United States Patent Application Publication US 2008/0276334 A1 - sequence listing, part 9

SEQ ID NO: 55144 - DNA, 373 bp, Glycine max
  Clone ID: LIB3109-056-Q1-K1-H8
gtcattagaattaatgcttactgactggattggggccattgattctggcgttcctcgtcgaccccctgctggaaaacgtgcagatgaccaggttaattatcctaagttggtcgagttactactcaatagctcagagttttcctctaacctgttacatgatataaccggagggagactaggattccctcatccagaagacacaaatacaatcattgatgttcatactactgatgtaacatcagtagttcatgcgttccgtagtggttttcgtgctgctcttagggatctgcaaggattccacatattcctactcacactgcatcaaaaacttgataatttgttaagatcatttattgaatctataggcaaaata

SEQ ID NO: 55145 - DNA, 334 bp, Glycine max
  Clone ID: LIB3109-057-Q1-K1-A1
gtcagacgaaggaagtaaggaagctagtctatatattttaaatttgtgatcatcttcattaatatttcattccatggcttcttgtcactcgtctcccactctagtgtttacagtacgaaggaggcaagcggagctaatagcgccggctaagccgacgcctcgtgaagttaagaaactatcggacattgatgaccaagaagggcttcgtttccaaatccccttcatacaattctatggtaataataaagagtcctccatgaaagaccctgttgaagtgataagaaaggcacttacaaaaactctagtattttactacccctttgcgggtaggctt

SEQ ID NO: 55146 - DNA, 385 bp, Glycine max
  Clone ID: LIB3109-057-Q1-K1-A10
ggagaaaaaaaataaaataaaaaataaggggaatgaatctggtggcctggtggggagtggggactccgcgatcctcgacagtacaatttcaccgagttcccatcagcagtgcgaaggggagtcccatggctgaccccaagcgagtagttgtctgcggcggcggagtcatcggagtctccaccgcctactttctggcggagaagggcgccgacgtcacgctcatcgagaagtccgacgtggcatgcgccgcgtccggaaaagccggtggattcctcgccctcgattggtgcgacggaggaccgctggaagagctagctcgcacgagcttcaatctccaccgttcgctctccgaagaactggacggtccgcgatcgtacgggtacag

SEQ ID NO: 55147 - DNA, 412 bp, Glycine max
  Clone ID: LIB3109-057-Q1-K1-A11
ggggggagtgaaattagaattcctagatgcttggagagtgagctcaccgagctgcatcttagccttttgctccttcaggatgttgagttaaaaacagccgggattataggttgtgcaagattacacctgtgaggagtttgtatgaacataggcaacataaggtcaatattaccttattagcatccctagaaaagggaaataaggaaaaacggaagtgaactgcaccaaccgatcattatggcaaagaggtcccaaagattccctgtgaattatgagaaagatcagtcaggatgtatgtggggttttattagtatatttgattttcgtcatgcccgctttactcggaagttgatcgcggataggaggcatggcagcaagcatgctgttgctgctgcacttaccaagaacaagt

SEQ ID NO: 55148 - DNA, 352 bp, Glycine max
  Clone ID: LIB3109-057-Q1-K1-A2
ggtggcgtgggtagataaagagtgtatctggattctgatctgaatatattggcacgcataaaagggaacgaacgtaatggctgcagcagcgttgctcgaacttgatcgagttctcaagtccaagaaggaaatgttgacgcctcgggaagcaaatattcttctatcgtggaaatctaaatctctgatggatctcgctgccggtgcacttggtgggaccgcagctgcaggggctgcaacttggaaactcaatggactatttcgaatatgcctttcagcaggatttggtacttactgtggaccgtggatgtttaatagatcctcgtattctcatgcggatcagattcttacaatg

SEQ ID NO: 55149 - DNA, 381 bp, Glycine max
  Clone ID: LIB3109-057-Q1-K1-A3
gacgttccagtggacattatgcgcttgttacgcaacaaccacttagaggaagggccaagcagggaggacaacgggtaggcgaaatggaggtttgggccttggaaggatttggtgttgctcatattttacaagagatgcttacttataaatctgatcatattaaaactcgccaagaagtactcgggactacgatcattggaggaacaatacctaaacctacagatgctccagaatcttttagattgctagttcgagaattacgatctttagctatggaactgaatcatttccttgtatccgagaagaacttccggattcataggaaggaagcttaattggactgaatcagaaattttattctatgattgatcagtattaaca

SEQ ID NO: 55150 - DNA, 327 bp, Glycine max
  Clone ID: LIB3109-057-Q1-K1-A4
ggagtaagggcggtgcagtgcttcaaaccccgttttcggttctcatttcctttcatcactctcttgcttcttttcttcttctcgcaattttccattttcacacttttagcaacatcttttaatggcgtcccaaatccgtgagtggtctggaatcaatacattcgcacctgctacccagactaagttgcttgaactcttgggaaatcttaaacaagagaatgtgaactccttgactatacttgtgatgggaaaaggaggtgttggaaaatcttcaactgtgaactccatcattggggaaagagtggtttcgattaatcctttccagtc

SEQ ID NO: 55151 - DNA, 389 bp, Glycine max
  Clone ID: LIB3109-057-Q1-K1-A5
tcggacaggtcatcgaaggattgaacgttggggaggacatcgagaaggtcggatccagctccggcaggacctccaagcccgttgtcatcgccaactgcggtcaactctcttagacgacgttgacccgcggctttaatctctgaatctgtgttatttctttcggtgtcgtttttgccttttttttctcttcttttctttctcgtgtcgtcgtttaggggattgtggtgttaaggatatcatttcgaaacccttcccctttccttttcaatatcagtatcatgtggttggttggttggggttcatagagtgagtgaatggagtctgttatgagaagcataaaaaaaacatgaagagctaccctcaataaaaattagacatctataattcac

SEQ ID NO: 55152 - DNA, 395 bp, Glycine max
  Clone ID: LIB3109-057-Q1-K1-A6
gatattgacattgggaaatatgttgctggtggtattgttgtttttaatctggatacaaaacaagttaaatggactgcagaacttgatctgagtacagatacttcaaatttccgagcctacatatattcttccccaactgtcgtagatttggatggtgacgggaatcttgacattcttgttggaacttcgtatggcctgttttatgtgttggatcatcatggtaaggttagacaaaagtttcctcttgaaatggctgagattcaaggagctgttgttgcggctgatgttaatgatgacgggaaaattgaactagttacagctgatacacatggaaatgttgctgtatggactccaaaaggagatttaatatgggaaaaacatctaaagagtcttat

SEQ ID NO: 55153 - DNA, 130 bp, Glycine max
  Clone ID: LIB3109-057-Q1-K1-A7
cattgggaaatatattgggtatgggaattttgtttatggggctggatacaaaacacatcaaatcaacttcataactataactgagtacagatactctaaatttactagcctacttatattcttccccaac

SEQ ID NO: 55154 - DNA, 364 bp, Glycine max
  Clone ID: LIB3109-057-Q1-K1-A8
gtcggcgaggaggttatcggatgtggtgctgggctgcgtgatgcggtacatacacgactccaaggaccgcgacgccgtgtcgcaggtgtgcaggcggtggtacgagctcgactcgctcactcgtaaacacgtcactattgcgctgtgttacaccaccacgccggaccggctaaggcggcggttcccgcacctggagtcgctgaagctgaagggaaagccgcgggcggcgatgttcaacctgatacctgaggattggggaggtttcgtcacgccttgggtcagagtgatctctcaatactttgattgcttgaagtcgcttcactttcggcgcatgattgtgagggattccgatcttcaagttcta

SEQ ID NO: 55155 - DNA, 401 bp, Glycine max
  Clone ID: LIB3109-057-Q1-K1-A9
aggtctatgcacaatgcagatgcaaattcaattcttgctgccaaagccaaaacaaaactgagtcatttctttgcttaggagatcggttctgcaaaaagccaaaaagaagaagaagaataaatggaagcagagacctcaaacggtggtggtattggaggcctttacgtcaaagttatgaccgacgaccaaatggaactgctcaggcaacagatttctgtctacgccaccatctgtgaacagctcgttgagatgcacaaggccgtcactacccaacaggaccttgcatggctgaggctgtgtaattagtactgtgatccgttgatggcatgctctggacacaagataactgcgaggcagcgctggactccaacgcctctgcagcttcaaatacttgagcgtat

SEQ ID NO: 55156 - DNA, 362 bp, Glycine max
  Clone ID: LIB3109-057-Q1-K1-B1
ggttagggcgtgagaaaaacaaaagagtagtgggctttaggtggtgaagaacaagagctcaaatcaaatcgaatcgaaaaaagaaagaaagatcatattcatggcgatggcaagcctggctcgacggaagggttacgccgtcgttttgtcgtcgaggtcgtcgttttgtctgacaagctggaggggattcgcgtccggatctgacgaaaacgacgtcgtcgtcatcggcggcggtcccggcggctacgtggccgccatcaaagccgcgcagctcggtctgaaaaccacttgcatcgaaaagcgtggcactctcggcggtacctgcctcaacgtcggatgcataccttccaaggttcattttc

SEQ ID NO: 55157 - DNA, 408 bp, Glycine max
  unsure (1)..(408): unsure at all n locations
  Clone ID: LIB3109-057-Q1-K1-B10
ttggggtagattggggcgtggacataagggggtttatgacgcaatcaataattcaattcattttcaattaggtcttgctctagcctctttaggggttattacttccttggtagctcaacacatgtactctttacccgcttatgcatttatagcgcaagactttactactcaagctgcattatatactcatcatcaatatatagcgggcttcattatgacaggggcttttgctcatggagctatattttttattagagattataatccagaacagaatgaagataatgccttagcaagaatgttagaccataaagaagctatcatatcccacttaagttgggctagcctctttctggggttccatactctgggactntatgtccataatgatgtcatgcttgcttttgg

SEQ ID NO: 55158 - DNA, 406 bp, Glycine max
  Clone ID: LIB3109-057-Q1-K1-B11
gtaagaaaggcagagttattgccattgcctcggcctcttgcaacaccaaactggtacacacttaataatattattataaaaattaacccaccaaatccactaaccctttttttaatacaactcattacctggattggaccaaggtgaaagtaaaatcatttgcaaccaatgccgttgaacatatttcaggacaaagatggattgccacggattatattgactgagccaaagggttcatcagctgaggttcttctttatggagggcatattatttcttggaagaatcatctaaaggaagaacttctttttatgagcagtaaggctaacaagaaacagcataaagcaatcagaggaggaatatcatcttgcctagcacggtttgtgatctcagttcacttgacaacat

SEQ ID NO: 55159 - DNA, 359 bp, Glycine max
  Clone ID: LIB3109-057-Q1-K1-B12
gaaacgaagcctgttaatttcttcctacttggcaaactataggaagagccacacggtatcttataccataggtcaccatgatccttccattaaacgttgctatagaccgatccaaatgcatatgatatacactttcatgaatggctagctttatatactgaacctcatgccccgatgacaaacttttaagacacatacatatttgctggatttctcggcatagaccagatagagcatgtaattccaaattaacccataataacacttccgcttgctcaccatacatatattattgacgacggagatgccaatatccaagccttatctaacggataatatggtgaaagcttcaactggtc

SEQ ID NO: 55160 - DNA, 390 bp, Glycine max
  Clone ID: LIB3109-057-Q1-K1-B2
ggagagaaagtgagagagaattacagagcatgttccaacacgattacacgaccgaatcaaacccctctttctctccgaagctgcttttaatatcgtactggccttcgattgttctcctctttaatacatactgttctctcttcgatttgagggaacagtacaagagtctgagcatcggttaacccaactgcacaggtagtctccaaataatggagcctcatgatgagactggatgccaggctcctgaacgccccattctttgcattaataattgtggcttctttggaagagcagctaccatgaacatgtgttccaagtgttacaaggacatgctgttgaagcaggagcaggacaaaattgcagcatcatccgttgaaaacattgtgaatg

SEQ ID NO: 55161 - DNA, 360 bp, Glycine max
  unsure (1)..(360): unsure at all n locations
  Clone ID: LIB3109-057-Q1-K1-B3
ggggataagacttggcattttctctatatccatcctctcaccattattgcctcaatttcatactttctttcatgatcacagtttagggactgcaaattctctgcttctctacacatggagccggtgtcgcgtgctaatttcttttcattccaaagattttggctaccgtttcagggacagggagggatgaggcagcaagttgatccctcggctcacacaatcaagtcccatggagcatcacttgcaagaaaacacgctcgtgattggcttatattgctgcttctcatagtgatagagattgtcctttttgtcattcatccatntaaacgctntgtgggaagggacatgatggaaggacct

SEQ ID NO: 55162 - DNA, 295 bp, Glycine max
  Clone ID: LIB3109-057-Q1-K1-B4
ggaagaggggagtcgttgccatcaaaggatgggcgccggttgttgttacagacatggctgcagcctctgatgaatgactacaactggctgcagcatggatgcaggtcatttgataggaaactcgtggaggaaggaattgggaggactattctcaccttgcctcttgaggatcaacaaagcattttactttcatggttggggagtttcttgaaaactgatgatagctgtcccaatcttcaaagggcatttgaagtgtggtggaggataaccttcattagggcatatgtggagaacc

SEQ ID NO: 55163 - DNA, 389 bp, Glycine max
  Clone ID: LIB3109-057-Q1-K1-B5
gggacttgagatggcaatgggatcattagaacatcttctacaatatggagagcagaatattcgccgagcagttcctttggcccttggtctactctgtatatcaaatccaaaggtcaatgttatggatacgttaagcagacttagccatgatactgattcggaagtagctatggcggcagttatatccttgggtctaataggtgccggaacgaacaatgctcgaattgctggcatgcttcgcaatctttcaagttattactacaaggataccagccttctattctgcgtgcggattgcccaaggtcttgtacatttgggaaagggcttattaacccttaatccatatcattccgatcgctttctactatcaccgacagcacttgctggat

SEQ ID NO: 55164 - DNA, 393 bp, Glycine max
  Clone ID: LIB3109-057-Q1-K1-B6
ggttctagtgtgtgattgtttgttgttgtaactcgttcttcttcttttgttgttctgtgtttgtgtttgttttttctctcacctgaaaatgtcttgctgcggtggtaactgtggttgcggaagctcctgcaagtgcggcaacggctgcggaggctgcaagatgtacccagacttgagctacactgagtcaaccaccaccgagaccttggtcatgggagtggcacctgttaaggctcaatttgagggtgctgaaatgggtgtgcccgctgagaacgatggctgcaaatgtggaccaaactgctcctgcaacccctgcacttgcaagtgaggtgttgggagagcaagcttcaagcagagatagcccttaattaggaataatgataaactattaat

SEQ ID NO: 55165 - DNA, 370 bp, Glycine max
  Clone ID: LIB3109-057-Q1-K1-B7
ggttctagtgtgtgattgtgggttgttgtaactcgttcttcttcttttgttgttctgtgtttgtgtttgttttttctctcacctgaaaatgtcttgctgcggtggtaactgtggttgcggaagctcctgcaagtgcggcaacggctgcggaggctgcaagatgtacccagacttgagctacactgagtcaaccaccaccgagaccttggtcatgggagtggcacctgttaaggctcaatttgagggtgctgaaatgggtgtgcccgctgagaacgatggctgcaaatgtggaccaaactgctcctgcaacccctgcacttgcaagtgaggtgttgggagagcaagcttcaagcagagatagcccttaatt

SEQ ID NO: 55166 - DNA, 360 bp, Glycine max
  Clone ID: LIB3109-057-Q1-K1-C1
ggaggaagaagaagtgacaaaagaggtatcatgttggaatggcttctctgctcctccctccaactgctacttcttccacacttaaacacaacaaccaaatcctgaaactgaaaccaaacaataatgctcatgctacatgtaacgtcttcttatcaaactcaaaccactaccgtttcaactctgcaaagtgccatgcattgttcgatgacgtggccaaagggttgttggagagcagcagtgtcggggtggaccagttccagagagtgacagaaggcttatccgacatgcagaggtgggtgttcctttgtctttggtgggttgacgtggatttacctgactgcaagaccaggtgttcttgtc

SEQ ID NO: 55167 - DNA, 409 bp, Glycine max
  Clone ID: LIB3109-057-Q1-K1-C11
atcggagaaagagttcgtactcacattggatgactctaacggtcacgacactgtcagcaagcacgatttcatcgtcgtcgagttctacgctccatggtgtggccactgtaagaagcttgctcccgagtatgagaaagctgcttctatcttgagtagtcatgatcctccggttgttttggctaaaattgatgccaatgaggagaagaacaaagaccttgcatctcaatatgatgttaggggatacccaacaattaagattctgagaaatgggggaaagaatgttcacgaatacaaaggtccccgtgaagcagatggcatcggtgactatttgaagaaacaaagtggtcctgctttaactgaaattaaatctgctgatgaaactactgctttcattggtgaaaataaagtt

SEQ ID NO: 55168 - DNA, 414 bp, Glycine max
  Clone ID: LIB3109-057-Q1-K1-C12
ctagatgaactattgataggagagaatgacaggatggagcaagtattagtacaagggcactgcaaagatcaaagaacggcaatggagacagcaaaaacaatcattttcttgggacttcttgaccagactgaaatccctgcttcctgcaaaagtgcttttgatgttgcttgtttccgcatggaggagaggttatcatacaccagcacagaaaaggatatggtgcttttgcatcatgaagtggaaatagaatacccagatagccaaattacagagaagcatatagctactttacttgaatttgggaagactcttgatgaaaaaaaccacaactgccatggcccttactgttggtattccagctgctgttggagctttgcttttattgacaaacaaaattcagacaagaggagtctt

SEQ ID NO: 55169 - DNA, 371 bp, Glycine max
  Clone ID: LIB3109-057-Q1-K1-C2
ggcttgaaggaggctctagtgtggtctgcaactatgagcaaggattatctaatcatactttctctccttctttccacggtgcttgcaactgcaagttcttcttcttcttcttcctccctctatcttgggaagggcttctcccatcgcaaattgtctcccagttatcacattcacaaaaccattgacgaatcctatgcagttatcttcgatgctggtagcacgggaagccgtgtacatgtctatcgttttaaccaacaattagatctccttcgcattggccaagaccttgagttgtttgtcaagactatgccaggtttaagtgcttacgctgagaatccacaagatgctgcaaaatctcttattccactttt

SEQ ID NO: 55170 - DNA, 379 bp, Glycine max
  Clone ID: LIB3109-057-Q1-K1-C3
ggtgagattggtgtgctttgttataagccacagcttttcacagctcgaacgaagcgactaagtcagttgctcaggctaaaccgtactacgttcttgaatattgttcaggccaacgtgggagatggaaccataataatgaataatctccttcagcatttgaaagagatcaacgatccaatcatggagggagttttggtggatattgagaacatgttagctcgtggtaggatggacctaccagcgagtgtgtgctttgcggcagcaagaggagatgacttgttgttgcatcaattactcaaacgaggcatggatccaaatgaatccgacaacaatcgaaggacagctttgcatatagcggcatgtcaaggaaaacagaact

SEQ ID NO: 55171 - DNA, 355 bp, Glycine max
  unsure (1)..(355): unsure at all n locations
  Clone ID: LIB3109-057-Q1-K1-C4
gtgacttgtgaagtacagcaattattangaagtaatcggattagagctgtagctatgagtgccacagaaggtctaatgagaggaatggaagtgattgacacaggagctgccctaagtgttccagtaggtggagcaactctaggacgaattttcaacgtgcttggagagcccattgataatttaggtcctgtagatactcgcacaacatcttccattcatagatctgcgcctgcctttatacaattagatacaaaattagccatttttgaaacaggaataaaagtagtagatcttttagctccttatcgtcgtggaggaaaaataggacttttcggtggagcttgagtgggtaaaa

SEQ ID NO: 55172 - DNA, 375 bp, Glycine max
  Clone ID: LIB3109-057-Q1-K1-C5
ggtgcacagcttgaacacagcgcgtttcggagagagacgtcgcaatggggaggaggcctgcaaggtgttatcggcagataaaaaacaagccataccccaaatcacgcttttgccgtggtgttcctgatcctaagatcagaatttatgatgttggtatgaagaagaaaggtgttgatgagtttcccttctgtgttcatctggttagctgggaaaaagaaaatgtttcaagtgaagcattggaagctgctagaattgcatgcaacaaatatatggcgaaatttgctggaaaagatgctttccacttgagagtccgagtacatccattccatgttcttaggatcaacaaaatgctttcatgtgctggagctgataggc

SEQ ID NO: 55173 - DNA, 337 bp, Glycine max
  Clone ID: LIB3109-057-Q1-K1-C8
ggtgtgagttcattaacatatacaaattctctgtgttgtgttgtgtacttgtgttaattgtgttgttgttgtaggaaatttaagtgaagagagaatgatgatgaagtctgctatgtgtgcattggtgcttgtggcactggttgtggttgaagtggggcccatggctgaggctgcggtgacttgcaacccaacacagttgactccttgtcttccggcaattaattcaggttctgcaccttcgagtgcttgttgccagaagctgaaggagcaaaagccatgcttctgtggctacctcaaaaaccctagcttgaagcagtatgttaactctcctaatgcc

SEQ ID NO: 55174 - DNA, 386 bp, Glycine max
  Clone ID: LIB3109-057-Q1-K1-C9
gacagctgatggtggcgtcaccaaatacctgcatggtatgtcactttggaggatgatgttcttcgggaatttggtgcttataatgatcattgggtagtggcaaaaaatgaagaggaagctcagaaagaggctcgccagaggtataatggaaagcagtttcatttaagccaggatcctgacgttcttgatacatggttttcttctggtctgttcccattatctgagctgggatggcctgatgacacagaggacctgaagacattctatccaacttctgttctggaaactggccatgatatcctctatatctgggttgcccgaatggtgatgcaaggattgaagttgggtggtgatgtgcctgttacgaagatttatttgcatcctat

SEQ ID NO: 55175 - DNA, 408 bp, Glycine max
  Clone ID: LIB3109-057-Q1-K1-D1
ggtatcacattggtttattttgaaaccctaaagtttgccgccttacacgttttttgtcttcttttttctcccatctttgtttcgagaagcacttgacgaagagaagagacagtgaatcgcggtttcaattcaacccacttcatctcaggtgtttgaagttgagataaaaatgagcggaacagagaaagcaggatcaggaaccaccaaaacccccgccgatttcctcaaatccattcgtgggaggccggttgtcgtcaagctcaattctggtgttgattacagaggtatacttgcttgtctagatggctatatgaatattgcaatggagcagacagaggagtacgtcaatggacaactgaagaacaagtatggtgacgctttcatccgagggaataatgttctatacat

SEQ ID NO: 55176 - DNA, 382 bp, Glycine max
  Clone ID: LIB3109-057-Q1-K1-D10
gacaacagtaaaatcatattatacacaataaaaaaatgaagtaaatagtagaatattcaagaggccttaaaagatcaagataaagacgaaggagccgacttgatattttagcattataaccaaaaagaatagctttcggatctctattttttattatcgtcaaagaaaattagaatcataggattaaataaagaaatttcaaactttctattacacatatctgttttcgttacaagcagtatttgggtatttttgtttgagccgtacgagatgaaattctcatatacggttctcagggggggtccgttggtttacctatctcaataaagtctatgattggttcgaagaacgtcttgaaattcaagcgattgccgatgatata

SEQ ID NO: 55177 - DNA, 407 bp, Glycine max
  unsure (1)..(407): unsure at all n locations
  Clone ID: LIB3109-057-Q1-K1-D11
ttatgagttctaatatatcattcaaaagtttgtgaaatgttggcaccccttcttctatttctatgcctaactcttcctttgtttttgttgtccttcttcaaataccgtaaaaccttcaagaatccaccacttccaccaggtcctagaggccttcccataatagggaatcttcatcaactagatagtccttctcttcatgagcagctatggcatctctcaaagaaatatggtcctttattttcccttcaatttggattaaggccagccatagttgtttcctctccaaaattggccaaagaggtaatgaaagacaatgaccttgagtgctgtggacgacctanattactaggccaacagaaactaacctataatgggttagacatgggatttttctcatacgatagtta

SEQ ID NO: 55178 - DNA, 338 bp, Glycine max
  Clone ID: LIB3109-057-Q1-K1-D12
atggcgattaacatcattcacgacacgggtattaatagggcgcatttgtgccagaaaatccttaaggtctacattcgttgtgttgttcttaaaagggtatctttcgttggacactatttccgctttatttgtaacatactttttgtttgctccgtctccggaaggccatctcagtaccggaaactacctgttcgacacccctcttcttcgccgtcgtactacgctgactacgacttcttttccgctacaactaccactggcggttattacttctattccgatattttgaaccttaatatcagcttgtagtcttattgccatattttaaaaactacttt

SEQ ID NO: 55179 - DNA, 366 bp, Glycine max
  Clone ID: LIB3109-057-Q1-K1-D2
ggagaggagaggagagaagagaggaagttttggggtttgaatctatagaatagaatcaaaccaaattgaaagaagatcgatcgatcgatcgatggctctggtcggagttgaagtgaagcatgcggcggatggcgcaccggaggagaattgctccgccaagcccaccaagcagggcgagggcctccgccactactattctcacaacatccacgagcatcagctccttctccgtcaaaagacgcataacctcaaccgtcttgaggctcagagaaacgagctcaattccagggtgaggatgctgcgcgaagaattacagcttttgcaggaaccaggctcttatgttggtgaagttgtcaaagtcatggg

SEQ ID NO: 55180 - DNA, 399 bp, Glycine max
  Clone ID: LIB3109-057-Q1-K1-D3
gacggctaaaagctaaaaatcatcgaagtagggaaatgagcatggctgtcacggttgcattcttgaatttgatcatcatgttttcagtagtctctacaagcaagtcactgagcttaaactactattcaaaaacatgccctgatgtggaatgcattgttgccaaggcagtgaaggatgccactgctagggacaaaactgttccagctgcacttctgcgaatgcacttccatgactgtttcgttcgggggtgtgatgcctctgtgctgctaaattcaaaaggaagcaacaaagcagaaaaagatgggccaccaaatgtttctttgcatgcattctatgtcattgatgcagcgaagaaagcactagaagcttcatgcccaggtgtggtctcttgtgctgaca

SEQ ID NO: 55181 - DNA, 330 bp, Glycine max
  Clone ID: LIB3109-057-Q1-K1-D4
tgagaagatcgatgtagtgaaggaatggtcgtgcgttgctctttcatcaagttgttgtatacccagaggccaaggacaacataattgtactatgactctatgagggccaatattggtatacttgttcaaactacataattttctgatctgccttgtatacaaagtcatgcaatattgccatagcatctttttaattattttctctgattttctttgtctattgcatgtgtggttctgtgtgcatgtcagcctgtgtaagctttcccgtgagtacgttgggaaatgtacaagttagcgaagctttagatttttcttaaaaaataagacatt

SEQ ID NO: 55182 - DNA, 383 bp, Glycine max
  Clone ID: LIB3109-057-Q1-K1-D5
ggcggacaaagaaaatcaaaattatgaatcggtaaaaaaaattaaaaggggcgtgggtgtgtgtgtgcgtgtgtgagagagagagagaaagagagagtgaaacagcgcaaagaagatacaaaattgagacgaggctgaacaaaaataagagtgtttagtttcccttctgatggtcgtgagtggttcctccccactaacttcgaagaggagaagggtcaccaacttttgttccaccgacatggacgctgaaactgctaaggccaagcttgctgctgtgaaagaaagatttggacgagagatccatgtttttgaaacatcagttctttcttcatcttcaaaggctgcgttatccaatgaaggagaggagacggatgacttctatg

SEQ ID NO: 55183 - DNA, 362 bp, Glycine max
  Clone ID: LIB3109-057-Q1-K1-D6
cgatggagaaatggtggtttaattctatgttgtttaataggaagttagaatacaggtgtgaattaagtaaatcaatggatagtcttggtcctattgaaaataccagtctaagggaagaccctaaaattttaaccgatatagaaaaaaaaattcacagggatttggattatttagaaatggaaggttttttttctagcgatctgaatactgtttctaagaatgatgatgatcattacatgtatgagactcaatttagttttaacaataatattactagtttcattgatagttgcattgagagtttcaatttaggtgatattgacaaatacaatgatatttatttttatagttacatttttttg

SEQ ID NO: 55184 - DNA, 299 bp, Glycine max
  Clone ID: LIB3109-057-Q1-K1-D7
ttcaggcttctgctaaaagctaaaaatcatgcaagtgcgcaaatttgcatggctgccacggtttcattcttgaatttaatcatcatgttttcagtaatctctacaatcaattcactgagctttatctactattcaaaaacatgccctgaccttgaatgcattgctgccaaggcaaagaaagttgccactgctatggacaaaactgttccagctgcactttttcgaatgcacttccatgactgttttattcgggagtatgatgcctctatgctgctaacttcataaagattcaacaatac

SEQ ID NO: 55185 - DNA, 347 bp, Glycine max
  Clone ID: LIB3109-057-Q1-K1-D9
gtaacgaaagcgtcgctagttcgttccattcggctctccatagaaacgcttttgacaaaatcctaacatttgttgtggcagttattgaaatccaaattctcggggcagatatctttcgaccttgcttcacaccattcaacgaactgcactcactgtgctctctagaaccctaacttttgtgctaaaaccctaaaccacgtcgaatcgatgattgaaccctacaacaagctggttaaactagcggcgagggctttttacgatgatcttaccagcaaaggagataatcagcccaaaacgggaaggagtgataacaggggaatagctgtggtggttcttgacgcgctcac

SEQ ID NO: 55186 - DNA, 397 bp, Glycine max
  unsure (1)..(397): unsure at all n locations
  Clone ID: LIB3109-057-Q1-K1-E1
gaaagagagtattttatggtggacttgaccacgaattacaaaatgaggtatggggtttgcttttgggatattatccatatgaatcaacatatgctgagagagaattcctgaagtcagttaagaagttagaatacgagaacataaagaaccagtggcagagtatatcctcagcacaggctaaaagattcacaaaattcagggaaaggaaagggcttattgagaaagatgtggtgagaactgatagatcactcgctttctatgaaggcgatgataatccaaatgtaaatgttctgcgagatatcctgttgacatattcattctacaactttgatcttggttattgccagggaatgagtgatcttctatctncaatattgtttgtgatggataatgaatc

SEQ ID NO: 55187 - DNA, 268 bp, Glycine max
  Clone ID: LIB3109-057-Q1-K1-E2
gaaggtttaatattttattttatggtgtactaacccagtctttgtttaatgttgtacggggtttcctttcctaatatcattcacataaaaaaacatattctgcagatataactcctaaattcagaaactacttcaaaatccgtaaccattactaacccttcacaatatacacactcttcacctacactaagacaaccaccacccataccttggtcattgctaattcacacatataagctcaaatctgagatacctaaaatctttttat

SEQ ID NO: 55188 - DNA, 350 bp, Glycine max
  Clone ID: LIB3109-057-Q1-K1-E3
ggagagaagagaagcaaacgatggctactttgctttcgaaccaatctctgttgggttcttgtccttgttctactcccttctcttcaaagccctttcaaaccctaaaaccccaaatcttatcttttccatctcgcgggtttccgcgccccctaatttcctcagtcaatcgaagaacccaattgaagtcttcccaagatttccctccaactacaaatgatgaaacagaggagacccagaatgatgtaagagggacaaatgatgatgaagataaaaaacaagtacctagtttaatgatcctccttgaagcatacaaggaagcctttttaatggcgaccaatataccgtagctc

SEQ ID NO: 55189 - DNA, 352 bp, Glycine max
  Clone ID: LIB3109-057-Q1-K1-E4
ttctctaaaacagttcctttattactatcatggaactggggaagcgtcctttatattctgtattttccacaaagcctactcaagtttcctctgtggaaaacctctatgaatctatttgctcagcacctttactcgacacattacgcctcacacaatagcagagcctcaaaaagctaagatttatcattactatgtacctgtctttctctgctgtgaacagcacattactgaacatcattgccatttcatacattgacaatatataccttctttagtgattggttatacagctcctcaaagctgacataagacaacccttgtctttgctcttgactatcatttcgaaaccatt

SEQ ID NO: 55190 - DNA, 433 bp, Glycine max
  unsure (1)..(433): unsure at all n locations
  Clone ID: LIB3109-057-Q1-K1-E5
gtaagaagaataangaataangaagaaggagcgacggaaaaaagacctcggtgagattgtctatccgaggagcgtccagaggaangagagaatgangaataatacnagatnnagcgatggagatatcctcgaagaagaagaagaagaaagaagggtggaagggagaaagntgaagtgaaagagaaaaaagggtgaagaaacaatggtggctttctggaattatgagcanctgagtcatttgnnaatctctcggattggtctgannacctacttataaagccattatggatatngggattccaccacatgaaactcagattcaagcgaagggcaattccaccgcttttgaattggaaaaagatgnttcttggtgctgcaaggactggttctgggaaaactcttgccttcttaattcctgctgtggagctgttgt

SEQ ID NO: 55191 - DNA, 219 bp, Glycine max
  Clone ID: LIB3109-057-Q1-K1-E9
gatcatggcggcagcttgttgtctctgcatcaaagcggtctatctgccgatccggggacttcgcctcacccgacgcttttaccaaactacaaaacagccatccagctaaatccgtggcacaacgcgtactacatgttcatccaccacaacttacctatgaaccccaactactgcatgcgcagctctttttctgcaccgatcgcatgtgttaacctactt

SEQ ID NO: 55192 - DNA, 227 bp, Glycine max
  Clone ID: LIB3109-057-Q1-K1-F10
caagaccgatgatatttacatttaccaaagaatactttggacttatatttatatcgtaaaaaaataaatatagataataaaaatttaaacttttataaatattgttcgtacaagcagattggtattttgttgagccgacgagatgaaatctaatacgtctcagggggtcgtggttacctattaataagctatgatggtcgaaaagtttgaattagcgatgcgtgatt

SEQ ID NO: 55193 - DNA, 238 bp, Glycine max
  Clone ID: LIB3109-057-Q1-K1-F11
tgtaactctctgtagactacacgcgcgtgattggactctggggtaacccgataaccactcacatatttgataattgcatcattgatagtagctgctttgaacttgggtgctctgcttcttctgctaaagaaaatgggtgttttcttgatcacaccagctatcactttcagagctttctcattgtctgctttcactgcaagataaatcttggccagtgtaaagatatctacatgtacag

SEQ ID NO: 55194 - DNA, 428 bp, Glycine max
  Clone ID: LIB3109-057-Q1-K1-F12
tacccaatcgagccacacattctaattctatcgaacgttttattaattttttttctatttctttttttcgacattaatacgggacctttatcatgaatgctactactattacattaagaaataattcttcattctcataaagattaaactttaagtccatattttgccctattatccatccaatttcaacacaaaatgttatcttcttaacgaaaatgtaaacttgaactaaattaaatacttttctttattattaggaacttattaattaaaaaatcatattactttccattaattctttattaatccatcaactactacttaaatgaataaatttcaaaaattctatgatttcattatttaattttaatcctactattatcttatatatcccactaaaatattttttttttcttattttttaccaa

SEQ ID NO: 55195 - DNA, 370 bp, Glycine max
  Clone ID: LIB3109-057-Q1-K1-F2
gggaccacacagttaaaaaaatgatacactaagcgagaaagttttcttaccgagattgcagggaatttatccttttggattctacccaaagaagataaaattctcatcttctaatataagtggtgaccctgtctcttcacagttcagcgtttcacacctagacaattggctcagaagaaaagaaaagcaaccaaaaatggttctcacatccactgccacacacccagatgaacaagaccagagcctaaactatacttttgcttccagatatgtgcgtgaacctattccaaagttcaagatgctggagaaatccataccaaaagatgctgcttatcagataataaacgatgagttgatgttggatggtgca

SEQ ID NO: 55196 - DNA, 351 bp, Glycine max
  Clone ID: LIB3109-057-Q1-K1-F3
gatcacaggccagggaacttctaacacatacactactctctctctctattttattgtatggccggcaattccagaatccgaagcatcaccttcttatggaaacaagtccccaaccgtatctggacttacaacgctcctcctctcacttcaatgacgggagcatacattagcggctgcatgtacgacaagaaccctgacgatgagatccactcgtgcgcacgtgcccgacgatgtgatccaggcagatacacagtccggctaatactgggccacacatccacagactgaggtatctgagccctccggatgatgtgaacaaactgcttgcgacattcactcttgtgcgctata

SEQ ID NO: 55197 - DNA, 323 bp, Glycine max
  Clone ID: LIB3109-057-Q1-K1-F4
gttgaacatggggaaaactttgtggacatgcgggatgggatcttctcatttggtctactgtacacccgtgacaacagttttatagcggctcgggatgctattggggtcacttccttgtacattggatgggggttagatggctctgtttggatttcatcagaaatgaaaggcctgaatgatgattgtgaacactttgagtgtttttcacctggtcacttgtactctagcaaaaaaagagggttcctcaatatggtcaatccttcttggttctctgaggctatttcatctgtcccttattatccttttgttttaatacactcttt

SEQ ID NO: 55198 - DNA, 400 bp, Glycine max
  Clone ID: LIB3109-057-Q1-K1-F5
acacgtgatcgctcaagaagcttatcaaactgttcaatgagagatttgtaatttactgattgcatttccatgttgttattgcgtgtttctatctggacataagaaaagttattaagaccaaacaaagtaagaatccagtgctttgaaagaactcctacacctgaaattatatcacctagaaaagcaaatagaactgaaatagtgaaatctcattaagcagaaagcaacttcgacagcaccacaaaatggtcactgtagaaataattgtgaccataattcaactttacaaaggtaaaatccaattcatattaatatcattttaaactcaatgaaaatatttggcatgaaccaactgtcccaaaacctattttatattttatttttagagaaaataagaaaa

SEQ ID NO: 55199 - DNA, 377 bp, Glycine max
  Clone ID: LIB3109-057-Q1-K1-F6
ggcggcgcggcagagcaaatacattgcaggtgatctttcatctcagaacgtctgatttgagcctctctcagtgacaacagtttctgagtcttactgatcttttcttctctctaatctcttgtgatttttcttctctctaatctcttggttgcgtggcagactaaatgattttgtgtttttggttctcttttaggtgcgattctgattctcttctcttaaatcattggctttgattgtattcattggtgccatggcgtttcccagtttgattacaacaatcattaagtcgtgtttggttctttgattttctttttctttttcatgtattggtacgataagtcttcagttttttcatatccttacttgcagccagttct

SEQ ID NO: 55200 - DNA, 382 bp, Glycine max
  Clone ID: LIB3109-057-Q1-K1-F7
ttaagcaaggacgatgagtatagtgggagtagtcatattcagagtgtatagtgattctgattctttcattttccatagattagcaagcaatcgagcgagggagggagagagagagagagagagagagaatggttcgggaagtatcagagagttgcattgatagcttattgacggagatggtggcgtgctattgcaaccgattctacgcaaacaagcctgaactctccgcacgccggatcgaggccattggatatcatgtcggtcaccagctctctgaaaggtataccatggatcggcctcggttcacggatcatctggaggccatcaagttcatctgcaaggatttctggtctgaactctttaagaagcatattgacaactt

SEQ ID NO: 55201 - DNA, 392 bp, Glycine max
  Clone ID: LIB3109-057-Q1-K1-F9
gggaagagttttgctactaggaaagtggatgcaattcaaaagggaaatgtcatattcactttgctggcttcatttcacaaggaagaagtagggtttcaccaccaggaagtgtctatcccatcagtccctgctccagatacgcttttatcgttggaagagcttcgggaacaacgtcttactgaccctcgtctcccaagaacataccggaacaaggttgctacaattgaattcattccctggcccatagagatacggttctgtgaacctaaaatttcaacaaatcagaccaaatctcctcctagtttgagatattggcttagagcaaggggaaaactttcagatgatgaagccttgcataggtgtgtggtagcatatacttcagatctaatctt

SEQ ID NO: 55202 - DNA, 384 bp, Glycine max
  Clone ID: LIB3109-057-Q1-K1-G1
ggcacatgggagttggtacggaaacggtgcattcgagcgcgtgtttatctagtctctctgcgtggatctgcagaagtggaagaagaagaagatgcagtggtactttgtcgctgcgctcctcaccgtcctcaccagttctcagggaatactaaccaccctctcgcaaagtaaaggagagtacaagtatgattacgccacggtcccatttctcgccgagattttcaagcttgtggtgtcaagtttgttactgtggaaggaatgcaaaaagtcacctttgccaaagatgacaacggagtggaaaacggtgtctctgttccccattccctcagttatatatctgatccacaacaatgttcagtttgctacactcacttatgtggacac

SEQ ID NO: 55203 - DNA, 190 bp, Glycine max
  Clone ID: LIB3109-057-Q1-K1-G10
tttgcttaggtgcaatacagagctattgagggcgcattacacgctcaacctcatactcaacaactcgcgtaaccttctcacccttgacgagaatatccccccccgaaatttcaatataaaatctctcccccaaaaaatctcactttactgtctcctatatgatacacaaaacatttttaatcaccctctt

SEQ ID NO: 55204 - DNA, 285 bp, Glycine max
  Clone ID: LIB3109-057-Q1-K1-G12
ttgcttcggtgcaagagagagctgtgtagggggcaatacgcgcgtcattccatccgcaacatcgcgcgtaaccttctcaccctcgacgagaagaacccgcgccggatcttctagggagaggcgctgctccgaaggatgttccgttacggtctcctcgatgagacacagaacaagcttgattacgtactcgtcctcaccgcacaaaactttctcgagcgccgacttcaaacccttgatttcatgttcggcatggccaagttcatccaccatgctaggggacttatt

SEQ ID NO: 55205 - DNA, 362 bp, Glycine max
  Clone ID: LIB3109-057-Q1-K1-G2
gggtggagagaggggcactgactcacacccacaatagtcgggggcagcttcaaagtacctccacattgtctcctactcttactgttctcttctcttctcatcatttttattttttccaatcaaaccaaacaaaacataagcaccgctcttttctctccgaaatccccatctcccttcacttctgagctctggacgagatcccagatctcaccatctttcacgcactcttccatcagattcaccctttcgtttaacgcaaactcataacttgaaggttaatggctgctccaccggcaagggctcgtgccgattacgattatctcataaagcttctcttgatcggtgacagcggtgctgggaaa

SEQ ID NO: 55206 - DNA, 383 bp, Glycine max
  Clone ID: LIB3109-057-Q1-K1-G4
gaggtgacagttgcaaataggaacggagagaggttctgcgccgttgcttatcctctgagctgagagcagaagagaacaagaaacgtcgtcgttctgcactttgaactttgaagttctaacaccttcttatcttatctttctctctacctacagcttcaccaatgactatgactggtttaatttcaaaccgcaacttcgcttccttctttgcctcaggaaatgtatatagatcgggaaaggatatatccgttcaaagagggggaatttctatttctggtgtatctgttgctaaggatccctttccaagatggcagcataagatgtatttgccattggaagagagagtttcaaaacaaatgcaaacatccaacaacaaaagggag

SEQ ID NO: 55207 - DNA, 143 bp, Glycine max
  Clone ID: LIB3109-057-Q1-K1-G5
ccctattcttttacttctcctttgggtcttttgcaccaacttgccctctgcttctcttccttctactgattcctgcccagaagagcattagacaaatacttcagtgttttttttagatcatagagttacacatactctttccc

SEQ ID NO: 55208 - DNA, 348 bp, Glycine max
  Clone ID: LIB3109-057-Q1-K1-G6
ggggtaaggggggaatgtcaattggggaacatggagaaggcaaagaagagaatatggctgcttggcttgttggaataaactctctcaagattcagcctttcaagcttcctactttgggaccccatgatgtcagagttagaatgaaggctgttggtatttgtgggagtgatgttcactacctcaagacactgaggtgtgctcactttatagttaaagaaccaatggttattggtcatgagtgtgctgggatcatagaagaagttggcagtcaagtgaagagtttggtgcctggtgaccgtgtggcaattgatcctgggatcagttgttggcgtttcgaccactgcaaac

SEQ ID NO: 55209 - DNA, 393 bp, Glycine max
  Clone ID: LIB3109-057-Q1-K1-G7
gtatcaggcacttctcatgatcatgggttgcgttcaccaagtgctggaatgttttatgcgatgcctgaaaattatgtacaccagccttctaattctaattatgacagacaagcattttctgctgctgatggggtttttaatgatcttacaatgggaaatggacgagggcctcaaaagcgaaagagccctggaattcctcctgtctgtgaatgaggcagtacaagcagatatttcaatgctgcaagtgcatctgatcgtcctacatcttcagaattgtggccagagaagcccaatatggattctctatatatgccttgggatcatgttaatatgacacccacatttagaggtagaagcctttctatacggggcgaagggtcctttaagaatgtt

SEQ ID NO: 55210 - DNA, 326 bp, Glycine max
  Clone ID: LIB3109-057-Q1-K1-G8
acttatcattatcatgttttgggttcactatattctggaatgtctccttccattcctcaaaattttatacaccacccttctaatattaattattacatacaaacattttctccttcttattaaatttttaaccttcttacaattatatatgtactatctccttaaaatcaaaacataccttgaattcctatcacttcttaattaatcacctcattcatatttttcaattctctatttacaacttacccatatacattatctctaatttttaccataaaaatcccaatatttattctctatataatacctttcaatacatttaattt

SEQ ID NO: 55211 - DNA, 212 bp, Glycine max
  Clone ID: LIB3109-057-Q1-K1-G9
gggcttcggtgcaagagagagctgtggagggggcagtacgcgctcagccgcatacgcaacaacgcgcggaacctcctcaccctcgacgagaagaacccgcgccggatcttcaaggaaaaggcgctgctccaaaggatgttccgttacggcttcctcaataagccccagaacaggcttaataccgtcctggccttaacggctaaaaccttctt

SEQ ID NO: 55212 - DNA, 375 bp, Glycine max
  Clone ID: LIB3109-057-Q1-K1-H1
tcaggcacactagttataaaggtttttaatgggataacgcagatgaatatttgttagacattaaatattctcttattaaaattatgtttctgaatctgaaaaggaacacctacatcttactatttgattgtggacagtaaataaataaagaaactcgattcaagttttgtccataaattgaaaaatatgtttgcagaacattttgctctcctagtaaatgcataataaaaatcaatgagtgtaacttagttgtacacttatttaacgtaaatgttgcactttgtatctcaactagtagttgttttaggtcaacataataagtatgttaatgtaagatatgttaagtgtttagctagatagcacccgttcaatgtt

SEQ ID NO: 55213 - DNA, 238 bp, Glycine max
  Clone ID: LIB3109-057-Q1-K1-H10
gtttcaagagtgaagagcgaagagaatggctcgcgaaggtttaatctttttggctgtgttatgcttctcagcactgtcactgagtcgttgtcttgcggaggataatggacttggtatgaacttctacaaggaatcatgcccctaggctgtagacatcatctaagaacaagtcaagcttctctacaagcgccactagaacactggtttcttctggctcagaaacatcttccatgactgt

SEQ ID NO: 55214 - DNA, 416 bp, Glycine max
  Clone ID: LIB3109-057-Q1-K1-H11
agggaagaagaagaagaagaaagagaagcaaggggaaagataagggttagaaggcgaagaagcatggcttcactcaagaagaagaaaccctattacccgcttccgttaattcctatctattactacttcttattcaaagggtgatatgatcttcttcttccaagagtctcatgcatgctactttcttctctcttctcggggaattgaagcgttgtggtccgattgtttgctagatcaagcaaattaacctgtatactgggttatatatcttcaccttgcacctttctctctctctctctatctctctctctctatatatatatatgggtttaatctcttactatctttatcttttcactttttttcagatctggtttgatttaattacgtgattaaaaattacatatatggatttg

SEQ ID NO: 55215 - DNA, 331 bp, Glycine max
  Clone ID: LIB3109-057-Q1-K1-H2
tgggcccacaggaaatgtaagatgctgataaagttataccccattttcatttcattacacagctccttttctctctcttttctctcaccccactttcgttctttatctctatcttcactaacataacataggatcctttcattgtacttctcactcatgaaagagatacatatatagaaatagaaacactctttttgagaaacaatcatataatcggcatcatcatcatcattcatagagtgcagagaatgaattcttcttctgctcagagcagcgactatgatctctccatcaagatcttactgatcggtgactctgctgagggaaaaag

SEQ ID NO: 55216 - DNA, 299 bp, Glycine max
  Clone ID: LIB3109-057-Q1-K1-H3
tgtcaaaaaaaggaccactatttgattccccgggaaatgtgaggatgctggaccagcttaaccccattttcatggtattaattctacactacagtgtctaatacatatgactctaattctttttaagacggctcttattttggaccgtcttagaaagcgtacattgtaatacggatattagataacgacccacttataaaaacacttcctcttatttgagaaacatggatcatgtttgaaaatacatcatctatgacagagtgcagataatacctgtttctataagtccaattttttaa

SEQ ID NO: 55217 - DNA, 374 bp, Glycine max
  unsure (1)..(374): unsure at all n locations
  Clone ID: LIB3109-057-Q1-K1-H4
gacagtggatgtggatccaaactctccaacttattccaaagtcatccataggcttcctgttccttatttaggtgacgaattgcatcacacaggctggaattcatgcagctcttgccatggagacccctcagcagaccgacgatttctcatcgtacctgcactcgtatcaggtcgagtatatgtggttgatgtgaaaacaaatccaagggctccatctttgcacaaagttgtcgagcctgccgatatcatacagaagactggattagcttatccacacacatctcactgccttgcttctggtgatataatgatctcgtgtcttggagataaagatggaaatgctgcangaaatggatttcttcttcttgattctg

SEQ ID NO: 55218 - DNA, 373 bp, Glycine max
  unsure (1)..(373): unsure at all n locations
  Clone ID: LIB3109-057-Q1-K1-H6
tttaggggtagagagagagagagaaagtgtgagtgcagtggcaacaatgggagagagtccacnaagcccanaagcgaagttggggatgcgagtggaggatctttgggacgttcaggagccacagttgagtcccactgagaagctcaacgcttgttttgaaagcatccctgtctctgcttttcctttggatccttcaaacacagaaattgagattaaatcagacgcgaccctagcagatgctgttaagatattggcgcgacacaacgtattcagcgcacctgtggtggatgttgaggcgcctgaagatgctagttggatggatagatacatcggaattgttgagtttgctggaattgttgtatggattttgcat

SEQ ID NO: 55219 - DNA, 239 bp, Glycine max
  Clone ID: LIB3109-057-Q1-K1-H9
cgagggtatcaactgtgtatgaggagagagagaaagtgaggagcactagcactacacaagctccgaaataaggaggggcgagaaattttggatgcgttggatttcgtagatctgacacataaattgtggtggcagcacaatggatcctggcagtggaagaaacaagctttggcaccactcttaatttgctttaaaacaacgtttaccggggacaccttgattacattaacccctttgtg

SEQ ID NO: 55220 - DNA, 384 bp, Glycine max
  unsure (1)..(384): unsure at all n locations
  Clone ID: LIB3109-001-Q1-K1-G2
accgggacagaatggccgggtcgacccatgcgtacggccaggcgtncgaacacgtgtgagaaggactacaaaagggctggatacaaacaacagagggatgattaacattgatggattgcgattcaggttgcataaacttggtcattaagttcccgaattagatgtacaaactcttatggaagctggtgatgtaaatggtgatgggcacctacattatggaaagtttgtaaccatttctgctcatctaagaaagatgggaaatgattagcatgttcgcaaaacctttcaattttttgatcactacaaaagttaggatattgtgaacgaggagctgcttagcgacttatctgatgatcttgaccccaacagcgattaagttatcag

SEQ ID NO: 55221 - DNA, 274 bp, Glycine max
  Clone ID: LIB3109-001-Q1-K2-D8
ggtgctggggatgtattacattgaaacactctactttacttttgggtacatgtatcgtttcgtttagtttcatcccacttaacgtatttggttttttttcaccgataactaatgtcttgttaatgtgtggaaaggctactagatattatctgattataagtaaagttatgtggttcacattcatgggcatgtacaacgcaatgaatgtaacataacccatgaagtgactaattactgctaacttgctaattttactgatttttttaaattacgc

SEQ ID NO: 55222 - DNA, 110 bp, Glycine max
  Clone ID: LIB3109-001-Q1-K4-E8
gaattcccggctcgacccactcgtccgcccacgcgttcgaatactaccgaatgatgttcactagttacttcacttaaacataggtcgtgttttcacacaagggagttaaa

SEQ ID NO: 55223 - DNA, 312 bp, Glycine max
  Clone ID: LIB3109-001-Q1-K4-H6
tcccgggtcgacccacgcgaccggtcacgcgtgcgcggacgcgacgacggacgcgtgaaggaagagagtggtgtacgacactggtgctgtcgactcgatccgttacccctgcccgaacatagcagaaccaaacgacgcccaggtttcggaattgtgttctaggtttttgagtttcgattccgatcgaccgacgatgctggccaatcatttccaaaacggcatcgaaacggcgaggctcgtttggtcgcggattcctaattcggaagaatcgcagctcctcgacgacgccgttggcatccttaagaagaacga

SEQ ID NO: 55224 - DNA, 391 bp, Glycine max
  Clone ID: LIB3109-002-Q1-K1-D11
ccagtcgtacgtacagatccaagaggcctccttaagggggagcaggattgaacagcgatgagactggctcccaacgctgcaatcttttagactgagctatgctaatcaccactgcaactgattctgtgtattgctgatgataatgtacttggtatgaactcttacgtggactcatgctctcatgctgaacacatcatcgaagaacatgtcaatcttgtgtacaaacgctacaagaacactgctctctcccggatcaaactcatcatgcatgactgggctaatcagagttgtgatgctgcactgtggctggactccacacgaaggagctcttatgagaatgatacacatagactctttgatatgagagattctatgtacattgagaccatca

SEQ ID NO: 55225 - DNA, 282 bp, Glycine max
  Clone ID: LIB3109-002-Q1-K1-D12
gggtccacccacgcgtccgcccactcgtacgaaccgtttcgagagcactctataatggcgagcatgagtgaataacgcaggggctaattcacaacgatttaatgtcagcgactaacatatgctattcagcactgcaactcattcagtctaatgctgaggacaatcttcttcgcatgaacacgtacatggactcactccctaataccgaatccatcataaaagtatatatcactctatctcacacattctacacgaactcttttctttcctttataaaaatca

SEQ ID NO: 55226 - DNA, 391 bp, Glycine max
  Clone ID: LIB3109-002-Q1-K3-D1
cggggcggcccaagccgtccgcccagccgtccgaccggttgcaagaggccacctgaggggggaggttatgggactggttgggagcttttacaaggaatcatgccctcaggctgaaaacatcatcaaggaacaagtcaggcttctctacaagcgccacaagaacactgctttctcctggctcaaaaacatcttccatgactgtgctgttcagagttgtgatgcttcactgttgctggactccacaagaaggagcttgtctgagaaggaaacagatagaagctttgggttgagaaatttcaggtacattgagaccatcaaagaggctctggaaagggaatgcccaggagttgtttcctgtgctgatatcctcgttctctctgccagagatggc

SEQ ID NO: 55227 - DNA, 416 bp, Glycine max
  Clone ID: LIB3109-002-Q1-K3-F8
gatttaattgaagggttcaatgcaaatgatgggaaatgtagtgagatgcctgggtctacacctgctgcaagattggtcagtcctgttccattttctgcttcatccatgtcttttggtattctctcgatcacagtagctgctgctgcaaagagcccctttgtggcacctgaagatttattgaaaagtaaaaaggagcttggttggaagggatctgctgctactagtgcatttcggccagctgagcccaggaaagttatggaaattcctcttgatatgtcaactacccctattcctaatgatgaagctagaaagcagagccgggcaccattggattttgacttgaatgtttctgatgaagtaatacttgatgatgtttcttcccaaaattgtgctcgtcagactgattgtggaactca

SEQ ID NO: 55228 - DNA, 188 bp, Glycine max
  Clone ID: LIB3109-003-Q1-K1-B2
taccgattctcaattcgcgggacgacccacgcctgcttacagatgacgacgacaacggaggggggcgattaattactagcaatgagcaatagggttggtttgttacctattccgttaggaactgctcattttttggttcatcatattcatgcatttaccatacatgttacaggattgatactcctcaa

SEQ ID NO: 55229 - DNA, 402 bp, Glycine max
  Clone ID: LIB3109-005-Q1-K1-F10
gatagcagaggacctgaagtgatgcgcattgttcctcgtctaaatgaggacataaatgaagaatggatttcagacaaaacccgcttttgttatgatggtttgaaaaggcagaggttaaatgaccccatgattcgtggttctgatggacgctttaagcctgttaactggcgtgatgctcttgctgtggtagcagaggttgcccaccaagtcaaaccggaagaaattgttggcatagctggcaaactttctgatgctgagtccatgattgcactaaaagatttcataaataggatggggtcaaatgatgtatggggtgaaggcattggtgtaaatactaatgctgatttcagatcaggatatattatgaatactagcattgctggtcttgaaaaagcggatgcg

SEQ ID NO: 55230 - DNA, 481 bp, Glycine max
  unsure (1)..(481): unsure at all n locations
  Clone ID: LIB3109-006-Q1-K1-D10
tgcctcgtaccggtccggaattacccgggtacgaccccacgcctgtccggcttttgcgagaagaccgactagaagtggatattcagtgttnnntaaaaaaaccgtggaagattnntaaatgtgtcgattctaccaacagtaacccttgataatgtgctcttgaaaatgggctgtcagtgatttgaccacccatcttaaatcanncttaatcttggatgctctcgacagattactcgatgcctggacttagcannaatcttaccagtcttgagtggattgataacatttggatctctttggagcacgcatttcagacaatggaactacatttttacgatcgttcaagaacttgcaatcccttgaaatatgtggcggaagattaactgatgctggtgtaaaaaatataagagaaattgtctccctgacacagctaaacctgtcccagaattgtaatttgacggataaaactttggaattgata

SEQ ID NO: 55231 - DNA, 320 bp, Glycine max
  Clone ID: LIB3109-006-Q1-K1-E10
ggagagtcagattcgcacgcattgcttcgcctcacaacagcagttgcagcagcaatggctcccaaacgaggtggaaaggctccggctcttgccgctaagaagaagcctgagaaggtcacgaatccgttgttcgagaagcgtccgaagcagttcggaatcggaggggcgttgcctccgaagagagacttgactaggttcgtgaagtggccaaagaatgttcaaattcagaagaagaagaggattctgaagcagaggttgaaggttcccccagctttgaaccaagttaccaaaactcttgacaaaaacctagcaacaagtct

SEQ ID NO: 55232 - DNA, 319 bp, Glycine max
  Clone ID: LIB3109-006-Q1-K1-E11
ggagagtcagattcgcacgcattgcttcgcctcacaacagcagttgcagcagcaatggctcccaaacgaggtggaaaggctccggctcttgccgctaagaagaagcctgagaaggtcacgaatccgttgttcgagaagcgtccgaagcagttcggaatcggaggggcgttgcctccgaagagagacttgactaggttcgtgaagtggccaaagaatgttcaaattcagaagaagaagaggattctgaagcagaggttgaaagttcccccagctttgaaccagtttaccaaaactcttgacaaaaacctagcaacaagtc

SEQ ID NO: 55233 - DNA, 334 bp, Glycine max
  Clone ID: LIB3109-007-Q1-K1-F10
ggatggtaggattaagttgctgagtagttgtgtaatcaagattttatgtaacatttgtaaagggaaaattagcacttttgtggttcttaagggaaaagaaacagaccttgtggagattataatttccttggtttctgttaccactgttagagggagttgcatcatttaacatatagtaggatagtttaagtgtagggaggacaattattgtctgaagctaaaatgggttatttataggactgatggaaatgatttcatctctgccatctctaaagcacttttcattgaacatgttagcctatgatacgtacagtaaattaacaatgatagcagc

SEQ ID NO: 55234 - DNA, 292 bp, Glycine max
  Clone ID: LIB3109-007-Q1-K1-G12
tggtcccaggggttcagctgaggtagggacgtgctgtaggccggaatgttaccggctgttggatctgcggatgaggaggaggatcctgcggaggaggattgtcctgaattggttcccattgagacgacgcaaagcgaggaggaggaaaagtctggcctcggcgccaagatcccagtcacaattatcaccgggtatttaggtgctgggaagacaacacttctgaactatattttgacagagcaacatagtaaaagagtagcggtcattttaaatgaatttggggaaggaagtg

SEQ ID NO: 55235 - DNA, 473 bp, Glycine max
  Clone ID: LIB3109-009-Q1-K1-D4
acccgtacggaattccgagtcgacctacgcgtacgcgcacgtgcgggtacgcgaggacgacacattggggataagaaaggcacaattatacacattgcctgtgcatattgacacaccaaactgatccacacttaataatctcatagtaaggaatagcgcaccagaagtcactaacctatttactcatacagctcaataaccgtattggagcagggtgaaagtcaaatcatatgcaaccaatgccgatgaacatacatctagacatagatggattgacgcggattatattgactgagccatagggttcatcaactgaggtgcttctttatggaaggccgattattacttggtacaatcatccaatggaagaacacctttttatgagcacttatgcttacaagaaacagcatagatcaatcacaggaagaatatcaccttgcctagcacggttaggcgatctcaaatcacttgaa

SEQ ID NO: 55236 - DNA, 376 bp, Glycine max
  Clone ID: LIB3109-011-Q1-K1-A8
taccggacttgaattcccggctagacctacgcgtgcgtgcacgcatacgaccacacgtgcgctatgagaatactacagactgtgaaatgaatgtgtcggaccccctacaaaaccctagcacacttttatcgcttaatgactactacagacgatgtaagcaactgcattcgcaatgggaattgatgtgaaagcctgatgtgagtccaataagaccatgctatccgaacacatatccgatgatatctaccttaagcttctcgacgagctgatccggcatcttgttaggaagactggcagtaacttcaatgctgctgtcctcaagcgccttgtcatgagcaaggtcagcatagcccacgctatacctctctagattgat

SEQ ID NO: 55237 - DNA, 135 bp, Glycine max
  Clone ID: LIB3109-011-Q1-K1-B4
gaatttccagttcgacccacgcgtacgcccactcacacgttccactacacgacgacttctgaactatgtcaagagatgtgaaaacctgggtcgggtatattgcctacctgtgataacacatggcctattctaggc

SEQ ID NO: 55238 - DNA, 243 bp, Glycine max
  Clone ID: LIB3109-011-Q1-K1-C9
ccgctccggaattcccgtctcgacccacgcgtgcactgctacaagacgacagcaggggactgtaaaccatttattacaatgcacatcaatttcattgtcttgttatatgagcaaaaatccatcttcaggtggatcaccaggaagcatttacctatatgtgcgatcaaatgctatatctgcatattgatcagaatgatctggatccctatcttctagttcatataggatctggtgatctcatga

SEQ ID NO: 55239 - DNA, 483 bp, Glycine max
  unsure (1)..(483): unsure at all n locations
  Clone ID: LIB3109-012-Q1-K1-A5
cggttctcggaattcccgggtgcgactccacgtcgtctccgtacggcttttgcgagaagtacgtacagtaaggtgtggcaccaagnttgagtttgttggggatcgagataacgtgagaaacccagtgtgatngtaaaatgaagggtccttgggttttcttcgttggctaccaannntttggtagcatnnggcaatgccanntgcgtacgaatatgttcccttcttcctgaatgaaccactggcttanntggtgcccgtacttccggnnaggtgaaattgcgcaagttggagtgctttgctgttnggaagcacacatacatctttaggctttttgagaccnnnattcctgaagaaagtgcgtnntgaagcaaccaaagggaataccatttccatggcnngaacaatatnnagatcagacttccataaacatgtnntaaccaacctaagcttaaacttttatgctcagaagaacctttcgaagtc

SEQ ID NO: 55240 - DNA, 289 bp, Glycine max
  Clone ID: LIB3109-012-Q1-K1-C8
acgcgttcgtttacaattttacttacatagcaagagtgaattagtagcgaatcgcgtaccaaaattggcatagggtatactaaaagcacacatcacacaatacactttcaaattatacccttaagcgcgccctcttattaaactacaattatcactcatttccagaatcccttattactttatatctctattctaattctaattccaatcacaaccataatctatttccttcctttcaaatctacagtttcatatacccaatagggttccaaatttttttttccttttc

SEQ ID NO: 55241 - DNA, 237 bp, Glycine max
  Clone ID: LIB3109-012-Q1-K1-D7
ccacgcgtccgatgacgcgttattacgggtgggaggagacaacttcatgcggaggcgggacggacccttggtagaatgtagtataggtcgaacatggaccgtagcagcaatggcgggctttcatgatgcttaatcatttgtgaacctggagatgatgatcaagatgtcctaagcgaccagttagcttcgctaactatctacaacccaatgagctagatgttggataataggaatgct

SEQ ID NO: 55242 - DNA, 67 bp, Glycine max
  Clone ID: LIB3109-012-Q1-K1-F9
accacagaagtccccgcctacgttgcggacccccaggagaccctttcgtcaagccggatcaaggcct

SEQ ID NO: 55243 - DNA, 475 bp, Glycine max
  unsure (1)..(475): unsure at all n locations
  Clone ID: LIB3109-013-Q1-K1-C1
gtactcgcgtccggaattctccgggatcgatcccacgccgtgccgtacctggcgagtaagaccgacagtaaggtggataccttaacatggtgtgagcgtcaagaaaagggcgtctaggggaaaagagcaccaccatcagttcagttggttaccatgttccgtaagtattgagtagttacctcgcagttagtaatcctatggctttaatagcnnatttccctcttctcttcaaacgccaaaactctcggttttaaaattatcgtcactttgtttgnngcggttcagctatctgaaaccgggccgaaagggggtgggcccattcccagaaaagcgaagnnccggatanntggatcccnnncagcagcngtcccgtgtagatgtcaggactccgggtcaaaccgttaaacgngctccnnngtcacgccgctttggcttcttctttcgcnncgacggccccgtctaattttgtggtctg

SEQ ID NO: 55244 - DNA, 294 bp, Glycine max
  Clone ID: LIB3109-014-Q1-K1-A12
aattccgggcgacccacgcgtacggcacgcgtgcgcacagactgtttcggatccgagaatacttcaaaagcgggggccatgttcaattgcactcatgatcatccctaacatgacgagaatatacaccctgatcactagcattgctgaacacatgccttactaggcaaatcaccaaatcacgtatcagaagactttggccagatcacaattcaccatttatcatatatgtcatcatctgaggctccggcatccctctaacactggctcccctgcctcttgacgtgcacctctggc

SEQ ID NO: 55245 - DNA, 76 bp, Glycine max
  Clone ID: LIB3109-014-Q1-K1-A5
ccacgcatgcgtgcgggaggaccacaaactggggcgcactgcttgttagcgcaactagcgcctcgacccagctggc

SEQ ID NO: 55246 - DNA, 377 bp, Glycine max
  Clone ID: LIB3109-014-Q1-K1-D2
gagaaggaaaatatgtgagctgagatgttccaagacaattaattcatggcactatggtaaatgtgagacagaaaatcctagctgatgcatcaggtgctatgtctcgagcagttagcattgctacaagaaatagagctggtagaagacagtttcgatcacatattggagggctagaaacacaagtgattgattacaatacacaacaggctatgctctaacctgtgctggctgatgcttatgctattagatttgcgggtggatgtgtgaaatggctttatatcgatgtgacggaaagattgcaagctaatgattttgcaacaatgcctgatgctcatgcatgccctgatggattgaaatccttgactactacagcaact

SEQ ID NO: 55247 - DNA, 293 bp, Glycine max
  Clone ID: LIB3109-014-Q1-K1-D5
tggggagagagagagagatatttaaggatctggtgccccttcttaattcttgtgatgggaccaattctttaatgagcctgagagagatggcgcaatactaaccatcaccataatttattggtattatttatggatgagtgtaatgtatgtatgaaaacaaaaatacttgcatctctcttgtgtctcaccgaagactatgctgatcttaatctgtgcgacatatgcgatcagttccatgtaactgaacacatcaacctcgatctttttctgagaatatttaaggcccacaatct

SEQ ID NO: 55248 - DNA, 323 bp, Glycine max
  Clone ID: LIB3109-014-Q1-K1-G9
tccgggtcgacccaagccgtccgccaagccttccgaccggttccaaaaggccaccgaagggggacaccgtcaaattgggagaatgggttttcgggatgaccatgattttagtatgcattcggatttccgtcaaaggcaatttggtccacaaggagctgtgaggggtggacattatgcacgtatccgaggtgctgcatttgcgggaccatctagaccttatcatgatagagcatggtacggtatccctgatggaggccctagtgagcctattcctccaaggaggccctactccccaggtggacagtttgacatgccttttatgg

SEQ ID NO: 55249 - DNA, 276 bp, Glycine max
  Clone ID: LIB3109-015-Q1-K1-F7
ccactcgtacataacctccgagaggactacagaggggagtcatggagccagtcattatgacaagtgaagtgctgcctgctctggaggatgctctatctaatgatcgacccgatctctatcaccaggatcaaagttactgtgtaaatgacctttagcactggcggcatgcataccgagcagaggtgctgcttttatgaacgacgtgacccgattgacaactattaactcataggtgactattaaattcatgccccatatatactgtgtgaatgacca

SEQ ID NO: 55250 - DNA, 331 bp, Glycine max
  Clone ID: LIB3109-016-Q1-K1-F8
gcgagaagacgacagattgggggagtggaagtagtaacaagtacgtcgcatatgtggttgatcttttgctggttgatagttttgttccttccaattgtcagatctgaatcaccggactcactcttcacactcactcacactgaatggcttctgaaggcgaccatcaccaccactaccaccaccatcaagatcacgatcatcatcatcatgatcatgatcaccatcatcatcacgatggagagggagagaccaactcatgggtaggtaaggatgggaaggtgtaccatagccacgatggtctggcgccgcattctcacgaacccatttactt

SEQ ID NO: 55251 - DNA, 371 bp, Glycine max
  Clone ID: LIB3109-016-Q1-K1-G12
taccgtccggaattcccggtcgaccacgcgtcgccacgcgacgaccgtcgatacctacgcacgatgaccacaggaaagcgatatctactgaggctgcagtctataggagaagcaactaccgagcatgagaatgctcgatgcgaagtaccaggtggcggacatggcggtgatgatacatgtgaagaacatagcggacatgggggcgtacgtgtcgctgctggagtacaacaacatcgagggcatgatcttgttctcggagctctctcgccgtcagattcggagtgtgagcagcctcatcaaggctggccgcatcgagccggtgatggtgctccgtgtcgacaagggaaaaggttacatcgatctcagcaagc

SEQ ID NO: 55252 - DNA, 377 bp, Glycine max
  Clone ID: LIB3109-016-Q1-K1-G4
gtatcaagggataaataatcggaccggtccttagatttttttaaggctttaagggagccgtatgaggtgaaaatctcatgtacggttctgtaatagagatggtaacagtaatgtcatcaccgactaggattatctaacagtttaagtacagttgatatagttgatgcacaatcaaaatatggtttttggggatggaatttgtggcgtcaacctatgggtttcattgtttttctaatctcgtccctagcagaatgtgaaagattaccttttgatttaccggaagcggaagaagaactagtagcgggttatcaaaccgaatactcgggtatcaaatttggtttattttatgttgcttcctatttaaacctattcatttc

SEQ ID NO: 55253 - DNA, 405 bp, Glycine max
  Clone ID: LIB3109-018-Q1-K1-C7
taaagggacggcttaaggctaaaaatcatcgatgcactcgaattagcatggctgtcacggttgcattcttgaattcgatcatcatgttttcagtagtctctacaagcaagtcactgagcttaaactactattcaaaaacatgccctgatgtggaatgcattgttgccaaggcagttaaggatgccactgctaggtacaaaactgctccaactgcacttctgcgaatgcacttccatgactgtttcgttcgggggtgtgatgcctatgtgctgctaaattcagaaggaagcaacatagcagaaaaagatgggccaccaaatgttactatgcatgcattctatgtcattgatgcagctaagaaagcactagaagctttatgcccaggtgtggtctctagtgctgaca

SEQ ID NO: 55254 - DNA, 181 bp, Glycine max
  Clone ID: LIB3109-019-Q1-K1-G11
acgcgatcgggctcatacatgaagacctccgacaccgggcatcttggagtcagctgcttttacggctatggtacccacacactgtcagttggtctgaattctcgttctgagttagagcgtttcgatgagtattcatgatatgagacgaggagcatggtaccgtattccatgacaccaagaa

SEQ ID NO: 55255 - DNA, 432 bp, Glycine max
  unsure (1)..(432): unsure at all n locations
  Clone ID: LIB3109-020-Q1-K1-C10
gatggtcgaggagaaatttcagcttcggaatctcgattaatcgaatctcctgctcccggtattatttcgagacgttccgtatatgagcctctccaaacaggacttattgctattgattcgatgatccccataggacgtggccaacgagaattaattattggagacagacaaacgggtaaaacagcagtagccacagatactattctcaatcaacagggacaaaatgtaatatgtgtttatgtagctattggtcaaaaagcatcttctgtggctcaagtggtgaataccttacaagaaagaggagcaatggaatacactattgtagtagctgaaacagcggattctncagctacattacaatacctcgccccttatacaggagcagctctggctgaatattttatgtaccgtgaacgtcacactttaatcatt

SEQ ID NO: 55256 - DNA, 324 bp, Glycine max
  Clone ID: LIB3109-021-Q1-K3-B11
gcaattcccggatcgaccgacgcgctccacgcgtgcctgcgagatgacagaacaacaacggactgtggcatgactgaaccgatccacgcttttggactaggagctttcacttgataataagaataataagatgcacttgatgcttgggaccccttgcaagatcatcaacacttcatatatccctatagttttgatatgtcttttacttttacagatacgggaattgttgctgtctccaaggctatggatgtgaactagcaggctcatcctggacctggaaacacagagacagccccttatgagcctttgaaactgcttcacttt

SEQ ID NO: 55257 - DNA, 468 bp, Glycine max
  Clone ID: LIB3109-022-Q1-K1-C2
accggaaattcccgggtcgaccaacgcggtccgacggcttggaaaagaccaccaaaaggggggggagggggaatttaaaagaaagaaaaaaagaggttggtggtaaaacaaaagaatattattgaaacataaattttggactttctttgcatttggcagccacccccacaacgaaataaaacaaaacaagcacacaaccagagacacacacgcatagagagagagggagagagaagcagaggaagaaagagaagaaggagatcttgagagatcaagtcgcaactcgtcatggggagagaagttacaggaatgcaagttgtggacaagaagccaaatggtgttataccagcttcaaatggtagttctaatgataaagtatgcttttctcctaaaatggaagcagctaaggttcaggcgaaggatcacaaggtaaatgaatgtaccaaaactaactcttttgaggagaaa

SEQ ID NO: 55258 - DNA, 437 bp, Glycine max
  Clone ID: LIB3109-022-Q1-K1-D12
ggtgaacacaaagctggagagtaccatggtgagcacaagccagagcacaaagaggggttcctagacaaagtcaaggacaagatccatggtgagggcggcgccgccgagggcgagaagaagaagaaggagaagaagaagaaggagcatggccatgagcatggccatgacagcagcagcagcagtgacagtgattaaactgctgcatcacctatatatttaaaaggtttatgggaccatagtagcgagggctgtgccttaatttctctctctctctctctctctctctctctctctctctctctttttcctttttccctatcttgtgatctatttatgagtgagaaaaacaaaagtgagaaattgtgcgtgtatctggttgctaattcgagtgctattagtctgtggtttggttggtttgtaaccccgctacttgggtt

SEQ ID NO: 55259 - DNA, 210 bp, Glycine max
  Clone ID: LIB3109-027-Q1-K1-A1
cgattcccggtcgaccacgcgtccgccacgcgtcgcgacagaggggtgtgggggttgaaacggttatcattttaggggggataattggctggggaatgaaccccaactatgaagatccgtggatagtcttgtactgtacaacatgcctatttcccacaaatttggatggaagattatgaccaaaccttctaattactacttgcaaagatt

SEQ ID NO: 55260 - DNA, 409 bp, Glycine max
  unsure (1)..(409): unsure at all n locations
  Clone ID: LIB3109-027-Q1-K1-B5
cggaattncccgggtcggacccacgcccgtccgtaccggctnnngcgagaagaaacgacagaaggtggactatgnnagaaatttccaattattagcttttccgttcataantttctgggcttaggatgtacgagattgtagcttgcttaccatacanctgtgctaatagtatttgctttggtgacagttcattaaggggacgcgtgtcgtttaatgggcgttactctgataacttgcacgggaggcgtgtaacaaatgaatgcgtatacgtaatacattgaagcgggcgtctaacatnggatcggtccaacaatggtaaccatcacatngggtctgaagaatcagcttgtgttttataggttataatctatatgatagtttgtgcgaaatatcttttagctttttttaa

SEQ ID NO: 55261 - DNA, 273 bp, Glycine max
  Clone ID: LIB3109-027-Q1-K1-E8
ccactcgtacgttctgttcgagatttctatttattgggacacaagcgagtttgttgatcgggataactagaaacagggcggtgaaaatgaaggtccttgttttcttcgttgctacaattttggtagcatggcaatgccatgcgtacgatatgttccctctacgaatgaacactgactatggtgcccgaactcctgaggtgaattgctcaagttgcaagcttgctagtgaatcacacagcatctttggctttgagaccatctcttgagagtgcg

SEQ ID NO: 55262 - DNA, 280 bp, Glycine max
  Clone ID: LIB3109-027-Q1-K1-F5
gactgggaagtgaggtttgtttgtgtgtccaacaaggcgaatcgcgtggctgataggctcgccaacgatgctcggaaattggcttgtgatgatgtttgtgaggagtatcttcatcccccggctaactgtaaccagttgctcttggaggatgagataggctgtgagagcttttagtccttttttttttttttcttcttctttcaaacataagaaaagaaaaattactatcacaaggtttttgaaggacaccatcggctacttaattaattggcaatcatgg

SEQ ID NO: 55263 - DNA, 385 bp, Glycine max
  unsure (1)..(385): unsure at all n locations
  Clone ID: LIB3109-027-Q1-K1-G11
nngggagatggcggggttgaggtactagttgaatccatggcgcatgtgcggcttgcnnatttgcaactacaacatgctaacactgaggggctgccaaatgttggagaaagacaaaagtttgctagctccnngtaagtgtaacccttaatctccaataagcttaaggttanntgcgggggtttggcggttggttctggaagtggcagtgagtgtgaagaaattggaattggaaggggttcgggcgaagttcgaagttcttcttcttctgaggaaggaagaaaggaggcagtgagtgtgcagtcaaaaagtgacttcagaaagtataccttcgacgtgagtattggaaatccagttgggaagtttgtgggacggattgtgattggac

SEQ ID NO: 55264 - DNA, 436 bp, Glycine max
  Clone ID: LIB3109-031-Q1-K1-F5
gggacaaaaggattgatcgcgaaaaagatttcttgttcttattagaagatcgtgattggatccacatatgtttggtaaaaagaaagaaaaatattcttctttgagaataataaaaaaggaaagtgttcaattggaacatgaaaacgtgacagaattggtcctagttactcttcggaacggaatagaagaaggggagagattctcgaaccgaactaggaaacggatccaatgacttcaaaagaattgaacgaggagccatatgaagtgaaaatctcatgtacggttctgtagagtggcagtaagggtgacttatctgtcaacttttccactattacacccaaaaaaccaaactctgctttacgtaaagttgccagagtacgcttaacctctggatttgaaattactgcttatatacccggtattggccataatttac

SEQ ID NO: 55265 - DNA, 422 bp, Glycine max
  unsure (1)..(422): unsure at all n locations
  Clone ID: LIB3109-031-Q1-K1-H5
accggccggaattcccggnccgaccacgcgtccaggcgctggtacagntgcgaaaaaggcgacagttagggggtagacaaacagaggagcccggagtgcggatcctctcttctcttctttgatctccgataccctttttgatatctcaacagagagagagagagaggatctgttgaagctcaagggattgagaagtggggggagtcacagagagctgcgacacctgcgacggcgcgtggcgtatacgaagacgaaagaagcgcaatgttactgcgatggctggttgctcagacaccatggaaagtgtgtgcctgaatagctcaaaactgaaagagcgcaactacatggggttatctgattgttcatctgtggacagctccgcgccgtccttctcagatgagactaagagcaattgtgataca

SEQ ID NO: 55266 - DNA, 377 bp, Glycine max
  Clone ID: LIB3109-032-Q1-K1-A7
cgacgcgtcagctgatgccagaagcgacagtaggcgtgtgaccaaagtgtgatccatccacgggtgggaaactcgacctttggcatacagcaattctactttaattaacacttcctatctagagtgtttgtccgatccatgacccattgcccccagccacctcaaaatttgcagtgccaatagacttgaataagaatccatgggaacaaaacgctactctccataaccgatggcaccctcacataccggacgtagctgcttgtaataccggagaagtcttcacggtagagatggtagattggacaagaagtgctattaaagacaacgattcatcactagacataaaatttctagacctctcaactgtccattatctt

SEQ ID NO: 55267 - DNA, 303 bp, Glycine max
  Clone ID: LIB3109-032-Q1-K1-F11
cggtcttgaatttccgggtcgagccaagccttcgcaccggttccagaagaccaccgaaggggatatttaagacgatgctagaaggaactgttgcgggaagtacgaggcatagctgcattcacccgattgttatcaccaaaaccatctacatggctttccattttgagctattaaagattaatgcctaggtcatccaagttgatgacgacattgaattgatcgagacttcatgcttgtgatacttgacttcaactgatctctgactacaacctagcctgtcagctgtatatctacacctagttt

SEQ ID NO: 55268 - DNA, 438 bp, Glycine max
  Clone ID: LIB3109-032-Q1-K1-F2
tgatggtcgaggagaaatttcagcttcggaatctcgattaatcgaatctcctgctcccggtattatttcgagacgttccgtatatgggcctctccaaacaggacttattgctattgattcgatgatccccataggacgtggccaacgagaattaattattggagacagacaaacgggtaaaacagcagtagccacagatactattctcaatcaacagggacaaaatgtaatatgtgtttatgtagctattggtcaaaaagcatcttctgtggctcaagtggtgaataccttacaagaaagaggagcaatggaatacactattgtagtagctgaaacagcggattcttcagctacattacaatacctcgccccttatacaggagcagctctggctgaatattttatgtaccgtgaacgtcacactttaatcatttatga

SEQ ID NO: 55269 - DNA, 137 bp, Glycine max
  Clone ID: LIB3109-033-Q1-K1-G12
cccaagccgcccgaccggcggcaagaggccaccagaaggggaaggagaaaggaggaaaaaaaaaaacaaagggaaaaagaaaaacgcgcccgctcaagaggacccaagcaaacgcccccggccagccaacgccaaac

SEQ ID NO: 55270 - DNA, 392 bp, Glycine max
  unsure (1)..(392): unsure at all n locations
  Clone ID: LIB3109-034-Q1-K1-A6
agtttagacacgacctctgattttcattgaccaacaccatacactggccaagtgcgcataatctaaggaagagttcttttttgatagatattgtcatcgcttcnactaagaacatcacactgaagagttccgacggcgaggccttttaggtggacgaggcggttgccgtgtagtcccacacgatcaagcacatgatcgatgacaactgcgcctacagcgaaattcctctccccaatgttaccaacatgattctcgccaaggttatctagtattgcaagaaccacgttgacgccaattgcgcttatgagaagcccactgaggatgaactcaaggcttgggactcttatttcgtcaaagtgatcaggccacactctttgatcttattctggctt

SEQ ID NO: 55271 - DNA, 343 bp, Glycine max
  Clone ID: LIB3109-035-Q1-K5-B9
acgcacgcgtccgagatgtctcacaggaagttcgagcaccctttgcatggttccctcggattcctccccagtgagcgtgcatcacgccaccgcggcaaggtgaaagcatttccgaaggatgacccatcaaaagcccctcatcttactgccttccttggttacaaggctggaatgactcacattgttcgtgaggttgagaagccaggatcaaaactccacatgaaggagacttgtgaagctgtgacaatcattgaaactccacccatggttatagttggagtggttggttatcttaatacaccacgtgtccttcgctctcttgccacagtatgggctgagcatt

SEQ ID NO: 55272 - DNA, 405 bp, Glycine max
  unsure (1)..(405): unsure at all n locations
  Clone ID: LIB3109-036-Q1-K1-B4
ggtgaataacctcggtactattgcaaggtctgggaccaaggaattcatggaagccctggctgctggtgctgacgtgagcatgattgggcagttcggtgttggtttctactcggcttatcttgtagctgataaggttattgttaccacaaagcacaatgatgatgaacagtatgtctgggagtcccatgccggtggctcatttactgtgacaagagatacatctggtgagaaccttggtaggggaacaaagataactttgtttcttaaggaagatcaacttgagtatcttgaggaacgccgtctgaaggatttgataaagaggcattctgaattcattagctatccaatntctctctggattgagaagactactgaaaaggagatttctgatgatgaggatgagga

SEQ ID NO: 55273 - DNA, 482 bp, Glycine max
  Clone ID: LIB3109-036-Q1-K1-C10
tactggaccggaattccggggtagacccacgcgtgggtgcgtgagggcagacgacagaagggtgcagcggcgcgcagaggatggggccgagtggtggagtttgaaagagaacatattgatcgcagttgagttctaaggagtctcgaatacgattacctgttcaagcttctgctaatcggagactcttccgttggaaaatcctgcttgcttctcatattcgctgatgactcctatgtcgacagctacataagtaccattggagttgattccagaatcagaacggtggagctggaagggaaaaccgtgaagctgcagatacgggatacagctggacaggagcgattcatgactataacatgcagttattatagaggagcacatggaattatgattgtctatgatgatactgagatggcacggtttaaccatgtgaaaccgcggttgaatgagattgacatacatgcgaatgacactgtgtgcaa

SEQ ID NO: 55274 - DNA, 325 bp, Glycine max
  Clone ID: LIB3109-036-Q1-K1-D3
gaattccagggtcgaccgactcgtgcgtaaagtcgactaaatgcttcagaaagaattttttgaaaagcttgctaacaacaacgctcgggctatactcacagacagtgctctcagaaatgtcaagattcctactggacctacacattcgattcttgaccatataccaagagactcggatttgaaacataagctcagacacctacagagactgatatgaagagtaagctgtctcagaactttgaactccatctaacaattgatagtaagaagcttcagatccaaatgaattgtgcatatcattgatagctagctctgatcaattgtt

SEQ ID NO: 55275 - DNA, 310 bp, Glycine max
  Clone ID: LIB3109-038-Q1-K1-D1
gtggcagtggataggagattggaacatatgttgaaaaacttttgacaagtgagctttctggaaatgtcatagatatctggcctgtgggagctctcacgtcaaaacctttggcatttaaggcccggaattgggagttgaagggcacacagaccattgatgttactgatgcagttggatccaatattcgaattgatagcacaggacctgaattgatgcgcattgatcctcgtttaaatgaggacataaatgaagaatggatttgagacaaaacccgattttgttatgatggtttgaaaaggcagaggttaaa

SEQ ID NO: 55276 - DNA, 408 bp, Glycine max
  Clone ID: LIB3109-038-Q1-K1-E1
gattggatggatgtcatctcttcccaagggttgtccttactttcagttgatgttgctggttctcaggtgacagatgatggattgcgactcctaaaggattgctcaagtcttcaagcattgactctcagttactgtgaccaattttcagaatatgggcttaagcacattagtggtctttcaaacttgacttccttgagtatcaggaagagcagctctgtcaaacccgatggaatgcgtgctttctccaacttatttaatttggagaagttggaccttgagaggtgttcagagatccatggtggatttgttcatcttaaaggtttgaaaaagctcgagtatcttaatattggatgctgtaaatgtgttacggattcagacataaagtctatctcagagcttataaatttg

SEQ ID NO: 55277 - DNA, 243 bp, Glycine max
  Clone ID: LIB3109-038-Q1-K1-G11
aatgacctctgatgggggttcgtatgttctcggggacggtgatcaccgtaaagtgagcaccatcttagctgaacacctctaaaggactctgactcctgatacccatgagtagcatattgcggccgacctttttctacaaatggtccatgatcatgagcatgtatttgatgatgaagtataagatgtcgaacttgacgaagattttgaccttgataatgccttaaaacgttattctacttttat

SEQ ID NO: 55278 - DNA, 384 bp, Glycine max
  unsure (1)..(384): unsure at all n locations
  Clone ID: LIB3109-041-Q1-K1-A2
ccgggncgacccacgcgtgacgcacggcctccataagctacaaaaagacgttttagtgtattttattgcatcacacacacggccacatagggaattctcttgcttttatagcaactttttttgcnttgattactcaaacaacacttagtgttcttaggttattattcttgattgacttcctaaaacattctacttttgnnnnnnaattatttgagctcctatcacaatttccctccaacaccttaatggtttcctttgcattaaaacttcacacttcacaactgacacttattttgttcatttgattcgtttaatattctcaaaaacccatcattgattgaacttgcaaactatactcatcggaactagcttttttggttttct

SEQ ID NO: 55279 - DNA, 453 bp, Glycine max
  Clone ID: LIB3109-041-Q1-K1-A5
gctcgacccaagccttccccaaccttctaccgtttagaagccaccaaagggcaatgcaagggcgcctagggggacaagagagttatcacctacagatactgcttcgtgcactcactgtcagatgctcgtggtttggattcagaatcaactaacacaaaagacgaccaaggagatagtattcaactatgtaaatcacctgtgcgagagcttgccaagtccaaatggagagtcagtagtagactgtaatagcatttatggattgccaaacatcacgtttactgttggagacaaacctttcaccctcacccctgagcagtatattctgaaaactggaaaatgcattgcagaagtttgccttagtgggtttattgcttttgacattcctcctccttaaagtcctctctggattcttggcgatgttttcatgaaggtatatcacaccctctttgacta

SEQ ID NO: 55280 - DNA, 138 bp, Glycine max
  unsure (1)..(138): unsure at all n locations
  Clone ID: LIB3109-041-Q1-K1-B4
accgggttncgaacaggcaagacgcccaccccctcctactctttctaaaagactttataaggcttataaagagacatctttatcgtcattttttgaacacatttacagcacattttacaccaccaaccattctttctt

SEQ ID NO: 55281 - DNA, 349 bp, Glycine max
  unsure (1)..(349): unsure at all n locations
  Clone ID: LIB3109-041-Q1-K1-B5
acccccgtggcgacccaggcgtgcggcaggcgtnagtacgactacagaaaagacgattttaaagggtatatatatcaactgaatccatgattattcagtaatcgatctattctgaatggtgtaaataatcaatttgttattgtaggaaaaagatgccgcattatcactcaaataacaacaacgatcttgcgttcttcacgtacgatgagaancgaaatctatgttatgggacccagaaagagaggttgggcaaggactccattaagcccttcgatgcttgctctctctgtctcaaatccctaattgatcctatgagctgccagaaaggccatctcttttgcaaagagtg

SEQ ID NO: 55282 - DNA, 262 bp, Glycine max
  unsure (1)..(262): unsure at all n locations
  Clone ID: LIB3109-041-Q1-K1-B7
ctaatcttcaaaatttaattaacaattttataaaccctttttgnnncccattttcatacatttacccatattatattttttatacaccaccttacaacaacttgntatttcaaattataactnccaattcactcttcaaacccaacttgtcaaactttcctaggaaattgaatgtgttccttgttttatcccattatcttttttaacatccccacattaattatctttcttacattccttcaaacaaaggattacctttttt

SEQ ID NO: 55283 - DNA, 438 bp, Glycine max
  Clone ID: LIB3109-041-Q1-K1-C5
ggcgtgacggccagcgcgtccacacggttgcgaaaacaccttataggggttgtcctaatgtaacacaccgggccaattgggaaaatcgtcatgtggtgctaccttatttaccaaaaattctcaagggcctcaataaggttggatcgactagtcctcaaagtggaatggacaatgtgagaaaccctgttggtaaccctcttgcaggcattgacccagatgagattgttgatacacgaccttacaacaacttgttatctcaattcatcactgccaattcacgcggcaacccaaccatgtcaaacttgcctaagaagtggaatgtgtgcgtggttgtgatcccatgatctgtttgagcatccccacattaatgatctggcttacatgcctgcaaacaaggatgggcgttttggattcaacttacttgttggtggtttcttc

SEQ ID NO: 55284 - DNA, 424 bp, Glycine max
  unsure (1)..(424): unsure at all n locations
  Clone ID: LIB3109-041-Q1-K1-D1
cacgcgtgaccacggccttcttacgactacaaaaagacgacttaatgggggtttgcaaaantaaaaatntgntgtctatttgggaaatgtgcatcaacattctcaacctcttccacaacccaacaagtcactcaaggtattgatggaaccgccctcacctccatcgtcacaagagcaacaagtggcctttgtctggagaccacccgggttcttgcattgcgcggtgtccatgttgttatggcagtaaagagtcttgacagtggtaagaatgtcaaataaacaattcttaatgaaatccnctcggttaaaattgatgtcatggagttagatctaaactctatggcatcggtaaagaaatttgcagcaaattttaattcttcttgtctttcactcaatatccttatttaagaacttttaactctat

SEQ ID NO: 55285 - DNA, 127 bp, Glycine max
  unsure (1)..(127): unsure at all n locations
  Clone ID: LIB3109-041-Q1-K1-D8
tatttctcccaaccaattaccctctgtcttcccaaagattctatatttatgttccttgcataactcgtgcttgtggccttccacaaaataccatctattttnaanatactaactaaaatgttaatcc

SEQ ID NO: 55286 - DNA, 116 bp, Glycine max
  unsure (1)..(116): unsure at all n locations
  Clone ID: LIB3109-041-Q1-K1-G2
tctttctattcccatcaccatttatacattataaanactgtttanagcattcatatctatcattaagtccttcaaatattttaaagttactctttatcctggaaacgngttatcac

SEQ ID NO: 55287 - DNA, 345 bp, Glycine max
  unsure (1)..(345): unsure at all n locations
  Clone ID: LIB3109-041-Q1-K1-G3
ccaggcgtccgcccacgcgttcgtggactctctaaaaccacataaacngggagtatcttgtatccataccacactgggagtgtgccatagggatgtgaagcctcaaaatcttttgggtcatcctcttactcaccaagttaagctatgtgattttgggagtgccaaagttctggncaagggtgaatcaaacatttcatacatatgttcacgttactatcgggctccaaaactaatatttggtgcaacagaatacacagcttttattgatatctggncagctgtgtgtgttcttgctgaacttcttctaggacagtcattatttcctggagaaaaccaagtggacca

SEQ ID NO: 55288 - DNA, 476 bp, Glycine max
  unsure (1)..(476): unsure at all n locations
  Clone ID: LIB3109-041-Q1-K1-H3
ccgggcgacccacgcgtacgaattcgagcgtccggtttttataagactctttatggtaatgtagattgatcctaaaacaaatgcaacattagatcagcgacttgcttttatagcaactttttttgctgggattactcaagcaacacttggtgttcttaggttaggattcttgattgacttcctatcacatgctgctattgttggnnnnatggtgggagctgctatcacaattgccctccaacagcttaagggtttccttggcattaaaactgcacacttcacaacggacacctatattgtccatgtgatgcgtttagtattctcaaaagcccatcatggatggaactggcaaactatactcatcggagctagctttttgggttttcttctggttgccaaatatattggaaagaaaaacaagaaattcttctgggtgccagcaattgctccattgatatccgttattttatccactt

SEQ ID NO: 55289 - DNA, 305 bp, Glycine max
  Clone ID: LIB3109-042-Q1-K1-C9
gcaggttgaaaggagagatcaacagaactggaaccaaggtcaggggggacctatgcagccatccactgcaatgaatggccaaaactttgcttccggtggagagcactaagaaatgcttaataggaactctgctttagaaatcatcacacatagaaaacagaaccatgtttttcttatgggggagtgatgatttaaggttctgaggtcatattttacttatgtcttttttgtgtggagaatggctgtgcctgaccatgaaggactttgataaataatatacgctcataaagttaatattttacttt

SEQ ID NO: 55290 - DNA, 231 bp, Glycine max
  unsure (1)..(231): unsure at all n locations
  Clone ID: LIB3109-042-Q1-K1-G12
tgtcataccgacaggaagaaaattaaaacacatcgcatcttttaaaagacgggagcgccaccacaccaccatnttcttaccactcccccaacatcctcatcacaacaacattatgtttactatcaaacgataacctactatatttcatttcacaaaaaccaaccaacttttaatctaaccccattctcctatctgttaacactaaacaaacctacctccacaaatttcaaa

SEQ ID NO: 55291 - DNA, 349 bp, Glycine max
  unsure (1)..(349): unsure at all n locations
  Clone ID: LIB3109-042-Q1-K1-G4
gggattggctagatgttcttgggagnntagaagttttcaagggcgagaccannttgctggcaagtannttcttgtnntggtagttacctggtgcctnntctccaatagaggggtggcttgggttcaccnnnctcatacttcnncatagaagacnnttggatgaactnnttctacactnntcttcaggtnntcctttnnngtggctgtggaccnnngtgaaccgnngggtagtgaaagtaattnnngcagcttggaatgacccagttaatggattggacctgcnnattttggtggttcccgacccaccacagcaaccagagcttattcttgtaatcgagaagttgttttc

SEQ ID NO: 55292 - DNA, 307 bp, Glycine max
  unsure (1)..(307): unsure at all n locations
  Clone ID: LIB3109-042-Q1-K1-H10
ccggggcgacccacgcgtcacccatntcttacaacacctcccagaagttttcccaacgggggaagaggactaaaagaaggcatattttaacgaggagtgagagataacaaaacactaattctgagagagagtataataaatgaaagaaaaaagaagttgctgctaacaaggatatactgtgatgcctactctaataattcatggatatgccttgcttgtttcatcttgtttcatcatccttataacatcctcacaaacagatccttcaaaagtaaaatcacttatagacattaaaaaaaagtttgat

SEQ ID NO: 55293 - DNA, 332 bp, Glycine max
  Clone ID: LIB3109-043-Q1-K1-B3
ggttgagtggaagtggaaggtgaagaagaagaatatggaggatttcaagaagagaaagctggagctggacgaagcacgtggcgacggtgatttttcttccaaggaagagcttcgcttactcatcgaacctctcgctaaaccccagctcgtcgatcttcttgccaaactgcatttcaagagcatggagaaattgaggaaggagctgagatctatgataaagggacaggaaaatcccgtggctatggatttataactttcaaaaatatggaatcaactcagcaagcattgagagcccctaaccagttaatcgatgggagattggctgtctgtaa

SEQ ID NO: 55294 - DNA, 428 bp, Glycine max
  Clone ID: LIB3109-043-Q1-K1-B8
ggacgcgtgggcagacgccttgaccggttccaaaaaaacaacgaaagggaataagaggaaggaattattaataaccatggcaaggagaatgaccaacgccagattcaagaacttaagtcgaaaccgcataatttaacgatccgtgggttactctcttcgactccgctccggcatgggcctttccagtggcaaacactatattcccgacaaaccccttcccatgaatgaggaactcctgtgggacaacagaactgcatttctctaacagagtatagatcgtattgctgacactgtcagaaagtatgatgcattggcctgcctgtgtgctggattgaagtatttcgcgtcgctgggattgatggctgtgtggaatgacaaagcctccaagacaccagttgcacccaaagtatatccatatgacaatctgg

SEQ ID NO: 55295 - DNA, 329 bp, Glycine max
  Clone ID: LIB3109-044-Q1-K1-D3
gatgtatgagaggtagcatgtgtgctatggtgggcacactgaaccatatttgtcttaccaaaactgtggacgagatataggatccacgcttactaacgcttgcatacgacactatagcgcatcgatggacacaccataatactattcacatgacatcttacatacaacgtccatgactgggagatactattgatgttacctaactggactgcctagcatgacattcaaggttactccatactagcgtaatagcctaagacagacagcacctagtcgcccttcccaacatgtgcaccacctgaataactaattggactcgcactgtatct

SEQ ID NO: 55296 - DNA, 303 bp, Glycine max
  Clone ID: LIB3109-044-Q1-K1-F8
attcccgggtcgacccacgccgtccgcctgcctgccagatgagcgaagaagagggaagggggacggtgcaactgaaagtgctattccggggtgggtgttggtcactttagctgatcataaatattagatgcaaatgttcaagaagcccatcacaaacattaccatctcaagggctgaagaaaacacttaccccgacacctttgaaggggctttggatcattacatcataagcttggtctttgggatcggaacgttcagctattgcgtttactatcgcaaggtcagccgctactgagctgacga

SEQ ID NO: 55297 - DNA, 392 bp, Glycine max
  Clone ID: LIB3109-044-Q1-K1-G8
acgaccgaagctgattaatacgcagagtggatgtcactagggagggaaatcatgtattgtcgcgctgagatgggttagatagagaactctaccgcacttacctactcaggtctagtgaagagacatgaagaaatacgataagcgaaccagatgcactgattcgcttgcctcttatccaaaaggtgctgaaccagcccttcttacagaactgatgtccttaacatgcttgtcaaggagtgcccggtgatgctgaggattctcttaacgaacgactggtctataattagtgaagattttgaggaacactagtgtcgctacatgtctggaagtgaatacactgagacgcttatgcacggatcatcagaacttgctgaaagtgctgacatggagaa

SEQ ID NO: 55298 - DNA, 451 bp, Glycine max
  Clone ID: LIB3109-045-Q1-K1-A10
cggaattcccgggtcgaccaacccgtcctaccggttgcaaaggacaccagagggggaggccattgttaatatagttatggagttgtccaaaggaggggaattgctagataggattctttccaggggtggaaagtcctcagaagaggatgccagagtagttatgatccacatattgagtgtggtagctttttgtcatctgcagggtgttgttcaccgtgatctcaagccagagaattttcttttcacttctaaggatgacaagtccacgctgaaggccattgattttgggttgtctgactatgtaaagccagatgagaggttgaatgatattgtgggaagtgcttattatgtagctccagaagttttgcatagatcttatgggacagaggcagatatgtggagcattggtgtaattgcttatattcttttatgcggaagccgtcccttttgg

SEQ ID NO: 55299 - DNA, 312 bp, Glycine max
  unsure (1)..(312): unsure at all n locations
  Clone ID: LIB3109-045-Q1-K1-A2
gtnaacaactgggttacaagagcatactgccacaaggctcttcgtctctcagctgctactcaggatttaccaaagtctgtaatttgcaatgttcatggtgtgaatcccatattctcgaaaattggagaaaagattgctgcagagagggagctagggcagaaagcctttacaaaaggggcgtatttcttgagaaagatggtgtgggcaaagggatacaaggagttgatagatttattagcaaagcacaaggctgaccttgatggcttcaagatggatgtatttggaaatggagaggatgctaatgaagtacat

SEQ ID NO: 55300 - DNA, 366 bp, Glycine max
  Clone ID: LIB3109-045-Q1-K1-A9
tgccgtaccgaaccggaagtttccggctcgaccgtacgcgtccgttcggatgagacaacacaagggggagcaagagtgaatagcgaagagaatggctccgaagggtttaatctttttggctgtgttatgcttctcagcactgtcactgagtcgttgtcttgcggaggataatggacttgttatgaacttctacaaggaatcatgccctcaggctgaagacatcatcaaagaacaagtcaagcttctctacaagcgccacaagaacactgctttctcctggctcagaaacatcttccatgactgtgctgttcagagttgtgatgcttcacttgtgctggactccacaagaaagagcttgtctgagaa

SEQ ID NO: 55301 - DNA, 373 bp, Glycine max
  Clone ID: LIB3109-045-Q1-K1-D11
accgggccggaaattccggggtggaccaacgcgtccgtccagccgtccgaccccaagagaccgccgaagggggaccgaatggatggtttaaaaccaaccaagggctcacaatctttttggcaccccattggtgatcacttccgatagctctcacaatcctatggcggagaacaacaacaaccaccaccttgaaaccgccaccagaaggcttgcctatgtgaccaaccacctcactacttcttcttatcacaacgcacccggcgaactcgccccgtgcctcacttccggtgggaacaacagcttccgccgcgtccacggagaagttccatcccacgacgtcgtttggaggatcgacgacttcgaccacgacaac

SEQ ID NO: 55302 - DNA, 295 bp, Glycine max
  Clone ID: LIB3109-045-Q1-K1-E11
tggagaagaccacaaaagggggagggggaaagaaaaaccaaccaacccttgttgggggtgaacggaccccccaaggtcgatcctacttgaaggggaataaggcccaatttgcatgaattgaaatcggcggaaatgggagctagtcgaaagcttcagggcgagattgatcgtgttctcaagaaagttcaggaaggcgtcgaagtcttcgatagcatctggaacaaggtttacgacactcgatatgccaaccagaaggagaagttcgaggccgacctgaagaaggagattaagaagc

SEQ ID NO: 55303 - DNA, 436 bp, Glycine max
  Clone ID: LIB3109-046-Q1-K1-D1
gtatcaagggataaataatcggaccggtccttagatttttttaaggctttaagggagccgtatgaggtgaaaatctcatgtacggttctgtaatagagatggtaacagtaatgtcatcaccgactaggattatctaacagtttaagtacagttgatatagttgatgcacaatcaaaatatggtttttggggatggaatttgtggcgtcaacctatgggtttcattgtttttctaatctcgtccctagcagaatgtgaaagattaccttttgatttaccggaagcggaagaagaactagtagcgggttatcaaaccgaatactcgggtatcaaatttggtttattttatgttgcttcctatttaaacctattcatttcttccttatttgtaacagttctttacttttgtggttcaaatatctctattccatacatat

SEQ ID NO: 55304 - DNA, 52 bp, Glycine max
  Clone ID: LIB3109-046-Q1-K1-G7
ccacgcgttcgaccacgcgttcgcgcactcgtccggccacgcgtgcgccgag

SEQ ID NO: 55305 - DNA, 319 bp, Glycine max
  Clone ID: LIB3109-048-Q1-K1-A4
gatttcccggtcggcccacgccttccgattccaaagaagggtgtgggtgattccattcgaacaccagacaaccaccaccaatcttaaggtggctttcttctcttttggtcgaccgtgtcacgtgcgagaacaatgagaattgccattttccgctccctatctaaacctttgaatcttattcgattcaatttcatcacgacttaaataccatcgcatgttcattcattgatggtcatgttctttccttaaaccttcttcaaaaagtcaaaattgaaaacctttctctctcttaactccttctcgtcatcgccccaaagct

SEQ ID NO: 55306 - DNA, 388 bp, Glycine max
  Clone ID: LIB3109-050-Q1-K1-B7
tacagatgacaaaaaaacttcagattgtgaacgagtaaaaaagaaagatcgtgtttggtattatatttaacagcgatgtagacgtattgaagatgttaaagtttggatcacacaaattctctgagaggcaagcactttttacatgagctaagagtgacaattactactactaggcaccaccagcacccttgtttgatccaggtgagttaaagtcatgctctttttacagagctttgatctcacagtttgttgccacattctttttcctctacatcactgtcttgactgtcatgggtttcaacatggcacccaacaagtgcttttctgttgtcattcaaagaatttcatgggctttttgtggcatgaatctttcccttttctacttcac

SEQ ID NO: 55307 - DNA, 402 bp, Glycine max
  unsure (1)..(402): unsure at all n locations
  Clone ID: LIB3109-050-Q1-K1-H2
aaatcccgggtcgacccacgccttcggccacgccttcggccaccccttcggccacgccttccaccgcttgcaaaaaaccaccgaagggggaaaaaaaaaatgaaagaaaatatcttaaacttttattcttaaaatccaaacgaagtaattagtgctgcttcttcttctgaatcaaatcattcatcactctctggttctgatttttctgacaccaaaatggtgaatcctcgaattccacgttcaaagatcccaactttcacacttttcacttctgctatctccatcgttctgtgcattttcttcgntctctcttttctcttcactgcccattcttattcctcccatcaacaccacaacgcgggttctgacggtggtgttgcacatggatttgagtcgattaag

SEQ ID NO: 55308 - DNA, 391 bp, Glycine max
  unsure (1)..(391): unsure at all n locations
  Clone ID: LIB3109-052-Q1-K1-B1
ccgggccggaatacccgggcggacccacgcggacaccaccacgganggggcaattgacgggggagaacaagatcaacaggcaagtgacctttgcaaaacgaatgaacgggcttttgaagaaagcttacgagctttccgttctttgtgatgccgaggttgctctcatcatcttctccaatagaggaaaactgtacgagttctgcagcagttcaagcatgctcaaaacgctagagaggtaccagaaatgtaactatggtgcgcctgaggctaatgtgtctacacgggaagccttggagttaagcagtcaacaggagtacttgaagctgaaggcacgttatgagtccctacaacggtcccagaggaaccttatgggagaagatctttgcccttt

SEQ ID NO: 55309 - DNA, 397 bp, Glycine max
  Clone ID: LIB3109-052-Q1-K1-G6
ggcacaagtgaatttgttgatcgagataactagaaacagtgtgatgaaaatgaacgtccttgttttcttcgatgctacaattttggtagcatggcaatgtcatgcgtacgatatgttccctctacgaatgaacactggctatggtgcccgtactccggagatgaaatgcgcaagatggaggcttgctgtggaagcacacaacatctgtggctctgagaccattcctgaagagtgcgttgaagcaacaaaggaatacatgcatggcgaacaatatagatcagactccaaaacaggtaaccaacaagcttacttttatgccagagacctcgaagtccataccgaggacacatttgtgttcagtatagatggcaccgtactctgtaatattccatactac

SEQ ID NO: 55310 - DNA, 274 bp, Glycine max
  Clone ID: LIB3109-054-Q1-K1-E1
gggtgagaaaaatgggacgcggaaacacgcgcatgttcacgatcctggaatccaccgcggcgtattcagcgattccgatctccgacgagtctgcgcaggcgaagaatcgcgaggccagccgccggtgaagaatcgcgcgatttgtctggaaatcgcgattcagccacgattcatccccgatactgagactcaaccacgattcaggaagaaaaacgagacaacctccgattcgtatcggtagcaagtggaatcatatcgaatcgggcgatacata

SEQ ID NO: 55311 - DNA, 446 bp, Glycine max
  Clone ID: LIB3109-055-Q1-K1-E11
gtttggaatggccggggcgacgccacgcgtccgtatgcgataagactacagattgtgagagtaaaggatgcggaaagagatctttgagccaaactacttgtcaaccttgcgaaatctcaccatggaaccttgaatcaagttcagctcattaaagggtttgaatctgctctcagtacattggaggatgctgttaatgatgctcccagagcatcagagtttcttggccgaatttttgcaaaagccataacagagaatgtagtttctttgaaggagattgggcagttaatacatgatggtggagaggagccaggtaatctcttagaagttggacttgcagctgatgttcttggaagcactttggatgtaattcaaagcgaaaagggggaccgtggttctaaacgagatgctttcaaactctaacttgaggttggaaacttttcggcaac

SEQ ID NO: 55312 - DNA, 296 bp, Glycine max
  Clone ID: LIB3109-055-Q1-K1-G10
tttaaggtactgctaaaagctaaatatcatggaggtactcaaattagcatggctgtcatggctgcattcttgaatttgatcatcatcttttcagcagtctctacaacaggcaagtcactgagctcaaactactatgcaaaaacatgccctaatgtggagttcattgttgccaacgcattaaaggatgccactgctagggacaaaactgttccagcaccaattctgcgaatgcacttccatgattgtttcggtcgcaggtgatgatgcctctgcgctggctcaattcataaggaaac

SEQ ID NO: 55313 - DNA, 387 bp, Glycine max
  Clone ID: LIB3109-056-Q1-K1-C6
gggagtcgcgtctgataataaaaatacacagtgagctctcgcttctagccctagggcgctgctcccgattttctctcttcggattgagtgaattgtgaaatgggttggaaagctgctgagaaactcattaggcactggaaagttgtcagaggggataatgttatgataataaggggcaaagataagggcgagactgggactattaagcgtgtcattcgctctcagaatcgtgtcattgttgaaggtaaaaatctggtgaaaaagcacatcaagcaagggcaaggtcatgaagggggcatctttacagttgaagctccaatccatgccttcaatgtgcaagttcttgacccagtgacagggaagcctttgcagattggacacaaatat

SEQ ID NO: 55314 - DNA, 349 bp, Glycine max
  Clone ID: LIB3109-057-Q1-K1-C6
gaatttggaatccaaaaatgttggtgttgtattaatgggtgatggtttgatgatacaagagggaagttcagtaaaagcaacaggaagaattgctcagatacctgtaagtgaggcttatttgggtcgtgttataaatgccctggctaaaccaattgatggtcgaggagaaatttcagcttcggaatctcgattaatcgaatctcctgctcccggtattatttcgagacgttccgtatatgagcctctccaaacaggacttattgctattgattcgatgatccccataggacgtggccaacgagaattaattattggagacagacaaacgggtaaaacagcaatagccaca

SEQ ID NO: 55315 - DNA, 389 bp, Glycine max
  Clone ID: LIB3109-057-Q1-K1-D8
ttctataagactacttaaggtttttgaagaaattcaactccaccgggtatagtgaattgtttaacaagggcaatccaccatctctgtcctatactcttaataattacaacaagctgcagtctcttgtcttcaatattatattcttgtcaataaaaacactgtacaaacattccttaacagaatcaaacttaaataatgctgtcttccacacattggaaaaattaattctcaaagatccacaagatccttccacttcaaatgcaatttcatacaaaacatctcctaaaaataaacttataagtcaattatacaacattgtttagatcattgtaaaccaaattatcaatctcctttttatccacatattctaaatcatgacctttaatctt

SEQ ID NO: 55316 - DNA, 639 bp, Glycine max
  unsure (1)..(639): unsure at all n locations
  Clone ID: LIB3109-053-B5-R1A
ggagggagttttggtggatattgagaacatgttagctcgtggtaggatggacctaccagtgagtgtgtgctttgcggcacaagaggagatgacttgttgttgcatcaattactcaaacgaggcatggatccaaatgaatccgacaacaatcgaaggacagctttgcatatagcggcatctcaaggaaaacagaactgtgttttgcttctgttagactatggggcggatcccaacattagagatttggaaggtaatgtgccactatgggaggctatagtgggaggacatgaatcaatgagcaagctgttatcagagaatggagcaaatttgcaatgcggggatgtgggccaatttgcatgtactgccgctgaacaaaacagcctcaacttgctgaaggaaataatgcgctacggaggagatatcacgcttccnnaacagcagcacacagggaccacagctttgcacgttgcagtctctgaaggcaacgttgagactgtcaaattccttttggatcacggggcgagtattgacatgccagacaagcatggctggacccccagagatcttgcagatcagcaggcacatacagaaatcaaaggctgttttgattccattggggagcctaaggtcccatcttcc

SEQ ID NO: 55317 - DNA, 584 bp, Glycine max
  unsure (1)..(584): unsure at all n locations
  Clone ID: LIB3109-057-C3-R1A
ggtgagattggtgtgctttgttataagccacagcttttcacagttcgaacgaagcgactaagtcagttgctcaggctaaaccgtactacgttcttgaatattgttcaggccaacgtgggagatggaaccataataatgaataatctccttcagcatttgaaagagatcaacgatccaatcatggagggagttttggtggatattgagaacatgttagctcgtggtaggatggacctaccagtgagtgtgtgctttgcggcacaagnaggagatgacttgttgttgcatcaattactcaaacgaggcatggatccaaatgaatccgacaacaatcgaaggacagctttgcatatagcggcatctcaagngaaacagaactgtgttttgcttctgttagactatggggcggatccaacattagagattgggaggtaatgtgccactatgggaggctatagtgggaggacatgaatcaatgagcaagctgttatcagagaatggagcaattttgcatgcggggatgtgggccatttgcatgtactgccgctgaacaaacagccctcacttgctgaagaaataatgcg

SEQ ID NO: 55318 - DNA, 629 bp, Glycine max
  unsure (1)..(629): unsure at all n locations
  Clone ID: LIB3109-015-Q1-K1-G9.F2
ggggggggggggggggggnngggggggggggggggggggggggggcggggggggcgggggggcggcggnngcgcgcgggggggggggggggggggggggggggggggggccgggggggccgccggggcgggggcggggggggcccgggcggggggggccgggcggccgcggcgggcgcgggcgggcggccgccggccgcggggggcgcggggggcggcgcgccgcgccgggcgccggcgcgcggccgcggccggcggcggggncgggccgccccgcgccccgncgcgccgccngccggcgcgcggnnccgcgggcgggggggggggggggggggggggggggggggggcggggggggcgggngcggggggggcggggggggggcggcggcgggcgggagggggggccggggaacgggcgccgcgccggggcgggggccggcgcgggcgggncggggggcgggcgggcggggggggngggggggcgggggggcggggcggggcggcgggggggcggggggcgggggcgggggggggggggggcagccggggggggggggggggcgggggcgggggggggggggggcggggcgggcgggcggggcgggcggcggggggggggggggggcgg

SEQ ID NO: 55319 - DNA, 951 bp, Glycine max
  unsure (1)..(951): unsure at all n locations
  Clone ID: LIB3109-021-Q1-K3-D10.F2
gggggggggggggggggggggggnnggggnngggnngngngggngggggggggggggggggggggggggggggggggnggngnnnggnnnagnnggngnnggggggggggggggggnnngngnnngggggggaggnnngggggggggggggangnngggnnngggngggggggggggggggngggggggggggnggggggnnnggggggggggggggggggggggggggnggggggggggggggggggggggnngggggggggngggngggnggggggggggnnnnnngngggnngggggggggggggggggggangggggggggggnggggcgnnggngggggggggggggggggggggggaggggggggggggggggggggggggggggggnngggggggggggggngggcggggggggggggggggggggggggggggggcggggggggggggggggggggggggggggggggggggggggggggggggcggggggggggggggggggaggggggggggggggggggggggggggggggggggggggggggggggggggagggggggggggggggcgggggggcgagggggggggggggggggggggggggggggggggggggggggcgaggggggggggagggcggggagggcgggggcggggggggggggggggggggggggggggagggagggggggggcggagcngggggggggggaggggggggggagggggggggaggggggggggggggggagggggggggaggggggaggagggagagggagggaggggggggggagggggggggggggggggcggaggggcgcgggaggggggggaagaggggggggggggggggggcggggggggggggggggggggggcggaggcngggggggggggggtgaggcgggcggggggggggggggaagggggggggggg

SEQ ID NO: 55320 - DNA, 577 bp, Glycine max
  unsure (1)..(577): unsure at all n locations
  Clone ID: LIB3109-028-Q1-K1-B5.F2
gggggggggggggggggggggggggggggggggggnggggnnggggggggggggggggggggggggggggggggnnngggggggggngggggggngggggggggggngggggggggggggggggggggggnggnggggggggngngnnggnggggnnnnngngggngggggngggggggnngngnggnggggggnggggggggggnngggggngggnngnnngggggggggggggggggggggggngggggnngggggggggggggggggggggngngnnnnngnnngnnnggggggggggggggggggggggggggggggggggggggggggggggggngggggggggggggggggggggggggggggggggggggggggggggggggggggngggggggggggggggggggggggggggggggggggggggggggggggggggcggggggggggggggggggggggggggggggggggggggggggnggggggggggggggggggggcggggggggggggggggggggggggggggggggggggggggggggggggggggggggggggggggggg

SEQ ID NO: 55321 - DNA, 460 bp, Glycine max
  Clone ID: LIB3109-031-F1-F1A
agaagacaatagatattaatggagaattaattaaaggtagtgcaaacccgctccgattgatgttcagctacatcgccagtctgagacatgttgaagcagcattgacgatacttctcaatgattctgttaatgctgaaaagaaatattttagtagtgcgtgactaaaagaaatatttgaaccaatctgtcccagtttacgtacagttttatatgtagatttacagggagacctaataataaaattattatatgtataaataatcaatcaagagtttttcagttgctttcctatcctgttttaactatcttgaaacaaaacatgaattaatattgttgaatcattatattatgattatgaacgggccggatacaagaaaaaaaccaatatatatacatcccattttttggtgtatatataggtgcaggaaaatagaaagaacaaatcatattttggtttttt

SEQ ID NO: 55322 - DNA, 946 bp, Glycine max
  unsure (1)..(946): unsure at all n locations
  Clone ID: LIB3109-031-Q1-K1-F7.F2
gggggggggggggggggggnnnggggggnggggcgtccgggggggggggggngggggggggngggggggggggnngnggggnnngnnnngggggggggggggggggggggggggggggggggnnggggggggnggggggggtgggggggggggggggggggggggggggngggcggggggggggggggggggggcgggggggcggggcgggggggggggggcgggggggggggggggggggggggggggggggggggggggggggggggggggggggcggggggggggggtcgctcccgggcttcccgtggtgggggggggggggggggggcgcgcgggggcctcnccttcccctcccccgctggggggggggggggggggggggggggggggggctcgggggggggggagagggggggggggggggggggggggggtggggggggtggggggtcggggggggcgcggggggggggggggcgggggggggggggggaggggggggggggggtgggggggggggggggggggggggggggggggcggggggggggggcgggggggggggggggggggctgggggggcgggggggggtggggggggggggggggggggggggggggggtggcggcgggggcggaggggggggggggcggggcgggggtggggaagggggggggggggggggggggggggaagggaggggggaggggggggtgcggggggggggggaagaggcgcggcgggggaagggggggggggggggggggggggggagggggggcgaggagggggggtgtctggggtggggggggcggtggggtgggcgggagggggggggcgcggggggggcnggggggggggggcggggggggggggggggggggggggggggggcgggggggggggggggggggggggggggggggggcgggggggaggggg

SEQ ID NO: 55323 - DNA, 440 bp, Glycine max
  Clone ID: LIB3109-053-B5-F1A
aggcagaaatatattatttcacattaaccatgagaagaaggctaaagatttacaattgagaatgagaacacagatgagacaggaaaaataaaacaattacaataacagtaaagacgttccttatatgcattttatatatgcacgccattggttagtggtgttgctggagctgcacgattggattctagcaccctccacttgcaccaagaaaaacaagatggtcaccatccctaattatctctatatcttcaatttcacctccatctttgcatacaaccttattaggatagaaaccaaatttcttggctccaatctcaactagctcttgaaagcttccaggcagtaaaacaagcttcccaacaacctcacccttctcagggcaactaattataactctagttggaccaactgcactactactcttcataccattccttgca

SEQ ID NO: 55324 - DNA, 353 bp, Glycine max
  Clone ID: LIB3109-057-C3-F1A
ggacgtaggcagaaatatattatttcacattaaccatgagaagaaggctaaagatttacaattgagaatgagaacacagatgagacaggaaaaataaaacaattacaataacagtaaagacgttccttatatgcattttatatatgcacgccattggttagtggtgttgctggagctgcacgattggattctagcaccctccacttgcaccaagaaaaacaagatggtcaccatccctaattatctctatatcttcaatttcacctccatctttgcatacaaccttattaggataggaaccaaatttcttggctccaatcttaactagctcttgaaagcttccaggcagtaaa

SEQ ID NO: 55325 - DNA, 624 bp, Glycine max
  Clone ID: LIB3109-031-Q1-K1-H4-r5
atatccctgggagcataaaaagagaggctccgcgacaagaagagaagttagccccaagatctccatagttctcttgatggacacattgtcaagtaccagagttccataaatgaggctgcaaaagcattatttcgccagatattgcaaataaacaattctacaacacaatcatcaattaagaaccctgatgttttccttattgatgatattccttctgccattgcatcagatagcagtagttcatccactcaggtttctaatgtgatggttccacctatatctgagctgacgtctatggaagtaggatcacagtttcctctcagttgtatgcccagtaacatatctgaggtgcagtcttcacctgctgttttgggtttctgtagaagtcaggggatggagacagaaagcagtttattgaatcatgagctgaatgttatgggggctgatactaggaacatgggggagatagatatgatgtcaactgttttagatgaggcagacgaagctgatcatttttcacctgacacagatggaatttctaaactcccagaaatcagtgatgaattctgggaactgtttttaaggccaagcccacttacagaagacacagaggaaactaaatgt

SEQ ID NO: 55326 - DNA, 162 bp, Glycine max
  unsure (1)..(162): unsure at all n locations
  Clone ID: LIB3109-001-Q1-K1-B5
ccactcgtacggactgcaaaaaaccaccanaaggggccgttcaagggtttcgtttcggttttaacggggtgcacattcattttttgcgcttgactcactcccttcgngcggtttactttctttgtcgaactcgagcgaaaatgcgtgagattcttcacatac

SEQ ID NO: 55327 - DNA, 430 bp, Glycine max
  unsure (1)..(430): unsure at all n locations
  Clone ID: LIB3109-001-Q1-K1-E1
ccacgcgtccgcccacgcgtccgaattcgagcggccgcttttttttttttttttttttttttttttttcggggntgcctgtcatggaaggtaatactactacaaccactgtaccttcagggccaccaactaggaaccattcttacacacaacaccgtttacattcagaaagacatagccataaccatagccatggccatttcccctccaaaaccattctcataatcatcgcattcgtcaccttagtcacggtcctatttatcattttcggggtcctattcttgatccgtcgccaaaaatcctccagcaagaatggaacttgcgaagaagacagcaaagagcttcctgacacaagcagcaggctcatcactttaacaacgttgaattctagcccaaatgtgaaaagtgggtgtcttcatgggggaaatttg

SEQ ID NO: 55328 - DNA, 390 bp, Glycine max
  Clone ID: LIB3109-001-Q1-K1-E12
ccgttacggaattccccggtcgacccacacatacgtacacctgccagaacactacagaatttttttctaaaaactattctaaccctaatcgctggggtttttaaaaaaaatggggtcatccaaattaaaccaccattctcacattctacttcccttctaagaacctcaacacacctctatccctaccttatcacactcttatttttcatactttatgtcacaatccaatatccctaacacttcatatacatcttttctcaacatttacaaatctactcttattaccctcacaaactcttatccactcccatctaaatcataatccactcactcttattcattcaaattactcatactcacttaccattattaattcatattattattatc

SEQ ID NO: 55329 - DNA, 158 bp, Glycine max
  unsure (1)..(158): unsure at all n locations
  Clone ID: LIB3109-001-Q1-K1-E2
accggnctcggaattcccgggtcgacccacgcatccgtacacgcgtccgaatactaccgaactattttccaaaggggcttcacaaaaacataaagccgcttttctcacatgtgagataatactcatcactcccacttattcaaaaaccccaccaacta

SEQ ID NO: 55330 - DNA, 458 bp, Glycine max
  Clone ID: LIB3109-001-Q1-K1-F10
ccacgcgtccggcgagaagacgacagaggggggagataaagcaccacacaccgtttcactccatttcccagtctttctagggtttccctgctatcttcctcaattcgaacccttcgcctttccacccttcgatttcttatcttccaattcgtcaagcgtatccgcgagtctcgatttccttctctgcaagcggattggtcgcttgtgaaggaggaacatgtattcaagagggagcggcggttacggccaatcgtacactggtcaatccgcatatggccagaacctgggtggcaattattctgggagttctgttggagggcatgatgtgggtcagcattctgtggcttctaggcattcaacaattttaggtggttctcaagacgttgatgttggtgggtataggccttcggctgcgacccagtatgggggacagtataggtcttgttatggctctgctg

SEQ ID NO: 55331 - DNA, 370 bp, Glycine max
  Clone ID: LIB3109-001-Q1-K1-F12
ccacgcgtccgaccggttgtaaaaaaacaccggagggggctgaataaagagagtgagagatggatcagtgggtgtggaaggagttgcctttgcttacaatccttgtttcctttggagcgttcttatacttgcatgattattacacaacacagatatttactatcataaagttactgcatgataagtgcattcttctttcccatcgacacttatggatatatcagcaaacgtattgtgaccccacaagggatcatttctggttcagttcgagactaaatgatgggacaatcatatctgtcgttgaaggacatgctattcagtggatgcctaagcatgaaaaacttattgattatggagatgctggtatcat

SEQ ID NO: 55332 - DNA, 348 bp, Glycine max
  Clone ID: LIB3109-001-Q1-K1-G12
gtcgacgcacgcgtccgaccgcttgtacaagaacaccgaagggggtgttcgagtagaaaacgtacggtcaagggcgggctatgtgagactcaagccgaaaggtttattgctattaatatttggctctctttttcaatgtcaaattgcattattgcaataatcaaaggcactaaccacacttcatcacccccatatataccccttctcctttcacactaattaacacactcatcaaaaaacccttctttctttcaggttcattacttgatcagtgtcagaagggtagttacaaattgcaatggctaaacatgacgtttagggtggtgacttctcagccaatgactacca

SEQ ID NO: 55333 - DNA, 371 bp, Glycine max
  Clone ID: LIB3109-001-Q1-K1-H1
ggagatgggacttgtaataatgggcagttctatgaatgcctgaacatggcagctctgtggaaattgccaattgtgtttgtggtggagaataatttgtgggctattgggatgtcgcatctcagagcaacctcagatcctcagatatggaagaaagggccagcatttggaatgccaggggttcatgtagatgggatggatgttttgaaggtcagagaggtggcaaatgatgcagatggaagggctagaagaggtgagggaccaactctagtggaatgcgagacctatagatttagagggcattcattggctgatcctgatgagcttcgtgaccctgctgaaaatgaacactatgccggtagggaccccatcac

SEQ ID NO: 55334 - DNA, 467 bp, Glycine max
  unsure (1)..(467): unsure at all n locations
  Clone ID: LIB3109-001-Q1-K2-A2
cggaannncngggtcgacccacgcgtgcggccacgcgtncgnccacgcgtncggccacgcgtgccttcacgcctnccgccaaaaaacgacagaaggggaaaaaaggatgaaggtagaagagaaangtgggaagtggccagaaaagaagattacaaagaaatggggagatgggtgaattgtaagggcaatatattcccattcctggggatggtgatggctatgctagctcaaagtggaagcatggtggtaatcaaagttgccatgactgatggaataaacaaatatgtcatggttgtgtactctttggcactctccaccatcttgcttcttccctttgccttgtttcttcacaggtcagagcgtcctcctcttacattctctgcactttgcagtttcttcttgcttgcatttctttgcgagtcaggacagataatggcttatgttggcatagatctaagctcttctac

SEQ ID NO: 55335 - DNA, 231 bp, Glycine max
  unsure (1)..(231): unsure at all n locations
  Clone ID: LIB3109-001-Q1-K2-G1
cgaaattcccgggtggacccagccgtccgnccggttgtcaaaagacttcagaaggggcaccagatggggtatgggttaacgtagcaaaggatgggttcttttccttgaagccaccggatcggtatcatgcctcttacatggatattcaaatgcattaagtgtatggattacaggctacacagtgaatcgcgtagatggtagatagtgtgaacagacacttttctatgaatg

SEQ ID NO: 55336 - DNA, 246 bp, Glycine max
  Clone ID: LIB3109-001-Q1-K2-H9
ggccggaatcccgggtcgacccacgcgtcgcacgcgtcgacgtggaagcacaagggagatgggtagcacattatacagaggacatggtgaaatgcatttttttgacccaaagctaatgtgcctgttttaccgtaggctttttctatactaactacatcaagccacacacaaaagaaagataatatggagtatggcatgcactacatggccctctgtacttctcgcgagcaccgcatgaccaatggg

SEQ ID NO: 55337 - DNA, 479 bp, Glycine max
  unsure (1)..(479): unsure at all n locations
  Clone ID: LIB3109-001-Q1-K4-C2
ccagccgtcctccggttgcaaaaggccaccgaagggggattaaggattggaaccaccaaagcctttctttaaggcggcctttaaaaatttaatgtaaaggtgggtcaaatggtttaatctttcgaagccttgaaccctggaaacaaaatgaaagtttatgcacaaaatactttgttcctgaaacagatcaaagtgaagtgacaagccctgatgatcccctgcctgaatctccaaagtgtacagtccattcattntgcaagacactcactgcttctgacactagcactcatggaggtttctctgttcttcgaagacatgcagatgatcgtttgccaccactggatatgactcagcagcccccatggcaagaattagttgcaactgatctgcatgggaatgaatggcaatttagacatatttttcgagggcaaacccagcgccacttactgaccacttggttgagtggctttgtcagttcc

SEQ ID NO: 55338 - DNA, 375 bp, Glycine max
  Clone ID: LIB3109-001-Q1-K4-C7
taccggttcggaattcccgtgtcgacccacgcggtcctaccggttgcagaagaccaccgaaggggttacttaaccaggttaaagaagaacattaatggacttaccaagcaaccctatggcgaaagtgggttgtgtcaccggagacagctgggccctatgatcatgggtgggcctactctacttctaaagcgggtacacactgtatgcgaccgtacaagatatctagggttaaaatgagacgaaacattttgaggaaatggtaggagcatcaagtaatcttcattattttgtaaaggagcttcttgacatcgactacattatcgctgatataatagggtgttctctcgtaatacaccatgcttgttataacatcat

SEQ ID NO: 55339 - DNA, 408 bp, Glycine max
  Clone ID: LIB3109-001-Q1-K4-D1
gaattcccgggtcgaccgacgcgtccgacaacccgtccgaccggatgcaagaggcctccttaagggggccctaacaccaactaacgggcgggttccaaggcggagaaggcaggaatggccaccaacgaggagagggatatggagaacaagaagagtgaggaagaactgaagcatctcgggtttgtgaagattgcggcaatgaaagccttagtgtgtgtgtcgaatctctacggcttcgcatagcaaaactcgggacttttgagatctgctgttggaaccgtggaagacactgtaaccaccgttctgggtcccgtctaccacaaattcaacgctgttcccaaccacatcctcctttttgtcgacaacaaggtggatgaagctggtcacatattcgatgagcatgcacct

SEQ ID NO: 55340 - DNA, 449 bp, Glycine max
  unsure (1)..(449): unsure at all n locations
  Clone ID: LIB3109-001-Q1-K4-E7
ccacgcgtccgcccacgcgtccgaattcgagcggccgcttttttttttttttttttttttttttttttctgtgttgtctgtcatggaagttaatactactacaaccactgtaccttcagggccaccaactaggaaccattcttacacacaacaccgtttacattcagaaagacatagccataaccatagccatggccatttcccctccaaaaccattctcataatcatcgcattcgtcaccttagtcacggtcctatttatcattttcgtggtcctattcttgatccgtcgccaaaaatcctccagcaagaatggaaccttgcaagaaaaacacagaaaactttctgacacaagccgcaagcttattactttaacaacgttgaattctagcccaaatgtgaaaagtgggtgtcttcatggnggaaatttgagcaggaccccagcaccta

SEQ ID NO: 55341 - DNA, 266 bp, Glycine max
  Clone ID: LIB3109-001-Q1-K4-F8
acccacgcatccgtacacgcgtccgaagactaccgagtggattacagaaggggaagaaagagaagtaaaggagactgctttaccagtggggatgttgtttctgtcgtcggtttcggcagaattgggttcgactaccatagtcccgatacattccccctgacctctagattaaatgaaaaaaccgactataaacagtttgattgttaaaggtaccattatttcattagtaatgtaatcattattgtcacgggcttcgatcctattta

SEQ ID NO: 55342 - DNA, 389 bp, Glycine max
  Clone ID: LIB3109-002-F11-F2A
tttttgattaataagaagaaacaacctcaaaatccctttcttgtgtcgattagattactttcacaccagagtcgttcagagtacttcaccttctttatctctaagcgcaaaacctcgtactgtttttggcggctaaggatgtcggggaaaggagcgaaggggttgatcacaggcaaaacctaccccgccaacaaagacaaggacaagaagaaacccatctcgcgttcttgtcgtgccggccttaagttcccagttggtcgtatccaccgtgttttgaagtgaaggacaacctgtaatggtagaggtggggccacagctgttgtctactttgatgctatattggagtatttcactgctgaaggaatggagcatgcatggaatgatagcaa

SEQ ID NO: 55343 - DNA, 369 bp, Glycine max
  Clone ID: LIB3109-002-Q1-K1-B5
ccacgcgtccgcggacgcgagatcggacgcgactgtgcgagaggaccacagaacgttgcgcgttgggcgaatattaacgtttgaagtgtagctggaagctgcaggactggctcctaatataacacgtacagctatcagactccctaagtagatacggagaatctgaaagctctcaaggtcccagatggactacgagagagcgcatagatctagcactgcctaatagccgtgcatgctacgattgcgcagaccttgacgatcacctgcagctacggcatacaaaccgctgatcactcaccctactgatgctacttagaggccgcaatcgaactgacactgaccgatgccagcttaacccatggctagcat

SEQ ID NO: 55344 - DNA, 409 bp, Glycine max
  Clone ID: LIB3109-002-Q1-K1-D10
ccttaattcccgggtcgacccactcgtccgacctcttctaaaagactacataagggcgcttttgttttacgcgacttcaacacccatatccagttgggttatccaacactctacgtcaacacattgacaagccacttccgtcaccatcatatcacaatcatcattactctcactatcctatcacctccattctctctgttcatcatgatcatctctacaactctttcacacaactgttatcaccatagctcatagaaattatccttcatatcatactatatatataacatcgctttcagaagccaataacatgattcatgtcctggactatattcatctttgcacatagtattactacatcaacaatacattgttagaatacactacatgacatcctgcactacatata

SEQ ID NO: 55345 - DNA, 124 bp, Glycine max
  Clone ID: LIB3109-002-Q1-K1-D6
ccacgcgtccgatcggtcgttagatcactacacatcgtcgaccgttctacctaatcacatgattgggacctgtgactaagtacactatctagagtcataccatatcttctaccatacaacctct

SEQ ID NO: 55346 - DNA, 149 bp, Glycine max
  Clone ID: LIB3109-002-Q1-K1-E1
tccggaattcccggggcgacccacgcgtccgcccactcgtacgatccgatactaaggtgacttcttatgggagtgtctccgcattcgggagggctcttcactctgttgtggacatcctattctatttgcttttctaataaggcctttgc

SEQ ID NO: 55347 - DNA, 431 bp, Glycine max
  Clone ID: LIB3109-002-Q1-K2-E1
cgacccacgcgtccggacagccgtccgaacggatgcgaggacactgccgaagggggtggcgccgctcacataagggctctgcactctgtcttacggaaactattatattcgcttctctgctcaagcctcttcttctccagcactggcatctcataatgttggttatacacacatgctaccgacgagagaacttaaactagcttcagaatctttttcagatggaaagactagtactcaggaactgcacacggttactgaaaaccgtatgtcagccatatggaatcacatggctgatgctggaataaagtatattcctagctgcaacttctaaatttacgatcaaatactggacacaacaaccatgcacaggtcaattccatctagatataaccgtaacggtggtgacattggatttgatgaatacttctcaa

SEQ ID NO: 55348 - DNA, 322 bp, Glycine max
  Clone ID: LIB3109-002-Q1-K3-F1
gtccgtccggcgggaggacacctaagggggcccttgttgaagggaatgctttagcacacttaaggccgggcaaaacagctgtagcaaatataccatatggtggggccaaaggagggataggctgtgacccagcagaattaagtatatctgaattagacagacttactagagtttttacacacaaaattcatgattcgattggaactcacacagatgtgccagcacctgatatgggaacaggaccacagaccatggcatgcatactagatgagtattccaaattccacggctactctactgcagtagtgactggaaaacctat

SEQ ID NO: 55349 - DNA, 486 bp, Glycine max
  Clone ID: LIB3109-003-Q1-K1-H1
ctcgtctggaattcccgggtcgaccgacgcgtccgtccagatgaccacagactgcggatatgggaaacagtgagagataatgatgatagagatcagtgactcactcttaagggccgaagcagatccagatcaattgcttatgtaagatgtatcttctggaacttttcactctcctcctttgtatcaatcagaagatactttgaactccaacaacataatataatgctaagactcacacatcacaccacaacacatcacaacacagaaacacctacttcctctttccttatttgctcaaacacatagcaccataactagttctaatttaatatacacatcacaatacaacttttcctctgtatcttttattatcattttcatagtaattataatcgaagaagatttaagaagcgtatattcaacattattccaagagactttacctctctccatcgatatgtttaagtgttaaatgcattaaatggg

SEQ ID NO: 55350 - DNA, 376 bp, Glycine max
  Clone ID: LIB3109-005-Q1-K1-A12
ccacgcgtccgaagggataaaaatggagatgtcaaagatggtgggagtgattcctcaaatggggtgctgaatgagtcattggataaacctgttgtgactgctaacatcgagccgcagccaaatgtggtagcaacaggattttgtagatatgtacatgaaaagcatgcagctattcaccgagtcattgtcgataatgaagcttcctatggactgagaaagtggaccatctaggtcaggaaactctaactgtgaacagaagatacagactcgaaatagcactaactgacgcgtgctgtatggaagcagggctttcttctgaactctggatcatgggaaatactctcaagtgacttagactttagaatgaaaactgata

SEQ ID NO: 55351 - DNA, 409 bp, Glycine max
  Clone ID: LIB3109-005-Q1-K1-B5
ccacgcgtccgcggacgcgtgggcagacgcgtgagaaaacacctaaggggtaattaaggtacatgaaaaggaagatactggggaggttgatgttctaacaaaaagggacaactattatggggatgacaggctactggatgctcatggtcaactttggctgcaaatgcaccacattattggtatgagccgcgggttcttaccatacgtaagctatgtgaccatcattatgactgaaaaggcctatgatcaagtatattctcattgaggctttggggatgatcgtgataacttgcaaggattaaatgatgaatgtgaagtcaaaactgcggtctaactatggatggttgggtgagcagaatataatggtatgattaaaagatgaatctgaaatcattacgtaccattcata

SEQ ID NO: 55352 - DNA, 176 bp, Glycine max
  Clone ID: LIB3109-005-Q1-K1-C9
ttagggggcgtcaatagagagtagagagtaaggagaaaatgtgaagcgcgagtggctggtgaaggcagcgactgcgaaggaagggaagcatctttagctccaaattcaatggcggatacctcaagccgatcaagagacctcgacaagctccttcttcgccctggcaatctcgtcgg

SEQ ID NO: 55353 - DNA, 412 bp, Glycine max
  Clone ID: LIB3109-005-Q1-K1-F5
cgacgcgtgcgtacaggcgtccgaacaggtgagtattgacctcttataatgagatacgtactaacgagggtgaatgtgctgtgtcaccagtactacgacattcattatctagaagactcgcatttttgcaagcacattagctataacgtctattgcaacatttatatggattcactcaggttgaacttaattgacgctgcgcagtttcatacgcttctatagttgaaacaactaagttttaccaacaaggtttatccacgtgctgtgcatttcatattggagcattttctttgaacatattgtcttgccaaaccatgtgtgtaaaaccctttaacttattaaggcttgaagctttgtataaattgatttgatattcaaactatgaaactttgaagactttatggattatttg

SEQ ID NO: 55354 - DNA, 447 bp, Glycine max
  Clone ID: LIB3109-009-Q1-K1-E2
ccacgcgtccgcccacgcgtccggacgacagaagggggcaatcagcttccaaaatgactcaagcccagattcaaccagttaaacttggaacccaaggctttgaggtactattaactacattacttgctcttattttgataattgatacaattaatctcattctaggtttcaaaattgggattcggatgtatgggccttactggagcgtacaatgaccctctccaagaacaggatggcatatctgttatcaagtatgcgttcagtaagggaatcacattttttgatactgcggatgtttatggagccaatgctaatgaacttttggttggaaaggctttgaagcagctgcccagagaaaagattcagatagccacaaaatttggtattgcttcacgaggttttcctgatatgaagatcaagggttcgcctgaatatgtgcgatcatgc

SEQ ID NO: 55355 - DNA, 323 bp, Glycine max
  Clone ID: LIB3109-009-Q1-K1-G2
ggcgagggaggattgcttttcaccatgatgagacaagcaccgtattgtgtggcgcctgtactataatggcccttacagagcttctatatgaagaactggcagatgctggttgaagagctatacgtggctcataaactacatttagaaccggaggcgcctatccgggacttacgaactcgtatttcatgtaccgacattgagtcgcttatgccgatagttaccagtacggactacatccacgcctgtcatctgtgctcgcagctgactctgaaagctatgctttccgttcaatgccataacctggatatccggatgattgccct

SEQ ID NO: 55356 - DNA, 363 bp, Glycine max
  Clone ID: LIB3109-010-Q1-K1-C11
ccacgcgtccgaattcgagcggccgctttttttttttttttttttttttttttttccaagaaatagaaattttactaatgttaaaattacataaatatggcaaaagaaaaggattgtttttgtatcactgcataatctcgatggctagacttctaaacaaacaccgcctattataaactacattccttatggtacatagtacaacccatgattccagaacaaatgatgagataaaaaagcccagaaacaaggagcagtctggtttccacatcaaccccccattcacctttgttcctcatcatggggtcagaacaaacaatttggatctctgatggctctcaaccacctgcagttgccaattga

SEQ ID NO: 55357 - DNA, 330 bp, Glycine max
  unsure (1)..(330): unsure at all n locations
  Clone ID: LIB3109-010-Q1-K1-D1
cagttgtaaccctaatcagaagaagcgcagcttcaagcgagtgacagccaccagccatgggtcgtatgcacagccgcggtaagggtatatcctcttctgctttgccctacaaaaggacacctnctagctggctcaagatctcttcgcaagatgtcgaagaaaatatctgcaagtttgcgaagaaaggtttgaccccgtctcagattggtgtcattctcagagattctcacggtattgctcaggtcaatagcgtcactggcagcaaaatccttcgcatcctcaaagctcacggacttgcgcctgaaatccagaggatctgtaccatttgat

SEQ ID NO: 55358 - DNA, 64 bp, Glycine max
  unsure (1)..(64): unsure at all n locations
  Clone ID: LIB3109-010-Q1-K1-G12
gagacctcaagtcaggcggggctacccgctgagtgtgagcnaaaaaaaagaaaaaaaaataaaa

SEQ ID NO: 55359 - DNA, 357 bp, Glycine max
  unsure (1)..(357): unsure at all n locations
  Clone ID: LIB3109-010-Q1-K1-G7
ccacgcgtncggattagaggtgggccatgccttcggacggttggagaagactacggaggggggtaacagaagaggaaggcagaaaggaaagactntaccgagtccttacgcgttgattgtgtttgcatccgatggaagagaagatgagtgagaatttgatggagaaagtgagcgcactgtaagagcgcctgaaaatcgtaggcgtggaagtggcgagaaagatgagcgaggggatgagctccatgagtttcaagctcaaggagttcttccagcctggggccaatcaggccgtcaagcttgtagaggacgctacttccgaggccgtgaacgagcccgaatgggccctcaatctcgatc

SEQ ID NO: 55360 - DNA, 412 bp, Glycine max
  Clone ID: LIB3109-011-Q1-K1-A1
cattgaaagatgtgttaaggaatcccaacgagaggtcgacctaggagtttatttgaatcggttagtaatatttattatatccctgtaaacaatgtttgtgttattgatacctaattattgtcgaattcagggcccgttggcaactggttgttttgtgtcctacaaacaatgttgtcgtgtggttttgttcgttgtgtaagaagcctgatgttcatatcaaacctgcaattaataagttaagttttatattataagtcatttaatgtattttaaatatggatacatgaatagttttgtcctcatttatacgtccaaatctttctattcagtgcgttgaagacattaaagactacttctaacggtaagattgatcaacctacaccttagtggattgaagtaatgggtagtcata

SEQ ID NO: 55361 - DNA, 439 bp, Glycine max
  Clone ID: LIB3109-011-Q1-K1-C12
ccacgcgtccgaattcgagcggccgcttttttttttttttttttttttttttttttgtaaaaacaagactagcgatattagaatataattctcacaagacgagtaaaaaatcataaattaaaagatatgttcaaagcattatcaatctacagaaacccacccccttaacaataatcctaagttgagaaaagaaaagtcaagagagttgcaaataaatagaaaaggaaaaaaaaggggaaaaaacattaaaactgatacattgcaagctggaatgatacacatgcccacaatagcatcgcctgctgctcagcttccacttggaaagattcagttataattcaagtaaacaacacatccaccgaagcctaacttcgaaaatataagtatcaatatgattcatggctctgatttggacaaggagatgagcttgcacattact

SEQ ID NO: 55362 - DNA, 268 bp, Glycine max
  Clone ID: LIB3109-011-Q1-K1-E10
accggtcctgaattcccgtctgcgacccacgcgtccgaattcgagcggccgcttttttttttttttttttttttttatttttaactgaagaccttcaggtttgttttttaaacatcgatggttttctcacaatcacaaatctagtctccaaatttggttatttcataggtgtgtactgttaactttcctgtttctttcatattcaatctcaattctagtttatctttaatctcttactcgtatacatacttttatgtatacttcttat

SEQ ID NO: 55363 - DNA, 248 bp, Glycine max
  Clone ID: LIB3109-012-Q1-K1-C4
cggattcccggtcgacccacgcgtccgaagcttcagaatccaccgaagggtcatcataaggctaataatcatgtttttcagggtggtgctctgtgctttaattctttcttcttctttcgattgtaccattttctatattgctttctgttcttctctatttttggcttttatctttcttcccctaactatggatgcatgatcctttagttcttccggaacccttaaaacacgatcactggaccctcttt

SEQ ID NO: 55364 - DNA, 160 bp, Glycine max
  Clone ID: LIB3109-012-Q1-K1-F12
cccgcctacttgcgacccccaggaccctcctcagccggtcaggcctcgattccgtcgacccacgcgtccgatgggaaatgtctaaaaactagacgcgttacttatcaccagtcaaatcccaaaactatccaacctattacaatcaaactcacggcctcaa

SEQ ID NO: 55365 - DNA, 141 bp, Glycine max
  Clone ID: LIB3109-012-Q1-K1-G7
ccggttcggaattcccggggcgacccacgcgtccgctcacacgttcgaacaccacagtattgacaccataccgcggatatgatacagggaccgggtccaatactctggctgcgatcctcatccttacaccgacgctgattt

SEQ ID NO: 55366 - DNA, 432 bp, Glycine max
  Clone ID: LIB3109-013-Q1-K1-F10
ggatgtaaggaagtagtcacatctgaagagagacaagagcgggcttctttcatagaagaaatcagtagaacagcaccaattaagtatcttcacaagtatcttgcatccaagcaaattgtatcagggaattaccaagatttcaaaagaatgattaccagtctgtggtttgacctttatggccgtggtggcacttctggttcctcttctgcttttgaacatgtttttgttggagaaaccaaacaatgtggtgaagtttctggctttcataactggctgcagttttaccttgaagagcaaaggggagaggtgattatcaaggatatatttttccccgtcgacggggagaaactcctgactcttgagctcagcttctgactattcagtttgaatggaatggtgtcctaaaatctgtatccagcacttttggttgga

SEQ ID NO: 55367 - DNA, 84 bp, Glycine max
  Clone ID: LIB3109-013-Q1-K1-F9
cgacgcgtccgcccacgcgtccgcccacgcgtccgcccacgcgtccgcccacgcgtccgcccacgcgtccgccgaggcgtccgt

SEQ ID NO: 55368 - DNA, 361 bp, Glycine max
  Clone ID: LIB3109-013-Q1-K1-H11
attaccgggtcgaccgacgcgtccgaccgcgagaagacgacagacgggggcagcatttagtagcaaagtcttgcaggccacaatgcaagactttgcagaatctcatcaactttcacttatgtgttcttcttattcatctaatgttgatgtctttgacactggcaagtacaccgccaagctgctaagggttgaatctgaatcagaatcatatacacacaacaacaattttccaccaccaccaaagtctctcttgattgccactcctcttgaaggtggagatttccctcttctgctgtttctgcatggctatcttctttacaattcattatactcccaactaatacaacatgttgcttctcat

SEQ ID NO: 55369 - DNA, 302 bp, Glycine max
  Clone ID: LIB3109-013-Q1-K1-H6
ccacgcgtccgcccacacatgcgtaaaggtgcgaaaagaccacacaaggggagaatacaatgaaacgccgtggtatcttcaaaatgaacagggcaaatacgtgaaaatagattgagtgctatacagggcctgactttctagaaccccctttcaatccacggggagggaccaaccctatgcataaactccagtcacacatacacggttacacccttaaattaacgatcgacggtatggcaaatccctataccatttaacactcaaagagctcaaccgaaacgattaaggtcaaaaaaaattca

SEQ ID NO: 55370 - DNA, 310 bp, Glycine max
  Clone ID: LIB3109-015-Q1-K1-A6
ggaagcagtgtagtggtaactcttgtcaatctttccgcgtttgacagtgccgacgcctccagataaacaaccttaactttcccacaacaccacccatcattctttttctctctctagatttcatttagttgttgctgtcttcttctgtttgtgtgtgccaacacagagcgaaaaacatggctctgaaccaatcaaaagccgtgttgttgagggtgagtttggtggtggtggcgctcttcatagcagggtacatagtgggtccccctctctactggcatttcgttgaaggtttggctgcggtcaaccactc

SEQ ID NO: 55371 - DNA, 170 bp, Glycine max; identical to SEQ ID NO: 21709
  Clone ID: LIB3109-015-Q1-K1-B2

SEQ ID NO: 55372 - DNA, 59 bp, Glycine max
  Clone ID: LIB3109-015-Q1-K1-D6
ggacgccccctgttgcggcgcattattcaccgcggttgttgtggttactcccagcatga

SEQ ID NO: 55373 - DNA, 357 bp, Glycine max
  Clone ID: LIB3109-015-Q1-K1-D7
cgaccggccggaattcgggtcgacccacgcgtctcgctggagagacacgagggggagcgagagaagggggaacgaagaactcagctcagctgaacagagctcttcgactacattatgcgataacttattttctgagaggtcttttttctctctcttcttcacggattcaccatttccatatgattttgtccaaactaaatcgtgatttttacaggaaaatccggagattgactgagcgtgtataggagccggtatcatagggcgcttggctatgatgttttattggaaggactagtagtattgctgtagcacctcacattgtattgtgacaagagtctgagggactattacgatcga

SEQ ID NO: 55374 - DNA, 285 bp, Glycine max
  Clone ID: LIB3109-015-Q1-K1-G4
ccacgcgtccgcccacgcgtgctgacacccgagaggacgacttaaggggacggctgaaatctaataatcatcgacattcgtcagattatcaacgctgtcacggttgcatccttgaatttgatcatacacgattataagaagatgtacaagcagatcactgagcttaaactactattcaaaaacatgccctcatgtggaatgcattgctgacaaagcagtgaatgacgccactgctagagacaaaactgttccacctgcactgctgcgaatgcacttacatgactg

SEQ ID NO: 55375 - DNA, 373 bp, Glycine max
  Clone ID: LIB3109-016-Q1-K1-E7
ccacgcgtccgatgaatcaaaatcaaatgaaactcctgcattcggtagctcaaactctcagataactcaagcagtgtttgagaaggagaaaggagagttccaggtgaaggttgttaagcagatcttatgggtaaatggaatgaggtatgaacttcaggagatatatggtattggaaattcagtggagagtgatgtggatgggaatgacccgggaaaagagtgtgttatatgcttgtcagagcctcgggacacaactgtccttccatgtcgccacatgtgtatgtgtagcggttgtgcgaaggttttgaggttccagacaaatagatgtccaatctgcagacaaccagtcgagaggcttttggagatcaaagtt

SEQ ID NO: 55376 - DNA, 346 bp, Glycine max
  Clone ID: LIB3109-016-Q1-K1-G5
ccacgcgtccgcccacgcgtccgaattcgagcggccgctttttttattgtgattttttttatttttttggggattccgatattcggacgcatgaacttgttatgaaatcacattgatagcctctactcgggtcctagctcggctaatagctagatttgcctcaattggttggctcttgcctttcgccttattcaaattagcttctgctatttcaagagtttgctgcgctttttgcggatcaatggcactaccctttttcgcatcatttacttaaaccggtgatctcattattgctgattctaacaaaaaccgccattataggcatcgttaacccatgggctttaaa

SEQ ID NO: 55377 - DNA, 451 bp, Glycine max
  Clone ID: LIB3109-016-Q1-K2-D8
ccacgcgtccgaattcgagctttcgcttgatggtggcgtcttttatttgtagggttgacttgaggacatagatgtgcttccaggattcaaatcctaagcatataccaaacatttggtacatcattagagattgcctttgctttcaagaaacagtgatacaattaatacgatctgataaaaactaacctaccagaaagtttattacatcttatactaaacaactatacctgattagggttacgcatggacatgctctaaccataatcatttaccccattttgataactccctaagtttactatctaatcttagtgcgaacaatttttgattgacgttttatactaggactttgcattctcaagaaccatggtacaacactggattgtggcttaccaaacgtcaagggaaattcatcatcatgttcaaagaaacctcgatctttggatatgct

SEQ ID NO: 55378 - DNA, 470 bp, Glycine max
  Clone ID: LIB3109-016-Q1-K2-E7
taccggtcttgagttaccgggccgacccacgcgtccgatgaatcaatttcaaatgaaactcctgcattttgtagctcaggctctcagataactcaaggggtgtttgagaaggagaaaggggagttccaggtgaaggttgttaagcagatcttatgggtaaatggaatgaggtatgaacttcatgagatatatggtattggaaattcagtggagagtgatgtggatgggaatgacccgggaaaagagtgtgttatatgcttgtcagagcctcgggacacaactgtccttccatgtcgccacatgtgtatgtgtagcggttgtgcgaaggttttgaggttccagacaaatagatgtccaatctgcagacaaccagtcgagaggcttttggagatcaaagttggacccgagcttgaggagtgaagatacattggtagtgacacatgcttcctgtacaatccaactggtatagc

SEQ ID NO: 55379 - DNA, 375 bp, Glycine max
  unsure (1)..(375): unsure at all n locations
  Clone ID: LIB3109-016-Q1-K2-G5
gggccgacccacgcgtccggccaggcgattgaangcgagcggacgcagttttcttcgtgtgggattacgagtttttggtggttccgatattgggacgcatcaacttgttatgaaatcacattgatagcctatactcgtgtcctagctcgtctaagagctagatttgcctcaattgtttggctcttgccttccggcttattcaaattagcttctggtatttcaagagtttgctgggcttcttgtggatcaatggcactaccctttttcgcatcatttactaaaacagtgatctcattattggttattctagcaaaaccggccatcagagccatgggtaaccattgggctttaagaagacgtattcttaaaatacct

SEQ ID NO: 55380 - DNA, 486 bp, Glycine max
  unsure (1)..(486): unsure at all n locations
  Clone ID: LIB3109-016-Q1-K3-A3
ccactcgttcggcgtgaagaccaccgaaggggatggtcaggagtaagtaacttgttttctcttacttgacttgatcgatcgttccttccctctcttggggttatggcaaggattaccgcgtatccttggccgttccaggaacgagagggagaagtttcattggggaaggaaaaacccctgttttgaaccaaagccgttaattgaacctttgccccctttctattggtcgttccacttatctcatcggttttttcagtgtgtgcccgggttgcgttctgctgtggtcctttcactcacagggtgtaaccgngttaaccactatgaatcatatcttagtggcatggaaagaaagaaagaaagattaacctaaaaaccctgtgcaggctttcccagaaaagccaagtgagaaaaccaaaccctttattaccacttactacttacttcatgtaactgactatagccaccactatcactatttaggatttt

SEQ ID NO: 55381 - DNA, 253 bp, Glycine max
  Clone ID: LIB3109-016-Q1-K3-E2
tgctcgacccagcgtccggactccagcaggcgtccaaaggaatgcagaaagccgatcaggcacttgtctctgcatgttcttcggctggtctggcatccataatacactgtgatgacttcgggaacttgttggaaaatcttcaaagtaatgtcgatcacgatgtccttcgagcacgatgattgggcccactaactttcgtggcgtagtacatgcataatctgcaaagtgctgcactagacactgtctcttctaa

SEQ ID NO: 55382 - DNA, 461 bp, Glycine max
  Clone ID: LIB3109-016-Q1-K3-E7
ccactcgtccgatgaatcaaaatcaaatgaaactcctgcatccggtagctcaaactctcagataactcaagcagtgtttgagaaggagaaaggagagttccaggtgaaggttgttaagcagatcttatgggtaaatggaatgaggtatgaacttcaggagatatatggtattggaaattcagtggagagtgatgtggatgggaatgacccgggaaaagagtgcgttatatgcttgtcagagcctcgggacacaactgtccttccatgtcgccacatgtgtatgtgtagcggttgtgcgaaggttttgaggttccagacaaatagatgtccaatctgcagacaaccagtcgagaggcttttggagatcaaagttggacccgatcttgaggagtgaagattcattgttagtgacacaagctttctgttcaatccatactgtatagctaatactattcacttac

SEQ ID NO: 55383 - DNA, 335 bp, Glycine max
  Clone ID: LIB3109-016-Q1-K3-E8
ccactcgtccgatgaatcaaaatcaaatttaactcctgcatttgttatctcaaactctcagataactcaagcggtgtttgagaaggagaaaggagagttccaggtgaaggttgttaatcagatcttatgggtaaatggaatgaggtatgaacttcaggagatatatggtattggaaattcagtggtgagtgatgtggatgggtatgaccctggaatagagtgtgttatatgcttgtcagatcctttgtactcatctgtccttccatgtcgccacatgtgtatgtgtatcgtttgtgcgaaggttttgaggttccatgacttatatatgttcaatc

SEQ ID NO: 55384 - DNA, 359 bp, Glycine max
  Clone ID: LIB3109-016-Q1-K3-F8
ccactcgttcgtccacgcgtccgtagcgagaagacgacatattgggggagtggaagtagtatctagtacgtcgtatatgtggttgatcttttgctggttgactgttttgttccttccaattgtcagatctgaatcaccggactcactcttcacactcactcacactgaatggcttctgaaggcgaccatctccaccaccaccaccaccatcaagatcacgatcatcatcatcatgatcatgatcaccatcatcatcacgatggagagggagagaccaactcatgggtaggtaaggatgggaaggtgtaccatatccacgatggtctggcgccgcattctcacgaacccatttactcccc

SEQ ID NO: 55385 - DNA, 416 bp, Glycine max
  Clone ID: LIB3109-016-Q1-K3-G5
ccacgcgtccgcccacgcgtccgaattcgagcggccgctttttttttttttttttttttgggttttttggttattccgatattcggacgcatcaacttgttatgaaatcacattgatagcctctactcgtgtcctagctcgtctaagagctagatttgcctcaattgttcgcctcttgccttccgccttattcaaattagcttctgctatttcaagagtttgctgtgcttcttgtggatcaatgtcactacccttttccgcatcattgactaaaacagtgatctcattattggttattctagcaaaaccggccatcagagccatcgttaaccattggtctttaagaagacgtattctcaaaatacctatatctacggctgtggcaataggcgcatgatttggtaatactccaattt

SEQ ID NO: 55386 - DNA, 171 bp, Glycine max
  Clone ID: LIB3109-016-Q1-K3-G6
ccactcgttcgttctagaagtcgacttttagagtatgatggtataaatattcggaccggggcttatatgtagttatggctttaatgtagcctgatgaggttaaaatctgatgttcggatctctaattgagatggttacattattttctagagcgactatggattatctaac

SEQ ID NO: 55387 - DNA, 117 bp, Glycine max
  Clone ID: LIB3109-017-Q1-K1-A2
cacatggctcttgtcggccagcgcggcgcgcgaggtcttctcgttgccctcgacctgctcggcggcgggcgggtcgaggtaggcgcggaaggtcgagacctcgatcacctcgtgctc

SEQ ID NO: 55388 - DNA, 362 bp, Glycine max
  Clone ID: LIB3109-017-Q1-K1-D12
ccacgcgtccgcgcgagaagacgacagcagggggagaaaaacgagccaattcatcattatctctctgctctgcttcttcttgttcaaatcttaggagctgaggagaatcaatcgagagaaatatgtctggtatcgctcgtggacgccttgctgaggaacgaaagtcatggcgcaaaaaccatccacacggtttcgttgccaagcccgagactctacctgatggcaccgtaaatttgatggtctggcattgcactattcctggcaagaccgggactgattgtgacggtggatatttcccactgacaatgcacttcagtgaagattaccctagcaagccttcccagggcaaatcccctcaaggt

SEQ ID NO: 55389 - DNA, 388 bp, Glycine max
  unsure (1)..(388): unsure at all n locations
  Clone ID: LIB3109-017-Q1-K1-H8
ccacgcgtccgnccacgcgtncgaattcgagcgggcgcttttttttttgtggagagattcgtgtttgtggtaacaagcaatttctaaattcagatgaattgatttctcaatccatagtagagatttgaagcttacaatccccaggggtagaaaaggcccatggaaatttatatacagaatttggggaggcatacttaatcaagagaatacccacttttgtgggaagctaagcgacattgactactattcagaagaatctacccggcaacaatcttaaccatccaaatcagagatgaagaatcttcagtccgccaaaaacccattccaggcactttcttccagttttaatttgctactcaaatgcaatggccccattttagaggaattc

SEQ ID NO: 55390 - DNA, 117 bp, Glycine max
  Clone ID: LIB3109-017-Q1-K2-A6
cacatggctcttgtcggccagcgcggcgcgcgaggtcttctcgttgccctcgacctgctcggcggcggccgggtcgaggtaagcgcggaaggtcgagacctccatcacctcgtgctc

SEQ ID NO: 55391 - DNA, 216 bp, Glycine max
  unsure (1)..(216): unsure at all n locations
  Clone ID: LIB3109-017-Q1-K2-H3
cggaanaaccgggtcgacccacgcgtacgtacctacatgcgaacacactacataaggaaaaatacgacactaaaaaaaaaacatacaatgggcggaaattcatactgtgttgactttcccataataacttcactttcaaaaaacctggtggtttttaacttccacaacatgaacatgatctaaacttcttctacagaagatgatcacaatcatatt

SEQ ID NO: 55392 - DNA, 431 bp, Glycine max
  Clone ID: LIB3109-018-Q1-K1-B7
ccagcgtcgccagctcgacggagacacgagggggggtagaagaaacaagatggaaaccgggctcggaaaatccaaaggccaattttgaaatacctaacgtgtgttggcgttctgggttgacccaccctccttttcgtttcagcataatttctagggtttctatcttcgctcattcgccaatttacaattgaaatcgaattaccaatcttctcttgtcggagcttttacgttcgatcgacattccctcttgtttatggaggtataggtagatgatgggaaaacgtgtctcaagagagcactttcaacccaggccgtgttctgggaagacagagaatttaaaaaacaccgtgtttattgatgtaaatgatcaagttgatgatgtggatgtggtgatcatagattacaaagagttcatgtctaaatcacatgga

SEQ ID NO: 55393 - DNA, 428 bp, Glycine max
  Clone ID: LIB3109-018-Q1-K1-F2
ccacgcgtccgaattcgagcggccgctttttttttttttctttttattttttttttttatgagcaaccacaagcgaactgtaaattcacaattcatagtaaatgaaagacacttttagatttttatttatttatttggtatcatcctaattggggccataacatttggtcccaagtatctcgaacaagatttagtcgcacttaaaacatttcactcctccttaagagtgtattatgtgggattgaacccagatccttttccacagattgtagtcacgcagagtcaaaccatacgtaatgttaattaaataaataaaatatcttcatctataagaaaagctcctaaattacaaaagatcaaaataacttcaaattacataaataactcctattaattagcatcaattcttttctccccttctttttttg

SEQ ID NO: 55394 - DNA, 463 bp, Glycine max
  unsure (1)..(463): unsure at all n locations
  Clone ID: LIB3109-018-Q1-K1-F7
ccacgcctccggaccggttgcaagaagccaccggaagggtgggccaaatatgtactacaacccctttgggagtcgggtttgttaattttttccccctatggatgcctncaaacatgataactcttatggggattatgttcctactagtgtctgcattgcttggttatatatactccccacaattggacacacctncttcaagatgggttcattttgctcatggactacttcntgttttataccaaacatttgatgctgttgacgggaagcaagctagacgaacaaattccttaagcccattgggggagctctttgatcatgggtgtgacgcacttgcttgcacatttgaagcattggcttttgggagcacagccatgtgtggatgaaatactttctggtggtggttaatatctgcaattacattttatggtgcaacctgtgagcactatttcaacaatacact

SEQ ID NO: 55395 - DNA, 335 bp, Glycine max
  Clone ID: LIB3109-018-Q1-K1-G5
ccacgcgtgcggccacgcgtccacacacgcgtgcatacacgtgttagacgactgcaaaaagtcatcggggaagggatagattagaaaaggatcgagttatactgtgctacaattctgattgattatctctgacatagcctcgacaaccttttatgttcaaatgaacactcgcttatcaggcccgtactaccgaggataaatgctcacgttttaccctttctctggaatcgcccgacatcctttgactttagatcacttatggtaaatgcgattcaacttcagttgaacacatgtataggcaaccatctataattgaatcttacacatttcttaca

SEQ ID NO: 55396 - DNA, 336 bp, Glycine max
  Clone ID: LIB3109-018-Q1-K1-H8
ccaagcgttcgacgaagacgacagaaggggacactaaacaagttaaaagaagagcatcactgaactaacaaagcaaccctatgtcgaaggtggtttgtgtcaccggagccagcggcgccatcggatcatgggtggtcctactcctactccagcgtggttacaccgtccatgccaccgtgcaagatatcaaggatgaaaatgagacgaagcatttgtaggaaatggaaggagcagagagtcatctccatttgtttgaaatggatcttcttgacatcgactacattgccggtgccataaagggttgttccggcgtaatccaccttgcatgttctaaca

SEQ ID NO: 55397 - DNA, 469 bp, Glycine max
  unsure (1)..(469): unsure at all n locations
  Clone ID: LIB3109-019-Q1-K1-A1
aattcccgggtcgacccacgcgtgcgagacgacagaaggggaagtttttgatggaaaagaacaccactaatgctcttcatggacaagtcactattgggaccctgattttgcaggactgtgctgttggattgctctttgcattgcttccagttctgggtggcacctcangtgtttttcaaggagtgttatcaatgaccaagctgttggtgacattgattgcattcctctctgttctgtcaatattgtctcgcacttgccttccatggttgcttaaactgatgataagcctctcatcacagacaaatgaactctatcaattggcgtcagttgcattctgcttgctagtagcctggtgtagcgataagctgggactaagtctagaactaggttcctttgctgctggagtgatgaatgcaaccactgatctggctcaacatacactagagcaaattgaacctattcgcaatct

SEQ ID NO: 55398 - DNA, 345 bp, Glycine max
  Clone ID: LIB3109-019-Q1-K1-H8
ccacgcgtccggcttggaaaagaccaccgaaggggggagagtgatggatcttttgtgtatcaataatgagggggtatcatatgaatgtactgtacccaacaattatgtccactggggtggtgcataaagcattgatattagatattactgagactacaatgatctaatggcatatcctcgcaattgcatattataactacagatatgatgctacagatgggtacttttttccaccacctgtcattagagattcatatactgtatatcattatcatgatggcaactcatacgtgggactctttcctaatgatgatgatcatcggatgtcttacctattggctttga

SEQ ID NO: 55399 - DNA, 467 bp, Glycine max
  Clone ID: LIB3109-020-Q1-K1-C3
ccacgcgtccgaattcgagcggccgcttttttttttttttttttttttttttttttgtgattgaatacaaacctgtaacatgaaggctacgactattacagtaagaaatagtgctgcagtctcaaaaagttgaaagtttaagtccataggttgccctattatccagccaataacaacacaaaatggtatctgcataaggaaaaggaaaacgtgaaggaaatgaaagactttttgttattaggaggaacttataaatgaaaaaagcagattactgtccatgaatgctgcatcaagccatcaactactacataaaggaagaagttgaaaaaattcagtggtttcatcacttagtttcaatcgtactattatgttatatatcctactaaattttgctttttcttatttagacaacatgccaatcttttagcatggtgaactccatcagaaaaatgcatcactaaagttct

SEQ ID NO: 55400 - DNA, 465 bp, Glycine max
  Clone ID: LIB3109-020-Q1-K1-D12
ccacgcgtccgaattcgagcggccgctttttttttttttttttttttttttttttgtaatgttgatgatttggggcttgcattttgattgttgttagttagggattgcattagctgctatttctttatgcagttgttgtgatttgtggaagtagactagacactaggaacatgaaatttgatgtttgattttgttaaaactgatgttaattgaatgtgtttagaatgtttgaatttgaacctcggaagaagagtaataggcgtttgtttagaatgtttgaatttgaacctagggattgcgttagctgttatttctttatgcagcagttgtgatttgtggaagtagactagacactaggaagatgcaatttgatgtttgattttgttaaaactgatgttaattgaatgtgtttagaatgtttgaatttgaacctagaagagtaataggcatttgtttagtttgttt

SEQ ID NO: 55401 - DNA, 574 bp, Glycine max
  unsure (1)..(574): unsure at all n locations
  Clone ID: LIB3109-020-Q1-K1-G11
tgcaccgtactcggtccggaannttcccgggtcgactccacgtcgtctcgtaccggctgtcgagaagaccgatcagaagggggacgtgtctaaaagcttaaatanntcatcaaagtacctcaaggatgtagcatggcttggtcatggttgggcgattctnnngaatttgatccatcatcnnnttttcagtnnagtctcttacccaacaggnncaagtcacttgagccttaaaccctactanntgcaaaaacccatgtccctaatnngtggagttcaattggttgccataggggcagtaaagggatgcctnactgctagggaccaaatactgtnntccagcagctnaattctgcgaatgccacttcnncatgattgtttcgttcgggnggtgtgatgncctctgtgccctgctaaattcaaaagggaaacaaccaaagcagaaaaagacgggccaccaaatgtttctttgcatgcattctatgtcattgatgcagcaaagaaagcactagaagcttcatgccctggtgtggtctcttgtgctgacatccttgctctggcagcaagggacgcagtt

SEQ ID NO: 55402 - DNA, 384 bp, Glycine max
  Clone ID: LIB3109-020-Q1-K1-G8
ccacgcgtcgccacgcgtcgtacgctgcagaagacacgaggggacggcacagagaatatcaggttctagatctatccgacgtcgccagatccaccaaccgttatggctgcttcagcgggatgaaacggctcgttttcggttcttggagccgcactgcctcgtcttctctgatgggagctgctatggccacaaagaggggtgggcgtggcttcatgggtgtgatgagacctgactgggagaagctattgtcctgtgcatggtggattttgggattatggcttatatgctgtattatagaccggattaatcaaggccaatttattacctttgaggtatgcacatcttctctggcttgctgtgctggctggcttctgtgcatggtat

SEQ ID NO: 55403 - DNA, 505 bp, Glycine max
  unsure (1)..(505): unsure at all n locations
  Clone ID: LIB3109-021-Q1-K1-C1
tccggaanttcctcgggtcgactccacgccgtctcgtaccggctgcagagcagacgaccagaagggcgtagcacgaattgatacgcgaaatacccaagaaacatagtgtcagtcacncttcgttctctcttcttgtccctcgatatctgttaggttcgcattctctgtcatatcatacccattgatgccgtcgatctcccatatttctcactgtgaatagtattgaatgaaacgaatatgatgaagtaactggccaggagccagaagcaatgggcttctgtggcatgagaaactgctagatcagttgctttgtcccaagaagatgcatgaaagaagctcccaaagttggcgttgtttgccgaatcttcaatgtgccaacatcacaaatcagtctgataccctggacctgccagtacaagcatgatgtaatcttgatcattaatacagcttaatggttaccccattattaacagggaannatcgtcaatttctaaatctatcatca

SEQ ID NO: 55404 - DNA, 410 bp, Glycine max
  Clone ID: LIB3109-021-Q1-K2-E11
ggtccgtattcccgttcgacccacgcgtccgctccacgcgttctacatgcgagatgacgaccgagggggaggctgcattgtgtcaaacctgggggaggtaaaaagacccagtttattgtaatggtcaatgtgtgttgctcggagtaccatatccacaagaggtttgacctcatatgctcttctaatggtcaatctacagataaaccaagggaacaaattgatgagactaccactctcaaagaccttgatcttaactttgactatcgccttaaatagtcttgtcttcaagagcttatatggcatcttgttagacattgttagttcctggatgcaaagggattcatggattacagtcttttaattgtcctgcatttcgtgcattaatagcttcagagattaattgaaaagtt

SEQ ID NO: 55405 - DNA, 462 bp, Glycine max
  Clone ID: LIB3109-022-Q1-K1-C8
ccacgcgtccgaattcgagcggccgcttttttttttttttttttttttttttccggcaaaatagatgagcatgccatttaaaatatcaagacagaataattcctacgaacaaagtgtaaaacaatgagtattctcatctaatgaaataaagcaaatgacataatgcgtaaagcaacgttcatatcacacgggcaaaacaattagtatcccatccaacaaaaatcataaaagttaaaattcaataaaaaagcatcaaataagttttaaacagataaatggatgaaagcaactacacatttagtccacttcctcaatcttggggccagcaccacttccaccagaaggagcagcataatcatcctcggctgccccagcaccagcaccacccatgtcaggaccagcaccaccttggtacatcttggcaatgataggattgcagatgctttccaattccttcatttt

SEQ ID NO: 55406 - DNA, 226 bp, Glycine max
  Clone ID: LIB3109-022-Q1-K1-H11
ctcagaatcctatgaaataacgtatatattgtgaaagcattgctgaaattattggaccaattttgacatactagctattacaaagacccgctatatcacacaacttcatacctcttgcaacacatcgcgctttccaacagtttggctgtatgtacataccaatagataacacgttcttctgaaacattatgatgactgattatataaatatactctcgctgtttct

SEQ ID NO: 55407 - DNA, 435 bp, Glycine max
  Clone ID: LIB3109-027-Q1-K1-E1
cggaattcccgggtcgacccacgcgtccgcccacgcgtccgcccacgcgtccgcccacgcgtccgtccacgcgtccgacagaaggggagggaaaagagggtgcaaggtgcatcttctttttgttgttctctcaaactttaataatctcataaattagcagaacgaagaggaacaaaaacaagaagaagaattggattcgaaaatcgtagcgtagcgttggtgcgattgaacgatacgatgggaagaggaaaattcaagagcaagcccactggtcgccgccagttctccaccccggaagatatgcttgctggaacctctaaccgtcctcgaacttttagacagaaagaagctgagcatgaagaggaagaacccgaagaagtatctggagaataatctggagaagaatctgaagaagaaacttttaagaaaaaagga

SEQ ID NO: 55408 - DNA, 170 bp, Glycine max
  Clone ID: LIB3109-029-Q1-K1-B11
ggcggcaatagagagtagagagtaaacagaaaaggtgaggcgcgagtggctggtgaaggcagcgactgcgagggaagggaagcatctttagctccaaatccaatggcggatacctcaagccgatcaagagacctcgacaagctccttctccgccctggcaatctcgtcgg

SEQ ID NO: 55409 - DNA, 353 bp, Glycine max
  Clone ID: LIB3109-029-Q1-K1-B7
gcgtacgtacaggcgtacgtgacgacacaagggaacgactgactttggtagatgagcttctaccctagggggtgggctcaacattcggcagttctggaacaataataatggcgtcctgcaataaggttggaaaccgttcgaggcatggtgctgctcggaaacacatgcgcctgtgcagacatgctatatacatcgatgcacgattggagcacgctttcattggaggcctcacatatggagtcgatgaccattctcatcaagatgcattttctggcttctgagatgtggcttatgcgaaagttataactcgactgaaacagtggcagatcaatgggatttggatttgtcaactt

SEQ ID NO: 55410 - DNA, 165 bp, Glycine max
  unsure (1)..(165): unsure at all n locations
  Clone ID: LIB3109-029-Q1-K1-D4
ggcnggggagagcgtatatggaaatcaaacagcagatagagggtctagcatacgtgggttaaatgcatgcgcatgagtcggaagaatttgtgttagcggtgaggagatatattgagaattaacatttgatactgtatatatggggaggggaagagcggatttgaa

SEQ ID NO: 55411 - DNA, 432 bp, Glycine max
  Clone ID: LIB3109-031-F1-F2A
agaagacaatagatattaatggagaattaattaaaggtagtgcaaacccgctccgattgatgttcagctacatcgccagtctgagacatgttgaagcagcattgacgatacttctcaatgattctgttaatgctgaaaagaaatattttagtagtgcgtgactaaaagaaatatttgaaccaatctgtcccagtttacgtacagttttatatgtagatttacagggagacctaataataaaattattatatgtataaataatcaatcaagagtttttcagttgctttcctatcctgttttaactatcttgaaacaaaacatgaattaatattgttgaatcattatattatgattatgaacgggccggattcaagaaaaaaaccaatatatatacatcccattttttggtgtatatataggtgccgggaaaat

SEQ ID NO: 55412 - DNA, 522 bp, Glycine max
  Clone ID: LIB3109-031-F1-R2A
gaaagagagaagtaacatcaaggtgcagagagaggaattgaagcatgggaagagggaaggtggttctggagagaatacagaacaagatcaatcgccaagtaaccttctcaaagcgcagaaatggtttgctcaagaaagctttcgagctatctgttctatgcgatgctgaaatcgctctcgtcatcttctccagccgtggcaagctttttcagtatagtagcactgagtatttttcttcgatctctcatcttttttatcattataatcctaggttttgatttttcaacatatattgctggttggtttgggttgtttttttagtattacacacacacacatatatatatatatatataggcaataaatctctgaaatttgcgtggttccgattgttttcttctattaattgggatgtagctagggttttccaattcttcattcaccccctttccttctttttccacttttattattatttgcataaaacaaaaatatatcttatattattcacatatgattatt

SEQ ID NO: 55413 - DNA, 460 bp, Glycine max
  unsure (1)..(460): unsure at all n locations
  Clone ID: LIB3109-031-Q1-K1-C8
ccgggtcgacccacgcgtccgcccacgcgtccgaattcgagcggccgcttttttttttttttttttttttttttttttgaggcggtccattccatcattctgggttgaacgtgggcactgtttggtcgagtttattttataatttgattaatctcttttccgaaaagaagacatcttttcgttttcttttcttttcttttttttccccccttgaataagagcaaataaagtagcaaacttttcgttttcaaaagatagtaagctcgtgaaaaagagaaaataaaaattaattgaacaatgttaggattttcctgcgcttagtctttgccttcggtaatagcatagcgtttaaagtccgaactcatcagntttctctctctttctgcttttaantgatatcagtcgctttcttgatgaagtagtagtaatagtatgggaatatatttttgttaattatgta

SEQ ID NO: 55414 - DNA, 465 bp, Glycine max
  Clone ID: LIB3109-031-Q1-K1-D9
aaaaaccgggccgacccacgcgtccgctccgataagacaacacaacgggatgaatgaaattaccaaatttaccttcactttcccggcgcttctcttcttccttgtctaagttgctggagaggtcactgcaaacatcgagaagggagggtgaaaaaaatcgtaggagagctagacaacatggagttcagtggggccatcttgctattttgtttcctctatctgcattagttgcttatgctaattgttgcttcttttagctttctttggtcttgtaacgccaacttctccaaagtgttgaccgcgcagaacatgaatttaaataggacaaaaatgttgctaatgcaatagctggagaaaacttgaaattactgtgatgcgcatttcaaatccatacaacggattaccattaaatggaacccaaagcaagaattcctattctttttcaaaagtacttttgcctcaaaa

SEQ ID NO: 55415 - DNA, 471 bp, Glycine max
  Clone ID: LIB3109-031-Q1-K1-F10
accaacccgtccgaccggttgcaaaagacaacagaaggggagacacgaggggctttggttactgcgctgggtgcggaaccagagaaggagagaagaatggacgaggagaatggttacagtgggagtagcagctcaaacttggagactacaaaagcagagagatctgtgtggctgatgaagtgccctttggtggtggctaagtcatggcaggctcatcctccttctcaacctctcgccaaggttgtgctctcccttgatcctctccaccctgaagaagacgatccctctgcagtccagtttacaatggagatggctggctccgaagctgtgaatatgccaaaaacttattcattgaatatgtttaaagactttgttcctatgtgtgtcttctccgagactagccaaggtggcaaggttgcaatggaagggaaagtagaacataagtttgatatgaagccccatggtgaaaac

SEQ ID NO: 55416 - DNA, 419 bp, Glycine max
  Clone ID: LIB3109-031-Q1-K1-G11
ccacgcgtccgaattcgagcggccgctttttttttttttttttttttttttttttaagatgacattagggataattttcaatagatttttgcaaaggaaattgcttgccacaataactaataagtgaacctttttcatccagaacgcactacttgcaattgttacttaaaaggatattgagaagggatgagatactactagttattattacatactagaaaggcaaaagtaactattttatgcttgcattgttttgtaaatgcctccttgtagtctccgtgatgtcctgctgttttcttctcaataaatcttctatttcatcctggtattgttgttcaatcatctctaactctattctcaactcatccccaggttcaaagaaggaggaagtactaacgggatgacaagagaaattcatc

SEQ ID NO: 55417 - DNA, 319 bp, Glycine max
  Clone ID: LIB3109-032-Q1-K1-B10
ccacgcgttcgcggacgcgtgggagacgacagaagggggtggaagtgaaggaggagagggagaagaagaagaagtaggaggaagaaaaggggaaaacgcaaagaaaaaaagaggaagatagatcaagatctcccttgcgtttgtctcagttgaagaaattcaagagcagaacgagactaactcaacggtatcagacgtttcagggtttcagcacttccatttttttttttccggatttgagttggaagaagatcaaagaggttcctagttgcttggattgttcctctgggtggtggagactttgtgtatttttaaaata

SEQ ID NO: 55418 - DNA, 193 bp, Glycine max
  Clone ID: LIB3109-032-Q1-K1-D8
actcggtcttgaattcccgggtcgacccacgcctccgtccacgcgtacgcacacatgcgatattacgatcgatgacgcaacaaatcttatcaggaactgactctttcttacatttgccactgtcattctcagccacacacatattttgatacatcatggtatacaaacctctatcactgatgaactctatgtc

SEQ ID NO: 55419 - DNA, 430 bp, Glycine max
  Clone ID: LIB3109-033-Q1-K1-B10
ccacgcgtccgaattcgagcggccgctttttttttttttcttctttttttttttttggaacataaataaaaggcagcaagtggcactgcatgtatctctaaatattcaataacagattatactcaatacaattggatgggtttcataaaataaacaaaaattacgtcgccttacaagcgtgatcctctaatatactaccaaattcgccataaaattctcatcctatatggaaaagaaattggatcaaaccatcagaatgacaaacaaaaattgccttatcaatcctcatgcaaagccttcatcaaatagagtctgttaaagctttgccctgacaccccattgatttggttgcagtagttggaaatttgatttggtatgaagaagctcttcaaccgtgaaggctctgggagcggcttgaaaatgggatttg

SEQ ID NO: 55420 - DNA, 453 bp, Glycine max
  Clone ID: LIB3109-033-Q1-K1-E5
cggaattaccggatcgacccacgcatgcgtacggacgccaggacgacggccacagaatcaaacacgaacacttatagacaattcgatgatatcatatatccttcgataactaagatgcatgcataactttagcgcttaaacattaggatccatatcactgtcaaacagctccacatttgacaagctgataagaaatcatgacaggcgtgattgtaaaagactataacagcgaaagctaagacatcgatcatagaaattggatataatcgaatgaccgtaccaaacttgatatcgtcaaggtataaacaaccttatctagatgatatatgaaaagtgattggattctaggatagcgagattaaaagtggtcaccgaatgcatgattgatctatgacattctgacagatagacttacgtatgatagaatgtatagcatatagctgagttactgat

SEQ ID NO: 55421 - DNA, 433 bp, Glycine max
  unsure (1)..(433): unsure at all n locations
  Clone ID: LIB3109-034-Q1-K1-C10
taccgtctggaattcccggtcgacccacgcgtccgccacgcgtcgaagacacagagggggtgtgagacaatatcacacataatatgggtcggaatactcctattgctatagcantatatgggtgacactgagatcaaaccatcagtgaagtagtcatatgtgcttnatgaancaatacaatagcgcaacaaccacaccctcccaaccgacatcaccaagtcatcacaatcacacttaccaatcttgaccaagctnatgctggtactttttcatatgcctttcctttggccacaagctttgctctggaagagtttgagtaaacacaacaaggactcacaaactctctggcatggattcaatttgatgccttccattgcgtttctactactttggtgtgtggcactgctcactgccactacttngtctttacttt

SEQ ID NO: 55422 - DNA, 301 bp, Glycine max
  Clone ID: LIB3109-034-Q1-K1-F11
caacgggaggcgcggcgggatcagcacatgattgcaaagtgaaggggaacattgcaaatcccaccactgggtgccagaaaaagctggaaatcgatgacgacctgaagctgttagcattttgggacaagaggatctcccaggaggttcttgatgatgctctgggtgaggagtttaaaggatatgttttcaaaatcaccggtgggtgtgacaaacaaggattccctatgaagcaaggagtgctgacccctggtcgtgttcgacttttgctccatagaggaactccttgtttccgtggatatgg

SEQ ID NO: 55423 - DNA, 387 bp, Glycine max
  Clone ID: LIB3109-034-Q1-K1-G11
cggccggaattcccgggtcgacccacgcgtcgccacgcgtcgtctgcgagagacgacgaggggacacacagacagaccgctgcgaattattatcctttcccaagccagccagcgagtgaaattacttgcatagatagagcatatggcatgatgaacggctgcttctttcggtcgtcgtactttctatcctccacttaccagaaaccttatgcctcagtgaaaagaaaaaattggggggtgtctacaagggatgagtatgctaattgacccaatttcgggggtgtgtgaggacattggtatacgtgagtggctggatcacgggtcatcagacattgcactgatgacaagaagaccagatttgaactgaaaacacatccagatgcccat

SEQ ID NO: 55424 - DNA, 280 bp, Glycine max
  Clone ID: LIB3109-035-Q1-K1-A1
ccacgcgtccgaattcgagcggccgctttttttttttttttgttttttttttttttgtgttttttgaatccgatcgatttgaacgcagcttcttcttggtttgttgaaattttggcattaaatggtcggaattcggcgttgggattagcttagggtttcaaaaaaataattctcttttttttctgtctaattgtgtgttttttaatggaacctcgtattgggaataagtattggcttggccggaagatcggtatgcggatcgtttggagagatctattta

SEQ ID NO: 55425 - DNA, 467 bp, Glycine max
  Clone ID: LIB3109-035-Q1-K1-A8
ccacgcgtccgagacgacagaaggggagagaaagacaaataaaagaagctgcatttgcagagacgcattcgcgtttgtctgagagagagaattggaaggttgcgacgagtgatgatatacatattgtggcggtagtgaaatcgaggaaaaagaggtagcaatcgtgagttgcaatgagtagcgaaaagtctccttcatcagcttctgcttcagcttcttcttcgagtagctacgagttgagcaaaggcatcaatggcctcgacaaggttattcttcgcgacccacgtggtagctccgctgaggtgtacttgtacggtgctcacgtgacttcatggaagaatgaacaggccgaggaattgctttttctcagtagtaaggctatatttaagcctccaaagccaattcgtggagggatcccaatatgttttcctcaattttcaaacctcggtcctctcgactcgcatgga

SEQ ID NO: 55426 - DNA, 342 bp, Glycine max
  Clone ID: LIB3109-035-Q1-K2-A8
ccacgcgtccgagacgacagaaggggagagaaagacaaataaaagaagctgcatttgcagagacgcattcgcgtttgtctgagagagagaattggaaggttgcgacgagtgatgatatacatattgtggcggtagtgaaatcgaggaaaaagaggtagcaatcgtgagttgcaatgagtagcgaaaagtctccttcatcagcttctgcttcagcttcttcttcgagtagctacgagttgagcaaaggcatcaatggcctcgacaaggttattcttcgcgacccacgtggtagctccgctgaggtgtacttgtacggtgctcacgtgacttcatggaagaatg

SEQ ID NO: 55427 - DNA, 162 bp, Glycine max
  Clone ID: LIB3109-035-Q1-K3-A1
ccacgcgtccgaattcgagcggccgctgtttttttatgttgttttttttttattttgtgttttttgaatccgatcgatatgtacgcagcttcttctgggtgtgttgaaatttgggcattatatggtcggatattggcgttgggattagcttagggtttcaaa

SEQ ID NO: 55428 - DNA, 443 bp, Glycine max
  Clone ID: LIB3109-035-Q1-K3-A8
ccacgcgttcgagacgacagaaggggagagaaagacaaataaaagaagctgcatttgcagagacgcattcgcgtttgtctgagagagagaattggaaggttgcgacgagtgatgatatacatattgtggcggtagtgaaatcgaggaaaaagaggtagcaatcgtgagttgcaatgagtagcgaaaagtctccttcatcagcttctgcttcagcttcttcttcgagtagctacgagttgagcaaaggcatcaatggcctcgacaaggttattcttcgcgacccacgtggtagctccgctgaggtgtacttgtacggtgctcacgtgacttcatggaagaatgaacaggccgaggaattgctttttctcagtagtaaggctatatttaagcctccaaagccaattcgtggagggatcccaatatgttttccttaattttcaaac

SEQ ID NO: 55429 - DNA, 175 bp, Glycine max
  Clone ID: LIB3109-035-Q1-K4-A1
ccacgcgtccgaatacgcgcggccgcttaactctattgattttgtttccttaacacgagcttgatgcatcgcgtcgatatgaacgcaccttcctcttggctcactgaaagatgggcattaaacgggcggtcttcggcgctgggatgagctcatgattccaaaaatgcactaccct

SEQ ID NO: 55430 - DNA, 445 bp, Glycine max
  unsure (1)..(445): unsure at all n locations
  Clone ID: LIB3109-035-Q1-K4-A8
ggaannnccgggtcgacccacgcgtccgagacgacagaaggggagagaaagacaaataaaagaagctgcatttgcagagacgcattcgcgtttgtctgagagagagaattggaaggttgcgacgagtgatgatatacatattgtggcggtagtgaaatcgaggaaaaagaggtagcaatcgtgagttgcaatgagtagcgaaaagtctccttcatcagcttctgcttcagcttcttcttcgagtagctacgagttgagcaaaggcatcaatggcctcgacaaggttattcttcgcgacccacgtggtagctccgctgaggtgtacttgtacggtgctcacgtgacttcatggaagaatgaacaggccgaggaattgctttttctcagtagtaaggctatatttaagcctncanagcccaatcgtggagggatcccaatatgtttt

SEQ ID NO: 55431 - DNA, 360 bp, Glycine max
  Clone ID: LIB3109-035-Q1-K4-B5
ccacgcgtccgcccacgcgtccggcgagaagacgacagatagggggggaaggaagagagagaccaaggcccttagtgcttttcattatttacgaaaaaccaacagcgagggtggtttttgtttggtccaggctggcccagggattgattaaagttgaaaggcttccggtgaagagaaccgagttaagcggcgaatccaaacgcagaatcggcggcagaaattggcaccggaagcacgttaataccggtgaaccaaacacaaaattccatccaccacttctcttttcaatccccaactcaaatctgggaagaaaatctcaatttctaaattgtaattcttagcactactgctagtagtagt

SEQ ID NO: 55432 - DNA, 299 bp, Glycine max
  Clone ID: LIB3109-035-Q1-K4-B7
ccacgcgtccgcccacgcgtccgctaactcgcccgctgaccttgttaaaaattcaaaataacacggggctggtttttaagggcttgagctcctcttcctaaaaccatttttccatcaaataccaattccttattcctgctataactccaaaatccctttttttacccctacccctgattttcatttctcttctactatgaacagctgtttaatttgagaacatttctttacgtttctccatcttcttgtaataaaacaatccttttgctctattataccctcaacatacctcccccttc

SEQ ID NO: 55433 - DNA, 433 bp, Glycine max
  Clone ID: LIB3109-035-Q1-K4-D5
ccacgcgtccgcccacgcgtccgcgccggaaggggttggtgaatacattcagcaacatctatacagggggggagatgcttatactgaatcagtatcttgaaaattgcatctgaattctgtacaaaagacgttgcttacgggaatgtgcatctttggcagtactgattctgacatacttgttattaaccagtgctcaggtgcgtctatgcaagcactatgggagctgtctcagaagcatgctgaaattaccataaaaaatcatggggaagctaacattaggtatgcttggcttgcttcctatataggagaactatctacaatgatgaactatggacttagtcattatggactatctggatcatagtgcacatatggcagtggtgttcatcttgctgatgacacttgccgtgatgccagtgttcgttaatgtgat

SEQ ID NO: 55434 - DNA, 375 bp, Glycine max
  Clone ID: LIB3109-035-Q1-K4-F5
ccacgcgtccggtataactgtcgggtactcgacatgtcttttctacttagtctctgatctcacaaggataggtctcatccccattgtagactctagtactactttctcctcgatacactctacttcttctatgcacagtgtgaatggcgtctgaatgctgcagaaacaagctatataataacatgtacatatctctacttacatgcaatcatgattgatctggatgaacactccctacattctacgttcaactaaataaggatgctgtcaaatcatcttataggatcactacagccactaattgaagataacattgactccatcactctcttaagagactccaccactgttgtgtgcctggatgattaccactct

SEQ ID NO: 55435 - DNA, 244 bp, Glycine max
  Clone ID: LIB3109-035-Q1-K4-G5
ccacgcgtccgctcactcgtccgataattcgtccctttcgatctaaagaagaattgtttataaatcggcagggacaatacctgcgttatagtgtaaactaactatctttgccgatccctcaacctattactatctaagtatattcttttcatcaatgcttgttacagacacggctccttgatagacacaaactacgtaccattcatgagtgttgcttctccatctacaaacccattctaacaac

SEQ ID NO: 55436 - DNA, 228 bp, Glycine max
  Clone ID: LIB3109-035-Q1-K4-H5
ccacgcgtccgcacatttgtacggtgtatacaaatgttggtggattactcagaaatgtagcaaacagggtgggtcaaaagacttcctgactgtggtctatcatcaatctccccatcgaactttttgtgacttttatgatatctttaactaaaataatctgtactattgtgctacttttatatacattacacttgaatatgtgaaaagcttcttccaacgggacacata

SEQ ID NO: 55437 - DNA, 344 bp, Glycine max
  Clone ID: LIB3109-035-Q1-K5-D9
cggtcttgaattcccggctcgacgcacgcgtccgtcttcttgaaaggatttttgtactggatcctgaaaagaggatgaccgttgctcaggcatgaagtcatccattcatcacgggcaagtgaattatgatgctgccttatgatctattctgaaatagcccatctaatccttcggcatttttctttcttttccctgctgtactgaaccatgagcattgtttccaaattcgcaacgtggataaagcgtggggcagtcgatttaaagaccttcctacatggcagttcttatcagtgggatgtgttctgttctcttggtttcgttcagggctatgatgataacaccca

SEQ ID NO: 55438 - DNA, 428 bp, Glycine max
  Clone ID: LIB3109-035-Q1-K6-A1
ccacgcgtccgaattcgagcggccgccctccttaggggctcatcattttgtgctaggggtttgatgaaccctgccgatatcaacgcaacttcttctcggtgtgtctaaattttggcattaaacggccttaattgggcggtttgacttagcatacaggctcaaaaaaatcacacgcagatatttggttcgacgagaggcattattatgggatccaccgtacagaaattgaatacatctggtccgaggtacctgtgaggatacaaattactggtctgatagagtgactgttaatgaaagcaatctgatcgttgctagttttggggcagctgcaactgtgcaactaatgttcagttcttaagtgaccaaatctactgccgagaagttgagaggtcacatcttacaagcatttgaatctgtccttggatctt

SEQ ID NO: 55439 - DNA, 456 bp, Glycine max
  Clone ID: LIB3109-035-Q1-K6-A8
ccgcgcgtccgagacgacagaaggggagagaaagacaaataaaagaagctgcatttgcagagacgcattcgcgtttgtctgagagagagaattggaaggttgcgacgagtgatgatatacatattgtggcggtagtgaaatcgaggaaaaagaggtagcaatcgtgagttgcaatgagtagcgaaaagtctccttcatcagcttctgcttcagcttcttcttcgagtagctacgagttgagcaaaggcatcaatggcctcgacaaggttattcttcgcgacccacgtggtagctccgctgaggtgtacttgtacggtgctcacgtgacttcatggaagaatgaacaggccgaggaattgctttttctcagtagtaaggctatatttaagcctccaaagccaattcgtggagggatcccaatatgttttcctcaattttcaaacctcggtcctctcg

SEQ ID NO: 55440 - DNA, 445 bp, Glycine max
  unsure (1)..(445): unsure at all n locations
  Clone ID: LIB3109-035-Q1-K6-E12
ccggaannncngggncgacccacgcgtccgaattcgagcggccgcttnnnttttttnnttttttttttttttttttttatgctctgtgtgtgcagatggaattctcgtttggtccccgaagatggttgcctaaagaattactgcaagacagacgtgctgatgatgatgttggtaacaatgaaaattatgcgctgggattgcatgctcctggtttttttgataaaattctaaatgttgacaactgcttactgcaatctcatcctgctaataaggtacttgcagctgtccaagaatgttggagagatccacaacttggtttttctccctacagtgttcattcacacaagggatttcttaagcatttgatgctgagaactggaagggatgtaacaacttatcagcctgaagttatggtcaactttgtgacctctttctacaagcctga

SEQ ID NO: 55441 - DNA, 165 bp, Glycine max
  Clone ID: LIB3109-036-Q1-K1-E7
tgaattcccgggtcgacccactcgtccgtacacgcgttagaacacgactgataccactatttagtacgaatgtcagaccacgacacagtggccagctatacttaatttcgaacctgataatcaactttaattacataaaacgtctatactttaaatctctacatt

SEQ ID NO: 55442 - DNA, 161 bp, Glycine max
  Clone ID: LIB3109-036-Q1-K1-H7
gaattcccgggtcgacccactcgtccgcccactcgtccgtactgttagaaaacaccatttaggggatccactgctggctacaacatcgggtccggtcccacactattaaacataacttatattcaattctataacccaccattcttcttccatctctttac

SEQ ID NO: 55443 - DNA, 448 bp, Glycine max
  Clone ID: LIB3109-037-Q1-K1-D4
ccacgcgtccgcccacgcgtccgcggacgcgtgcagacgactgaaagaggacaacagtgtgaactgcaaagggctgctccagcctagtttgttctcagatcttcttcttacatggaccacttccagacggtggcgaacataggcgaaggaacatactgcgtcacttacaaggctcgcgaccgcgccaccaatgagacaatcgctctgaagaagattcgcctcgagcaggatgactaaggcgttcccagcaccgccattcgcgagatttctcttctcaaagagatgcagcatacgaacattgttaggttgcaggatgtagtgcacagtgagaagcgattgtatctggtttttgagtatctggacttggatctaaaaaaacacatggattcatctccagagtttgtgaaagatccgcggcaagtaaagatgttcctttatcaaattctct

SEQ ID NO: 55444 - DNA, 409 bp, Glycine max
  Clone ID: LIB3109-037-Q1-K1-D7
ccacgcgtccgcccacgcgtccgcccacgcgtccgaattcgagcggccgctttttttttttttggttttgttttttttttggctaaaagaaatagaaattttactaatgttaaaattacataaatatggcaaaagaaaaggattgtttttgtatcactgcataatctcgatggctagacttctaaacaaacaccgcctattataaactacattccttatggtacatagtacaacccatgattccagaacaaatgatgagataaaaaagcccagaaacaaggagcagtctggtatccacattaaccccccattcacctttgttcctcatcatggggtcagaacaaacaatttggatctctgatggctcttaaccacctgcagttgccaattgattagcactggtagcaat

SEQ ID NO: 55445 - DNA, 412 bp, Glycine max
  Clone ID: LIB3109-037-Q1-K1-E1
ccacgcgtccgaccggtgccagagacaccacagagggaaccacgagagggctgttactggtgccgccgatggaagagacagtgtttgtcagattcacgctaagccaagacatatgggctatcctgctcgatacctgtatattcaagttttatagtagatgtctcttgcctcaagatttgcccgagtgacaactctaccactttgaggagaaaaccatagtaatggatatactaccatagacaggaggacccatatgcagactaaccttgatcaccctaagaagagcttcaatgttgaggaatatacctctgatgacagtcctgtagccttggattgttacgaatgtgataacttatcactagtatggggaaaaccagtgcagctccgtataggttctggagagtggattacc

SEQ ID NO: 55446 - DNA, 404 bp, Glycine max
  Clone ID: LIB3109-038-Q1-K1-C6
gaaaccaagaggggagaatctctctctggttgtttgggtttgaagtctcccttccttccttcctctctctctccttttctttcctctatgaacttcctcaccagaaaaacaaaaccaccacaaggtttcttttcttcctgggcttgaactccacaaagccaaggaaggaaaacaaaccaaaccaaacatattccttatttcccacttgttcaacctgtggtttatttatccttggaatatggttcaaagaaaagtgcctagcaagcttggtatccaagctgaacatgttaaatcagacaagaggttgtcaaacctgaagctactatcttcatctcatcaccaagatggaaaaaatagaggggctgatatgaagaagaaaatgaaaaaatcaaggtcaataaagc

SEQ ID NO: 55447 - DNA, 166 bp, Glycine max
  unsure (1)..(166): unsure at all n locations
  Clone ID: LIB3109-041-Q1-K1-A6
ccggnctggagaaccaggcgcgacccacgcgtccatacatcttctaaaagactacttaatgaatattcaagacatcaattctaaaggggcctattggatctttctatggctctccaaaaaactaaatttncacagaaaatctaaatcatattttatcaagcttatt

SEQ ID NO: 55448 - DNA, 275 bp, Glycine max
  unsure (1)..(275): unsure at all n locations
  Clone ID: LIB3109-041-Q1-K1-A7
cgcgagccacgcttccatacggctacaaaaagactacttaatggggtaagacgaagatctaaaacccgatttattcggcgatcgatctggtgtggaaggtntcaattgtcaatttgtgattgtgggaaaaagatgccgcataggcactcgatgaacaacaacgatcttgcgttcttcacgtactatgagaancnaaaactatgttatgggacccagaaggagaggttgtgcaaggactccattaagcccttcgatgcttgctctctctgnctcaa

SEQ ID NO: 55449 - DNA, 79 bp, Glycine max
  unsure (1)..(79): unsure at all n locations
  Clone ID: LIB3109-041-Q1-K1-B6
ccggnntggaatacccgnctcgacccacgcgtccgcccactcgtccgtacagtctttataagactacagaagggtgctt

SEQ ID NO: 55450 - DNA, 270 bp, Glycine max
  Clone ID: LIB3109-042-Q1-K1-B1
acaggcgttggccgatgcgctcgacagcggccggctggccggttgcgcgcttgacgtcggccgtgccgcggaccagatgccgacgcccgcgctcgccgcgcatcctcgggtgatcgcgaccccgcatatcggcgggctgacgctgccggcggtcgagcatcaggcgcgggagacggttgaccagctcgccgcgttgctggccggaagggtgcccgcgggcgccgtcaacgcggcgcacgcgacgcggctcgcgcgctggcgcccggcgaa

SEQ ID NO: 55451 - DNA, 383 bp, Glycine max
  Clone ID: LIB3109-043-Q1-K1-A3
ccacgcgtccgaattcgagcgggcgcttttgttatatgactactgattgtttttttgcctacaaatgcgctcatatcactctaatattctggactccaattccattcttgctctatttgcaactgtgaatggcatcaatcctcttaacatttaaagtattacattaaatctctccttactttttgtgccattattaagcacattatccctcagtgacctttacgcgaaacatatggacttatctgactgcagcttcctaatggatgcatttctcctaactgtgtatggcccagcaaacaagggatccaattcgtgttcaatcaatactttgataaaatcatgtcaggaatagtttctacctcttggcttccatacacatcaat

SEQ ID NO: 55452 - DNA, 306 bp, Glycine max
  Clone ID: LIB3109-043-Q1-K1-F11
ccacgcgtccgaattcgagcggccgcttttttttttttttttttttttttttttttttttagaaaaagcaaatgcttttattcaagagaaacaactgtgcattacatttgatactgctctcaggactatcaagaacaaagagcatcatcatacagttgacgaaggtgactgcaaaggtgatgtcaagacagccaatttttcagcaaaaaaaccagaaataaaactgataacttcccattgaacacaagaaacaaatgctttttactcatgagaaacaacgagcacttgttttccaacattgcgacc

SEQ ID NO: 55453 - DNA, 440 bp, Glycine max
  Clone ID: LIB3109-043-Q1-K1-F12
cacgcgtccgaggacgccttgccggtttctaaaacaccacattaggggttctatagaagaacaatatcgaagagaggcgtcttccgttattccattcagcgattccattgtggcgaaaggcgtcccggcaatggcggcggaggccgttgccgcccttgacttgacagaatcctccaactggtggcgggacatcaaccgctccccgatctggcaagatcgcattttccacctcctcgccatactctacagaatcgtcgccgccgtcgctttcgttcaattaatgcgatatcaactgaaagcgccggaatatggcttgaccacgcagaaagactttcactttatcaatttcattgtgaatggggttaagggttttgtttctggcttaccccgggatgtgcagaaattgctagcatagattgtccaacatattttacttgaca

SEQ ID NO: 55454 - DNA, 189 bp, Glycine max
  Clone ID: LIB3109-043-Q1-K1-F9
ggccgacccacgcgtccgcccacgcttccttacacgcttaaaaacaccttatagatgtcttcctaaatctatctctggagtaaactggcgaaattatccttgactcccagcccattaacttacactccttatatcccaaaaatacaattaaacaacagacccatctaaatctactatctccctataata

SEQ ID NO: 55455 - DNA, 133 bp, Glycine max
  unsure (1)..(133): unsure at all n locations
  Clone ID: LIB3109-043-Q1-K1-G7
accggnccggaatncccgggncgacccacgcgtccggccgcgagaggacacacgacagagggggcagcgaaaggggacgcaggcgaggggcaacagggcaaggaccggcgggangcacaaacccacaagagaa

SEQ ID NO: 55456 - DNA, 439 bp, Glycine max
  Clone ID: LIB3109-043-Q1-K1-H11
ccacgcgtccgaagacgacagaagggggatgatgaatatgctaagcttattagaaggatgaacccaccaagggttgtgattgacaacaatgcctgtgaaaacgcaactgttattcaggttgacagtgtcaacaaacatgggattctccttgatgttgtccaagttatatcagatatgaaccttgtgataacaaaggcctacatctcctctgatgcggtgtggttcatggatgtgtttaatgtgattgatcataatggaaacaagatcagagataaggaagtcattgattatattcagaggagacttgaaaacaatcccagctttgcaccctcattgagagagtctgtaggggttgtaccaactgaagagcacaccgtaattgaactcactggcacagaccggccaggtttactatctgaaatctgtgcagttctcacag

SEQ ID NO: 55457 - DNA, 449 bp, Glycine max
  Clone ID: LIB3109-044-Q1-K1-A9
ccacgcgtccgaattcgagcggccgcttttttttttttttttttttttttttttttttctctcaacacttttctgagttctttctttgggggttgggaaagcaaaattttaggtcaaagttggttaacagttcacttgtatctgtaccactcactggaatcgttgcagctgtctattcttttccattttaggttccgtgaccttacagataattaacatatgccaaatcattatttggttttgaactttggtttaggtagtattttttcactcactttatatttgtgtttatctttcttttttatccatcttataattttattcatttaccttaatataaatggaatataattaaagagtaaatactagtgtatattctgaaagcaaaaaatatatatatattacactactatttgctatttagtcacaaactatatatcatttacgat

SEQ ID NO: 55458 - DNA, 445 bp, Glycine max
  Clone ID: LIB3109-044-Q1-K1-C11
ccacgcgtccgcccacgcgtccgaattcgagcggccgcttttttttttgtttttttttttttttttttctattatacatgtgtgaaaggcacatcagccttcaagtgagatattatgacaattaaatttacaatcataatagaaaataagattcacagtctatatatccttttgcagtctacttctagatatcttatcccagagtacacttcaaaattctaaagttttatacaaacaataatatgaatttaatcacttaaggtcctctaaaactgtaagtcacctaccaagtaacctctgaaagcagcttgtgcctttgatgctgcttcctcctgcctgattttctctggatcaggtggtgcatccgtatcaacagatccattaatgtctctttcttgattctcaagtaaaatattttctgattcttcattctccagttcaaggt

SEQ ID NO: 55459 - DNA, 445 bp, Glycine max
  Clone ID: LIB3109-044-Q1-K1-E7
ccacgcgtccgaattcgagcggccgcttttttttttttttttttttttttttttttgagacacaaaaatgttgtacaaactgttgtatgaaatgttaacatttctctattaaataaaataaaccaaaatagaaaccattcaaagttccctggctcgtttttagatcaaaatcttactatcttacactgtaacaaacactaaacattaacccagaagtaataaaggggaataccaaaaagttggctcatttatccccacaaggactctatggtatttagggtgacatttaaggagggacttgaggtgggatcaagggcaagatctgggtagcaagcagattcctcttgtgtaggcctacagcatatcctgtcaaaagaaactccttcctcaatgttgtcatggacgaatcgaacaatgaaagtgcacgtacactttgttggatcat

SEQ ID NO: 55460 - DNA, 433 bp, Glycine max
  Clone ID: LIB3109-044-Q1-K1-G6
ccacgcgtccgggtagatagagaagctagagagaagagacaagaaagggatgctgatttagaacgagataggtctgataagcatagcaaatgtcttgacaaggaatcaaacgatgggtgtgctgatggagaagggatgatggagaaggagagggaggtctataattatagcagtcagcaccgtaagaggatacaacgatctagagggagccctcaggtgcctaaccgggagcctcgtttcagatcccgtgcccaagataatgatgggtctcaaggtaaagtagaagtttcttctgatggtataaagttggcgaaagcatgcaagaactgataaagttgtggaaggaatatgaatcatctcaatctcaaatggaaaaaaacggtgaaagctctaataatggtcccactctggaaattcgtataccatctgagca

SEQ ID NO: 55461 - DNA, 172 bp, Glycine max
  Clone ID: LIB3109-045-Q1-K1-E5
ccacgcgtccgaattcgagcggccgcttttttttttttttttttacgttctgtcctaagttacttgaaactttgacctggtattttgattttaatggtgagacgtgtgctactgctacatcataattcccatcaaatttaattatcgatgggttagaatttcattaatttat

SEQ ID NO: 55462 - DNA, 427 bp, Glycine max
  Clone ID: LIB3109-045-Q1-K1-E9
ccacccgtccgaccggttgcaagaggccaacagaggggggccggcaaaataaagagtcctaatgagaagttgagtggtcctcttgatgagattgtcaagaggagaatggaagacaagaatagaacttcaaagaatttcttgtcactcattttgaatgcaagagaatcaaagaaagtatctgaaaatgtcttttcacctgattacattagcgctgttacttatgagcacttacttgctgggtcagctaccacagcctttaccttgtcatccattgtctacttggttgctggacaccgagaggttgagaaaaagttgcttcaagagattgatggatttggtccacctgataggattcccacagctcaagatcttcatgacaagtttccttatcttgatcaggtgattaaagaggccatgaggttttaca

SEQ ID NO: 55463 - DNA, 222 bp, Glycine max
  Clone ID: LIB3109-045-Q1-K1-F11
ggaattcccgggtcgacccacgcgttcgtccaggcgtgagacgacgcctgaggggggacagacggacgggtgaggaataacaacctagggggggtcgatggtgtgggcattcaaacctaaagcttgcgtctgtcggcttgggttggagcttgtgctgcgtaaagaggaaccatgtctgactgttgcggtaactgcgtctctgaaactatggctaatactgca

SEQ ID NO: 55464 - DNA, 261 bp, Glycine max
  unsure (1)..(261): unsure at all n locations
  Clone ID: LIB3109-045-Q1-K1-F6
ggtcgacccacgcgtncgcacacgcgtgcgaacacgccagcatgcgcttatattgacgggtgcgagaagacaacatgggggggggtgattgtgtgaggatgcagccctaaaacttgagtttctctgcttgggttggagcttgtgctgtctaaagagggaccatgtctgaatgtggcgctaacttcgtctgtgaaactagggctaatacttgatataccgagctctatatgtcaggatgaacgattgcttttgatccgtgtt

SEQ ID NO: 55465 - DNA, 427 bp, Glycine max
  Clone ID: LIB3109-046-Q1-K1-A1
gtcgacccacgcgtgcgcaccgcattaacgactcctgatcacaatttaaggggagcttacaccatgtcactcacgacaatccgtggtgctgactagagcgctacctctcttaagttctcctacaactgcccaaatagataccactccaacccctgcaccatcacccgccccacacctggcgaacataagctccctactgtccgtcgccggcccattacagacctttctcaactatctctagcaaacaacagtcatcgaaacctttcaaaaccaaccaaacaacaccaaccagcgcatcaccatcttcctaccgaaggactccgacttctcgtccctcataaaaccgtcactagccaacctgacccaagaccaacttaagtccctccttttaatccatgcattcccgtaagtctacactatttaccat

SEQ ID NO: 55466 - DNA, 310 bp, Glycine max
  Clone ID: LIB3109-046-Q1-K1-B4
ccacgcgtccgacgacagaaggggagactttttcattgcagcagttgcaaactgctcatgatgaatatgacgaagaggctacattgtttgttttccgattgaaatctctgaagcaaggacaatcgcgtagtcttctaacacaggcagcacgccaccatgctgctcagttatgtttcttcaagaaagcagtcaagtcccttgagacagtagaaccacatgttaaatcagtaactgaacagcaccacattgattaccacttcagtggtcttgaaaaggaggatggggatgaaggtgattatggaaatgatgt

SEQ ID NO: 55467 - DNA, 294 bp, Glycine max
  Clone ID: LIB3109-046-Q1-K1-G12
aattcccgggtcgacccacgcgtccgcggacgcgtgggtggtcaacttgcgatggcatccatggcttcacttgatttgtttagtggaggggaacaaattgatgcccggaaacttcaagagaaaatgatggttgttcagaaggaaagggaggagaaacttgctgagattctgaaagatagactccaccagtatgttcaaggagacaaggagggttttattagtcaggccgatgctgaagcgacatatctttaatatggcaattacggagttgatatgctgaacacaattggctat

SEQ ID NO: 55468 - DNA, 465 bp, Glycine max
  unsure (1)..(465): unsure at all n locations
  Clone ID: LIB3109-046-Q1-K1-G5
ccacgcgtccgcccacgcgtccggggagctgaccgtggaggagcgcaacctcctctccgtcggctacaagaacgtaatcggcgctcgccgcgcctcctggcgcatcatctcctccattgagcagaaggaggagagccgcggcaacgaggaccacgtcgccgtcatccgtgactaccgctccaagatcgaggccgagctctccaacatctgcgacggaatcctcaagctcctcgacacgcgcctcgtcccctccgccgcctccggcgactccaaggtcttctacctcaagatgaagggagactaccacaggtacctcgctgagttcaagaccggcgccgaccgcaaggaagccgccgagagcacgctctccgnctacaaagccgctcaggacattgctaacaccgagctgnctncaactgaccctatcaggctgngtcttgctctgaatttctctgtgtttactat

SEQ ID NO: 55469 - DNA, 434 bp, Glycine max
  Clone ID: LIB3109-047-Q1-K1-A9
ccacgcgtccgacgacagaaggggggtataattgtgatatgtctagatgagcttcttcaaaaaggatatggggtggggtctggaatttcccttttcatagcaactaatatctgtgaaaacattatatggaaggcatttagtcccaccactattaacagtggacgtggagctgaatttgaaggtgctgttattgctctgttccatttgctgataactagaacagacaaggtccgtgctcttcgtgaggcattttaccggcagaatcttcccaacgtgacaaatttgcttgctactgtcttgatcttcctaattgtcatatacttccaaggtttccgggtggtcttgcctgtaaggtcaaagaatgctcgtgggcagcagggttcatatccaatcaaattgttttataccttcaatatgcccatcattcttcagtc

SEQ ID NO: 55470 - DNA, 458 bp, Glycine max
  Clone ID: LIB3109-047-Q1-K1-G4
cggaattcccgggtcgacccacgcgtccgcccacgcgtccgaattcgagcggccgctttttttttttttttttttttttgttttttatggggccacgatgaagaaatccggggaaattatggcgaccaatttggtttagcaaacaaaacaaagcacaccagaaaaacatctcctgctaatgctatacttgataaactacgggtctaacacattgatcattacaaccggtgagtttcaagaactgaaatcagagcaaaatcttcaaaggaaactaattaaactagtaaaagaaacccagcactttcccaccaacattctttctcctagcttcttcatgatccatgatgccagctgaggtagtcaacacaatatacccaaactgcaacatttgtgtaaacaaaggttagggtcaacaatggaaactgtgtacaaagcctataccatgattaaaaaattta

SEQ ID NO: 55471 - DNA, 59 bp, Glycine max
  Clone ID: LIB3109-048-Q1-K1-B5
ccacgcgtccgcccacgcgtccgcccacgcgtccgcccacgcgtccgcccacgcgtccg

SEQ ID NO: 55472 - DNA, 335 bp, Glycine max
  Clone ID: LIB3109-048-Q1-K1-C1
ccacgcgtccggcgagaagacgacagacgggggggaaaaagaagagtaattggcaaattgattttggcttgctcggcaacacggtgggagcattcttcacttgtccttggttttggaacgactacagccgagctatctctcattccattttcatccatcaatggctccagtagcatcagcatcttcagattcaatcaagccaagagatgtttgcattgttggtgttgcacgtacaccaatgggtggatttcttggtaccctgtcatctctatctgccaccaagctaggctctatagctattgaagctgctcttaaaagggccaatgttgatccat

SEQ ID NO: 55473 - DNA, 437 bp, Glycine max
  unsure (1)..(437): unsure at all n locations
  Clone ID: LIB3109-048-Q1-K1-D6
ccagccgtccgcttcaaaaagaccaccgaagggttaatttattcggcgccaaatgggtgtgtgtgatagggcacattatctattgggtaagattttttgttgatgtttgttattattggtaaaggagttggattaaaaaaaagcgttttatgattagtttttaactattttgaatttttttggcgcaatgtgggtattcttctccaacccaaggggctatagttcgtgatctaaacctctctatttcggaggtcttgctgtatataaaaaaaattatctggtttgttattttttgttgtttaaggttttggtgcttaatatgttgagttcgctgcagttatctttctttggatcattgtctaacgtgngagcgatggtatgagctatagctaggggtcagatagctgaatacatcgggcgcaaagggtcattaatga

SEQ ID NO: 55474 - DNA, 411 bp, Glycine max
  unsure (1)..(411): unsure at all n locations
  Clone ID: LIB3109-050-Q1-K1-C3-F2A9
tggnattttttttttttttttttnnnnnnccgggaataagtattaaatattataggcagagattcataattcagattagccgaactttatacagaagcgaccaattaccaaacattaaaaaaaaaaaaaaaagaagcaaccatgagcttaacacacccatcacaagtccaaaacacttgactttgctgaagggcaagacatgaccattttattctaaggatgttggtttaacacaaaacaccagagtgcacgaaacccttcacagacttattacataggttttaagttacacattaatagttaatcattattcttaattaagggctatctctgtttgaagtttgttctcccaacacttaatttgcaagtgcaggggttgcaggagcagttcggtccacatttgcagcccct

SEQ ID NO: 55475 - DNA, 379 bp, Glycine max
  unsure (1)..(379): unsure at all n locations
  Clone ID: LIB3109-050-Q1-K1-C3-R2A12
ggctgcaaatgtggaccgaactgctcctgcaacccctgcacttgcaagtgaggtgttgggagagcaagcttcaagcagagatagcccttaattaggaataatgataaactattaatgtgtagctaaaaacttatgtattatgtctgtgatggttttcgtgcactctggtgttttgtgttaaacaaacatccttagaataaagtggtcatgtcttgcctttcagcaagttcaagtgttttggacttgtgatgggtgtgttaagctcatggttgcttcttttttttttttttttaatgtttggtaattggtcgcttctgtataaagttcggctaatctgaattatgaatctctgcttataatattaaatactattaccgna

SEQ ID NO: 55476 - DNA, 309 bp, Glycine max
  Clone ID: LIB3109-053-B5-F2A
aaggcagaaatatattatttcacattaaccatgagaagaaggctaaagatttacatttgagattgagaacacagttgagacaggaaaaataaaacatttccattaacagtaaagacgttccttatatgcattttatatatgcacgccattggttagtggtgttgctggagctgcacgattggtttttagcaccttccatttgcaccaagaaaaacaagatggccaccatccctaattatctctatatttaaatttacccccatttttttgttcaccctttttttggttgaaacccaatttttttggttc

SEQ ID NO: 55477 - DNA, 379 bp, Glycine max
  Clone ID: LIB3109-053-B5-R2A
ggagggagttttggtggatattgagaacatgttagctcgtggtaggatggacctaccagtgagtgtgtgctttgcggcagcaagaggagatgacttgttgttgcatcaattactcaaacgaggcatggatccaaatgaatccgacaacaatcgaaggacagctttgcatatagcggcatctcaaggaaaacagaactgtgttttgcttctgttagactatggggcggatcccaacattagagatttggaaggtaatgtgccactatgggaggctatagtgggaggacatgaatcaatgagcaagctgttatcagagaatggagcaaatttgcaatgcggggatgtgggccaatttgcatgtactgccgctgaacaaaac

SEQ ID NO: 55478 - DNA, 450 bp, Glycine max
  unsure (1)..(450): unsure at all n locations
  Clone ID: LIB3109-053-Q1-K1-C7
ccacgcgtccgagacgacagaaggggatcttggatatgtagattccgtttcagttcaggaaattggtggtgtcagggtgaccattgtgaaaaatgaagagggtggaaattctgtagccactgttgttttacgaggaagtactgatagtatactagatgatcttgaaagagcagtggatgatggagtgaacacttacaaggcaatgtgcagggatagccgctttgtacctggagctgcagctactgaaattgagttagctaaaagggtgaaagacttttccttcaaggagacagggttggatcagtatgctattgcaaaatttgctgaaagttttgaaatgattcctagaactttggctgagaatgctggcctanatgcaatggagatcatatcttctctgtatgcagaacatgcatctggaaatgccaaagttggcattgatttggaaga

SEQ ID NO: 55479 - DNA, 310 bp, Glycine max
  Clone ID: LIB3109-054-Q1-K1-B6
ccacgcgtccgcccacgcgtccgaattcgagcggccgctttttttttttttttttttttttttttttcccggcatcctaatttcactttgtttgagggttccttttttccttggtcactttttaccatgatgtttaacatgggggttgctttcaattctcatagttgatccaaaaggttacttgaaagtgtgtctcttttttttttttttaaactttctatttttgagctgaggatgatggagtgtgggagaaagaaggagaatcaaaatcccaactccactttccctgatgaggtgttggagcgaattt

SEQ ID NO: 55480 - DNA, 306 bp, Glycine max
  Clone ID: LIB3109-055-Q1-K1-B10
cacgcgtccgtacacgcgtccgaacacgtgcgaaaaaacaacttaagatgatcactctttgactactaggcaataggcttgagtgggaaacctaactcgatataaggacccaccatctcccttggtttggattgttattccataaaattgaatctggtgttttacccacaccaacggaggaattaaaatatacacttgatatgttccctgcacattccttattacacataatttaatttcataaaaggctgttcgatattaagcatattttatgataaacattttgcactgtctacgatgctcacg

SEQ ID NO: 55481 - DNA, 426 bp, Glycine max
  Clone ID: LIB3109-055-Q1-K1-B11
ccacgcgtccgggaggctgaggatgaagaacttgaaggtgtttggggaggttccctcgggactctcccttgactctaacgaggaaactatagggttttgcagcttcgacatcgaacgcaaccgcatcttcttcctctcttcccacaatctcatttacacttcccatctctcctctttccacgagaacgccgtttggagccctaacgcctcgctctcctcctccgatgctgttaccgtcgatctcgaacccggagacgccgttacctccttcgactacctcatggagaaagaagcgcttcttctcggaacctccaacggccttctcttgctccacaacgtcgacgacgcctccgacgcgacgcaagtcgttggcaagctcgacggcggcgtcaatgcagtttccctcagccctgacggagaactcgt

SEQ ID NO: 55482 - DNA, 433 bp, Glycine max
  Clone ID: LIB3109-055-Q1-K1-F3
ccacgcgtccgacagaaggggggacgatgaaagaaaaaataactgattagtctttctattataaaatagagtataggcattatttttttcttctaaaaaaataaaattaagaaattttcatggtaaccattcgtgcagatgaaattagtaaaattatccgtgaacgcattgagcaatataatacggaagtaaaaattgtaaatacgggtaccgtacttcaagtaggcgacggtattgctcgtatttatggtcttgatgaagtaatggcgggtgaattagtggaatttgaagagggtactataggcattgctttgaatttggaatccaaaaatgttggtgttgtattaatgggtgatggtttgatgatacaagaaggaagttcagtaaaagcaacaggaagaattgctcagatacctgtaaatgaggcttattt

SEQ ID NO: 55483 - DNA, 437 bp, Glycine max
  Clone ID: LIB3109-055-Q1-K1-G4
ccacgcgtccgaccggttgcaaaagaccaccggaaggggacacacattggtcctagtagtgcctacagactcgatatgatacgccacttgtgagactgtagccttatcactcgcgtgcgacctgcagcaccacagctagctcaagggcgtatccccaacgatcataatgtacggtcactgtgctctaaccatacgctggcacgggtacatgatgatctaaaggcgtcacagcactgaatcagagagctcgactctgataacggtagatgacatgcacgctaaccagcactatgctgtagaagatacagtcgctatcgtgaaacttgaggatattgaggcctccaatgacaactgtgacgatgcttatgatgaaccaactgactgcctcatcattgatatagctcaggatggaccgttcagactccttactgaaaatg

SEQ ID NO: 55484 - DNA, 395 bp, Glycine max
  Clone ID: LIB3109-056-E5-F2A
gggatgtagaataattagattaaagaggtttgcaaagatttgaaatacaatttcctagtcatgttcatggctctaattcttggttgtcttagtatgaagtcatgcaggcaggcatttgaaacaattggtctaatggttatatcgtcatacactaaccaaaaaagtattacccttcacgatccgctgcgtctacaaaactacattgttatcaccaacagcaaacacaggaagccccttcattaccctgttcagtcacggtgtaggagtataccggagatgcatctcatagaaattgatcagcagaagaggattgtatgccttgagatatctgttgtccaccatcacttctgttccatcagacctcatagccataaaggtgactaaaacatcgtgca

SEQ ID NO: 55485 - DNA, 608 bp, Glycine max
  Clone ID: LIB3109-056-E5-R2A
ggatgaaagaaatataaatagaagcagcagcgggatttggtaaagctagaaattgcaatgaagaagaggagcagcagcagcagcagcagttcagtttttgaggcgaatggagtggaggaacctcaacaaccttcatcctgtgcagcagcagcacttgatgagttgcataaagagaaaaatgagaatggagaagaaaccctcgtgccttccaatccctatcccaatcttgacgatggcttctatgaaatcgaaaccatacgccgtaagaggctacgcaagggtcagctccagtacctaatcaaatggcgtggatggcctgagactgccaacacttgggaacctcttgaaaatctacagtccgttcctgatctcgttgatgcttttgaggacagcctcaagtctggaaaacatcaaaagcgcaagcgccaggattttggatttgcttaaactcaccctactaaagaagcgctccgaacgttctaccacttcttacagccttagacatttcccacctttaactcccactaatgcaaatgattatgatccaaagctcaatgaacttaaggcaccaacacacactggggttcagctagataaccttgcaatac

SEQ ID NO: 55486 - DNA, 316 bp, Glycine max
  Clone ID: LIB3109-056-Q1-K1-A1
cagtcgcaaccctaatcagaagaagcgcagcttcaagcgagtgacagccaccagccatgggtcgtatgcacagccgcggtaagggtatatcctcttctgctttgccctacaaaaggacaccttctagctggctcaagatctcttcgcaagatgtcgaagaaaatatctgcaagtttgcgaagaaaggtttgaccccgtctcagattggtgtcattctcagagattctcacggtattgctcaggtcaatagcgtcactggcagaaaaatccttcgcatcctcaaagctaacggacttgcgcctgaaatccagaggac

SEQ ID NO: 55487 - DNA, 441 bp, Glycine max
  Clone ID: LIB3109-056-Q1-K1-F12
ccacgcgtccgaattcgagcggccgcttttttttttttttttttttttttttttttgggattgaatacgaacctgtaacatgaaggctacgactataacagtaagaaatagtgctgcagtctcaaaaagttgaaagtttaagtccataggttgccctattatccagccaataacaacacaaaatggtatctgcataaggaaaaggaaaacgtgaaggaaatgaaagactttttgttattaggaggaacttataaatgaaaaaagcagattactgtccatgaatgctgcatcaagccatcaactactacataaaggaagaagttgaaaaaattcagtggtttcatcacttagtttcaatcgtactattatgttatatatcctactaaattttgctttttcttatttagacaacatgccaatcttttagcatggtgaactcca

SEQ ID NO: 55488 - DNA, 63 bp, Glycine max
  Clone ID: LIB3109-056-Q1-K1-G3
gaattctccgggtcgacctacgcgttcgaacatttgttacacgaccatacaacggcctaccta

SEQ ID NO: 55489 - DNA, 396 bp, Glycine max
  Clone ID: LIB3109-057-C3-F2A
ggacgtaggcagaaatatattatttcacattaaccatgagaagaaggctaaagatttacaattgagaatgagaacacagatgagacaggaaaaataaaacaattacaataacagtaaagacgttccttatatgcattttatatatgcacgccattggttagtggtgttgctggagctgcacgattggattctagcaccctccacttgcaccaagaaaaacaagatggtcaccatccctaattatctctatatcttcaatttcacctccatctttgcatacaaccttattaggatagaaaccaaatttcttggctccaatcttaactagctcttgaaagcttccaggcagtaaaacaagcttcccaacaacctcacccttctcaggacaactaatta

SEQ ID NO: 55490 - DNA, 531 bp, Glycine max
  Clone ID: LIB3109-057-C3-R2A
ggtgagattggtgtgctttgttataagccacagcttttcacagttcgaacgaagcgactaagtcagttgctcaggctaaaccgtactacgttcttgaatattgttcaggccaacgtgggagatggaaccataataatgaataatctccttcagcatttgaaagagatcaacgatccaatcatggagggagttttggtggatattgagaacatgttagctcgtggtaggatggacctaccagtgagtgtgtgctttgcggcagcaagaggagatgacttgttgttgcatcaattactcaaacgaggcatggatccaaatgaatccgacaacaatcgaaggacagctttgcatatagcggcatctcaaggaaaacagaactgtgttttgcttctgttagactatggggcggatcccacaatagagaattggaagggaatgtgaattatggaagctatagtggaggcatgataatgacaagctgtatagagatggagcaattcaatggggattggccaattgatgtactgcgtg

SEQ ID NO: 55491 - DNA, 442 bp, Glycine max
  Clone ID: LIB3109-057-Q1-K1-C10
tcccgggtcgacccacgcgtccgcccacgcgtccgaattcgagcggccgctttttttttttttttttttttttttttttttgaattgcgtactagtaactctctctctctctctgggaattgggtgcttctatttgtttaatggaagattatttatgggtttagattattgggtttaacagttcatgcctagtcaccaatacgcgtttggtatacgtattgaaatctttctttcttcttttgtgcaaatttgcttggtctagcagccatatctgcatctggttttgcgcgtggtgtacacccagacattctcgctgatctagttgggataaagtgtctctttatattgccaataagagtttactgtgtggcaagagtgttttatgtttgaggtcttatatacttgtgagaaaagagctttttggatttgagtagtacgggtg

SEQ ID NO: 55492 - DNA, 585 bp, Glycine max
  Clone ID: LIB3109-056-E5-F1B
gggatgtagaataattagattaaagaggtttgcaaagatttgaaatacaatttcctagtcatgttcatggctctaattcttggttgtcttagtatgaagtcatgcaggcaggcatttgaaacaattggtctaatggttatatcgtcatacactaaccaaaaaagtattacccttcacgatccgctgcgtctacaaaactacattgttatcaccaacagcaaacacaggaagccccttcattaccctgttcagtcacggtgtaggagtataccggagatgcatctcatagaaattgatcagcagaagaggattgtatgccttgagatatctgttgtccaccatcacttctgttccatcagacctcatagccataaaggtgactaaaacatcgtgcatgttgtcagataaagaagctgaatagcctattggcttgataatcttgacaatattgcaggcagtattagcatcaggcatgttgataggagcagaaattggttgaagtgcagctgcatcggtgtctctcttgaacctcttgacagaagaagcagattttctcctttttgctcctctgcttggaattggttg

SEQ ID NO: 55493 - DNA, 728 bp, Glycine max
  Clone ID: LIB3109-031-F1-F3A
acaatatatatacatcccattttttggtgtatatataggtgcaggaaaatagaaagaacaaatcatattttggtttttttctatcttcctccgcctatgtgatatgataaatataaaaaataaagatagaaatatgaagggaaaaaaaggatgaaagtgagctagaagagaatatgacaatactaatatgaaaacttaattacaaaataacccttagttaaaaaagagtaaaaagaagaaggaagctgtgtgtgtcttgtacctacaggtagtgactactctaccccctaacaaaagagcctttacccctacatgaatgacctatacttatcctagtgatttgggacttgaggagaaaaaaattagccataatactgaaatagtgattttactgttaattttctctataaacgaaacaatctaaacctactaaaagcatgcaaaacacctaattcaaacaaagaattaccaccctctaaagaatattttttaatgttaactattcaaataatattagttatttagttttaatttataagaaaatacttattcttaaataaataatataattctaacaagctgggtaatcatagtttcattctaataaacaaacaaattaaatcatattggacagtgacatgcacttgaatatagtatttttttggtaaagcttgtatactagtaattagatttatgagtaaaatattatgtcttaaaaaaagggaaac

SEQ ID NO: 55494 - DNA, 678 bp, Glycine max
  Clone ID: LIB3109-031-F1-R3A
ttaatgggatgtagctagggttttccaattcttcatccaccccctttcccctctttttgccactttttatttatttatttgtcattaaaacagaaaagataatatcctctcattattcatatacgaacattatgtatcttatatgaattaaatagaggtggccgggggtattgtaatttggtgaagggtaatttttcgtacgtctaaaagaaagcaatactcagtttttctttcttttcttttttccatctcaattttcatgcatgctgttatgccacggtatttgtcatccgatcaattactcttgccatattaagaattaaaaaatagatgctattttcagcagaacaaaagtattatgctaattagtcacttgtagaaaatatcaactttctatgagaccccatgtttaactttcatgaaaagaatgttaattgggagctctagaaatagtattttcctattaaaagaaacattttttttactcatataataacttggtagctgtgcagatctgtttgtcgcttacttcgtttcaattctaaaaaaaaagaacacagtaccgtttccctttttttaagacataatattttactcataaatctaattactagtatacaagctttaccaaaaaaatactatattcaagtgcatgtcactgtccaatatgatttaaat

SEQ ID NO: 55495 - DNA, 717 bp, Glycine max
  Clone ID: LIB3109-053-B5-F3A
tccttttggatcacggggcgagtattgacatgccagacaagcatggctggaccccaagagatcttgcagatcagcaggcacatacagaaatcaaagccctttttgattccattggggagcctaaggtccattcttccgtcgctattccggtgaggaatagcaagatcaagtaccttggtaggttcacaagtgagccaaccatgacattgcctcttgatggatcgtttcatggaactgatggctcttggagccagaaccagagccaaaaccagagccggccgaggcgtcggagcaacaactaccataactctctgttcgggatattgtcagcagcacacaatggggaaaagtacctgctttcagctgttgacatgaataacaatgcaaggaatggtatgaagagtagtagtgcagttggtccaactagagttataattagttgtcctgagaagggtgaggttgttgggaagcttgttttactgcctggaagctttcaagagctagttgagattggagccaagaaatttggtttctatcctaataaggttgtatgcaaagatggaggtgaaattgaagatatagagataattagggatggtgaccatcttgtttttcttggtgcaagtggagggtgctagaattcaatcgtgcagctccagcaacaccactaaccaatggcgtgcatatataaaaatgcataataaggaacggctttac

SEQ ID NO: 55496 - DNA, 631 bp, Glycine max
  Clone ID: LIB3109-053-B5-R3A
gcttccaacaacctcacccttctcaggacaactaattataactctagttggaccaactgcactactactcttcataccattccttgcattgttattcatgtcaacagctgaaagcaggtacttttccccattgtgtgctgctgacaatatcccgaacagagagttatggtagttgttgctccgacgcctcggccggctctggttttggctctggttctggctccaagagccatcagttccatgaaacgatccatcaagaggcaatgtcatggttggctcacttgtgaacctaccaaggtacttgatcttgctattcctcaccggaatagcgacggaagaatggaccttaggctccccaatggaatcaaaaagggctttgatttctgtatgtgcctgctgatctgcaagatctcttggggtccagccatgcttgtctggcatgtcaatactcgccccgtgatccaaaaggaatttgacagtctcaacgttgccttcagagactgcaacgtgcaaagctgtggtccctgtgttgctgctgtttggaagcgtgatatctcctccgtagcgcattatttccttcagcaagttgaggctgtttttgtcaagcgcagtacatgcaaattggcccaca

SEQ ID NO: 55497 - DNA, 735 bp, Glycine max
  Clone ID: LIB3109-056-E5-F3A
atctcgttgatgcttttgaggacagcctcaagtctggaaaacatcagaagcgcaagcgcaagcatgtggatgtgcttcaactcaccctactcaagaagcgctccgaacgttctaccacttcttacagccttagacatttcccacctctaactcccactaatgcaaatgattatgatccaaagctcagtgaacttaaggcaccaacacacactggggttcagctagataaccttgcaatacatttccaacaaccaattccaagcagaggagcaaaaaggagaaaatctgcttcttctgtcaagaggttcaagagagacaccgatgcagctgcacttcaaccaatttctgctcctatcaacatgcctgatgctaatactgcctgcaatattgtcaagattatcaagccaataggctattcagcttctttatctgacaacatgcacgatgttttagtcacctttatggctatgaggtctgatggaacagaagtgatggtggacaacagatatctcaaggcatacaatcctcttctgctgatcaatttctatgagatgcatctccggtatactcctacaccgtgactgaacagggtaatgaaggggcttcctgtgtttgctgttggtgataacaatgtaattttgtagacgcagcggatcgtgaaggggaatactttttttggttagtgtatgacgatataaccatttgaccaattgtttcaaatgcctgcctgcatga

SEQ ID NO: 55498 - DNA, 534 bp, Glycine max
  unsure (1)..(534): unsure at all n locations
  Clone ID: LIB3109-056-E5-R3A
aaaggtgactaaaacatcgtgcatgttgtcagataaagaagctgaacagccccctggcttgataatcttgacactcctgcaggcagtattagcctcaggcatgttgatcggagcccaaattggtcgcactgcccctgcatcggcgtctctcttgaacctcttgacagaagacgcagattttctcctttttgctcctccgcttggacttggttgttggaaatgtattgcaaggctatctagctgaaccccagtgtgtgttggtgccttaagttcactgagctttggatcataatcatttgcattagtgggagctagaggtgggaaatgtctaaggctgtaagacgtggtagaacgttcggagcgcttcttgagtagggtgagttgaagcacatccacatgcttgcgcttgcgcttctgatgttttcccgacttgaggctgccctcaaaagcatcaacgagatcaggacccgactgcanattttcaacaggtccccaagtgctggcagtctcaggccctccacgccatttgattag

SEQ ID NO: 55499 - DNA, 714 bp, Glycine max
  unsure (1)..(714): unsure at all n locations
  Clone ID: LIB3109-057-C3-F3A
ttagagatttggaaggtaatgtgccactatgggaggctatagtgggaggacatgaatcaatgagcaagctgttatcagagaatggagcaaatttgcaatgcggggatgtgggccaatttgcatgtactgccgctgaacaaaacagcctcaacttgctgaaggaaataatgcgctacggaggagatatcacgcttccaaacagcagcaacacagggaccacagctttgcacgttgcagtctctgaaggcaacgttgagactgtcaaattccttttggatcacggggcgagtattgacatgccagacaagcatggctggaccccaagagatcttgcagatcagcaggcacatacagaaatcaaagccctttttgattccattggggagcctaaggtccattcttccgtcgctattccggtgaggaatagcaagatcaagtaccttggtaggttcacaagtgagccaaccatgacattgcctcttgatggatcgtttcatggaactgatggctcttggagccagaaccagagccaaaaccagagccggccgaggcgtcggagcaacaactaccataactctctgttcgggatattgtcagcagcacacaatggggaaaagtacctgctttcagctgttgacatgaataacaatgcnaggaatggtatgaagagtagtagtgcagttggtccaactagagttataattagttgtcctg

SEQ ID NO: 55500 - DNA, 681 bp, Glycine max
  unsure (1)..(681): unsure at all n locations
  Clone ID: LIB3109-057-C3-R3A
agttggaccaactgcactactactcttataccattccttgcattgttattcatgtcaacagctgaaagcaggtacttttccccattgtgtgctgctgacaatatcccgaacagagagttatggtagttgttgctccgacgcctcggccggctctggttttggctctggttctggctccaagagccatcagttccatgaaacgatccatcaagaggcaatgtcatggttggctcacttgtgaacctaccaaggtacttgatcttgctattcctcaccggaatagcgacggaagaatggaccttaggctccccaatggaatcaaaaagggctttgatttctgtatgtgcctgctgatctgcaagatctcttggggtccagccatgcttgtctggcatgtcaatactcgccccgtgatccaaaaggaatttgacagtctcaacgttgccttcagagactgcaacgtgcaaagctgtggtccctgtgttgctgctgttnggaagcgtgatatctcctccgtagcgcattatttccttcagcaagttgaggctgttttgttcagcggcagtacatgcaaattggcccacatccccgcattgcaaattagctccattctctgataaccgcttgctcattgattcatgtcctcccactatagccttccataggggcacattacctttc

SEQ ID NO: 55501 - DNA, 518 bp, Glycine max
  Clone ID: LIB3109-011-F8-F2A
gaacttggtaattttctatcgaaaagtttatgtgcgttgaaggtccccagtacttaagagccgcgagatcataggctcttgcagctttttcttccatatcataacctcccaaatatacttgttttcctttcctagtctgcccttccttcttgcaactattatcccacaaatgcgcttcatacctaccagtccatttatgccttgtgacgcctctatactgcgacgttctttgcccaaatgtgtcaatagattttctatgcacaggctgcttctgaccaagtttagcatgccctctcttctttgcatccacagccacagaatctgttccagaaggagcagtgacacaactagactgagaaccaggactcatagataagcttaaagattgcaactctccacaccccacagtttcaacagataccccacttctctcattccaaatgccacagttcatttgctggtccagaatctgctgatgagttgaatactcccttgttggagctacccagttttgcaaa

SEQ ID NO: 55502 - DNA, 602 bp, Glycine max
  Clone ID: LIB3109-036-F6-F2A
ggataaaacacatcagctagtagcctatggtatgtgctaggatacatggagaccaagaaaggctcaagaagggtgacaaagtagtaaagtacagataataagctttggtgctggctttaaatgaaacagttgtttgtgggaggtaaagaaggatctaggggatacaaaattacacatcagtgggacaactgcattgatggttgcacgtttgaaattacttgatgccaaaaattttagaaacacaattgggtaagatatcaccttctataaatcacattggagagaccagttaaatagttacaaaaacatatgaaaaaaaaatactgaaggaaaaattaacagccaatcaagaacctacttgccatagaaaccagaacagattaaaaaagaagaagatgattaacaacgatttatacttcacattaattagcttaggcatttcatcaagtaggcaagtaggcaagtaggcaagtaggcaagtaggcaagttggttaaatactaaaatccccaaattcctaacaaccagcccaacacaaggcatcaactaccattcaacatgatgtattgtagggagacttgaccataacaaccagtcataaca

SEQ ID NO: 55503 - DNA, 522 bp, Glycine max
  Clone ID: LIB3109-011-F8-F1A
gaacttggtaattttctatcgaaaagtttatgtgcgttgaaggtccccagtacttaagagccgcgagatcataggctcttgcagctttttcttccatatcataacctcccaaatatacttgtcttcctttcctagtctgcccttccttcttgcaactattatcccacaaatgcgcttcatacctaccagtccatctatgccttgtgacgcctctatactgcgacgttctttgcccaaatgtgtcaatagattttctatgcacaggctgcttctgaccaagtttagcatgccctctcttctttgcatccacagccacagaatctgttccagaaggagcagtgacacaactagactgagaaccaggactcatagataagcttagagattgcaactctccacaccccacagttccaacagataccccacttctctcattccaaatgccacagttcatttgctgctccagaatctgctgatgagttgaatactcccttgttggagtacccagttttgcaaacctcc

SEQ ID NO: 55504 - DNA, 521 bp, Glycine max
  Clone ID: LIB3109-011-F8-R1A
ggagacagatttgtgtgttgagcgcatagaacgatgagtttggttggtagaggagcaagttttgcattgtagtagttgtagcaatagccacacaacaaaagaaaacaaaaaaccaagtcttcgtcatcttcgtatgcagagatttttcttcaacatgatgatgatgattagtttatttaccaaacaatgattgccttgccttccttcgtgagatactggtagcaatttcaaaccttttcgagtaaccaaaaagaaaagaaaagaaaaaacaaaagctagaagatgaagcgcatgaatgagagtaacaacaccgatgatggaaacaatcataactggttggggttctctctctcgccccacatgaaaatggaggttacttcggcagccactgtttccgacaacaatgttccgacaaccttctacatgtccccttctcacatgtccaactccggaatgtgttacagtgtcggggaaaatggtaacttccattctcctcttaccgttatgcctctcaagtctga

SEQ ID NO: 55505 - DNA, 573 bp, Glycine max
  Clone ID: LIB3109-011-F8-R2A
ggagacagatttgtgtgttgagcgcatagaacgatgagtttggttggtagaggagcaagttttgcattgtagtagttgtagcaatagccacacaacaaaagaaaacaaaaaaccaagtcttcgtcatcttcgtatgcagagatttttcttcaacatgatgatgatgattagtttatttaccaaacaatgattgccttgccttccttcgtgagatactggtagcaatttcaaaccttttcgagtaaccaaaaagaaaagaaaagaaaaaacaaaagctagaagatgaagcgcatgaatgagagtaacaacaccgatgatggaaacaatcataactggttggggttctctctctcgccccacatgaaaatggaggttacttcggcagccactgtttccgacaacaatgttccgacaaccttctacatgtccccttctcacatgtgcaactccggaatgtgttacagtgtcggggaaaatggtaacttccattctcctcttaccgttatgcctctcaagtctgatgggtcacttggtatcttgggagctcttcatagatcacaaacgcaagtgatg

SEQ ID NO: 55506 - DNA, 57 bp, Glycine max
  Clone ID: LIB3109-036-F6-F1A
ggataaaacacatcagctagtagcctcatggtgatgtgctcaggattacatggagac

SEQ ID NO: 55507 - DNA, 513 bp, Glycine max
  Clone ID: LIB3109-036-F6-R1A
gaagatgaaaaaaaactcaattaaacaaagaaatactcctacactcaattaaatactccaagtgtgtgtttggatggagcaattaaagtaagtaaagtattttaattgagatattaaaatgcttccttgtaaaatgatctgtttggatagggtattttagaagtaattaaaatgtcatcattttattgaagcattttaataaagtaaattggcagaatttcaaattctcacaaaaaatagaggaattaaaattcccagccactcttaggctctctctccctctcagccacatgctctctctccatctcagccactctcacgatgatagttctctctcagctgcacgctctctctcacgatgctagcgcgctctctctctctcagcacactagctctgtccgtacctctctctccctctcagccaccctcatgcaccacacctagctctctctcaagtaagtttcccttgcgatttcgacccactctcgctgtgccatggtgtgttcatttttt

SEQ ID NO: 55508 - DNA, 542 bp, Glycine max
  Clone ID: LIB3109-036-F6-R2A
gaagatgaaaaaaaactcaattaaacaaagaaatactcctacactcaattaaatactccaagtgtgtgtttggatggagcaattaaagtaagtaaagtattttaattgagatattaaaatgcttccttgtaaaatgatctgtttggatagggtattttagaagtaattaaaatgtcatcattttattgaagcattttaataaagtaaattggcagaatttcaaattctcacaaaaaatagaggaattaaaattcccagccactcttaggctctctctccctctcagccacatgctctctctccatctcagccactctcacgatgatagttctctctcagctgcacgctctctctcacgatgctagcgcgctctctctctctcagcacactagctctgtccgtacctctctctccctctcagccaccctcatgcaccacacctagctctctctcaagtaagtttcccttgcgatttcgacccactctcgctgtgccatggtgtgttcattttttttcgttaatttgagatttattttttattt

SEQ ID NO: 55509 - DNA, 662 bp, Glycine max
  Clone ID: LIB3109-031-F1-F4A
ttctaataaacaaacaaattaaatcatattggacagtgacatgcacttgaatatagtatttttttggtaaagcttgtatactagtaattagatttatgagtaaaatattatgtcttaaaaaaagggaaacggtactgtgttctttttttttagaattgaaacgaagtaagcgacaaacagatctgcacagctaccaagttattatatgagtaaaaaaaatgtttcttttaataggaaaatactatttctagagctcccaattaacattcttttcatgaaagttaaacatggggtctcatagaaagttgatattttctacaagtgactaattagcataatacttttgttctgctgaaaatagcatctattttttaattcttaatatggcaagagtaattgatcggatgacaaataccgtggcataacagcatgcatgaaaattgagatggaaaaaagaaaagaaagaaaaactgagtattgctttcttttagacgtacgaaaaattacccttcaccaaattacaatacccccggccacctctatttaattcatataagatacataatgttcgtatatgaataatgagaggatattatcttttctgttttaatgacaaataaataaataaaaagtggcaaaaagaggggaaaggggtggatgaa

SEQ ID NO: 55510 - DNA, 760 bp, Glycine max
  unsure (1)..(760): unsure at all n locations
  Clone ID: LIB3109-031-F1-R4A
accgagaatcggcggctgctgagagcctagcatacgatgctttaccaaaaaaatactatattcaagtgcatgtcactgtccaatatgatttaatttgtttgtttattagaatgaaactatgattacccagcttgttagaattatattatttatttaagaataagtattttcttataaattaaaactaaataactaatattatttgaatagttaacattaaaaaatattctttagagggtggtaattctttgtttgaattaggtgttttgcatgcttttagtaggtttagattgtttcgtttatagagaaaattaacagtaaaatcactatttcagtattatggctaatttttttctcctcaagtcccaaatcactaggataagtataggtcattcatgtaggggtaaaggctcttttgttagggggtagagtagtcactacctgtaggtacaagacacacacagcttccttcttctttttactcttttttaactaagggttattttgtaattaagttttcatattagtattgtcatattctcttctagctcactttcatcctttttttcccttcatatttctatctttattttttatatttatcatatcacataggcggaggaagatagaaaaaaaccaaaatatgatttgttctttctattttcctgcacctatatatacaccaaaaaatgggatgtatatatatggggtnttttcttgtatccggnccgttcataatcataatataatgattcaacaa

SEQ ID NO: 55511 - DNA, 584 bp, Glycine max
  unsure (1)..(584): unsure at all n locations
  Clone ID: LIB3109-011-F8.F2A
gcgcgcgtgcgnnggctcgcctcctctggggcggccgcttttttttttttttttttttttttttttttgaacttggtaattttctatcgaaaagtttatgtgcgttgaaggtccccagtacttaagagccgcgagatcatatgtttttgcagctttttcttccatatcataacctcccaaatatacttgtcttcctttcctagtctgcccttccttcttgcaactattatcccacaaatgcgcttcatacctaccagtccatctatgccttgtgacgcctctatactgcgacgttctttgcccaaatgtgtcaatagattttctatgcacaggctgcttctgaccaagtttagcatgccctctcttctttgcatccacagccacagaatctgttccagaaggagcagtgacacaactagactgagaaccaggactcatagataagcttagagattgcaactctccacaccccacagttccaacagataccccacttctctcattccaaatgccacagtttcatttggctgctccaggaatctgctgatggagtgtgaatacctccctttggttggaggctaccc

SEQ ID NO: 55512 - DNA, 596 bp, Glycine max
  Clone ID: LIB3109-047-B3.F3A
tcctacagtaaaaatcaaaggaattttatgggacaagatttggagggcctaagtatcaaagagcttcagaatttggagcatcagcttgaaagtgctctcaaacacattagatcacggaagaaccaactgatgtatgaatctatttcagagcttcataaaaaggataaggccctacaagaacaaaacaacactctcgctaagaagataaaggagaaagagaaggcactagcccaacaggcacaactggagcgacttggtgatgaagtggatctgacttcctctgcccttgttccccaaccactggtgacatcaaacattagaacctcctcacaaatcagaggtgaaggagataacgaaggaaccccaactccaacccaagctaatgccattcttccaccttggatgcttcgtcctacaaatgaatagaatactatttaattaatgacataaagttttaatcaaattaaatatgaatatggccaatacaaagctcaccctacaagatgtaaaatggtctagtgtgtttgatttggggaatggcacccggtggactttgatcaggttggcaatactcaaccgattatgtaaatatggtc

SEQ ID NO: 55513 - DNA, 562 bp, Glycine max
  Clone ID: LIB3109-016-Q1-K1-A2-f6
atggtctcattcctcactatcaccgtctcttggcagcttacgtcaattgtcagaaggttggggccccgcctgaagtggtggcaaggttatgaagaagcatgtgcttctgcagcgacaatggctggtggtgatgcagcagctggatcaagctgcataggtgaagatccagctttggatcagttcatggaggcttactgtgagatgctcacaaagtatgagcaagaactctccaaacccttaaaggaagccatgctcttccttcaaaggatcgagtgccagttcaaaaatcttacaatttcttcctccgactttgctagcaatgagggtggtgataggaatggatcgtctgaagaggatgttgatctacacaacatgatagatccccaagcagaggacagggatttaaagggtcagcttttgcgcaagtatagcggatacttgggcagtctgaagcaagaattcatgaagaagaggaagaaaggaaagctacctaaagaagcaaggcaacaattacttgaatggtggaacagacattacaaatggccttacccatccgaatccc

SEQ ID NO: 55514 - DNA, 608 bp, Glycine max
  unsure (1)..(608): unsure at all n locations
  Clone ID: LIB3109-016-Q1-K1-A2-f7
gttgatctacacaacatngatagatccccaggcagaggacagggatttaaagggtcagcttttgcgcaagtatagcggatacttgggcagtctgaagcaagaattcatgaagaagaggaagaaaggaaagctacctaaagaagcaaggcaacaattacttgaatggtggaacagacattacaaatggccttacccatccgaatcccagaagctggctcttgcagagtcgacaggtctggatcagaagcaaatcaacaactggtttattaatcaaaggaaacggcactggaagccttcagaggacatgcagtttgtggtgatggatccaagccatccacactattacatggataatgttctaggcaatccatttcccatggatctttcccatcccatgctctagaaaattatccctcgtttgtgggctgctgataatagattcataaactcgtgctgtcacttattaaaaccttacaattattaatattaattaatatgcattctaagaaatcctagattgctatactataatatagtacgcaggtgtatcccttgctagctttttagaanaaaaaaaaaaaaaaaaaaaaaaaaaaagcggccgctct

SEQ ID NO: 55515 - DNA, 376 bp, Glycine max
  Clone ID: LIB3109-016-Q1-K1-A2-f8
ccttacccatccgaatcccacagctggctcttgcgagtcgcaggtctggatcagaagcaaataacaactggtttattaatcaaaggaaacggcactggaagccttcagaggacatgcagtttgtggtgatggatccaagccatccacactattacatggataatgttctaggcaatccatttcccatggatctttcccatcccatgctctagaaaattatccctcgtttgtgggctgctgataatagattcataaactcgtgctgtcacttattaaaaccttacaattattaatattaattaatatgcattctaagaaatcctagattgctatactataatatagcacgcaggtgtatcccttgctagctttttag

SEQ ID NO: 55516 - DNA, 621 bp, Glycine max
  Clone ID: LIB3109-016-Q1-K1-A2-r5
cacacacacacacacattcactgtcttatcctttttgccctaccaccacccttgtgtagaatactcactagctaaccttacaacaaaccaaacaaaaacaaacacgacacacaattctcttattctctctctcaattttattatgagggctctcccgggttttatggtaaaagagtatcaggctttttacagaaaatcctaaatagtgatagtggtggctatagtcagttacatgaagtaagtagtaagtggtaatagagggtttggttttctcacttggcttttctgggaaagcctgcacagggtttttaggttaatctttctttctttctttccatgccactaagtatgattctagtggttacacggttacacctgtgagtgagaggacacagcagaacgcacgcggggcacactgagaaaacgatgagttagtggtagcgaacaagagaaggggggcgagggttcatgtaaggcactgctacaaacaaaggcttttaccttcccaatgaaaactctccctctcgtttcctgcactgccactgatacgctgtcattcctggcataaacacaagagagagaaggaacgatcgatcaaatcgaggaagagaaaacaagtta

SEQ ID NO: 55517 - DNA, 406 bp, Glycine max
  Clone ID: LIB3109-016-Q1-K1-A2-r6
tcatgaagtaagtgtaagtggtaatagagggtttggttttctcacttggcttttctgggaaagcctgcacagggtttttaggttaatctttctttctttctttccatgccactaagtatgattctagtggttacacggttacacctgtgagtgagaggacacagcagaacgcacgcggggcacactgagaaaacgatgagttagtggtagcgaacaagagaaggggggcgagggttcatgtaaggcactgctacaaacaaaggcttttaccttcccaatgaaaactctccctctcgtttcctgcactgccactgatacgctgtcattcctggcataaacacaagagagagaaggaacgatcgatcaaatcgaggaagagaaaacaagttacctactactgaccatc

SEQ ID NO: 55518 - DNA, 244 bp, Glycine max
  Clone ID: LIB3109-016-Q1-K1-A2-r7
agcagtacgcacgcggggcacactgagaaaacgatgagttagtggtagcgaacaagagaaggggggcgagggttcatgtaaggcactgctacaaacaaaggcttttaccttcccaatgaaaactctccctctcgtttcctgcactgccactgatacgctgtcattcctggcataaacacaagagagagaaggaacgatcgatcaaatcgaggaagagaaaacaagttacctactactgaccatc

SEQ ID NO: 55519 - DNA, 611 bp, Glycine max
  unsure (1)..(611): unsure at all n locations
  Clone ID: LIB3109-031-Q1-K1-H4-f5
cttcgtctgcctcatctaaaacagttgacatcatatctatctcccccatgttcctnagtatcagcccccataacattcagctcatgattcaataaactgctttctgtctccatcccctgacttctacagaaacccaaaacagcaggtgaagactgcacctcagatatgttactgggcatacaactgagaggaaactgtgatcctacttccatagacgtcagctcagatataggtggaaccatcacattagaaacctgagtggatgaactactgctatctgatgcaatggcagaaggaatatcatcaataaggaaaacatcagggttcttaattgatgattgtgttgtagaattgtttatttgcaatatctggcgaaataatgcttttgcagcctcatttatggaactctggtacttgacaatgtgtccatcaagagaactatggagatccttggtggctaaactatcttcttcttgtcgctggagcctcctctttttattgctcccagggatatgtttactactttcattctgctgctgaacaaattgagctaagaagcctgggctctgcatggccttagccaggaatgacatcatttgctgctgacgctg

SEQ ID NO: 55520 - DNA, 595 bp, Glycine max
  unsure (1)..(595): unsure at all n locations
  Clone ID: LIB3109-056-Q1-K1-A4-f5
tggtacagnagncgnntgttcaggggacaggnggaggggtcagaagaagagagggagaagcccagctgataaagaaagtaaacggctaaagaggctactgaggaaccgagtttcagctcagcaagcaagggagaggaagaaggcatacttgattgatttggaaacaagagtcaaagacttagagaagaagaactcagagctcaaagaaagactttccactttgcagaatgagaaccaaacgcttagacaaatattgaagaacacaacagcaagcaggagagggagcaataatggtaccaataatgctgagtgaacataatgtcaaaagatggcagagaaaacttatagatggaatagatttagaaagagagaatacattagccagaaagagaaaaaaaaattggacattagttgatgattctttctaggtgtgcgtttggaatacaatgaagtaaaggatgaaccttaagacatgctttatcctaaaatagtgtgatctgatattccattgttaatgagtaatgtaattatcatacaaacaatttgtagtctcattttaattaataattattaaactacttgattacttatggtc

SEQ ID NO: 55521 - DNA, 616 bp, Glycine max
  Clone ID: LIB3109-056-Q1-K1-A4-r5
tctctggcctcttcttatctcttatactctcagacctggttgctttggatcagcatatgaaagtgagtgaaccttttcggattgacctatagatgtagtttgcatagattgagcatcagaagtagcacatggaaactcaccagacatcggttgcccgtttgctagatgggggtttggtatttgagaatcatgtccagaagatgaagagaggtcagcatcttcttcccatagcatccccgccttggaactgtttccttggccatagttgatctcattatctagatcatcagcatcgtcttcatcatcatcatctccctccacttcagcaccctcttggtgacttgtgaatgcagtcttgcactggggacaagactggctcatatgtttcagctcatactcgtaacaagaatgacaaagtgggaagccacactcatgacaagcgacaaagacatcaccagtagccgttaatccaatggtatcaccacatatttgacaactctgaccattcaaattcttcaagggtttagacctactatcagagccgtgtctaactctaacaagttcgttcctttcatgcgacccagttaccattccgccacttcgttccatctttctt

SEQ ID NO: 55522 - DNA, 730 bp, Glycine max
  unsure (1)..(730): unsure at all n locations
  Clone ID: LIB3109-011-F8-F3A
gaggacttcttaaggggtgcaactatgggaactcacgaatatgggaaccacgagagaggtttgagcctagacagcatctattataactcacaaaacgcagaggctcaacccaacagaaaccttctttcacatcccttcaagcaacaagggcatgtgaatgtcgaaacacacccttattactctgtatttgcttgtcgaggtttgtatcaagcaccgtcggaggaagaagcaacaaaggaaacgcacgtttcagtgatgcctcaaatgacaggaggaggtttgcaaaactgggtagctccaacaagggagtattcaactcatcagcagattctggagcagcaaatgaactgtggcatttggaatgagagaagtggggtatctgttggaactgtggggtgtggagagttgcaatctctaagcttatctatgagtcctggttctcagtctagttgtgtcactgctccttctggaacagattctgtggctgtggatgcaaagaagagagggcatgctaaacttggtcagaagcagcctgtgcatagaaaatctattgacacatttgggcaaagaacgtcgcagtatagaggcgtcacaaggcatagatggactggtaggtatgaagcgcatttgtgggataatagttgcaagaaggaagggcagactanngaaggaaagacagtatatttgggagggtatgatatggaagaaaaagctgcaagagcctatgatc

SEQ ID NO: 55523 - DNA, 720 bp, Glycine max
  unsure (1)..(720): unsure at all n locations
  Clone ID: LIB3109-011-F8-R3A
cctcctcctgtcatttgaggcattactgatttgtgcgtttcctttgttgcttcttcctccgacggtgcctgatacaaacctcgacaagcaaatacagagtgattagggtgtgtttcgacatttacatgcccttgttggctgaaaggatgtgaaaaaaaggttctgttgggttgaacctttgcgttttgtgaagtataataaatgctgtctaagctcaaacctttttcgtgggtcccatattcgtgagttcccataagtgcaccaactaaaaaagtgctccaatttccgaaacgaagttggcaccatcacttgcgtttgtgatctattgagagcttccaagataccaagtgacccatcagacttgagaggcataacggtnagaggagaatggaagttaccattttccccgacactgtaacacattccggagttggacatgtgagaaggggacatgtagaaggttgtcggaacattgttgtcggaaacagtggctgccgaagtaacctncattttcatgtggggcgagagagagaaccccaaccagttatgattgtttccatcatcggtgttgttactctcattcatgcgcttcatcttctaagctttgntttttcttttcttttctttttagttactcgaaaaggtttgaaattgctaccagtatctcacgaaagaaggcaaggcatcattgtttgtaaataaactaatcatcatcatcat

SEQ ID NO: 55524 - DNA, 360 bp, Glycine max
  Clone ID: LIB3109-016-Q1-K1-A2-F1A
ctaaaaagctagcaagggatacacctgcgtactatattatagtatagcaatctaggatttcttagaatgcatattaattaatattaataattgtaaggttttaataagtgacagcacgagtttatgaatctattatcagcagcccacaaacgagggataattttctagagcatgggatgggaaagatccatgggaaatggattgcctagaacattatccatgtaatagtgtggatggcttggatccatcaccacaaactgcatgtcctctgaaagcttccagggccgtttcctttgattaataaaccagttggtggattgcatctgatccagacctggcgactctgcaaaagccagcttc

SEQ ID NO: 55525 - DNA, 702 bp, Glycine max
  Clone ID: LIB3109-031-Q1-K1-H4-F1A
tttttatttttgtttttttgttttttttttgtatacggaacatccccacaaaaatatcatcgcattggaaacgggggcatagttattaaaattcaagatacatggagatatatgaagtttcgtgaacttgtatgtttttaagcccccaatgtcaaacagaacacacgacgacattacaagcggataaaagcaccgatcaagttgttggatctgtcaggtttctttgttgaataagtaagatggctttgcctgcccagtaccaaaggggacctcaaccttcggttgtgagtaacatatatacacacaatcagtactccaatgcatgaagtcccatctgttgagtaacacagtcaccatgtggtattgtctcaaaattttcctgcttatttcccatttctgaaggcaaaccctgatcttcagtcaaaccacatcctagagagctacatttcagttcctctgtgtcttcagtaagagggcttggccttaaaaacagttcccagaattcatcactgaattctgggagtttagaaattccatctgtgtcaggtgaaaaatgatcagcttcgtctgcctcatctaaaacaggtgacatcataactatctcccccatgttcctagtatcagcccccataacattcagctcatgattccataaactgctttcagtctccatcccctgacttctacagaaacccaaaacag

SEQ ID NO: 55526 - DNA, 500 bp, Glycine max
  Clone ID: LIB3109-052-Q1-K1-B1-F1A
aaaaatataatcttcattactaaatatcacaattgtttatacttgaacaacaagcacttaaaacatggggaagagatagaaaaattgtaatttaaatatttaaaatttagtgtaaaaaaagatggaaaaattataatttagtaatagtatttaaaatgctataagcgttcattttcactttattatcaaccttagacgaaaaagtctttgttcaataacacggaacctaaaaccacacaatgatctttggggattaacatctagaaaatccttagtctttttcacaagccatcttcaagcaacagcagcagcaaccacaagtgtaggaaatccaaagaatgactcgtgaagtgtatgattaggatataagagagatgccagaagtaatcaaatcaaccgccaaaaccttgattgcagcctctgaaggctgaaaaccatcccagaatacatattcagaagcattagcacatgttcctatggacttcttattgcacaaaata

SEQ ID NO: 55527 - DNA, 227 bp, Glycine max
  Clone ID: LIB3109-056-Q1-K1-A4-F1A
gaccataagtaatcaagtagtttaataattattaattaaaatgagactacaaattgtttgtatgataattacattactcattaccaatggaatatctgatcacactattttaggttaaagcatgtcttaaggttcatcctttacttcattgtataccaaacgcacacctagaaagattcatcaactaatgtccaatttttttttctcttactggcaaatgtattctc

SEQ ID NO: 55528 - DNA, 558 bp, Glycine max
  Clone ID: LIB3109-019-Q1-K1-A10.F3
ctcatcatgaaatccatacctcggaatcaacaaatgccaacaaatccaattcaaactcagatggagcggcagcagtagcagcgacagcagatggggatggcacattcagcatactcaaatccggcatttccagcatttccagctcggcaaattcagctgccaaatttttagtctcagcaacttcagcctccaatcctttagtctcaacaacttcattgcttgaaaccttaccactcccaatcaaattgaaagcagatgtatccaattcaagcacagaagatggtgatgtgagtgacaacacactctctgattcatccatagaagcagacttggagtctgatacagaacctgcagcagaagaaacacaatagttggaactgttattttctgtggcagccacagtttcagcagaagcaacaacattgttgttgctgctgctgttgctgccattgttgctcttctcatcagatagagccttggccatggcctcaaattcaagccttctggcattataggcttgagaagcctcttctgcagtgctgaaagtacccaaccaga

SEQ ID NO: 55529 - DNA, 264 bp, Glycine max
  Clone ID: LIB3109-019-Q1-K1-A10.F4
acattgttgttgctgctgctgttgctgccattgttgctcttctcatcagatagagccttggccatggcctcaaattcaagccttctggcattataggcttgagaagcctcttctgcagtgctgaaagtacccaaccagattcgcgcgcccttgaaagggtcacgaatctccgcagcccatttgccccatttccgcatccgaacacctttgtatttcccacaagattgcctcttgactgtgggagttttacccaaaaccctcttc

SEQ ID NO: 55530 - DNA, 446 bp, Glycine max
  Clone ID: LIB3109-019-Q1-K1-A10.R3
cgatacgatttcgacgactttggtgctgatgagtttgctggttggattgaagaacccctcaatataccttgcgtatagattttgcagcttcataggaatgagttctatccaagagactagtactactacaacattacaagttgtgtcattgcttaaaaatgctatagttttttgagatctcaggaaaaaactagttcctgggagagttgttttgtcaggtttgttttaatttatttgtttctttagggatggaagatcaatgagaggttaagagacaatgccttggtttttcttgtgctattagagccgtccaagggtttttcaatttctattatcgtgaaagttgagtgtgtagatgtctatcaaacttgaaatctactatctttatcagaaattctatggtatccttggaaaagtaccccgcagaaaaaaaaaaaaaaaaataa

SEQ ID NO: 55531 - DNA, 685 bp, Glycine max
  unsure (1)..(685): unsure at all n locations
  Clone ID: LIB3109-019-Q1-K1-A10.R4
ttctgctgcaggttctgtatagactccagtctgcttctatggatgaatcagagagtgtgttgtcactcacatcaccatcttctgtgcttgaattggatacatctgctttcaatttgattgggagtggtaaggtttcaagcaatgaagttgttgagactaaaggattggaggctgaagttgctgagactaaaaatttggcagctgaatttgccgagctggaaatgctggaaatgccggatttgagtatgctgaatgtgccatccccatctgctgtcgctgctactgctgccgctccatctgagtttgaattggatttgttggcatttgttgattccgagtatggatttcatgatgagcatgactttgatgatgatcttgctgccctggaagactttcacatttgcggtttcgatgacaatgagcctagcgagcttcccgattacgattttgacgactttggtgctgatgagtttgctggttggattgaagaacccctcaatataccttgcgtatagattttgcagcttcataggaatgagttctatccaagagactagtactactacaacattacaagttgtgtcattgcttaaaaagctatagttttttgagatctcaggaaaaactagttcctgagagagntgntntgtcaggtttgtttaatttatttgtttctttagggatg

SEQ ID NO: 55532 - DNA, 73 bp, Glycine max
  Clone ID: LIB3109-036-Q1-K1-C7.F3
aaatgctcttttccgttgtggatagcaatggtatggccaatcattgtaggtataatggtagatgctctggacc

SEQ ID NO: 55533 - DNA, 546 bp, Glycine max
  Clone ID: LIB3109-036-Q1-K1-C7.R4
ttcacctactctaaatttccgaggacatgcgaaaaagataatagatctcgtcgttaacgttaattttaacataaatttttaaatcgtaatttataactaaatattacaaaatggaattcttattaaaatgaaattcaaatcatttcttttataaaaaaaaaaaaattctttaattaaatatttaatgaaattaaatatttaaattaataaaattagtcgtgttttattcgattttttgaattggtttttttttacagtagctaatgctagtcaccgaacttagtcaatgagctagaatgggttataaagatatctatagatatatatagatatatttatctatagatatctttagaaaaaaaaaaagaaaataaacaaataagacgtatcattttatgtatagtagtggggaattatgggacaaaaaataaatccgcttggtttcagacttggtacaactcaaagtcatgattctatttggtttgctcaaccaacaaattattccgagaattacaagaagataaaaaaatacgagattgtcccccc

SEQ ID NO: 55534 - DNA, 513 bp, Glycine max
  unsure (1)..(513): unsure at all n locations
  Clone ID: LIB3109-041-Q1-K1-F10.F4
gtactgcttttttttctctttcctgtaaagccggctgcattgaaactttgggagcactgactaccaatgatgaaagtgatctttccttcctttttgcaggcaatgatattgaagacaaaacttcttgggctttgatcttttttcttttaaaagggaatatttttgcccttatatcatgcaaattatggtccggcctgagtttctccaccggaaggcagcctaagtcaatatggcacacaggacagcaatccatctcctcatccgagagtttctcatatatgcacttcctgcaaaaggtgtgaaggcagagagagatggtggtggcatctttgaagaacttgtggcagagagggcatgtcatgcatggtcgtagcgtatttctctttactttcaccacctggctcggcgacaccatctcgctacgatgattgattattagtattaatcaattaaacttgcattccaatcttgtctaatgaataaaacacaccgtaccacaccgatntcgacgtc

SEQ ID NO: 55535 - DNA, 351 bp, Glycine max
  Clone ID: LIB3109-041-Q1-K1-F10.R3
ttgcctccttgccaaagtttcctattctatctatatatcattttccctccgctactttacatacatacacaatcaactgttttgatagcattctcaccgatattactgcttagagatttgttcatttagtagcatgcgaggaatctatgattttgttttgctcatgactgaatatgtgcagccagcaattttcagttttcttctgcttcatttgctgctgttctttggatcatgattactatttccttttgatccaatgatgcctttccccttagtaagaatcaaaatgagtggttataaatcaggaagtactctaccaaaatttctctaatccaagatgcaatcattttc

SEQ ID NO: 55536 - DNA, 711 bp, Glycine max
  Clone ID: LIB3109-041-Q1-K1-F10.R4
aagcggaacaatcaaatggtgatgataatatggattctcccatgcctgagcattctaagaagcataagccccatgaagatacagagaacagtgtgcaacatacagaagggaaggttgatctttggacaccactgaactgtcttgttgaagctgccaacagaacaaagtcctccaggtcaaattcacaagcaactcctcttgccaaattagagtccccaactactcctcatggtggacaggatgcatctgaaactacaaccaaaacagacctacctgcttctgcccagagtgaattaaacattccaaaatccaaaaataaggatactggacttaaaccaatatttggagatgacaaggatgcaaacagcttgcctttaggaccagtgaagcgaagaagattgcgtcctgctggtcagaaaagggttgcagcatctgagatgtctgcctcatccccagccccactcgatgcaacagggggcaagtgcaacagaaaaaacagtcctatttggttttcattagttgcttcagaggaccagaaaggagattttcccttgccacagatctcagcatgttacttacgaataaaggatggtactgtgcctgtctcatttattcaaaagtaccttatgaagaaacttaatcttgccagtgaagcagaggtggaaataatgtgccgaggtcagccagtgctcccatctttacaactgcata

SEQ ID NO: 55537 - DNA, 549 bp, Glycine max
  Clone ID: LIB3109-047-B3.F1A
cgtaacacttagataaaaccattagttcatacaaaatttaatatttctgttgtaaaaaatcatagattttgagggatctaacatcgcccaatatcgtagtttctagcacaacttaaacttttgataagaaccaaacatacataattgacactatatatgtattgtaggcctgtatagacaggccataccatataatttactaagcatccttgaaatgtggtagtcacagacatattacatatcgttgatattccaactgatcaagtcaccgggtgccattcccaaatcaacacactagaccattttacatcttgtagggtgagctttgtattggccatattcatatttaatttgattaaaactttatgtcattaattaaatagtattctattcatttgtaggacgaagcatccaaggtggaagaatggcattagcttgggttggagttggggttcttcgttatctcttcactctgatttgtgaggaggttctaatgttgatgtcacagtggtgggggacaagggcagaggagtcagatcacttcatcac

SEQ ID NO: 55538 - DNA, 480 bp, Glycine max
  Clone ID: LIB3109-047-B3.F2A
cgtaacacttagataaaaccattagttcatacaaaatttaatatttctgttgtaaaaaatcatagattttgagggatctaacatcgcccaatatcgtagtttctagcacaacttaaacttttgataagaaccaaacatacataattgacactatatatgtattgtaggcctgtatagacaggccataccatataatttactaagcatccttgaaatgtggtagtcacagacatattacatatcgttgatattccaactgatcaagtcaccgggtgccattcccaaatcaacacactagaccattttacatcttgtagggggagctttgtattggccatattcatatttaatttgattaaaactttatgtcattaattaaatagtattctattcatttgtaggacgaagcatccaaggtggaagaatggcattagcttgggttggagttggggttccttcgttatctccttcacctctgat

SEQ ID NO: 55539 - DNA, 476 bp, Glycine max
  Clone ID: LIB3109-047-B3.R1A
gttggtgtggtagagataataagagaggatcatagtagtgctagaaattgaagtgtgtaatagaatagtgatagagagagagagatatggggagaggaagggtgcagttgaagaggatcgagaacaagatcaataggcaagtgacgttctcaaagagaaggtctggtttgctcaagaaagcacatgagatctctgtgcattgtgatgctgaagtggccctcatagtcttctccaccaaaggcaaactctttgagtacttcagcgatccctgtatggaaaaaattcttgaacggtatgagaggtattcatatgcagagaggcagcttgttgcaagtgatcaaccactaactgaaaattggactctggaacatgcaaagctgaaagcaaggttggaagtcctacagaaaaatcaaaggaattttatgggacaagattttggagggcctaaagtatcaaaagagctttcaggaattttg

SEQ ID NO: 55540 - DNA, 396 bp, Glycine max
  Clone ID: LIB3109-047-B3.R2A
gttggtgtggtagagataataagagaggatcatagtagtgctagaaattgaagtgtgtaatagaatagtgatagagagagagagatatggggagaggaagggtgcagttgaagaggatcgagaacaagatcaataggcaagtgacgttctcaaagagaaggtctggtttgctcaagaaagcacatgagatctctgtgcattgtgatgctgaagtggccctcatagtcttctccaccaaaggcaaactctttgagtactttagcgattcctgtatggaaaaaattcttgaacgggatgagaggttttcatatgcacagaggcagcttgttgcaagtgatcaaccactaactgaaaattggactctggaacatgcaaagctgaaagcaaggttggaag

SEQ ID NO: 55541 - DNA, 280 bp, Glycine max
  Clone ID: 700605901H1
tctatttctcagtctctgtgtttgcggctgaggattccgaacgagtgaccttcttcgtttctcgcaaagtttaagtaatcatgggtaaggaaaaggttcacatcaacattgtcgtcattggacatgtcgactctgggaagtcaactaccactggtcacttgatctacaagcttggaggtattgacaagcgtgtgattgagaggttcgagaaggaggctgccgagatgaacaagaggtcatcaagtatgcctgggtgctcgacaagctcaaagctgagcgt

SEQ ID NO: 55542 - DNA, 284 bp, Glycine max
  unsure (1)..(284): unsure at all n locations
  Clone ID: 700605902H1
caaaaggaagaggaaaagcacgaatggcaacacaagcaggaaaagcaccaaggaannnnnnnnnnnnnnnnnnnnnnnnnnnnnnnnnnnnatgaggagcaagacaaagagagccaagaaagtgaaggttctgagtctcaaagagaaccacgaagacataagaataagaacccttttcacttcaactctaaaaggttccaaactctcttcaaaaaccaatatggccacgttcgcgtcctccagaggttcaacaaacgctcccaacagcttcagaatctccgaga

SEQ ID NO: 55543 - DNA, 278 bp, Glycine max
  Clone ID: 700605903H1
ttggcatttctccttctaagaatacaagtggtggttttctacaatatataccttttgtaaatatcgtctgttgttaacttgttaaactgttttgcattttgcacatgacttgtgctggatgtgtgttgtgaatataataaatctaatcacctagccgagaaaattatgggaaaactctttttctgggggaattcattagaaaatcccatatggcattcagtatgcttaaatttttttaatgatctcattgatctatacttctttagtataaaaccagg

SEQ ID NO: 55544 - DNA, 281 bp, Glycine max
  Clone ID: 700605904H1
gccccggaattcttggaacatgcgttcgtcgtggacaggcagatagtgagaaagctacaaggtgagaacgaagaggaagagaagggtgccattgtgacagtgaaaggaggtctcagcgtgataagcccacccacggaagagcagcaacaaagacccgaggaagaggagaagccagattgtgacgagaaagacaaacattgccaaagccaaagcagaaatggcattgacgagaccatttgcacaatgagacttcgccacaacattggccagacttcatcacc

SEQ ID NO: 55545 - DNA, 282 bp, Glycine max
  Clone ID: 700605907H1
caccagatgtacgagagctccttccagaccctctcggagcgtctcttcaaggataccccgtggccctccgtggacgccgtcgcgcactacgtcgacaacgaccacgtcttctgcctcctctaccgcgagatgtggttccgccacctctacgctcgtctcactccgacgctccgccagcgcatcgactcgtgggacaactactgcagcctcttccaggttgtcctccacggggtcgtcaacatgcagctccccaaccagtggctatgggacatggtcgacgag

SEQ ID NO: 55546 - DNA, 281 bp, Glycine max
  unsure (1)..(281): unsure at all n locations
  Clone ID: 700605908H1
actcttcctcaccgattgctagaatggaatttcgatgctcagtcatctcttttaccattctcttctctcttgctcttgcaggagagagccatgtccatgcatcgctacctgaggaagattattgggaagctgtttggccaaacactcccattcccactgcactgcgagagcttctaaagcctctccctgcaggtgttganctcgatgaactccctaagcaaattgatganacacagtacccaaaaacattcttcnataaagaagaccttcatccaggcaaa

SEQ ID NO: 55547 - DNA, 280 bp, Glycine max
  unsure (1)..(280): unsure at all n locations
  Clone ID: 700605909H1
ctgaccaagccatggcgatgagaaccaaactttctttagctatctttttcttttttcttttagccttattttcaaacctagcctttggcaaatgtannnnnnnnnnnnnnnnnnnnnnnnaccctgagctcgtaacatgcaaacaccaatgccaacagccacagcaatacactgagggtgacaagcgggtatgcttgcaaagatgtgacaggtatcatcgtatgaagcaagagcgagagaaacaaatccaagaggnaactcgtgagaagaaagaggagga

SEQ ID NO: 55548 - DNA, 246 bp, Glycine max
  unsure (1)..(246): unsure at all n locations
  Clone ID: 700605910H1
gtcgccgctttgatttcgcgagtaacacatgcagtacagtccttcctctcccaaaaacgacctcgttctcctaccttcccaatccctccgtctcgaatccctaatctcatccatcatctcnnactctccctcgccgcctctctctccgccgcacagcgactcctggttccgccgcttccgctccgtctccgattccctatggctccacgccttccgcatgtncaaaccctccttctcccatctcct

SEQ ID NO: 55549 - DNA, 249 bp, Glycine max
  Clone ID: 700605911H1
tttggatttggatttggatttggactttggtcgtcaacacagcttttggtccttcgcttcgtttacgaatcctcttcttgttgttcctgcaacgcactgcattcgatcaatccatccatcttcacttgcttggtttcgatcggagggaaatggccgatcagttatccaaaggagaggaattcgagaagaaagctgagaagaagctcagcggttggggctgtttggctccaagtacgaagatgccgccgg

SEQ ID NO: 55550 - DNA, 279 bp, Glycine max
  unsure (1)..(279): unsure at all n locations
  Clone ID: 700605912H1
cgcttgctctcntctctctccgctcctttcagctttgactttggtggaaactaaagactagtccaaaatggtgaagttcacagctgaagagctgcgtcgcattatggactataagcataatatccgtaaatatgtctgtcattgctcatgttgatcacggaaaatcaaccctgactgattctcttgtgggctgctgctggtattattgctcaagaagttgcagtgatgtccgtatgactgatacccgtgcagatgaagctgagcgtggtattacaatca

SEQ ID NO: 55551 - DNA, 274 bp, Glycine max
  unsure (1)..(274): unsure at all n locations
  Clone ID: 700605913H1
aacttattaacactttccttagttcaatatggggaagcccttcttcactctctctctttcttccctttgcttgctactcttgtcgagtgcatgctttgctattacctccagcaagttcaacgagtgccaactcaacaacctcaacgcgttggaacccgaccaccgcgttgagtccgaagtggtcttattgaaacatggaactctcaacaccctgagctgcaatgcgccggtgtcactgtttccaaacgcaccctcaaccgcaacgggctcnatt

SEQ ID NO: 55552 - DNA, 274 bp, Glycine max
  unsure (1)..(274): unsure at all n locations
  Clone ID: 700605914H1
ttatttgaaaaacacttggggcgntggtgcaaatgtttgctncgttaaattttctctgggagacaacaggctcactgagaaaacaatttttacttgcagagatttggacatcttggttgtttattatacaatagcaactcaatttagaaaatttctaccgcattacattaggtggcatctgnatacctgttgatctacatctcccatcttttctcactgctgaaattaaatataagcggaatttgagtaatattcatatttccggcttatttta

SEQ ID NO: 55553 - DNA, 276 bp, Glycine max
  Clone ID: 700605915H1
ccatcatcatgggccacctctgctattcagcaatcagcattcgcaggtcaaactgctctgaagcagctcaatgagttggtccgcaagaccggtggcgccggcaaaggtcgcaccaacatgcgccgtaccgtcaagagtgctcctcagagcatttggtatggccctgatcgtcccaagtacctgggtccattctcagagcagattccgtcatacctgaccggagaattccccggtgactacggatgggacactgctggactatcagctgacccggaa

SEQ ID NO: 55554 - DNA, 273 bp, Glycine max
  unsure (1)..(273): unsure at all n locations
  Clone ID: 700605916H1
cagcantgaacctttgccgcatggcactttcgatcctcgaagcntctctctcgcccttatcatcgtctttctgttcaggtgcagatgcagatgcagccctcttctccttcacttcactcgaaagatgagcatggatgcacagagtgttcttnctcagcttaatagtctggattgttgaggatcacgngcctgtttggaggggaatggagtgatgcttatgatggcaaaancataaagggntataatccagcaanggtggatctaattgagatg

SEQ ID NO: 55555 - DNA, 275 bp, Glycine max
  unsure (1)..(275): unsure at all n locations
  Clone ID: 700605917H1
gngaagactgccctgtatttgacaacttatttgaattttgtcagatttatgctggtggaactatagatgctgcacgtcgattaaacaatcaattgtgtgatattgctataaactgggccggtggactacatcatgctaagaaatgcgaggcatctggattttgttacatcaatgacttggttttaggaatctggagctcttaaatatcatgctcgtgttttgtatattgatatagatgtgcaccatggtgatggtgtagaagaagccttctactt

SEQ ID NO: 55556 - DNA, 278 bp, Glycine max
  Clone ID: 700605918H1
gggcgggcgagaaccccacctgctccggcagcagctacagaacttagcggcaggtgaaatgatcgaacttgcagcgtaattatttcagtccagctgaaattgaaagtaactgctttctgagattctgcaaccgcatgaaaccctagaaatgagtgccgcaggtggtgcatttggtggcaatagggggctccgtccagtgcctcccgaaaaggggatatttccattggaccacatgcatttgtgtgacctcgagaaaatagaatatctcaattgtctaa

SEQ ID NO: 55557 - DNA, 276 bp, Glycine max
  Clone ID: 700605919H1
cacaaagtccggtgatgccttctttggcaatttcaaagatggatggcgacatggccagtttctttgtattaatgcgaatgggacaaggtacactgaaatttgggaaaatggtgttcttgtagatggcaagtatttagacagatgaccatggtggacaaatgcggtcggtgcccaaaattttgtaattactgtgaattttagtctttctcgatttttatttgtgttttatgttgtataatagctgtttttgccggcaagctatgttttgtagtctgt

SEQ ID NO: 55558 - DNA, 278 bp, Glycine max
  Clone ID: 700605920H1
ttggaaaaagtttcctctacaaaagcacaatttgttagtggaaaaaccttcaaatatgatataattggtgctggttcacattcttcaggagattttcctgaaaaggaagatcaagaaaaacccaaaaagattgataccagattgagacaaagaatagatcctcaatacaatgaggttcaggctcagatggaaacaaatttgtttaaattgtctcttgatgatgttgaaactcctaaaggttctatgttggatcttaaaatttctcaatctaaaattgc

SEQ ID NO: 55559 - DNA, 279 bp, Glycine max
  unsure (1)..(279): unsure at all n locations
  Clone ID: 700605921H1
ggaaaggttagagttgtgaactgccaagggaatgcagtgttcgacggtgagcttaggaggggacaattgctggtggtaccacagaacttcgtggtngcggagcaagccggagaacaaggattcgaatacatagtattcaagacacaccacaacgcagtcactagctacttgaaggatgtgtttagggcaattccctcagaggttcttgcccattcttacaaccttcgacagagtcaagtgtctgagcttaagtatgaaggaaattggggtcctttggtc

SEQ ID NO: 55560 - DNA, 278 bp, Glycine max
  unsure (1)..(278): unsure at all n locations
  Clone ID: 700605922H1
anttgaaattttgataaaccgcgatcacaggttgccgcaccttaaaaccggaaacaaaagcaatcgttacttgatttcaagaatctttcaatttttcctacttctttgtgcacgatttcttaagggaaagaaaatcactctctgtgccggtcacagacttcgtgaatcattttcttttccactcttagtttatttgctgaacactctcctatttgatataggacttcgtgtcagatttaaacttcttctgtctctttctcagttctctgtttaattca

SEQ ID NO: 55561 - DNA, 279 bp, Glycine max
  Clone ID: 700605923H1
gtggtggaggaggaatacacgaagcaatatataggcaatgaaatgaggcgttttgactggccttttcggatctgatcgaatccaaaccctaatctaatcccacaagcctattagtctcattcaatcgaagaagcgagcgagactgtgtctctctcccaggccatgcgaccaccctgttcctccgccatcgccctctccagagaggattcttttttcgttttcgtcgctttctccgtcgattccaccagccatgactgctgacacccacgccgctcctaa

SEQ ID NO: 55562 - DNA, 277 bp, Glycine max
  Clone ID: 700605924H1
ttagattggacagatcctgatcagtcacctgagaaagaaaatgaggcctttcaacgtgcaatggctcttgctggcagtgagtttctggatagtgttcgatttcatgtcaattcatggttaccagcaaggtcaattgtaatggagaccctagaggctagacatactgttgatcctagtggagaaattctagttttgactaaattgtgtccttggaagcttcacttatttgagcttgaggagagttgaaaaatgacccttctgtcaaatatgttctgta

SEQ ID NO: 55563 - DNA, 278 bp, Glycine max
  Clone ID: 700605925H1
gcaaagggttgctgagaggagcttcgttaactgcaaacgcagtttggcatagaagcagtttcttcccaaaggtaacggttagcgtccaccccaagttggtgaaatttcagagcttctcatcaaccaccgcttgctcctctcttccacccccggatttgcctcgtttggcaaaaactgctcaaatttcacttaccccaaacgaggttgaagaaattgctcccaaaattcaacaagttatagaatggtttggacagctgcagggtattgatcttgaaagt

SEQ ID NO: 55564 - DNA, 276 bp, Glycine max
  Clone ID: 700605926H1
gacgttcgttcgtgtctcaaaaaaaggggtactaccactctgtagtgtatatggatgctggaaatcaatgtgttttgtatttgttcacttccttcgtcgtcccccccggagcccgtttcgaaccgccgcgttatgaagccggcgtcaaagcgccctccatttaccattccgagagaggtccaacgacttcccaggtcctcgccgtcctcgccggcctcccggtcggtggcatcctgctcctcctggcgggattgaccctggcaggaaccctcaccg

SEQ ID NO: 55565 - DNA, 129 bp, Glycine max
  unsure (1)..(129): unsure at all n locations
  Clone ID: 700605927H1
ggaattttgataaaccgcgatcacnnggtgccngcnactttaaaacgggaacnaaaagcatcgntaacttgatttcaagatcctctccantttcttcnaacttcttggtgnanggatttcttaagggaa

SEQ ID NO: 55566 - DNA, 268 bp, Glycine max
  Clone ID: 700605928H1
atttccaagcacaagttctctgagttgttttgtgagatagcacatagcatagcaaggaaggagtattacaaccgaaaccctgaagaaaaaaagagtagaggaagaaaaaacacctgcaccaccaacgatgggtgtggattactacaagatcttgcaggttgataggagcgccaaagacgacgacttgaagaaggcttataggaaacttgctatgaaatggcaccctgataagaaccccaacaacaagaaagaagctgaagctaagttt

SEQ ID NO: 55567 - DNA, 271 bp, Glycine max
  unsure (1)..(271): unsure at all n locations
  Clone ID: 700605929H1
ctttccaaggtgggcgacaactcaattgatattcctgaagcacncgtaataattcagatctcttcacatgctggttcaaggcgacaagaagcccagcgtctgggtcgtattcttagggcaaagggaaagcttgaggataggatggcagggggcaaggaggagtataatgcatttttttattcccttgtttcaattgatacccaggagatgtattactccactaagaggcagcaattttaattgatcaggttacagctttaaggtaattact

SEQ ID NO: 55568 - DNA, 236 bp, Glycine max
  unsure (1)..(236): unsure at all n locations
  Clone ID: 700605930H1
gaaactaatcagataacaatagaaattaanncaacaatatttgtctcagtatgaaaganacctactctctaatacaaccaatggaaaggaagacaacacatgctagcacattacactcaacactgtacatctataaagacaactaagttaacaatcaattagattctcacataaccgtgcaactactatttacattctcagactaacataggacnaagattacaacacaataagag

SEQ ID NO: 55569 - DNA, 279 bp, Glycine max
  unsure (1)..(279): unsure at all n locations
  Clone ID: 700605931H1
ggaagaatcactccccttatccatttcccacacccacaccatgggcctcaaccaacgctctctcttcagcctccattctacgctctcccaaccgccagtctctgacccgaagagcgaaccataatggaagagtaaattaccggaaaccgaataaccgtttctccgtgaaagcctccgccaaagagattgcctttgaccagcattcccgctctgctaatgcaggccggcattgacaagctcgccgacgctgttgggctcactcttggggcccaganggag

SEQ ID NO: 55570 - DNA, 257 bp, Glycine max
  unsure (1)..(257): unsure at all n locations
  Clone ID: 700605932H1
cttattaacactttccttagttcaatatggggaagcccttcatcactctctctctttcttcccttgcttgctaactcttgtcgagtgcatgctttgctattacctccagcaagttcaacgagtggccaactcaacaacctcaacgcgntggaanccgaccacgcgttgagtccgaaggtggtctattgaaactggaatttcaanacctgagtgcatgcgcggtgtcatgttccaaagnacctcaacgggaanggttt

SEQ ID NO: 55571 - DNA, 276 bp, Glycine max
  Clone ID: 700605933H1
tctccattggtccttaaacactcatcagtcatcaccatggccaagctagttttttccctttgttttctgcttttcagtggctgctgcttcgctttcagttccagagagcagcctcagcaaaacgagtgccagatccaaaaactcaatgccctcaaaccggataaccgtatagagtcagaaggagggctcattgagacatggaaccctaacaacaagccattccagtgtgccggtgttgccctctctcgctgcaccctcaaccgcaacgcccttcgt

SEQ ID NO: 55572 - DNA, 276 bp, Glycine max
  unsure (1)..(276): unsure at all n locations
  Clone ID: 700605934H1
tatcactcttcaccttcctctgcgcaatttgtgcgcactccgtcgccgtcacctccgcggcatatccttccatccccggcacggaaaccggagagtgctccctccgcggcgtcngcgtcggcgacggtgttctggtccctccgcggcgagaagtgtacgaggaggggcgaatcttcgacatcacccacaggtatgtccccgagatgccggtgtgggactcgacggaggggctcgggcagcacttcctgtggctcgaaaagagcatgaagaatggct

SEQ ID NO: 55573 - DNA, 274 bp, Glycine max
  Clone ID: 700605935H1
aagctctagagaagtttgttgaggaatctagtacccctgttgttactgtctttaacaatgaaccgagcaatcaccctttcgttgtcaaattcttcaacagtcccaacgcaaaggcaatgttgttcatcaacttcactgccgaaggtgctgaagctatcaaatcaaaataccgtgaagctgctgagcaatataaacaacagggtgtcagctttttggtgggagatgttgagtctagtcaaggtgcttccagtatttggactgaaagaagagcaag

SEQ ID NO: 55574 - DNA, 276 bp, Glycine max
  Clone ID: 700605936H1
gtgacatttatggtaccattgattacatatttggaaatgcagcagtgattctacaagaatgtaacatcatatcaagaaaaccaatgcctggtcaattcacagtaatcactgcacaatctagagatagcccagatgaggacactggtatctcattccaaaattgctcaatcatagcaactcttgatctctattccaactctagcagcttcaagagctaccttgggaggccatggagggtgtattctcgcactgtttaccttgagtcctacattgatg

SEQ ID NO: 55575 - DNA, 277 bp, Glycine max
  unsure (1)..(277): unsure at all n locations
  Clone ID: 700605937H1
cnagtataccttaataaataatttaaganactatgatgagagcncggttcccattactgttgctgggacttgttttcctggcttcagtttctgtctcatttggcattgcttactgggaaaaagagaaccccaaacacaacaagtgtctccagagttgcaatagcgagagagactcgtacaggaaccaagcatgccacgctcgttgcaacctccttaaggtggagaaagaagaatgtgaagaaggtgaaattccacgaccacgaccacgaccacaaca

SEQ ID NO: 55576 - DNA, 277 bp, Glycine max
  Clone ID: 700605938H1
gttgcgactaagagttgctgcttcttccgccactcagcacttcgctccctctgtgcttcaccaaccatggccgaaatcgaagctaccgttccagatccctctcaaatcgacgtcaaacttttcaaccgctggagcttcgacgacgttgaggttactgatatgtctctggctgattacattggagtgtccccgtcaaagcatgctacatatgttcctcacactgctggtaggtactcagtgaagaggttcaggaaggcgcagtgccccattgttgaga

SEQ ID NO: 55577 - DNA, 278 bp, Glycine max
  Clone ID: 700605939H1
gagcagcacagaagagggaaaacggcaccgccgccgtagaagaaaacaaccatggtgcacgtctccttttacaggaactatgggaagacattcaagaagccgcgtcgtccgtacgagaaggagcgtctcgacgcggagttgaagctggttggtgagtacgggcttcggtgcaagagagagctgtggagggtgcagtacgcgctcagccgcatccgcaacaacgcgcggaacctcctcaccctcgacgagaagaacccgcgccggatcttcgagggaga

SEQ ID NO: 55578 - DNA, 277 bp, Glycine max
  unsure (1)..(277): unsure at all n locations
  Clone ID: 700605940H1
gtttcgggcgctttcctcagagagctcaaggatggaggctacctgagatgccttccggatggaaatctcttgtaagttaattgctttgcttgatcttttcattttttttccctcaatnnatatatatccttctttaaaagccaaatttttgctgtgctgatatatccttctttaaagtcactttcaaaaagacactttcattgtccctctcctcaccttttccccatacatgaagaaaaatgaacggttaattcattgagcatgaaagttgacaggt

SEQ ID NO: 55579 - DNA, 234 bp, Glycine max
  Clone ID: 700605941H1
gttcaatatcctagtacaccgtattaaagaatttaagatatactatgatgagagcgcggttcccattactgttgctgggagttgttttcctggcatcagtttctgtctcatttggcattgcgtattgggaaaagcagaaccccagtcacaacaagtgcctccgaagttgcaatagcgagaaagactcctacaggaaccaagcatgccacgctcgttgcaacctccttaaggtgg

SEQ ID NO: 55580 - DNA, 272 bp, Glycine max
  Clone ID: 700605942H1
gctggtgaatttactgaaagatgataatgatacaattcaggaaggtgttctaaatgttttagcaaaggctggtggtactattcgtgaacaacttgcagtcacatcaagttctgtagaccttatattggagagactatgtttagaaggcagtcggaggcaggcaaagtatgctgtccatgcactggctgcaataactaaggatgatggcctcaagtctctctctgtcctatacaagaaacttgtagatatgctggaagataaaacacatctgc

SEQ ID NO: 55581 - DNA, 273 bp, Glycine max
  Clone ID: 700605945H1
gggatctctccgcaagaatgcaatgttcgtgccacactacaacctgaacgcgaacagcataatatacgcattgaatggacgggcattgatacaagtggtgaattgcaacggtgagagagtgtttgatggagagctgcaagagggacgggtgctgatcgtgccacaaaactttgtggtggctgcaagatcacagagtgacaacttcgagtatgtgtcattcaagaccaatgatacacccatgatcggcactcttgcaggggcaaactcattgtt

SEQ ID NO: 55582 - DNA, 272 bp, Glycine max
  Clone ID: 700605946H1
taattctattttctctcttttccaccccttcccattctgccctcacttgcgcttcccagaagctcaaccgcacctacgccaactgcaccaaccttcccaccctcggcgccaccctccacttcaccttcaacgccactaaccgctccctctccgtcgccttctccgccgagcctccctcccgctccggctgggtcgcctggggcctcaacctcgtcggcgatggcatgcgcggcgccgaagccttcctcgccttcccctcctccgcctccgcc

SEQ ID NO: 55583 - DNA, 269 bp, Glycine max
  Clone ID: 700605947H1
tattcctggtcttactatgaactatgatgtgatgttcagataaaaggtttaggtagtagccaaccttaacaaatgaaaagaagttagcaattgataaaactcacaggtgcatcaacttgctctacctacccaccttattttcggccttgtcaggaacaaagggtctaaataaatagccttacataacgactctaattaactcaccctttttgtaaaaacctctctcagagtttgctcacccctactcttcttccagtctctatctcaat

SEQ ID NO: 55584 - DNA, 267 bp, Glycine max
  unsure (1)..(267): unsure at all n locations
  Clone ID: 700605948H1
gnacttgagagaaagagagagctgaagtagagtccgaaccaagtctcatagctgagagtttaggatcggaattctgcctccgttcttcttcatctcacctaccaccttaacctcatattagcacaaacttggtttgcttctatgagccaaatctcntgtttccttctgcttcataatggtcttgaagggtctatgtgagaggattgtttcttcaaaatgctttctaaaagctcaaccgagactgtagataatacacaggtgcccgnt

SEQ ID NO: 55585 - DNA, 272 bp, Glycine max
  Clone ID: 700605949H1
aaaattcttccaccaagttatgggtttccttgtgttgcttcttttctccctcttaggtctctcttctagttccagcatatcaactcatcgttccatattggaccttgacctaaccaagtttaccacacagaaacaggtgtcttcactgttccaactatggaagagtgagcatggacgtgtctaccataaccacgaagaagaggcaaagagacttgagattttcaagaataacttgaactatatcagggacatgaatgcaaacagaaaatcac

SEQ ID NO: 55586 - DNA, 265 bp, Glycine max
  Clone ID: 700605950H1
ctcagcttcgggacttggatgtcttcctcagtgttgtggatatgaacgagggagctctttttctgccacacttcaattcaaaggccatagtggtactagtgattaatgaaggagaagcaaacattgaacttgttggcattaaagaacaacaacagaggcagcaacaggaagagcaacctttggaagtgcggaaatatagagctgaattgtctgaacaagatatatttgtaatcccagcaggttatccagttgtggtcaacgctac

SEQ ID NO: 55587 - DNA, 274 bp, Glycine max
  Clone ID: 700605951H1
aggcacttggtagtcgaaggttatttatgttagattaccatgatatcttcatgccatatgtgaggcagataaatcagctgaattctgccaagacttatgcgacaaggactatcctttttttgagagaagatggaactttaaagccagtggccatcgaattaagtttgccacattctgctggggatctgtcagctgccgtcagtcaagtcgtcttacctgctaaggaaggtgttgagagcacaatttggctactagccaaagcttatgtcatcgt

SEQ ID NO: 55588 - DNA, 274 bp, Glycine max
  unsure (1)..(274): unsure at all n locations
  Clone ID: 700605952H1
ggnagaggaaaagatggaggtgattagaaatagaggcattcctgctgatgttcttgcaaagcgagctcatgaatttgaaaaacatgttgctcatgaaagcctcaaggatcaaattcctgctgttgacaagttgtattctactaaggttaataagtttgcaaaaattatgaaccttagacaaagtgttgttggtgatcttaaacttcttactgatgggaagttgtatgagggtaagcatattcctgtatctaatattagtgcaggggnaatcatg

SEQ ID NO: 55589 - DNA, 276 bp, Glycine max
  unsure (1)..(276): unsure at all n locations
  Clone ID: 700605953H1
gnaagaaaggaaacggaataattcgatacccctctcgtctcgtaactaaccatggcagcgttccgatggaagagcttcgaggagaatgaggatcgcccagccaagcctcgtcattttggcgtcaccgagattcaaagcccccactgcactctcttctcccacaaccttcttcaggatatttttgaatctatgggagactatgtagatgggttaaagttttctggaggttctcacagcatgatgccaaaggctactatcaagcaaatcattgacatg

SEQ ID NO: 55590 - DNA, 275 bp, Glycine max
  Clone ID: 700605954H1
attcattcttaatctttgtgaaaaataatgttcatcgagaattttaaggttgagtgtcctaatgtgaagtacaccgagactgagattcagtccgtgtacaactacgaaaccaccgaacttgttcacgagaacaggaatggcacctatcagtggattgtcaaacccaaatctgtcaaatacgaatttaaaaccaacatccatgttcctaaattaggggtaatgcttgtgggttggggtggaaacaacggctcaaccctcaccggtggtgttattgc

SEQ ID NO: 55591 - DNA, 275 bp, Glycine max
  Clone ID: 700605955H1
atatactatgatgagagtgcggtttcctttgttggtgttgctgggaactgttttcctggcatcagtttgtgtctcattaaaggtgagagaggatgagaataaccctttctacttgagaagctctaacagcttccaaactctctttgagaaccaaaacggtcgcattcgtctcctccagagattcaacaaacgctccccacaacttgagaaccttcgagactaccggattgtccagtttcagtcaaaacccaacacaatccttctcccccaccatg

SEQ ID NO: 55592 - DNA, 275 bp, Glycine max
  unsure (1)..(275): unsure at all n locations
  Clone ID: 700605956H1
cnaactaccgtatccccaaaggcttctcttcccatcagaagttaatcatggaacacatgttgcagaaggacacgccagcaagtgtttccaaccctttttgttgcctaaagatttgaagggcaggccagaggaacttaaaaataagttgctggtagattttgatccatcaaagtgctttatcagagatttaaagcaagaattctcaaccacattccaagtatggcatgattatctgggaggtgatgttatcggcctaacatggggagagtcatatc

SEQ ID NO: 55593 - DNA, 274 bp, Glycine max
  Clone ID: 700605958H1
gggaagcagtgatggagtcactgaagggacctggaagtacgaaatccaaatgcagaacaaccaacaagtagtgttagttctgtgtatgtagatgctgtagagccgtctgataaagatgcttcttcaggagagatttcgagaccggtggagacagaatcttcctcactcaaacacaccacagagtcaaaattcaaaaccacttcctcgacatcagaagaatttgagccattgaacggtgagtccaaattccatttcagtgaaacattcccaaatg

SEQ ID NO: 55594 - DNA, 274 bp, Glycine max
  unsure (1)..(274): unsure at all n locations
  Clone ID: 700605959H1
ctgtgcttctcatttctcttnctaaaaaacgccgnagtctctttctctctcagaaaaccctaatggcagagcgcggangtggcgaaacgtggcggtcaccgtgggcgttttcggacgcggctttcggcgggcgagggcgcggaagcgacangggccgcggccggcgtagaggtccccgccgcgaggaggaggagaagtgggtccggtgataagctgggacgcctggtgaaggaaggaagaatccgaagcctggagcagatctactcnatcgctg

SEQ ID NO: 55595 - DNA, 108 bp, Glycine max
  Clone ID: 700605960H1
gactaatttgtctaaaatgtaatgtttttatagtcttggagactatttttgtttatggttaaatgcacctttacagcttaataaaccttttgctatgagttgtgtact

SEQ ID NO: 55596 - DNA, 271 bp, Glycine max
  Clone ID: 700605961H1
caaagttgaacaaaactcattttccaactacatttcttccaccaactcataaaatcctcatatctgttcccaaaagcttgtttgtgagaatggcttcgggtgaaaagaaattcccacctcaacaacaacaaacacagcctgggaaggagcatgctatgaatccagtaccccaattcactagccctgactacaagccttcaaataaacttcaaggaaagatagcattagtgactgggggtgactctgggattggacgagcggtgtgtaactt

SEQ ID NO: 55597 - DNA, 265 bp, Glycine max
  unsure (1)..(265): unsure at all n locations
  Clone ID: 700605962H1
aggatcaaattcctgctgttgacaagttgtattctactaaggttaataagtttgcaaaaattatgaaccttagacaaagtgttgttggtgatcttaaacttcttactgatgggaagttgtatgagggtaagcatattcctgtatctaatattagtgcaggggaaantcatgtagttcaaatacccttaatggcacaggaggaaattctgtcttctagtgcaagtgatttcagaactgcaatggtgagtaaaaatagcaaacctcc

SEQ ID NO: 55598 - DNA, 266 bp, Glycine max
  Clone ID: 700605963H1
ctcacaggaggtcatcggagatgcactcggtgaggaatttaaggggctatgtcttcaaaattaccggagttgtgacaaacaaggatttccaatgaagcagggagtgctgactcctggtcgtgttagacttttgcttcacaggggaactccttgcttccgtggatatggaaggcgtaatggagagcgtaggagaaagtctgttcgtgggtgcattgtcagcccagacctctctgttttgaacttggtaattgtgaagaaaggtgaga

SEQ ID NO: 55599 - DNA, 253 bp, Glycine max
  unsure (1)..(253): unsure at all n locations
  Clone ID: 700605964H1
ccgcgcccacaacctcgtcaagaagaagagcacgagcagagagangaacaggaanggccttcgcaaggnggaaaaacgcggagaaaagggaagtgaagaggaagatgaggatgaggatgaggaacaagatgaacgtccattcccattcccacgcccacctcatcagaaggaagagcgaaagctcagaggaagatgaggatgaggagcagcagcgagagagcgaagaaagtgaagattctgagttacgagacat

SEQ ID NO: 55600 - DNA, 269 bp, Glycine max
  unsure (1)..(269): unsure at all n locations
  Clone ID: 700605965H1
gaaaagatctcgcaatggttaaagttaatgtagcatgtgctgctgttggcttgacatcaagttacactccaactccattgttggaatctggtctgcaaaaagacagagggttaattgtggagtattttggaaggatgtcttacgttgctcataacgttaatcagccccaagagaaagatttgttggagggaaatttttccttganattaaatctcgctctagattggaaaaagtttcctctacaaaagcacatttgttagtgggaaaac

SEQ ID NO: 55601 - DNA, 270 bp, Glycine max
  unsure (1)..(270): unsure at all n locations
  Clone ID: 700605966H1
tttgaaattttgataaaccgcgatcacaggntgccgcaccttaaaaccggaaacaaaagcaatcgttacttgatttcaagaatctctcaatttcttcctacttctttgtgtacgatttcttaagggaaagaaaatcactctctgtgctggccacagacttcgtgaatcattttcttttccactcttagtttatttgcngaacactctccnatttgatataggactcgtgtcacatttaaacttcttctgtctctttctcagttctctgtt

SEQ ID NO: 55602 - DNA, 272 bp, Glycine max
  unsure (1)..(272): unsure at all n locations
  Clone ID: 700605967H1
cnattttggttaagagtcttgaaaaagcaagagaaaaaaaaataccaaccatggcaaccatttctgatcaacctagagggtcctactcctatggaacctcatatggagcaccctatggaaccacgtatgagaccaacaccagcattaacaacccaccttcacgccaaacagtgaagttcataactgctgccactattggcatcacactcttgctcctgtctgggttgaccctcacaggcactgtcataggtttgatcattgcaacccctctt

SEQ ID NO: 55603 - DNA, 271 bp, Glycine max
  Clone ID: 700605968H1
caagaattgcccccggaatcgaagtgtttcctccgaaagattttgatcagcaaacattcgatacaactggcatgccattcgcttctcaagctacaagagactatagccgaggctcatcaccggagtggttacatatgcaggttggagatggttttgaaagagcaacgtagtctttgaaatcacatcacctgacaataaatgcatataggatctttaatctctctatcagagctcccataaatcatatactcaaggtgttgttgctaagtcc

SEQ ID NO: 55604 - DNA, 270 bp, Glycine max
  Clone ID: 700605969H1
tgataaatcatatcattaaattattaaataagttttgaagttgatacttgtgtctatattgagtatgcttttggtcattgtgcgagcagaaggatttacaaaagtggtgttagtggaaaacgttgtgatggaagtagcactgctcctccttgcacagggtgggttgaaatgatggctcctgttttctcaagagctgcttggcgttgcatttggtatatgatccagaatgacttgatccatgcatggggtctagatatgcagctaggctac

SEQ ID NO: 55605 - DNA, 272 bp, Glycine max
  Clone ID: 700605970H1
gctgatgacaccatcaattttgaggcttttccccacaagctggtgcagtttggagagattcaggaaaaagttgtgttgaaattttcacaagaggaatttcttacagcttggtcaactcaggtgcgtcccgcaacgactctgttggctgatgggtgcccatatttgtatgctatggtgcatgatagttcagtgtctacaataccaggtgattttgtcattggtgttaagttgacaaccataaacaatatgtgtgcatatgggctcaatcctgg

SEQ ID NO: 55606 - DNA, 270 bp, Glycine max
  Clone ID: 700605971H1
aaacagttgaacaacttaggtctggtggtcaatttactgagtcctcagagtgtaaatatgttgtatggatttcgtttagtggcttagggaataggattttgaccctagcttctgcttttctctatgctctcctcactaaccgtgttctactggttgaccctggagcggatatggttgatctcttttgtgagccatttccagattcttcctggcttcttcctagtgactttcctcttaatgctcagtttaataatttcagtcagaattctg

SEQ ID NO: 55607 - DNA, 270 bp, Glycine max
  unsure (1)..(270): unsure at all n locations
  Clone ID: 700605972H1
aactgagaaaccgttgtggaccagttcaaatgccttatactctgcttttgccttcnagngattcttcctcagctcctcatgcctgagaaaggttctgctgagtatgaggagctgaggaagaatccccagaaggctnncttgaagactattacaccaaagtttcagacccttattgacctttctgttatagaaatcttgtcaaggcatgcatctgatgaggtgtaccttggggagagncgcaatccaaattgggacatctgatacaagagc

SEQ ID NO: 55608 - DNA, 273 bp, Glycine max
  Clone ID: 700605973H1
ctttggttcagcagccattagcgatttcccttatctctctccatgttaactccaagcacaagaatcatcttcccatttcgtttctgaccaatggcttccctcactgtcccaaaccattgtgttcccactttgcttcgcactcactctctcaactacccatcttcccaaaacctcccacttccttccgcgccatcaaattctcaattttttggcctcaagctatctcattcttccttttccacaattccctcttcttcttcttcactcaaaggg

SEQ ID NO: 55609 - DNA, 271 bp, Glycine max
  unsure (1)..(271): unsure at all n locations
  Clone ID: 700605974H1
gggaaaacatcttcaagtgggctcccaacagactgataaagatccatcttcaccttttactttctgcatcaccagtttccagctgtgtccaaaactgagatccaaaagacttcnactggaagattaactgaaagatctgtggnacaagtgcctatgatgtcaagaccttcaagtggtcctttagttcctggtcccaggccaactgctccggttgtctctatggttcaaacttctcccctattgcacatcagtgagtgcaatcggttgggtc

SEQ ID NO: 55610 - DNA, 277 bp, Glycine max
  unsure (1)..(277): unsure at all n locations
  Clone ID: 700605975H1
angagataaaaccaaggttctgtttagncnnagagggaaggggcagcagcnagggggagcagagggctgcnagagagcgtgattgtggaaatctcgaaggaacagatttcgggcactgagcaaacgtgccaaatctagttcaaggaaaaccatttcttctgaagataaaccttttaacttgagaagccgcgaccccatctactccaacaagcttggcaagttctttgagatcaccccagagaaaaacccccagcttcgggacttggatatcttcctc

SEQ ID NO: 55611 - DNA, 256 bp, Glycine max
  unsure (1)..(256): unsure at all n locations
  Clone ID: 700605976H1
tggagaagaagaagggtgagctaaagtcaattttccttcctttcctttccactagtcacataatcccgctagtggacatggccagactcttcgccttgcacgacgtcgacgtcaccatcatcaccaccgcacataacgccaccgttttccaaaagtccatcgatttagatgcgagtcgcggtcgccncatcagaacgcacgttgtcaattccccgccgcacaagtgggtctccccgttgggatcgaagcttcaagt

SEQ ID NO: 55612 - DNA, 268 bp, Glycine max
  Clone ID: 700605977H1
ctgtatcatttcatttcgataatcatccatagttactgaagaaaatggcaaccatctccgctgctatcacaaccccatcgatcacccgcgcatgtctagtgcaaaaacgttctcttgggttctcatctcccgttcttggtttgccagcaatgggtaaggtgggaagagtgagttgctccatggaggaaaagccttcttctgtgaaggaaagcagctcaagcatgttggggatgggggcatctttgatggcagcggccagcgccgcagc

SEQ ID NO: 55613 - DNA, 229 bp, Glycine max
  Clone ID: 700605979H1
gtccatggcagagagaggtcatttgaattgaactacttcccctacctctaccgtttccggccaccgcggacggcgacgaaaacggcggcgacggatccaaccgaactggtttgagatctaatggatgcgcggacggtttccaaatccaagcgaaaactgattatgtgcttcgtctctgtgtttgcgtgtgtctgtgtgtatataatacagaacttatatattcagttgc

SEQ ID NO: 55614 - DNA, 127 bp, Glycine max
  unsure (1)..(127): unsure at all n locations
  Clone ID: 700605980H1
ggctccacnngtaattgncatangcattttaaaggggaggctcattangntataagctnatggaaaaattactgcggccaggctaaagctcccaagtatgnntttacaatccttccaaaaatttgtg

SEQ ID NO: 55615 - DNA, 269 bp, Glycine max
  unsure (1)..(269): unsure at all n locations
  Clone ID: 700605982H1
cagaggagaacacaaacagcagcgtcttggtttgtgagagagacagaggcacagagagaaaatggtttcggggtcaggaatctgcgcgaagagggtagttgtggangcgcggcaccacatgctggggaggctggcatcgatcgtggcgaaggaacttctgaatgggcagaaggtggtggtggtgcgctgcgaggagatttgcatctccggtgggctcgtcaggcagaagatgaagtacttgcgtttcctccgcaagcgcatgaacacca

SEQ ID NO: 55616 - DNA, 268 bp, Glycine max
  Clone ID: 700605983H1
ttaataaagatgagtttgaagaacaacatggtggtgctaaaggtgtgtttgttgcttcttttccttgtgggggttacagctgcacgcatggaactgagcttcttcaaaagtgatcagtcatcaagttatgatgatgatgagtattcaaaaccatgctgtgatctctgcatgtgcacacgctcaatgcctcctcaatgcagctgtgaagatattaggctgaattcatgccactcagattgtaagagctgtatgtgcacacgctcacagc

SEQ ID NO: 55617 - DNA, 272 bp, Glycine max
  unsure (1)..(272): unsure at all n locations
  Clone ID: 700605984H1
ctcactcttcactcaaaactcttctctttcattttcataattccnacacattatggctgagcttcactaccaaccacaacaccaataccccctccgctaccctaacgatccacaccaacaaacccgttcctccacccaccaggtcgtcaaggccgccaccgccgtcacagcgggcggctccctcttgatcctcgcctcgttgatcctcgccgccaccgtcattgccctcaccatcgtcaccccgctgttcgtcattttcagtccggttctcg

SEQ ID NO: 55618 - DNA, 277 bp, Glycine max
  unsure (1)..(277): unsure at all n locations
  Clone ID: 700605986H1
cttgtaccgaaattcggataatggtgtctctaatttcaacatctccacctttctttcatctttcaacatttcatcccnttcttctctccaagggggcgtccaatttcagacacaactgcgtaaattacaaacggaaaacggtacggtgcgccgtcaccagcgccgacgcatctcctccgccgtcaacgtcgttggccaaggaacctcacaaatacttcgaccacgtcatcatcaccgttcgcgccggtgacggcggccacggcgcggtgctgaatca

SEQ ID NO: 55619 - DNA, 269 bp, Glycine max
  Clone ID: 700605987H1
acaattctctttaattaattttctttcatttcatttcatcttttaagttgatctgtgaaaatggcttcatcttcctccaacggcagttccagcggaagcaagagttgggacatcgacggcgacctcgccggcttcggctataaagtccggtcatcggagctgcaacacgtggcagaaaacatggagcgtttagagaacgtgatggacattgtgaactcatcaaccaacaacaatatatctcagcttgcctccgacacaatcttctacaa

SEQ ID NO: 55620 - DNA, 263 bp, Glycine max
  unsure (1)..(263): unsure at all n locations
  Clone ID: 700605988H1
ttaattattaacacnttccttagttcaatatggggaagcccttcantctctctctttcttccctttgcttgcnactctgtcgagtgcatgctttgctattagctccagcaagctcaacgagtgccaactcaacaacctcaacgcgttggaacccgaccaccgcgttgagtccgaaggggttgantncaacatggaatctcaacaccctgagctgaaatgcgccggtgtcactgtttccaaactcaccctcaaccgcaatggct

SEQ ID NO: 55621 - DNA, 260 bp, Glycine max
  unsure (1)..(260): unsure at all n locations
  Clone ID: 700605989H1
cttttaacacttcgggaagtgccctnnggaggagctggtgcaaagaatgctattctcatgaatatgccaaatgctgttcttcaatgtggagatattttgttggagatctcgtcttgaagtttctaagatgacttctccctacattaaatgtacagtctctttcntcatagcatttggaaatttggctgatgacaccatcaatttgaggctttccccacaagctggtgcaattggagagatcaggaaaaagttgtattgaa

SEQ ID NO: 55622 - DNA, 267 bp, Glycine max
  unsure (1)..(267): unsure at all n locations
  Clone ID: 700605990H1
aaaattcattgnacagtgttattttcagtatcagcatcatggctccaattgcagtgggagatgtcattccagacggcattttggcttacttggatgaagaaaacaaaccccaaactgtctcnattcactctctcgccgccggcaagaaagtcatcatctttggggttcccggtgccttcactccnacatgcagcttgaagcacgtgcctggcttcattgagagagcagaagagctgaaaggaaagggtgtggacgaaataatctgta

SEQ ID NO: 55623 - DNA, 266 bp, Glycine max
  unsure (1)..(266): unsure at all n locations
  Clone ID: 700605992H1
gccagcgtaaaaaaaagaatgaaagaataatttagtatttggcacaataataaaaaaggtaaaaaataatgaaagtgaagaaaaaaacaggcagggcagcagtataaataatagaagtttgatgatttatatgcagaaccaacaacnacacttgttttcnatatattcttgcatgatcatgaattcttcctccatttatattcntgtctttgtccagctttggttgttgagcttaccatgcagagagagtgtgtgcatcccaagtg

SEQ ID NO: 55624 - DNA, 257 bp, Glycine max
  unsure (1)..(257): unsure at all n locations
  Clone ID: 700605993H1
atcataaaattcttccaccaagttatgggtttccttgtgttgctttcttttctccnncttaggtctctcttctagttccagcatatcaactcatcgttccatattggaccttgacctaaccaagtttaccacacagaaacaggtgtcttcactgttccaactatggaagagtgagcatggacgtgtctaccataaccacgaagaagaggcaaagagacttgagattttcaagaataacttgaactatatcagggaca

SEQ ID NO: 55625 - DNA, 177 bp, Glycine max
  Clone ID: 700605994H1
tagtagtgttggtgggttgcaaagatgcttgggggtctctccataggggtcataagataaaagggacagtggtgttgatgcgcaagaatgtgttggacgtgaatagcgtaaccagcgttgggggaattattggtcaaggtctcgacttattggctcaacactcgatactcttactgg

SEQ ID NO: 55626 - DNA, 262 bp, Glycine max
  unsure (1)..(262): unsure at all n locations
  Clone ID: 700605995H1
antggtttgattgtgttgatgaggaggattcctttgaggaagtttctttaagtgcagcacttaatggtgttgagggtttggactatatggaaagaattcctcttgccacatctgagggttttcctcatgtgctttcacgcaaaaatggcgaaaaaggcaaaaggagatttgtctctggggatggtgaagagatgacattgattccaggaaccagtgttgaagaggcttacaacaagctaatagttgaacttgagaaaagtgt

SEQ ID NO: 55627 - DNA, 263 bp, Glycine max
  unsure (1)..(263): unsure at all n locations
  Clone ID: 700605996H1
gttgagatgtgtcctcnctcttcatcccttcncttctttaccagaagattattccacctaaaaccgnaccttcgcnacantgctgcaccctcaccctccattattctttcntcttctctctcttttgtgttttggggaaaagagaagaagtgaggaaccgaagaaagaagaaaagaaaaagaaacaaaaatggctgaatcaaaattattggaccgtggaagttggaagaaacgcgattatctgattcagcttctccnaatcgg

SEQ ID NO: 55628 - DNA, 272 bp, Glycine max
  Clone ID: 700606001H1
tccaagcacacacaaccgctttagatggaactttgagcttccataattccgtgaactcttccccctgggcctccgctggtacgtgctgtctaagcacactgtatgtgctcttaactgagtactgcccagttgggtcagcctcccacacccactagtcgccaatgagaggttgaattctgaacccctccacttcttgaataaatgaaactaccagctttatctcactgtcgaacagtggtctttgccatttgaaatctcatacccatcctgtg

SEQ ID NO: 55629 - DNA, 272 bp, Glycine max
  unsure (1)..(272): unsure at all n locations
  Clone ID: 700606002H1
agtcagtcacatcgataaaaaaaaagncncgggaaagaaagggtgtgtcaaaattttgagagccactcccagttttgcaccctcccacaaaatcaaaatcttcgttccgtgttttagcaatcggtagagagcgagacacggtttctgcattattgctttcagagggactcattgcagtcattgattgtaagcaatggagaaaacgcccaaacaaggttccaatgcatcactttttccttctactggaattggatcgaggttctccaatttga

SEQ ID NO: 55630 - DNA, 271 bp, Glycine max
  Clone ID: 700606003H1
ggccgccgcgatgatgtgcttagtggtttaaataggattgccgtgccgctcgttacgaggagtacacttgaagttgttataccagagtatgcagtaccaaagcttatagctaaatccaaaagcaaacttgctcaaataagtgagttgtcaggagccaatgtaacccttgtagaggatagaccagatgtgacacagaagattattcagatatctggtactccagagcaagcagagagagcccagagcttgctccaaggatttattttgagca

SEQ ID NO: 55631 - DNA, 272 bp, Glycine max
  unsure (1)..(272): unsure at all n locations
  Clone ID: 700606004H1
attgacaccaacagcttggagaaccagctcgaccagatgcctaggagattctatcttgctgggaaccaagagcaagagtttctaaaatatcagcaagagcaaggaggtcatcaaagccagaaaggaaagcatcagcnnnnnnnnnnnnnnnnnnnnngcagcatattgagtggcttcaccctggaattcttggaacatgcattcagcgtggacaagcagatagcgaaaaacctacaaggagagaacganggggaagacaagggagccattgt

SEQ ID NO: 55632 - DNA, 267 bp, Glycine max
  Clone ID: 700606005H1
gtcagtggtactgaccatactcatattttgcgagttccattcagatcagagtcaggaactctccgtaaatggatttcaaggtttgatgtgtggccttatctagagacttatgcagaggatgttgccagtgaaattgctgctgagttacaagggtatcctgatttcatcattggaaactacagtgatgggaatcttgttgcatctttattggcttataaaatgggagttacacagtgcacaatcgcgcatgcacttgagaagacaaaa

SEQ ID NO: 55633 - DNA, 273 bp, Glycine max
  Clone ID: 700606006H1
atcaattttggttaagagtcttgaaaaagcaagagaaaaaaaaataccaaccatgggcaaccatttctgattcaacctagagggtcctactcctatggaacctcatatggagcaccctatggaaccacgtatgagaccaacaccagcattaacaacccaccttcacgccaaacagtgaagttcataactgctgccactattggcatcacactcttgctcctgtctgggttgaccctcacaggcactgtcataggtttgatcattgcaacccct

SEQ ID NO: 55634 - DNA, 270 bp, Glycine max
  Clone ID: 700606007H1
ttgtgttgcttcttttctccctcttaggtctctcttctagttccagcatatcaactcatcgttccatattggaccttgacctaaccaagtttaccacacagaaacaggtgtcttcactgttccaactatggaagagtgagcatggacgtgtctaccataaccacgaagaagaggcaaagagacttgagattttcaagaataacttgaactatatcagggacatgaatgcaaacagaaaatcaccccattctcatcgtttaggattgaaca

SEQ ID NO: 55635 - DNA, 272 bp, Glycine max
  unsure (1)..(272): unsure at all n locations
  Clone ID: 700606008H1
gtgattgtgtctctttctccccagtcaaggggcttctattgctgtncattttggcatttctccaattcaggntttcaaaaagctgacaagattttttaaatccttgggagtgaaggcagtttttgatacaagttgtagtagagatttganccttgtcgaatcttgtgtggagttcatcacaaggtatagacagaatcagttggttgatgatgagaggagtaaatcaagccnacctatgattgcatcagcttgcccatgttggatatgctatg

SEQ ID NO: 55636 - DNA, 243 bp, Glycine max
  unsure (1)..(243): unsure at all n locations
  Clone ID: 700606009H1
aggaaagacactgagnnngcaatgaaatttccaaattctcaattgtttcttacattcttgtagttgttgttcttcgcgataactccctttcgcggttcagggcagcaaacggattggaacagcgaagagactcaacatggaaatggggttcgccgcagagttcttctgagtttcaaagagaagccctcaggaagtaacgttacctttgaatgtactccttcgggtccttgtgtgccctgtctc

SEQ ID NO: 55637 - DNA, 235 bp, Glycine max
  unsure (1)..(235): unsure at all n locations
  Clone ID: 700606010H1
atcctcctcatctctcttctcttctgcatcgcccacacttgcagcgcctccaaatggcagcaccagcaagatagctgccgcaagcagctccagggggtgaacctcacgccctgcgagaagcacatcatggagaagatccaaggccgcggcnnnnnnnnnnnnnnnnnnnnnnnnnnnnnncacattctcaggaccatgcggggaagaatcaactacataaggaggaacgaaggaa

SEQ ID NO: 55638 - DNA, 272 bp, Glycine max
  unsure (1)..(272): unsure at all n locations
  Clone ID: 700606011H1
anagggtaccttgccgataaggcaagggcatgtaaaggagagggcaaaggattatggaagttatgctcaaggtagaattaatgaggccacacaaggagcttattagtcatgcctgcttatatatgcatgagtgtatgaggttgaattgaaggtggtgatggtggtggtacccttgtggatttgcatgttcaagttctgcagtttattttgaatcttgtttgcattgttctatgtagttctggtttttgtaatctcgtttgtttttgaagcta

SEQ ID NO: 55639 - DNA, 273 bp, Glycine max
  Clone ID: 700606013H1
atagtagtgttggtgggttgcaaagatgcttgggggtcttctccataggggtcataagataaaagggacagtggtgttgatgcgcaagaatgtgttggacgtgaatagcgtaaccagcgttgggggaattattggtcaaggtctcgacttagttggctcaacactcgatactcttactgccttcttgggccgatccgtgtctctccagcttattagtgctaccaaagctgatgccaacggaaaagggaaacttggaaaggctacctttttggg

SEQ ID NO: 55640 - DNA, 190 bp, Glycine max
  unsure (1)..(190): unsure at all n locations
  Clone ID: 700606014H1
ctactcccacctaggattccgaccgccaccaacgttacccgctgctctgctttgccttctctgcctcctcgcggnaccaacactaaaaccactttgctcttatcttccctcaaccacttctcagtgtcccgaaaatcttctctgcttcagaccagagcttcttcagagggatcatccccagtagatgcna

SEQ ID NO: 55641 - DNA, 278 bp, Glycine max
  Clone ID: 700606015H1
ttcttcatcatagtcttaaacattaaaccttagcaaaactcaacaatgctagacatcaaagggctacctcgtactcttcttcctatggttcatatcaaccattctgatacgttccatcttcaagaaaccacagcgtctaagactcccaccgggtcctccaatttcaatacccttgctgggacacgcgccatatctccgttcactgctccaccaagcattgtacaagctatcactgcgctatggacccttgatccacgtcatgatggttcgaagcacgt

SEQ ID NO: 55642 - DNA, 282 bp, Glycine max
  unsure (1)..(282): unsure at all n locations
  Clone ID: 700606016H1
gggctatgaaactgatgaatgaaattgagggctgatcagtcaggaacaatagctgaggtattagctgaggatgggaaaccagtcagtgtagacatgcctctttttgtaatagttccatgagtaccggaagggaccttacttcaaagttgatatgaaatctccctagcttgttggatagcagcatggtatttgatgtcagattttctgttcagaaatttcttgagtgataatgtttgtctcattttaagaaatccttgtcttctttagcncccacccctcctc

SEQ ID NO: 55643 - DNA, 267 bp, Glycine max
  unsure (1)..(267): unsure at all n locations
  Clone ID: 700606017H1
atggaatcctgcttgcacaaaagcaatgactatgtcatttaatccaaacccgtgttctgatgcatggagtttggaatttctgaagcgtaccgganttcattgtgatatcatttgtgtcactggatggactgccaccccaatgcaggatgttcaggttacaattgattggtttatttcctctcaggaatgtgttcccaggacctattgtgttttaaatccacaaaatcctttgtgtaaataggtggatgggaaaactgactttccccc

SEQ ID NO: 55644 - DNA, 267 bp, Glycine max
  unsure (1)..(267): unsure at all n locations
  Clone ID: 700606018H1
ggtttgaaaagaagccggtgctgtctccttgttctccatcgtaagatataactaattatttttatatcttcatcaagatgcgccgagggagaannnnnnnnnnnnnnnnnnnnnttgtggatcccacgccggaccaggccaaggagacgacgcggttccgtggcgtgaggaagcggccgtgggggcgatncgcggcggagattcgagatccgtggaagaagcagcgcgtttggctggggacttcgattccgccgaggatgccgcgcg

SEQ ID NO: 55645 - DNA, 268 bp, Glycine max
  unsure (1)..(268): unsure at all n locations
  Clone ID: 700606019H1
tcgttctctttcaccactgttccatagagcaactcaaaaccacacacacaaaaaaacatgaatccccgttttgcccctctctctttctcaatcccttctcttcgaaaaacaccttctctcattggtgctaaccacacctccgctcgcttctgctcccgataaataataccacacaaaaaaaaatcccaactttttttttcttcntcttcttttatttcaattcaattcatttttttttgtgattttttctggttattgttattaattt

SEQ ID NO: 55646 - DNA, 200 bp, Glycine max
  unsure (1)..(200): unsure at all n locations
  Clone ID: 700606020H1
acccactcacacacactctctgcccctgcacatgcacatgcaccattctcactaatcactagggtttattcatccatccatggagctaacnnnnnnnnnnnnnnnnnnnnnnnnnnnnnnnnnncaccttccctcctgcttctcaggacaatcgagctccatggaatcagtgcctgatcttcagaacactatgtacgctt

SEQ ID NO: 55647 - DNA, 268 bp, Glycine max
  Clone ID: 700606021H1
aagaaatgaagagtactatcttctttgctctctttctagtttgtgccttcaccatctcatacctgccttcagccaccgctcagttcgtgctcgacactgatgatgatcctcttcaaaacggtggcacatactatatgttgccagttatgagaggaaagggcggtggaatagaagtagattcaactggaaaagaaatatgccctctcactgttgtgcaatcacccaatgagctcgataaggggattggactagtctttacatctccatt

SEQ ID NO: 55648 - DNA, 267 bp, Glycine max
  Clone ID: 700606022H1
aatttcttactttcaggatcaatattgatactctctatcttgcttgcaaaacctgaaacaaaatttgcaatagcattacatcaatggaggaatcatggactagttggctttgtgacatggaaccagatgattacagtttcataggtcaatcagacataaaagtggatgatgtgaatggatgtttagtatctcctcatgatgtagccactgcattattagagaagaaccagcaaagcttattttccagagagagtcactcttcagcgg

SEQ ID NO: 55649 - DNA, 269 bp, Glycine max
  Clone ID: 700606023H1
ccaaatgatcattgtcgttcaagggaagggagcaattggatttgcatttccgggatgtcctgagacgtttgagaagccacaacagcaatcaagcagaagaggctcaaggtcgcagcagcaactacaagacagtcaccagaagattcgtcacttcaatgaaggagacgtactagtgattcctcctggtgttccttactggacctataacactggcgatgaaccagttgttgccatcagtcttcttgacacctccaacttcaacaatcagc

SEQ ID NO: 55650 - DNA, 269 bp, Glycine max
  Clone ID: 700606024H1
ggggaagcccttcttcactctctctctttcttccctttgcttgctactcttgtcgagtgcatgctttgctattacctccagcaagttcaacgagtgccaactcaacaacctcaacgcgttggaacccgaccaccgcgttgagtccgaaggtggtcttattgaaacatggaactctcaacaccctgagctgcaatgcgccggtgtcactgtttccaaacgcaccctcaaccgcaacggcctccacttgccatcttactcacttatcccca

SEQ ID NO: 55651 - DNA, 258 bp, Glycine max
  unsure (1)..(258): unsure at all n locations
  Clone ID: 700606025H1
cttgggaaaggtaaganaattgtttttcttactagagttgatcctnttccagtagctttactggctgttctttttggtgttaagaatgaaattctgagttctaacgccactaatcctatgctgacgcgacttcttgaaaactgtaagagtctcaaatatctggttgatgagtgtccttttgcatttgtgaactagtatgtaatattttattcacttaaataaagcgcattactatgtgcaatgagtgtgtttaaatat

SEQ ID NO: 55652 - DNA, 269 bp, Glycine max
  unsure (1)..(269): unsure at all n locations
  Clone ID: 700606026H1
ggccaatctgcattcaaaattaattttgaatgggatgatgggagtggaattcctggagcattttatatcaagaattttatgcaaactgagtttttccttgtgantttgactcttgaagacattccaaaccatggaagcatccactttgtttgcaattcgtggatttacaatgccaaactcttcaaaagtgaccgcattttctttgccaaccagacatatcttccaagtgagacaccagctccactagtcaaatatagagaagaagagtt

SEQ ID NO: 55653 - DNA, 271 bp, Glycine max
  unsure (1)..(271): unsure at all n locations
  Clone ID: 700606027H1
tggatgtacaacaatgaagacactcctgttgttgccgttttctattattgacaccaacagcttggagaaccagcttcgaccagatgcctaggagattctatcttgctgggaaccaagagcaagagtttctaaaatatcagcaagagcaaggaggtcatcaaagccagaaaggaaagcatcagcnnnnnnnnnnnnnnnnnnnnngcagcatattgagtggcttcaccctggaattcttggnacatgcattcagcgtggacaagcagatagc

SEQ ID NO: 55654 - DNA, 244 bp, Glycine max
  unsure (1)..(244): unsure at all n locations
  Clone ID: 700606028H1
cgttctttcatgcttcttccccgtttctnccanctcctccggcaanctcctcctcctctccaagncatggcgcgtgngtcaagtgcgncaatcaggcccctcatttcaacgtcatccggnatgtaactctcgtgggggttctctggcctccaaatctcgttttcgggcgcactttcacgcctcncgcggtgcgcgggcgaaaanagcgagcggcggcggcatggggatcgcacgacagaggata

SEQ ID NO: 55655 - DNA, 116 bp, Glycine max
  Clone ID: 700606030H1
gcataaggcaccctttatgttttagaccttggtcagatgcttgaacagttgtacttctgttttggccctgaatctcattctttaatttttattttttaaacacatctctagaaaat

SEQ ID NO: 55656 - DNA, 275 bp, Glycine max
  Clone ID: 700606031H1
ttcaccaacaaaaaaagtagcccaaaaccgcaactcaccgcttcgcacgtttcttcgatcattatccacattcctcttctcctcataggatggaacagcaggatatggctgatacaaccacccttagttattggttaaattggaggttctatctgtgtgcagtttgtgttttgctgtctattgtcctttcatttcttgtaatatggaaggataagggttcaaggaaattcagatctggaaaaggagaaaatcaggaagatgggactttgtctggt

SEQ ID NO: 55657 - DNA, 119 bp, Glycine max
  Clone ID: 700606032H1
actagttagaagcctagtatgtcttacatctgatatgttctgaaaaatggacaaaagtaactttgtttcattaggtattttttcaaaggaaagaatcgagtttctatgtcttgtgcttc

SEQ ID NO: 55658 - DNA, 266 bp, Glycine max
  unsure (1)..(266): unsure at all n locations
  Clone ID: 700606033H1
ggaggaaggaactttagagtaatgggttctttccagacaggatttngagggggagtgggatcgtcttttccttcagcagcaaccttccctcattatgccatccagcaagggataccttataatgtttatgggtactctccttactcgccggattacacttaccctacgagctactatggtgtgtatggaggagcaacagcacagtacccggtttatggaagtggagctgctgctgcagcgttctacccatatctgcagtacggaga

SEQ ID NO: 55659 - DNA, 264 bp, Glycine max
  Clone ID: 700606034H1
gccaatctgcattcaaaattaattttgaatgggatgatgggagtggaattcctggagcattttatatcaagaattttatgcaaactgagtttttccttgtgagtttgactcttgaagacattccaaaccatggaagcatccactttgtttgcaattcgtggatttacaatgccaaactcttcaaaagtgaccgcattttctttgccaaccagacatatcttccaagtgagacaccagctccactagtcaaatatagagaagaag

SEQ ID NO: 55660 - DNA, 263 bp, Glycine max
  Clone ID: 700606035H1
gggaaacaaaactacccttttgcttttgctctttgttctttgccatggagtggccacaacaacaatggccttccatgatgatgagggtggtgataaaaagtcaccaaaaagtttgtttttgatgagcaactccacgagggttttcaagactgatgcaggggaaatgcgtgtgctgaaaagccatggtggtaggatattttataggcacatgcacattggcttcatctctatggaaccaaagtcctgtttgttcctcagtacct

SEQ ID NO: 55661 - DNA, 265 bp, Glycine max
  Clone ID: 700606036H1
ataaatagcattaagcagtggagacggtcttttgtttaattcatccaattgacgccttgctttatagtaagttttaattcatccgaaatgatttaacctgaacaacaagtaggagtgccaatgaaaacaagagataaatagtacgtaaaagagagggaattaaaacttactataaaaactagagtgaaaaatgttttaggattggaatcttgagaacgataaagggaggtgtgcattatgtaatcaaggttttaagaaataaatt

SEQ ID NO: 55662 - DNA, 265 bp, Glycine max
  Clone ID: 700606037H1
tcatgggaaatattcgtttgaagagaatgggggaacttgatactagaccattccttgaagcaatgaagcaaagatataatgaggaggatgctgaagagagagcttcagagctgtgttcattgtgggaagaatatctaaaggacccagattggcatccattcaaagttatcatggttgaaggaaaagaaaaggaaattattagagatgacgatgaaaagctgaatgggttgaaaaatgacttgggtgaaggggcatataaagcagt

SEQ ID NO: 55663 - DNA, 263 bp, Glycine max
  Clone ID: 700606038H1
gaagggttcgagtgagagcatacctgtcgggacccgaaagatggtgaactatgcctgagcggggcgaaccagaggaaactctggtggaggcccgcagcgatactgacgtgcaaatcgttcgtctgacttgggtataggggcgaaagactaatcgaaccgtctagtagctggttccctccgaagtttccctcaggatagctggagcccgcgggcgagttctatcgggtaaagccaatgattagaggcatcgggggcgcaacgcc

SEQ ID NO: 55664 - DNA, 256 bp, Glycine max
  Clone ID: 700606039H1
attgcattcgtgaattgttggcatggggtgcagatcgtcttcaacgcgatgcatctgggcgtataccatatatggttgcccttaaacacaaacatggagcctgtgcatcattgctaaatcctacatctgcagaacctcttgtctggccgtctccattgaagttcatcagtgagcttaatcctgaagccaaagctttattagagcaggccttgatggatgcaaacagagaaagagagaaaaacatattgaaagggag

SEQ ID NO: 55665 - DNA, 263 bp, Glycine max
  unsure (1)..(263): unsure at all n locations
  Clone ID: 700606040H1
caatgcttttggttgatacttatcataccaatcctgaaaatgcagttcgtagtatttttgttgcgccttcagaggcggnangcccattcgggtggntacatttccgaataccatcgtgcagattgaaccagatatgaattcaaggtttcagcttttgagtaccactaccaatggtgattttgttcaagggnaagatctcgcaatggttaaagttaatgtagcatgtgctgctgttggctgacatcaagttacactccaactcc

SEQ ID NO: 55666 - DNA, 286 bp, Glycine max
  unsure (1)..(286): unsure at all n locations
  Clone ID: 700606041H1
ggcttaacaacaacaanganggtttannatttctgcnattttgctcataaacttgcttgggtaatcaaaccatccaaaactagcataaatcggcaacacaggaataatccgttgcccttaactccagtaaatcctattngggccaaacccagtcccattcccatgggagtatggggttgattccaacttgacaactaagcttgtcccttttcttcataatgaacctcacaaaatttaaaaacttctgacgaaccacaagattaaactccatagggagatagtggaa

SEQ ID NO: 55667 - DNA, 266 bp, Glycine max
  Clone ID: 700606042H1
ctcttgggaatttctcaagattttgaaattgctggtaatactcttatgccagctttttctgtcccacaggctactgccagatccttctgaaaatgcggaatcctctgcatgatctggaatttgtgttttctctcgcttgttcgtttgtttaattcaataaaggaaattaggcatgaccctcttgttgagtatgctctgcctatttgaaaatttccacacctcttttaattatcgtaatgatgtgtgaagtgtgtgttattttaaaa

SEQ ID NO: 55668 - DNA, 229 bp, Glycine max
  Clone ID: 700606043H1
aatatcctagtacaccgtattaaagaatttaagatatactatgatgagagcgcggttcccattactgttgctgggagtgttttcctggcatcagtttctgtctcatttggcattgcgtattgggaaaagcagaaccccagtcacaacaagtgcctccgaagttgcaatagcgagaaagactcctacaggaaccaagcatgccacgctcgttgcaacctccttaaggtgg

SEQ ID NO: 55669 - DNA, 267 bp, Glycine max
  unsure (1)..(267): unsure at all n locations
  Clone ID: 700606044H1
gaacattttagaggcctcctacgataccaaattcgaggagataaacaaggttctgtttagtngagaggaagggcagcagcaaggggagcagaggctgcaagagagcgtgattgtggaaatctcgaaggaacagattcgggcactgagcaaacgtgccaaatctagttcaaggaaaaccatttcttctgaagataaaccttttaacttgagaagccgcgaccccatctactccaacaagcttggcaagttctttgagatcaccccaga

SEQ ID NO: 55670 - DNA, 266 bp, Glycine max
  Clone ID: 700606045H1
catttggaaatttggctgatgacaccatcaattttgaggcttttccccacaagctggtgcaatttggagagattcaggaaaaagttgtattgaaattttcacaagaggaatttcttacagcttggtcaactcaggtgcgtcctacaacaactctgttggctgatgggtgtccatatttgtatgctatggtgcatgatagttcagtgtctacaataccaggtgattttgtcattggtgttaagttgacaaccataaacaatatgtgt

SEQ ID NO: 55671 - DNA, 269 bp, Glycine max
  Clone ID: 700606046H1
tgcattgtcaccctgcaccccgccccccaaatttagtagtagtaatattttaatgatttactgatagtaatacagagttgttatgctgttggctttaaattgcttttgagctatgctaatgctcatttaacttgtctattctaattttaatgcttcacaatcaagccttgtgcatttcaatttgttaaacacttaagcgatcattcagtcctaattcagaattggcatcgatataggttatatgtgacagatatgagtagaccacaata

SEQ ID NO: 55672 - DNA, 273 bp, Glycine max
  Clone ID: 700606047H1
attaaagattcctgtagcgagttcaataataagtcctccaccacactcagatctgcgagtctctgtattgtgtatactgctgcaaattcgatgttcaattcccaatttctattttcaaattctcagaatttcaacggtttaattttaagtgtatgagatctgagcagaaatcataattttccatcgcaccggaagccggaaccctaaccgaacctgatcccaatctccgatgtcttgtttagcgctttctctgcaacccgcaaatggatccga

SEQ ID NO: 55673 - DNA, 274 bp, Glycine max
  Clone ID: 700606048H1
cttttcgtgggaacccatttcccattttcccctttccaaaagaatgaatgcataaagtttggtggcgactgatccttttcgatcccacataaccaaagagaatgacaatatcactggtaggtttgattatttaacagaaaaggactgctggaaaatgggaggttgctgttgttctgccaggaaacctcacctgcatggaacaccagtgtattactattgcccaccaactttagaagagcgtgagtctttaacatctaatgatggtagggctatg

SEQ ID NO: 55674 - DNA, 263 bp, Glycine max
  Clone ID: 700606049H1
aaaattcttccaccaagttatgggtttccttgtgttgcttcttttctccctcttaggtctctcttctagttccagcatatcaactcatcgttccatattggaccttgacctaaccaagtttaccacacagaaacaggtgtcttcactgttccaactatggaagagtgagcatggacgtgtctaccataaccacgaagaagaggcaaagagacttgagattttcaagaataacttgaactatatcagggacatgaatgcaaaca

SEQ ID NO: 55675 - DNA, 262 bp, Glycine max
  Clone ID: 700606050H1
aaattttgataaaccgcgatcacaggttgccgcaccttaaaaccggaaacaaaagcaatcgttacttgatttcaagaatctctcaatttcttcctacttctttgtgtacgatttcttaagggaaagaaaatcactctctgtgctggtcacagacttcgtgaatcattttcttttccactcttagtttatttgctgaacactctcctatttgatataggacttcgtgtcagatttaaacttcttctgtctctttctcatttct

SEQ ID NO: 55676 - DNA, 242 bp, Glycine max
  unsure (1)..(242): unsure at all n locations
  Clone ID: 700606051H1
ttgagtaacaactcaacctgtgacagtttcaaatgagtgaagcaacggcaagattcgaacggcgggtcctggtggcggnggacgaaggcgaggagagcatgtacgctctttcttggagcctcaggaacgtaattttccaaaattccagagatacccttatccttctttacgtcaagccccctcatgccgtttattcccccttagattccactggcaggatagatgatcctgaaactccaggt

SEQ ID NO: 55677 - DNA, 258 bp, Glycine max
  Clone ID: 700606052H1
acaggaactgatgttgggtacccaggtgggctttggtttgatccacttggctggggaagtggttctcctgagaagatcaaggagttgagaacaaaggagatcaagaatgggaggttggccatgttggctgtgatgggggcatggttccagcacatttacactggcactggtcctattgacaacctctttgctcaccttgcagatcctggtcatgctactatttttgctgctttcactcccaagtgagaagggttggaa

SEQ ID NO: 55678 - DNA, 263 bp, Glycine max
  Clone ID: 700606054H1
acctaagacggttatctccaagcctcactccctcgtttcttccgcccccttcactcaccttctatctgccaattctcttctattaataacacccacctctttggttcctcttcccttcaattcatcacataataacgacactacaaaacattgtttttagctcttttttgttgcagcgaaaccaaaatgtctttcactgcaactaagtttgcaccttctcctctccctctcaattccaccacccccagatccaatgacaagcc

SEQ ID NO: 55679 - DNA, 262 bp, Glycine max
  Clone ID: 700606055H1
ttcaatatcctagtataccttaataaataatttaagatactatgatgagagcacggttcccattactgttgctgggacttgttttcctggcttcagtttctgtctcatttggcattgcttactgggaaaaagagaaccccaaacacaacaagtgtctccagagttgcaatagcgagagagactcgtacaggaaccaagcatgccacgctcgttgcaacctccttaaggtggagaaagaagaatgtgaagaaggtgaaattcc

SEQ ID NO: 55680 - DNA, 265 bp, Glycine max
  Clone ID: 700606056H1
acgttctgttcattcattcagaagcagcgtgggtgtgtgttttgcttcagagaatctttctcctaatggaacagctgaagccaagcgctcctaactcatcccctctcactccactcgccttcttggacagagcagccaccgtctacgcccacgtcccttccctagtctacaaccacaccaccttcacctggtccctcacgcgccgccgatgcctccagctcgcctcctccctctcctccctcggcatccgccgcggcaggtcgtt

SEQ ID NO: 55681 - DNA, 264 bp, Glycine max
  Clone ID: 700606057H1
ctttttttcttgtaggtataagcttagctgctcaggctctaatatacccctgccgaagtttatacaacaatgatgggcctgtaagtaacgagtcatgatgagactaagcagctgggacctggcacggagtggatgtaacagttgaggaaaggacagttatgatgctcccaacaagttttggtggatgatcaagacactatgaaaagttgaaaaagtctgcatacttaatttcaacatagtttgaattttgaagtacaagaccaa

SEQ ID NO: 55682 - DNA, 243 bp, Glycine max
  unsure (1)..(243): unsure at all n locations
  Clone ID: 700606058H1
gaatagaggttcctatagtgagaannnacccgaagtccagaaatattataactcaactggannatggtgatgagcttttatgggcagctagttggctctatcatgctacgggtgatgattcttaccttcagtttgtgactggccaagatggagaagactatgctcaatggggaagcccaacctggttcagttgggataacaagcttgctggaactcaggttttgttatctagattaagctttt

SEQ ID NO: 55683 - DNA, 264 bp, Glycine max
  Clone ID: 700606059H1
ggactatccttatgccgctgatggactggagatatgggctgcaattaagacatgggttcaagaatatgtgcccttgtactatgcaagagatgatgatgtcaaaaatgattctgaactccaacattggtggaaagaagctgtagagaaaggccatggtgatttgaaagacaagccatggtggcctaagttgcagacacttgaagaccttgttgaagtttgcctcattatcatatggattgcttcagctctccatgcagccgttaa

SEQ ID NO: 55684 - DNA, 263 bp, Glycine max
  unsure (1)..(263): unsure at all n locations
  Clone ID: 700606060H1
tttctctttctctctctgtctttctatatcctcagcaacacactcangaaaaatgtagaacaactagaatctttgttccaaacaaaaacgtatgaattggtcggtttttctccggagtcgtcttcacttttctccgagtttttattatcatcatctctctcgtgtccctgtctccatctccatctcttagtttcttcttcaaatggcagaagttgaagacatagacaaccctcatcacgaccaccatcattacctttcttctt

SEQ ID NO: 55685 - DNA, 266 bp, Glycine max
  Clone ID: 700606061H1
atagaataagaattcttggcgagaggagcattgtcatagtccttgtagccttggccagtcaaccacaattttctgttaaaggttaattatagttgctttcaactaatttgtcagtagagagaggagcattgtcatagttggtgaaaatagggggtctcctcctttagggtatcgtggcatcagcaccagccatgattcggatcatgaggtgcaaaataacacccacaggatatgtcattggatttaagcaagtgtattcatcagct

SEQ ID NO: 55686 - DNA, 238 bp, Glycine max
  Clone ID: 700606062H1
caaaaggtacatcgcttcagagagggtgatttgatcgcagtgcctactggtgttgcatggtggatgtacaacaatgaagacactcctgttgttgccgtttctattattgacaccaacagcttggagaaccagctcgaccagatgcctaggagattctatcttgctgggaaccaagagcaagagtttctaaaatatcagcagcagcagcaaggaggttcccaaagccagaaaggaaagc

SEQ ID NO: 55687 - DNA, 236 bp, Glycine max
  unsure (1)..(236): unsure at all n locations
  Clone ID: 700606063H1
ggatcaaactcaagtttatcgatacctcttcaaagtttggtgcatggtcgcttccagaccacacaggagaagcagaagttcttggacgcctcaaagcataattatgttaattggatggaaatgctggaattctatttggttgccatcacttataaactttgtagtgtttctgttttgatattatggattctcgggtagtgagtcattacattgcgtcaatccctccttaagcngac

SEQ ID NO: 55688 - DNA, 285 bp, Glycine max
  unsure (1)..(285): unsure at all n locations
  Clone ID: 700606064H1
tttcggnttgnttccctttcctnaccnataanttgagtcctaaatttgattcaagttccctcctcctttccaatcctgcgttcctcgggaacgacaaatagtnnattttagggatctttctggtnccggggtgtctggcttggtaggacttcatttctggagagtttggtttaatgtctgaatcagaagctcagcntcctactgcctttgttgctgatgttctattgtggaagaggtggcatgtttccttgggnatcangttgttgcaacagttgcctggggtcc

SEQ ID NO: 55689 - DNA, 259 bp, Glycine max
  Clone ID: 700606065H1
tcagctagcattgtttggctgaagaacataaacaggagaactgttgatgttattgcatccagactgtatttttactattcgtatagctatgaacttatgggagatcttgctgaaattcggggcaaccttcttgcattgcaccgaattgccaccctccgccatgatgagctgggtcaggaaacacttcttaatttgttacttcgtaactaccttcactacaacctatatgatcaggctgagaagttgaggtcgaaggctc

SEQ ID NO: 55690 - DNA, 252 bp, Glycine max
  unsure (1)..(252): unsure at all n locations
  Clone ID: 700606066H1
cgccgtcgtcgctgtttttgtgtgtcgcttcttcgtaggtgcagctgcaatggncnaagggacgccaaggagaacgtgtcagactctacgtgaggggtacaatccttggatacaaaaggtccaagtcaaaccagtatccaaatacatccctgatccaaattgagggtgtgaatgccaaagaagaagtagcatggtatgctggcaagaaaatggcctatatctacaaggctaaggtgaagaagaatggaagcc

SEQ ID NO: 55691 - DNA, 260 bp, Glycine max
  Clone ID: 700606067H1
aaattttaataaaccgcgatcacaggttgccgcaccttaaaaccggaaacaaaagcaatcgttacttgatttcaagaatttctcaatttcttcctacttctttgtgtacgatttcttaagggaaagaaaatcactctctgtgctggtcacagacttcgtgaatcattttcttttccactcctagtttatttgctgaacactctcctatttgatataggacttcgtgtcagatttaaactttttctgtttctttctcagtt

SEQ ID NO: 55692 - DNA, 255 bp, Glycine max
  Clone ID: 700606068H1
ttacagagaaagatttggctagagatgcaaactcgaagtttgagaatgtgattttgagcaagattgactcaaagttgggtggctattagctgaagcctcttctgaagaggatttctctggcaaagttggtcagtcaactgttcttagaattacaggacttggatcaaagagggttggattgattggtctggtcagtcaccttccactccttcaccttttaagggtcttggcgatgccgttgtggaggctgccaag

SEQ ID NO: 55693 - DNA, 258 bp, Glycine max
  unsure (1)..(258): unsure at all n locations
  Clone ID: 700606069H1
gcttctcctggggccctgatggaaagatctccatcatcaacaagcattgagcgcaggtatgtgaatagaagtagtgttaagcggaatcttgaaattgacgaaagtngaaggaggaacagtactaatgtaagagatttctctgcttctgatgatagacttggcagggagtctactctagagaaaccgctcttggatgagccctctcaagcagattcatctttatatggtaggactaatcagagcaatgcaccattgatt

SEQ ID NO: 55694 - DNA, 228 bp, Glycine max
  Clone ID: 700606070H1
tatcctagtacaccgtattaaagaatttaagatatactatgatgagagcgcggttcccattactgttgctgggagttgttttcctggcatcagtttctgtctcatttggcattgcgtattgggaaaagcagaaccccagtcacaacaagtgcctccgaagttgcaatagcgagaaagactcctacaggaaccaagcatgccacgctcgttgcaacctccttaaggtgg

SEQ ID NO: 55695 - DNA, 258 bp, Glycine max
  unsure (1)..(258): unsure at all n locations
  Clone ID: 700606071H1
cttgcggctagggttttagcgcacttcttctagatttaaggaagangggtaaggaaaaggttcacatcagtattgtggttattggccatgttgactctgggaagtccactaccactggccacctgatctacaagcttggaggcattgacaagcgtgttattgagagatttgagaaggaagctgctgagatgaacaagaggtctttcaagtatgcctgggtgcttgataagcttaaggctgagcgtgaaagaggaatca

SEQ ID NO: 55696 - DNA, 262 bp, Glycine max
  unsure (1)..(262): unsure at all n locations
  Clone ID: 700606072H1
gttcacaatcctcctcatctctcttctcttctgcatcgcccacacttgcagcgcctccaaatggcagcaccagcaagatagctgccgcaagcagctccagggggtgaacctcacgccctgcgagaagcacatcatggagaagatccaaggccgcggcnnnnnnnnnnnnnnnnnnnnnnnnnnnnnncacattctcaggaccatgcggggaagaatcaactacataaggaggaacgaaggaaaagacgaagacgaagaagaa

SEQ ID NO: 55697 - DNA, 260 bp, Glycine max
  unsure (1)..(260): unsure at all n locations
  Clone ID: 700606073H1
gtgagtttgttgttcctcactgacctcaccatggcgaccagagccaagctttctttagcnannnnnnnnnnnnnnnnnagccttgatttcaaacctagccttgggcaaacttaaagaaaccgaggtcgaagaagatcncgagctcgtaacatgcaaacaccagtgccaacagcaacggcaatacactgagagtgacaagcgaacatgcttgcaacaatgtgacagtatgaagcaagagcgagagaaacaagtcgaagagg

SEQ ID NO: 55698 - DNA, 241 bp, Glycine max
  unsure (1)..(241): unsure at all n locations
  Clone ID: 700606074H1
ggagaacttcctcttcgtttcgctgantttggggtttgcataggaatgagggctagtgggcgcactgagtggattaacacgtgttaggagattccagcaggacgatgcacatattttctgcagggagtctcagataattgangaaattcaagcngttcctcacttcatcctttatctgagactccctgcagaaaaaggatgaagtgaggaacagcttgaatttcatcaattatgtctataa

SEQ ID NO: 55699 - DNA, 260 bp, Glycine max
  Clone ID: 700606075H1
ttcagcatttggtgttgtctggtggaaaagatgatttgtgtgctctcgctgttttcgaggacagtgtcaagaagctcaagagtcctaggaacttgtcgcatgttgctcctcctgagttgaccaaggaccaggttaactctgctgttgaattgctggcagattggttctacgagtcttgtggctctgtgcctctctctgctcttgaacacccaaagtttcaatcttttctcacccagctgggtttgccggtgactctgtta

SEQ ID NO: 55700 - DNA, 264 bp, Glycine max
  unsure (1)..(264): unsure at all n locations
  Clone ID: 700606076H1
aagaagcaagcatgtgtggcggagcaatcatcgcagatttcatacctcggcagcgtccccgcacccttcacagcctccgaactctggcccaagcgcaggaaannnnnnnnnnnnnnnnnnnnnnnnnnagttaagaggcagaggaaaaacctctacagagggatcaggcagcggccctggggcaaatgggccgcggagattcgcgatccacgtaaaggagttcgtgtctggcttggcaccttcaacaccgccgaagaagccgcc

SEQ ID NO: 55701 - DNA, 262 bp, Glycine max
  Clone ID: 700606077H1
aatatcctagtataccttaataaataatttaagatactatgatgagagcacggttcccattactgttgctgggacttgttttcctggcttcagtttctgtctcatttggcattgcttactgggaaaaagagaaccccaaacacaacaagtgtctccagagttgcaatagcgagagagactcgtacaggaaccaagcatgccacgctcgttgcaacctccttaaggtggagaaagaagaatgtgaagaaggtgaaattccacg

SEQ ID NO: 55702 - DNA, 262 bp, Glycine max
  Clone ID: 700606078H1
aacaggtatcgctgtcctatatgcttgaagacaatagtcaatgatatgaactgggaatatttagatcgagaggtgtgtggaactattattaaattttgttttgaaatattttttgttggtctatgtatgaccatgttttatgtctttgaactctaaagtaatattccacatgacttcttggagacaaggaaaattcatggggataaaacaactaggaaatgagccttggaagacattttgtatcaaatttttgctatgattg

SEQ ID NO: 55703 - DNA, 265 bp, Glycine max
  unsure (1)..(265): unsure at all n locations
  Clone ID: 700606079H1
ctactcattctccatacctcaacgaagaggttaaagagacggcaacactttgctgtccgccttgaccgagcagagcttcgtcttggccctcgattttgccctaaagtactctcagtcacaacagacacnnnnnnnnnnnnnnnnnnnnnnaatggcaccgaagcagaccaaggctgagaagaagatcgcttacgatgcgaactgtgcgacctaatggaggagtacggccagatcctcgttgtgaactccgataacgtgggatcga

SEQ ID NO: 55704 - DNA, 273 bp, Glycine max
  unsure (1)..(273): unsure at all n locations
  Clone ID: 700606080H1
attctctccattggtccttaaacactcatcagtcatcaccatgggcaagctaagttttttcccctttgtttctgcttttcaagtgggctgcngcttcgtttcagttccagagagcagcctcagcaaaaacgagtgccagattccaaaactcaatgccctcaaaaccggataaccgtatagagtcagaaggagggctcattgagacatggaaccctaacaacatgcattcagcgtggacaagcagatagcgaaaaacctacaaggagagaacga

SEQ ID NO: 55705 - DNA, 260 bp, Glycine max
  unsure (1)..(260): unsure at all n locations
  Clone ID: 700606081H1
cttctcttctcacccccacactcccatctcacacacccctcgcatcaaacaatgtctctcaccattccctccaacctctccaagcccgcngccctccgccccaaactaagcccaaagctaaggtccgccgccacaaccaccatcgtctgnnnnnnnnnnnnnnnnnnnnnnnnnnnnnnngtgtcctccgacctgaaggcgttctccgcngcgctggccctctcctccatcctcctctccgcncctctccccgccggcgg

SEQ ID NO: 55706 - DNA, 257 bp, Glycine max
  Clone ID: 700606082H1
taaaatgtcttataaaaaaagaatcatatcaattccttctaaactagtcttataataaggatcagagggagtaatataattgactgattccaataacacccaactaattaacaacgtaatcagacccaatctggaaaattcaaaagagtaaggtttcactttggcaagttaaagtgacctctacttggaccaagacagcttccagctatgtattatacatcacatggatggggtaaccgactaatcaactttgtctc

SEQ ID NO: 55707 - DNA, 256 bp, Glycine max
  Clone ID: 700606083H1
ggtatttttggcatgatattcccgggttgtcctagcacatttgaagagcctcaacaaaaaggacaaagcagcaggccccaagaccgtcaccagaagatctatcacttcagagagggtgatttgattgcagtgccaaccggttttgcatactggatgtacaacaatgaagacactcctgttgttgccgtttctcttattgacaccaacagcttccagaaccagctcgaccagatgcctaggagattctatcttgctg

SEQ ID NO: 55708 - DNA, 247 bp, Glycine max
  unsure (1)..(247): unsure at all n locations
  Clone ID: 700606084H1
cttaattattaacacttccttagttcaatatggggaagcccttcactctctctcnttcttccctttgcttgctactcttgtcgagtgcatgctttgctattagctccagcaagctcaacgagtgccaactcaacaacctcaacgcgttggaacccgaccaccgcgttgagtccgaagtggtttgattcaaacatggaactctcaacaccctgagctgaaatgcgccggtgtcactgtttccaaactc

SEQ ID NO: 55709 - DNA, 256 bp, Glycine max
  unsure (1)..(256): unsure at all n locations
  Clone ID: 700606085H1
tgcatcttctttttgttgttctctcaaactttaacaatctcataaataaataatcagannnnnnnnnnnnnnnnnttgaattcgaaaaatcgtagcgtaggttnggttgcgattgaaacggtacgatgggaagaggaaaattcaagagcaagcccaccggtcgccgccagttctccaccccggaagatatgcttgctggaacctctaaccgtcctcgaacttttagacagaaagaagctgagcatgaagaggagcc

SEQ ID NO: 55710 - DNA, 255 bp, Glycine max
  unsure (1)..(255): unsure at all n locations
  Clone ID: 700606086H1
cagattgcaaagtttgttgttgggctaggagacaaggtttcccccactgacatanaggaagggatgcgtgttggggttgatagaaataaatatcagattcagattcctttgcctccaaaaattgatccaagtgtgaccatgatgactgttgaagagaagccagatgtaacatataatgatgttggcggttgtaaggagcagattgaaaagatgcgagaagttgttgaacttcccatgcttcatccagagaaattt

SEQ ID NO: 55711 - DNA, 258 bp, Glycine max
  Clone ID: 700606087H1
gttaacaaacccggtagatttgagagtttcttcctatctagcactcaagctcaacagtcctacttgcaagggttcagcaagaatattctagaggcctcatacgacaccaaattcgaggagataaacaaggttctgtttggtagagaggaggggcagcaacaaggggaggagaggctgcaagagagtgtgattgtggaaatctcaaagaaacaaattcgggaactgagcaaacatgccaaatctagttcaaggaaaacc

SEQ ID NO: 55712 - DNA, 240 bp, Glycine max
  unsure (1)..(240): unsure at all n locations
  Clone ID: 700606088H1
atcatgtagttcaaatacccctaatggcacaggaggaaattctgtnttctagtgaaagtgatttcagaactgcaatggtgagtaaaaatagcaagcctcaagctactgcaatgcatgtgggagctatagaaattatcattgatagtttcgcaagtcctgactgcaacatagttggtgcaatgctttggttgatacttatcataccaatcctgaaaatgcagttcgtagtatttttgttgc

SEQ ID NO: 55713 - DNA, 259 bp, Glycine max
  Clone ID: 700606089H1
ggctgctacaaagaaacaaaagtatgataaaatatgccagaagaaattatcaactccctattgaggtactatgcaaatctcatcctgtagagtttgcctcgtacttccattactgccactctttgacatttgatcagcgacctgattatggattcttgaagcgcctatttcgggacctatttgctcgagaaggttatgattttgattatgtatttgattggaccattttgaagtaccagcaatctcaaaagaatgtaat

SEQ ID NO: 55714 - DNA, 249 bp, Glycine max
  Clone ID: 700606090H1
tgatattcatgatgataatcagctacagtatcttgttcagcaacgatgcttttaacttcaatagtaatctcttcagtaatcatattttccttaccagcatttaccacatgctcagataatagctttaatgcatctctttgttgcttctgttcctccaaagaaattggggtttggtctagttggttcagggaaaagaacatctgtccgttctgttttccatgaagaggatgataatgaggccaaaatgag

SEQ ID NO: 55715 - DNA, 256 bp, Glycine max
  Clone ID: 700606091H1
ttaacacttccttagttcaatatggggaagcccttcactctctctctttcttccctttgcttgctactcttgtcgagtgcatgctttgctattagctccagcaagctcaacgagtgccaactcaacaacctcaacgcgttggaacccgaccaccgcgttgagtccgaagtggtttgattcaaacatggaactctcaacaccctgagctgaaatgcgccggtgtcactgtttccaaactcaccctcaaccgcaatgg

SEQ ID NO: 55716 - DNA, 258 bp, Glycine max
  unsure (1)..(258): unsure at all n locations
  Clone ID: 700606092H1
taccttttcctcgtcccattcaagtgaaaccttgatggctgaagtggatcagtacacgggcggtgagcatgangttgaggaaacgattgaggttgaggcggaggaagaaatgcacggnggtgaagaggcggttgttgttgcggagaagaagtggccgggttggcccggggagagtgtgtttcggatgttagttcctgcgcagaaggttgggggtatcattggacgcaaaggagagttcattaagaaaattgtcgaggg

SEQ ID NO: 55717 - DNA, 263 bp, Glycine max
  unsure (1)..(263): unsure at all n locations
  Clone ID: 700606093H1
gggaatttcgatgctcagtcatctcttttaccattctcttctctcttgctcttgcaggagagagccatgtccatgcatcgctacctgaggaagattattgggaagctgtttggccaaacactcccattcccactgcactgcgagagcttctaaagcctctcccnncaggtgttgaaatcgatgaactccctaagcaaattgatgatacacagtacccaaaaacattcttctataaagaagaccttcatccaggcaaaanaatg

SEQ ID NO: 55718 - DNA, 263 bp, Glycine max
  Clone ID: 700606094H1
aaactccttcacccctcactatcgtgacaccatgaacataaatggccttgctcggttatcactggtcaacgacggtggcgtatagaacaaacatttttgtggggaaggtattctgtggaaatgtctgctgtagtttacaaggattgggtttttacagatcaagcattgcctgctgatcttataaaaagaggaatggcaattgaggatccatcgtgccctcatggcattcgccttgtgatagaggactacccttatgctgttga

SEQ ID NO: 55719 - DNA, 263 bp, Glycine max
  Clone ID: 700606095H1
tagctacttagtttgagaagaatgatcttcggaagctgaagtacattcttgggatagaagttgcctactctaagtaaggtatctttaattctcaaaggaaatatgtgcttgatctccttaaatagactggtaagttgggttgtaagatgtgcttgaccatgtgtacagggcccttaaccagctaaaatactcctaaagaaagacacatcagataaatctggattctaccatattttggaggaggaaactccaatacatgaagc

SEQ ID NO: 55720 - DNA, 239 bp, Glycine max
  unsure (1)..(239): unsure at all n locations
  Clone ID: 700606096H1
taagttaaaacccattgataattgnacttaacaggaatggagaactgacngntaacattgttgggacttgtacgnaagagggtatattgctatatggcggaacttatgacatagtgtaccttagtcgagacattgtgcacatctccattatgtgagtcatgatgacccgtaatgttggatgaccccnacatatgntnattcagccatgtatatacactcattgtggnctcatgataatt

SEQ ID NO: 55721 - DNA, 259 bp, Glycine max
  Clone ID: 700673504H1
tgaacactcatcaccatggccaagcttgttctttccctttgtttccttcttttcagtggctgcttcgctctgagagagcaggcacagcaaaatgagtgccagatccaaaagctgaatgccctcaaaccggataaccgtatagagtcggaaggtgggttcattgagacctggaaccctaacaacaagccattccagtgtgccggtgttgccctctctcgctgcacccttaaccgcaatgcccttcgtagaccttcctaca

SEQ ID NO: 55722 - DNA, 252 bp, Glycine max
  Clone ID: 700673522H1
aattgttgtaactttttgattcctaaattctctaaaattcgaaattctaatttcgttaggggaaagagattgtttgtgtgtgagtgagtatggctggaaaaggcgagggtcctgctatcggaatcgatttgggaacgacgtactcttgcgtcggcgtgtggcaacacgatcgtgttgaaatcatagccaacgatcagggtaacagaactaccccatcctacgtggctttcaccgacacagaacggttgatcg

SEQ ID NO: 55723 - DNA, 257 bp, Glycine max
  Clone ID: 700673550H1
ctttatcatatcataataggtgagcagccgagatctgttgccggtggcatcaaggaaagtaagagtttagagtttgaactctgtttatccaatgcacaaagcgtagatctctgtgttataatggaatacaggaaaatcaaagacgaggatgaagttagggatgcgggcgttgaggacgttggaaaatcatttttgctgtcagtcccagataacgatttgacttccgagggagaaaccaaaattgacagccacaggga

SEQ ID NO: 55724 - DNA, 250 bp, Glycine max
  Clone ID: 700673552H1
gtggcttcaagctctgcctcgtgctctagttgttggttttgtaaaaactgacatagagtttcagaaaaaaggggaaacttcaggaacaacagctacatttgttctggttgatggatggactgttactgttgcatctgttggggattcccgttgcatattagatactcaaggaggtgttgtttctctcttgacagttgatcacagattggaagaaaatgcagaagagagggaacgcgttactgccagtggt

SEQ ID NO: 55725 - DNA, 108 bp, Glycine max
  Clone ID: 700673561H1
caataaaggaaattaggcatgaccctcttgttgagtatgctctgcctatttgaaaatttccacacctcttttaattatcgtaatgatgtgtgaagtgtgtgttatttt

SEQ ID NO: 55726 - DNA, 257 bp, Glycine max
  Clone ID: 700673602H1
attggcaaatacacaagaattttttgatggaaattttccaacagattcttggttaccaatatttgttaattgtctttaccctgtgagtcaattgcccgcagaagctgtcattgttaatgttgtttgtgggagtgggcgtggtggtttgcctactactgcttggattagttctgcagttaacaatcgctcctcagatatcaataagaaaattcggacagcgcttgggaaaggtaagaaaattgtctttttgactagag

SEQ ID NO: 55727 - DNA, 254 bp, Glycine max
  Clone ID: 700673634H1
gtccccgccgtaatcaccgttgcgctcctgagcctggggttcctcgcctcgagtgggttcggtgtggcggcgatcacggtgctggcgtggatctacaggtacgtcaccggcaagcaaccacctggcgcggatcagttagacagcgcgcgtcacaagatcatggacaaggcgcgtgagatcaaggactacggacagcaacaaatcagcggggtccaggcttcttaattctgcactcgcacgcacatgatcgtatc

SEQ ID NO: 55728 - DNA, 136 bp, Glycine max
  Clone ID: 700673705H1
ctagttcaatatcctagtataccttaataaataatttaagatactatgatgagagcacggttcccattactgttgctgggacttgttttcctggcttcagtttctgtctcatttggcattgcttactgggaaaaag

SEQ ID NO: 55729 - DNA, 132 bp, Glycine max
  Clone ID: 700673710H1
ggagcagaaatggcattgatgagaccatttgcacaatgagacttcgccaaaacattggtcagaattcatcacctgacatctacaaccctcaagctggtagcatcacaaccgccaccagccttgacttcccag

SEQ ID NO: 55730 - DNA, 257 bp, Glycine max
  Clone ID: 700673751H1
attgtctttgaacactcatcaccatggccaagcttgttctttccctttgtttccttcttttcagtggctgcttcgctctgagagagcaggcacagcaaaatgagtgccagatccaaaagctgaatgccctcaaaccggataaccgtatagagtcggaaggtgggttcattgagacctggaaccctaacaacaagccattccagtgtgccggtgttgccctctctcgctgcacccttaaccgcaatgcccttcgtaga

SEQ ID NO: 55731 - DNA, 124 bp, Glycine max
  Clone ID: 700673774H1
gttttattcacaggaaattagcggttcacgacttccttcagcatatccctattgtagagccaagacccaacttggtcagagaaatcagggaagcattgctaaggcatctcacggctgttcttgg

SEQ ID NO: 55732 - DNA, 281 bp, Glycine max
  Clone ID: 700673809H1
ctccaaccatgtcctctattccaaccgatccgccgcatacgcctccctcaaaaactacgcagatgcattagcggatgccaaaaagacagttgaactcaagcccgactggtccaagggttacagccgtctcggtgccgcgcatcttggcctttcccaatacgatgatgctattttggcttacaaaaggggtctcgaaatcgaccctcacaacgagccccttaagtctggtttggcagatgcgcagaaggccttggccgcggcctccaggcctcgcccctcgg

SEQ ID NO: 55733 - DNA, 271 bp, Glycine max
  Clone ID: 700673822H1
cttgtttggtttgagacttagagtaattgagttggtcctccttccaactatttgagttgtttttcttttctccagtgccaattccggtcactctcttcattaataaattctactatatatatgaagaagtggccactgctgctgaatcagttattccttcaatcatgtctttctcttcttgcttttcccattctccattgacattcaaggctatgaaaccttgtggttctgttgggaaggggcaaaattttgctttccctatcagaagtaa

SEQ ID NO: 55734 - DNA, 170 bp, Glycine max
  Clone ID: 700673880H1
gaaattttgataaaccgcgatcacaggttgccgcaccttaaaaccggaaacaaaagcaatcgttacttgatttcaagaatctctcaatttcttcctacttctttgtgtacgatttcttaagggaaagaaaatcactctctgtgctggccacagacttcgtgaatcatttt

SEQ ID NO: 55735 - DNA, 274 bp, Glycine max
  Clone ID: 700673893H1
agttcactaagcagaagaggaatttctagtgtacaggaattactagacattccaaaagcagcattgcagactgtaactgcaaatttcccagcttcaagattgtaccaggatcttcagcatttccctcatgttaaaatgaaattaaaagttcagaggaaggacactgatggtgacaggtctcgcatattatctgttagattagagaagaccaattctagacgacactcttctagagcatttgtacctcgatttccaaagataaaagaggaacaat

SEQ ID NO: 55736 - DNA, 222 bp, Glycine max
  Clone ID: 700673911H1
cagaaggcttacttgaagactattacaccaaagtttcagacccttattgacctttctgttatagaaatcttgtcaaggcatgcatctgatgaggtgtaccttggggagagggacaatccaaattggacatctgatacaagagcattagaggcttttaaaaggtttggaaataaactggcacaaattgagaataaactctcagagagaaacaacgatgagaaa

SEQ ID NO: 55737 - DNA, 224 bp, Glycine max
  Clone ID: 700673912H1
attctatatcaattttggttaagagtcttgaaaaagcaagagaaaaaaaaataccaaccatggcaaccatttctgatcaacctagagggtcctactcctatggaacctcatatggagcaccctatggaaccacgtatgagaccaacaccagcattaacaacccaccttcacgccaaacagtgaagttcataactgctgccactattggcatcacactcttgctc

SEQ ID NO: 55738 - DNA, 224 bp, Glycine max
  Clone ID: 700673914H1
gccatttccatagcagcctaagaaaatgaagagcactagcttgttcgctatctttctactttgcgccttcacctcatacctaccttccgccaccgcccaggacgtgctcgacgtggatggcgatccgattcggaacggtttcatatactacgttttgccggcaataagaggaaacggtggcggaatagaacgagccgcactcgggaaagacacttgccctatca

SEQ ID NO: 55739 - DNA, 228 bp, Glycine max
  Clone ID: 700673916H1
cgtgagagtaaacccaattcttcctccaccaccagcaccaaagaaaccaatcttcacagatgctggtatgattgactatctcagtggtgatgcatacaaaacagaagcatcccatgaacaatctgaaccaacttcatatgccgtgccccttcattctagtcctactaatcctgcctcaaccgctgcaacactatcttcctctccaccttattccccaagtactccatc

SEQ ID NO: 55740 - DNA, 224 bp, Glycine max
  Clone ID: 700673919H1
gacaaagcgtggggaagctgctcttgctcgtttgaaggtttatgaaggaatccctcctccatatgacaagaccaagagaatggttgttcctgatgcactcaaggtgttgaggcttcagaagggacacaagtattgtgtgctgggcaggttgtcatctgaagttggatggagctactatgataccattagggagctggagaagaagagaaaggagaaggcagcgg

SEQ ID NO: 55741 - DNA, 217 bp, Glycine max
  Clone ID: 700673942H1
gaatgacctagtggacttagctcaggtggcgcttgagcggggcttcccagcagtgattagtcctttaggtagaaggaggcttccttttccaagtcaaagttttgatgctatacattgtgggggttgcagcataccttggcattccaatggtggtaagcttctattagagatgaatcggattctacgacctggtggatactttattatgtcaactaaa

SEQ ID NO: 55742 - DNA, 215 bp, Glycine max
  Clone ID: 700673958H1
gttgtggtcaacgctacctcaaatctgaatttctttgctattggtattaatgccgagaacaaccagaggaacttcctcgcaggttcgcaagacaatgtgataagccagatacctagtcaagtgcaggagcttgcattccctgggtctgcacaagctgttgagaagctattaaagaaccaaagagaatcctactttgtggatgctcagcctaagaa

SEQ ID NO: 55743 - DNA, 217 bp, Glycine max
  Clone ID: 700673959H1
ggagcagcagcgagagagcgaagaaagtgaagattctgagttacgaagacataagaataagaacccttttctcttcggctctaacaggttcgaaactctcttcaaaaaccaatatggtcgcattcgcgtcctccagaggttcaaccaacgctccccacaacttcagaatctccgagactaccgcattttggagttcaactccaaacccaacaccctc

SEQ ID NO: 55744 - DNA, 214 bp, Glycine max
  Clone ID: 700673974H1
ctcactcacaaacacacactgaactaaaaaacatcaaaagagacatggctgagcaaaccttcatcatgatcaagcctgatggcgtccaaagaggccttattggcgagatcattagcagatttgagaagaaaggtttctacttgaaaggtttgaaacttgttactgtggaccgtccttttgctgagaagcactatgctgatttgtctgccaagcc

SEQ ID NO: 55745 - DNA, 214 bp, Glycine max
  Clone ID: 700673975H1
ctagttcaatatcctagtataccttaataaataatttaagatactatgatgagagcacggttcccattactgttgctgggacttgttttcctggcttcagtttctgtctcatttggcattgcttactgggaaaaagagaaccccaaacacaacaagtgtctccagagttgcaatagcgagagagactcgtacaggaaccaagcatgccacgctc

SEQ ID NO: 55746 - DNA, 212 bp, Glycine max
  Clone ID: 700673990H1
ggggcaaactcattgttgaacgcattgccagaggaagtgattcagcacacttttaacctaaagagccagcaggccaggcaggtgaagaacaacaaccctttcagcttcctggttccacctcaggagtctcagaggagagctgtggcttagagagccctttttgcatgtgctaccacacttttgtccttttgggctctagctagtgctggtag

SEQ ID NO: 55747 - DNA, 213 bp, Glycine max
  Clone ID: 700673991H1
attcattccttctttcatttcattagcaaaagtgatcaattaagtgttaattaaccatcgatcatgatgaggagcaagaagcagagccagaacaagtttgttcgaatcatggcatcaccaatcagagcactgggaaaagcacgtgacatgtacgtgcggagcataacgaactgcggccagcacgtgagctactacggcggcgaccccacagaa

SEQ ID NO: 55748 - DNA, 122 bp, Glycine max
  Clone ID: 700674039H1
attttagagacataagatggtagtaaaatgggggtcccttattctccttgttaatgtatggatgtattaaaagttttgtcccttgtaatttctttgtttggcttaatgaaaggtagtaaaat

SEQ ID NO: 55749 - DNA, 230 bp, Glycine max
  Clone ID: 700674055H1
gtttgctactacggccagcattatcattgctttgcttatagccatgaccatgaacagtggattatgtatgatgacaagactgtcaaggtaattggtggatgggcggatgttcttacaatgtgtgaaagagggcatctacaacctcaggttcttttctttgaagctgtaaactagatttttggtggaactgataacatcatttgctggactgaagaatgttgacttttggg

SEQ ID NO: 55750 - DNA, 230 bp, Glycine max
  Clone ID: 700674057H1
agagaagatcctgaactccaagcctgctggaaagaactcgtagaggtgggtcatggagacaagaaaaatgagccatggtggcctaagatgcaaactcgtgaagagctagttgaagcttgcgctatcatcatatggactgcttcagcacttcatgcagctgttaattttggacagtatccctatggaggtttaatcttaaaccgtccaactcttagtaggcgattcatgcc

SEQ ID NO: 55751 - DNA, 237 bp, Glycine max
  Clone ID: 700674078H1
gtcttccatagccccccaaaaatgaagagcaccatcttctttgctctctttctcttttgtgccttcaccacctcatacctaccttcagccatcgctgatttcgtgctcgataatgaaggtaaccctcttgaaaatggtggcacatattatatcttgtcagacataacagcatttggtggaataagagcagccccaacgggaaatgaaagatgccctctcactgtggtgcaatctcgc

SEQ ID NO: 55752 - DNA, 259 bp, Glycine max
  Clone ID: 700674189H1
acacgcttcagaagacatggcctcattgggtgggttacaaaatgtgagcggcatcaattttcttatcaaagagggtccaaaagtcaatgcaaagttcgagctgaagccgccaccatatccactgaatggtttggagccggtgatgagccagcagacacttgagtttcactgggggaagcaccacaagacttatgtggaaaatctgaaaaaacaagttgttgggacagagcttgatgggaagtcactagaagaattattg

SEQ ID NO: 55753 - DNA, 132 bp, Glycine max
  Clone ID: 700674236H1
atttttgcataggatgccataatactaatgtaactttgtgctaatcaaatcatcaaaaggtagcatacgatgatttagtgtaatgctacgctcgcaactattttcatccgaaagatcacaattatcctgcgc

SEQ ID NO: 55754 - DNA, 279 bp, Glycine max
  Clone ID: 700674253H1
cgagggtttgggtttctcttcctcccttggagaaaaagaagagccaccgctgcgacgccgttcgtgcatttttgaggtgccgctgtcatgtttgggcgtggtggaccaaggaggagtgataactccaaatattatgatattctcgggatttccaaaaatgccagtgaagatgaaatcaagaaggcctatagaaaggcggctatgaagaaccatccagataagggaggagatcctgaaaagtttaaggagttaggtcaagcatatgaagttttaagtgat

SEQ ID NO: 55755 - DNA, 279 bp, Glycine max
  Clone ID: 700674254H1
gtcttccatagccccccaaaaatgaagagcaccatcttctttgctctctttctcttttgtgccttcaccacctcatacctaccttcagccatcgctgatttcgtgctcgataatgaaggtaaccctcttgaaaatggtggcacatattatatcttgtcagacataacagcatttggtggaataagagcagccccaacgggaaatgaaagatgccctctcactgtggtgcaatctcgcaatgagctcgacaaagggattggaacaatcatctcgtcccca

SEQ ID NO: 55756 - DNA, 278 bp, Glycine max
  Clone ID: 700674260H1
aaatgatactacaagccactaggcatgggtctagcaaaggaaacaataatgggaggtggaggccgtgtggccaaagttgaaattcagcagaagaagcctctctcaagggttccaaacacaaagccaccattcactgttggccaactcaagaaagccattccaccgcactgctttcagcgttccctcctcacttcattgtcctatgttgtttatgacctttcattggctttcattttctacattgccaccacctacttccacctcctccctcacccctt

SEQ ID NO: 55757 - DNA, 188 bp, Glycine max
  Clone ID: 700674264H1
gttcaatatcctagtataccttaataaataatttaagatactatgatgagagcacggttcccattactgttgctgggacttgttttcctggcttcagtttctgtctcatttggcattgcttactgggaaaaagagaaccccaaacacaacaagtgtctccagagttgcaatagcgagagagactcgta

SEQ ID NO: 55758 - DNA, 279 bp, Glycine max
  Clone ID: 700674266H1
cacagaggaattaacatatatatagcaagcatggcagtcacactctacgaccttagctcttcctctgggttgaagaaacttgatgagtaccttctcccacgcagttacatcaccgggtaccaagctacaaaggatgatcttactgtttatgcagctttgccaactgctccatcagatgaatatggaaatgtttccaggtggtacaagcacattgatgctttgttgagaatctctggtgttactggcgagggatctggtgttattgttgagggatctcta

SEQ ID NO: 55759 - DNA, 277 bp, Glycine max
  Clone ID: 700674268H1
cattctctccattgtctttgaacactcatcaccatggccaagcttgttctttccctttgtttccttcttttcagtggctgcttcgctctgagagagcaggcacagcaaaatgagtgccagatccaaaagctgaatgccctcaaaccggataaccgtatagagtcggaaggtgggttcattgagacctggaaccctaacaacaagccattccagtgtgccggtgttgccctctctcgctgcacccttaaccgcaatgcccttcgtagaccttcctaca

SEQ ID NO: 55760 - DNA, 275 bp, Glycine max
  Clone ID: 700674271H1
gatgtgtttagggcaattccctcagaggttcttgcccattcttacaaccttcgacagagtcaagtgtctgagcttaagtatgaaggaaattggggtcctttggtcaaccctgagtctcaacaaggctcaccccgtgttaaagtcgcataaatgacaagcatgatggtgtgaggatgaggccatcttatgaaataataacaaataaataaattttgtatgataataaaaagtatggcccatgtaccatcccagcgagcctatgtttatatctgagt

SEQ ID NO: 55761 - DNA, 276 bp, Glycine max
  Clone ID: 700674278H1
ttggtattcctgagaatacaggtatagcattggcctgtgctatgaatagttcttttagggggcgcgccagttctgatatttacaccatctgctctcaagactgtgaattatggaatcctgcttgcacaaaagcaatgactatgtcatttaatccaaacccgtgttctgatgcatggagtttggaatttctgaagcgtaccggatttcattgtgatatcatttgtgtcactggatggactgccaccccaatgcaggatgttcaggttacaattgatt

SEQ ID NO: 55762 - DNA, 92 bp, Glycine max
  Clone ID: 700674291H1
ctgttttggagagatcatgccgcaccgtgatgagcaaatcacccaacaagcacaaccgtctgtacatggaagcaagaccattggaggaaggt

SEQ ID NO: 55763 - DNA, 259 bp, Glycine max
  Clone ID: 700674301H1
aacagtacttgcaaggaacagaatgaaaagtattaatggtgctgcagttgtcatacaatcatttattcgtggttggttagtcagaagatgctcaggagatataggactatcaaaacctcggggcattaagactaatgagtcagatgaggttctggtgaagtcatctttcctggctgaattacagcgccgggtacttaaggcagaagcttccctgagagagaaagaagaggaaaatgacattcttcaccaacgccttcaa

SEQ ID NO: 55764 - DNA, 255 bp, Glycine max
  Clone ID: 700674304H1
gttcaatatcctagtataccttaataaataatttaagatactatgatgagagcacggttcccattactgttgctgggacttgttttcctggcttcagtttctgtctcatttggcattgcttactgggaaaaagagaaccccaaacacaacaagtgtctccagagttgcaatagcgagagagactcgtacaggaaccaagcatgccacgctcgttgcaacctccttaaggtggagaaagaagaatgtgaagaaggt

SEQ ID NO: 55765 - DNA, 256 bp, Glycine max
  Clone ID: 700674307H1
cagcttcatccctaacgcgtgcatagcagagtcagagacagagacgcagccatggggcggagacctgcgaggtgttataggcaaattaagaacaagccataccccaagtcacgtttctgccgtggtgttcctgatcccaagatcaggatttatgatgttggtatgaagaagaagggtgttgatgagtttcctttctgtgtccatctggttagttgggagaaggaaaatgtttcaagtgaggccctggaagctgctc

SEQ ID NO: 55766 - DNA, 258 bp, Glycine max
  Clone ID: 700674309H1
ccaaattaaagacgtttccggatgaaattctcgagttagacagatctgttcgcactcttgacttgacgcataatcgaatagttgacattcctgtggaaattagcaagttaattaatgtacagcgcctgatattagcggagaacctcattgagagactgccagtaaatttggggaaactccaatctctgaaactgatgaacctggatggaaatcgaattacttccttgcctgatgaattgggccagttagtaaggcttg

SEQ ID NO: 55767 - DNA, 257 bp, Glycine max
  Clone ID: 700674310H1
ctttgtggaagtttgaaaccaccaagtactactgcacagtcatcgatgcccccggacatcgtgactttatcaagaacatgattactggtacctcccaggctgattgtgctgtccttatcattgactccaccactggtggttttgaagctggtatttctaaggatggacagactcgtgagcatgctcttcttgctttcacccttggtgtgaagcagatgatctgctgctgtaacaagatggatgccactaccccgaag

SEQ ID NO: 55768 - DNA, 258 bp, Glycine max
  Clone ID: 700674313H1
ccttaataaataatttaagatactatgatgagagcacggttcccattactgttgctgggacttgttttcctggcttcagtttctgtctcatttggcattgcttactgggaaaaagagaaccccaaacacaacaagtgtctccagagttgcaatagcgagagagactcgtacaggaaccaagcatgccacgctcgttgcaacctccttaaggtggagaaagaagaatgtgaagaaggtgaaattccacgaccacgacca

SEQ ID NO: 55769 - DNA, 254 bp, Glycine max
  Clone ID: 700674321H1
ccttaataaataatttaagatactatgatgagagcacggttcccattactgttgctgggacttgttttcctggcttcagtttctgtctcatttggcattgcttactgggaaaaagagaaccccaaacacaacaagtgtctccagagttgcaatagcgagagagactcgtacaggaaccaagcatgccacgctcgttgcaacctccttaaggtggagaaagaagaatgtgaagaaggtgaaattccacgaccacg

SEQ ID NO: 55770 - DNA, 257 bp, Glycine max
  Clone ID: 700674331H1
gtagggctcagctcagccatattctatctctacgccgctaactctctctcactctcgcgctctctctttcacaaccttcactttactctctctgctaaaatgcaaggaggatttcaatcatttttgtcacacgggaatgtcattagaaatgctgttctacaacgggtgcgcatggtgaaccccctgttacagccaattgtctcttcgcggtttgaatctgttacacctgctcgcattgaggagcatggttttgagag

SEQ ID NO: 55771 - DNA, 131 bp, Glycine max
  Clone ID: 700674335H1
cttctccaagcccaatttatggtggccaaatggaatgggaaaacaatctttgtacaatgttgttattgtcattgatgttaaaggatttggtgaatctgattcatggagccatcactttggattccacacaa

SEQ ID NO: 55772 - DNA, 254 bp, Glycine max
  Clone ID: 700674342H1
gcagattgtgattttctcaagagaaactttaggcagatgtctaatgttttgtgggtggctcctgaggacaaggcgagtttatggtcacaacttcattatgtttcgtgtaataatctggaaatgcaagaagcttatcttgtcaatctcgtaaatgtgttacgagaattgtatttgcacagtccagaggaagctcgccaattgagaaggaaagctctctctcgtattgaatggctgcaaaaagctgatgtgcctac

SEQ ID NO: 55773 - DNA, 80 bp, Glycine max
  unsure (1)..(80): unsure at all n locations
  Clone ID: 700674532H1
attcaaactagccgattganatcttctcttantgctcgnnaacatnccaccanaaaactttagatccaancncaagantt

SEQ ID NO: 55774 - DNA, 257 bp, Glycine max
  Clone ID: 700674614H1
caaaaaaaaagatcatacatagtagtgttggtgggttgcaaagatgcttgggggtcttctccataggggtcataagataaaagggacagtggtgttgatgcgcaagaatgtgttggacgtgaatagcgtaaccagcgttgggggaattattggtcaaggtctcgacttagttggctcaacactcgatactcttactgccttcttgggccgatccgtgtctctccagcttattagtgctaccaaagctgatgccaacg

SEQ ID NO: 55775 - DNA, 223 bp, Glycine max
  Clone ID: 700674632H1
gtgttgttatgaacttatgatgttggtttatgtggggaaataaatgatgtatgtacctcttcttgcctatgtagtaggtttgggtgttttgttgtctagctttgcttatttagtaattagtagaagggacgttcgttcgtgtctcataaaaaggggtactaccactctggcaatgtgatttgtatttgatgaattcaatgtgaaatgtgttttgcgttggtgt

SEQ ID NO: 55776 - DNA, 253 bp, Glycine max
  Clone ID: 700674642H1
gttcaatatcctagtataccttaataaataatttaagatactatgatgagagcacggttcccattactgttgctgggacttgttttcctggcttcagtttctgtctcatttggcattgcttactgggaaaaagagaaccccaaacacaacaagtgtctccagagttgcaatagcgagagagactcgtacaggaaccaagcatgccacgctcgttgcaacctccttaaggtggagaaagaagaatgtgaagaag

SEQ ID NO: 55777 - DNA, 254 bp, Glycine max
  Clone ID: 700674644H1
attctggtgaatgcgtagaaaaggaaaataaagaaattagcgtgaaaaatgttgggtgtgttcagcagctccatagtgtcgccgccggaggagctcgttgccgccggcagccgtacaccgtcgccgaagatgacggcggcggcgctgcggaagtggttcgaggagaagaacccctccgcagtgtcggtggaggtcggagagcatgtccagctcgcttatacccaccagaacgagtcgccgtttcagcccagatc

SEQ ID NO: 55778 - DNA, 251 bp, Glycine max
  Clone ID: 700674652H1
gcaagagaaaaaataccaaccatggcaaccatttctactgatcaaccaagaggatcctactcctatggaacctcctatggagcaccctatggaaccacctatgagaccaacagcagcattaacaaccctccttcacgccaaaccgtgaagttcataactgctgcaactattggcatcacactcttactcctgtctgggttgaccctcacaggcactgtcataggtttgatcattgcaacccctcttcttgt

SEQ ID NO: 55779 - DNA, 248 bp, Glycine max
  Clone ID: 700674683H1
gagttcatgctgaagaaaaagacgtgggatcttggacgtgaggttgatcatattatgagacaaaaggaggctgcaatgcatgtaagaatgcttactcaggagatacgtaagtcactcgatagacatacgattctgtataccactttggtggagctgtctaaaacacttggcttgcaaaattgtgctgtgtggatgcctaatgttgataagactgagatgaacctcactcatgaattgaatgggaggaa

SEQ ID NO: 55780 - DNA, 247 bp, Glycine max
  Clone ID: 700674685H1
acgatgatgaggtcaaagatagtgttgtttggagactccatcacggagcaatcgatccgagagaatggatggggtgttcctcttgccaatgcctattctcgcagggctgatgtacttgttcgtggttatggtggatacaacactaggtgggctatgttcttactgggccatctcttccctctggactcaactaaaccacctactgctaccacaattttctttggcgctaatgatgcagctttgttag

SEQ ID NO: 55781 - DNA, 247 bp, Glycine max
  Clone ID: 700674689H1
gaatgttctgccctcatcaacaaacccaacacgccctttaacactcaatactatagatgagcatcttgacatgttgatggtctgccatcatctgaatagggaaattccagaagacttagcttttgcatgttcaaggataagagaaggaacgattgctgccgaagatattttgcatgatattggggcaattagcatcatatcttctgattctcaggctatgggtcgagttggagaggtgataagcaga

SEQ ID NO: 55782 - DNA, 248 bp, Glycine max
  Clone ID: 700674694H1
gacaaatttgcttgctactgtcttgatcttcctaattgtgatatacttccaaggtttccgcgtggtcttgcctgtaagatcaaagaatgctcgtggacagcagggttcatatccaatcaaattgttttatacctccaacatgcccatcattcttcagtctgcccttgtttccaatctctacttcatctcccagctgctccaccgtaagtacagcggaaacttcttcgtagatctattgggaaaatgga

SEQ ID NO: 55783 - DNA, 55 bp, Glycine max
  Clone ID: 700674719H1
cattcacttaaataaagcgcattactatgtgcaatgagtgtgtttaaatataaaa

SEQ ID NO: 55784 - DNA, 246 bp, Glycine max
  Clone ID: 700674801H1
cttttaaaaggtttggaaataaactggcacaaattgagaataaactctcagagagaaacaacgatgagaaactgagaaaccgttgtggaccagttcaaatgccttatactctgcttttgccttctagtaaggaaggattaactttcagaggaattcccaacagtatctctatctgaagaggtttgtggttccttaagttttgtggctttgaataaaagatagaagagaaggaactgaatttcttca

SEQ ID NO: 55785 - DNA, 132 bp, Glycine max
  Clone ID: 700674841H1
acgaatatttatattcattgttggtggagcaaccagatctgagcttaggatatgccacaagcttactggtaagctgaagagggaagttattctaggctcgtcaagtatcgatgatcctgcacaatatattac

SEQ ID NO: 55786 - DNA, 259 bp, Glycine max
  Clone ID: 700674904H1
catctttctccgccaccctagtccaagactcgttaagattagccactgatgttatccccaactactccttcggctgcgtcaacgccatcaccggcgcctctgtcccggcccaagggcttttgggcctgggccgtggcccgctgtccttgctctcccaatccgggtcaaattactcgggcatcttctcttactgtctccccagcttcaagtcctactacttctctgggtcgctcaagctcgggcccgtgggccagcccaa

SEQ ID NO: 55787 - DNA, 259 bp, Glycine max
  Clone ID: 700674905H1
gcaaggtttccgatcgagggtctatcattggtcttgaatgcattgccagaggaagtgattcagcacacttttaacctaaagagccagcaggccaggcaggtgaagaacaacaaccctttcagcttcctggttccacctcaggagtctcagaggagagctgtggcttagagagccctttttgcatgtgctaccacacttttgtccttttgggctctagctagtgctggtagcagtaaataagaatgaataaaagaaacaa

SEQ ID NO: 55788 - DNA, 248 bp, Glycine max
  Clone ID: 700674908H1
gtctgatatacacgctgaattgaataatacaagttattgtcaggcatggataaatgcagcctcctagaatggggtgattcaatgtcctggaatgatggcagaaccaggttaaagcttgaactcattgcagaatagcttttgtagctataatagaatggacgagtttcctcgcatcaactcggtcatattgttatttacacgtaggaagttcctggccatctttgttgtaccaaagctgtatttttttg

SEQ ID NO: 55789 - DNA, 258 bp, Glycine max
  Clone ID: 700674921H1
aaccttcaaatatgatataattggtgctggttcacattcttcaggagattttcctgaaaaggaagatcaagaaaaacccaaaaagattgataccagattgagacaaagaatagatcctcaatacaatgaggttcaggctcagatggaaacaaatttgtttaaattgtctcttgatgatgttgaaactcctaaaggttctatgttggatcttaaaatttctcaatctaaaattgcacttcccaagaacacagttggagg

SEQ ID NO: 55790 - DNA, 258 bp, Glycine max
  Clone ID: 700674922H1
attgtctttgaacactcatcaccatggccaagcttgttctttccctttgtttccttcttttcagtggctgcttcgctctgagagagcaggcacagcaaaatgagtgccagatccaaaagctgaatgccctcaaaccggataaccgtatagagtcggaaggtgggttcattgagacctggaaccctaacaacaagccattccagtgtgccggtgttgccctctctcgctgcacccttaaccgcaatgcccttcgtagac

SEQ ID NO: 55791 - DNA, 248 bp, Glycine max; identical to SEQ ID NO: 55788
  Clone ID: 700674987H1

SEQ ID NO: 55792 - DNA, 116 bp, Glycine max
  Clone ID: 700675011H1
caaaagaggtgctgttagcaatattgcacctttggcaattggactcattgttggggcaaacatccttgttggtggaccatttgatggagcatgcatgaaccctgctctggcttttg

SEQ ID NO: 55793 - DNA, 256 bp, Glycine max
  Clone ID: 700675184H1
agctgaagcaaagcaatggctacttcaaagttgaaaacccagaatgtggttgtatctctctccctaaccttaaccttggtactggtgctactgaccagcaaggcaaactcagcggaaactgtttctttcagctggaacaagttcgtgccgaagcaaccaaacatgatcctccaaggagacgctattgtgacctcctcgggaaagttacaactcaataaggttgacgaaaacggcaccccaaaaccctcgtctcttg

SEQ ID NO: 55794 - DNA, 268 bp, Glycine max
  Clone ID: 700675205H1
tgatttaccatttaccacaccaaaaccaatcggatcgtttcctctgcggagtcagaaatccatggatccctacaagaatcggccatcaagcgccttcaattctcccttctggactactaattccggtgctcccatctggaacaacaactcatcgctgactgttggatctagaggtacggtatggtattcaatattattttctctcttcatgatcacattttttcatccagatgactctaacccaagactttacttaacaaattaagtc

SEQ ID NO: 55795 - DNA, 272 bp, Glycine max
  Clone ID: 700675216H1
agctgaagcaaagcaatggctacttcaaagttgaaaacccagaatgtggttgtatctctctccctaaccttaaccttggtactggtgctactgaccagcaaggcaaactcagcggaaactgtttctttcagctggaacaagttcgtgccgaagcaaccaaacatgatcctccaaggagacgctattgtgacctcctcgggaaagttacaactcaataaggttgacgaaaacggcaccccaaaaccctcgtctcttggtcgcgccctctactc

SEQ ID NO: 55796 - DNA, 268 bp, Glycine max
  Clone ID: 700675244H1
tgcaaattgcaatggctaagcatgatgttgagggtggttccttctctgcaaaggactaccatgatcctcctccagcaccgttgattgatgctgaggaactcacacagtggtccttctacagggctttgattgctgagttcattgccacaatgctcttcctttacatcacagtgctcactgtgattggttacaagagccagagtgatgtaaaggctgggggtgatgtgtgtggtggagttggcattcttggcattgcttgggcctttgg

SEQ ID NO: 55797 - DNA, 265 bp, Glycine max
  Clone ID: 700675249H1
ccaccattgatgcacagttacgttatgctgctggtgtcaaagacatgcttgataggcacttcaagggtgaagactttccagaacaaaactacattgtgaaggagggtcaacttgctagccaataccgatgaagtggtgtgtgtcaatgtggcctttgaatcttccaattttaaggccaatgaatatgagcaaataaagatctagaaggcactctaattatgtaatgcacttgctttgttgaatttgaactcgtttaattgatctc

SEQ ID NO: 55798 - DNA, 259 bp, Glycine max
  Clone ID: 700675255H1
gtgagtggcagcccttgtcctcggtttctgacctgtgggctcaaattaaccggcagggacctgattcttcaactactgtgtctgctcctgatgttgatgagtttgaaagatggcaaaaggagattcaggaggtggaggcacaggtggaaggttcggaatttggatccttatctggcaatgttggtggtactggggcaggagaagattctgagagaccttcgacgccacctgagggtgaagaaggatttactgatgatga

SEQ ID NO: 55799 - DNA, 256 bp, Glycine max
  Clone ID: 700675284H1
ggccttaagccacccctcaaaggtgagtttgtcacacagccattcccggagattgaggaatgatgtgtcttcatacaacgaaaccgaaagcctgagacacaaatcaacaagcaagggatggtgggctgaggatttagcagatttgagcatagacttgtattggagaaccatgatggctatcaaatctggtggcaagacaccctcaaatctcattggtgatgcattgaaaatttatgcatctagatggctaccaaat

SEQ ID NO: 55800 - DNA, 138 bp, Glycine max
  Clone ID: 700675408H1
aggccagagagtgtggtgtgtgtgtgtgtctctctctttctctgcttttgagtaattaaatgagagcaaaaatgacgctcaaaacagcggcggtggctgtggctatagtgtgcatttctgcctttagcatcactgtgg

SEQ ID NO: 55801 - DNA, 152 bp, Glycine max
  Clone ID: 700675432H1
gcaaggtttccgatcgagggtctatcattggtcttgaatgcattgccagaggaagtgattcagcacacttttaacctaaagagccagcaggccaggcaggtgaagaacaacaaccctttcagcttcctggttccacctcaggagtctcagag

SEQ ID NO: 55802 - DNA, 131 bp, Glycine max
  Clone ID: 700675433H1
gaaaaagcaacagagaaagaaatgaatcacaattcactcttggttgcttctcaactcaaaatttttttacttctgacaagcaaggtccaggtgggactacgttgccctctgcatggccttccacatcctat

SEQ ID NO: 55803 - DNA, 135 bp, Glycine max
  Clone ID: 700675441H1
ggagaaccagctcgaccagatgcctaggagattctatcttgctgggaaccaagagcaagagtttctaaaatatcagcaagagcaaggaggtcatcaaagccagaaaggaaagcatcagcaagaagaagaaaacga

SEQ ID NO: 55804 - DNA, 176 bp, Glycine max
  Clone ID: 700675449H1
gtagttttttaatctggcttcatggtaatgaactaacaatattcatctttggggatgaatccttaattctacatgcagattttgataccaagttgctgtttagagatctgtttccttctagacaacggtctgtggtatctgttattttagttgaatcgaagctgcaacaaaatctt

SEQ ID NO: 55805 - DNA, 183 bp, Glycine max
  Clone ID: 700675464H1
attttgataaaccgcgatcacaggttgccgcaccttaaaaccggaaacaaaagcaatcgttacttgatttcaagaatctctcaatttcttcctacttctttgtgtacgatttcttaagggaaagaaaatcactctctgtgctggccacagacttcgtgaatcattttcttttccactcttagt

SEQ ID NO: 55806 - DNA, 240 bp, Glycine max
  Clone ID: 700675466H1
gacaaatttgcttgctactgtcttgatcttcctaattgtgatatacttccaaggtttccgcgtggtcttgcctgtaagatcaaagaatgctcgtggacagcagggttcatatccaatcaaattgttttatacctccaacatgcccatcattcttcagtctgcccttgtttccaatctctacttcatctcccagctgctccaccgtaagtacagcggaaacttcttcgtagatctattggg

SEQ ID NO: 55807 - DNA, 247 bp, Glycine max
  Clone ID: 700675563H1
gttatcattggaaagaccaccccaatatctcaggaggaggcacagggacaagctttacgttacacaaggcgtgatcacagcataagcttacgtcacagtgaaactggaattgttgatcaagttttgctgaccacaaatgctgatggattgagatttgtgaaagtaagagtgagatctgttcgtataccacagattggtgataaattcagtagtagacatggtcagaaggggacagttggtatgactt

SEQ ID NO: 55808 - DNA, 263 bp, Glycine max
  Clone ID: 700675711H1
ggtggacctaacggttcgatccggaacgaggaagagtattctcacggagccaataatggcttgaagaaagctattgatttctgccaggaagtgaaggcaaaatatcctaaaattacatatgcagatctcttccagcttgcgggtgttgttgcagttgaggttactgggggtccaacaattgatttcgttcctggtagaagagattcaaaagtatctcctaatgaagggcggcttcctgatgctaaaaaaggtgttccacatct

SEQ ID NO: 55809 - DNA, 261 bp, Glycine max
  Clone ID: 700675725H1
ggtaaatacggtgagataacggattccgtcatcatgaaggaccggaagaccggccagccgcgtggtttcggcttcataacttacgctgatccctccgtggttgatacagtgattgaggacactcacattatcaatggcaagcaggtggagattaagcggacgataccgaggggggctgctggctcgaactcaaaggacttccgaacgaagaagatttttgtgggtggaattccttcgactgttactgaagatgaatttagg

SEQ ID NO: 55810 - DNA, 257 bp, Glycine max
  Clone ID: 700675736H1
tgtctcacttcggacgttcgggtcccccagacatttccgacacttactctcttctcgttctgaacatcaccttccgtaccaccgccgacgacctattccctctcttcgacaagtatgggaaggtcgtcgacatcttcatccccaaggatcgaaggactggtgaatcgaggggttttgcgttcgtgcgttacaagtatgctgatgaggctcagaaggccgttgagaggctcgacgggagaatggttgatggtcgcgaa

SEQ ID NO: 55811 - DNA, 255 bp, Glycine max
  Clone ID: 700675754H1
gttgaaaccgcgaaaattccctcttttctctctttctctttcacacgtctttgttttacaaagcggcttcgatttatttttgtgtttgtttcttcccctttccctcttctctgttttcaccgacccttgttttctatctgggtcggcaaatggttttcaattagtgtttctgtgttgtttcttcattgttgctttctctcgaagctagctcaacccgagatggatctgagagaaagtttggtacttcttcttgtg

SEQ ID NO: 55812 - DNA, 159 bp, Glycine max
  Clone ID: 700675816H1
gatgcttgatttgctagttttgctttatggatgttttaggaactttattactttacatactttgttggttctgtgctttacttttggttttgatagacggtatgtctctgtatgcattttgattgtttccaagttttaatgactgcagttgagtaccac

SEQ ID NO: 55813 - DNA, 270 bp, Glycine max
  Clone ID: 700675828H1
ggacactgttcacggttagggtttgagtctcaaccactctttctttaaagcacagtctcgcattcctccttgcctctttgttctctctttttctctctccttctttctttgtttctgtgtgttcgagattgaagaagagatgcaggctggacccggcggcatggcccaacaagcgaaccaacaatacgcacagcaacagcaacaaccctacatgatgatgccgccgcagcctcagccccctcagatgtgggccacatcggcccagcctcc

SEQ ID NO: 55814 - DNA, 268 bp, Glycine max
  Clone ID: 700675829H1
gtgggcaagtttgtcacgaccgttcagttcaaagcctgctggtaatgatgtcattggaattgatctgggtactaccaattcgtgtgtctctgttatggagggaaagaatcctaaagttattgagaattctgaaggagtcgtacaacaccatcagtggttgccttcaaccagaaagcggagttcttgttggtacaccagccaagcgtcaggctgtgactaacccaacaaacactcttttcggaaccaagcgtttgatcggtaggcgttt

SEQ ID NO: 55815 - DNA, 270 bp, Glycine max
  Clone ID: 700675830H1
atatcctagtataccttaataaataatttaagatactatgatgagagcacggttcccattactgttgctgggacttgttttcctggcttcagtttctgtctcatttggcattgcttactgggaaaaagagaaccccaacacaacaagtgtctccagagttgcaatagcgagagagactcgtacaggaaccaagcatgccacgctcgttgcaacctccttaaggtggagaaagaagaatgtgaagaaggtgaaattccacgaccacgacca

SEQ ID NO: 55816 - DNA, 267 bp, Glycine max
  Clone ID: 700675842H1
agcatgtgctgctgttggcttgacatcaagttacactccaactccattgttggaatctggtttgcaaaaagacagagggttaattgtggagtattttggaaggatgtcttacgttgctcataacgttaatcagcccaagagaaagatttgttagagggaaatttttcctttgatattaaatctcgctctagattggaaaaagtttcctctacaaaagcacaatttgttagtggaaaaaccttcaaatatgatataattggtgctggt

SEQ ID NO: 55817 - DNA, 266 bp, Glycine max
  Clone ID: 700675844H1
atcaagacttcccttcagatattgacattacaacgggagactaacaaggtcatggttaaacggcagagaacagcttttcccccaaattttgttcactctcttgatggttctcacatgatgatgactgcagttgctttaaaaaagcagggttgaactttgcaggggttcatgattcatattggacacatgcgtgtgatgttgatgaaatgaacaggatactcagggaaaagtttgttgaactctatgatgctccaatattggaaaat

SEQ ID NO: 55818 - DNA, 267 bp, Glycine max
  Clone ID: 700675846H1
atggagagctgcaagagggacgggtgctgatcgtgccacaaaactttgtggtggctgcaagatcacagagtgacaacttcgagtatgtgtcattcaagaccaatgatacacccatgatcggcactcttgcaggggaaactcattgttgaacgcattaccagaggaagtgattcagcacactttcaacctaaaaagccagcaggccaggcagataaagaacaacaaccctttcaagttcctggttccacctcaggagtctcagaagag

SEQ ID NO: 55819 - DNA, 267 bp, Glycine max
  Clone ID: 700675847H1
cttgagcacactgatgtggctgtcctgctcgacaatgaagccatttatgacatctgcaggcgttcactggacattgagaggccaacctacaccaaccttaatcgtttagtttctcaggtgatatcatcactgactgttccctgaggtttgatggagccttgaatgttgatgtcaatgaattccagaccaaccttgtgccataccccaggattcattttatgctttcatcttatgctcctgtaatttcagccgagaaggctcaccatg

SEQ ID NO: 55820 - DNA, 265 bp, Glycine max
  Clone ID: 700675867H1
ctctccgcaagaatgcaatgttcgtgccacactacaacctgaacgcgaacagcataatatacgcattgaatggacgggcattgatacaagtggtgaattgcaacggtgagagagtgtttgatggagagctgcagagggacgggtgctgatcgtgccacaaaactttgtggtggctgcaagatcacagagtgacaacttcgagtatgtgtcattcaagaccaatgatacacccatgatcggcactcttgcaggggcaaactcattg

SEQ ID NO: 55821 - DNA, 262 bp, Glycine max
  Clone ID: 700675877H1
gttagtctaaggtaacccactttgagaattctcataaagttgcatgcttttggattggaaggttgttgcaatggggaaggttgtgttgttgtttctttgcatggtattggtggtggtgcctttggcttgtatgattcaattcagaagcttgaggttcagaagcacttgaagaacttgaataggcctcctgttaggtccatcaagagtcctgatggagatgttattgattgcatccatgttacacaccagccagcttttgatc

SEQ ID NO: 55822 - DNA, 262 bp, Glycine max
  Clone ID: 700675895H1
agaatattctagaggcctcatacgacaccaaattcgaggagataaacaaggttctgtttggtagagaggaggggcagcaacaaggggaggagaggctgcaagagagtgtgattgtggaaatctcaaagaacaaattcgggaactgagcaaacatgccaaatctagttcaaggaaaaccatttcttctgaagataaacctttcaacttgagaagccgcgaccccatctattccaacaagcttggcaagttgtttgagattacc

SEQ ID NO: 55823 - DNA, 266 bp, Glycine max
  Clone ID: 700675991H1
ctcctaccgcatttgttttcggaccccagaaaagcctgactcagcaatcaggttcctcagagaccacggtttctctaactcccaaataaacagtatggttagaagggtaccatggttgctttcctgcgacccttgcaaaagagtattgcccaagtttcaatttttactctcaaaaggtgtttctagctctacaattgttgacatagtgagtaagtcccctgcaatactgagtcgaagcctggagaatactatagtcccaagctatg

SEQ ID NO: 55824 - DNA, 260 bp, Glycine max
  Clone ID: 700676006H1
ggggtgccctgagatcacattgaacaatggtgaaggctgtggccgttcttggcagcagtgagggtgtcactggaactattcacttcgttcaggagggaagtggtccaaccaccgtaactggatctcttgctggtcttaagcctggtctccatggtttccatgtccatgccttgggggacactaccaatggttgcctctcaactggatcacatttcaatcctaataacaaggagcatggtgcccctgaggatgagaatcgt

SEQ ID NO: 55825 - DNA, 261 bp, Glycine max
  Clone ID: 700676036H1
cttaattattaacacttccttagttcaatatggggaagcccttcactctctctctttcttccctttgcttgctactcttgtcgagtgcatgctttgctattagctccagcaagctcaacgagtgccaactcaacaacctcaacgcgttggaacccgaccaccgcgttgagtccgaaggtggtttgattcaaacatggaactctcaacaccctgagctgaaatgcgccggtgtcactgtttccaaactcaccctcaaccgca

SEQ ID NO: 55826 - DNA, 258 bp, Glycine max
  Clone ID: 700676041H1
attctctccattgtctttgaacactcatcaccatggccaagcttgttctttccctttgtttccttcttttcagtggctgcttcgctctgagagagcaggcacagcaaaatgagtgccagatccaaaagctgaatgccctcaaaccggataaccgtatagagtcggaaggtgggttcattgagacctggaaccctaacaacaagccattccagtgtgccggtgttgccctctctcgctgcacccttaaccgcaatgccc

SEQ ID NO: 55827 - DNA, 256 bp, Glycine max
  Clone ID: 700676042H1
ctgtttggaactcgattgcctgcagtaattggagggtcttatacttacgttgcaacaacaatctctattattctttctggtcgattcagtgatgagccagatcctatagagaaattcaagaggataatgcgggcaacccaaggtgctcttattgttgcttcaactcttcaaatagtactaggctttagtggcctttggcgaaatgttgcaaggttggtctcaggttcttagttcttaagtccactttcagcagttc

SEQ ID NO: 55828 - DNA, 261 bp, Glycine max
  Clone ID: 700676048H1
cacttccctggttgaagagaagggaacaattaaaggtgtgcaatataagaacaaagatggccaggagttgacaacatatgctcctcttaccattgtttgtgatggttgcttctcaaacttacgccgttctctttgtaatcctaaggtggatattccctcatgttttgttggtttagttttagagaactgtgaacttccatgtgcaaatcatggccatgtcatactgggagacccttcgccgattctattctatcctatcag

SEQ ID NO: 55829 - DNA, 258 bp, Glycine max
  Clone ID: 700676052H1
gattaccagagctgatgtggatgtgcagccctatgctttcactaccaagtctctctttgtgggtcatactgattataaatacctgaggtaccaagtaattgatacgccagggattttggacaggccttttgaagatcgtaatattattgagatgtgcagtatcactgctctagcacatttgagagctgcaatcttgtttttcttggacgtctctggatcttgtggttacagtattgctcagcaggcagcgctgtttca

SEQ ID NO: 55830 - DNA, 255 bp, Glycine max
  Clone ID: 700676059H1
aagttctatttggctgctagcaaaggcttatgtagttgtgaatgactcgtgctatcatcaacttgtcagccattggttaaacactcatgcagttgttgagccattcatcatagcaacaaacaggcatctcagtgttgttcaccctatttataaactccttcaccctcactatcgtgacaccatgaacataaatggccttgctcggttatcactggtcaacgacggtggcgttatagaacaaacatttttgtgggg

SEQ ID NO: 55831 - DNA, 255 bp, Glycine max
  Clone ID: 700676069H1
atttggatgaatcgggctttgtccgttgcacatgacatagcaattgagaggaatttgctgctttgcctccaggttgttggtgtattgtgggtaatatcttacattggtagtttgttcaactttttgactttgatctattttggtgttcttctttgcttgtctcttcctgtgttgtatgacaagtaccaggaccgagttgatgacaggctgtgtgtgattcatgggattattcagacacagtatacaaaagttcac

SEQ ID NO: 55832 - DNA, 255 bp, Glycine max
  Clone ID: 700676071H1
ggtttatttcctctcaggaatgtgttcccaggacctattgtgttttaaatccacaaaatccttttgtgttaaataggtggatggggaaattgactttcccccagggcacttcccgaaatgttaaaagaatgcctctttctatagggggaggagctggtgcaaagaatgctattctcatgaatatgccaaatgctgttctttcaatgtggagatattttgttggagatctcgtctttgaagtttctaagatgactt

SEQ ID NO: 55833 - DNA, 258 bp, Glycine max
  Clone ID: 700676077H1
gatcactgggacatcccaagctgactgtgctgttcttatcattgattccactactggtggttttgaagctggaatttcaaaggatggacagactcgtgaacatgctctgctttcattcacccttggtgtgaaacagatgatttgttgctgtaacaagatggatgctactacaccaaagtactccaaggccaggtatgatgaaattgtgaaggaagtttcttcctatttgaagaaagtaggatacaaccctgacaagat

SEQ ID NO: 55834 - DNA, 254 bp, Glycine max
  Clone ID: 700676085H1
agcctgcttccaatggttaaccctgacgacattgtgtttgggggatgggatatcagcaacatgaacctggctgatgccatggccagggcaaaggtgtttgacatcgatttgcagaagcagttgaggccttacatggaatccatgcttccactccccggaatctatgacccggatttcattgctgccaaccaagaggagcgtgccaacaacgtcatcaagggcacaaagcaagagcaagttcaacaaatcatcaa

SEQ ID NO: 55835 - DNA, 254 bp, Glycine max
  Clone ID: 700676086H1
ataacttttgcaggcgaacaatatcacaatcatgcccattttgccgcgacagtctgaagagagtgaactcaggtgatctctgggtattcaccgatagaagggatgtggtagacatggcaacagtgacaagggagaatctcagaaggcttttcatgtacatagataagttgcctctgattgttccagactccctttttgacacatatgactctcacataaggtaagtgattgcaacagaacagattttaatgcat

SEQ ID NO: 55836 - DNA, 253 bp, Glycine max
  Clone ID: 700676089H1
attcgatgaactttttgttgacttccaggatttcaatgtggaagctctagagaaatttgttgaggaatctagtacccctgttgttactgtctttaacaatgatccgagcaatcaccctttcgttgccaaattcttcaacagtcccaatgcaaaggcaatgttgttcatcaacttcactgccgaaggtgctgaatctttcaaatcaaaataccgtgaagctgctgagcaacataaacaacagggtgtaagcttt

SEQ ID NO: 55837 - DNA, 261 bp, Glycine max
  Clone ID: 700676104H1
gttggcaaaggcattcgtggagcactactacagcaccttcgacaccaaccggaacggtttagcgaatctgtatcaggagggttccatgctgaccttcgaagggcagaagatccagggcgcttccagcatcgtcgctaagctcacttccctccctttccagcagtgccaccactccatctccaccgtcgactgccagccctccggtgtcaacgctggcatgcttgtctttgtcagcggcaacctccagctcgctggcgaaca

SEQ ID NO: 55838 - DNA, 69 bp, Glycine max
  unsure (1)..(69): unsure at all n locations
  Clone ID: 700676145H1
ggcgaatcccttctctctctttctctttctctnctcatcccagattcttgcaaaaaaaaaaaaacnnca

SEQ ID NO: 55839 - DNA, 255 bp, Glycine max
  Clone ID: 700676151H1
cgaagccagaggccccaagaccgtcaccaaaaggtacatcgcttcagagagggtgatttgatcgcagtgcctactggtgttgcatggtggatgtacaacaatgaagacactcctgttgttgccgtttctattattgacaccaacagcttggagaaccagctcgaccagatgcctaggagattctatcttgctgggaaccaagagcaagagtttctaaaatatcagcagcagcagcaaggaggttcccaagccaga

SEQ ID NO: 55840 - DNA, 278 bp, Glycine max
  Clone ID: 700676202H1
gtacttgcaagctcccaaggatgtgtcgcagcaaatcaaaatggccaacaagaaaatgaagaaggaacaatattcttgtgaccatccacctgcatcatgggattggaggaaaaaaggtgtcatcacccaagtaaagtaccaagggggctgtggaagcggttgggcgttttctgccacgggagccatagaagcagcacatgcaatagcaacaggagaccttgttagcctttctgaacaagaactcgtagactgtgtggaagaaagcgaaggttgttaca

SEQ ID NO: 55841 - DNA, 270 bp, Glycine max
  Clone ID: 700676209H1
gttgtcctctacaggaatggaatttactctccacattggaacttgaacgcgaacagtgtgatctatgtgactcgagggaaaggaagagttagagtggtgaactgccaagggaatgcagtgttcgacggtgagctaaggaggggacaattgctagtggtgccgcagaactttgtggtggctgagcaagggggagaacaaggattggaatacgtagtgttcaagacacaccacaacgccgtgagcagctacattaaggatgtgtttagggca

SEQ ID NO: 55842 - DNA, 274 bp, Glycine max
  Clone ID: 700676219H1
cttaattattaacacttccttagttcaatatggggaagcccttcactctctctctttcttccctttgcttgctactcttgtcgagtgcatgctttgctattagctccagcaagctcaacgagtgccaactcaacaacctcaacgcgttggaacccgaccaccgcgttgagtccgaaggtggtttgattcaaacatggaactctcaacaccctgagctgaaatgcgccggtgtcactgtttccaaactcaccctcaaccgcaatggcctccactt

SEQ ID NO: 55843 - DNA, 271 bp, Glycine max
  Clone ID: 700676223H1
tagcacttatcaagagccgcaagaatctcagcaacgaggacgaagccagaggccccaagaccgtcaccaaaaggtacatcgcttcagagagggtgatttgatcgcagtgcctactggtgttgcatggtggatgtacaacaatgaagacactcctgttgttgccgtttctattattgacaccaacagcttggagaaccagctcgaccagatgcctaggagattctatcttgctgggaaccaagagcaagagtttctaaaatatcagcagcag

SEQ ID NO: 55844 - DNA, 268 bp, Glycine max
  Clone ID: 700676226H1
ggagatttaccaagaggatctcatcaaacgccttgagtccgagatctctggtgactttgagagagctatgtaccggtggatgttgcagcctgcggatcgtgatgctgttttggtgaatgtggcaatcaagaatggcaccaaagactaccatgtgattgcagagattgcttgtgtcctatcagctgaagagctcttggcagtgaggcgggcctaccaccgccgctacaagtgttccttggaggaagatgtggcagctaacaccaccggc

SEQ ID NO: 55845 - DNA, 267 bp, Glycine max
  Clone ID: 700676241H1
cttaaacactcatcagtcatcaccatggccaagctagttttttccctttgttttctgcttttcagtggctgctgcttcgctttcagttccagagagcagcctcagcaaaacgagtgccagatccaaaaactcaatgccctcaaaccggataaccgtatagagtcagaaggagggctcattgagacatggaaccctaacaacaagccattccagtgtgccggtgttgccctctctcgctgcaccctcaaccgcaacgcccttcgtaga

SEQ ID NO: 55846 - DNA, 267 bp, Glycine max
  Clone ID: 700676254H1
ctttaagcctgttaactggcgtgatgctcttgctgtggtagcagaggttgcccaccaagtcaaaccggaagaaattgttggcatagctggcaaactttctgatgctgagtccatgattgcactaaaagatttcataaataggatggggtcaaatgatgtatggggtgaaggcattggtgtaaatactaatgctgatttcagatcaggatatattatgaatactagcattgctggtcttgaaaaagcggatgcgttcctgttggttgg

SEQ ID NO: 55847 - DNA, 268 bp, Glycine max
  Clone ID: 700676256H1
gtttgttgttcctcactgacctcaccatggcgaccagagccaagctttctttagctatcttccttttctttcttttagccttgatttcaaacctagccttgggcaaacttaaagaaaccgaggtcgaagaagatcccgagctcgtaacatgcaaacaccagtgccaacagcaacggcaatacactgagagtgacaagcgaacatgcttgcaacaatgtgacagtatgaagcaagagcgagagaaacaagtcgaagaggaaactcgcga

SEQ ID NO: 55848 - DNA, 263 bp, Glycine max
  Clone ID: 700676259H1
tccggataaaggtgaaaatcatgcccgtcctgttcttggaggaaatgacacctttccttatcctcgtagggggagaactggtagaaaaccaacaaggaaagatcctaatagtgagagtaggagcaatgatgtttatcttccaagagatgaggcttttggacacttgaagtcatctgactttcttacttatggactaaaatccgtatctcaaaatgttcttccattattgcaatctgcttttgatttgaatttcacaccccgtg

SEQ ID NO: 55849 - DNA, 263 bp, Glycine max
  Clone ID: 700676269H1
agatgatctacggctgagaaccttgcggagtgtggtggggctactgtcgccgcagcaggctattgagttcttgattgcatcggcggagttgctagttgggatacgcggttggggattgaatcatgaccgtccacgtggcagatgaaagtggaattgagtttaggccacaatttctctattttgattgaaattcattgtggccttaaaatgattgtgtattatttattactagttactagaactagaacagtccttgctgaaca

SEQ ID NO: 55850 - DNA, 265 bp, Glycine max
  Clone ID: 700676273H1
tagttctgcagttaacaatcgctcctcagatatcaacaaaaagattcgcacagcacttgggaaaggtaagaaaattgtttttcttaccagagttgatccttttccagtagctttactggctgttctttttggcgttaagaatgaaattctgagttctaacgccactaaccctatgctgacgcgacttcttgagaactgtaagagtctcaaatatctggttgatgagtgtccttttgcatttgtgaactagtatgtaatattttat

SEQ ID NO: 55851 - DNA, 264 bp, Glycine max
  Clone ID: 700676274H1
ctcagtctctgtgtttgcggctgaggattccgaacgagtgaccttcttcgtttctcgcaaagtttaagtaatcatgggtaaggaaaaggttcacatcaacattgtcgtcattggacatgtcgactctgggaagtcaactaccactggtcacttgatctacaagcttggaggtattgacaagcgtgtgattgagaggttcgagaaggaggctgccgagatgaacaagaggtcattcaagtatgcctgggtgctcgacaagctcaa

SEQ ID NO: 55852 - DNA, 267 bp, Glycine max
  Clone ID: 700676282H1
ctgatgccaaggtttggacacacaatggccgtattgcctccttaatctatgtaaaagattgtagttctgggtctgctattgaggactctcagaaaattaataagattgaattgcgcttaagaaatgttttgaagggagacaatgacattagaagtgcaaaaatgtctgtctctatggccgtgatgcacactgaaagaaggctacaccaattgatgtttgttgaccgtgattatgagaggactccaattcttaaattgacttctgata

SEQ ID NO: 55853 - DNA, 262 bp, Glycine max
  Clone ID: 700676290H1
tccagcgaaaccacagccaagggaacgggcttggcggaatcagcggggaaagaagaccctgttgagcttgactctagtccgactttgtgaaatgacttgagaggtgtaggataagtgggagctggaaacagcgaaagtgaaataccactacttttaacgttattttacttattccgtgaatcggaagcggggcactgcccctctttttggacccaaggtcggcttcggccggtcgatccgggcggaagacattgtcaggtgg

SEQ ID NO: 55854 - DNA, 261 bp, Glycine max
  Clone ID: 700676291H1
ggttgcgtaatccgtaaagtttcgtgacattacagaaagaaaacaagtatcgttatgtaatccgtaaggttccgtaacgttacggaaaaagaatcagcaaagaaggggggtgaacttatcaagataggggtgtaaatagcaatttgaatctaggcccttccggaacattttggaagttgggttgcttaaggaggaagcaattgggcgacaagctcctccacgtttttgaaaaatggttcctggggcttccctggcttctgt

SEQ ID NO: 55855 - DNA, 273 bp, Glycine max
  Clone ID: 700676313H1
gtgccctcacagagaacacttcacggaggcatatttagagcatgttcagattttgaaaacgaggctgcagtgctcttcaacagcaagctctcatcccaaatggatgctcttaagaaacagtttcaagaggctagatttgtctaccttgacctttacaacccagtactaaatttgattcaaaacccagctaaatatggttttgaagtaatggaccaaggatgctgtggcactggaaaattggaagtaggcccgttgtgcaaccatttcaccttg

SEQ ID NO: 55856 - DNA, 267 bp, Glycine max
  Clone ID: 700676343H1
ggtttttatctacgcagaaagtgccattccttagtgacgacttggagcttgaatgtgaaggaaaggacaaatacaagtgcggttctaatgttttctggaaatggtgaaaggaggcaacattttatgcctaactgcgaacttttcgccttgcaatgtacctaactgcttgaatatatatcatatttttctgcattgatttattattatattgttgctgttggattttatttgttgaaaaaaatgtgtgcattaggcggctatttactc

SEQ ID NO: 55857 - DNA, 269 bp, Glycine max
  Clone ID: 700676359H1
cgaccacaacacccggagagggaacctcagcaacccggtgagaaggaggaagacgaagatgagcaaccacgtccaatcccattcccacgcccacaacctcgtcaagaagaagagcacgagcagagagaggaacaggaatggcctcgcaaggaggaaaaacgcggagaaaagggaagtgaagaggaagatgaggatgaggatgaggaacaagatgaacgtcaattcccattcccacgcccacctcatcagaaggaagagcgaaagcaaga

SEQ ID NO: 55858 - DNA, 255 bp, Glycine max
  Clone ID: 700676424H1
gttttccctttgttgcctttcccttcccatccaaacagctgagttctatgaagcctgaagcccactgcctaaactggaagaccagatcaaccaggttttgacaaactcatggcccaccttgacacctctacctaggggaccaaacatgtggagactattgatattggccatgtccattttaccttatttcacaagcttgataactaatgctcccccaagaacctataaagctggcttgcctttttggctgctttt

SEQ ID NO: 55859 - DNA, 251 bp, Glycine max
  Clone ID: 700676460H1
attgctgtgaagttttctgaaatcttgaccaagattgacaggcgatctggtaaggagcttgagaaggagcccaaatttttgaagaatggtgatgctggtatggttaagatggttccaaccaagcccatggtggttgaaactttctctgagtatcctccccttggtcgttttgctgtgagggacatgcgtcagaccgtagctgttggagtcatcaagagtgttgagaagaaagaccccaccggagccaaggt

SEQ ID NO: 55860 - DNA, 166 bp, Glycine max
  Clone ID: 700676473H1
tgaaattcgaacaatgattttttcattttctttttaatacttttttggtttagactccctaagaatctgtcgatatttccaattaaatcttcttgttcctgtgaaggtcctataaaaaaaagggctatgccctttctttactcagaagggccttattccaagttcc

SEQ ID NO: 55861 - DNA, 247 bp, Glycine max
  Clone ID: 700676476H1
gttgttgccaaggttggaaatcacaaacaaattgttggtttccatgttgctggaagcaaaggaagactgggatatgcttcattgataccatatgttgagccagttgtgcaagctcaaagtgctgaagtttactttgacttcttccctgtggaggttgatagtcaagagggagttgctcacattggtgaattgaaatctggtgtctatgttccactgcctacaaaaactaatttggtggaaactccca

SEQ ID NO: 55862 - DNA, 178 bp, Glycine max
  Clone ID: 700676503H1
ctttttgctttctcactaggaacacgatggtttctcttcccatagttcaatatgaagagaaaatcatcgaaaccgttgagcgcaaccctgtcgtcgtcgtcattggagagaccggttccggcaagagtactcaactctctcagatgctccaccgccgcggctacggtaaaatcgccat

SEQ ID NO: 55863 - DNA, 255 bp, Glycine max
  Clone ID: 700676511H1
caacaacacaccgctacgaagctggcgtcgtcccccccggagcccgtttcgaaccgccgcgttatgaagccggcgtcaaagcgccctccatttaccattccgagagaggtccaacgacttcccaggtcctcgccgtcctcgccggcctcccggtcggtggcatcctgctcctcctggcgggattgaccctggcaggaaccctcaccggactggcagttgccacgccgctcttcgtcctcttcagcccggtgctgg

SEQ ID NO: 55864 - DNA, 252 bp, Glycine max
  Clone ID: 700676519H1
ctagtataccttaataaataatttaagatactatgatgagagcacggttcccattactgttgctgggacttgttttcctggcttcagtttctgtctcatttggcattgcttactgggaaaaagagaaccccaaacacaacaagtgtctccagagttgcaatagcgagagagactcgtacaggaaccaagcatgccacgctcgttgcaacctccttaaggtggagaaagaagaatgtgaagaaggtgaaattc

SEQ ID NO: 55865 - DNA, 252 bp, Glycine max
  Clone ID: 700676520H1
caaacccaacacccttcttctcccccaccatgctgacgctgattacctcatcgttatccttaacgggactgccattcttaccttggtgaacaacgacgaccgagactcttacaaccttcaatctggcgatgccctaagagtccctgcaggaaccacatactatgtggttaaccctgacaacgacgagaatctcagaatgataacactcgccatacccgttaacaaacccggtagatttgagagtttcttcct

SEQ ID NO: 55866 - DNA, 250 bp, Glycine max
  Clone ID: 700676537H1
gttcaatatcctagtataccttaataaataatttaagatactatgatgagagcacggttcccattactgttgctgggacttgttttcctggcttcagtttctgtctcatttggcattgcttactgggaaaaagagaaccccaaacacaacaagtgtctccagagttgcaatagcgagagagactcgtacaggaaccaagcatgccacgctcgttgcaacctccttaaggtggagaaagaagaatgtgaag

SEQ ID NO: 55867 - DNA, 251 bp, Glycine max
  Clone ID: 700676545H1
gtggaaaagattgaaaatgaaagcccgaaatactatagagaagattcttgtggaaacaatgaattaggagcatgctatttgtttttgcattgctcttgaagcagttcgtatatagtaataatactatgattgcccacgtaggaccaatcgcatcatgtcaactagattttttgaggatctgcgattagagtgggaacagttttctgactgcacttgaggaatgatgccgtgccaatttcgaaagggagaaa

SEQ ID NO: 55868 - DNA, 247 bp, Glycine max
  Clone ID: 700676555H1
attccaatatattccattctctctgtgtatttccctacctctcccttcaagatgcagatcttcgtcaagaccctcaccggcaagaccatcacccttgaggtggaaagctctgacaccatcgacaacgtcaaggccaagatccaggacaaggaaggaatccccccggaccagcaacgtctcattttcgccggaaagcaacttgaggacggccgtacccttgctgactacaacattcagaaggagagta

SEQ ID NO: 55869 - DNA, 248 bp, Glycine max
  Clone ID: 700676565H1
caaccacaagtgttcttcctctgtaaacacacaaactctgttcctatttcagagtactgtccctttacctcgtacacatcaaacaatggaaggagatgggtattgtgggagtttctttcagaggtgcaagccttacatagccatgatttctctgcaattcgggtttgcgggtatgaacataatcaccaaggtttccctcaaccgtgggatgagccactatgtgcttgtggtttatagacacgcctttg

SEQ ID NO: 55870 - DNA, 246 bp, Glycine max
  Clone ID: 700676576H1
caatatcctagtataccttaataaataatttaagatactatgatgagagcacggttcccattactgttgctgggacttgttttcctggcttcagtttctgtctcatttggcattgcttactgggaaaaagagaaccccaaacacaacaagtgtctccagagttgcaatagcgagagagactcgtacaggaaccaagcatgccacgctcgttgcaacctccttaaggtggagaaagaagaatgtgaa

SEQ ID NO: 55871 - DNA, 244 bp, Glycine max
  Clone ID: 700676588H1
tgtctctccgcagcagccacacttcttcgccgtttcagctgaagagccatccgcaggtaagcaatggttaagcataataatgttatccccaatgggcacttccggaaacactggcaaaactatgtgaagacttggtttaatcaaccagcccgaaagaccagaagacggttggctcggcagaagaaggctgtcaagattttccccaggcctactgctggatctctcaggcctattgttcatggcc

SEQ ID NO: 55872 - DNA, 122 bp, Glycine max
  Clone ID: 700676656H1
atttgttgaaactatatacaaattttacattgatcagatctaaacacaacctttgcaagttgcaacaacattcaaaggttgtgattagatctgatcaatgtaaaatttgttgaaactatata

SEQ ID NO: 55873 - DNA, 255 bp, Glycine max
  Clone ID: 700676665H1
aagcaaagcaatggctacttcaaagttgaaaacccagaatgtggttgtatctctctccctaaccttaaccttggtactggtgctactgaccagcaaggcaaactcagcggaaactgtttctttcagctggaacaagttcgtgccgaagcaaccaaacatgatcctccaaggagacgctattgtgacctcctcgggaaagttacaactcaataaggttgacgaaaacggcaccccaaaaccctcgtctcttggtcg

SEQ ID NO: 55874 - DNA, 276 bp, Glycine max
  Clone ID: 700676715H1
tgaaaaaatcaggtctcaaatggatgttattgatgattgtgtccctgctccattatcaatgttcagtgagagtgattcagacatgaaatccgttaatatagatgacttgctgcccaaagaaaagctgcagaggaagctaccaaagccatcagtgggaaggcgaaaaaacggttacctacaaaatggtggttctgttcatccttatgctgctccagagcaatatgcagatacaaagcaatcctttggatcctcttccagtggggttacttctcttga

SEQ ID NO: 55875 - DNA, 263 bp, Glycine max
  Clone ID: 700676724H1
tggaaatttgacacctaccccacaccatcatggcctgcatcgacaaattttgggttttcgccctcgctcttctcctcctcgcttcccctctcctccaagttgctaggtgccagtcagactctgatgatgtagtggaggctgctgaagaatcaggtgatattggcattgttggtgatgatgtccaagacttggtgatgggactttcccttctgctccaggaattgaaacaataagtgtatttccgaaaaatagtgcaagattga

SEQ ID NO: 55876 - DNA, 258 bp, Glycine max
  Clone ID: 700676738H1
ggtgttggaaagagttgccttcttctacgattctctgatggttctttcacaactagtttcatcacaaccataggcattgattttaagataagaaccattgagcaggatggaaaacggatcaagctccaaatttgggatactgcaggtcaggagcggttccgaacaattacaactgcttactatcgtggtgctatgggcatattgctagtctatgacgttacagacgaatcttcatttaacaatatcaggaattggatt

SEQ ID NO: 55877 - DNA, 264 bp, Glycine max
  Clone ID: 700676742H1
cttaaacactcatcagtcatcaccatggccaagctagttttttccctttgttttctgcttttcagtggctgctgcttcgctttcagttccagagagcagcctcagcaaaacgagtgccagatccaaaaactcaatgccctcaaaccggataaccgtatagagtcagaaggagggctcattgagacatggaaccctaacaacaagccattccagtgtgccggtgttgccctctctcgctgcaccctcaaccgcaacgcccttcgt

SEQ ID NO: 55878 - DNA, 264 bp, Glycine max
  Clone ID: 700676743H1
gttcaatatcctagtataccttaataaataatttaagatactatgatgagagcacggttcccattactgttgctgggacttgttttcctggcttcagtttctgtctcatttggcattgcttactgggaaaaagagaaccccaaacacaacaagtgtctccagagttgcaatagcgagagagactcgtacaggaaccaagcatgccacgctcgttgcaacctccttaaggtggagaaagaagaatgtgaagaaggtgaaattcca

SEQ ID NO: 55879 - DNA, 257 bp, Glycine max
  Clone ID: 700676749H1
cacaaggcacctaaaaaggttgcaactgttgatcaaaattctggacattccaagctgaagattactattcctagagagcctgacctagaaacagctcacagagcacaaaggattagacctaaacctgctgcagaggcagaagttgtgacagtggctgtccccagattcaaagcacgcccgttaaacagaaaaattctaaatgctccttcgtttccacttcccaagaggagcactccacgattgccagaatttctaga

SEQ ID NO: 55880 - DNA, 260 bp, Glycine max
  Clone ID: 700676757H1
actgattccatctcattctcctcaaggctccaccctttctccatcttcaagtaccctcatgcaattggaggccttgcaggggttttcctctcctcattcaccaccatgtcaattttcactggaggagttattttcatagtgggacaactctgcattaagccactgcacttgctctatctctggctaacctacttcctttttcctcttgtttctttgtcactgctacaacccttgttgcacgtgatcaagatgaattctgt

SEQ ID NO: 55881 - DNA, 262 bp, Glycine max
  Clone ID: 700676758H1
atttaagatactatgatgagagcacggttcccattactgttgctgggacttgttttcctggcttcagtttctgtctcatttggcattgcttactgggaaaaagagaaccccaaacacaacaagtgtctccagagttgcaatagcgagagagactcgtacaggaaccaagcatgccacgctcgttgcaacctccttaaggtggagaaagaagaatgtgaagaaggtgaaattccacgaccacgaccacgaccacaacacccgg

SEQ ID NO: 55882 - DNA, 262 bp, Glycine max
  Clone ID: 700676776H1
tccattgtctttgaacactcatcaccatggccaagcttgttctttccctttgtttccttcttttcagtggctgcttcgctctgagagagcaggcacagcaaaatgagtgccagatccaaaagctgaatgccctcaaaccggataaccgtatagagtcggaaggtgggttcattgagacctggaacctaacaacaagccattccagtgtgccggtgttgccctctctcgctgcacccttaaccgcaatgcccttcgtagacct

SEQ ID NO: 55883 - DNA, 252 bp, Glycine max
  Clone ID: 700676781H1
ctagttcaatatcctagtataccttaataaataatttaagatactatgatgagagcacggttcccattactgttgctgggacttgttttcctggcttcagtttctgtctcatttggcattgcttactgggaaaaagagaaccccaaacacaacaagtgtctccagagttgcaatagcgagagagactcgtacaggaaccaagcatgccacgctcgttgcaacctccttaaggtggagaaagaagaatgtgaa

SEQ ID NO: 55884 - DNA, 257 bp, Glycine max
  Clone ID: 700676790H1
gaaccactttgttcaagagtttaagagaaagaacaagaaggacataagtgggaaccccagagcacttagaaggttgaggactgcttgtgagagggccaagagaacattgtcatccactgcccagaccaccattgaaattgattctctctatgagggaattgatttctactccactgttactcgtgccagattcgaggaactgaacatggatctctttaggaagtgtatggagccggtggagaaatgtttgagggatg

SEQ ID NO: 55885 - DNA, 263 bp, Glycine max
  Clone ID: 700676793H1
tgaagactcatcccatcttttggaggatttcagggtcacgcccatgaagcttatggatgtgaaggatgccttgatcatgaggaagtttggatctgttgagccggataactactggtatagagtctgtgaaggagagacagaatccgtcgtgcaaaggccgtggcatttgttatggaaatcaaggcggttgatggatatagtgtctgcaatatcttcaaagttgaactgggactatgattctgttcatgttgtgagaggggaaa

SEQ ID NO: 55886 - DNA, 260 bp, Glycine max
  Clone ID: 700676807H1
atcataaaattcttccaccaagttatgggtttccttgtgttgcttcttttctccctcttaggtctctcttctagttccagcatatcaactcatcgttccatattggaccttgacctaaccaagtttaccacacagaacaggtgtcttcactgttccaactatggaagagtgagcatggacgtgtctaccataaccacgaagaagaggcaaagagacttgagattttcaagaataacttgaactatatcagggacatgaat

SEQ ID NO: 55887 - DNA, 252 bp, Glycine max
  Clone ID: 700676813H1
aatccttccaagttgggactctcctacttcatttcgaaaggtaacctcttcgccaagtctttcaaagttggacatactatcatcctcccctccgaatagtttgtcttaccttagctgcagtccttctactgtagtgatatccttgaatatgactcttgcacattaaaatccatgagtgatccttccagaagtgaaggttttcttaatgctaaggaagttcaggtagcaggaggagctgctggtgaagataga

SEQ ID NO: 55888 - DNA, 256 bp, Glycine max
  Clone ID: 700676815H1
aaaagagttggcttcaaagactcaatctcatgcttacctttaccaacatcacccagagatctatgagtactattcactacaactcacatgcaacgaagatagcactggtgatcgatggcagagggcatcttcaaaatcatgtccacacatgtcatcaaggtcgtcacactcgaagcatgataagagtagcccttcataccatagaatcagttccgatttgaagcctggaatggtgtttgttgtccctcccggtcat

SEQ ID NO: 55889 - DNA, 242 bp, Glycine max
  Clone ID: 700676820H1
attttagatgaaaaaaaattaatgatatatatatataaagtgataattatagaaaaaaacttaaatggtaaaaaaatatttcaaaactcaaatcagcccaacccaattaattcggctatgattttaacctaaagccaactgatccaactcacgaaaattcctgattaacaatttgtaattataataactacatttaaacaaaattattataaaaatattttaatagatttagtttagttctt

SEQ ID NO: 55890 - DNA, 256 bp, Glycine max
  Clone ID: 700676832H1
gtcctctacaggaatggaatttactctccacattggaacttgaacgcgaacagtgtgatctatgtgactcgagggaaaggaagagttagagtggtgaactgccaagggaatgcagtgttcgacggtgagctaaggggggacaattgctagtggtgccgcagaactttgtggtggctgagcaagggggagaacaaggattggaatacgtagtgttcaagacacaccacaacgccgtgagcagctacattaaggatgt

SEQ ID NO: 55891 - DNA, 253 bp, Glycine max
  Clone ID: 700676840H1
tcaagttacactccaactccattgttggaatctggtttgcaaaaagacagagggttaattgtggagtattttggaaggatgtcttacgttgctcataacgttaatcagccccaagagaaagatttgttggaggaaatttttcctttgatattaaatctcgctctagattggaaaaagtttcctctacaaaagcacaatttgttagtggaaaaaccttcaaatatgatataattggtgctggttcacattcttc

SEQ ID NO: 55892 - DNA, 251 bp, Glycine max
  Clone ID: 700676841H1
gaagattccagcaggcaagcgatgtgggtttgtccaattcgcagacaggagctgtgccgaagaggcacttcgggtgttgaatgggaccctgttgggtggtcaaaatgttcgtctttcatggggccgcagtcttcaaacaaacaggctcaggcagatccaaaccagtggaatggtggtgctggttctggtggtggatactatgggtatgctgcacaaggttatgaaaattatgggtatgctcctgctgctgg

SEQ ID NO: 55893 - DNA, 251 bp, Glycine max
  Clone ID: 700676842H1
gcgttggaacccgaccaccgcgttgagtccgaaggtggtcttattgaaacatggaactctcaacaccctgagctgcaatgcgccggtgtcactgtttccaaacgcaccctcaaccgcaacggcctccacttccatcttactcaccttatccccaaatgatcattgtcgttcaagggaagggagcaattggatttgcatttccgggatgtcctgagacgtttgagaagccacaacagcaatcaagcagaaga

SEQ ID NO: 55894 - DNA, 248 bp, Glycine max
  Clone ID: 700676845H1
agaattttaaggttgagtgtcctaatgtgaagtacaccgagactgagattcagtccgtgtacaactacgaaaccaccgaacttgttcacgagaacaggaatggcacctatcagtggattgtcaaacccaatctgtcaaatacgaatttaaaaccaacatccatgttcctaaattaggggtaatgcttgtgggttggggtggaaacaacggctcaaccctcaccggtggtgttattgctaaccgagagg

SEQ ID NO: 55895 - DNA, 254 bp, Glycine max
  Clone ID: 700676853H1
gttggctgatgatgagagagaaaaaggaaatgaattcttcaagcagcagaagtatcctgatgctgtgaagcattacacagagtctatacgaagaaatccaaaagatcctagggcttatagtaacagagcagatgctacactaaattgggggcaatgcctgaagggttaaaggatgcagagaagtgcattgaacttgatccaacctttgtaaagggttatacccggaaaggtgcagtccagtatttcatgaagga

SEQ ID NO: 55896 - DNA, 244 bp, Glycine max
  Clone ID: 700676876H1
aaacaatatgtgtgcatatgggctcaatcctggtatttcaggttctcgtcttttgggcaccattcctcagtctatttcacagcaaactgtttggaatcaaatggcaacagtgagaacaccattgattttgattctagcaagcagagtttttgtcaattttctattgaccttctcggtggaggaattttagtggacaaaactggagattggatcacacttatacaaaattctccaattagtaact

SEQ ID NO: 55897 - DNA, 244 bp, Glycine max
  Clone ID: 700676877H1
ttgtctttgaacactcatcaccatggccaagcttgttctttccctttgtttccttcttttcagtggctgcttcgctctgagagagcaggcacagcaaaatgagtgccagatccaaaagctgaatgcctcaaaccggataaccgtatagagtcggaaggtgggttcattgagacctggaaccctaacaacaagccattccagtgtgccggtgttgccctctctcgctgcacccttaaccgcaatg

SEQ ID NO: 55898 - DNA, 247 bp, Glycine max
  Clone ID: 700676879H1
ggcagaggcgcggagaagatgtggttcaccctctcaaggtctctctggaggacctttatctcgggacttctaagaagctctccctctccagaaatgtcatatgctccaagtgcactggtaagggttcaagtctggtgcttcgatgaagtgtgctggttgtcaaggaactggtatgaaggtttctataagacatcttggcccgtccatgattcagcagatgcagcatgcttgcaatgaatgcaagggt

SEQ ID NO: 55899 - DNA, 248 bp, Glycine max
  Clone ID: 700676886H1
aggatagtggcctaccatggtggtgacgggagagaagttattagggtttttgagtgcggcggtccaaacactcttctctgcagcttttgcctacaactcccttcaccatggctgaacaaaccgagaagcttttctgaagcaaccaaaagtgtttctcagcacaaagaagactgggaagggaaagagacctggaaaaggtgggaaccgcttttggaagtccattgggcttggatttaagactcccaggg

SEQ ID NO: 55900 - DNA, 246 bp, Glycine max
  Clone ID: 700676888H1
atcactctcaactttactcctcttcaatcagttgcatattctttgctattccaatggccactgttgaggttgtgtcagccaaggttgccctcccagaggacacaaaagaggcatcattgaaggttacgaggagaagaacacagaagaagttgttgagactccaacaccagaaactgtggtcactgagcaaaccaaggaggaaagtactgaggccccacgacctgcagcttcagaagacaagccctc

SEQ ID NO: 55901 - DNA, 242 bp, Glycine max
  Clone ID: 700676891H1
ctttactttttttttcagccatggagtttcattgccttccaatatttctttatctcaatttgatgttgatgacagccaatgctgcgttaactcctagacattactgggaaacgatgcttccaaaactcccttgccgaaagcaatcacagagctactaagccttgaaagtaggtccatatttgaatatgccgggaatgatgaccagtcagaaagtaggtccatattaggatacgctggctata

SEQ ID NO: 55902 - DNA, 263 bp, Glycine max
  Clone ID: 700676941H1
gttcctggcttaacgaaatcaaatgtttaaggaagaatttctatgacgattcgcaaccccatgcgacgaatccgtctcctccactccttttccgtcgtcttcctctactggttctacgtcttctcatgaactaaccccctctcaatcccctaatttctccaacatttccccctttttctaattaatcagatctgcaaaaccctaatttccctaaccctaacgaaacccccaaatccaatggcttcgattcaacgcccggcgag

SEQ ID NO: 55903 - DNA, 256 bp, Glycine max
  Clone ID: 700676965H1
gtaaattcatgcagttcctagctttcgattgttgcagtggtatatagggttgcctgttagagggatgttgatataggatctatgcaacgttatatttcccattgaagatgacgttatatttttagtgtataaataaatagcactacactgtctaaatctgcttgatactgaaattgcaaaattggacgctaaaattatattatccagagtaacaatttgcaaagcggggctagttttcaattatcaaacaaatgac

SEQ ID NO: 55904 - DNA, 254 bp, Glycine max
  Clone ID: 700676986H1
ggagaagataaagaaaagggtcttctccaagtgggaccaagtgaaagacccagaaccagaaccagaatcagaatcagaatcaaaatcaacggttaattcttcttcaaagccaccaactttatcatcctttgttcttgcatgtgcatattctgttgtgtgtattgcaaaagcggttcacggagttgaaaaggagaagcaaaagtttggtttctggttcccggtggattatagggctaggttagagcctccaatcc

SEQ ID NO: 55905 - DNA, 252 bp, Glycine max
  Clone ID: 700677090H1
taaacactcatcagtcatcaccatggccaagctagttttttccctttgttttctgcttttcagtggctgctgcttcgctttcagttccagagagcagcctcagcaaaacgagtgccagatccaaaaactcaatgccctcaaaccggataaccgtatagagtcagaaggagggctcattgagacatggaaccctaacaacaagccattccagtgtgccggtgttgccctctctcgctgcaccctcaaccgcaa

SEQ ID NO: 55906 - DNA, 100 bp, Glycine max
  Clone ID: 700677167H1
cggacacgtcggcagcaagacctcttgtggttatggagtggccactggaggacctttggcctggggtctttgttacaatcatgaaatgagtcctatgcag

SEQ ID NO: 55907 - DNA, 267 bp, Glycine max
  Clone ID: 700677191H1
aaggcactggagacagaggttatgaagattgatcctccaccaagaccgccaaattggggtgagctagaccttccattgaatgcatcatcttggagtgaggaggatctccaagatccagataagttctatgaaatgactgttcttcttaatgcccaaagagaaatctctgataagatcttggatgcacagtgggaaactaaatggcgtcaggacaagttgaatgagatgttggaggcaaaagtgaagccgtacatccaggatatagac

SEQ ID NO: 55908 - DNA, 57 bp, Glycine max
  unsure (1)..(57): unsure at all n locations
  Clone ID: 700677256H1
ccgctaaggccgaatgcngatgataancntngattattttatactagtgnantgatt

SEQ ID NO: 55909 - DNA, 102 bp, Glycine max
  unsure (1)..(102): unsure at all n locations
  Clone ID: 700677265H1
tttcttctcttgcggctagggtnttagcgcancttncttgcnagatttaaggaaanatgggtaaggnaaanggttcagatcagtantggtgngtcaatnggc

SEQ ID NO: 55910 - DNA, 250 bp, Glycine max
  Clone ID: 700677275H1
atggtattgacaaaactagtgcaactttgcaatttagaaagttagcagattgtgattttctcaagagaaactttaagcagatgtctaatgttttatgggtggctcctgaggacaaggcgagtttatggtcacaacttcattatgtttcgtgcaataatctggaaatgcaagaagcttatcttgtcaatctcgtaaatgtgttacgagaattgtatttgcacagtccagaggaagctcgccaattgagaag

SEQ ID NO: 55911 - DNA, 250 bp, Glycine max
  Clone ID: 700677404H1
tgattaggtgagtcatcactccgattctcttcacacctaagatccattctttcttaattctcacctccctcactcgttcattcgaacaaaaccctttttagtttttttcctcctctgtttctctctctgctctgcattttggtggcatcatcagagatagagacttgagtgtgagagccacaacttctccaattcttcaaaagggtgaaactttgaaggaaaagaaatggttggtgctataaaagcagcg

SEQ ID NO: 55912 - DNA, 251 bp, Glycine max
  Clone ID: 700677409H1
gcatcatgggattggaggaaaaaaggtgtcatcacccaagtaaagtaccaagggggctgtggaagcggttgggcgttttctgccacgggagccatagaagcagcacatgcaatagcaacaggagaccttgttagcctttctgaacaagaactcgtagactgtgtggaagaaagcgaaggttgttacaatggatggcactatcaatcgttcgaatgggttttagaacatggtgggattgccactgatgatga

SEQ ID NO: 55913 - DNA, 251 bp, Glycine max
  Clone ID: 700677410H1
gaacaagttatagacgtggaagttggctggggttacatgaggaaatgagactcgacatgcaaagaatttggagaagaaatttagggagagatgatagatgtattgctgataatgggaaggagatttccattcttggatgaggatgttataaggcttttgctcaatattccattgtgggaggtagccaacctcgatcaacctagtggcattggtgataaaaggattttaagagaggttgctgaattgcttgg

SEQ ID NO: 55914 - DNA, 249 bp, Glycine max
  Clone ID: 700677413H1
gttctgtccacagcaagctgaggatgacaaatgtggggatattgggattagtattgatcatgatgatggaaccaggcgtttggtggtgtctaagaacaaaccgttagtggttcagtttcaaaaacttgataaagaatcactggccaagaaaaatcatggcctttctcgcagtgagtgagacacaagtgtgagagtactaaataaatgctttggttgtacgaaatcattacactaaataaaataatcaaa

SEQ ID NO: 55915 - DNA, 249 bp, Glycine max
  Clone ID: 700677419H1
gcattttcagaggaacaatggcgggtagggtttcgacgtgcttcttcttcgtgtttgctctttctctccttcttccttttcagatctccgctgaggaatcatcggagaaagagttcgtactcacattggatcactctaactttcacgacactgtcagcaagcacgatttcatcgtcgtcgagttctacgctccatggtgtggccactgtaagaagcttgctcccgagtatgagaaagctgcttctatct

SEQ ID NO: 55916 - DNA, 249 bp, Glycine max
  Clone ID: 700677423H1
ggcctggcagtttcagacaggtagaccaacaaggagctggtgatgttaatgtaggacatgctcaaagttcaaatgctagtttagctccaatggtgcctcctccaccacaagcttctgcatctcctgatctcacattgaagctttaagtttaaggcttaagaaaatgacgatacatacacaagcaaaggccttcacaaagtaataaataagtggctaagaactgactcatccgttgctttgcatccagcc

SEQ ID NO: 55917 - DNA, 249 bp, Glycine max
  Clone ID: 700677426H1
gtagttttttaatctggcttcatggtaatgaactaacaatattcatctttggggatgaatccttaattctacatgcagattttgataccaagttgctgtttagagatctgtttccttctagacaacggtctgtggtatctgttattttagttgaatcgaagctgcaacaaaatcttcctgatctttgctttgaggttatggcatcggcgggtgtagcacctgcttctggggtaagagatgtgaatgcaa

SEQ ID NO: 55918 - DNA, 248 bp, Glycine max
  Clone ID: 700677429H1
cacaaggcagaaagcaagctcatcctagagttttaaaaatggcagcagcctcctccatggctctctcttccccatccttggctggcaaggccgtgaagctgggcccatcagcccccgaagtcgggagggtcagcatgaggaagaccgtcaccaagcaggcctcctccggaagcccatggtacggcccagaccgcgtcaagtacttgggcccattctctggcgagcccccgtcctacctcactggcgag

SEQ ID NO: 55919 - DNA, 245 bp, Glycine max
  Clone ID: 700677438H1
gcggaaatatagagctgaattgtctgaacaagatatatttgtaatcccagcaggttatccagttgtggtcaacgctacctcagatctgaatttctttgcttttggtatcaatgccgagaacaaccagaggaacttccttgcaggttcgaaagacaatgtgataagccagatacctagtcaagtgcaggagcttgcgttccctgggtctgcaaaagatattgagaacctaataaagagccaaagtg

SEQ ID NO: 55920 - DNA, 248 bp, Glycine max
  Clone ID: 700677442H1
gtaggagcagagctgagcagtttgatttgccaattcaaagctcatcttcctgctcttactagaaccttccaaatcaatttcctctaattagggtttatctagggtttaattactcatcccaattcccaaaaccataatcctactttctccttctcaatacccaaatgctttgctcccatggcgtcaccctcattaatcgccttgctcgtcgatctttctgtcacgccaacgattctgtttatcaagca

SEQ ID NO: 55921 - DNA, 247 bp, Glycine max
  Clone ID: 700677444H1
cagagaactttgcagctctcttaggtttttaaaaaacaccacgcaaacagcaagatggccacttccgacagtaacatgctactaaattatgttccagtttatgtgatgctcccactcggagttgtcaatgttgacaatgtttttgaagacccagatggccttaaagaacagctcttgcagcttcgagctgcgggtgttgacggggttatggttgatgtgtggtgggggatcatagaactgaaggggc

SEQ ID NO: 55922 - DNA, 245 bp, Glycine max
  Clone ID: 700677445H1
gggaaaagaaaattggccttacaatccccagagtgaccatctcagaagatgatcttctggctgtagcagcagaaaattgcataccgcgaagtattgtggcatctttcactcatgacatattcatcaaaggttgtcaagttaacttcaacatagatggacttggtgatgttgagattagcactctctatcctgatgaagcattcagaagcttggaggattgcttcgagggctttgctcttatgatc

SEQ ID NO: 55923 - DNA, 246 bp, Glycine max
  Clone ID: 700677447H1
cccaagctgactgtgctgttcttatcattgattcgaccactggtggttttgaagctggtatttccaaggatggacagactcgtgaacatgctctgctttcattcacccttggtgtgaaacagatgatttgctgctgtaacaaaatggatgctactacacccaagtattccaaggccaggtatgatgaaattgtgaaggaagtctcttcctacttgaagaaagtaggatacaaccctgacaagattc

SEQ ID NO: 55924 - DNA, 246 bp, Glycine max
  Clone ID: 700677458H1
ttaaacactcatcagtcatcaccatggccaagctagttttttccctttgttttctgcttttcagtggctgctgcttcgctttcagttccagagagcagcctcagcaaaacgagtgccagatccaaaaactcaatgccctcaaaccggataaccgtatagagtcagaaggagggctcattgagacatggaaccctaacaacaagccattccagtgtgccggtgttgccctctctcgctgcaccctca

SEQ ID NO: 55925 - DNA, 244 bp, Glycine max
  Clone ID: 700677460H1
attgaagccaaacatggtcacccctggatcccaatctgctaaggtttcccctcaggtggttgccgagcacactgtcagagcccttcagagaaccgtgcctgctgcagttcctgctgtcgttttcttgtctggtggccagagtgaggaggaggcatccgtcaacctcaacgccattaaccaggtcaatgggaagaagccatggtcactctctttctcctttggaagggcacttcaacagagcacc

SEQ ID NO: 55926 - DNA, 243 bp, Glycine max
  Clone ID: 700677462H1
aaagaaccaaagagaatcctactttgtggatgctcagcctaagaagaaagaggaggggaataagggaagaaagggtcctttgtcttcaattttgagggctttttactgaataagtatgtactaaaatgtatgctgtaatagctcatagtgagcgaggaaagtatcgggctatgtaactatgactagagcttcaactatgaataaataaatcgacagcatatgatgcttttgttttgtgtcaaa

SEQ ID NO: 55927 - DNA, 249 bp, Glycine max
  Clone ID: 700677464H1
gtcaagtacaatagacacgtaatcaaaaccatgcagatacgaacctgccactccatcaccacccaaacccttccacaacttccgtgttcttctagaaaagcccaccaccgccaccttcttccgccgttaaacgctgcggtttccgcggcgccgttcaaagcccggaaggcccactcaatgcctccagaaaagaaagaaattttcaagtccttggagggatgggcctcggagtgggtcctaccgctgctg

SEQ ID NO: 55928 - DNA, 242 bp, Glycine max
  Clone ID: 700677467H1
ccaaggttaagatgccacttcccgatatgatggctgcagtactagctttggatgagtcagtattggatgttgatcaagtggaaaatctcattaagttttgtcctaccaaagaggagatggatcttttgaagggatacactggtgacaaggagattttggggaagtgtgaacagttttttctggagttgatgaaggtgccaagggtggagtcaaaattaagagtatttgcattcaagattcag

SEQ ID NO: 55929 - DNA, 241 bp, Glycine max
  Clone ID: 700677482H1
gtcccaggaagaaaggttaaagcgctataaaggtttcaaggaggggcatacaaggattcttgttgcaacagatttggttggaagagggattgatattgaacgtgtcaacattgttataaactatgacatgcctgattccgcagacacatacttgcacagggttggtcgagctggaagatttggcaccaaaggccttgcaatcacatttgtttcttgttctactgatgtcgatgttctcaac

SEQ ID NO: 55930 - DNA, 242 bp, Glycine max
  Clone ID: 700677490H1
actcggaattatgggagaattcacaccagagcaacagcgtgccttctgtcaatttgttactggtgcacctaggttgcctcctggtggactggcagttctaaatccaaaattaacgattgtgaggaagctttcatcaagtgcagctaatgcttcatctaatgggaacggtccttcagaattagcggatgatgacttgccaagtgtgatgacgtgtgcaaattaccttaagcttcctccttatt

SEQ ID NO: 55931 - DNA, 245 bp, Glycine max
  Clone ID: 700677496H1
taaattcttagttcttgccaaaaccctgaaggaagaagaacccaaaactttgggcaacaagaggcacaaaattttattattatgaagtgagaaactcctcagagatgtttgttgcatcccttgcttgctcttgcacttatccctcccttttgttgcgatctttgtgtcccacatttacttcgtggtcttatcagctcaagcaactcaacagaaagaagaatcgcattttggcatccatcaatggt

SEQ ID NO: 55932 - DNA, 195 bp, Glycine max
  Clone ID: 700677501H1
gtgtttttagctctctgattgcaaaagctgctcaaacaaagttatccaaagacaattttttacaatctgttgagagtagcaattctaccaggaattccagatcagaaattatatcttctagaaaaattgatgctggtggattatcccaagcaactgctagaagaattttggaagttatagatgactcactcccat

SEQ ID NO: 55933 - DNA, 188 bp, Glycine max
  Clone ID: 700677504H1
atggcgggtagggtttcgacgtgcttcttcttcgtgtttgctctttctctccttcttccttttcagatctccgctgaggaatcatcggagaaagagttcgtactcacattggatcactctaactttcacgacactgtcagcaagcacgatttcatcgtcgtcgagttctacgctccatggtgtggcca

SEQ ID NO: 55934 - DNA, 187 bp, Glycine max
  Clone ID: 700677505H1
gtcattctcaggtcagacactgatattatggaacttgtaggtgcacatagagaagatttgtcttcagtcatgtcctcaaagagaatgcccacatttaaaacattgagtatcaccacaaaggacacagattcactgagggatttagaacttgagccaaaagtgagaagtaggatgagcatcgtgatat

SEQ ID NO: 55935 - DNA, 262 bp, Glycine max
  Clone ID: 700677511H1
gcatgtgctgctgttggcttgacatcaagttacactccaactccattgttggaatctggtttgcaaaaagacagagggttaattgtggaatattttggaaggatgtcttacgttgctcataacgttaatcagccccaagagaaagatttgttggagggaaatttttccttcgatattaaatctcgctctagattggaaaaagtttcctctacaaaagcacaatttgttagtggaaaaaccttcaaatatgatataattggtg

SEQ ID NO: 55936 - DNA, 260 bp, Glycine max
  Clone ID: 700677526H1
ctggggatggtgaagagatgacattgattccgggaaccagtgttgaagaggcttacaataagctaatagttgaacttgagaaaagtgttcctacattggttggcattgaatgtcccaaggatgagaaacttcctcgtcgcaaaatttttgacaaacctaagacgcgctgcttcactattctccctatggagtttaatcttgtggttcgtcagaagtttttaaattttgtgaggttcattatgaagaaaagggacaagctt

SEQ ID NO: 55937 - DNA, 253 bp, Glycine max
  Clone ID: 700677534H1
gaagcaacttgctaagcaatttgatatggatctcactcctaaaaaggcatctataaagctgatgattcaggaagaactgacaaaactagctgatgaagcagatgacgaggaggacggagaagaggatgctgagaaagatgaagccccatctacaggccaggaggttaaagcctgattgaggagtagacctgactgcttagcaatgcatactataacccttgttatgcatgcttcatctgtacactttgttggg

SEQ ID NO: 55938 - DNA, 96 bp, Glycine max
  Clone ID: 700677549H1
gctttgaagggtttttccattttcttcaatggccacgccctttcccattcccgtcaccgcagctcaggttggaacgtacttcgtaggacagtacta

SEQ ID NO: 55939 - DNA, 236 bp, Glycine max
  Clone ID: 700677566H1
caatatcctagtataccttaataaataatttaagatactatgatgagagcacggttcccattactgttgctgggacttgttttcctggcttcagtttctgtctcatttggcattgcttactgggaaaaagagaaccccaaacacaacaagtgtctccagagttgcaatagcgagagagactcgtacaggaaccaagcatgccacgctcgttgcaacctccttaaggtggagaaaga

SEQ ID NO: 55940 - DNA, 251 bp, Glycine max
  Clone ID: 700677575H1
aatcacatctccagaacacaaagaagagtgacccttcttcttgttattccacttgcgttaggtattggtgtgattgtttgtaccatccggtggtggagcttgttggaaattggagatgagtcagaggggtttaatatatagctttgttgccaaaggaactgttgttttagcagagcacacgcaatataccgggaatttcagtaccattgccgttcagtgcctgcagaagctgccatcaaatagcagcaaat

SEQ ID NO: 55941 - DNA, 254 bp, Glycine max
  Clone ID: 700677578H1
gctgaagcaacattaccaacttcaagtgtgcttgaggcccaaagtagaaagcccaacagatatgaagtttcccaatacagatatcgcaatgtgccaataaagcgcagagcatgggttgaaggccagatgtctttcgatcagtctgtagtagcgattatgtctaaatgcaaagccagcatgagaatgggaaacactgatgctcaaattttgatggttccagggcgcagattcatagctcatggacattttttcaa

SEQ ID NO: 55942 - DNA, 153 bp, Glycine max
  Clone ID: 700677584H1
tctaacctacctctttttcttctctctcaacaacttcaccttcttcctcctcgatcatgtctcacttcaagggcaagtaccatgatgagcttatcgccaatgctgcgtacattggcactcctggaaagggtattcttgctgctgatgagtcaa

SEQ ID NO: 55943 - DNA, 261 bp, Glycine max
  Clone ID: 700677637H1
atatactgtatctttttggggagcttgaacaatttgtgctcactcaacaagcagtatggtttggcaaagggcaccaacgaagccatgtttgtgattgaagcttacaagacactccgtgaccgtggtccataccctgcagatcaagttgtgaaggatcttgatggcagctttggctttgttgtctatgacagcaaggttggcagtgtctttgcagcactgggttctgatggtggaattaagctgtattggggtattgcagct

SEQ ID NO: 55944 - DNA, 261 bp, Glycine max
  Clone ID: 700677696H1
ggacgaagccagaggccccaagaccgtcaccaaaaggtacatcgcttcagagagggtgatttgatcgcagtgcctactggtgttgcatggtggatgtacaacaatgaagacactcctgttgttgccgtttctattattgacaccaacagcttggagaaccagctcgaccagatgcctaggagattctatcttgctgggaaccaagagcaagagtttctaaaatatcagcagcagcagcaaggaggttcccaaagccagaaa

SEQ ID NO: 55945 - DNA, 223 bp, Glycine max
  Clone ID: 700677707H1
cagatacacgaggcaatagctgggattcaagccccatgttaggtgcatcccaaaacgtaagagcacactgatgacagaggaaagatcaccaacatgtccataatctgtaaaaattataggggttcgttgctgataaaccactttagcatcgttggcggtttaaaaatgcggatatcaatcaattcctttggttggattggaatttgggatgtcatgttagttg

SEQ ID NO: 55946 - DNA, 233 bp, Glycine max
  Clone ID: 700677716H1
attttcaccccctcttgccgttcatctctgttatttgagtcaaaggattatcgccatgtcagttgcaccagttgacagtattccctcattaagcagtgatctcttctatgatatatttcgtcgacttgatggtgcaacattggctagtgcagcatgtacttgtgcagcattgtgttccatctcaaaagaagagaatttatgggagaatgatgttcatctatgtggccttcaac

SEQ ID NO: 55947 - DNA, 217 bp, Glycine max
  Clone ID: 700677737H1
cctgagaatacaggtatagcattggcctgtgctatgaatagttcttttagggggcgcgccagttctgatatttacaccatctgctctcaagactgtgaattgtggaatcctgcttgcacaaaagcaatgactatgtcatttaatccaaacccgtgttctgatgcatggagtttggaatttttgaagcgtaccggattcattgtgatatcatttgtgt

SEQ ID NO: 55948 - DNA, 219 bp, Glycine max
  Clone ID: 700677739H1
gtcttcctcagtgttgtggatatgaacgagggagctctttttctgccacacttcaattcaaaggccatagtggtactagtgattaatgaaggagaagcaaacattgaacttgttggcattaaagaacaacaacagaggcagcaacaggaagagcaacctttggaagtgcggaaatatagagctgaattgtctgaacagatatatttgtaatcccagcag

SEQ ID NO: 55949 - DNA, 216 bp, Glycine max
  Clone ID: 700677776H1
catttggaaatttggctgatgacaccatcaattttgaggcttttccccacaagctggtgcaatttggagagattcaggaaaaagttgtattgaaattttcacaagaggaatttcttacagcttggtcaactcaggtgcgtcctacaacaactctgttggctgatgggtgtccatatttgtatgctatggtgcagatagttcagtgtctacaatacc

SEQ ID NO: 55950 - DNA, 214 bp, Glycine max
  Clone ID: 700677782H1
aacccaacaccatcatcatcgttcacgccaagtaaacgatcctctcttctccacctcaccctttctctctcttctctctctttttctctctgttacttcacaataccaacagcacaacctggttccgggtcgcactacttgccccggatcaggacccttctcatgcaaccaccgattcaagtgtttttcgctttcctaaacaacaactataggc

SEQ ID NO: 55951 - DNA, 211 bp, Glycine max
  Clone ID: 700677786H1
attgtatttgtcgatgaagttgacagtctgcttggagctcgaggtggtgcttttgagcatgaggccactagaagaatgaggaacgagttcatggcagcttgggatggattgaggtcaaaagaaaaccaaagaatccttattctgggtgcaactaaccggccatttgaccttgatgatgctgttattcgcgtttgccaagaaggatatatgt

SEQ ID NO: 55952 - DNA, 218 bp, Glycine max
  Clone ID: 700677793H1
ccgcagagtcagagagagagattcactgaaacagagcgcagaagaaaatacataaactaatccagaaaatgagcagcggcgctggaaaggtggtgtgtgtcaccggcgcttccggttacattgcttcctggatagtcaaattcctcctcaatcgcggctacaccgttaaggccaccgttcgcgacacaagtgatcgaaaaaaataaaccacttggttg

SEQ ID NO: 55953 - DNA, 257 bp, Glycine max
  Clone ID: 700677809H1
gaaaatttaggtcacttgaagtctaaggatgctcttgagattggaacaaaatctttatctcaaattgtccagccggcgttcgaatctgcgttcgatttgaaatccacgccaattgagtttcatagcttccaagatgtgcatgacttgtatgaaggtggaattaagcttcctagagatgtaattagcacaattatccccttaccagtgatcaaagaactctatcgtaccgatggtcaacacatcctcaagtttccaca

SEQ ID NO: 55954 - DNA, 256 bp, Glycine max
  Clone ID: 700677813H1
taaaattcttccaccaagttatgggtttccttgtgttgcttcttttctccctcttaggtctctcttctagttccagcatatcaactcatcgttccatattggaccttgacctaaccaagtttaccacacagaaacaggtgtcttcactgttccaactatggaagagtgagcatggacgtgtctaccataaccacgaagaagaggcaaagagacttgagattttcaagaataacttgaactatatcgggacatgaat

SEQ ID NO: 55955 - DNA, 255 bp, Glycine max
  Clone ID: 700677828H1
acgttccgagttttctgatcgctcatagagagttcgacgcggcggttgcagaagaagattgcaagatgaagttcaacatcgcgagtcccaccactggatgccagaagaagctcgagatcgacgacgatcagaaactacgagcattttgggacaagaggatctcacaggaggtcagcggagatgcacttggtgaggaatttaagggctatgtcttcaaaattactggaggttgtgacaaacaaggattcccgatga

SEQ ID NO: 55956 - DNA, 105 bp, Glycine max
  Clone ID: 700677854H1
ctcatttgttgtttacattgcttacatttgtttattgatgataaaatttgtatctgggatgcgccaacaacatcatacacacgaattaatagattgatcttctcc

SEQ ID NO: 55957 - DNA, 251 bp, Glycine max
  Clone ID: 700677855H1
acgcactgagttgactgatgggtgtccatatttgtatgctatggtgcatgatagttcagtgtctacaataccaggtgattttgtcattggtgttaagttgacaaccataaacaatatgtgtgcatatgggctcaatcctggtatttcaggttctcgtcttttgggcaccattcctcagtctatttcacagcaaactgtttggaatcaaatggcaacagtgagaacaccattgaattttgatctagtaaaca

SEQ ID NO: 55958 - DNA, 248 bp, Glycine max
  Clone ID: 700677874H1
tcacacagcgcttatgagaggctcttgttcatgtcaaccaagcaataacgataaagaaagaaattttatggttatggaggtctcagcatacatttgcaacaacaacttcatcttctcttcttctcgtgccataacacaaaaatcttctgcttctttctcatcacctatgcttgtcaaatccatggccactcccaagcctcttccctcagtctctagaactgtaggctctagaaagaatcaactgtgtt

SEQ ID NO: 55959 - DNA, 253 bp, Glycine max
  Clone ID: 700677883H1
caaacactgtgctggcaaagaaggacttagaatcaagaagaactacaagaagatctacttcactttctcagcatttttcaccacaatcctactactaatacttcttatatggctcatcctccaccctgcaaagcctcaattctccctcaaagaagttgacatctaccaactaaacctctcaggcccaaacctcaactcctccatccaactcaccctcctctccaaaaacccaaaccagaaagttggcatttac

SEQ ID NO: 55960 - DNA, 202 bp, Glycine max
  Clone ID: 700677911H1
gcctgttcttctttccgaaacacctctacctgttcttgttctctctaccggtaattgcatgaaggatggttggtcaatggcaaaaccagaagccagtttgaaaataatcatatcatcattttgacctaatcaaatcgaaacaaccacctaatctcactctgaaaatcgtttccctttgctgaacttgaacaggtcggagaaa

SEQ ID NO: 55961 - DNA, 241 bp, Glycine max
  Clone ID: 700678093H1
gataaacaaggttctgtttggtagagaggaggggcagcaacaaggggaggagaggctgcaagagagtgtgattgtggaaatctcaaagaaacaaattcgggaactgagcaaacatgccaaatctagttcaaggaaaaccatttcttctgaagataaacctttcaacttgagaagccgcgaccccatctattccaacaagcttggcaagttgtttgagattaccccagagaaaaaccctcag

SEQ ID NO: 55962 - DNA, 260 bp, Glycine max
  Clone ID: 700678135H1
ttaaaagccggagtaaagactgggaagaccagcttggagcagatatcaagagtttatggcaatcaggcagtggttgttagtatcgatccgcgtagagtgtatgtaaaggatcctaatgatttgcaattgaagaccaaagggtttcaagtccaggtccaaatggagaagaatatgcatggtatcaatgtacagttaatgggggacgagagggccggccaattggtgcttatgaactagcaaaagcagttgaagagcttggt

SEQ ID NO: 55963 - DNA, 182 bp, Glycine max
  Clone ID: 700678184H1
gtgaaatggactgaggaatggcaacagtgagaacaccattgaattttgattctagcaagcagagcttttgtcaattttctatcgaccttctcggtggaggaattttagtggacaaaactggagattggatcacacttatacaaaattctccaattagtaacttgttgagagttgctgcttgg

SEQ ID NO: 55964 - DNA, 140 bp, Glycine max
  Clone ID: 700678205H1
ggcatatatactctgcatccaagcagattagtgctgcaatatctccagatcaaaataccactgcctttaaagaggtagcaattatccgtcacccgcgtgttggtgaatatgcgtttggatttattacatcaactgttact

SEQ ID NO: 55965 - DNA, 247 bp, Glycine max
  Clone ID: 700678207H1
gggcgttttctgccacgggagccatagaagcagcacatgcaatagcaacaggagaccttgttagcctttctgaacaagaactcgtagactgtgtggaagaaagcgaaggttgttacaatggatggcactatcaatcgttcgaatgggttttagaacatggtgggattgccactgatgatgattatccttacagagctaaagagggtagatgcaaagccaataagatacaagacaaggttacaattga

SEQ ID NO: 55966 - DNA, 246 bp, Glycine max
  Clone ID: 700678208H1
gtaaactttgccaaataatttttctgcagaattgctctcttgcaaattggatactgttactggtcaatattatcctgagtgggctccaattaattgtcgagttcatcgacaaccaattcacatcactgaaggaaattatgtcagaaagcaagatgtcagcattgaatatgatgcatgtacaattccaaatgattgtggttcattggttgttgccaaggttggaaatcacaaacaaattgttggttt

SEQ ID NO: 55967 - DNA, 243 bp, Glycine max
  Clone ID: 700678213H1
ggaagggtaaggagggtgggagtgggaagaaggagaagaggatgaagggagagaagagttttgggagtggcggtgcgaagagtgggtccaaatttgggagtggaaagaaagggtttggtgggaaggcagggaaggatcatgatggtgaagttaaggagatgtgggacacaattgctgggggagattctgaggatgatcaagagggtctcaggaatgtggatgatgacaactttattgatgaca

SEQ ID NO: 55968 - DNA, 241 bp, Glycine max
  Clone ID: 700678227H1
gttcaatatcctagtataccttaataaataatttaagatactatgatgagagcacggttcccattactgttgctgggacttgttttcctggcttcagtttctgtctcatttggcattgcttactgggaaaaagagaaccccaaacacaacaagtgtctccagagttgcaatagcgagagagactcgtacaggaaccaagcatgccacgctcgttgcaacctccttaaggtggagaaagaag

SEQ ID NO: 55969 - DNA, 142 bp, Glycine max
  Clone ID: 700678256H1
gtgtgttccaagaatactgtgaagccatgagcaaactctctcttgggataatggagcttctggggatgagcctaggagttggcagggaatgtttcagagatttcttcgaaggaaatgagtcggttatgaggttgaattacta

SEQ ID NO: 55970 - DNA, 234 bp, Glycine max
  Clone ID: 700678287H1
tgtgtgtgtatggtgatgataacttaattagtgttcatgaatatgtcaagccttactttagtggttctaaattgaaaagctttctagctggtcataatatcaccattactgatggtattgacaaaactagtgcaactttgcaatttagaaagttagcagattgtgattttctcaagagaaactttaagcagatgtctaatgttttgtgggtggctcctgaagacaaggcgagtt

SEQ ID NO: 55971 - DNA, 266 bp, Glycine max
  Clone ID: 700678506H1
agcaaactgtttggaatcaaatggcaacagtgagaacaccattgaattttgattctagcaagcagagcttttgtcaattttctattgaccttctcggtggaggaattttagtggacaaaactggagattggatcacacttatacaaaactctccaattagtaacttgttgagagttgctgcttggaagaaaggctgtttaatggttaagattgtgatgtctggaaatgcagcagtcaaaaggagtgattgggcctcattggtacaa

SEQ ID NO: 55972 - DNA, 269 bp, Glycine max
  Clone ID: 700678508H1
ccaagagaaagatttgttggagggaaatttttcctttgatattaaatctcgctctagattggaaaaagtttcctctacaaaagcacaatttgttagtggaaaaaccttcaaatatgatataattggtgctggttcacattcttcagaagattttcctgaaaaggaagatcaagaaaaacccaaaaagattgatgccagattgagacagagaatagatcctcaatacaatgaggttcaggctcagatggaaacaaatttgtttaaattgt

SEQ ID NO: 55973 - DNA, 267 bp, Glycine max
  Clone ID: 700678510H1
ccccaaacagaacaacggcagagcaagcagccagaaaaatggtgttgctgtccaaagcaacaacagaacaatactcctacatcaagaactacatgccaactgcattctcctcaacaattcccatagtggacctctccaaacccgatgcaaagaccctcatagtgaaggcttgtgaggagtttggattcttcaaagtcatcaaccatggtgttcccattgaagctatatcccaattggaatccgaagccttcaagttcttctctatgc

SEQ ID NO: 55974 - DNA, 260 bp, Glycine max
  Clone ID: 700678554H1
cattgtctttgaacactcatcaccatggccaagcttgttctttccctttgtttccttcttttcagtggctgcttcgctctgagagagcaggcacagcaaaatgagtgccagatccaaaagctgaatgccctcaaaccggataaccgtatagagtcggaaggtgggttcattgagacctggaaccctaacaacaagccattccagtgtgccggtgttgccctctctcgctgcacccttaaccgcaatgcccttcgtagacc

SEQ ID NO: 55975 - DNA, 261 bp, Glycine max
  Clone ID: 700678556H1
gctgttaccaaaagggtcactccaagcaaacaaggatggttgcatggcttggacttaaaccaaaacaatctcaacttgttctattggttcttagcaatccttagctgccttaattttttcaacttcctttattgggcctcttggtacaagtacaaagctgaagacaacaattcaaaggtgaatttgaaggctctcagaacgactggtgaaaggaaacaagatgaggaagagaagaaggacatgagagttaaggctaaagaa

SEQ ID NO: 55976 - DNA, 259 bp, Glycine max
  Clone ID: 700678571H1
gtgcagggtcttatcaagcatttcaggcctgagcttgagagaaggattagagagcatgcagaaagggagcttctgcaggccactggctaggcgtttactaaggggtgtgactgtactggtggatagcaagagtcagaataagacagtgccagtcattttggaatgataggtggctcaggttactgcagctttatcgctacttctgttttcttttatgctgcagcaattatggctggaccatacctgggaaaccatttgg

SEQ ID NO: 55977 - DNA, 257 bp, Glycine max
  Clone ID: 700678575H1
aaactcccaaggaatggcaactggatctaccttgtgacaaaattcctagtgtcttgactacaactgatgagagattggtaggcacagaacatgagggatatgatccttttcttggtggaattcaaaaatatgccactcccatgatgcccctagatgaagaaattctttctaaggttgcacaagatatggttgaggaatggtttgattgtgttgatgaggaggattcctttgaggaagtttctttaagtgcagcactt

SEQ ID NO: 55978 - DNA, 288 bp, Glycine max
  Clone ID: 700678605H1
gctcttgctatggtgcatagagatctactgcatcctggacttgttagtcttgttgtgttccgggacgtcttcctcgttggtggcgcagtatttctaagagcaaatagcttgggttggaagtgggaaagctggtttgatttttttaaccttgatgggacctgccgccaaaaggttgaaccactctttctaagcaaggtgaatacagtgttccaattagcactagttgctgcagctcttcttcaaccagagtttggaacccaggaaactcaattatatgttacttatttg

SEQ ID NO: 55979 - DNA, 285 bp, Glycine max
  Clone ID: 700678649H1
ttcaactctaaaaggttccaaactctcttcaaaaaccaatatggccacgttcgcgtcctccagaggttcaacaaacgctcccaacagcttcagaatctccgagactaccgcattttggagttcaactccaaacccaacacccttcttctcccccaccatgctgacgctgattacctcatcgttatccttaacgggactgccattcttaccttggtgaacaacgacgaccgagactcttacaaccttcaatctggcgatgccctaagagtccctgcaggaaccaca

SEQ ID NO: 55980 - DNA, 194 bp, Glycine max
  Clone ID: 700678655H1
caaacatctgttagagagttcgtaatttcctggttagtctttctataagttgcagcaatttgttccatgatctggttggtcaatgcacttcaattgtgtttgatattgatccccaggactttcccgcggttgaactgtgcacgactgtgcaacttatatactatgaacatggcaagctgtacccaatttatgct

SEQ ID NO: 55981 - DNA, 276 bp, Glycine max
  Clone ID: 700678659H1
atcacaaacaaattgttggtttccatgttgctggaagcaagggaagactgggatatgcttcactgataccatatgttgagccagttgtgcaagctcaaagtgctgaagtttactttgacttcttccctgtggaggttaatagtcaagagggagttgctcatattggtgaattgaaatctggtgtctatgttccactgcctacaaaaactaatttggtggaaactcccaaggaatggcaactggatctaccttgtgacaaaattcctagtgtcttga

SEQ ID NO: 55982 - DNA, 277 bp, Glycine max
  Clone ID: 700678679H1
gcaatggatctgctcccacctctcacttcatcactagtttgggcaatggttccctaactggatctaaaatgacaaattcctcttcgtcgtcgcagttagctaaagagtctcctttgatggatgagatatcaagcattggacgcagtcagcgtcagatcatgcatcaattggacaatctcaataatcttctcagggggagcttgggggagaagtctcacccaacaagaaccaacagcaggaaaagcattgacatgtcatcggattccgtgggagctcg

SEQ ID NO: 55983 - DNA, 275 bp, Glycine max
  Clone ID: 700678685H1
ggaaaaggcgtcttcataaacgccgcccaaaacttctcatacccttttattcattccattcgtttctagggttttcttttctttgccgagaaaatgagagagtgcatttcgatccacattggccaggccggtatccaggttggaaacgcctgctgggaactctattgccttgaacacggcattcagcccgatggacagatgccgagtgacaagaccgttggcggaggagacgacgccttcaacacatttttcagcgagaccggcgccggaaagca

SEQ ID NO: 55984 - DNA, 272 bp, Glycine max
  Clone ID: 700678694H1
tgaacacattagaagttctaggtcagactctccagtatccggcgctgcatctgagcaacaattgcctgacaacaaagattcttcaaacactcagaatctggacaattatgccaatattggattggttcgtgatagtagtccatcctatgctccttcagaaccacagcaacaagattctcatgatatgccaggttttgcggcatatgatcctccagctggttatgacattccttatttcagacccacaattgatgaaacagtacgagggcagg

SEQ ID NO: 55985 - DNA, 274 bp, Glycine max
  Clone ID: 700678737H1
accaggtgattttgtcattggtgttaagttgacaaccataaacaatatgtgtgcatatgggctcaatcctggtatttcaggttctcgtcttttgggcaccattcctcagtccatttcacagcaaactgtttggaatcaaatggcaacagtgagaacaccattgaattttgattctagcaagcagagcttttgtcaattttctattgaccttctcggtggaggaattttagtggacaaaactggagattggatcacacttatacaaaattctcca

SEQ ID NO: 55986 - DNA, 269 bp, Glycine max
  Clone ID: 700678744H1
ggctacggagcaactactacaactcaacgtaaaggaagcaaactatgcaaattacaagagccaaagaggacgaggtcgcggccaagatcgtggacgtggacgaggacatggaggagaaggaagaggtggtttcaacaaccactccaacaaattcaacaatggagaaagaagttggaatccataagtaacaagaggtcatggaagaggaaattcatggtcgaggtatgacaaatcacaaatcaagtgcttcaattgcaacaagattggtc

SEQ ID NO: 55987 - DNA, 271 bp, Glycine max
  Clone ID: 700678745H1
gggacatgaatgcaaacagaaaatcaccccattctcatcgtttaggattgaacaagtttgctgacatcactcctcaagagttcagcaaaaagtacttgcaagctcccaaggatgtgtcgcagcaaatcaaaatggccaacaagaaaatgaagaaggaacaatattcttgtgaccatccacctgcatcatgggattggaggaaaaaaggtgtcatcacccaagtaaagtaccaagggggctgtggaagcggttgggcgttttctgccacggg

SEQ ID NO: 55988 - DNA, 268 bp, Glycine max
  Clone ID: 700678758H1
ctcagccgcaaaatcaaataaaaaatctccttctcggaaatggcgtcgtcaatccaacaacaacgctcgactgcaacaagttctggatctgaaggaggaggagatccgcaaatgatcgacgagaggaagcggaagaggatgctgtcgaaccgcgagtcggcgcggcgatcgcggatgaggaagcagaaacagctggaggatttgaccgatgaagttagcagattgcaaggcgcgaacaagaagctggcggagaacataaaggcaaagg

SEQ ID NO: 55989 - DNA, 266 bp, Glycine max
  Clone ID: 700678761H1
ccctcttcttgttatcttcagccccatccttgtccctgctgcgtttgtgctgttcctggttgcttctggctttttgttctctgggggctgtggtgtggctgccattgctgctttatcttggatttacaactacgtttctgggaaccagcctgcgggttctgacacccttgactatgcaaaagggtaccttactgataaggcaagggatgtgaaggagagggcaaaggattatggaagttatgctcagggtagaattaatgaggcca

SEQ ID NO: 55990 - DNA, 268 bp, Glycine max
  Clone ID: 700678783H1
ctctaccaatctttaagttcaaattgaagaacaatgaaaatggtgatgaccaggatgccaattcagctatagatgaaggtggaattttggctgcagggacagaaaaggagcgaatgatttcaggagaagatgctgtttgttgcatttgcttagcaaaatatgcagatgatgacgagcttagagagttaccttgctctcacgtttttcacgtcgaatgtgttgacaaatggttaaagataaatgcaacctgccctctctgtaaaaatga

SEQ ID NO: 55991 - DNA, 244 bp, Glycine max
  Clone ID: 700678813H1
aagctctcaagagttttaagggagagcgcaatgggaatgagtatcttatcaatctcattgactcccctgggcacgttgacttctcatctgaggttactgctgcactccgtattactgatggagctctagttgtggtcgattgtgtggaaggagtttgtgtccaaactgaaactgtgctaagacaagcccttggagaaaggattaggcctgttctgactgtcaataagatggacaggtgcttcct

SEQ ID NO: 55992 - DNA, 247 bp, Glycine max
  Clone ID: 700678814H1
gtcctggaatgctgatgaaatcgacaaaagcattccaaggcaaagtactgcagaaagtgttagctctgataatgaggaaggtgaaaggaacaattttgaccgtgagaatattgatagagaagcagcacaagatagtggattgcattcttacaatgcattgatctcaaagggttactcatcacgaataagcaattgggatgaagagtccaggaacttggattttgatagaaagcatgatatggtggtt

SEQ ID NO: 55993 - DNA, 248 bp, Glycine max
  Clone ID: 700678835H1
attctatatcaattttggttaagagtcttgaaaaagcaagagaaaaaaaaataccaaccatggcaaccatttctgatcaacctagagggtcctactcctatggaacctcatatggagcaccctatggaaccacgtatgagaccaacaccagcattaacaacccaccttcacgccaaacagtgaagttcataactgctgccactattggcatcacactcttgctcctgtctgggttgaccctcacaggc

SEQ ID NO: 55994 - DNA, 242 bp, Glycine max
  Clone ID: 700678839H1
gttgtaattgaagagggaactagattaggtggcgagtgaagagaagatcggtgaaggagtgaggtagcaacagcactgccactgccactaccaatagcagaatgggaaccttgggcagagctttctacgccgtcggattttggatccgcgagaccggccaagccatcgatcgcctcggctctcgtctccaaggcaactacctctttcaagaacagctatctaggcatcgacctctgatgaat

SEQ ID NO: 55995 - DNA, 241 bp, Glycine max
  Clone ID: 700678842H1
agaaattggtgtcattcgttaccatatggtacatgtggatgatgtcgctagagcacatatcttcctgcttgagcatcctaatccaaaagggaggtataactgctcaccattcattgtacccattgaagagatgggtgaaattctttcagccaaatatccagaatatcaaataccaacagtagacgagctgaagggaattaaaggtgtcaagcaaccacatttaacctccaagaaacttgag

SEQ ID NO: 55996 - DNA, 243 bp, Glycine max
  Clone ID: 700678853H1
catgagcttgccaaagagttgcaaggcaagccagatctgattgtcggaaactacagtgatggaaacattgttgcctctttgttggcacataaattaggagtcactcagtgtaccattgctcatgcacttgagaagaccaaataccccgaatccgacatttactggaaaaaattggaagagagataccacttctcttgccaattcacagctgatctatttgccatgaaccacacagatttcatt

SEQ ID NO: 55997 - DNA, 242 bp, Glycine max
  Clone ID: 700678861H1
aatctgcaaaaaagatgtttggagggttgagtgtggtatcccttctggatttccactcactgttatctgcaatagcattttcaatgagatgcttatcagatatagttatgaaaagttgttgcgtcaagctaaggctcctagtatgtttctccagtcttttaaaaattttatttctttgtgtgtttatggagatgataatttaattagtgttcatgagtatgttaagccatattttagtggtt

SEQ ID NO: 55998 - DNA, 251 bp, Glycine max
  Clone ID: 700678863H1
ctcattgagacatggaaccctaacaacaagccattccagtgtgccggtgttgccctctctcgctgcaccctcaaccgcaacgcccttcgtagaccttcctacaccaacggtccccaggaaatctacatccaacaaggtaagggtatttttggcatgatatacccgggttgtcctagcacatttgaagagcctcaacaacctcaacaaagaggacaaagcagcagaccacaagaccgtcaccagaagatcta

SEQ ID NO: 55999 - DNA, 94 bp, Glycine max
  Clone ID: 700678956H1
ctcctggtgggcttccttgggcctgggcccggcccagaaccatcatccctggcccagtaactgccctgctcggggtcttcacgggttccacaca

SEQ ID NO: 56000 - DNA, 269 bp, Glycine max
  Clone ID: 700678987H1
attttgttggagatctcgtctttgaagtttctaagatgacttctccctacattaaatgtacaatctctttcttcatagcatttggaaatttggctgatgacaccatcaattttgaggcttttccccacaagctggtgcagtttggagagattcaggaaaaagttgtattgaaattttcacaagaggaatttcttacagcttggtcaactcaggtgcgtcctgcaacaactctgttggctgatgggtgtccatatttgtatgctatggtg

SEQ ID NO: 56001 - DNA, 103 bp, Glycine max
  Clone ID: 700679001H1
attggtccttaaacactcatcagtcatcaccatggccaagctagttttttccctttgttttctgcttttcagtggctgctgcttcgctttcagttccagagag

SEQ ID NO: 56002 - DNA, 96 bp, Glycine max
  unsure (1)..(96): unsure at all n locations
  Clone ID: 700679003H1
gggaaacttggnaangctacctttnnggnaggtntcantacttacattgccaactttgggagnaggccnatgctgcnantcacaattaattttgag

SEQ ID NO: 56003 - DNA, 101 bp, Glycine max
  unsure (1)..(101): unsure at all n locations
  Clone ID: 700679004H1
gtgaaaggacgcacctgctgttggcttgttgttcaaggatggcaatttgtaagaaagatgtntggagagttgaatgtggaatcccttctggatttccgctc

SEQ ID NO: 56004 - DNA, 96 bp, Glycine max
  unsure (1)..(96): unsure at all n locations
  Clone ID: 700679005H1
attcctagtgtctngnctacaactgntgaaagattggnaggcacagaacatgagggatataattcctttgtccntggtggannnncaaaaatatnc

SEQ ID NO: 56005 - DNA, 109 bp, Glycine max
  Clone ID: 700679006H1
ggtcatcgttgggatctccataacgccggattctgctaaaatacgcttgatccatatgggccttcctcgacgcacttgtgggatcgaacaccgtcgcccggacccaagg

SEQ ID NO: 56006 - DNA, 102 bp, Glycine max
  unsure (1)..(102): unsure at all n locations
  Clone ID: 700679007H1
gtcttcttctcnaanatangaaaccctaacttctgaacctttcaccgcatcgccaccggattccctatgctaccactantncaaagaaaagnaaatgagtgg

SEQ ID NO: 56007 - DNA, 69 bp, Glycine max
  unsure (1)..(69): unsure at all n locations
  Clone ID: 700679008H1
caatcatggctttgcccagatncagcaaacngtcgatnaccctagtttcaaactcgtcatcgtcggtga

SEQ ID NO: 56008 - DNA, 153 bp, Glycine max
  unsure (1)..(153): unsure at all n locations
  Clone ID: 700679009H1
agggtcttggattattaccacggcttggaaatttggaaataaattaccaaagtntaattngttccagggccatggggatnaaaattgccagccctccctaagaaattgggggggtggatttccaaatggtccctgggaaattgaatggggcag

SEQ ID NO: 56009 - DNA, 106 bp, Glycine max
  Clone ID: 700679010H1
gcgagagagcgaagaaagtgaagattctgagttacgaagacataagaataagaacccttttcctctttcggcttctaaacaggttcgaaactctcttccaaaaacc

SEQ ID NO: 56010 - DNA, 106 bp, Glycine max
  unsure (1)..(106): unsure at all n locations
  Clone ID: 700679011H1
ctccattggtccttaaacactcatcagtcatcaccatggccaagctcagtttnttccnctttgttttctggcttttnnagtggctggctgcttgcgctttcagttc

SEQ ID NO: 56011 - DNA, 101 bp, Glycine max
  Clone ID: 700679012H1
agtttaatcttgtggttcgtcagaagtttttaaattttgtgaggttcattatgaagaaaagggacaagcttagctgtcaagttggaatcaacccatactcc

SEQ ID NO: 56012 - DNA, 94 bp, Glycine max
  unsure (1)..(94): unsure at all n locations
  Clone ID: 700679013H1
cttcgggagaaattatatgttggncactgccgtagggtactctcttgatagttttgggactctattctgttctctggggaaagagtgaaaaggt

SEQ ID NO: 56013 - DNA, 108 bp, Glycine max
  unsure (1)..(108): unsure at all n locations
  Clone ID: 700679014H1
cttaattattaacacttccttagttcaatatggggaagcccttcactactgctgcngcttncttccctttgcgtgctaactcttgncgagtgcatgcnttgccnatta

SEQ ID NO: 56014 - DNA, 108 bp, Glycine max
  Clone ID: 700679016H1
caacatctctctgaaaatcactcaaacgcagaagagagagggagagaatcgaaacagccctacgcagcacagcacaatgcgcaacgcaagcgattaataataattcgg

SEQ ID NO: 56015 - DNA, 100 bp, Glycine max
  unsure (1)..(100): unsure at all n locations
  Clone ID: 700679017H1
cctttggccgatgcgcaactcgcaataacaatcttggatcttgtgcaacaagctgccaactacaagcaactaaaaaagggtgntaatgaagcgactaaga

SEQ ID NO: 56016 - DNA, 99 bp, Glycine max
  Clone ID: 700679018H1
cttattaacactttccttagttcaatatggggaagcccttcttcactctctctctttcttccctttgcttgctactcttgtcgagtgcatgctttgcta

SEQ ID NO: 56017 - DNA, 99 bp, Glycine max
  Clone ID: 700679019H1
gaacgctcgctcgcactgtccagatcttaatcaagaggagtgagttttgtttttccagccatgacgccgctgatcctgcatgctgggaaaaccaacaaa

SEQ ID NO: 56018 - DNA, 99 bp, Glycine max
  Clone ID: 700679021H1
ggtgaactcagtgagtgagtgagagatggcggagagtgaagtggaggtgattcattcttggtctgctccaagatccctcagtactagtctcatgtattg

SEQ ID NO: 56019 - DNA, 89 bp, Glycine max
  Clone ID: 700679022H1
tttttacagtagctaatgctagtcaccgaacttagtcaatgagctagaatgggttataaagatatctatagatatatatagatatattt

SEQ ID NO: 56020 - DNA, 108 bp, Glycine max
  unsure (1)..(108): unsure at all n locations
  Clone ID: 700679023H1
tctctctctccattccgtgttttcagctccggtaacctncttccttacttccgccgccgttgctattcttccggccgtgaaccttccatcccttcaacgccccaacag

SEQ ID NO: 56021 - DNA, 101 bp, Glycine max
  unsure (1)..(101): unsure at all n locations
  Clone ID: 700679024H1
tttgaagangaanaggaaggtngcganngggatggagnagaaggcntggcggattcttgcctaaccagctngggcanttgaganagatggacgacgcggtt

SEQ ID NO: 56022 - DNA, 98 bp, Glycine max
  Clone ID: 700679026H1
gtcttacgttgctcataacgtaaatcagccccaagagaaagatttgttggagggaaatttttcctttgatattaaatctcgttctagattggaaaaag

SEQ ID NO: 56023 - DNA, 98 bp, Glycine max
  unsure (1)..(98): unsure at all n locations
  Clone ID: 700679027H1
gttttagttactgatcctagggaactagagaaaattcgtcaaagagaggccgnnnatgactaaggaacgcattgaaaaactgctgaaggctggagcta

SEQ ID NO: 56024 - DNA, 112 bp, Glycine max
  Clone ID: 700679029H1
gcctctacaatggagcaacgacaaggacacatttcaacgtcgccgattcttcactttctgcttctcaaacgaggaacaatagaggcagaccttgttcaatgcttcttaaagg

SEQ ID NO: 56025 - DNA, 106 bp, Glycine max
  unsure (1)..(106): unsure at all n locations
  Clone ID: 700679030H1
agcgagcgagcgagcagtttcaaagagaggatttgggattgggaaggcgagggattgcgctgcgtnctcttncctgcttctnctttncgattcattccctcattca

SEQ ID NO: 56026 - DNA, 101 bp, Glycine max
  Clone ID: 700679031H1
ggtggccttttccctctctttctctggaaaattcccccgattttctcgagaaagtgaaacgggaattatgagctttcaggacatcgaggctgggcggccct

SEQ ID NO: 56027 - DNA, 100 bp, Glycine max
  unsure (1)..(100): unsure at all n locations
  Clone ID: 700679034H1
ancagnccacaagaccgtcaccaggagatcctatanctttcagagagggtgatttgatcgcagtggcctactggtgttgcatggtngatgtncaacaatg

SEQ ID NO: 56028 - DNA, 94 bp, Glycine max
  unsure (1)..(94): unsure at all n locations
  Clone ID: 700679035H1
gtcgcagcaaaaccaaaccacatattaacttgtttgctctaagtcatggctctgatcttgcacgcaaccnaagcaagccaagaatgctttcaag

SEQ ID NO: 56029 - DNA, 97 bp, Glycine max
  Clone ID: 700679036H1
caggaatgtgttcccaggacctattgtgttttaaatccacaaaatccttttgtgttaaataggtggatggggaaactgacttttccccagggcactt

SEQ ID NO: 56030 - DNA, 97 bp, Glycine max
  unsure (1)..(97): unsure at all n locations
  Clone ID: 700679038H1
caattccttcacttgcagcactgttgcatcatcatcttcattgcaaaaccctaaacttcaccttcaaccatgaccacacaagtaccancacacagtg

SEQ ID NO: 56031 - DNA, 89 bp, Glycine max
  unsure (1)..(89): unsure at all n locations
  Clone ID: 700679039H1
gtcttccatagccccccaaaaatgaagagcaccatcttctttgctctctttcncttttgtgccttcaccacctgcatacctaccttcag

SEQ ID NO: 56032 - DNA, 97 bp, Glycine max
  unsure (1)..(97): unsure at all n locations
  Clone ID: 700679040H1
attctaatcccacttnggaagatatcccacattcagcttgggnccttnttngctgggacagtgaagaaaactttgccnaataangtgttctgcngaa

SEQ ID NO: 56033 - DNA, 99 bp, Glycine max
  unsure (1)..(99): unsure at all n locations
  Clone ID: 700679041H1
atctgaatggcaaacagtgtgatctatgtgacttcgaggacaaggaaaggttagagttgtgaactgccaagggaatgncagtgttcgacggtgagctta

SEQ ID NO: 56034 - DNA, 98 bp, Glycine max
  unsure (1)..(98): unsure at all n locations
  Clone ID: 700679042H1
gcttttccaaacaagattgtttttgatgataaagcttgtgttggctaacacacaagaattctttgatggaaattttccagtggattcttggttacnca

SEQ ID NO: 56035 - DNA, 87 bp, Glycine max
  unsure (1)..(87): unsure at all n locations
  Clone ID: 700679044H1
cttctcccattgtcctttgaacacttcattcacccatggccaagcttgttctattccctttntttcccttcttttcagtgngctgct

SEQ ID NO: 56036 - DNA, 98 bp, Glycine max
  Clone ID: 700679046H1
ctctgaaccaacaaattaataaacttatcccagtccaaatacatgtggttgataaagtgttggtaactagagttggattgcactagccattagtggag

SEQ ID NO: 56037 - DNA, 100 bp, Glycine max
  unsure (1)..(100): unsure at all n locations
  Clone ID: 700679047H1
gnnaaaacagatcaagcaaaactaggccaggtgacagaccatgtagacttgctggggaaaattagatggggaatggttaggggctcgttcatctaaaacc

SEQ ID NO: 56038 - DNA, 97 bp, Glycine max
  unsure (1)..(97): unsure at all n locations
  Clone ID: 700679050H1
caagaaacggggttgaggaaaatatcngcaccttgaagctttcacganaacatngctcgcccttcanggcgctgacttcnacaaccctaaagctggt

SEQ ID NO: 56039 - DNA, 93 bp, Glycine max
  unsure (1)..(93): unsure at all n locations
  Clone ID: 700679051H1
ttttggtttctcttttggttcctttcttatatgccatatttgcatctgatgcagcaattcctctgnaacggntatnatttttgtgaaggggtt

SEQ ID NO: 56040 - DNA, 95 bp, Glycine max
  unsure (1)..(95): unsure at all n locations
  Clone ID: 700679052H1
cgttagtcagataatacccacatccgaaaccaaatgggtttgctctganaaccgnaatgggtgacgancanccgttcgacnaccgccgtctccgg

SEQ ID NO: 56041 - DNA, 80 bp, Glycine max
  unsure (1)..(80): unsure at all n locations
  Clone ID: 700679053H1
ctttagttcgttgaacaatgtgatgatgacggtgtatggnaantcttatgantnttacganggtnagggcttggngcttg

SEQ ID NO: 56042 - DNA, 100 bp, Glycine max
  unsure (1)..(100): unsure at all n locations
  Clone ID: 700679056H1
gaagcagcagagggaggagcggcattaaaaatgcagatctttcgtgaaanccctaaacggggaagaccataaccctncgaggtncgaaagcagcgaccac

SEQ ID NO: 56043 - DNA, 93 bp, Glycine max
  unsure (1)..(93): unsure at all n locations
  Clone ID: 700679057H1
cttaattattaacacttccttagttcaatatggggaagcccttcantctctctctntcttccctttgcttgctactcntgtcgagtgcatgct

SEQ ID NO: 56044 - DNA, 97 bp, Glycine max
  unsure (1)..(97): unsure at all n locations
  Clone ID: 700679058H1
tcccctttcacttcacaccagtgctcattttccacttccccatacnnctcccttttaccattctacctggcgttaaancccccctagaatcctnccg

SEQ ID NO: 56045 - DNA, 93 bp, Glycine max
  unsure (1)..(93): unsure at all n locations
  Clone ID: 700679059H1
ctctgtttctgtctctgtgtttgcggctgaggattccgaacgagcgacnttcttcgtttctcgcaaagtttaagtcatcatgggtaaggaaaa

SEQ ID NO: 56046 - DNA, 93 bp, Glycine max
  Clone ID: 700679060H1
cggcccagacccatcatccctggcccagtaactgccctgttagggatctttactggctccacgcctcaccgtgctttatccaaactcgcccgt

SEQ ID NO: 56047 - DNA, 95 bp, Glycine max
  Clone ID: 700679062H1
atactatgatgagagtgcggtttcctttgttggtgttgctgggaactgttttcctggcatcagtttgtgtctcattaaaggtgagagaggatgag

SEQ ID NO: 56048 - DNA, 97 bp, Glycine max
  Clone ID: 700679063H1
gttttcctggcttcagtttctgtctcatttggcattgcttactgggaaaaagagaaccccaaacacaacaagtgtctccagagttgcaatagcgagc

SEQ ID NO: 56049 - DNA, 98 bp, Glycine max
  Clone ID: 700679064H1
gaacacttttgtaccagggctgattgatcttgccatcgcgaggaacactttgattggtggagatgacttcaagagtggtcagaccaaaatgaaatctg

SEQ ID NO: 56050 - DNA, 94 bp, Glycine max
  unsure (1)..(94): unsure at all n locations
  Clone ID: 700679065H1
gcgatagggatggcgaagttcaatgtggtgcagaagaaaagaagagctctaatagcagagaagaagagacagcttcncggagaccctttaaccg

SEQ ID NO: 56051 - DNA, 92 bp, Glycine max
  Clone ID: 700679066H1
ggacaaaactggagattggatcacacttatacaaaattctccaattagtaacttgttgagagttgctgcttggaagaaaggttgtttaatgg

SEQ ID NO: 56052 - DNA, 92 bp, Glycine max
  unsure (1)..(92): unsure at all n locations
  Clone ID: 700679067H1
gaaataccactacttttaacgtnattttacttattccgtgaatcggaagcngggcactgcccctctttttggacccaaggtcggcttcggcc

SEQ ID NO: 56053 - DNA, 93 bp, Glycine max
  Clone ID: 700679068H1
attttcaccccctcttgccgttcatctctgttatttgagtcaaaggattatcgccatgtcagttgcaccagttgacagtattccctcattaag

SEQ ID NO: 56054 - DNA, 93 bp, Glycine max
  unsure (1)..(93): unsure at all n locations
  Clone ID: 700679069H1
tctctctctccattccgtgttttcagctccggtaacctctccttctccgccgccgttgctatantccgccgtgaccttccatccctcaacgnc

SEQ ID NO: 56055 - DNA, 94 bp, Glycine max
  unsure (1)..(94): unsure at all n locations
  Clone ID: 700679070H1
gtgcagtgaaagcagtagtagnagacgacnacacgagttacgcacagtacccggtgccgccaccaccaccattggtttcagtcanctaatggnc

SEQ ID NO: 56056 - DNA, 93 bp, Glycine max
  Clone ID: 700679071H1
ccggaactcttgggatccaccaaatccacacatcggaattaacgtcaattctatcagatccattcaaaacgacgtcttgggatttggccaaca

SEQ ID NO: 56057 - DNA, 92 bp, Glycine max
  unsure (1)..(92): unsure at all n locations
  Clone ID: 700679072H1
acaacacncggaganggaacctcagcaacccggtgagaaggaggannacgangatgagcaaccacgtccnatcccattcccacgcccacaac

SEQ ID NO: 56058 - DNA, 92 bp, Glycine max
  Clone ID: 700679073H1
gtgagtgaaagtgaaacagaaaaaatcacccttgaacctggggacatgatacacataccagctggcaccccactgtacatcgttaacagaga

SEQ ID NO: 56059 - DNA, 91 bp, Glycine max
  Clone ID: 700679074H1
caataaaggaaattaggcatgaccctcttgttgagtatgctctgcctatttgaaaatttccacacctcttttaattatcgtaatgatgtgt

SEQ ID NO: 56060 - DNA, 93 bp, Glycine max
  unsure (1)..(93): unsure at all n locations
  Clone ID: 700679076H1
gtcgcagcaaaaccaaaccacatattaacttgtttgctctaagtcatggctctgatcttgcacgcaaccaaagcaanccaagaatgctttcaa

SEQ ID NO: 56061 - DNA, 93 bp, Glycine max
  unsure (1)..(93): unsure at all n locations
  Clone ID: 700679077H1
ctcttcttctcttgcggctaggngttttagcgcanttcttctagatttaaggaagatgggtaaggaaaaggttcacatcagtattgtggtcat

SEQ ID NO: 56062 - DNA, 93 bp, Glycine max
  Clone ID: 700679078H1
tttcatcaactgctaagctaactgaactctctctcgttgttcccttggcctctcgctctataaatacacattcgcatcattctctcacttgca

SEQ ID NO: 56063 - DNA, 94 bp, Glycine max
  Clone ID: 700679079H1
gttggtgacacagaatctctcttttgttgttgctggggccactgtagttgctttactactcaactcatctttgaagttgacaaatttctcagct

SEQ ID NO: 56064 - DNA, 92 bp, Glycine max
  unsure (1)..(92): unsure at all n locations
  Clone ID: 700679081H1
agaaaagcagttataaaaaaaattgaaaaaattaaaaaggggcttgtaatttcagagacaaatattcattcaanccaaaacaacttatgata

SEQ ID NO: 56065 - DNA, 89 bp, Glycine max
  Clone ID: 700679082H1
gtagtttcttccctatttttggttcataactcagtttgtaactatgactgctgaggttatggctcaagaggagacacaagcagctgagg

SEQ ID NO: 56066 - DNA, 91 bp, Glycine max
  Clone ID: 700679083H1
aaatgaccaagttcacaatcctcctcatctctcttctcttctgcatcgcccacacttgcagcgcctccaaatggcagcaccagcaagatag

SEQ ID NO: 56067 - DNA, 88 bp, Glycine max
  unsure (1)..(88): unsure at all n locations
  Clone ID: 700679084H1
ccttggtcggcgccgtgggtgctctccggcggccatattcgtcgggaggnggcggcatctcctccgccgtgaactcaatgctcctccg

SEQ ID NO: 56068 - DNA, 70 bp, Glycine max
  Clone ID: 700679086H1
gccgcacttcgaggcagacaatgaatggaatacaatacaccatcaatacctagttccaaagaacgtttta

SEQ ID NO: 56069 - DNA, 90 bp, Glycine max
  Clone ID: 700679087H1
atcaaagtttcttcctttctctgctctttgccttctctgacacatttggtgccttgtagagcgtgttttggcaggaaggtggtatggcga

SEQ ID NO: 56070 - DNA, 90 bp, Glycine max
  unsure (1)..(90): unsure at all n locations
  Clone ID: 700679088H1
gtgactcgaggacaaggaaaggttagagttgtgaactgccaagggantgcagtgttcgacggtgagcttaggaggggacaattgctggtg

SEQ ID NO: 56071 - DNA, 89 bp, Glycine max
  unsure (1)..(89): unsure at all n locations
  Clone ID: 700679090H1
accaaactttctttagctatctttttctnttngcttttagccttattttcaaacctagcctttggcaaatgtaaagaaaccgaggtaga

SEQ ID NO: 56072 - DNA, 91 bp, Glycine max
  unsure (1)..(91): unsure at all n locations
  Clone ID: 700679091H1
cacgagtncnagccagagcttgatattattnccaatgcnagntgcacaaccaacngncttgccccacttgccaaggttatcantgatcagg

SEQ ID NO: 56073 - DNA, 90 bp, Glycine max
  Clone ID: 700679092H1
gaaataccactacttttaacgttattttacttattccgtgaatcggaagcggggcactgcccctctttttggacccaaggtcggcttcgg

SEQ ID NO: 56074 - DNA, 100 bp, Glycine max
  unsure (1)..(100): unsure at all n locations
  Clone ID: 700679093H1
cgggggacaacgaggctttctgcgcacgggagaagaagttcaaggttttcatgggagaattaacggngaggagctactcccacagagggaggagtatttg

SEQ ID NO: 56075 - DNA, 106 bp, Glycine max
  unsure (1)..(106): unsure at all n locations
  Clone ID: 700679094H1
aggtcccataggcagcggatggggaatcggatctttaagggctggggggtaagagcaaaaaagaccaaaaagangnagcacccaaaatcccaatggacatctacct

SEQ ID NO: 56076 - DNA, 83 bp, Glycine max
  Clone ID: 700679095H1
ctgtggcagaggtcacaggaagcaacgttgtgtcggttgcggaggacgaactcatgagaatcctcattctaatgaggaatttc

SEQ ID NO: 56077 - DNA, 94 bp, Glycine max
  unsure (1)..(94): unsure at all n locations
  Clone ID: 700679096H1
gtctttgaacactcatnancatggccaagcttgtnctntccctttggatccnncntttcagtggctgcttcgctctgagagagcaggcacagnc

SEQ ID NO: 56078 - DNA, 275 bp, Glycine max
  Clone ID: 700679104H1
catttatcaactcactcatcaatctcgtttgttctcactaactattacttcatcatgtcgtcgagcacagttggtcaagtcatcaaatgcaaagctgcggtttcatgggaggcagggaagccacttgtgattgaagaagtagaggtggcaccaccacaagctggtgaagtgcgtttgaagatcctctacacctctctttgccacactgatgtttacttctgggaagccaagggccaaactccattgtttcctcgtatatttggtcatgaagctgg

SEQ ID NO: 56079 - DNA, 268 bp, Glycine max
  Clone ID: 700679126H1
ataaaattcttccaccaagttatgggtttccttgtgttgcttcttttctccctcttaggtctctcttctagttccagcatatcaactcatcgttccatattggaccttgacctaaccaagtttaccacacagaaacaggtgtcttcactgttccaactatggaagagtgagcatggacgtgtctaccataaccacgaagaagaggcaaagagacttgagattttcaagaataacttgaactatatcagggacatgaatgcaaacagaa

SEQ ID NO: 56080 - DNA, 268 bp, Glycine max
  Clone ID: 700679129H1
caaacccgtgttctgatgcatggagtttggaatttctgaagcgtaccggatttcattgtgatatcatttgtgtcactggatggactgccaccccaatgcaggatgttcaggttacaattgattggtttatttcctctcaggaatgtgttcccaggacctattgtgttttaaatccacaaaatccttttgtgttaaataggtggatgggaaaactgactttccctcagggcacttcccgaagtgttaagagaatgcctctttctatagg

SEQ ID NO: 56081 - DNA, 190 bp, Glycine max
  Clone ID: 700679140H1
tgttactgctagcgtgttgcatgaggccatctaaatgtgacagatcgaaggaagaaagtgtaataagacgactctcactactcgatcgctagtgattgtcattgttatatataataatgttatctttcacaacttatcgtaatgcatgtgaaactataacacattaatcctacttgtcatatgataaaaa

SEQ ID NO: 56082 - DNA, 275 bp, Glycine max
  Clone ID: 700679149H1
gatttgtgcgttagggaaaaaaataaataaaaaatagatatcatggcagcgagtgggggttgcagcagcagcttcttaacattgtcttgtgcaggtgcggcgcaaaatcaacacgcgtcacaccctagaacgttttttggagttcctcacaagaatcagagaaagaggaaaacaccgcataggttagttgtggttgcggtgactcaaggctctgctgaatcaagcaagtccgacgaaaaaatcccttcgtgggccaaaccggactccgatgaacc

SEQ ID NO: 56083 - DNA, 273 bp, Glycine max
  Clone ID: 700679150H1
tttctctctcgctcgcaaacgcaaataataaaaaacaaggttttagccatggcatcgaagcggatcttgaaggaactcaaggatctccaaaaggatcctcctacctcatgcagcgccggtcctgttgctgaagacatgtttcactggcaagcaacaattatgggtcctccagacagtccttatgctggaggtgttttcctagtcactattcatttccctccagattatccctttaagccacccaaggttgcattcaggacgaaggtatttcac

SEQ ID NO: 56084 - DNA, 270 bp, Glycine max
  Clone ID: 700679204H1
atgagggactcagagcaaccctcagatgccaaaatggcatgatggcgagacagcatccttgcaatggggcggtatccgtctctatcattaaggttgtaatatccagcagtaagctccgcagctcgtctatcaaaagaggaggcaaactcaattgctcagaaacctggtgtggtgtctgttttcctgaccccattctgaagctccacactacacgttcatgggatttcctcaaaagccaaactcgtgtcaatatcgacaccaaaccaaata

SEQ ID NO: 56085 - DNA, 266 bp, Glycine max
  Clone ID: 700679225H1
aaacagaaaaaatcaccctagaacctggagacatgatacacataccagcaggcacaccactgtacatcgttaacagagatgagaatgagaagctcctccttgccatgctccatatacctgtctctactcctggaaaatttgaggaatttttcgggcctggaggacgagacccagaatcgtcctctcagcattcagctggaatgtgctgcaagctgcgctccaaaccccaaaaggaaagttagaaaggctttttaatcaacagaacg

SEQ ID NO: 56086 - DNA, 263 bp, Glycine max
  Clone ID: 700679239H1
caaccataaacaatatgtgtgcatatgggctcaatcctggtatttcaggttctcgtcttttgggcaccattcctcagtccatttcacagcaaactgtttggaatcaaatggcaacagtgagaacaccattgaattttgattctagcaagcagagcttttgtcaattttctattgacttctcggtggaggaattttagtggacaaaactggagattggatcacacttatacaaaattctccaattagtaacttgttgagagttg

SEQ ID NO: 56087 - DNA, 264 bp, Glycine max
  Clone ID: 700679254H1
gagctaaagagggtagatgcaaagccaataagatacaagacaaggttacaattgacggatatgaaactctaataatgtcagatgagagtacagaatcagagacagagcaagcgttcttaagcgccatccttgagcaaccaattagtgtctccattgatgcaaaagattttcatttatcaccgggggaatttatgatggagaaaactgtacaagtccgtatgggattaatcactttgttttacttgtgggttatggttcagcgga

SEQ ID NO: 56088 - DNA, 261 bp, Glycine max
  Clone ID: 700679256H1
ctctgcagcaacaagatgtggaaccaaccattgggaaaaaccgatttggaaagcggttctcgcccgctgtatccgatgatgcttgagagccccgaactgcgctggtctttcatcagaaaagtatactccataatcgccatacagttgctcgtaaccatcgtcgtcggcgccgtcgtgtcaccgtccgcccaatcagcgtcttcttcgccaccaccggcgccggattggctctctacatcgtcctcatctttgtccccttca

SEQ ID NO: 56089 - DNA, 197 bp, Glycine max
  Clone ID: 700679502H1
ctgcattacaggctattggacaatactgcaatcagctacaatctttgaaccttggatggtgtgataatgttggcgatgttggagtgactactttagcatatgggtgtcctgatcttaggatagttgacttgtgtggctgtgtccgtataacagatgacagtgtgattgctttggcgactagatgcccccatctgagg

SEQ ID NO: 56090 - DNA, 165 bp, Glycine max
  Clone ID: 700679504H1
caactcgtaaggcaaccatgaggggcattctttctgtaaggacagccttggttcaacatcgtagtgagaaattgggccttggtttcaggctatttagcactcagggtgcttccactgctagtaccccacagccgccgccaccacctccaccaccagagaaaaccc

SEQ ID NO: 56091 - DNA, 173 bp, Glycine max
  Clone ID: 700679529H1
tctctccattgtctttgaacactcatcaccatggccaagcttgttctttccctttgtttccttcttttcagtggctgcttcgctctgagagagcaggcacagcaaaatgagtgccagatccaaaagctgaatgccctcaaaccggataaccgtatagagtcggaaggtgggtt

SEQ ID NO: 56092 - DNA, 152 bp, Glycine max
  Clone ID: 700679533H1
aattgctctcttgcaaattggatactgttactggtcaatattatcctgagtgggctccaattaattgtcgagttcatcgacaaccaattcacatcactgaaggaaattatgtcagaaagcaagatgtcagcattgaatatgatgcatgtaca

SEQ ID NO: 56093 - DNA, 159 bp, Glycine max
  Clone ID: 700679542H1
gggattgctaaaggtatagcatatttacatgcatacaaagcaaacaaaccagctcttgttcaccaaagcatctcagctgagaaagtgctcattgatcagcggtacaacccattgctttcagattccggcctgtacaagcttcttaccaatgatgttgtc

SEQ ID NO: 56094 - DNA, 112 bp, Glycine max
  Clone ID: 700679558H1
cttcttttcagtggctgcttcgctctgagagagcaggcacagcaaaatgagtgccagatccaaaagctgaatgccctcaaaccggataaccgtatagagtcggaaggtgggt

SEQ ID NO: 56095 - DNA, 122 bp, Glycine max
  Clone ID: 700679572H1
cggaaaaagaaaagacgaacggagactctcctctttgttcacagcaatgcagacgctacttctgccggcaacatgcgccggcagcttcacggcggttccgctctcagcctctgccgtcgccg

SEQ ID NO: 56096 - DNA, 260 bp, Glycine max
  Clone ID: 700679585H1
gcaagttggaaactcaacttactgcttacatcacaaatatgtaagatttggtggatttagtgtgttgaaaggccagaaactaaccacggcgaatgcaaaacaagattgttttgcttgactgacttggcagtacaggacatcagaacagactggggactatcagttgataatggtgaatatgtgcttcctttcaagatgtataatcagagccacatcaatgagcaggtagtgacctaatcaccttcaatacttgcaatcat

SEQ ID NO: 56097 - DNA, 259 bp, Glycine max
  Clone ID: 700679588H1
agcaaatattgcctattccgcaatatggcggaaaatgcttcgattgagctgaacaagtttgtgttcttttgtttgttggtgctaatacaagtggcagtttctgaaatcatttttgaagagcgttttgatgatggatggcgaggtaggtgggtgaagtcagactggaaaagcagtgaaggcaaagcaggttcattcaagcacacagctggaaaatgggccagtgatccagatgataaaggtattcaaacatccagtgatg

SEQ ID NO: 56098 - DNA, 119 bp, Glycine max
  Clone ID: 700679590H1
ttttctttcgccagggctttgttaaaattgacagggatgattccagcctacctctggttacatctcctatcagacatgccacccaggaaactataaagttactgcctttggaagcccct

SEQ ID NO: 56099 - DNA, 121 bp, Glycine max
  Clone ID: 700679593H1
agatcacatagcagaatggcttctactcaatgtttcttgcaccaccatgctcttaccacccctgccagatccccatcacaacgcatcatggttagcaccaagcctaaccagcttgtttgca

SEQ ID NO: 56100 - DNA, 256 bp, Glycine max
  Clone ID: 700679608H1
cataaagtgaaaggagccatgggttgtggaggagataaggccaataatgatgctaaaaataacatgggcgtgaaaatggaacatggaagggacaaagtagccgaaacttttgaccaggctaaacgtgaagtgggtgaagcatatgtatcagcaaagaataccatgactgaagaggccaaagctaagtacgaggctgcaaaggagaaggcttcggatgcaacaggtgatttaggagctaagatgaggaacaccccaa

SEQ ID NO: 56101 - DNA, 251 bp, Glycine max
  Clone ID: 700679613H1
atggagagtacttgtggtacatgtaagggaactggcaaaattgtatcgaatttctgcaagtcatgcaaaggtacaaaggttatcaaaggaacgaaatctgtcaaattggatattatggctgggattgacaacaatgaaactataaaggtttatagaagtggtggtgcagatcctgatggagataatcctggtgatctttatgttaccatcaaggtcagggaagatcctgtcttccgtagagaaggatctaa

SEQ ID NO: 56102 - DNA, 253 bp, Glycine max
  Clone ID: 700679620H1
tgaaatggttggagctaaatctcgtaatatctcttatttaaaagggaaagtagcttcttggattggaattcctacctcggttgccataccatttggagttttcgaacatgttctttctgataaaccaaaccaggcagtggctgagagggtcaataatttgaaaaagaagttaattgagggagacttcagtgttctcaaggagattcgtgaaacagttctacaattgaatgcaccatcccatttggtagaggag

SEQ ID NO: 56103 - DNA, 252 bp, Glycine max
  Clone ID: 700679623H1
gggattatggtgaactagatggggatagttggactgatcaagaaactttgctgcttcttgaagcaatggagatttacaatgagaattggaatgaaattgctgagcatgttggtaccaagtcaaaagcacaatgcattcttcattttctccgtctacccatggaagatggaaaattggaaaatattaacgttccaagcatgtctttgtcatccaatgcaataaatagagatcatagtggaagactgcattgtt

SEQ ID NO: 56104 - DNA, 250 bp, Glycine max
  Clone ID: 700679639H1
ggcagcataacaaacaaaatggctttcatgatttccagagctgaatcagaggcagagaagtctagccttaaacacatggaagacaaggactcgaccaacacacttgatggcgtctcaagccagctccagttgaagtcctcattgtcatccaaagcctcggcgcaaaccctgaacaaacaacaagttctcaatcgcattcgacaccgtaagtccttaaacagaatcaaaggcgcttttgagggtcttttgg

SEQ ID NO: 56105 - DNA, 246 bp, Glycine max
  Clone ID: 700679644H1
aaacagtatccatccacagaacccgtggaagaaaaactcacccaactccacttctatttccataacaacataacgggggaacacccaactgctatgaaaactgttttgcctcctaaggggtccattcatggttttggggctacttacatgatggatgaccctctaactgaaggaccaagtccaacttcaaagcttgtgggaagatctcagggaatatacgctttggcttcacaacatgagcctggg

SEQ ID NO: 56106 - DNA, 250 bp, Glycine max
  Clone ID: 700679651H1
gcaagagaaaaaataccaaccatggcaaccatttctactgatcaaccaagaggatcctactcctatggaacctcctatggagcaccctatggaaccacctatgagaccaacagcagcattaacaaccctccttcacgccaaaccgtgaagttcataactgctgcaactattggcatcacactcttactcctgtctgggttgaccctcacaggcactgtcataggtttgatcattgcaacccctcttcttg

SEQ ID NO: 56107 - DNA, 243 bp, Glycine max
  Clone ID: 700679658H1
gccagctggtggctaactacaactcacttcaggccctgaatctgcttggaaatccaattcaaagcaacatcagtgatgatcagctgcgcaaagcagtttgtggtcttcttccaaagcttgtttacctgaacaagcaatctatcaagactcaaaggggacgagaaatactcactgatagtgttgccaaagctgcacttggtaacagcagccggacctcctacagaagagcactaaagaaaggtg

SEQ ID NO: 56108 - DNA, 243 bp, Glycine max
  Clone ID: 700679670H1
aactgccccaagattcatcaagtgcgtgaccgttggtgatggagctgtagggaagacctgcatgctcatttgctataccagcaacaaattccccacggactatatccccactgtgtttgataatttcagtgcaaatgtggttgttgaaggcataactgtcaacttaggcctttgggatacagctgggcaagaggattacaacaggctgaggcccttgagctacaggggggcagatgtctttgt

SEQ ID NO: 56109 - DNA, 246 bp, Glycine max
  Clone ID: 700679672H1
gtgcagtggtatcaagaagggctgaatggcgacaacaaggactctcagatatggaagaaggccaaacctttgattgaatggcttcaaagtgcggaatcagaaacagaggaagagtaatctgcacgaatagtctttcatttcagtttctttacttgtgtcttttatttccaataaagggtcttgctgtagttggcccattgagcgttgttccgtgtgcctgtttttgtctggatttgagtaacatta

SEQ ID NO: 56110 - DNA, 253 bp, Glycine max
  Clone ID: 700679691H1
gcaagcagagcttttgttaattttctattgaccttctcggtggaggaattttagtggacaaaactggagattggatcacacttatacaaaattctccaattagtaacttgttgagagttgctgcttggaagaaaggctgtttaatggttaagattgtgatgtctggaaatgcagcagtcaaaaggagtgattgggcctcattggtacaagtctttttaacaaacagcaacagtacagagcattttgatgcttg

SEQ ID NO: 56111 - DNA, 259 bp, Glycine max
  Clone ID: 700679693H1
ctccgcagcagccacacttcttcgccgtttcagctgaagagccatccgcaggtaagcaatggttaagcataataatgttatccccaatgggcacttccggaaacactggcaaaactatgtgaagacttggtttaatcaaccagcccgaaagaccagaagacggttggctcggcagaagaaggctgtcaagattttccccaggcctactgctggatctctcaggcctattgttcatggccagactctgaaatacaacatg

SEQ ID NO: 56112 - DNA, 137 bp, Glycine max
  Clone ID: 700679708H1
gtacaagggaccaactctccttgaggctcttgaccaaatcaatgagcccaagaggccctccgacaagcctctaaggcttccattgcaggatgtctacaagattggtggtattggtactgtgccagtgggacgtgtag

SEQ ID NO: 56113 - DNA, 124 bp, Glycine max
  Clone ID: 700679711H1
gtctcttgtctctctcactttctctctctataatttgggtttcattgttcggtgctgaagcaaatttgcggtgtagcagaggcaatggaggttcaaagtctcagctttgaggagaacactttgt

SEQ ID NO: 56114 - DNA, 256 bp, Glycine max
  Clone ID: 700679720H1
ctctccattggtccttaaacactcatcagtcatcaccatggccaagctagttttttccctttgttttctgcttttcagtggctgctgcttcgctttcagttccagagagcagcctcagcaaaacgagtgccagatccaaaaactcaatgccctcaaaccggataaccgtatagagtcagaaggagggctcattgagacatggaaccctaacaacaagccattccagtgtgccggtgttgccctctctcgctgcacc

SEQ ID NO: 56115 - DNA, 126 bp, Glycine max
  Clone ID: 700679726H1
ggcttagggttggttggaattggaggaagctattgaattgggtcctgtacgaggttttggggaaaagcttagctccattattgatgcctgcctttcacagtaagttccagatgctggtggactttt

SEQ ID NO: 56116 - DNA, 173 bp, Glycine max
  Clone ID: 700679766H1
cttaattattaacacttccttagttcaatatggggaagcccttcactctctctctttcttccctttgcttgctactcttgtcgagtgcatgctttgctattagctccagcaagctcaacgagtgccaactcaacaacctcaacgcgttggaacccgaccaccgcgttgagtcc

SEQ ID NO: 56117 - DNA, 129 bp, Glycine max
  Clone ID: 700679790H1
gttgccgtttctattattgacaccaacagcttggagaaccagctcgaccagatgcctaggagattctatcttgctgggaaccaagagcaagagtttctaaaatatcagcagcagcagcaaggaggttcc

SEQ ID NO: 56118 - DNA, 247 bp, Glycine max
  Clone ID: 700679791H1
ttgaatacacctcatgagtttggacctgattccactaagttcaaatattcgatattcgtcatggtgcttatgaaaattggttcttctgaggagagtagctacctacgtgtgaatggatcaactctactgctctgttacccacttgaaatcgagttctggggcttggtttttcatttttcctgaacgcactgtactgtggtatttgctccaatatgtagttaatatgtgtactggttcatactatata

SEQ ID NO: 56119 - DNA, 259 bp, Glycine max
  Clone ID: 700679827H1
cttcaaagttgaaaacccagaatgtggttgtatctctctccctaaccttaaccttggtactggtgctactgaccagcaaggcaaactcagcggaaactgtttctttcagctggaacaagttcgtgccgaagcaaccaaacatgatcctccaaggagacgctattgtgacctcctcgggaaagttacaactcaataaggttgacgaaaacggcaccccaaaaccctcgtctcttggtcgcgccctctatccacccccatc

SEQ ID NO: 56120 - DNA, 263 bp, Glycine max
  Clone ID: 700679829H1
cacaaacaagtggatcaaagagaccatcagagccgtcgatggagttggctaacccccgaaacgaaactgcttctgcccctcaaccacccaaacctgtcaagcgagagggcaatcgcaaaggtccaacgtcaagttctgaacatgaaggacctaaaacaccagatcctaagacactcagaagacttgctcagaatagagaggcagctaggaaaagcaggcttaggaaaaaggcctatgttcaacaactagagtcgagtaggatt

SEQ ID NO: 56121 - DNA, 260 bp, Glycine max
  Clone ID: 700679846H1
agaggattggagggtcgccacgtttagcaacaaccaaaccctctctactctttcttcttctcttcgctagggttttagcttcttcctcttcacttcgttcttctggcctctacaatgagcaacgacaaggacaccttcaacgtcgctgatctcacttccgctctcaacgaggacaatagagcagaccttgtcaatgctctcaagagcaagatacagagtttggctggacagcattctgatattctagatctctgtcgccc

SEQ ID NO: 56122 - DNA, 248 bp, Glycine max
  Clone ID: 700679887H1
ccggtttcccagatctgctccttcctcaccccacaggctgatactagactgtaactttcagaagtcagttgaagagcatgggtcgtggagttagcagtggtggtggtcaaagttccttgggttatctttttggcagtggagaggcccctgccgcaaaaccggcaacaaacaatgccccagcccaacctgaagtgcaggctgtaaataatgcgcctccttcaaaagcatctcctcctataaaacaatag

SEQ ID NO: 56123 - DNA, 274 bp, Glycine max
  Clone ID: 700678729H1
gagctggcacaccacttcagaataatcttcatgaactctggtctcttctcaactttcttctgcccgaaatttttagttctgctgaaacttttgatgaatggtttcaaatctctggtgaaaatgaccaacaggaggttgttcaacaattacacaaggtcctccgcccatttctccttcgaaggttgaagtcagatggagagaaagggttgccaccgaaaaaggaaactattcttaaggtaggcatgtcccaaatgcagaaacagtattatagagc

SEQ ID NO: 56124 - DNA, 224 bp, Glycine max
  Clone ID: 700675424H1
ctacggttttagaaaaattgatcctgacaagtgggagtttgcgaacgaagggtttttggcggggcagaggcaattgttgaagacgataaagaggaggaggcacgtgacagtgacacagacacagtcacacgagggaggaagtggggcttgtgttgaattgggggagtttgggttggaaggtgagatggagaggttgaggagagacaggacagtgttgatggctg

SEQ ID NO: 56125 - DNA, 265 bp, Glycine max
  Clone ID: 700678057H1
ctcgagccgtccggtttctccattcaacgatttgcgatgtgaatcgatcattcattaacgatctttcaaggaaatattcgttgcgatcggtgattctgttgttgttattgaaaccacaatgcggggctatggcgatgaaggagatggttacgatgattattatgaggatgaagatgagtatgaagaggaggctgaggaagagtatgaagaagaggaagaggcgcctaggaagccttcaaaagaagaaatggagtaccttgagttg

SEQ ID NO: 56126 - DNA, 169 bp, Glycine max
  Clone ID: 700677948H1
gagatgtcggatgcgccaccgagcccgactcatgagagtgggggcgagcagagcccgcgcggttcgtcgtccggcgcgagggagcaggaccggtacctcccgattgccaacatcagccgcattatgaagaaggctctgcctcccaacggcaagattgcaaaggatgcca

SEQ ID NO: 56127 - DNA, 203 bp, Glycine max
  Clone ID: 700679378H1
gaagaaggcgctgccggcgaacgcgaagatctcgaaggacgcgaaggagacggtgcaggagtgcgtgtcagagttcatcagcttcatcaccggcgaggcctccgacacgtgccagcgcgagaagcgcaagacgatcaacggcgacgacctgctctgggcgatgaccactctgggcttcgaggactacgtggagcctcctcaaa

SEQ ID NO: 56128 - DNA, 257 bp, Glycine max
  Clone ID: 700676039H1
gaaatttttcccaaagctgatcgagaagccagccaggccagaaagagttgaagaagaatgggaagggggaagatcgaaatcaaaaggattgagaacacaacaaatcggcaagtgaccttctgcaagagaagaaatgggcttctgaagaaagcttatgagctgtcagtgctgtgtgatgcagaagttgccctcatcgtcttctccagccgtggccgtctctatgagtattccaacaacaacataagaacaacaataga

SEQ ID NO: 56129 - DNA, 292 bp, Glycine max
  Clone ID: 700678604H1
gttaccatttgctcccagcactgagcttaaccgagcttcacaaagatgaatcgggaaaaattgatgaagatggccggttcggttagaactgggggaaagggcaccgtgagaagaaagaagaaggctgtccacaagacaacaaccacagatgacaaaaggcttcagagcaccctgaagagaataggggtgaatgccatcccggctattgaggaggtcaatatctttaaggatgacgtaattatccagtttctaaatcccaaagttcaagcatccattgctgctaatacttggg

SEQ ID NO: 56130 - DNA, 253 bp, Glycine max
  Clone ID: 700675677H1
gcctgacgtcacttataatgacattggaggatgtaatatacagtaacaggtaatccgtgaggctgtggagctaccccttacacatcatgaactatacaaacaaattggtattgatcctccccgtggtgtattactgtatggaccccctggcactggcaaaacaatgcttgcgaaagctgttgcgaatcataccactgctgctttcatcagggatgtgggatctgagtttgtgcagaagtatcttggtgatttt

SEQ ID NO: 56131 - DNA, 256 bp, Glycine max
  Clone ID: 700676408H1
tgtcagtgtcagacatgaacatgaggcagcaggtagcatcatcagatcacagtgcagccacaggagaggagaacgaatgcacggtgagggagcaagacaggttcatgccaatcgccaacgtgattaggatcatgcgcaagattctccctccacacgcaaaaatctcggacgatgcaacagaaacaatccaagagtgcgtgtctgagtacatcagcttcatcacaggtgaggcgaacgagcgttgccagagggagca

SEQ ID NO: 56132 - DNA, 243 bp, Glycine max
  Clone ID: 700678883H1
caccgctgggttgaagctgtcagtgtcagacatgaacatgaggcagcaggtagcatcatcagatcacagtgcagccacaggagaggagaacgaatgcacggtgagggagcaagacaggttcatgccaatcgccaacgtgattaggatcatgcgcaagattctccctccacacgcaaaaatctcggacgatgcaaaagaaacaatccaagagtgcgtgtctgagtacatcagcttcatcacagg

SEQ ID NO: 56133 - DNA, 257 bp, Glycine max
  Clone ID: 700677935H1
ggacatactctgagcgtgagatagagaaggggaagaaagagagagagtgatgggaaggggaagagtggagttgaagagaattgagaacaagatcaacaggcaagtgacctttgcaaaacgaaggaacgggcttttgaagaaagcttatgagctttccgttctttgtgatgccgaggttgctctcatcatcttctccaatagaggaaagcagtacgagttttgcagcggttaagcatgctcaaaacgctggaggggta

SEQ ID NO: 56134 - DNA, 237 bp, Glycine max
  Clone ID: 700676985H1
gatggattccacaaactcaaatgatggagagcctgccccatcaaagccagaaaacacacatccatcttatcctatgttatatcctgcgtattattctccagtgttcccgtttcctctgccctattggtcaggatacagtccagagcccaccaagaaggaggaaacacatgaagtgctgaaaccaactgcagtacattctaaaagccctatcaatgttgatgaactggttggcatatc

SEQ ID NO: 56135 - DNA, 266 bp, Glycine max
  Clone ID: 700679185H1
aatggattccacaaactcaaatgatggagagcctgccccatcaaagccagaaaacacacatccatcttatcctatgttatatcctgcgtattattctccagtgttcccgtttcctctgccctattggtcaggatacagtccagagcccaccaagaaggaggaaacacatgaagtgctgaaaccaactgcagtacattctaaaagcccaatcaatgttgatgaactggttggcatatcaaaactgagtttaggggagtctattggtg

SEQ ID NO: 56136 - DNA, 251 bp, Glycine max
  Clone ID: 700677068H1
aagaaacatgagatgctactggctgaaattgaatacttccagaaaagggagattgaactggaaaatgaaaatctttgcctccgaactaagataactgacgtggagaggattcagcaagtaaacatggtttctgggccagaactgaatgccattcaggcattagcttcccgtaacttcttcaatccaaatatgttggaaggtggaactgtttaccctcactcagataagaagattcttcatcttgggtgatc

SEQ ID NO: 56137 - DNA, 225 bp, Glycine max
  Clone ID: 700677709H1
aggaaattatggacaagaccaccaagcgttgcaacattcttcatcatctgcacctttggtgcgtgatgattgccttacacaggctccacaactggaacttgttggccactcaattggatacgctccttttataggaatgtctcatgccagaatggctttgccccttgagatggctcaagagcctgtttatgtgaatgccaaaaataccaaggaattctgagacga

SEQ ID NO: 56138 - DNA, 260 bp, Glycine max
  Clone ID: 700679268H1
aagggtgtctctgaaattgtcatgtccacgttaaggtcttgattggctttctgggtttggagaagaatctctgcttcactctcttcactgctgggaggtaactgacccaaaccctattggttttggcaacatggaagatgaacacactttggcggttgctgagagagagatgtggtgaacagtgaccaagacgagttcctaggtgtcaatgatgcttccatgttctacgctgatttccctcctctccctgatttcccttg

SEQ ID NO: 56139 - DNA, 222 bp, Glycine max
  Clone ID: 700679384H1
ccacaaggtaggctggaccccgaagttatagatcttcttttagagcttgctgatgacttcattgattctgcaactacacatggttgcattttggcgaaacatagaaaatcgtcaaatttggagtccaaggatttattgctacacctagagaaattggggatttaacaattcccggatactcaagtgaagagaaggagaatcagagcaacctcaattaaatga

SEQ ID NO: 56140 - DNA, 246 bp, Glycine max
  Clone ID: 700679313H1
ctcgagccgctctcttctctctgcatcgcttcaggttcttctgaaaagatgtctcgcgtgtctgttggtaacttggattcacgagtcaccgagagagatctcgaagacgaattccgtgttttcggagttattcggagtgtttgggttgcacgtagaccacctggtgatgcttttattgactttgatgaccgcagagatgcacaggatgctatccgtggaattggatgggcagaatggtttggaggg

SEQ ID NO: 56141 - DNA, 248 bp, Glycine max
  Clone ID: 700679621H1
attttctttttctcttctcactgcatcgcttcaggttcttctgaaaagatgtctcgcgtgtatgttggtaacttggattcacgagtcactgagagagatctcgaagacgaattccgcgttttcggagttattcggagtgtttgggttgcacgtagaccacctggttatgcttttattgactttgatgaccgcagagacgcacaggatgctatccgtgaattggatggcaagaatggttggagggttga

SEQ ID NO: 56142 - DNA, 274 bp, Glycine max
  Clone ID: 700674564H1
attcggctcgagattcaaactagccgattgagatcttctcttagtgctcgtgacatgccaccagaagactttgatgggttgcaagattttgatggccagcaacaccttttgagtgacttgggctgtttctcgcagccccgtcctggcgccatttcagtgagtcgatctggtcggtctaagacactagccccatcaaatctggatgaactattctctgccgagatttcgtcatctccccggtattctgacccagcagtggcttctgtattttccc

SEQ ID NO: 56143 - DNA, 259 bp, Glycine max
  Clone ID: 700675341H1
ttcggagatgcgcacgtggcaggtcacatgactggaccgagtgtccgtacgcccaccccggggagaaggctcgccgccgtgatccccggaagtaccattactccggcacggcgtgccccgatttccgcaaggggagttgcaagaagggtgacgcgtgcgagtacgcgcatggggttttcgagtgctggctccaccccgcacgttaccgtactcagccctgcaaggacggcaccagttgtcgccggcgcgtgtgtttctt

SEQ ID NO: 56144 - DNA, 260 bp, Glycine max
  Clone ID: 700677659H1
aacgttagcgcctccgaacataccaccaacaaagacgtcaacaacaacgtagaaaacggcgagagcagccgcagattcgagtgccattgttgttgcagaaacttccccacttcccaggccttaggcgggcaccaaaacgcgcacaaacgagagcgccacacgcgaaacgacaccttcaaagtaccctgatctccgatgcaaacgcgtatagcttcgtgaactacaggttcggttccacggcaatgtctaattacactgag

SEQ ID NO: 56145 - DNA, 268 bp, Glycine max
  Clone ID: 700678063H1
gtgaggatgaggttgagattaaatgcatgggacatccagtgcttccttcactgcaggtgcaaaacttggttgactcgtggcttgatatggcggcttcaggacatagaattccagcaaccattggatcctcggggaaagattttgtcatgatcctaacctatggtcggaaggtcctacacccttgattgtggttcccagttcttcccctttcacatttttattatagcatgaaaaatcgaaaaccttcccagaataattgcttcctcgt

SEQ ID NO: 56146 - DNA, 255 bp, Glycine max
  Clone ID: 700679859H1
ggaagaggaagagaatgttgtccaatagggaatcggcacgtagatcgaggataaggaaacagcagcacctggaaggtctgagtgcccaattggatcagcttaaaaaggagaacgcacaaatcaacacaaacataagcatcacgacgcagatgtacctcaacgtggaagctgagaacgcgattctgagggctcaaatgggggaactgagcaacaggattgaactctctgaacgaaatgataagttcattaactcca

SEQ ID NO: 56147 - DNA, 269 bp, Glycine max
  Clone ID: 700676747H1
cttttaagatatttttggtcacatagtttatggtctgcctctgcgtagtgcttcaacagccccctgctcgctcgatcatcttgattattttttaagccttttaaatgcccaacatcttgttcttgatgtttgagattgatgtatccaattcttagtgaaatcttcttttccgggtgtatgatcaattctactgtgagacgacgcaggacccatttagttcaatccttctccgttgcttttctttactggctctactacgtttcatgatt

SEQ ID NO: 56148 - DNA, 260 bp, Glycine max
  Clone ID: 700676705H1
gttaatttacttgaacaaaactttggaaatgaacgcaaacttgagtccgaaagaaaggataggctggcaatggagcttggtttggaccctcgacaagttgctgtgtggtttcaaaacagaagagcccgttggaagaacaaaaagttggaagaagagtactccagccttaaaaaaaatcatgaagccacttgcttgagaaatgttgcctggagagtgaggtgttgaagctcaaagagcaactttctgaggcagagaaagag

SEQ ID NO: 56149 - DNA, 154 bp, Glycine max
  Clone ID: 700673793H1
ctcgagccgcgcgcgcaaaggattagggtttcgaacgtagcgcttttggagcttccattacgatttcatacttgcgcacgatcaggagggagggctttggagttgaatgcattgctcgtttttactgaaaggagaacccgcgctctctttggtt

SEQ ID NO: 56150 - DNA, 262 bp, Glycine max
  Clone ID: 700676275H1
ggggaaggcacgggagcaacaatgtctgatgacgaagatgagcaagtaggtagtgatgccaatctgtttgatggtgctttggatggtcctgatagcatgggattcggtcctcttattcccacagagaatgagaggtccctcacggaacgtgtaagacctgaagtaaagcacgaattgaaacagggttataaagagaaaattgtggacataagagaggaaattttacgcaagagatgagttgggaaacttcctggtgacacga

SEQ ID NO: 56151 - DNA, 283 bp, Glycine max
  Clone ID: 700678901H1
acttgttatctatacagatgttgcattagatccttattcatcagatgggcatgatggcatagttagagaagatggagttattatgaatgatgagacagttcatcagctatgtaaacaagctgtagcccaggcccaagctggagcagatgttgtccagtctagtgatatgatggatggtcgggtaggagcactgcgtgcagctctggatgctgaaggcgttcagcatgtatctataatgtcctatacagcaaagtatgcaagttctttttatggtccatttaga

SEQ ID NO: 56152 - DNA, 256 bp, Glycine max
  Clone ID: 700673750H1
catgcattggggacactcttgaacagcgtgaagctggtacaacaacggctgttgttgctgagcaaacaaaagcaattgcagctaaaatatcaaattgggacaatgtcgttttggcctatgagccagtttgggccattggaacaggaaaggttgcaactcctgctcaggctcaagaggttcatgctgatttaaggaaatgggttcatgacaatgtgagtgctgaaattgctgcatctgtaagaattatctatggagg

SEQ ID NO: 56153 - DNA, 285 bp, Glycine max
  Clone ID: 700674706H1
ctcgagccggttgaacaagggtttctctgtctgcttcttcactttctctcgtttcaatacgcaaccaaaacaaaaacatgggcagaaaattcttcgtcggtggcaactggaaatgcaatgggaccactgaggaggtaaagaagattgttactactttgaatgaggctaaagtccctggagaagatgtcgtagaagttgttgtgagccctccttttgtgttccttcctgttgtaaaaagtttgctgcgccctgatttccatgtttcggcacaaaactgttgggtcg

SEQ ID NO: 56154 - DNA, 237 bp, Glycine max
  Clone ID: 700675469H1
ctcgagccggttgaacaagggtttctctgtctgcttcttcactttctctcgtttcaatcgaaaccaaaacaaaaacatgggcagaaaattcttcgtcggtggcaactggaaatgcaatgggaccactgaggaggtaaagaagattgttactactttgaatgaggctaaagtccctggagaagatgtcgtagaagttgttgtgagccctccttttgtgttccttcctcttgtaaaaag

SEQ ID NO: 56155 - DNA, 258 bp, Glycine max
  Clone ID: 700676004H1
atcatgtctcacttcaagggcaagtaccatgatgagcttatcgccaatgctgcgtacattggcactcctggaaagggtattcttgctgctgatgagtcaacagggacaattggcaagcgtttggccagcatcagtgtagagaacattgaatccaacaggcgagctcttagggagctgcttttcactgctcctggtgttcttcaatattcagtggtgtcatcctctttgaggaaaccctctaccagagtacagctgcag

SEQ ID NO: 56156 - DNA, 257 bp, Glycine max
  Clone ID: 700677674H1
attgaagccaaacatggtcacccctggatcccaatctgctaaggtttcccctcaggtggttgccgagcacactgtcagagcccttcagagaaccgtgcctgctgcagttcctgctgtcgttttcttgtctggtggccagagtgaggaggaggcatccgtcaacctcaacgccattaaccaggtcaatgggaagaagccatggtcactctctttctcctttggaagggcacttcaacagagcacccttaaggcatggg

SEQ ID NO: 56157 - DNA, 241 bp, Glycine max
  Clone ID: 700677453H1
attgaagccaaacatggtcacccctggatcccaatctgctaaggtttcccctcaggtggttgccgagcacactgtcagagcccttcagagaaccgtgcctgctgcagttcctgctgtcgttttcttgtctggtggccagagtgaggaggaggcatccgtcaacctcaacgccattaaccaggtcaatgggaagaagccatggtcactctctttctcctttggaagggcacttcaacagagc

SEQ ID NO: 56158 - DNA, 252 bp, Glycine max
  Clone ID: 700673606H1
aacctacctctttttcttctctctcaacaacttcacctacttcctcctcgatcatgtctcacttcaagggcaagtaccatgatgagcttatcgccaatgctgcgtacattggcactcctggaaagggcattcttgctgctgaggagtcaacagggacaattggcaagcgtttggccagcatcagtgtcgagaacattgaatccaacaggcgagctcttagggagctgcttttcactgctcctggtgttcccc

SEQ ID NO: 56159 - DNA, 255 bp, Glycine max
  Clone ID: 700678326H1
atcatgtctcacttcaagggcaagtaccatgatgagcttatcgccaatgctgcgtacattggcactcctggaaagggtattcttgctgctgatgagtcaacagggacaattggcaagcgtatgccagcatcagtgtagagaacattgaatccaacaggcgagctcttagggagctgcttttcactgctccgggtgttcttcaatatctcagtggtgtcatcctctttgaggaaaccctctaccagagcacagctg

SEQ ID NO: 56160 - DNA, 253 bp, Glycine max
  Clone ID: 700678816H1
cggctcgagcggctcgagcggctcgagaacctacctctttttcttctctctcaacaacttcaccttcttccacctcgataatgtctcacttcaagggcaagtaccatgatgagcttatcgccaatgctgcgtacattggcactcctggaaagggtattcttgctgctgatgagtcaacagggacaattggcaagcgtttggccagcatcagtgtagagaacattgaatccaacaggcgagctcttagggagct

SEQ ID NO: 56161 - DNA, 267 bp, Glycine max
  Clone ID: 700606005H2
aagtcagtggtactgaccatactcatattttgcgagttccattcagatcagagtcaggaactctccgtaaatggatttcaaggtttgatgtgtggccttatctagagacttatgcagaggatgttgccagtgaaattgctgctgagttacaagggtatcctgatttcatcattggaaactacagtgatgggaatcttgttgcatctttattggcttataaaatgggagttacacagtgcacaatcgcgcatgcacttgagaagacaa

SEQ ID NO: 56162 - DNA, 98 bp, Glycine max
  Clone ID: 700673918H1
catgagcttgccaaagagttgcaaggtcagccagattcgattgtcggaaactacagtgatggaaacattgttgcctctttgttggcacataaattagg

SEQ ID NO: 56163 - DNA, 271 bp, Glycine max
  Clone ID: 700674761H1
gcagaacaggcttacagccctgcatggttcaattgaaaagctgttatttgatcctgagcagactgatgaatacattggttcattgaaagacaagtcaaagcccataattttctccatggcaaggctagacagagtgaaaaacataactggattggtagaatgctttggtaagaacagcaaattgagggaactggtcaaccttgttgtagtagctggttatattgatgtaaagaagtcgagtgacagagcagaaatggcagaaattgagaag

SEQ ID NO: 56164 - DNA, 241 bp, Glycine max
  Clone ID: 700674815H1
gcagaacaggcttacagccctgcatggttcaattgaaaagctgttatttgatcctgagcagactgatgaatacattggttcattgaaagacaagtcaaagcccataattttctccatggcaaggctagacagagtgaaaaacataactggattggtagaatgctttggtaagaacagcaaattgagggaactggtcaaccttgttgtagtagctggttatattgatgtaaaaagtcgagtg

SEQ ID NO: 56165 - DNA, 252 bp, Glycine max
  Clone ID: 700677058H1
cgcacttgagttttataaataatgtccgtgattttagtatttttaccttctctttctctcctcttatcgaaagcttaatcacaaaactaaaatcacggacattatttataaaactcaagtgcgacaaactccaaatgagaaagaaaaagccggtgattttagttttgtgattaagctttcgataagaagtgagaaagagaaggaaaaaaaaagttgcttttgtttatgtacgtaccatgatttggaccttaa

SEQ ID NO: 56166 - DNA, 109 bp, Glycine max
  Clone ID: 700679301H1
cgcacttgagttttataaataatgtccgtgattttagttttgtcgccttctctttctctcctcttatcgaaagcgtaatcacaaaactaaaatcacggacattatttat

SEQ ID NO: 56167 - DNA, 273 bp, Glycine max
  Clone ID: 700678981H1
catgagcttgccaaagagttgcaaggcaagccagatctgattgtcggaaactacagtgatggaaacattgttgcctctttgttggctcataaattaggagtcactcagtgtaccattgctcatgcacttgagaagaccaaataccccgaatccgacatttactggaaaaaattggaagagagataccacttctcttgccaattcacagctgatctatttgccatgaaccacacagatttcattatcaccagtaccttccaggagattgctgga

SEQ ID NO: 56168 - DNA, 254 bp, Glycine max
  Clone ID: 700673512H1
acatgagcttgccaaagagttgcaaggcaagccagatctgattgtcggaaactacagtgatggaaacattgttgcctctttgttggcacataaattaggagtcactcagtgtaccattgctcatgcacttgagaagaccaaataccccgaatccgacatttactggaaaaaattggaagagagataccacttctcttgccaattcacagctgatctatttgccatgaaccacacagatttcattatcaccagta

SEQ ID NO: 56169 - DNA, 274 bp, Glycine max
  Clone ID: 700677915H1
cagatctgattgttggaaactacagtgatggaaacattgtcgcttctttgttggcacataaattaggtgtcactcagtgtaccattgctcacgcacttgagaagaccaaataccccgaatccgacatttactggaaaaaattggaagagagataccacttctcttgccaattcacagctgatctatttgccatgaaccacacagatttcattatcaccagtaccttccagggattgctggaagcaaggacactgttggacagtacgaatctcac

SEQ ID NO: 56170 - DNA, 237 bp, Glycine max
  Clone ID: 700673790H1
cagatctgattgttggaaactacagtgatggaaacattgtcgcttctttgttggcacataaattaggtgtcactcagtgtaccattgctcacgcacttgagaagaccaaataccccgaatccgacatttactggaaaatattggaagagagataccacttctcttgccaattccccgctgatctatttgccatgaaccacacagatttcattatcaccagtaccttccaggagattg

SEQ ID NO: 56171 - DNA, 247 bp, Glycine max
  Clone ID: 700675710H1
ggctcgagcggctcgagcgaaactagccagaggttgacctccttacaccccgaaatcgaagaacttgtttacagctctgtggagaatgaagaacacatatgcgtgctgaaggaccgcagcaagccgattatcttcaccatggcaaggttggaccgtgtgaagaacatcacaggactcgtggagtggtacggtaagaacgcgaagctgagggagttggtgaaccttgtggttgttgccggagacagga

SEQ ID NO: 56172 - DNA, 175 bp, Glycine max
  Clone ID: 700675496H1
caacttctcttggatcttcttgaggcccctgacccttgcacccttgagactttccttggaagaattcctatggtcttcaatgttgtcattctttctccccatggttactttgcccaagattatgtcttgggataccctgacactggtggccaggttgtttacatcttggatcaag

SEQ ID NO: 56173 - DNA, 256 bp, Glycine max
  Clone ID: 700674325H1
caaagctagggcaaatcctgaaaacccttctattgaacttgggccagaatttaagaaggttagcaacttcttgggccgcttcaagtcaattcccagtattgttgagcttgacagtctaaaagtggctggcaatgtatggtttggagatggtgttatcctcaagggaaaaatcagtatcgtggccaatcctggtgttaagctggaagttcccgatggtgctgtcatttcggataaggaaattaatggcccagaggac

SEQ ID NO: 56174 - DNA, 266 bp, Glycine max
  Clone ID: 700677995H1
gtgatgataatgatgatgatgatgtgttccatgtggatgtgggttgtccttgtggccattgctggtgcccttttagtcctaagatctatcctcaagaatgtaaattggtggctctatgaatccaaattgggtgtgaagcagtactctttgccaccaggtgacatgggatggcccttcattggcaacatgtggtcctttctcagtgctttcaagtccaaggaccctattccttcatctcctcctttgtctccagatttggaagaact

SEQ ID NO: 56175 - DNA, 272 bp, Glycine max
  Clone ID: 700677919H1
gtgtgttccaagaatactgtgaagccatgagcaaactctctcttgggataatggagcttctggggatgagcctaggagttggcagggaatgtttcagagatttcttcgaaggaaatgagtcggttatgaggttgaattactacccaccatgccaaaaacctgagttagctttaggaactggacctcattgtgaccctacatccctaaccattctccaccaagatcaagtcgaggcctccaagtctttgttgatggaagatggtactctgtcg

SEQ ID NO: 56176 - DNA, 256 bp, Glycine max
  Clone ID: 700677934H1
ctgtgttccaagaatactgtgaagccatgagcaaactctctcttgggataatggagcttctggggatgagcctaggagttggcagggaatgtttcagagatttcttcgaaggcaatgagtcggttatgaggttgaattactacccaccatgccaaaaacctgagttagctttaggaactggacctcattgtgaccctacatccctaaacattctacaccaagatcaagtcagggcctccaaatctttgttgatgga

SEQ ID NO: 56177 - DNA, 262 bp, Glycine max
  Clone ID: 700678796H1
ggtgcgaatcacaacactgcacaaggattagggtttacatttgggaggtagcacgagagcagtaggtgaagcgtgcattctcaacagttgatctctctcctttcctgagagaggatgacgatggataaccgagagccatagatgcaatcacccaagtctggtctgcatatggcagcttccatattgtgaaccatggagtatcccttgatttgggtaaagaggccatgcagctatctaagaccttgtttagattactcggatg

SEQ ID NO: 56178 - DNA, 264 bp, Glycine max
  Clone ID: 700677640H1
ttcaatgcttgtctggaactggttctttaagagttgggggtgaatttttggctaaacactatcaccaacggactatatacttgccaacaccaacttggggcaatcacccgaaggttttcaacttagcaggcttgtctgtcaaaacataccgctactatgctccagcaacacgaggacttgactttcaaggacttctggaagaccttggttctgctccatctggatctattgttttgctacatgcatgcgcacataaccccactg

SEQ ID NO: 56179 - DNA, 280 bp, Glycine max
  Clone ID: 700678487H1
aacagattggaatgtttactttcactggattgaatgcggaacaagtttccttcatgactaaagagttccatatatacatgacatctgatgggaggattagcatggctggtctgagttccaaaactgtcccacttctggcggatgcgatacatgcagctgtaacccgagttgtctaaaacatgttgacaacagttttcaacatgctccctagtccctataggagaacttccattatttttgtttaataattgtcaacatcaacaatgaaaccttttatttg

SEQ ID NO: 56180 - DNA, 259 bp, Glycine max
  Clone ID: 700675621H1
ctttagagagatagagagatagagagagagagaaagaaattaagaaaaaatggcagcctgcactgtctactcaacacaatctctgagcacaaattgctccatctcaaccccatcaaagacacagctgagtttcttccaccaaaagcaggtagttttctggaggaacagcaacaggggcaacagcatcagcagaagaagctatgtgataacatgtgcagcaggtgactcacagacagtggtgattggtcttgctgcagac

SEQ ID NO: 56181 - DNA, 257 bp, Glycine max
  Clone ID: 700677209H1
aaaatttcaaccacagtgaaggctacatctcgtgttgacaagttttcaaaaagcgatatcattgtctctccatccattctttctgcaaactttgcaagattgggacaacaggtgaaagcactgcagttggctggttgtgattggcttcacgttgatgtaatggatggccgttttgttccaaatattacaattggacctcttgtcggctgatgcattgcgccctgtgacagatcttcctttggatgtacacctgatga

SEQ ID NO: 56182 - DNA, 168 bp, Glycine max
  Clone ID: 700674249H1
aattcttgcactttctaggcaaaagttgacccaacttccaggaacttctattgagggagttgaaaagggtggctacaccatttcagacaactcatcaggtaacaagcctgatgttattttgattggaactggttctgagttggaaattgctgctgctgctgctgagga

SEQ ID NO: 56183 - DNA, 117 bp, Glycine max
  Clone ID: 700677401H1
aattcttgcacttgctaggcaaaagttgacccagcttccaggaacttctattgagggagttgaaaagggtggctacaccatttcagacaactcatcaggtaacaagcctgatgttat

SEQ ID NO: 56184 - DNA, 122 bp, Glycine max
  Clone ID: 700678096H1
tggaagcatcacgatgtcaccgttaaggacgataagacccttctcttcggtggcaagccagtcactatttttggacacaggaaccctgaagagatcccatgggggtcaactggagctgacat

SEQ ID NO: 56185 - DNA, 88 bp, Glycine max
  Clone ID: 700679091H2
cacgagtacgagccagagcttgatattatttccaatgctagctgcacaaccaactgccttgccccacttgccaaggttatcactgaca

SEQ ID NO: 56186 - DNA, 256 bp, Glycine max
  Clone ID: 700678041H1
gagcgagttgttgtaaagctagccttgttgcagccatggccacccacgcggctctagcttctacaaggatccccactaacaccaagttcccatccaaggcttcacactctttcccaacccaatgcgcctcaaagagacttgaggtgacagaattctctgggctaagatccacttcatgtgtgacatatgctaacgatgctagagaatcttccttttttgatcttgtagcttcccaactcactcccaagaccaatgg

SEQ ID NO: 56187 - DNA, 245 bp, Glycine max
  Clone ID: 700676860H1
cgacagtgttcatggacactggaagcatcacgatgtcaccgttaaggacgagaagacccttctcttcggtgacaagccagtcactatttttggacacagaaaccctgaagagatcccatgggggtcactggagctgacatcattgttgagtccaccggagttttcaccgataaggacaaggccgccgcacatttgaagggtggtgcaaagaaggttattatttctgcccccagtaaggatgcccc

SEQ ID NO: 56188 - DNA, 242 bp, Glycine max
  Clone ID: 700678241H1
tggaagcatcacgatgtcaccgttaaggacgagaagacccttctcttcggtgacaagccagtcactatttttggacacagaaaccctgaagagatcccatgggggtcaactggagctgacatcattgttgagtccaccggagttttcaccgataaggacaaggccgccgcacatttgaagggtggtgcaaagaaggttattatttctgcccccagtaaggatgcccccatgtttgttgttgg

SEQ ID NO: 56189 - DNA, 232 bp, Glycine max
  Clone ID: 700674865H1
cacgagtacaagcgagagcttgatattattataaatgctagctgcacaactaactgccttgccccacttgccaaggttatcaatgacaggtttggcattgttgagggtttgatgaccactgttcattccataccgctacccagtagactgttgatggaccatcagccaaggactggagaggtggaagagctgcttcatttaacatcattcctagcagcactggagctgccaa

SEQ ID NO: 56190 - DNA, 265 bp, Glycine max
  Clone ID: 700678780H1
tgttaacgagcacgagtacaagccagagcttgatattatttccaatgctagctgcacaaccaactgccttgctccacttgctaaggttattaatgacaggtttggcattgttgagggtttgatgaccactgttcattccatcactgccacccagaagactgttgatgggccatcagccaaagactggagaggtggaagagctgcttcatttaacatcattcctagcagcactggagctgccaaggctgttggaaaagtccttcct

SEQ ID NO: 56191 - DNA, 236 bp, Glycine max
  Clone ID: 700675491H1
cacgagtacaagccagagcttgatattatttccaatgctagctgcacaaccaactgccttgccccacttgccaaggttatcaatgacaggtttggcattgttgagggtttgatgaccactgttcattccatcaccgctacccagaagactgttgatggaccatcagccaaggactggagaggtggaagagctgcttcatttaacatcattcctagcagcactggagctgccaaggc

SEQ ID NO: 56192 - DNA, 217 bp, Glycine max
  Clone ID: 700677777H1
aatgttttaaacgttgttacgttgattgttctggcagacatacatgttcaagtacgacaccgttcatgggcagtggaagcattttgatgtgaagctgaaggactctaagacccttctcttcggtgagaagcccgtcaccgtttttggattcaggaaccctgaggaaattccatggggtgaggttggtgctgatttgttgttgagtcaactggcgtat

SEQ ID NO: 56193 - DNA, 234 bp, Glycine max
  Clone ID: 700678284H1
tttctaatctcattctccttctgttcaaacactctctctcatggcatcagataagaagattaggatcggcatcaacgggtttggaaggattggccgtttggtggccagggttgcccttcaaaggaatgatgttgaacttgttgctgtcaacgatcctttcatcaccactgattacatgacatacatgttcaagtacgacaccgttcatggccagtggaagcattttgatgtgaa

SEQ ID NO: 56194 - DNA, 248 bp, Glycine max
  Clone ID: 700674379H1
cgctctctaataacatttctaatctcattctccttctgttcaaacactctctctcatggcatcagataagaagattaggatcggcatcaacgggtttggaaggattggccgtttggtggccagggttgcccttcaaaggaatgatgttgaacttgttgctgtcaacgatcctttcatcaccactgattacatgacatacatgttcaagtacgacaccgttcatggccagtggaagcattttgatgtga

SEQ ID NO: 56195 - DNA, 264 bp, Glycine max
  Clone ID: 700679803H1
cggctcgagcaagcctctactatactgcttcaccttctgctctagaaaattcagtgctgaaacatggcttcggctactctctctgtagccaaaccagcccttcaggcaaatgggaaaggcttctctgaattctctggcctccgaagctcatcaggcttccttcccttttctagaaaatcttcagaggatttccattctggtcattgccttcaagacctatgcagttggaagcagtggatgatacaagaagggtgtgcagaagca

SEQ ID NO: 56196 - DNA, 239 bp, Glycine max
  Clone ID: 700677613H1
ctcgagccgaatcggctcgaggaagaaaagaatgaccccgagcacgcaaaaaagcttgcagctctggcagatctgtatacgaatgatgcatttggtactgctcacagggcacatgcatcaacagagggtgttactaaatacctgaagccatctgttgctggttttcttttgcaaaaggaacttgattaccttgttggggcagtatcaaaccccaaaaggccatttgctgccattgttgg

SEQ ID NO: 56197 - DNA, 255 bp, Glycine max
  Clone ID: 700677812H1
ctcgagccgaatcggctcgaggaagaaaagaatgaccccgagactgcaaaaaagcttgactctctggcagatctgtaactgaatgatgcatttggtactgctcacagggcacatgcatcaacagagggtgttactaaatacctgaagccatctgttgctggttttcttttgcaaaaggaacttgattaccttgttggggcagtatcaaaccccaaaaggccatttgctgccattgttggtggttcaaagtctcat

SEQ ID NO: 56198 - DNA, 217 bp, Glycine max
  Clone ID: 700673963H1
cttgctggttgccacactacaccgatatatccaccaaacccgttagcattgttgtatgcgaataaatggcaactaagaggagcgtgggaacattgaaggagggtgatttgaaggggaagagggtattcgtgagggtcgatctgaacgtgcctttggatgacaaccttaacatcaccgatgacactagagtccgtgctgctgttcccaccatcaagta

SEQ ID NO: 56199 - DNA, 264 bp, Glycine max
  Clone ID: 700676242H1
cttgctggttgccacactacaccgatatttccaccaaacccgtttgcgttgttgtttgcgaataaatggcaactaagaggagcgtgggaacgttgaaggagggtgatttgaaggggaagagggtattcgtgagggtcgatctgaacgtgcctttggatgacaaccttaacatcaccgatgacactagagtccgtgctgctgttcccaccatcaagtacttgactggttatggtgctaaagtgatcctttctagccatttgggac

SEQ ID NO: 56200 - DNA, 237 bp, Glycine max
  Clone ID: 700674046H1
tgccgagtcatcctgtgctgctcttgttgttgcttccatctcttcttttggggtgaatcatgagttgactgctatgttataccctctcattatcagttctgtgggtatccttgtttgtttgctcacaaccttatttgcaactgacttctttgagatcaaggctgtaaaggagattgagcctgcattgaagaaacaactcatcatttccactgccctgatgactattgggattgcaat

SEQ ID NO: 56201 - DNA, 90 bp, Glycine max; identical to SEQ ID NO: 56073
  Clone ID: 700679092H2

SEQ ID NO: 56202 - DNA, 90 bp, Glycine max; identical to SEQ ID NO: 56069
  Clone ID: 700679087H2

SEQ ID NO: 56203 - DNA, 99 bp, Glycine max; identical to SEQ ID NO: 56017
  Clone ID: 700679019H2

SEQ ID NO: 56204 - DNA, 95 bp, Glycine max; identical to SEQ ID NO: 56047
  Clone ID: 700679062H2

SEQ ID NO: 56205 - DNA, 92 bp, Glycine max; identical to SEQ ID NO: 56051
  Clone ID: 700679066H2

SEQ ID NO: 56206 - DNA, 92 bp, Glycine max; identical to SEQ ID NO: 56058
  Clone ID: 700679073H2

SEQ ID NO: 56207 - DNA, 91 bp, Glycine max; identical to SEQ ID NO: 56059
  Clone ID: 700679074H2

SEQ ID NO: 56208 - DNA, 89 bp, Glycine max; identical to SEQ ID NO: 56065
  Clone ID: 700679082H2

SEQ ID NO: 56209 - DNA, 103 bp, Glycine max; identical to SEQ ID NO: 56001
  Clone ID: 700679001H2

SEQ ID NO: 56210 - DNA, 101 bp, Glycine max; identical to SEQ ID NO: 56011
  Clone ID: 700679012H2

SEQ ID NO: 56211 - DNA, 265 bp, Glycine max; identical to SEQ ID NO: 55661
  Clone ID: 700606036H2

SEQ ID NO: 56212 - DNA, 263 bp, Glycine max; identical to SEQ ID NO: 55674
  Clone ID: 700606049H2

SEQ ID NO: 56213 - DNA, 119 bp, Glycine max; identical to SEQ ID NO: 55657
  Clone ID: 700606032H2

SEQ ID NO: 56214 - DNA, 268 bp, Glycine max; identical to SEQ ID NO: 55647
  Clone ID: 700606021H2

SEQ ID NO: 56215 - DNA, 267 bp, Glycine max; identical to SEQ ID NO: 55648
  Clone ID: 700606022H2

SEQ ID NO: 56216 - DNA, 272 bp, Glycine max; identical to SEQ ID NO: 55605
  Clone ID: 700605970H2

SEQ ID NO: 56217 - DNA, 268 bp, Glycine max; identical to SEQ ID NO: 55612
  Clone ID: 700605977H2

SEQ ID NO: 56218 - DNA, 229 bp, Glycine max; identical to SEQ ID NO: 55613
  Clone ID: 700605979H2

SEQ ID NO: 56219 - DNA, 272 bp, Glycine max; identical to SEQ ID NO: 55582
  Clone ID: 700605946H2

SEQ ID NO: 56220 - DNA, 275 bp, Glycine max; identical to SEQ ID NO: 55591
  Clone ID: 700605955H2

SEQ ID NO: 56221 - DNA, 277 bp, Glycine max; identical to SEQ ID NO: 55576
  Clone ID: 700605938H2

SEQ ID NO: 56222 - DNA, 278 bp, Glycine max; identical to SEQ ID NO: 55577
  Clone ID: 700605939H2

SEQ ID NO: 56223 - DNA, 282 bp, Glycine max; identical to SEQ ID NO: 55545
  Clone ID: 700605907H2

SEQ ID NO: 56224 - DNA, 249 bp, Glycine max
  Clone ID: 700679652H1
gtggagtcgccaactatcgcaacctacccttcggcgggagggcgacgcgagactcgcgggatgcgtgttccactaaaggaatacgcacggagtcgccaccaatgtttatttgaggaaaacgtcggaaaaaccggaaaagacacgatcaacgaacttttaagtgaaaggctcgggagttgtatttacgcccggggaaggtattagcaccccatacgtccgtcacaagggacggcagcctttaatcaaatg

SEQ ID NO: 56225 - DNA, 247 bp, Glycine max
  Clone ID: 700679653H1
caactgcacccctcctccagtcacttccttttccatggcccaaacactttctccctgcatttattacctaccactgtcactatgaatgctgtcttttgtttttcatcttcaacttcatctaaacctttcacacatctcaccagaccaaaacaaccaacaacaagttcacattgtaggaacctttgtcttgtcgtgtcgggtagtggctcatattgatattggtatggtctttcttgaaaccccattt

SEQ ID NO: 56226 - DNA, 143 bp, Glycine max
  Clone ID: 700679654H1
gcttttgcaatgaatgcagcaccactaccctcatcatccacactacctttcctggagtaatacccaaaccttctctatctttcactccctttctctttctattctccctctcactcgaactctcatcttctctgttccacaac

SEQ ID NO: 56227 - DNA, 245 bp, Glycine max
  Clone ID: 700679655H1
gggaagccaaagcgaaaccctaaccctaacggagagatggcggacacttggcatcgatattcgggacggagaaggacagggtgaactgtccgttctacttcaagatcggcgcgtgcaggcacggcgaccggtgctcccggcttcacacgaagcccacaattagcccaacgttggttctgtcgaacatgtaccagaggcccgacatgacatgaacatcatcaccaaccccgatcagccccagcccc

SEQ ID NO: 56228 - DNA, 241 bp, Glycine max
  Clone ID: 700679657H1
attctctccattggtccttaaacactcatcagtcatcaccatggccaagctagttttttccctttgttttctgcttttcagtggctgctgcttcgctttcagttccagagagcagcctcagcaaaacgagtgccagatccaaaaactcaatgccctcaaaccggataaccgtatagagtcagaaggagggctcattgggacatggaaccctaacaacaagccattccagtgtgccggtgtt

SEQ ID NO: 56229 - DNA, 240 bp, Glycine max
  Clone ID: 700679659H1
catggaggaacacaaaaaagaagggttttttttgcccacaccagttgcaaaactaatatcctttcaaacggatttgatctataatggcctggtttctctcttttcccctatccactctcttttctccgtggcttctaagtcctaccaccgtgctgaggagaccaaagacagtgttgaatcagcagtgcaacgtgctctttctcatcaaatcactcatggcagcgcactcttgctgaagaa

SEQ ID NO: 56230 - DNA, 244 bp, Glycine max
  Clone ID: 700679660H1
cggctcgagcccaagttgacttttgaggaatttaaggaatttcaccgcaagtattaccatcctagcaattcccgcatatggttttatggagatgatgatccaaatgagcgcctccgcatcctaagtgaatatttagacttgtttgattctagtttggcctctcatgaatcaagggttgaaccacagacactattttcaaagccagtccggattgttgagacatatcctgctggtgaagggggtg

SEQ ID NO: 56231 - DNA, 139 bp, Glycine max
  Clone ID: 700679662H1
cgcacatttcaaatttcaaaacgccttcttcctcttcttcttgttctgcttctcgttttaccttaattaagccaagcaaagcagcaacaacaactacagcttcaaactcaaactcacctcaacttccacttgctgtttt

SEQ ID NO: 56232 - DNA, 233 bp, Glycine max
  Clone ID: 700679663H1
ctcgagccgattcggctcgaggaggatgttatacagactggtgtggtttctcgatcggtgggactacgttcaatcgaaagcagcttccgattgaacgtagtccaccgattgaggacgttatacagactggtgtggtttctcgatttgttgagtttctcatgagggaagactttccgcagttgcagtttgaggcagcttgggctttgacaaatatagcttctggaacgtctgaa

SEQ ID NO: 56233 - DNA, 77 bp, Glycine max
  Clone ID: 700679665H1
ctcgagccgctcgagccgattcggctcgagacagagactcctacagacttcaatctggtgatgccctgaaggtcccc

SEQ ID NO: 56234 - DNA, 241 bp, Glycine max
  Clone ID: 700679666H1
tatggccacgttcgcgtcctccagaggttcaacaaacgctcccaacagcttgagaatctccgagactaccgcattttggagttcaactccaaacccaacacccttcttctcccccaccatgctgacgctgattacctcacgttatccttaacgggactgcaatccttaccttggtgaccaaggaggacggggatcctaaaaactttaatcttggcgatgccctaagagtcctgcaggaacc

SEQ ID NO: 56235 - DNA, 249 bp, Glycine max
  Clone ID: 700679667H1
ctcgagccgctcgagccgcgccatacccgttaacaagcctggtagatttgagagtttcttactatctagagctgaagctcaacaatcctacttgcaaggattcagcaggaacattttagaggcctcctacgataccaaattcgaggagataaacaaggttctgtttagtagagaggaagggcagcagcaaggggagcagaggctgcaagagagcgtgattgtggaaatctcgaaggaacagattcgggc

SEQ ID NO: 56236 - DNA, 247 bp, Glycine max
  Clone ID: 700679668H1
tgctggtagcatcacaaccgccaccagccttgacttcccagccctctggcttctcaaactcagtgcccagtatggatcactccgcaagagtgctatgttcgtgccacactacaccctgaacgcgaacagcataatatacgcattgaatgggcgggcattggtacaagtggtgaattgcaatggtgagagagtgtttgatggagagctgcaagagggaggggtgctgatcgttccacaaaactttgcg

SEQ ID NO: 56237 - DNA, 245 bp, Glycine max
  Clone ID: 700679669H1
tctgtctctttgctccatttcagtgctctgtcttctcccccaccaccgcactctctcagatattatcatttcatatcacacattcacatcctatcatcatcgacaacacgctatccccattgcttcttctcttctccctctctcgtttcctacttgacggcgccgtttcgttctccagaagatgcttctgagtacttcgcgctgcaattagacatgatgagttcaagtttcaagacatgggctgt

SEQ ID NO: 56238 - DNA, 246 bp, Glycine max
  Clone ID: 700679671H1
gaaggaggaagacgaagatgagcaaccacgtccaatcccattcccacgcccacaacctcgtcaagaagaagagcacgagcagagagaggaacaggaatggcctcgcaaggaggaaaaacgcggagaaaagggaagtgaagaggaagatgaggatgaggatgaggaacaagatgaacgtcaattcccattcccacgcccacctcatcagaaggaagagcgaaagcaagaggaagatgaggatgagga

SEQ ID NO: 56239 - DNA, 247 bp, Glycine max
  Clone ID: 700679673H1
ctagaatctcagaaaagagagcttgagttgcggagaattgaattggaaaaacgtgaggcacgtaacgaaagtgaaagaaaaaagttggaagaagagattatggagaatgcattgaaaaatagctctcttgacatggctgatctggagcaacagaaagctggtgaaaatgttttgaaactggctgcagatcaaaagcggcaaaaagaacaatttcatgctaaaataatcctgcttgaaagacaactgg

SEQ ID NO: 56240 - DNA, 251 bp, Glycine max
  Clone ID: 700679675H1
tgaaatggttggagctaaatctcgtaatatctcttatttaaaagggaaagtagcttcttggattggaattcctacctcggttgccataccatttggagttttcgaacatgttctttctgataaaccaaaccaggcagtggctgagagggtcaataatttgaaaaagaagttaattgagggagacttcagtgttctcaaggagattcgtgaaacagttctacaattgaatgcaccatcccatttggtagagg

SEQ ID NO: 56241 - DNA, 252 bp, Glycine max
  Clone ID: 700679676H1
attcctgggaattgatcttcccaatagaggtatgtggtcctaataatggttttgaaatgtggagttctgagtgggcaaatcaaacttcatggcatttgagtttccttattgacaatcccaaacagtctacagtttttgatattctcttgggaatttctcaagattttgaaattgctggtaatactcttatgccagctttttctgttccacaggctactgccagatcttctgaaaatgcggaatcctctgcat

SEQ ID NO: 56242 - DNA, 100 bp, Glycine max
  Clone ID: 700679679H1
cggtacggcaatgctcacgaaacaagttgtaacggttctatcatggttcgtactgagctgtatacacatatcgaacttcactgtggaaatgttttatccc

SEQ ID NO: 56243 - DNA, 230 bp, Glycine max
  Clone ID: 700679681H1
atttcctcaatcctggttttggaattcgacgatggagcagaagaggagcagtagcaagatgtacaacctgtttgtgaagcacttggacgggaaaaccctaaccctcctattcccctctccgatcctctacgcgagttccatcagggatcgcctcttccaactcaccggaatccccgcccaccaccagcgccttgttaccggctgccgccacctcaacgacgacaaatctg

SEQ ID NO: 56244 - DNA, 245 bp, Glycine max
  Clone ID: 700679682H1
ctagttttttatattgctgtcgtatcttctctctgctacgtcgttttttgttttgcgttcgttgccgaagtcgttttaatttcttattgtcgctgtgtattcttcgttgcttcatttcgctttgcgccttctgcagttcaacatcgcgaatcccaccactggatgccagaagaagctcgagatcgacgacgatctgaaactgcgagcattttgggacaagaggatctcacaggaggtcatcggag

SEQ ID NO: 56245 - DNA, 243 bp, Glycine max
  Clone ID: 700679683H1
ggaaggcatagtacacaggacagttgaagtgaatggcataaaaatgcatgttgctgagaaaggtgaaggtcccgtggtcttgttcctccacggcttcccggagctctggtactcctggcgccaccagattctggctctcagcaacctcggctaccgcgccgtggctccagatctccgcggctacggagacaccgaggcaccagcttcaatcagcagctacaccatcctccacttagtttctga

SEQ ID NO: 56246 - DNA, 243 bp, Glycine max
  Clone ID: 700679684H1
tggatactgttactggccaatattatcctgagtgggctccaattaattgtcgagttcatcgacaaccaattcacatcactgaaggaaattatgtcagaaagcaagatgtcagcattgaatatgatgcatgtacaattccaaatgattgtggttcattggttgttgccaaggttggaaatcacaaacaaattgttggtttccatgttgctggaagcaaaggaagactgggatatgcttcattga

SEQ ID NO: 56247 - DNA, 240 bp, Glycine max
  Clone ID: 700679685H1
cacaacttcagaatctccgagactaccgcattttggagttcaactccaaacccaacaccctccttctccccaaccatgctgacgctgattacctcatcgttatccttaacgggactgccattctttccttggtgaacaacgacgacagagactcctacagacttcaatctggtgatgccctgagagtcccctcaggaaccacatactatgtggtcaaccctgacaacaacgaaaatctca

SEQ ID NO: 56248 - DNA, 241 bp, Glycine max
  Clone ID: 700679686H1
caactgcacccctcctccagtcacttccttttccatggcccaaacactttctccctgcatttattacctaccactgtcactatgaatgctgtcttttgtttttcatcttcaacttcatctaaacctttcacacatatcttcggataagaacaaccaacaacaagttcacattgtaggaacctttgtcttgtcgtgtcgggtagtggctcatattgatattggtatggtctttctttgaacc

SEQ ID NO: 56249 - DNA, 242 bp, Glycine max
  Clone ID: 700679687H1
ctcgagccgctctcatcactacctctgcatttttctctcgctctctgccttccatcaccctacgccatctcccttcccaagatagtagaagatggcagacgctgaggatattcaacctcttgtttgtgacaatggaacaggaatggttaaggctggttttgctggagatgatgccccacgtgctgtgtttcccagcattgtaggtcgtcctcgtcacactggtgtgatggttggcatgggcc

SEQ ID NO: 56250 - DNA, 246 bp, Glycine max
  Clone ID: 700679688H1
cgctacctgaggaagattattgggaagctgtttggccaaacactcccattcccactgcactgcgagagcttctaaagcctctccctgcaggtgttgaaatcgatgaactccctaagcaaattgatgatacacagtacccaaaaacattcttctataaagaagaccttcatccaggcaaaacaatgaatgtacaattcaccaagcgtccctatgcacaaccttatggtgtatatacatggttaacgg

SEQ ID NO: 56251 - DNA, 254 bp, Glycine max
  Clone ID: 700679689H1
caaataataccaaaaaacaccatgatgcttggggagacccaccgcccaaatccaaccgtacacgtgccaccgtgggcgccggagatcttctcaccatacaccggcaatgccgattactctccgtactccatgcaagaagcacttagtgcacttcagcactacgaatccaccgatgctgagtcagactcggaggttccgtctcgggaaccggaagtcccggtggacgcttactcctgcgaccatttccgcatgtt

SEQ ID NO: 56252 - DNA, 249 bp, Glycine max
  Clone ID: 700679690H1
gtgtatcatcgcttattgggcgcagatgctttgtgtgcttctggtgattgcgtgaattgcagactatgtgctctggtgtaatgtatttgttagactgtacttttacagcctcttgacttcatctgctcccttttaagccttgattcatatgaatgttactagttaaagctgttgcgatagactagttttgtacttttagctggatcatctgggctgatacagcctgttttaattatatagtcctggact

SEQ ID NO: 56253 - DNA, 249 bp, Glycine max
  Clone ID: 700679692H1
caattttggttaagagtcttgaaaaagcaagaggaaaaaaaataccaaccatggcaaccatttctgatcaacctagagggtcctactcctatggaacctcatatggagcaccctatggaaccacgtatgagaccaacaccagcattaacaagccaccttcacgccaaacagtgaagttcataactgctgccactattggcatcacactcttgctcctggctgggttgaccctcacaggcactgtcatag

SEQ ID NO: 56254 - DNA, 265 bp, Glycine max
  Clone ID: 700679701H1
tccaaacccaacacccttcttctcccccaccatgctgacgctgattacctcatcgttatccttaacgggactgccattcttaccttggtgaacaacgacgaccgagactcttacaaccttcaatctggcgatgccctaagagtccctgcaggaaccacatactatgtggttaaccctgacaacgacgagaatctcagaatgataacactcgccatacccgttaacaaacccggtagatttgagagtttcttcctatctagcactc

SEQ ID NO: 56255 - DNA, 253 bp, Glycine max
  Clone ID: 700679702H1
aacacccggagagggaacctcagcaacccggtgagaaggaggaagacgaagatgagcaaccacgtccaatcccattcccacgcccacaacctcgtcaagaagaagagcacgagcagagagaggaacaggaatggcctcgcaaggaggaaaaacgcggagaaaagggaagtgaagaggaagatgaggatgaggatgaggaacaagatgaacgtcaattcccattcccacgcccacctcatcagaaggaagagcg

SEQ ID NO: 56256 - DNA, 114 bp, Glycine max
  Clone ID: 700679703H1
attgataacagctggagaagagtcagagctgcttgttggtgttaaaaatgatggggattcaagcttgaatgttattgcgatcaaggctagtgttcaccttccttttgatcaccg

SEQ ID NO: 56257 - DNA, 137 bp, Glycine max
  Clone ID: 700679704H1
cggctcgagagtggacaaaatcggaaccacattcctgggaattgatcttcccaatagaggtatgtggtcctaataatggttttgaaatgtggagttctgagtgggcaaatcaaacttcatggcatttgagtttcctt

SEQ ID NO: 56258 - DNA, 245 bp, Glycine max
  Clone ID: 700679705H1
acgctttcttgtgttaatggttctcatttggttgtatttggaggctgtggaaggcagggcttgctcaatgatgtgtttgtcctggacctggatgcaaagcctccaacttggcgtgaaatttctggattggcacctccacttcccagatcatggcacagctcctgtactcttgatggtactaagttgatagtttctgggggatgtgcagactctggagttctcttgagtgacactttcctccttga

SEQ ID NO: 56259 - DNA, 260 bp, Glycine max
  Clone ID: 700679706H1
aaatgaccaagttcacaatcctcctcatctctcttctcttctgcatcgcccacacttgcagcgcctccaaatggcagccccagcaagctagctgccgcaagcagctccagggggtgaacctcacgccctgcgagaagcacatcatggagaagatccaaggccgcggcgatgacgatgatgctgatgacgacgacaatcacattctcaggaccatgcggggaagaatcaactacataaggaggaacgaaggaaaagacgaa

SEQ ID NO: 56260 - DNA, 116 bp, Glycine max
  Clone ID: 700679707H1
cgtgagagtaaacccaattcttcctccaccaccagcaccaaagaaaccagtcttcacagatgctggtatgattgactatctcagtggtgatgcatacaaaacagaagcatcccatg

SEQ ID NO: 56261 - DNA, 244 bp, Glycine max
  Clone ID: 700679712H1
ggagccacaagaacaatcaaacagaagaggctcaaggtcgcagaagcagcagctacaggacagtcaccagaagattcgtcacttcaatgaaggagacgtactcgtgattcctcctggtgttccttactggacctataacactggcgatgaaccagttgttgccatcagtcttcttgacacctctaacttcaataaccagcttgatcaaacccctagggtattttaccttgctgggaacccagat

SEQ ID NO: 56262 - DNA, 244 bp, Glycine max
  Clone ID: 700679713H1
tggggttctactctgcttaccttgttgcagagaaggtcattgttaccaccaagcacaatgatgatgaacagtacatttgggagtctcaggctggtggctcttacactgttactagggacactgatggcgagcaactcggaaggggaaccaagatcaccctcttcctcaaggaagatcagttggagtacttggaggagaggagaatcaaggatcttgtgaagaagcactctgaattcattagtta

SEQ ID NO: 56263 - DNA, 242 bp, Glycine max
  Clone ID: 700679714H1
gttgatttgcagcgcactcatcgtattaaaggaatgattaaaatggtggccacagttggtattcctgagaatacaggtatcgcattggcctgtgctatgaatagttcttttagggggcgtgccagttctgatatttacaccatctgctctcaagactgtgaattatggaatcctgcttgcacaaaagcaatgactatgtcatttaatccaaacccgtgttctgatgcatggagtttggaatt

SEQ ID NO: 56264 - DNA, 104 bp, Glycine max
  Clone ID: 700679715H1
caacatacaaaaatcaacgtgtgcgcttttcttctctttacccgttgaaacatccttagttttcagattctgaaatcttgattctgaattcatcacaatgaatt

SEQ ID NO: 56265 - DNA, 149 bp, Glycine max
  Clone ID: 700679716H1
tgtgaagaagaatcgagacagaaagcattgaatcaagcaaatgaagcaaaggtagaagggaataagctttttgtagaagggaagtatgaagaggcattattacaatatgaacttgctttacaagcagcaccagacatgccttcatctgt

SEQ ID NO: 56266 - DNA, 133 bp, Glycine max
  Clone ID: 700679718H1
gaaagtcttccatagccccccaaaaatgaagagcaccatcttctttgctctctttctcttttgtgccttcaccacctcatacctaccttcagccatcgctgatttcgtgctcgataatgaaggtaaccctctt

SEQ ID NO: 56267 - DNA, 255 bp, Glycine max
  Clone ID: 700679719H1
gggaattggcctcatacacaccgagctcgtatctgggatcccagctattttctcccactttgttaccaatctccctgccttccaccaagttgttatcttcctttgcattaaatcagtccaagtgccacatgttagacctgaagaaaggttcttggtgggaagagttggcccaaaggagtatagactttaccggtgcatagcgcggtatggctaccatgacattcacaaggatgacattgagtttgagagggatct

SEQ ID NO: 56268 - DNA, 176 bp, Glycine max
  Clone ID: 700679721H1
ggttgccgcaccttaaaaccggaaacaaaagcaatcgttacttgatttcaagaatttctcaatttcttcctacttctttgtgtacgatttcttaagggaaagaaaatcactctctgtgctggccacagacttcgtgaatcattttcttttccactcttagtttatttgctgaacac

SEQ ID NO: 56269 - DNA, 254 bp, Glycine max
  Clone ID: 700679723H1
tcttattgaaacatggaactctcaacaccctgagctgcaatgcgccggtgtcactgtttccaaacgcaccctcaaccgcaacggcctccacttgccatcttactcaccttatccccaaatgatcattgtcgttcaagggaagggagcaattggatttgcatttccgggatgtcctgagacgtttgagaagccacaacagcaatcaagcagaagaggctcaaggtcgcagcagcaattacaagacagtcaccaga

SEQ ID NO: 56270 - DNA, 124 bp, Glycine max
  Clone ID: 700679727H1
gactaaggtatgttctcggactctgagtgcttgccctaagaggagaaggtgctgccaccgccgagacgagagttccgtcgccggcagcgccgcaactcacgcttcaaccctcaaactcacaccg

SEQ ID NO: 56271 - DNA, 245 bp, Glycine max
  Clone ID: 700679728H1
ggctccaaagaaaggtgcgaaaggtggagttgtagcagcaaagaagaaggttcaggagaaggtaacgaaccctttgttcgagaagcgtccgaagcagttcgggatcggaggcgcgctgccgccgaagcgggacctgacgcgcttcgtgaagtggccgaagaacgtccaaatccaacgcaagaagcgcatcctcaagcagaggctcaaggtccctccggctctcaaccagttcaccaaaaccctcg

SEQ ID NO: 56272 - DNA, 127 bp, Glycine max
  Clone ID: 700679729H1
ccgacagcatcaagcaaccaacacaaactgatttctcatttcgtagcatcaaccgctaactatgcagatactaattttcgctttggtttggttcaattctgtccgcagacatggttttcaggccaat

SEQ ID NO: 56273 - DNA, 146 bp, Glycine max
  Clone ID: 700679730H1
gccccccaaaaatgaagagcaccatcttctttgctctctttctcttttgtgccttcaccacctcatacctaccttcagccatcgctgatttcgtgctcgataatgaaggtaaccctcttgaaaatggtggcacatattatatcttg

SEQ ID NO: 56274 - DNA, 171 bp, Glycine max
  Clone ID: 700679731H1
caaacaccaaacccaagtgattatgtgttccttcaaaacatggttcaatttgttcatcattttccttgcctcggctgcaacacccatcttctcattaacagattccccaaatcaactctccacaaactttctagaaattgccaagaaacctgaagtatttgattggatggt

SEQ ID NO: 56275 - DNA, 252 bp, Glycine max
  Clone ID: 700679732H1
gtagtcatatgcttgtctcaaagattaagccatgcatgtgtaagtatgaactaattcagactgtgaaactgcgaatggctcattaaatcagttatagtttgtttgatggtatctactactcggataaccgtagtaattctagagctaatacgtgcaacaaaccccgacttctggaagggatgcatttattagataaaaggtcaacacaggctctgcctgttgctttgatgattcatgataactcgtcggatc

SEQ ID NO: 56276 - DNA, 155 bp, Glycine max
  Clone ID: 700679742H1
ctcgagccgctcttggccagctatagagaattcaggtggctgagtcacatagacctcttacatcaaggggaccatttaagaaagcacacttcacatcttgttggtgcattgtccaattctttaggctagaaattaccactactgttctaatagtc

SEQ ID NO: 56277 - DNA, 253 bp, Glycine max
  Clone ID: 700679743H1
gctgttctttcaatgtggagatattttgttggagatctcgtctttgaagtttctaagatgacttctccctacattaaatgtacagtctctttcttcatagcatttggaaatttggctgatgacaccatcaattttgaggcttttccccacaagctggtgcaatttggagagattcaggaaaaagttgtgttgaaattttcacaagaggaatttcttacagcttggtcaactcaggtgcgtcccgcaacgactc

SEQ ID NO: 56278 - DNA, 133 bp, Glycine max
  Clone ID: 700679745H1
gaagggggggaaatgatactacaagccactaggcatgggtctagcaaaggaaacaataatgggaggtggaggccgtgtggccaaagttgaaattcagcagaagaagcctctctcaagggttccaaacacaaag

SEQ ID NO: 56279 - DNA, 134 bp, Glycine max
  Clone ID: 700679746H1
atcctagtataccttaataaataatttaagatactatgatgagagcacggttcccattactgttgctgggacttgttttcctggcttcagtttctgtctcatttggcattgcttactgggaaaaagagaacccc

SEQ ID NO: 56280 - DNA, 136 bp, Glycine max
  Clone ID: 700679747H1
attgggaaaagcagaaccccagtcacaacaagtgcctccgaagttgcaatagcgagaaagactcctacaggaaccaagcatgccacgctcgttgcaacctccttaaggtggaggaagaagaagaatgcgaagaagg

SEQ ID NO: 56281 - DNA, 144 bp, Glycine max
  Clone ID: 700679748H1
acagacttcaatctggtgatgccctgagagtcccctcaggaaccacatactatgtggtcaaccctgacaacaacgaaaatctcagattaataacactcgccatacccgttaacaagcccggtagatttgagagtttcttcctat

SEQ ID NO: 56282 - DNA, 245 bp, Glycine max
  Clone ID: 700679749H1
cgacgacgtcgccgcaaagccttgcggcgttcacttccgcggcgaaacgcggcgaggcgcgctccgagccaccgtgaatctccgaaagccgaaaacgttgagcggtattctgaatttcgggtgttccacatcggatgcaagttggaggagctggaatccgagttcgctccacaggaactcgtccttcgcttgctgctccgccgagacaacgccgcatgttcagcacctcgcaacctccaccttct

SEQ ID NO: 56283 - DNA, 174 bp, Glycine max
  Clone ID: 700679752H1
gagagaagcgtcttaataaacgctcttctctgaaaaacctgatttcttctcttcttctcttctctttcgtttcgatcttcgatctctgaaaatgagagagtgcatttcaatccacatcggtcaggccggtattcaggtcggaaacgcctgctgggagctctactgcctcgaaca

SEQ ID NO: 56284 - DNA, 153 bp, Glycine max
  Clone ID: 700679753H1
ctcgagccgctccattggtccttaaacactcatcagtcatcaccatggccaagctagtttagtccctttgttttctgcttttcagtggctgctgcttcgctttcagttccagagagcagcctcagcaaaacgagtgccagatccaaaaactca

SEQ ID NO: 56285 - DNA, 221 bp, Glycine max
  Clone ID: 700679754H1
agacaatttttctctctctttctcttttattttctctccaatcaagcacaaggaaatacagtgctattctgttttcttttctccatattaaacataccaaaactgtggaaatttgaatgaaggaaagagtaatgaatttttgttttttagtagtctaacacttttcttttcaccttctcttcaatcatgcaaaataatgtgttgtattcctcttattttca

SEQ ID NO: 56286 - DNA, 248 bp, Glycine max
  Clone ID: 700679755H1
actatgtggtcaaccctgacaacaacgaaaatctcagattaataacactcgccatacccgttaacaagcctggtagatttgagagtttcttcctatctagcactgaagctcaacaatcctacttgcaaggattcagcaggaacattttagaggcctcctacgataccaaattcgaggagataaacaaggttctgtttagtagagaggaagggcagcagcaaggggagcagaggctgcaagagagcgtg

SEQ ID NO: 56287 - DNA, 253 bp, Glycine max
  Clone ID: 700679757H1
cttcaattcaaaggccatagtggtactagtgattaatgaaggagaagcaaacattgaacttgttggcattaaagaacaacaacagaggcagcaacaggaagagcaacctttggaagtgcggaaatatacgtactgaattgtctgaacaagatatatttgtaatcccagcaggttatccagttgtggtcaacgctacctcagatctgaatttctttgcttttggtatcaatgccgagaacaaccagaggaactt

SEQ ID NO: 56288 - DNA, 251 bp, Glycine max
  Clone ID: 700679758H1
gaaatattgccttctactttggtccttttcattttgaggaagcttcctcccaagcgtggtatcactcaatatcacccaattcgctgaaaagattagcatatggagaaaatttagtcaggatttcctgagtgcatgctcctctgctttctttgatgtttctctcccctccgcaaggataatttctagaggacagagaagtcggtctttcttctgttgagtgacaaagctaatatcattgtcttaaagttctc

SEQ ID NO: 56289 - DNA, 250 bp, Glycine max
  Clone ID: 700679759H1
ccaccagtgaaagtcattcctgcacatcgaatggcggttcacggtgacgatgacaccatggtgatggtggttcccaaactctctccgcccaacacctacgaagccgtcgtcaatggtggcaccttcgaccgattgcacgacggccaccgcctcttcctcaccgcttcagcggagttggcaaggcgccggattgtaattggagtttgcgatggacctatgctggcaaaaaaacagtttgctgaactgatac

SEQ ID NO: 56290 - DNA, 109 bp, Glycine max
  Clone ID: 700679760H1
attctatcctctctctctctctctctatctctctctctctcttttccttcggagtgtgtgtgcagattgatgacaagcaaccccattacgtggaagcctaagaggagaa

SEQ ID NO: 56291 - DNA, 141 bp, Glycine max
  Clone ID: 700679761H1
ccgagaacaaccagaggaacttccttgcaggttcgaaagacaatgtgataagccagatacctagtcaagtgcaggagcttgcgttccctgggtctgcaaaagatattgagaacctaataaagagccaaagtgagtcctact

SEQ ID NO: 56292 - DNA, 212 bp, Glycine max
  Clone ID: 700679763H1
ataaccgatgagaggagtggtatgcgtgagatcgacccactgtccgatatcttcgctcgagaatggtaatggaaagggttcatcaggaacatattagaggtcacctgagatcataatcttcgagcttgatcctatggggttacggatgataatgaggagggttcgaaattcgggaaggagaagaagaggtgatttctgattggggaaatctc

SEQ ID NO: 56293 - DNA, 118 bp, Glycine max
  Clone ID: 700679767H1
caactctaaaaggttccaaactctcttcaaaaaccaatatggccacgttcgcgtcctccagaggttcaacaaacgctcccaacagcttcagaatctccgagactaccgcattttggag

SEQ ID NO: 56294 - DNA, 130 bp, Glycine max
  Clone ID: 700679768H1
gttaaagaagagagaagaaaaatgcgaaagttcgatccatggcccgttttcttcaagcgcgagtggaaacgcaactggcccttcctcgttggattcgcagtcaccggagctctaatcaccaaactttccc

SEQ ID NO: 56295 - DNA, 250 bp, Glycine max
  Clone ID: 700679769H1
cggtgacttcctcgccttcgtggcggccggcaacattctcctcgaagccctcgtcggtgctgccggcctcgggcgctcctggtcctcgtacttcgccagcatggtcaaatccgaccccgacatcttccgaatccacgtcccctccttcaaacccgggttcgacatgctcgatcctctcgccgtcgctgttctcctcatcgccaatggcatcgccgtcagcggcactcgcagaacctccctcttaacctgg

SEQ ID NO: 56296 - DNA, 242 bp, Glycine max
  Clone ID: 700679770H1
gtcaacttcatcgtcctcctcgtacgcatgcgctctgcaaccttaacctaagtacactgtgaggtgagttccttgggtacacgcgggaatggctgctgcatctggcatgccagaggaggagacagcgatgtttcccgacaaaagtgtccatcccaggttggatgtctacgtgtgggacatggatgagacccttgtactgctcaactccttgctgaaatcatcatacgctgaggctttcaatg

SEQ ID NO: 56297 - DNA, 128 bp, Glycine max
  Clone ID: 700679771H1
caatatcctagtataccttaataaatagtttaagatactatgatgagagcacggttcccattactgttgctgggacttgttttcctggcttcagtttctgtctcatttggcattgcttactgggaaaa

SEQ ID NO: 56298 - DNA, 250 bp, Glycine max
  Clone ID: 700679780H1
tggcaatttgtaagaaagatgtttggagagttgaatgtggaatcccttctggatttccgctcacagttatttcgcaatagcatttttaatgagatgctcattagatatagctatgaaaaattactgcgccaggctaaagctccaagtatgtttttacaatccttcaaaaattttgtttctttgtgtgtgtatggtgatgataacttaattagtgttcatgaatatgtcaagccttactttagtggttcta

SEQ ID NO: 56299 - DNA, 65 bp, Glycine max
  Clone ID: 700679781H1
cgaactagtatgtaatattttattcacttgaataaagcgcattactatgtgcaatgagtgtgttt

SEQ ID NO: 56300 - DNA, 127 bp, Glycine max
  Clone ID: 700679782H1
ctcaccttttcctctctcaatttcctttcccttttgaaattatgatataagagaacaaaaactcccccttaaacagataaggtatatataagccacccttcagagcaatttgtccatcttcttcaat

SEQ ID NO: 56301 - DNA, 246 bp, Glycine max
  Clone ID: 700679783H1
ctaaggttgcacaagatatggttgaggaatggtttgattgtgttgatgaggaggattcctttgaggaagtttctttaagtgcagcactcaatggtgttgagggtttagactatatggaaagaattcctcttgccacatctgagggttttcctcatgtgctttcacgcaaaaatggtgaaaaaggcaaaaggagatttgtttctggggatggtgaagagatgacattgattccgggaaccagtgttg

SEQ ID NO: 56302 - DNA, 168 bp, Glycine max
  Clone ID: 700679784H1
gttcaatatcctagtacaccgtattaaagaatttaagatatactatgatgagagcgcggttcccattactgttgctgggagttgttttcctggcatcagtttctgtctcatttggcattgcgtattgggaaaagcagaaccccagtcacaacaagtgcctccgaagtt

SEQ ID NO: 56303 - DNA, 187 bp, Glycine max
  Clone ID: 700679785H1
ggcgccctcttccatttaccattccgagagaggtccgacgacctctcaggttctcgcagttgtcgtcggccttccggtcggcggcatcctcctgctcctggcaggactgaccctggctggaactctcaccgggctggtggtggcaacaccgctcttcatcatcttcagcccggtgctgattccggcc

SEQ ID NO: 56304 - DNA, 236 bp, Glycine max
  Clone ID: 700679786H1
gcagcagagccaacagggccatcaaaatgcaagtatgtctagtggatcatccacctctcagaagcagcatgctcaaaaccaacaacaaaagcctaataataatgctactgggtccaatgggggtggaagcttgcaaggctttcctgtcaccaaaaacccaccatcactgccactgcagttgcaacagcaacagccgcagcagaggcagaatcatcacccttctcatccagctcgcc

SEQ ID NO: 56305 - DNA, 245 bp, Glycine max
  Clone ID: 700679788H1
ctcaaacctcttcgttccttcgattcattccatttcttccaaaatggccaaagacccagttcgcgttctcgtcactggagccgcagggcaaattggatatgctcttgtccctatgattgctaggggagtgatgctgggtcctgaccagcccgtgatcctccacatgcttgacattcctccagcagcagagtcattgaatggggttaaaatggaattggtggatgctgcattccctcttcttaaag

SEQ ID NO: 56306 - DNA, 248 bp, Glycine max
  Clone ID: 700679792H1
ggcaaatcaaacttcatggcatttgagtttccttattgacaatcccaaacagtctacagtttttgatattctcttgggaatttctcaagattttgaaattgctggtaatactcttatgccagctttttctgttccacaggctactgccagatcttctgaaaatgcggaatcctctgcatgatctggaatttgtgttttctttcgcttgttcgtttgtttaattcaataaaggaaattaggcatgaccc

SEQ ID NO: 56307 - DNA, 248 bp, Glycine max
  Clone ID: 700679793H1
cctgccagtagtcatatgcttgtctcaaagattaagccatgcatgtgtaagtatgaactaattcagactgtgaaactgcgaatggctcattaaatcagttatagtttgtttgatggtatcttctactcggataaccgtagtaattctagagctaatacgtgcaacaaaccccgacttctggaagggatgcatttattagataaaaggtcaacacaggctctgcctgttgctttgatgattcatgataa

SEQ ID NO: 56308 - DNA, 251 bp, Glycine max
  Clone ID: 700679794H1
gtgcaatttagctgaagcaaagcaatggctacttcaaagttgaaaacccagaatgtggttgtatctctctccctaaccttaaccttggtactggtgctactgaccagcaaggcaaactcagcggaaactgtttctttcagctggaacaagttcgtgccgaagcaaccaaacatgatcctccaaggagacgctattgtgacctcctcgggaaagttacaactcaataaggttgacgaaaacggcaccccaaa

SEQ ID NO: 56309 - DNA, 235 bp, Glycine max
  Clone ID: 700679795H1
gcacagggtgagataaatgctggaataaatgtgaggaagggtcagattaccaacatcttggaggagaatgtggtgcagccccttcttgttagcacaagtgcgatcatgttggcgacagagtgtgtgcggatgattttgaagattgatgatattgtaactgtgaggtagagttgattgaacaatgtggaatttagagagaaactgaatcacccattatcttctttttttttttttt

SEQ ID NO: 56310 - DNA, 212 bp, Glycine max
  Clone ID: 700679801H1
caatatcctagtataccttaataaataatttaagatactatgatgagagcacggttcccattactgttgctgggacttgttttcctggcttcagtttctgtctcatttggcattgcttactgggaaaaagagaaccccaaacacaacaagtgtctccagagttgcaatagcgagagagactcgtacaggaaccaagcatgccacgctcgttg

SEQ ID NO: 56311 - DNA, 262 bp, Glycine max
  Clone ID: 700679804H1
aagcactattgttggtcttcttcaccagaactctatgaattctagacaaccaaattcaatgaacaatgcaagcagtccatatggaggtagttctgttcagattccatccccaggttcctccagtacagtgccacaagcccagccaaactcatccccttttcaatcaccaacaccatcctcttctaacaaccccccacaaacatctcaccctgctttaacatctgccaatcacatgagtacaacaaactctccagctaatatt

SEQ ID NO: 56312 - DNA, 164 bp, Glycine max
  Clone ID: 700679805H1
aaatactattactagctaatgagtatgtatctgaagcagaagcagatgatagtgggtgtggcattggtggtgttcttgttgttgatttcggtgaagggacaaagcatatgcaacgtatccttaccagatttaatgacatgcaaaccagcggtgacgcctccaaa

SEQ ID NO: 56313 - DNA, 103 bp, Glycine max
  Clone ID: 700679806H1
caaaatactccacaattaaccctctgtctttttggaaggatgtcttacgttgctcataacgttaatcagccccaagagaaagatttgttagagggaaattttt

SEQ ID NO: 56314 - DNA, 260 bp, Glycine max
  Clone ID: 700679808H1
aaaattcttccaccaagttatgggttaccttgtgttgcttcttttctccctcttaggtctctcttctagttccagcatatcaactcatcgttccatattggaccttgacctaaccaagtttaccacacagaaacaggtgtcttcactgttccaactatggaagagtgagcatggacgtgtctaccataaccacgaagaagaggcaaagagacttgagattttcaagaataacttgaactatatcagggacatgatgcaaa

SEQ ID NO: 56315 - DNA, 262 bp, Glycine max
  Clone ID: 700679809H1
gttctgaggctatcggccttgcaccaagagccgtggaaaagtgcaagaacagaagctgaagtgattttagggttcggccacaacaatcggcttggttgttcatctgtgtcacaaggaagcaaatgtactcgagcaagatcgagtctcttttaggaataagagtttaattataattattattattatgtgtctctgtaattttcttatatgtgtattatacgaatgagaaaatagttggaaattcgttagggacagaaataat

SEQ ID NO: 56316 - DNA, 259 bp, Glycine max
  Clone ID: 700679810H1
cggctcgaggtggctggtgaaggcagcgactgcgagggaagggaagcatctttagctccaaatccaatggcggatacctcaagccgatcaagagacctcgacaagctccttctccgccctggcaatctcgtcggtcctaggttcgaacctggccctgagttgcgagatgaccttcaggccttcgccaattcttgttcagacttgaagatgttggcaaacccaaagccgaggtagctgccaagcgtgtcatggagagaat

SEQ ID NO: 56317 - DNA, 256 bp, Glycine max
  Clone ID: 700679811H1
gatgttaaaagttaataaaatacttgacacctttctttatgtcaatctaagcaattaattaatgacgtgagaggagcatcatagattcatcattcttgttacttgttcacgtccactatgtaacttcctttttattttcgtgggtcaaggattagagcaccactcatgggttttacatgctgcgacaagttgatgattatgattataatcctgctctctttctaccttttgtcatgactcctaacaaatcataatc

SEQ ID NO: 56318 - DNA, 265 bp, Glycine max
  Clone ID: 700679812H1
ctcgagctcgagccgctaaaatatcagcagcagcagcaaggaggttcccaaagccagaaaggaaagcaacaagaagaagaaaacgaaggaagcaacatattgagtggcttcgcccctgaattcttgaaagaagcgttcggcgtgaacatgcagatagtgagaaacctacaaggtgagaacgaagaggaggatagtggagccattgtgacagtgaaaggaggtctaagagtcacagctccagccatgaggaagccacacaagaaga

SEQ ID NO: 56319 - DNA, 263 bp, Glycine max
  Clone ID: 700679813H1
caaactttccgttccaaggaaatctccaagagcaacgttgttgatgatatggtcaacagcaatgccatcctctatgagcctggtgaacatccagaccatgttgttgttattaagtatgtgccttacgtaggggacagcaagagagccatggatgagtacacttcagagatattcatgggtggaaagagcaccattgttttgcacaacacatgcgaggattccctcttagctgctcctattatcttggactggtccttcttgct

SEQ ID NO: 56320 - DNA, 267 bp, Glycine max
  Clone ID: 700679814H1
tgctcactctcacgtggatcacatagatccttctgtgatggtgtttttcaccatcgaagatttgaaggttgggaaaacaatgcctattcattttcccaagagggaccctgcaacatcccctaagttgtggccaagagaagaagcagattcacttcctttctcactgaacaaactcccaaaccttctcaaaatcttctctgtatctcaaaactctcccaaagccaaggccatggaagatacccttagggaatgtgagaccaaacccat

SEQ ID NO: 56321 - DNA, 267 bp, Glycine max
  Clone ID: 700679815H1
ctcgagccgctcgtgctcagacttgtcactaataacatgagaccatcagggttccacgtaggggcaaggtgttggagtaggacacatgcttatacttgagataatcatgacatttgggctaatgtacactgtgtatggtactgcaattgatcccaaaaggggttctgttagcaacattgcacctttggcaattggactcattgttggggcaaacatccttgttggtgggccatttgatggagcctgcatgaacccgctctagctttt

SEQ ID NO: 56322 - DNA, 269 bp, Glycine max
  Clone ID: 700679816H1
cccatgtggaattgtacttccaaatacagtgctgttggagaggatgaatattgcttgctcctttcttgagcaagttgggcttataaagttagcagcacatatctttcatttcatgggttgtttacacatttttgtgagcgctaaagaggatgaaatactcaaggaaattggaaacttgcattaatttctgtatttcatcaaatagtctaaaatgactgcaaccttcagtccgtcctcctgtctattgctcctgatttgaaattctaatt

SEQ ID NO: 56323 - DNA, 260 bp, Glycine max
  Clone ID: 700679817H1
tagcatcacaaccgccaccagccttgacttcccagccctctggcttctcaaactcagtgcccagtatggatcactccgcaagaatgctatgttcgtgccacactacaccctgaacgcgaacagcataatatacgcattgaatgggcgggcattggtacaagtggtgaattgcaatggtgagagagttgtttgatggagagctgcaagagggaggggtgctgatcgttccacaaaacttgtgggtggctgcaaatcccaga

SEQ ID NO: 56324 - DNA, 259 bp, Glycine max
  Clone ID: 700679818H1
gagctagtttagttatctactcttttctgcatgtttgttctctcaacgactcctccgcgaaagagtattattcaatattttggttgggttgaatcccggggttgaagcgttgcagacatcacggctattctaagagtgtctcgctccctcattcatgtccgatctgtacgacggaggacgggtagttgcgtaactgccgttaacccttcgccgcacggtgggcgtggtgctttgccttctgaaggtggtagccttcaga

SEQ ID NO: 56325 - DNA, 262 bp, Glycine max
  Clone ID: 700679819H1
gctcatttacacacctctccaacctttcactttcagctttatttgaatccctctctctcctttccaaatggccagcgttgaggttgcacatcaaacaccaacaacagttccagaaaatgaaacaaccgaggtaatcaagacccaggaaacaaccccggaaccagtaccagccactgaggctcctgcaacagaacaagcagcagctgaggttcctgctcaagaagaacaacaagcaactgaggttcctgccccaaatcaacca

SEQ ID NO: 56326 - DNA, 256 bp, Glycine max
  Clone ID: 700679820H1
aagtcgtgcaagcaacaactgtagatcagcaaaatgccagagaagagcctgctaaacagagttcaactacatcagtctttgtgaactcgcaactgatgcgagaagaacaaattcagaatgctgtgaaatttctatcacacccaaaagttagaggttcacctgtcatgtataggcgatcatttctagagaagaagggccttacgaaggaggagattgatgaagcttttcagcgtgtgccagattcagctccaaagtg

SEQ ID NO: 56327 - DNA, 160 bp, Glycine max
  Clone ID: 700679821H1
ctgccaaaggccacaacgagattgtggcattgttgctggagaatggagctgatgtgaattccagaaattattgtggccagaccgcattgatgcaagcttgtagatatgggcattgggaggttgcacagagacttgtactcttcagatgcaatgttataag

SEQ ID NO: 56328 - DNA, 252 bp, Glycine max
  Clone ID: 700679822H1
atttgatcgcagtgcctactggtgttgcatggtggatgtacaacaatgaagacactcctgttgttgccgtttctattattgacaccaacagcttggagaaccagctcgaccagatgcctaggagattctatcttgctgggaaccaagagcaagagtttctaaaatatcagcaagagcaaggaggtcatcaaagccagaaaggaaagcatcagcaagaagaagaaaacgaaggaggcagcatattgagtggct

SEQ ID NO: 56329 - DNA, 226 bp, Glycine max
  Clone ID: 700679823H1
tccaaatacagcagtttgcatatgaatttttatctgtttgcttataggagaaacataatctttattgttccttgtttccataatgaagaaaaagtgtgataaaacctcaaagtaaatcgaccttgtatgaaatgaatctggctatgagaaatacttgtttcagaggatttcctgtttgaaaccagtttggaatagttgcagtttatatttatggggaccattgaaa

SEQ ID NO: 56330 - DNA, 261 bp, Glycine max
  Clone ID: 700679824H1
gccaaaaaccacacaaagcacaatagaggaggaacaacaatcacaaagggcatgaggaccaatgtaggagatattgttcaagtagaaggagggcacattgttaggtccacaggtagaaaagatcgccacagcaaggtgtacacatcgaaagggccacgcgatcgtcgcgttagactctcggcacacacagccattgagttctatgatgttcaagacaggcttggctatgacaggccaagcaaggctgtggactggctcatc

SEQ ID NO: 56331 - DNA, 244 bp, Glycine max
  Clone ID: 700679825H1
aaataatttaagatactatgatgagagcacggttcccattactgttgctgggacttgttttcctggcttcagtttctgtctcatttggcattgcttactgggaaaaagagaaccccaaacacaacaagtgtctccagagttgcaatagcgagagagactcgtacaggaaccaagcatgccacgctcgttgcaacctccttaaggtggagaaagaagattgtgaagaaggtgaaattccacgacc

SEQ ID NO: 56332 - DNA, 259 bp, Glycine max
  Clone ID: 700679826H1
cagaagaggctcaaggtcgcagcagcaactacaagacagtcaccagaagattcgtcacttcaatgaaggagacgtactagtgattcctcctggtgttccttactggacctataacactggcgatgaaccagttgttgccatcagtcttcttgacacctccaacttcaacaatcagcttgatcaaaaccccagagtattttaccttgctgggaacccagatatagagcacccagagaccatgcaacaaagcagcagcaga

SEQ ID NO: 56333 - DNA, 230 bp, Glycine max
  Clone ID: 700679828H1
ggcccactgggattggctattgacagaacccaatgactgaattctggttcttgccgcaaccaacaggccatttgaccttgatgaagcgatcataatacggtttgagcgcaggtaagaccacacttttgtctcatggttggcaggatcttctgttgattacttgcttctgttcaagagttatatttgctttatgagaactgccacaatcattatgttcatcagctgtggtg

SEQ ID NO: 56334 - DNA, 257 bp, Glycine max
  Clone ID: 700679830H1
accttaataaataatttaagatactatgatgagagcacggttcccattactgttgctgggacttgttttcctggcttcagtttctgtctcatttggcattgcttactgggaaaaagagaaccccaaacacaacaagtgtctccagagttgcaatagcgagagagactcgtacaggaaccaagcatgccacgctcgttgcaacctccttaaggtggagaaagaagaatgtgaagaaggtgaaattccacgacacgacc

SEQ ID NO: 56335 - DNA, 267 bp, Glycine max
  Clone ID: 700679832H1
aacgcgaacagtgtgatctatgtgactcgagggaaaggaagagttagagtggtgaactgccaagggaatgcagtgttcgacggtgagctaaggaggggacaattgctagtggtgccgcagaactttgtggtggctgagcaagggggagaacaaggattggaatacgtagtgttcaagacacaccacaacgccgtgagcagctacattaaggatgtgtttagggcaatcccttcggaggttctttccaattcttacaccttggccaga

SEQ ID NO: 56336 - DNA, 263 bp, Glycine max
  Clone ID: 700679833H1
gcaaacattgaacttgttggcctaaaagaacaacaacaggagcagcaacaggaagagcaacctttggaagtgcggaaatatagagccgaattgtctgaacaagatatatttgtaatcccagcaggttatccagttgtggtcaacgctacctcaaatctgaatttctttgctattggtattaatgccgagaacaaccagaggaacttcctcgcaggttcgcaagacaatgtgataagccagatacctagtcaagtgcaggagct

SEQ ID NO: 56337 - DNA, 163 bp, Glycine max
  Clone ID: 700679834H1
caaatttagtagccttcatacaaacctcaagagagtattagaaattaaaaatttgttgaaatttgatttttttgagtctatctttttatccgtgttgcatgctctgcctaacaacaaaagacttaaattgttattgatacgttttgcattcgttggaaatatc

SEQ ID NO: 56338 - DNA, 258 bp, Glycine max
  Clone ID: 700679835H1
aaattctggaattcagggatttttacatcctagcatcagtctatcacagacatcgctgattgaaatatttgtgtacaagagatgcagaaacatagcttgccaaaaccaacttcctgctgaagattgtacctgtgagacgtgcgccaatggcaatggtttctgcaatctttgcatgtgtgttatctgcagcaagtttgactttgaagtaaatacatgccgctggattggatgtgatttgtggtctcattgactcacaca

SEQ ID NO: 56339 - DNA, 257 bp, Glycine max
  Clone ID: 700679836H1
ctgaacatcctgcattggggtggcagtccatccagtgacacaaatgattggtttatttcctctcaggaatgtgttcccaggacctattgtgttttaaatccacaagatccttttgtgttaaataggtggatgggaaaactgactttccctcagggcacttcccgaagtgttaagagaatgcctctttctataggggggaggagctggtgcaaagagtgctattctcatgaatatgccaaatgctgtgcttcaatgtg

SEQ ID NO: 56340 - DNA, 84 bp, Glycine max
  Clone ID: 700679837H1
gtcggaaggtgggttcattgagacctggaaccctaacaacaagccattccagtgtgccggtgttgccctctctcgctgcaccct

SEQ ID NO: 56341 - DNA, 256 bp, Glycine max
  Clone ID: 700679838H1
atttttggcatgatatacccgggttgtcctagcacatttgaagagcctcaacaacctcaacaaagaggacgaagcagcagaccacaagaccgtcaccagaagatctataacttcagagagggtgatttgatcggagtgcctactggtgttgcatggtggatgtacaacactgaagacactcctgtggttgcagtggctatgattgacaccagcaggttggagacccagctcgaccagatgcctaggagattctatc

SEQ ID NO: 56342 - DNA, 117 bp, Glycine max
  Clone ID: 700679840H1
ctgttcccaatcacgtatgtaacagaaaaaaaaattagtggtgacggatagggatggggacaggggtcacgctgggccagggaagagggttcctcttgtaactgatgttcaaaattt

SEQ ID NO: 56343 - DNA, 255 bp, Glycine max
  Clone ID: 700679841H1
catgatcagcagtctattgctgatgctcttttgaagcttgttagcaacaaacaactttgggcaaaatgtagacagaatgggttaaagcatattcatttattttcatggcccgagcactgtaagacttacctttctaaaatagccacttgcaagccaaggcatccacaatggcagcgaagtgaggatggaggtgaaagttcagaatcagattcaccaggtgattccttgagagatttacaggacttgtctctaaat

SEQ ID NO: 56344 - DNA, 255 bp, Glycine max
  Clone ID: 700679842H1
gctagctagctagcaagcaagcacagagatggaggcaaagcgaggccatgccctcatgtgcttggcacgtgtttcactcttcctctgcgctctaaccctatccgctgctcacggaagcaccacggttcaagacatcgcgagaaagttgaaactcggggacaacgagcttctgcgcacggagaagaagttcaaggttttcatggagaattacgggaggagctactccacagaggaggagtatttgcgccgtttggg

SEQ ID NO: 56345 - DNA, 252 bp, Glycine max
  Clone ID: 700679843H1
aaaattcttccaccaagttatgggtccccttgtgttgcttcttttctccctcttaggtctctcttctagttccagcatatcaactcatcgttccatattggaccttgacctaaccaagtttaccacacagaaacaggtgtcttcactgttccaactatggaagagtgagcatggacgtgtctaccataaccacgaagaagaggcaaagagacttgagattttcaagaataacttgaactatatggggacatg

SEQ ID NO: 56346 - DNA, 256 bp, Glycine max
  Clone ID: 700679844H1
gttcctcactgaccaagccaaggcgatgagaaccaaactttctttagctatctttttcttttttcttttagccttattttcaaacctagcctttggcaaatgtaaagaaaccgaggtagaagaagaagaccctgagctcgtaacatgcaaacaccaatgccaacagccacagcaatacactgagggtgacaagcgggtatgcttgcaaagatgtgacaggtatcatcgtatgaagcaagagcgagaaaacaaatcc

SEQ ID NO: 56347 - DNA, 259 bp, Glycine max
  Clone ID: 700679847H1
cttgcctgggtaccatcaggctgttaagggtgaatggaatgttgctggcattgcacatagagcttatgatcttgaaggcaagacagtaggaaccgttggcgcgggacgaattgggaagcttttactccagaggttgaaaccttttaactgtaatcttctgtattttgatcgacttaggatcgatcctgaattggagaaagagattggagcaaaatttgaggaggaccttgatgcaatgcttccaaagtgtgatgtaatt

SEQ ID NO: 56348 - DNA, 262 bp, Glycine max
  Clone ID: 700679848H1
ctcgagccgctcgtgctcagacttgtcactaataacatgagaccatcagggttccacgtagggcaaggtgttggagtaggacacatgcttatacttgagataatcatgacatttgggctaatgtacactgtgtatggtactgcaattgatcccaaaaggggttctgttagcaacattgcacctttggcaattggactcattgttggggcaaacatccttgttggtgggccatttgatggagcctgcatgaccctgctctagc

SEQ ID NO: 56349 - DNA, 252 bp, Glycine max
  Clone ID: 700679849H1
gaatagatcctcaatacaatgaggttcaggctcagatggaaacaaatttgtttaaattgtctcttgatgatgttgaaactcctaaaggttccatgttggatcttaaaatttctcaatctaaaattgcacttcccaaaaacacagttggaggaaccattctgcgtagtgatctattggcaaattttttgacagggggcaattttagagcaagtgttgatttgcagcgcactcatcgtattagaggaatgatta

SEQ ID NO: 56350 - DNA, 114 bp, Glycine max
  Clone ID: 700679852H1
ctttttcttttctttttttcgtttcgttcggaaaacgcgtaggctgtgccgtcgtttttagtgggtggatgggaacgacgtcgtgtgagtacgtgagcttggaggaggttttta

SEQ ID NO: 56351 - DNA, 257 bp, Glycine max
  Clone ID: 700679853H1
ttgagagatcacaacagcaatcaagcagaagaggctcaaggtcgcagcagcaactacaagacagtctccagaagattcgtcacttcaatgaaggagacgtactagtgattcctcctggtgttccttactggacctataacactgtcgatgaaccatttgttgccatcagtcttcttgacacctccaacttcaacaatcagctttatcaaaaccccatagtattttaccttgctgggaacccagatatagagcaccca

SEQ ID NO: 56352 - DNA, 251 bp, Glycine max
  Clone ID: 700679854H1
tgagaggaagagggagtgagagagagtgttcttcgtttgctaccttctcccagaaatggttacgttcaggtttcaccagtaccaggtggtcgggagggctctcccaacggaagcagatcagcatccgaagatctaccgaatgaagctctgggccaccaacgaggttcgcgccaagtctaagttctggtattttttgaggaagctgaagaaggtgaagaagagcaatggtcaagttcttgctatcaacgaga

SEQ ID NO: 56353 - DNA, 250 bp, Glycine max
  Clone ID: 700679856H1
agtgatttcagtgagtgatcggtgttcacttgatctcatcataatcgtcagcgtcaattgaagaagatgccgatcagatacatcgccgtcggaaggcctgaagaggcgactcaccccgacacgttgaaggcggctttggctgagtgcatctcaaccttcatcttcgtgttcgccggctcaggctccggcatcgcctacaacaagctcaccgacaacggcgcggccacccctgccggcctcatctccgcct

SEQ ID NO: 56354 - DNA, 250 bp, Glycine max
  Clone ID: 700679857H1
actcgccatacccgttaacaagcctggtagatttgagagtttcttcctatctagcactgaagctcaacaatcctacttgcaaggattcagcaggaacattttagaggcctcctacgataccaaattcgaggagataaacaaggttctgtttagtagagaggaagggcagcagcaaggggagcagaggctgcaagagagcgtgattgtggaaatctcgaaggaacagattcgggcactgagcaacgtgcca

SEQ ID NO: 56355 - DNA, 249 bp, Glycine max
  Clone ID: 700679858H1
gtggccactgcatccttcactcccacaacaccattttctgtcttaaaggcggcgacactttcattccatgtctccactctcttcatctatgaattttgaacactttttttcactcttgttcttcttctcgttcctattccatttagtttgatgttctccctcgccaagggactcgattctcttcccaaccctctcattccgccatttcctcgaacatgtggcggcacgcgccaaacacgctgccgcggt

SEQ ID NO: 56356 - DNA, 250 bp, Glycine max
  Clone ID: 700679860H1
gaggagaatgaccatacctgagatccgtcaacacccatggttccaagctcgacttccacgttatttagctgtgccaccaccagatacaatgcaacaggccaaaaagattgatgaggagatccttcaggaagtggtgaaaatgggatttgacaggaatcaattggttgaatctcttgggaacaggatacaaaatgagggtactgtggcatactatttgttattggacaaccgatttcgtgtttcagtggct

SEQ ID NO: 56357 - DNA, 254 bp, Glycine max
  Clone ID: 700679861H1
taagaaagtcttccatagccccccaaaaatgaagagcaccatcttctttgctctctttctcttttgtgccttcaccacctcatacctaccttcagccatcgctgatttcgtgctcgataatgaaggtaaccctcttgaaaatggtggcacatattatatcttgtcagacataacagcatttggtggaataagagcagccccaacgggaaatgaaagatgccctctcactgtggtgcaatctcgcatgagctcga

SEQ ID NO: 56358 - DNA, 236 bp, Glycine max
  Clone ID: 700679862H1
agatctccattcccaatccatggcttccgctgagtcatccccttccaagaaaattcagattcaaagggatgacactagatttgacgcctatgtggatagaaaatacgatgctcatgggatagcagttattcaggagtcgtgcggtatggactacgaaattaagatccatgccgtgaggatttctcagcttggtagtgggtttaaagctctaattccagatttatacagaggaaagg

SEQ ID NO: 56359 - DNA, 241 bp, Glycine max
  Clone ID: 700679863H1
gaaagtcttccatagccccccaaaaatgaagagcaccatcttctttgctctctttctcttttgtgccttcaccacctcatacctaccttcagccatcgctgatttcgtgctcgataatgaaggtaaccctcttgaaaatggtggcacatattatatcttgtcagacataacagcatttggtggaataagagcagccccaacgggaaatgaaagatgccctctcactgtggtgcaatctcgc

SEQ ID NO: 56360 - DNA, 262 bp, Glycine max
  Clone ID: 700679864H1
ctcgagccgctcgagccgtaaaattcttccaccaagttatgggtttccttgtgttgcttcatttctcccacttaggtctctcttctagttccagcatatcaactcatcgttccatattggaccttgacctaaccaagtttaccacacagaaacaggtgtcttcactgttccaactatggaagagtgagcatggacgtgtctaccataaccacgaagaagaggcaaagagacttgagattttcaagaatacttgaactatatc

SEQ ID NO: 56361 - DNA, 258 bp, Glycine max
  Clone ID: 700679866H1
ggagtcagagaaaccctaggtaagaagaaaagatgccggctggtcatggtttgagatcccgcaccagagattccttctctcgtcctttcaggaagaagggaaccatcgccctcaccacatacctgagaacctaccacgtcggcgactatgttgacgtcaaggttaacggtgccgttcacaagggaatgccccacaaattctaccatggccgcaccggacgcgtctggaatgtcaccaaacgtgctgttggcgtcgaag

SEQ ID NO: 56362 - DNA, 255 bp, Glycine max
  Clone ID: 700679868H1
tctcgagccgaatcggctcgagataatgtccctcacacgataaaatacaggtgaaaagctcatacgcgcgggagagagaagagactaagaacgtgtaattggggtacgggataggtgctcaagttcaactacggatttatggtcaacttaattacaccagtgaatactgaatagccaaggagattgatcagattcataaagacatgatgatcgcaaactgtactataatttctcagcatctacccaataatatat

SEQ ID NO: 56363 - DNA, 144 bp, Glycine max
  Clone ID: 700679870H1
cctagcctttggcaaatgtaaagaaaccgaggtagaagaagaagaccctgagctcgtaacatgcaaacaccagtgccaacagccacagcaatacactgagggtgacaagcgggtatgcttgcaaagatgtgacaggtatcatcg

SEQ ID NO: 56364 - DNA, 245 bp, Glycine max
  Clone ID: 700679871H1
aaattaagtttgaatctgcataccccgcctattacataaacgaaaccctaatttctaaccccttagagtttggattgggagattgcactacagtgatagggcaagtgtctttccaaactctaaggggttagaaattaagtttgaatctgcataccccgcctattacataaacgaaaccctaattttgcaaataaagttcagttacccacagcagtgtgaaagaaagaatccttggtggggcattt

SEQ ID NO: 56365 - DNA, 246 bp, Glycine max
  Clone ID: 700679873H1
caatatcctagtataccttaataaataatttaagatactatgatgagagcacggttcccattactgttgctgggacttgttttcctggcttcagtttctgtctcatttggcattgcttactgggaaaaagagaaccccaaacacaacaagtgtctccagagttgcaatagcgagagagactcgtacaggaaccaagcatgccacgctcgttgcaacctccttaaggtggagaaagaagatgtgaag

SEQ ID NO: 56366 - DNA, 242 bp, Glycine max
  Clone ID: 700679874H1
gtcgcagagaaagaaaaccctagctcaccgtttcaagatgcaaatcttcgttaagaccctcactggtaagaccatcactctcgaagtcgagagttcagataccatagacaatgtaaaggccaaaattcaagacaaggaagggatcccaccagatcagcaacggctcatttttgctggcaagcagcttgaggatggacgtacccttgctgattataacatccaaaaggagtccactctccatt

SEQ ID NO: 56367 - DNA, 250 bp, Glycine max
  Clone ID: 700679875H1
cttaattattaacacttccttagttcaatatggggaagcccttcactctctctctttcttccctttgcttgctactcttgtcgagtgcatgctttgctattagctccagcaagctcaacgagtgccaactcaacaacctctacgcgttggaacccgaccaccgcgttgagtccgaaggtggtttgattcaaacatggaactctcaacaccctgagctgaaatgcgccggtgtcactgtttccaaactcac

SEQ ID NO: 56368 - DNA, 239 bp, Glycine max
  Clone ID: 700679876H1
gagttgatcagcaaagggcagcagcttgatgcggttcactttacctatgaagtgggtctggtggaaaagttccctcctgttcccttgttgaagtcttttctcaaggatgctaagaaagttgcggcttctattttggaagatcctaataatgcaggccgagctgcgtacctagctgcaaggaaagagcagtctgcactcagggctgtgattaaatgcattgaagaatacaaacttgagga

SEQ ID NO: 56369 - DNA, 254 bp, Glycine max
  Clone ID: 700679877H1
ttttctcctcacttgttgcataacaccaaagaactacaaatagttgtcattgcacagccatagatggagtttcccaacgaagcaataatatcagaagggtctaattctcagaagaaaacggggagagggaaaatagaaatcaaacggatcgagaacacaacgaataggcaagttaccttctgcaaacgccgtaacggattgctgaagaaggcttatgaattgtctgttctgtgtgatgctgagttgctcttgtt

SEQ ID NO: 56370 - DNA, 253 bp, Glycine max
  Clone ID: 700679878H1
ccagaagattcgtcacttcaatgaaggagacgtactagtgattcctcctggtgttccttactggacctataacactggcgatgaaccagttgttgccatcagtcttcttgacacctccaacttcaacaatcagcttgatcaaaaccccagagtattttaccttgctgggaacccagatatagagcacccagagaccatgcaacaacagcagcagcagaagagtcatggtggacgcaagcagggcaacaccagc

SEQ ID NO: 56371 - DNA, 255 bp, Glycine max
  Clone ID: 700679879H1
attacactcacactctttgtgaaaaaggggagtttcttattctttctagacgcttccattgatcggcgatttcttagacatggcggacatcacgaacacgaggaagtgaagggtgagtccttgttggagaagatttctgggaagatccacgaccacgattcgtcatcttcgtcggattccgacaacgagaaaaccagcgcttctgactccttgaagtcaaaggttttcaggcttttcggcagaaaaagcccattc

SEQ ID NO: 56372 - DNA, 257 bp, Glycine max
  Clone ID: 700679880H1
aagaaaacccgggaacgcaacctagaacaaaaacgaagcagttgaagatggagcacgacgaagacgaagagccacctcttgctgttcagattcaagggaatgatgaatccgtttctcagcaatcttcttctgttggggtcactctcatcaccggttatcttggttcgggcaagtccactctagtgaatcatattttgaattcgcaacatgggaagaggattgctgtcattttaaatgagtttggtgggaaattggcg

SEQ ID NO: 56373 - DNA, 254 bp, Glycine max
  Clone ID: 700679881H1
gtgggacgggttgagactggtgtcttgaagcctggaatggtggtgacttttgcaccaactggactgacaaccgaagttaagtctgtggaaatgcaccatgaagctctcacagaggctcttcccggtgataatgtgggattcaatgttaagaatgttgctgttaaggatctcaagcgtggttatgttgcctcgaactcaaaggatgatcctgccaaggaggctgctaacttcactgcccaggttacatcatgaac

SEQ ID NO: 56374 - DNA, 254 bp, Glycine max
  Clone ID: 700679882H1
tgaagcaaagcaatggctacttcaaagttgaaaacccagaatgtggttgtatctctctccctaaccttaaccttggtactggtgctactgaccagcaaggcaaactcagcggaaactgtttctttcagctggaacaagttcgtgccgaagcaaccaaacatggatcctccaaggagacgctattgtgacctcctcgggaaagttacaactcaataaggttgacgaaaacggcaccccaaaacctcgtctcttgg

SEQ ID NO: 56375 - DNA, 252 bp, Glycine max
  Clone ID: 700679883H1
ccaccactcactcccaaaaccattcccagatctgattccaacccttaccctaccacttttgtccaagctgacacctccactttcaagcaagtagtccaaatgctaactggctcatcagacaccacaaaacaagcatcacaagatccacaaccaccacaaccaccatcatcatcatcatccagaaacttcaacatacgccccatcaaggccccaccaaagaagcaacaaggaggcttcaagcctatgagagga

SEQ ID NO: 56376 - DNA, 121 bp, Glycine max
  Clone ID: 700679884H1
ggagtcagagaaaccctaggtaagaagaaaagatgccggctggtcatggtttgagatcccgcaccagagattccttctctcgtcctttcaggaagaagggaaccatcgccctcaccacata

SEQ ID NO: 56377 - DNA, 238 bp, Glycine max
  Clone ID: 700679885H1
gcaagaggaagatgaggatgaggagcagcagcgagagagcgaagaaagtgaagattctgagttacgaagacataagaataagaacccttttctcttcggctctaacaggttcgaaactctcttcaaaaaccaatatggtcgcattcgcgtcctccagaggttcaaccaacgctccccacaacttcagaatctccgagactaccgcattttggagttcaactccaaacccaacaccctc

SEQ ID NO: 56378 - DNA, 87 bp, Glycine max
  Clone ID: 700679886H1
tgatgtaatgctgcgccgttattcgaaagcacgatcagctgctgctggtggtggttctctgaacggagacatttctagtaattctaa

SEQ ID NO: 56379 - DNA, 121 bp, Glycine max
  Clone ID: 700679889H1
gtagcaagtaagtaatagaaaaaaattaagaataaaactcccatatatctctgacacacagtaattcttccaaaccctttctttggcggctttcaatttttcgaacccccaaaaccctagt

SEQ ID NO: 56380 - DNA, 244 bp, Glycine max
  Clone ID: 700679890H1
gcagcagagggaggagcggcattaaaaatgcagatcttcgtgaaaaccctaacggggaagaccataaccctcgaggtcgaaagcagcgacaccattgacaatgtcaaggctaagattcaagacaaggaaggcatccctccggatcagcagcgtttgattttcgccggaaagcaacttgaagatggaaggaccttggccgattacaacatccagaaggaatcaacccttcaccttgtctcaggct

SEQ ID NO: 56381 - DNA, 249 bp, Glycine max
  Clone ID: 700679891H1
tgcacttcgtattaccgatggagctcttgttgtggttgattgtgtggaaggagtttgtgtccaaaccgaaactgttctacgacaagcccttggagaaaggattaggcctgttctgactgtcaataagatggacaggtgcttccttgaactccaggttgacggagaggaggcttaccagacattccagagagttattgagaatgctaatgtgatcatggctacatatgaagatccactctcggtgatgtt

SEQ ID NO: 56382 - DNA, 250 bp, Glycine max
  Clone ID: 700679892H1
cccaaaacacacataactaggaacccgctccttccttaacctctgcaactttctccaattcaaaagaacaaaaacaacaaaagcacccccatcattgagaatcgtctcaagcttcgttttttacgtgctggggttgcttagatttcaattgggtatagagaatgttcaacggtatgatggatcccgatttgatgagaatcgctcaggagcagatgagtcgcatgtcacccgctgagttggctcggatcca

SEQ ID NO: 56383 - DNA, 253 bp, Glycine max
  Clone ID: 700679893H1
caaagttgaacaaaactcattttccaactacatttcttccaccaactcataaaatcactcatatctgttcccaaaagcttgtttgtgagaatggcttcgggtgaaaagaaattcccacctcaacaacaacaaacacagcctgggaaggagcatgctatgaatccagtaccccaattcactagccctgactacaagccttcaaataaacttcaaggaaagatagcattagtgactgggggtgctctgggattgg

SEQ ID NO: 56384 - DNA, 122 bp, Glycine max
  Clone ID: 700679894H1
gtgaccattcccatattcagtttttctctcttttctttgttgtttcctttcttctccaaatttctcactggtttatgaatggaggtcacggaggtataaccagcaacaatagagagaggggt

SEQ ID NO: 56385 - DNA, 251 bp, Glycine max
  Clone ID: 700679895H1
ccgatggtcaacacatcctcaagtttccacaaactcacgtcgtataaagtgagtcagtctgcatggatgactgatgaagaatttgctagagagatgattgctggtgtaaatccctgcgtaattcgtggtcttgaagagttccctccaaaaagtaatctggatcctgcaatctatggtgatcaaagcagtaagataacagcagattcccttgatctagatgggtacacaatggacgaggcacttgtagtcga

SEQ ID NO: 56386 - DNA, 262 bp, Glycine max
  Clone ID: 700679213H1
ggaacctaaccttcaccacttgtggtgcttatggtatcttggcctatatctctatctggtccaacctccctcataggaaaactgattctgatgagttccatgttccgggattccctcaaaactaccgtttccacaaaacacaactgcataggtttcttcaagcggctgatggcaccgatactggtcaagattcctcgttccacagattcaactttctatgaagtctgatgggtggatttgcaatacgattgaaaagatagag

SEQ ID NO: 56387 - DNA, 264 bp, Glycine max
  Clone ID: 700679214H1
aacatgaaaagattattagggggttagcattgggattagctcttacagtttatggaagagaagaagaagctgacactttgattgagcagatgactagggatcaagatccaatattgcgttacggtggcatgtatgctttggccttggcgtataagggaacagcaaacaataaggccatcgccagttactgcactttgctgtgtctgatgtgagtgatgatgtcaggaggactgcagttctagcattagggtttgtgttgtactc

SEQ ID NO: 56388 - DNA, 265 bp, Glycine max
  Clone ID: 700679215H1
ataaaattcttccaccaagttatgggtttccttgtgttgcttcttttctccctcttaggtctctcttctagttccagcatatcaactcatcgttccatattggaccttgacctaaccaagtttaccacacagaaacaggtgtcttcactgttccaactatggaagagtgagcatggacggtctaccataaccacgaagaagaggcaaagagacttgagattttcaagaataacttgaactatatcagggacatgaatgcaaacag

SEQ ID NO: 56389 - DNA, 268 bp, Glycine max
  Clone ID: 700679216H1
ctcgagccgctcgagccgaatcggctcgagcaaaatttccctcaattatttctcaccaacttcacccactttccttctctcaagaaaaaaaaaagataatttcttgaacccaatggcttcagagacagaggtgccggatattatttcctctgttttcgaaaggtttcaacaaaacagagaatgtctctgtttctgcccttcctcttcggcttctctgacgccaccccaggacgaaatagcgacgacccagatcacgaaactgctccca

SEQ ID NO: 56390 - DNA, 267 bp, Glycine max
  Clone ID: 700679219H1
attaattatatttaattttattatattgatcgatagaaacaggctgacatatttaagcgtagatcggcatcgtggtgctgtatccacttgtcaatcgcaaattcggaaaccctagctagctagctagcagcagcagcagatctgatctcacgttcgttcgtggttatggcgccaaggaaactcgcgagcgtgaaatgctgctcgagtccgttatcgcgctcatcttcatcttcgtcgcctgcgtcgacctctgcgacggcgccactg

SEQ ID NO: 56391 - DNA, 255 bp, Glycine max
  Clone ID: 700679220H1
ggctcgagtaattattaacacttccttagactcaatatggggaagccgcttcactctctctctttcttaccctttgcttgctactcttgtcgagtgcatgctttgctattagctccagcaagctcaacgagtgccaactcaacaacctcaacgcgttggaacccgaccacgcgttgagtccgaggtggtttgattcaaacatggaactctcaacaccctgagctgaaatgcgccggtgtcactgtttccaaactc

SEQ ID NO: 56392 - DNA, 267 bp, Glycine max
  Clone ID: 700679221H1
aatcgttggtgaagaacattatgagactgcgcaaagagttaaacaaactttacaacgttacaaagaacttcaagacattatagctatccttggcttggacgaattatccgaagaagatcgcttaaccgtagcaagagcacgaaaaattgagcgtttcttatcacaaccttttttcgtagcaaagtatttaccggtacaccgcgcaactacgtcagtctagcagaatcaatttaaaccctctaattgtttctgctagactaacatatt

SEQ ID NO: 56393 - DNA, 255 bp, Glycine max
  Clone ID: 700679222H1
agacattggatggcaaccctcgaagtccacaagcagcccaaacgacccaagtatcgggaaagcagcgtctctccctctgtaaacccgcagcggcgcactcccgaggccgaatctccctccagctacagccacaggacccgcttctctccaataatggacttttttcattcttcttctccccatccaaccatgcctcattcccttctagcttctccaagttgcactccgccctcaccgctggcctcttaaacccat

SEQ ID NO: 56394 - DNA, 241 bp, Glycine max
  Clone ID: 700679223H1
tcgagctcgagccggtgagtcctactttgtggatgctcagcctcagcagaaagaggaggggaacaagggaagaaagggtcctttgtcttcaattttgagggctttttactgaataagtatgtagtactaaaatgtatgctgtaatagctcatagtgagcgaggaaagtatcgggctatttaatatgacttgagctccatctatgaataaataaatcagcatatgatgcttttgttttgtgt

SEQ ID NO: 56395 - DNA, 265 bp, Glycine max
  Clone ID: 700679224H1
attacactctttgcctcgcaccttcaacttaaccttttctactcataatcttaacaacttgctagaagaagataaagaaagagaaaaagtgtgtgtgtgtgagagagagcaatggctggctcgtgggcacgccgttctctgattgttctggctatcatttccttcggatgtttatttgaatttccattgctaaggaggaagccacaaaattggggacggtcatcgggattgatcttggaacgacctattcatgtgttggtgttta

SEQ ID NO: 56396 - DNA, 265 bp, Glycine max
  Clone ID: 700679226H1
cggctcgagcggctcgagcggctcgagggcgtataccatatatggttgcccttaaacacaaacatggagcatgtgcatcattgctaaatcctacatctgcagaacctcttgtctggccgtctccattgaagttcatcagtgagcttaatcctgaagccaaagctttattagagcaggcttgatggatgcaaacagagaaagagagaaaaacatattgaaagggagttcttactctctgccatctccatctcattctgatggggta

SEQ ID NO: 56397 - DNA, 260 bp, Glycine max
  Clone ID: 700679227H1
cttatatgagtttgaaaggaagggatgaaccggttgacatggagggaggaaattcaccacatgttccgtatgcctcagagtcatatgtagatgcccctgaaagatacccaattcctcaagctgaactacatgatattgatgatccagcagctttctcttctaattaccaacacatatcgttgaagagaggaaagagcatcttgtggttgctcgaaacagtctcgaattgctctctagcatattgaattctgatgcagagc

SEQ ID NO: 56398 - DNA, 253 bp, Glycine max
  Clone ID: 700679228H1
ggtctacctagataaaggactagttgctttttctgctggtttgcatggctgggcttttaccctgactaactttgccaagatgtatgcatccaagtttggagttgatgaaggaaagatgatggaaaggctctggggtgaaaacttttatgatccagccacaaagacatggaccagcaacatagtggttctgctacctgcaagcgtgggtatgttcagttctgttatgagcccatcaagcagtattataacactt

SEQ ID NO: 56399 - DNA, 265 bp, Glycine max
  Clone ID: 700679229H1
ctcgagccgtttgcaccatgaagcttcacgagaacattgctcgcccttcacgtgctgacgtctacaacccaaaagctggtcgcattagcaccctcaacagtctcaccctcccagccctccgccaattcggactcagtgcccaatatgttgtcctctacaggaatggaatttactctccaattggaacttgaacgcgaacagtgtgatctatgtgactcgagggaaaggaagagttagagtggtgaactgccaagggaatgcagtg

SEQ ID NO: 56400 - DNA, 268 bp, Glycine max
  Clone ID: 700679231H1
cactgaccaagccatggcgatgagaaccaaactttctttagctatctttttcttttttcttttagccttattttcaaacctagcctttggcaaatgtaaagaaaccgaggtagaagaagaagaccctgagctcgtaacatgcaaacaccaatgccaacagccacagcaatacactgaggggacaagcgggtatgcttgcaaagatgtgacaggtatcatcgtatgaagcaagagcgagagaaacaaatccaagaggaaactcgtgaga

SEQ ID NO: 56401 - DNA, 269 bp, Glycine max
  Clone ID: 700679232H1
cgtaacgttaccttacctgctccgagcctcttccatgacacgctctggccagagctgcagctagcttcgacactgaggttcgttctccgaccctgctcccgaaccactgccatggggtgcttcttcgcttgcttcagagcccgcgatacctccgccgccgctaccactgctacggtgccttttctcgttccagcaaacgcaaaccaaacgatgttgcggtctctcgaaatcggttatccactttgtttctatccgaagagagagaagat

SEQ ID NO: 56402 - DNA, 257 bp, Glycine max
  Clone ID: 700679233H1
tataccttaataaataatttaagatactatgatgagagcacggttcccattactgttgctgggacttgttttcctggcttcagtttctgtctcatttggcattgcttactgggaaaaagagaaccccacacacaacaagtgtctccagagttgcaatagcgagagagactcgtacaggaacaagcatgccacgctcgttgcaacctccttaaggtggagacagaagaatgtgaagaaggtgaaattccacgacacga

SEQ ID NO: 56403 - DNA, 267 bp, Glycine max
  Clone ID: 700679234H1
cttcaaagttcaaatctgtttggggagttttgaaaatggaaatggggactgtagcatggattttcttggtgattatggtcacatttttctgcccttcctctcttgctctcactcaggatggtatggcgttgttggaaatcaaaagcactttgaatgatactaagaatgttctgagcaacggcaagagtttgatgaatctccttgtgcatggactggtatctcttgtcacccgtgtgatgaacaaagagttcgctcaataaatctgcc

SEQ ID NO: 56404 - DNA, 269 bp, Glycine max
  Clone ID: 700679235H1
ggtccttaaacactcatcagtcatcaccatggccaagctagttttttccctttgttttctgcttttcagtggctgctgcttcgctttcagttccagagagcagcctcagcaaaacgagtgccagatccaaaaactcaatgccctcaaaccggataaccgtatagagtcagaaggagggctcattgagacatggaaccctaacaacaagccattccagtgtgccggtgttgccctctctcgctgcaccctcaaccgcaacgcccttcgta

SEQ ID NO: 56405 - DNA, 266 bp, Glycine max
  Clone ID: 700679236H1
agccattccagtgtgccggtgttgccctctctcgctgcacccttaaccgcaatgcccttcgtagaccttcctaccgccatagaaaataagaaatctacatacaacaaggtaatggtatttttggcatgattttcccgggttgtcctagcacttatcaagagccgcaagaatctcagcaagaggacgaagccagaggccccaagaccgtcaccaaaaggtacatcgcttcagagagggtgatttgatcgcagtgcctactggtgttg

SEQ ID NO: 56406 - DNA, 267 bp, Glycine max
  Clone ID: 700679237H1
gagaggctgaaacaaagaagtgaaaataacagcaaaaagtaggagctgcagcagctcccccgaagcttatctcagcggcagactctgaaagctgtttgagtagcctcaacccggagaatagcaccaatgggagaggaggaaaacaaaccagaggaacccatggcaaaggagaaaaacccgaggaagaagcaacccaagagaaaaaaccggagcaagagtccaaagaggaagttgctgctgctgctgctgctccgccaccgccaccgc

SEQ ID NO: 56407 - DNA, 266 bp, Glycine max
  Clone ID: 700679238H1
gtttctaaaatatcagcagcagcagcaaggaggttcccaaagccagaaaggaaagcaacaagaagaagaaaacgaaggaagcaacatattgagtggcttcgcccctgaattcttgaaagcagcgttcggcgtgaacatgcagatagtgagaaacctacaaggtgagaacgaagaggaggtagtggagccattgtgacagtgaaaggaggtctaagagtcacagctccagccatgaggaagccacagcaagaagaagatgatgatga

SEQ ID NO: 56408 - DNA, 263 bp, Glycine max
  Clone ID: 700679241H1
ctcgagccgctcgagccgatttcattcattcttaatctttgtgaaaaataatgttcatcgagaattttaaggttgagtgtcctaatgtgaagtacaccgagactgagattcagtccgtgtacaactacgaaaccaccgaacttgttcacgagaacaggaatggcacctatcagtggatgtcaaacccaaatctgtcaaatacgaatttaaaaccaacatccatgttcctaaattaggggtaatgcttgtgggttggggtggaa

SEQ ID NO: 56409 - DNA, 262 bp, Glycine max
  Clone ID: 700679243H1
aaaatctcagattaataacactcgccatacccgttaacaagcctggtagatttgagagtttcttcctatctagcactgaagctcaacaatcctacttgcaaggattcagcaggaacattttagaggcctcctacgataccaaattcgaggagataaacaaggttctgtttagtagagggaagggcagcagcaaggggagcagaggctgcaagagagcgtgattgtggaaatctcgaaggaacagattcgggcactgagcaaa

SEQ ID NO: 56410 - DNA, 261 bp, Glycine max
  Clone ID: 700679244H1
ggcctacggcgactccttcaacgccgtcgcgagggacctcgcgaagacctgagggcgctcggcgcggcggaagtcgttcccctgttcgaaggggacgtcgacggcggtgacgtggatgcggtttacgatcggtggtgtgagaaggttgtggcggttttgaaaagtggtagtgttgggaaagctgtgataatgatggtgctgaggaatctggcgtcgttacgagttctgaagatgagtctgatgtggatagtagtgagattg

SEQ ID NO: 56411 - DNA, 264 bp, Glycine max
  Clone ID: 700679245H1
atcctagtacaccgtattaaagaatttaagatatactatgatgagagcgcggttcccattactgttgctgggagttgttttcctggcatcagtttctgtctcatttggcattgcgtattgggaaaagcagaaccccagtcacaacaagtgcctccgaagttgcaatagcgagaaagctcctacaggaaccaagcatgccacgctcgttgcaacctccttaaggtggaggaagaagaagaatgcgaagaaggtcaaattccacga

SEQ ID NO: 56412 - DNA, 262 bp, Glycine max
  Clone ID: 700679246H1
cggctcgagtaaaattcttccaccaagttatggatataaatgtgttgcttcttttctccctcataggtctctcttctagttccagcatatcaactcaatgttccatattggaccttgacctaaccaagtttaccacacagaaacaggtgtattcactgttccaactatggaagagtagcatggacgtgtctaccataaccacgaagaagaggcaaagagacttgagattttcaagaataacttgaactatatcagggacatg

SEQ ID NO: 56413 - DNA, 262 bp, Glycine max
  Clone ID: 700679247H1
ccgagactgaaacggccttgatagaccattgaaaattttctgggcaacctgcaagacttcattgaagaatcagcattactgatgtggtggattgctattcttttgttgagatatatactccattaaccttatatataacacgatgcttgtatgatttattcttgtttgatatattttaccatctatgactttgttgatgccctactgctactgggaggaaccatgatgagtgacccgtgttcttcattggtgaatgatgatt

SEQ ID NO: 56414 - DNA, 265 bp, Glycine max
  Clone ID: 700679248H1
ctcgagccgctgcttttgtccttttgccacgcttaagatcacccaagagagaacctaagacacacaacacaacacaaacacacagagttagaggagaaatcatcatggcatcagcagcatctgggtttgtgttgtcacttaatgttgcagctgccaccacaactcaagggtggtcatgtcaacacaaagaacaacgcttctaggcttgttgtaagggcttcagatgagcctgcagcggcggcacccgccaccgccacacccccag

SEQ ID NO: 56415 - DNA, 269 bp, Glycine max
  Clone ID: 700679249H1
cacacacaagacagccaaattgaactgagagagatagataacatagagagagataacagagagagagaaaaaagaaaacattgaccgccattaaaacccacttcccttttttatatcactcccaaacacattcctctcatttcctttccattttcctttctctttgtctttctctcacaatcatcactttagcattgcaacactgaaaggaaaagaatactctttaagaacttagaaaacaaccaattctagtgtgtgtttcgttttct

SEQ ID NO: 56416 - DNA, 265 bp, Glycine max
  Clone ID: 700679250H1
ctctcatcagattcgggtcgggttagcgttatcggataacttcgcccataaattctctgtttacggggcgaaaatgtcagtattcttagccacgaggctcgtgttgcggagatccccgccgcttctctggcggcgcacttttctcgggcggcggtagaggccgaaaaggacactgttccgtgccgtcgcttccgttgttcgattactctccgcctccgtatgcggggcccaccgctgacgagattctggcaaagcgcagggagta

SEQ ID NO: 56417 - DNA, 263 bp, Glycine max
  Clone ID: 700679251H1
cgaagatgaagataaacctcgtcctagtcgaccaagccaaggaaagcgtgaacaagaccaggaccaggacgaggacgaagatgaagatgaagatcaacctcgcaagagccgcgaatggagatcgaaaaagacacaacccagaagacctagacaagaagaaccacgtgaaagaggatgcggacaagaaacggggttgaggaaaatatctgcaccttgaagcttcacgagaacattgctcgcccttcacgcgctgacttctacaa

SEQ ID NO: 56418 - DNA, 262 bp, Glycine max
  Clone ID: 700679252H1
ctctttctgagatatttcgaatttcgatactttgatcagatccacaacactccttcatccatgacgcttggctcttcaggatccagtgtcgtggttccaaggaacttcagattgctggaggagcttgagaagggagaaaaaggaatcggagatggaacagttagctatggaatggatatggtgacgacatttacatgcgctcttggactggaaccattattggcccctataatactgtacatgaaggaagaatttatcaatt

SEQ ID NO: 56419 - DNA, 260 bp, Glycine max
  Clone ID: 700679253H1
gtttgaggttcatctgagttagcatatccattgtcataaactatctgcatgcatttgggtgtctcgaggtgggtcttgggattgcatgtgtcaatttgtctccatggtcagacaacagaaggtatcagtctgaaggtcttctagttgtcactaactcttgcatcatcaccaatgcatactgacttttgcatgagcaccactaagtccaggtctgtcaagaggaagaaggtagcaatgaatttgcaaatgggggtgtaggt

SEQ ID NO: 56420 - DNA, 260 bp, Glycine max
  Clone ID: 700679255H1
ctttctcctgcccagctaatactttctcctgtagagggttcctaaaaagacttcatctggtggcatttatgctcatatgtcttcatcgatgtacattccagatcggtgattttggcattctgataagatctggtttcagcataccaaaagcgttgttcttcaactttctgtcagccttgtggcacttgcggggactgcattggctctgctgtgggggaaggatcctggacagtcatctttgattgagggatttacagcag

SEQ ID NO: 56421 - DNA, 262 bp, Glycine max
  Clone ID: 700679257H1
gaagcagcctggggtctggctcgctatgccgcaattgctcaggacaatggattggtcccaattgtggagccagagatcttgcttgatggggagcatggtattgacagaacttttgaagtagcaaaaaaggtctgggcagaggttttcttctaccttgctgagaacaatgtccttttgagggtattcttcttaagcctagcatggttacacctggagctgagtccaaggacaaggccagtcctcagacagttgctgattacac

SEQ ID NO: 56422 - DNA, 260 bp, Glycine max
  Clone ID: 700679259H1
gcagaacagagagagcaaaaccctagagcatccatcacaagcagaggaagaagatggtgaagttcctgaagcctaacaaggcagtgatcgtcctgcagggccgctacgccgggcgcaaggcggtgatcgtgaggaccttcgacgagggaaccagggagcgcccctacggccactgctcgtcgccggaataaagaagtacccaagcaaggtcatcaagaaggactccgcgaagaagaccgcgaagacatctagggttaagg

SEQ ID NO: 56423 - DNA, 259 bp, Glycine max
  Clone ID: 700679260H1
taaactactaatcattgaggaagctagctaaaggattgccgcccaacaagcaactgctgcttaaatctttaggaaatgaatagactttgagtgtttggtagtttttatttaatggttttggtttctaatttattttgtcttgaaattttatccactgaatttcgtctcttaaatgtctatagaactttttattgcggcttctatgttcatgaaggaatctttccatttcctagtaaaaaataaaaaaaaaaaggggggg

SEQ ID NO: 56424 - DNA, 263 bp, Glycine max
  Clone ID: 700679261H1
gggaagcccttcactctctctctttcttcctattgcttgctactcttgtcgagtgcatgctttgctattagctccagcaagctcaacgagtgccaactcaacaacctcaacgcgttggaacccgaccaccgcgttgagtccgaacgtggtttgattcaaacatggaactctcaacacctgagctgaaatgcgccggtgtcactgtttccaaactcaccctcaaccgcaatggcctccacttgccatcttactcaccttatccc

SEQ ID NO: 56425 - DNA, 120 bp, Glycine max
  Clone ID: 700679262H1
gattgcgttactgcctgcaagtgatcctggtatggaggtgaagaccagatcagatattgtgcatcaagagcaacattctggaagagacagctctgtatctgatccctctccacacaacat

SEQ ID NO: 56426 - DNA, 263 bp, Glycine max
  Clone ID: 700679263H1
gtccgaaggtggtcttattgaaacatggaactctcaacaccctgagctgcaatgcgccggtgtcactgtttccaaacgcaccctcaactgcaacggcctccacttgccatcttactcaccttatccccaaatgatcattgtcgttcaagggaagggagcaattggatttgcatttccggatgtcctgagacgtttgagaagccacaacagcaatcaagcagaagaggctcaaggtcgcagcagcaactacaagacagtcacca

SEQ ID NO: 56427 - DNA, 261 bp, Glycine max
  Clone ID: 700679265H1
ccaattggttgtagatctttttgttaacttttatgacactgtcaatccacttttaagaaaggtgctgatgctcctggttagctttataaagcgccctcatcaaagccttgctggcattggtattgctgcttttgttcgtttgatgagtaatgctggggagctgttttctgatgaaaatggttagaagtggttttctcattaaaagaagtagcacatgcaacacttcctaactttctgtttgttgaaagtgaggactttact

SEQ ID NO: 56428 - DNA, 216 bp, Glycine max
  Clone ID: 700679266H1
ctcgatcctaaacgatctctctttctctctcatacacttttttataataaaaaagcttttcgacttattttcccatgaagtgatcccaaagtatattagagcttacattgtttcttgtctcggatttcataattgataattaattaatttcaccaacttgttggcttttttagttcttaaattccccgcttgaatcacatagagtcctctcttcca

SEQ ID NO: 56429 - DNA, 264 bp, Glycine max
  Clone ID: 700679267H1
gtactgccgcgagcagctcaaggggatcaacctcaacccctgtgagtacatcatggagaagatccaagactggccgccgcggcgaggacggcagcgacgaagatcacattctcatcaggaccatgccgggaagaatcaactacatcaggaagaaggaaggaaaagaagaagaagaagaggacacatgcagaagtgctgcagcgaaatgagcgagctgaaaagccccatatgccagtgcaaagcgctacagaagataatggataa

SEQ ID NO: 56430 - DNA, 262 bp, Glycine max
  Clone ID: 700679269H1
ggatgacatgccgttgccggcgctctttgagcaagcccgcaagatccacgccgcagccaccgattccggcgccgaccaggaggttgtgaagaaggggtgcgaggctctgcatagatgcgaggacatggtcaataatctaggtttgttctctcccaacgagaccaaagaagatatcacaccacgaatctcaaatacattctggttcgtatgtttgagtttagttacttttacttttaattaacgccattattttatataatca

SEQ ID NO: 56431 - DNA, 262 bp, Glycine max
  Clone ID: 700679270H1
ggattattcaagaagatagcctttcaagtcgccttccagtttatgagcaaatgggttgggagcatattgtttctcattggagaagtgcttttagcagagccagtgttgttgtgtttccagattttacttatccgatgttatatagtgagcttgacactggaaacttctttgtgatcctggatcaccagtagatgtgtgggctgcagaaagctatcataagacccatgcaaaggagcagctaagagaacttagtggatttggt

SEQ ID NO: 56432 - DNA, 259 bp, Glycine max
  Clone ID: 700679273H1
tggtggtgctggttctggcgcgggacctaagattgaagaagttgactaagcttgtgcatgtgactaactcaaaaactttggttaggttcttgttatttggtctaataatgtaagttttagtgatgatgtaaggtttcaggaatcgtgaataaggtcttttttgcttcatgtgatagtgtaatatcagagatggagttgagattaatgtaattttttatacagtttgggcttttaaaaaaaaaaaaaaaaaaagggcggc

SEQ ID NO: 56433 - DNA, 261 bp, Glycine max
  Clone ID: 700679274H1
cttctctctcttcttgctcctctctccttttcaattactctctctaccaaggagtgatggctgtgcaactgtgggaaaccctgaaggaggccatcgtggcctacaccggcttctctccttccaccttcttcacggtcttggcgcttctttttgccgcttactacgtcgtcacggtctttttggttcctccgacgaccaccaccaccgccaccgccacgcccaggaggaggagatgccgcctctgcgccccccggttcagct

SEQ ID NO: 56434 - DNA, 259 bp, Glycine max
  Clone ID: 700679276H1
ggaataacaatgctccacagcaaggagagtctgggggtgaagtgtctcagcctcaggctcaacctcatcatcatcagcagcagcaacaacaaccgcaacaacgatgttttcattcatcagaggttgggaatttggggggctcaggtgttgagggtttgaggatgttgaaagtggaaatggggaagagggtgatgatgactccgaggatgatgatgactcagaggatgattcggacgaggacgaagatgattcgggagaa

SEQ ID NO: 56435 - DNA, 261 bp, Glycine max
  Clone ID: 700679277H1
gaataattaagaaaagccatttccatagcagcctaagaaaatgaagagcactagcttgttcgctatctttctactttgcgccttcacctcatacctaccttccgccaccgcccaggacgtgctcgacgtggatggcgatccgattcggaacggtttcatatactacgttttgccgcaataagaggaaacggtggcggaatagaacgagccgcactcgggaaagacacttgccctatcactgtagtgcaatctcccaatcca

SEQ ID NO: 56436 - DNA, 258 bp, Glycine max
  Clone ID: 700679283H1
ctcgagccgttttcgcagtttcttcgtttctctctctctctctctcttcagaaaagcagaacgaaataacccattcaaaaaaagaaagagcaatcaattccaatcacaatggcaaatcaactcaccgatgaacagatctctgagttcaaggaagccttcagtttgttcgataaggatgagatggttgcatcacaacaaaggagcttgggaccgttatgcgttcgttgggtcagaacccaacagaggctgagctccaag

SEQ ID NO: 56437 - DNA, 260 bp, Glycine max
  Clone ID: 700679284H1
ggggtttcttcaatcggaatcgcgaacaacatggaagtgagaattgggcaaagggtgtctcgcggaatgctccctctcctcgctctccacaccgtcagcgagtattaccgctccgaccacaaacctccgttcaccgccgccctcatcgccgccaacaccctcatctacctccgccctccttcctcgatcccctcattccccccattgaacaagtctggttcaacccccacttcatcctcaagaacaaggacttgaaacgc

SEQ ID NO: 56438 - DNA, 256 bp, Glycine max
  Clone ID: 700679288H1
gccacagcaagaagaagatgatgatgatgaggaagagcagccacagtgcgtggagacagacaaaggttgccaacgccaaagcaaaaggagcagaaatggcattgatgagaccatttgcacaatgagacttcgccaaaacattggtcagaattcatcacctgacatctacaaccccaagctggtagcatcacaaccgccaccagccttgacttcccagccctctggcttctcaaactcagtgcccagtatggatcac

SEQ ID NO: 56439 - DNA, 258 bp, Glycine max
  Clone ID: 700679289H1
caataattccttcacttgcagaacttagttctctgttgcatcatcatcatcttcattagtgttagccctaaacttcaccttcaaccatgaccacagtgccaccacacagtgtccaagtgcacacaacaacacaccgctacgaagccggcgtcgtcccgccggctcgttttgagcgccgcgttacgaagccggcatcaaggcgccctcttccatttaccattccgagagaggtccgacgacctctcaggttctcgcagt

SEQ ID NO: 56440 - DNA, 77 bp, Glycine max
  Clone ID: 700679291H1
ctcgagccgattcggctcgagcgaagacgaagatgaagacgaagactatgaacaaactccctcttatcctccacgac

SEQ ID NO: 56441 - DNA, 118 bp, Glycine max
  Clone ID: 700679294H1
ctaacaattccttcacttgcagcaccggtgcatcatcatcttcattgcaaaaccctaaacttcaccttcaacgatgaccacacaagtaccaccagacagtgtccaagtccacacaaca

SEQ ID NO: 56442 - DNA, 237 bp, Glycine max
  Clone ID: 700679296H1
ctcgagccggtgagtcctactttgtggatgctcagcctcagcagaaagaggaggggaacaagggaagaaagggtcctttgtcttcaattttgagggctttttactgaataagtatgtagtactaaaatgtatgctgtaatagctcatagtgagcgaggaaagtatcgggctatttactatgacttgagctccatctatgaataaataaatcagcatatgatgcttttgttttgtgta

SEQ ID NO: 56443 - DNA, 105 bp, Glycine max
  Clone ID: 700679303H1
ctcgttgtggccagccaagcagagagagaaactagagccagaaagagaaacaaagagagcgagagcgggagcgaaaacacctcaacgtcgtcgtcgtagccgaga

SEQ ID NO: 56444 - DNA, 85 bp, Glycine max
  Clone ID: 700679304H1
tcgagaaacttgcttcctccctcaactatccgttaaagaaactatttgttgtcgatggatccacaagatcaagtcacaggaatgc

SEQ ID NO: 56445 - DNA, 83 bp, Glycine max
  Clone ID: 700679305H1
gaaaaacaagtagttgagaactaagaagaaggacatggcttcctcaatgatctcctccccagctgttaccaccgtcaaccgtg

SEQ ID NO: 56446 - DNA, 248 bp, Glycine max
  Clone ID: 700679314H1
cccatactccatggaatggactggtttggccaatagattactgagtaagggcaacgatattctgtgttgcgattatgctagttttgatggtttgattaccaagcaagttatgagcaagatggcagaaatgataaacagtctttgtggtggtgatgaaaaattgatgcgtgaaaggacacacctgctgttggcttgttgttcaaggatggcaatttgtaaagaagatgtttggagagttgaatgtggaa

SEQ ID NO: 56447 - DNA, 89 bp, Glycine max
  Clone ID: 700679318H1
agctaggtaaaagtcttaccgcgatgtcaaatattgggcattcgatgcatattctgtggcacgaatgtccaatccagaaacttgataga

SEQ ID NO: 56448 - DNA, 79 bp, Glycine max
  Clone ID: 700679319H1
ctcgagccgaatcggctcgaggtctgaggttgaccctcacaggcagtgtcataggtttgatctttgcaacccctcttct

SEQ ID NO: 56449 - DNA, 118 bp, Glycine max
  Clone ID: 700679320H1
gacccaggcaggtgtcgcagtacgcggagaaaggacgctatataaatatatttgtccccgatgctctctatttcagccactcgtatattcttcctccgctcaacaactataagattat

SEQ ID NO: 56450 - DNA, 103 bp, Glycine max
  Clone ID: 700679323H1
ggagcatagagcctattgtagacttgttcgccgacgaggtagataccgaaggcgacgacggcgatgccaaggccaggggtggcgtggcggagctgattggtga

SEQ ID NO: 56451 - DNA, 101 bp, Glycine max
  Clone ID: 700679327H1
ggaaacttgaaaattcttttttgcttggtccagtcttagtgtatccaacccctgtctacgtaaggtgcatgcatacattaagactggaccaagcaccttac

SEQ ID NO: 56452 - DNA, 193 bp, Glycine max
  Clone ID: 700679328H1
tgccgtttctattattgacaccaacagcttggagaaccagctcgaccagatgcctaggagattctatcttgctgggaaccaagagcaagagtttctaaaatatcagcagcagcagcaaggaggttcccaaagccagaaaggaaggcaacaagaggaggaaaacgaaggaagcaccatattgagtggcttcgcc

SEQ ID NO: 56453 - DNA, 216 bp, Glycine max
  Clone ID: 700679330H1
caccatgccaccgaaactcacactcgtgttggtggtgctgtttttcgcccccgttgacgcgcattttccggcaaccggagagcttccaacgttccgcgaggcgccggcattccgcaacggaagagaatgccgcaaccgcgcgcggagcgactccgtgatccacatcgcgatgacgctggacgcgacctacttccggggtccgtcgccggtgtgttc

SEQ ID NO: 56454 - DNA, 238 bp, Glycine max
  Clone ID: 700679331H1
aaaattcttccaccaagttatgggttcccttgtgttgcttcttttctccctcttaggtctctcttctagttccagcatatcaactcatcgttccatattggaccttgacctaaccaagtttacccacagaaacaggtgtcttcactgttcccaatatggaagagtgagcatggacgtgtctaccataaccacgaagaagaggcaaagagacttgagattttcaagaataacttgaact

SEQ ID NO: 56455 - DNA, 249 bp, Glycine max
  Clone ID: 700679333H1
ggcataatagagacaacctttttgccctcaaagtattctgtggagatgtcttcggcggtttataagaattgggttttcactgatcaagcactacctgcagatcttatcaagagaggagtggcaattaaggatccatcaaccccacatggagttcgtcttctgatagaggactatccttatgccgctgatggactggagatatgggctgcaattaagacatgggttcaagaatatgtgcctttgtactat

SEQ ID NO: 56456 - DNA, 136 bp, Glycine max
  Clone ID: 700679334H1
ggcttcaccgcattcccccgccgccgcgcctcttcattctccgtgcaagctaagatccgcgaaatcttcatgcccgcactcagctccaccatgaccgagggcaaaatcgtctcctggatcaaatccgagggcgaca

SEQ ID NO: 56457 - DNA, 107 bp, Glycine max
  Clone ID: 700679335H1
cgaagatctaccactcaacatttcaagtgaaatgttgcaacagaacaagatcttgaaggtcatcagaaagaacttggttaagaagtgccttgagctcttctttgaaa

SEQ ID NO: 56458 - DNA, 115 bp, Glycine max
  Clone ID: 700679341H1
catcatcaaagaacaagtcaagcttctctacaagcgccacaagaacactgctttctcctggctcagaaacatcttccatgactgtgccgttcaaagttgtaatgcctcaatggtg

SEQ ID NO: 56459 - DNA, 77 bp, Glycine max
  Clone ID: 700679344H1
agactgctagtcttgcagagataagactcagaaaatcaacgagttgatacaagctgttctttcaacactactgacct

SEQ ID NO: 56460 - DNA, 225 bp, Glycine max
  Clone ID: 700679345H1
gattggaaaaagtttcctctacaaaagcacaatttgttagtggaaaaaccttcagatatgatataattggtgctggttcacattcttcaggagattttcctgaaaaggtagatcaagaagaacccaaacagattgataccagattgagacaaagaatagatcctgcatacaatgagggtcaggctcagatggcaacaagttgtctaacttgtctctggatgatgt

SEQ ID NO: 56461 - DNA, 196 bp, Glycine max
  Clone ID: 700679346H1
attctgatcgctccctgagagagctcgtcgcggcggttgcagaagaagattgcaagatgaagttccacatcgcgaatcccaccactggatgccagaagaagctcgagatcgacgacgatctgaaaatgcgagcattttgggacaagaggatctcacaggaggtcatcggagatgcactcggtgaggaatttaaggg

SEQ ID NO: 56462 - DNA, 122 bp, Glycine max
  Clone ID: 700679348H1
attgtttgttgttgtaactcgttcttcttcttttgttgttctgtgtttgtgtttgttttttctctcacctgaaaatgtcttgctgcggtggtaactgtggttgcggaagctcctgcaagtgc

SEQ ID NO: 56463 - DNA, 179 bp, Glycine max
  Clone ID: 700679349H1
gttcaatatcctagtacaccgtattaaagaatttaagatatactatgatgagagcgcggttcccattactgttgctgggagttgttttcctggcatcagtttctgtctcatttggcattgcgtattgggaaaagcagaaccccagtcacaacaagtgcctccgaagttgcaatagcgag

SEQ ID NO: 56464 - DNA, 193 bp, Glycine max
  Clone ID: 700679350H1
tgatcctagctagggtttaaaagcagcttgctctccgtagacaacgaatcaaagtcttcttcttcttctttctattcctcactcaagggttagggatgcgtcggaacagccctgcatactacagtcctccgcggcgaggatacggcggtggtggccgaggaggaggaggaggaggaggaggaaggaggtccgg

SEQ ID NO: 56465 - DNA, 125 bp, Glycine max
  Clone ID: 700679351H1
ggctcgtcagaaaactattttggagaagaaagcaaagcaacaattcccaaagcaggtatgggaagggaaacctgctgatgagaagattgagataaatggggaagttaatactccaaaatctgaag

SEQ ID NO: 56466 - DNA, 168 bp, Glycine max
  Clone ID: 700679352H1
gagtaatagaaacctctcagcccctctccgatcaaatggccaccgtaatcgacggcaaagccgttgcgcaaaccatccgatctgaaatcgccgacgaggtgcgccagctctctcaaaaatacggcaaggttccgggattagcggtggtgatagtagggaacagaaaag

SEQ ID NO: 56467 - DNA, 212 bp, Glycine max
  Clone ID: 700679353H1
gtcttccatagccccccaaaaatgaagagcaccatcttctttgctctctttctcttttgtgccttcaccacctcatacctaccttcagccatcgctgatttcgtgctcgataatgaaggtaaccctcttgaaaatggtggcacatattatatcttgtcagacataacagcatttggtggaataagagcagccccaacgggaaatgaaagatg

SEQ ID NO: 56468 - DNA, 80 bp, Glycine max
  Clone ID: 700679354H1
ctttctcatcaataatggaggttatacaattgaagttgagattcacgatggtccatacaatgtgataaagaattgggact

SEQ ID NO: 56469 - DNA, 60 bp, Glycine max
  Clone ID: 700679356H1
cggctcgagcacacacacaaacatatgctacaaactccacttcttcaacacaaaaatccg

SEQ ID NO: 56470 - DNA, 220 bp, Glycine max
  unsure (1)..(220): unsure at all n locations
  Clone ID: 700679360H1
taacgacgtgcaacttgtatttaggattcagccagctcttagttaagagcttcacctccgagttccctcacgtcgagaggtacttttggacattggtcaaccagcctaacttccgaaagatattaggtcaggttaagcanactgagtctgttccaccattccatccgctgcaaagaagccttcccagcctaaggaatctaagcccaagcctaaggatgaa

SEQ ID NO: 56471 - DNA, 74 bp, Glycine max
  Clone ID: 700679361H1
tgaatatgccaaatgctgtgctttcaatgtggcgatcattagtatgggatctcgtctttgaagttactaagatg

SEQ ID NO: 56472 - DNA, 226 bp, Glycine max
  Clone ID: 700679363H1
tgtctttgaacactcatcaccatggccaagcttgttctttccctttgtgtccttcttttcagtggctgcttcgctctgagagagcaggcacagcaaaatgagtgccagatccaaaagctgaatgccctcaaaccggataaccgtatagagtcggaaggtgggttcattgagacctggaaccctaacaacaagccattccagtgtgccggtgttgcctctctcgctg

SEQ ID NO: 56473 - DNA, 242 bp, Glycine max
  Clone ID: 700679365H1
ggaaatttggctgatgacaccatcaattttgaggcttttccccacaagctggtgcagtttggagagattcaggaaaaagttgtattgaaattttcacaagaggaatttcttacagcttggtcaactcaggtgcgtcctgcaacaaccctgttggctgatgggtgtccatatttgtatgctatggtgcatgacagttcagtgtctacaataccaggtgattttgttattggtgttaagttgac

SEQ ID NO: 56474 - DNA, 163 bp, Glycine max
  Clone ID: 700679366H1
gagtgagaggtgggaaatggcgtacctgaacgctaggcgcaccttagcatctaccctgtcacgagctctttcttcttcatccgctagcgcctctcgctttcgcttcgcattcgcattcgcgttgctccccgccaaacaaaacgcacccaaacctcactgggcg

SEQ ID NO: 56475 - DNA, 115 bp, Glycine max
  Clone ID: 700679367H1
gcaaaaatgttggcggtgtttgcaaaagccattggaaaaccaccggaggaactgaggcttccggcaatggggtccaataattcaaagaccccagaagaaattgtacagaaatttc

SEQ ID NO: 56476 - DNA, 68 bp, Glycine max
  Clone ID: 700679369H1
atgagggactcagagcaaccctcagatgccaaaatggcattctagcgagacagcatccttgcaatggg

SEQ ID NO: 56477 - DNA, 195 bp, Glycine max
  Clone ID: 700679370H1
aaagtgttgtttttctttttttcatttgcattgcaaagcaaaaccttgcaaattgcaatggcttccaacaaggttattgccaccatcttggttctttctccccttgcctaatcaacattcttcccccatgcatgtgggaaatggcaaccaaaaactaattctttttccccttcttcattaggggaatgccccaag

SEQ ID NO: 56478 - DNA, 199 bp, Glycine max
  Clone ID: 700679373H1
agttatcttctagtatttttcaagtaacttaaggtttcaaacctaggaagttggaagtcatggcagcaacattgatggcagcaacaagttctggcactcttaaagcaactcccttcccaggcccaggccagggtgccaatgcccatgctccttagggatgttgtttccatgggaactgggaagtacaccctgggcaatg

SEQ ID NO: 56479 - DNA, 66 bp, Glycine max
  unsure (1)..(66): unsure at all n locations
  Clone ID: 700679374H1
cacacaactactacaagtacttccttagaatcaaaancaggaanaactagggcaagttatcaaaag

SEQ ID NO: 56480 - DNA, 139 bp, Glycine max
  Clone ID: 700679376H1
gaccacgaccacgaccacaacacccggagagggaacctcagcaacccggtgagaaggaggaagacgaagatgagcaaacacgtccaatcccattcccacgcccacaacctcgtcaagaagaagagcacgagcagagaga

SEQ ID NO: 56481 - DNA, 90 bp, Glycine max
  Clone ID: 700679377H1
ggaattcagctcgagcaagaaatgaggcttttggacacttgaagtcctctgactttcttacttatggactaaaatccgtatctcaaaatg

SEQ ID NO: 56482 - DNA, 212 bp, Glycine max
  Clone ID: 700679379H1
aacagaagagagagagagagagagagagagtcctgaaacttgggtgcgattccttcactcacaacaacaacacatcactatggctcttctgagtcgagcctcttcacgcttccctcagctggtttcccctcaaagggtagtttcactccacacaacgctcactttctctgaacgcatccccatccacagccacgcctacaccatatgccccg

SEQ ID NO: 56483 - DNA, 237 bp, Glycine max
  Clone ID: 700679381H1
ttcggctcgagctcgggccgaatcggctcgagctaaaatatcagcagcagcagcaaggaggttcccaaagccagaaaggaaagcaacaaggggaagaaaacgaaggaagcaacatattgagtggcttcgaccctgaattcttgaaagaagcgttcggcgtgaacatgccgatagtgagaaaactacaaggtgagaacgaagaggaaggtaatggagccattgtgacagtgcaaagga

SEQ ID NO: 56484 - DNA, 215 bp, Glycine max
  Clone ID: 700679382H1
gacccacatactatgtggtcaaccctgacaacaacgaaaatctcagattaataacactcgccatacccgttaacaagcctggtcgatttgagagtttcttcctatctagcactgaagctcaacaatcctacttgcaaggattcagcaggaacattttagaggcctcctacgataccaaattcgaggagataaacaaggttctgtttagtagagag

SEQ ID NO: 56485 - DNA, 198 bp, Glycine max
  unsure (1)..(198): unsure at all n locations
  Clone ID: 700679386H1
gaggagagctgtggcttagagagccctttttgcatgtgctaccacacttttgtccttttgggctctagctagtgctggtagcagtanataagaatgaataaaagaaacaaaggcttagatgccctttgttaagtgtagaataacgggtatagtaactatgtacccttgtgtaatgagtcactcaagtacctatgcggg

SEQ ID NO: 56486 - DNA, 216 bp, Glycine max
  Clone ID: 700679392H1
gccattgtgacagtgaaaggaggtctaagagtcacagctccagccatgatgaagccacagcaagaagaagatgatgctgatgaggaagaggagccacaatgcggggagacagacaaggttgccaacgccaaagccaaaggtgagcaatggcattgatgagaccattgcacaatgagacttcgccaaaacattgggtcaaattcatcactgacatct

SEQ ID NO: 56487 - DNA, 207 bp, Glycine max
  Clone ID: 700679394H1
actagtataccttaataaataatttaagatactatgatgagagcacggttcccattactgttcctgggacttgttttcctggcttcagtttctgtctcatttggcattgcttactgggaaaaagataaccccaaacacaacaagtgtctccagagttgcaatagcgagagagactcgtacaggaaccaagcatgccacgctcgttgc

SEQ ID NO: 56488 - DNA, 205 bp, Glycine max
  Clone ID: 700679401H1
atgctctaatctatctctttttcttcttatttaaaatttcatcttcaattcaattctctttctgtcaccgttcctcattcgcatggagaacgacactgccgccgccgttaacaataacaccaccgccaccgccaccgctaaagcaggttctggaggagtgaaatcgaccaacccataactagaagaggagccttccaatttgaat

SEQ ID NO: 56489 - DNA, 262 bp, Glycine max
  Clone ID: 700679406H1
tgcaaactctaatcctccgtcaagacaagcctcaactagaggataatgctgttgagactattgcaaaatgctgtcatgaactgcagatcctggacctcagcaaaagtttcaagctaactgatcgttcactctatgagctcgcccttggttgtcgcgatcttacaaaactcaacatcagcgggtgttcagcatttagtgacaatgctctggcttaccttgccagcttctgcagaaaactgaaagttctaaatctttgtggatg

SEQ ID NO: 56490 - DNA, 261 bp, Glycine max
  Clone ID: 700679407H1
ggaaagctctatctcgtattgaatggctgcaaaaagctgatgtgcctaccatagcacagattgaagaattccattcgatgcagaggatgatgaatgctcctgattcaaatgataatattgatttgctgctgagcattgatttgttgggtttgcaaggagcaggtaaagcttttccaaataagattgtttttgatgataagcttgtgttggctaacacacaagaattctttcgatggaattttccagtggattcttggttac

SEQ ID NO: 56491 - DNA, 261 bp, Glycine max
  Clone ID: 700679408H1
tgaagatcacgccggtccagaagcagacccgggccgggcagaggacccggttcaaggccttcgtcgtcgtcggagacaacaacggccacgtcgggctgggcgtgaagtgcagcaaggaagtggcgacagtattcgttgcgcgattattctggcgaactgtctgttatccccgtgaggagggggtactgggggaacaagatcgggaagccccacaccgtcccgtgcaaggttacggggaagtgcggctccgttaccgttagg

SEQ ID NO: 56492 - DNA, 265 bp, Glycine max
  Clone ID: 700679421H1
cttgtatcaaactcttttttgtattgactcaaaattagaaaaaattacacagctatgaactatcttctccagaacctctggcacttttcatataatgttgtggtgacaactagggttttaacttgtgtccatttcttctccatcttcgttttggtcttgacgaatcttattacctttttcatttttcagtgttgcggtttcttcgtcacccttggtgatttcttccttcttcatattgagaggcagtggcaatattttcttcacc

SEQ ID NO: 56493 - DNA, 253 bp, Glycine max
  Clone ID: 700679431H1
ctcgagcaagaccgagctagctagctagcaagcaagcacagagatggaggcaaagcgaggtcatgccctcatgtgcttggcacgtgtttcactcttcctcagcgctctaaccctatccgctgctcacggaagcaccacggttcaagacatcgcgagaaagttgaaactcggggacaacgagcttctgcgcacggagaagaagttcaaggttttcatggagaattacgggaggagctactccacagaggaggag

SEQ ID NO: 56494 - DNA, 265 bp, Glycine max
  Clone ID: 700679436H1
agtatgttgagcatcatctcaagtatcccccttctgtcccatcggacaaactaactcatgtgtacactgcaattctgaagcctgataatgaattgcaaatcttgattgatggggaggagaagaaaaaggcaaatttcttgtcttctgaggactttgagcctcctcttataccttccaagacaatccctgatcctgatgataagaaacctgaggactgggacgaaagagccaaaatcccagacccaagtgctgtgaagccagatga

SEQ ID NO: 56495 - DNA, 264 bp, Glycine max
  Clone ID: 700679437H1
cactgatctccattcccattccatggcttccactgaatcatcccctttcaagaaaattcagattcaaagggatgacactacatttgacgcatatgtggttggaaaagaggatgctcctggaattgttgtgattcaggagtggtggggtgtggattacgaaattaagaaccatgccgtgaagatttctcagcttggtagtgggtttaaagctcttattccagatttatacagaggaaaggttggtctggatgttgctgaagctca

SEQ ID NO: 56496 - DNA, 264 bp, Glycine max
  Clone ID: 700679438H1
ctgacaacaacgaaaatctcagattaataacactcgccatacccgttaacaagcctggtagatttgagagtttcttcctatctagcactgaagctcaacaatcctacttgcaaggattcagcaggaacattttagaggcctcctacgataccaaattcgaggagataaacaaggttctgtttagtagagaggaagggcagcagcaaggggagcagaggctgcaagagagcgtgattgtgcgaatctcgaaggaacagattcggg

SEQ ID NO: 56497 - DNA, 262 bp, Glycine max
  Clone ID: 700679440H1
tactcgagccgaatcggcccaggcttggcaagttctttgagatcatcccagagaaaaaccatcagcttcgggacttggatatcttcctcagtattgtggatatgaacgagggagctcttcttctaccacacttcaattcaaaggcgatagtgatactggtaattaatgaaggagatgcaaacattgaacttgttggcctaaaagaacaacaacaggagcagcaacaggtagagcaacctttggaagtgcggaaatatagagc

SEQ ID NO: 56498 - DNA, 272 bp, Glycine max
  Clone ID: 700679448H1
cgaagatctaccactcaacatttcaagacaaatgttgcaacagaacaagatcttgaaggtcatcagaaagaacttggttaagaagtgccttgagctcttctttgaaattacagtgaacaaggaggattacaacaagttctatgaggctttctccaagaacttgaagctaggtatccatgaggattcacagaacaagggatagattgctgaattgctcaggtaccactccaccaagagtggtgatgaaatgacaagcctcaaggattatgtga

SEQ ID NO: 56499 - DNA, 262 bp, Glycine max
  Clone ID: 700679452H1
gaaactgtgatgtcctcctaaaaaactctatccatgtctatgatgtctctcacaaccgtggctgcattcaagtccctcacaatggcggaatcgtgccttctatccctcccttccctcttctacgccaaaaacaataccctttctctctcaattcccaccaagcccctcaacctccatcttccatgctccaactcttcgctctttcccctcaccaccaaaacaacgcgccactcttctctcctcacattcgtggctcagacat

SEQ ID NO: 56500 - DNA, 259 bp, Glycine max
  Clone ID: 700679453H1
gtttgaggttcatctgagttagcatatccattgtcataaactatctgcatgcatttgggtgtgtcgaggtgggtcttgggattgcatgtgtcaatttgtctccatggtcagacaacagaaggtatcagtctgaaggtcttctagttgtcactaactcttgcatcatcaccaatgcatcactgacttttgcatgagcatcactaagtccaggtctgtcaagaggaagaaggtagcaatgaatttgcaaatgggggtgtag

SEQ ID NO: 56501 - DNA, 260 bp, Glycine max
  Clone ID: 700679454H1
cagatttctcatcaataatggaggttatacaattgaagttgagattcatgatggtccatacaatgtgataaagaattgggactacactcgctttgtggacgctatccataatgggcaaggcaaatgctggactgccaaggtacgtacagaggatgatctgactgaagcaattgcaaaagctactggaccacagtaagattcactatgttttatagaagtttttgtacacaaggatgacaccagcaaagaattgctggaat

SEQ ID NO: 56502 - DNA, 256 bp, Glycine max
  Clone ID: 700679455H1
ctttctcctgcccagctaatactttctcctgtagagggttcctaaaaagacttcatctggtggcatttatgctcatatgtcttcatcgatgtacattccagatcggtgattttggcattctgataagatctggtttcagcataccaaaagcgttgttcttcaactttctgtcagcacttgtggcacttgcgggatctgcattggctctgctgtgggggaaggatcctggacagtcatctttgattgagggatttac

SEQ ID NO: 56503 - DNA, 255 bp, Glycine max
  Clone ID: 700679456H1
cggctcgagcacacacacaaacatatgctacaaactctacttcttcaacacaaaaatccgaaaattgtgctccaacacaaaaaaatgaaacctacaatcaccattctcttgttgtctctactacttctcataacttcaccctccttggcaacccgacccgcatccaaccctgatcaagtcaagcacaacaaaaacaacaaccaaggtggtggtgctggtgctggtgctggcgggttctttggccctggaggaggg

SEQ ID NO: 56504 - DNA, 257 bp, Glycine max
  Clone ID: 700679460H1
agaaagtcttccatagctccccaaaaatgaagagcaccatcttctttgctctctttctcttttgtgccttcaccacctcatacctaccttcagccatcgctgatttcgtgctcgataatgaaggtaaccctcttgaaatcggtggcacatattatatcttgtcagacataacagcatttggtggaataagagcagccccaacgggaaatgaaagatgcactctcactgtggtgcaatctcgcaatgagctcgacaaa

SEQ ID NO: 56505 - DNA, 259 bp, Glycine max
  Clone ID: 700679461H1
tgaatatgccaaatgctgttctttcaatgtggagatattttgttggagatctcgtctttgaagtttctaagatgacttctccctacattaaatgtacagtctctttcttcatagcatttggaaatttggctgatgacaccatcaattttgaggcttttccccacaagctggtgcattttggagagattcaggacaaagttgtattgaaattttcacaagaggaatttcttacagcttggtcaactcaggtgcgtcctgc

SEQ ID NO: 56506 - DNA, 259 bp, Glycine max
  Clone ID: 700679468H1
cttttgtatgtgaagcaaagaggaacccagatttctcaagggcaaacaagcatgggtcctccagaagcagaaatcggaatagtgatgggagagacagctttgagcgctttgacgacgatatgttttctttaaaaaatggaccacctgtgtctctttcaacctcaggaaaattccaggccacttcagcccctggtcctagggagaaggagattgttgagctatttaggaaggtccaggctcggttgcgtgagagggctgc

SEQ ID NO: 56507 - DNA, 187 bp, Glycine max
  Clone ID: 700679469H1
atttgaaattttgatcaaccgcgatcacaggttgcagcaccttaaaaacggcaacaaaagcaatcgttacttgcatttcaagaatctctcaatttcttcctacttctttgtgtacgatttcttaagggacagaaaatcactctctgtgctggccacagacttcgtgaatcattttcttttccacaca

SEQ ID NO: 56508 - DNA, 237 bp, Glycine max
  Clone ID: 700679470H1
agagaagagagatggatccagacgcgttggcaaaggcattcgtggagcactactacagcaccttcgacaccaacaggaacggcttagcgaatctctaccaggagggttccatgctcactttcgaagggcagaagatccaaggcgcttccaacatcgttgccaagctcacctccctcccttttcagcagtgccagcactccatctccaccgtcgactgccagccctccggcgtcaacg

SEQ ID NO: 56509 - DNA, 255 bp, Glycine max
  Clone ID: 700679471H1
tgactacacagcttttgcagcaactacttagccctcctccagctgcagttcttgtagcagatgtgaagttgcatcatgagagtgtggtctactctgttgccagattagcattaggagaagcatgcagttcaatctcatggtccagatgtgatacacttttgcctcctggcaacaagaacctgctgccagagaagtgcaaatcatccgataaaattgatcattacattttgaaagttacggactttgttgatagag

SEQ ID NO: 56510 - DNA, 258 bp, Glycine max
  Clone ID: 700679473H1
tctcgagccgattcggctcgacttcaccttcaaccatgaccacagtgccaccacacagtgaccaagtgcacacaacaacataccgctacgaagccggcgtcgtcccgccggctcgttttgaggcgccgcgttacgaagccggcatcaaggcgccctcttccatttaccattccgagagaggtccgacgacctctcaggtcctcgcagttgtcgccggccttccggtcggcggcatcctcctgctcctggtaggactgc

SEQ ID NO: 56511 - DNA, 145 bp, Glycine max
  Clone ID: 700679501H1
aaacactcatcagtcatcaccatggccaagctagttttttccctttgttttctgcttttcagtggctgctgcttcgctttcagttccagagagcagcctcaggaaaacgagtgccagatccaaaaactcaatgccctcaaaccgg

SEQ ID NO: 56512 - DNA, 228 bp, Glycine max
  Clone ID: 700679503H1
atttgttttttcacatgctataggataaagaaagaaagatccaattggaagttaaatgttattggataaatttctctcaggtttagagagagttgaagaaaacatttcattgataattgagcaaacacaatgaatgctccacctcatcatgacgatgaagacgacaacgaacaagttttccttgatgagtctgacatcatccatgaagttgccatggataatgaagat

SEQ ID NO: 56513 - DNA, 274 bp, Glycine max
  Clone ID: 700679505H1
aggttgttggtgtttaaaattaaaaccgagcctcttccccaaaggagacacagagcgagagagaatcgtaacaaaagcggtaaccggaataagttgtctctacgatttgagccatggcaacaacaacaccctcaaaccgatcatcagaggcgtttgctctcatggcaatcctcagcactctgctttgcacggcggtggcggcgaaggagagcgtgtacgagatactccccaagtacggcctcccgagcggtctgttaccggacaccgtcaccga

SEQ ID NO: 56514 - DNA, 268 bp, Glycine max
  Clone ID: 700679506H1
tcctggctcaggatgaacgctggcggcatgccttacacatgcaagtcggacgggaagtggtgtttccagtggcggacgggtgagtaacgcgtaagaacctacccttgggaggggaacaacagctggaaacggctgctaataccccgtaggctgaggagcaaaaggaggaatccgcccgaggaggggctcgcgtctgattagctagttggtgaggcaatagcttaccaaggcgatgatcagtagctggtccgagaggatgatcagccac

SEQ ID NO: 56515 - DNA, 272 bp, Glycine max
  Clone ID: 700679508H1
atcgagcgattcggctcgagaccaagttcacaatcctcaccatctctcttctctacctgcatcgcccacacgtacagcgcctccaaatggcagcaccagcaagatagctgccgcaagcagctccagggggtgaacctcacgccctgcgagaagcacatcatggagaagatccaaggccgcggcgatgacgatgatgatgatgacgacgacaatcacattctcaggaccatgcggggaagaatcaactacataaggaggaacgaaggaaaagc

SEQ ID NO: 56516 - DNA, 185 bp, Glycine max
  Clone ID: 700679509H1
ttcctcccaacacattctgttcaccggtggtgccggtttcattggcacccacaccgtcgttcagcttctcaaagctggcttcagcgtttcaataatcgacaatttcgataactccgtcatggaagcagtggaccgcgtccgccaagtggttggccctctgctttctcagaacctccaattcaccc

SEQ ID NO: 56517 - DNA, 191 bp, Glycine max
  Clone ID: 700679510H1
gcactggtatttaaacaagtctgatgggttcaagattcccatctcatcagctcagcaatggcctgtatgtatcaggtcggcctgaacagccgaaagaaagaactccaacaatgagctcagttgccatgccttacactggtggagacatcaagaaatccggagaattagggaaaatgtttgatatccccatg

SEQ ID NO: 56518 - DNA, 164 bp, Glycine max
  Clone ID: 700679511H1
gacgtggtcttgggtaataaccaagtcgtcaagggaagagccataaatttctcccctcttttaaattctcccgattatccaatgatatatgctgagtctgctgccagggcaaatatctccaacataactgatgcaagacaatgccacccagattcattagatcc

SEQ ID NO: 56519 - DNA, 85 bp, Glycine max
  Clone ID: 700679512H1
attctctccattgtctttgaacactcatcaccatggccaagcttgttctttccctttgtttccttcttttcagtggctgcttcgc

SEQ ID NO: 56520 - DNA, 110 bp, Glycine max
  Clone ID: 700679513H1
cttcatccttctctgttctcctagaacttgattacttgaacattccctatgacagatgaggtggttcttctggatttctggccaagtccatttgggatgagggtcaggat

SEQ ID NO: 56521 - DNA, 133 bp, Glycine max
  Clone ID: 700679514H1
cgagaaaggaaaggttaactaagaagcaatacttcaatggccacccttgttgttcataaccaaacttcttctgctcaagatgctgaggctctccaacaggctttcaaaggatggggggctgatgacaaggcca

SEQ ID NO: 56522 - DNA, 196 bp, Glycine max
  Clone ID: 700679515H1
catgatcagtggaggtgccctttgggagcttgtccggatttcaagggattgtatgcgagaggacataaggaatcttggtcgtcgaactctcacttctatcccgccattcaaatctgaattccggcgattacatatagacgtatagtatatatagactgttgatgacaggtctttcctgggattgttcatattttgt

SEQ ID NO: 56523 - DNA, 217 bp, Glycine max
  Clone ID: 700679516H1
gaattagacaaacatgttgctcatgaaagcctcaaggatcaaattcctgctgttgacaagttgtattctactaaggttaataagtttgcaaaaattatgaaccttagacaaagtgttgttggtgatcttaaacttcttactgatgggaagttgtatgagggtaagcatattcctgtatctaatattagtgcaggggaaaatcatgtagttcaaatac

SEQ ID NO: 56524 - DNA, 213 bp, Glycine max
  Clone ID: 700679517H1
caaaaatgaagagcaccatcttctttgctctctttctcttttgtgccttcaccacctcatacctaccttcagccatcgctgatatcgtgctcgataatgaaggtaaccctcttgaaaatggtggcacatattatatcttgtcagacataacagcatttggtggaataagagcagccccaacgggaaatgaaagatgccctctcactgtggtgc

SEQ ID NO: 56525 - DNA, 252 bp, Glycine max
  Clone ID: 700679518H1
caaaatgccaccaatgttgaacaggctttcatggccatggctgctgaaattaaaaacagaatggcaagccagccagtgaacaatgcgaggcctccaacagttcaaattcgaggacagccagtgaaccagaaggctggttgctgctcgacttagagagagacgaagtatttggggtcttagaagttcatgtgtctcagtggcatctaaaactagcttttcacattgctttcatatcaagattgttcgtcatga

SEQ ID NO: 56526 - DNA, 181 bp, Glycine max
  Clone ID: 700679520H1
gatgcttgatttgctagttttgctttatggatgttttaggaactttattactttacatactttgttggttctgtgctttacttttggttttgatagacggtatgtctctgtatgcattttgattgtttccaagttttaattgactgcagttgagtaccacaaaaaaaaaaaaaaggggcgg

SEQ ID NO: 56527 - DNA, 272 bp, Glycine max
  Clone ID: 700679521H1
tcaagagttcagcaaaaagtacttgcaagctcccaaggatgtgtcgcagcaaatcaaaatggccaacaagaaaatgaagaaggaacaatattcttgtgaccatccacctgcatcatgggattggaggaaaaaaggtgtcatcacccaagtaaagtaccaagggggctgtggaagcggttgggcgttttctgccacgggagccatagaagcagcacatgcaatagcaacaggagaccttgttagcctttctgaacaagaactcgtagactgtg

SEQ ID NO: 56528 - DNA, 115 bp, Glycine max
  Clone ID: 700679524H1
ccctacgataccaaattcgaggagataaacaaggttctgtttagtagagaggaagggcagcagcaaggggagcagaggctgcaagagagcgtgattgtggaaatctcgaaggaac

SEQ ID NO: 56529 - DNA, 171 bp, Glycine max
  Clone ID: 700679525H1
tagatttgagagtttcttcctatctagcactgaagctcaacaatcctacttgcaaggattcagcaggaacattttagaggcctcctacgataccaaattcgaggagataaacaaggttctgtttagtagagaggaagggcagcagcaaggggagcagaggctgcaagagag

SEQ ID NO: 56530 - DNA, 82 bp, Glycine max
  Clone ID: 700679526H1
ggaatttgagtaatattcatatctccggcttattctacgacggcagatacaaattctggactaaacacgagaaaaatcttgc

SEQ ID NO: 56531 - DNA, 94 bp, Glycine max
  Clone ID: 700679527H1
ccgtattaaagaatttaagatatactatgatgagagcgcggttcccattactgttgctgggagttgttttcctggcatcagtttctgtctcatt

SEQ ID NO: 56532 - DNA, 203 bp, Glycine max
  Clone ID: 700679531H1
cacccaagtaaagtaccaagggggctgtggaagcggttgggcgttttctgccacgggagccatagaagcagcacatgcaatagcaacaggagaccttgttagcctttctgaacaagaactcgtagactgtgtggaagaaagcgaaggttgttacaatggatggcactatcaatcgttcgaatgggttttagaacatggtggga

SEQ ID NO: 56533 - DNA, 276 bp, Glycine max
  Clone ID: 700679532H1
cagaaggcttaccaggtctgtgtatctcacgtggtggagggtgtagatgtcaagcttctggttgtacagaaggggcacagggaagcactatgttctgcaaagcacatggtgggggaaaacgctgtacagcaccagggtgcaccaaaggtgcttgaggggaccacaccactttgcaaaggccatggtggaggaaaatgctgtgcagaccacggtggtggaatttgtactaaaagtgtgcatggaggtaccaacttctgtgtggcacatgggggtgga

SEQ ID NO: 56534 - DNA, 240 bp, Glycine max
  Clone ID: 700679534H1
aagtagcagaaaatggctgtgatcccgtgtcactgttaccgtaccgtcggatcagacaaaccctacctctccggtcagagtctccgccgtcgcgctcctttccccgccgtctctgtttcatttcgacgccgaatatcatgcgtcgcctcttctgccatcgctcacaaagttgggctgaaagattttcttcacttagatgattttgataaggacactattctgaagatgctggaccgggca

SEQ ID NO: 56535 - DNA, 268 bp, Glycine max
  Clone ID: 700679537H1
gttcaggctcagatggaaacaaatttgtttaaattgtctcttgatgatgttgaaactcctaaaggttccatgttggatcttaaaatttctcaatctaaaattgcacttcccaaaaacacagttggaggaaccatcctgcgtagtgatctattggcaaattttttgacagagggcaattttagagcaagtgttgatttgcagcgcactcatcgtattaaaggaatgattaaaatggtagccacagttggtattcctgagaatacaggta

SEQ ID NO: 56536 - DNA, 265 bp, Glycine max
  Clone ID: 700679538H1
gcacgagcagagagaggaacaggaatggcctcgcaaggaggaaaaacgcggagaaaagggaagtgaagaggaagatgaggatgaggatgaggaacaagatgaacgtcaattcccattcccaggcctacctcatcagaaggaagagcgaaagcaagaggaagatgaggatgaggagcagcagcgagagagcgaagaaagtgaagattctgagttacgaagacataagaataagaacccttttctcttcggctctaacaggttcgaa

SEQ ID NO: 56537 - DNA, 115 bp, Glycine max
  Clone ID: 700679539H1
ttgcattgcagcgaaaatttcgcagaagtatcttttttctctctctcatccgcgccccaaatcttagggttttcacccaattcaattcctggaactctcctcgattcgattccac

SEQ ID NO: 56538 - DNA, 252 bp, Glycine max
  Clone ID: 700679540H1
gttcctcactgaccaagccagggcgatgagaaccaaactttctttagctatctttttcttttttcttttagccttattttcaaacctagcctttggcaaatgtaaagaaaccgaggtagaagaagaagaccctgagctcgtaacatgcaaacaccaatgccaacagccacagcaatacactgagggtgacaagcgggtatgcttgcaaagatgtgacaggtatcatcgtatgaagcaagagcgagagaaaca

SEQ ID NO: 56539 - DNA, 156 bp, Glycine max
  Clone ID: 700679541H1
ataaaattcttccaccaagttatgggtttccttgtgttgcttcttttctccctcttaggtctctcttctagttccagcatatcaactcatcgttccatattggaccttgacctaaccaagtttaccacacagaaacaggtgtcttcactgttccaa

SEQ ID NO: 56540 - DNA, 93 bp, Glycine max
  Clone ID: 700679543H1
gtgagaccaaggtgttcagccctgaggaaatcagtgccatgattctgaccaagatgaaggaaactgcggaagcattccttgggaagaaaatta

SEQ ID NO: 56541 - DNA, 126 bp, Glycine max
  Clone ID: 700679544H1
ctccattggtccttaaacactcatcagtcatcaccatggccaagctagttttttccctttgttttctgcttttcagtggctgctgcttcgctttcagttccagagagcagcctcagcaaaacgagt

SEQ ID NO: 56542 - DNA, 195 bp, Glycine max
  Clone ID: 700679547H1
catgatcagtggaggtgccctttgggagcttgtccggatttcaagggattgtatgcgagaggacataaggaatcttggtcgtcgaactctcacttctatcccgccattcaaatctgaattccggcgattacatatagacgtatagtatatatagactgttgatgacaggtctttcctgggattgttcatattttg

SEQ ID NO: 56543 - DNA, 196 bp, Glycine max
  unsure (1)..(196): unsure at all n locations
  Clone ID: 700679548H1
cctttctcctaaaacatctccagtgggttcttcttcttctattacaacaacgtctacccaagaccatgaccatggccatggccacgatcctgctcctgttcacggtcttcgcggtttcatcggccctagacatgtcgataatctcgtacgacaacgcccacgccgccacgtcgcgcacgctnaggagctgatgtcc

SEQ ID NO: 56544 - DNA, 180 bp, Glycine max
  Clone ID: 700679549H1
attaataaagatgagtttgaagaacaacatggtggtgctaaaggtgtgtttgttgcttcttttccttgtgggggttacagctgcacgcatggaactgagcttcttcaaaagtgatcagtcatcaagttatgatgatgatgagtattcaaaaccatgctgtgatctctgcatgtgcacacg

SEQ ID NO: 56545 - DNA, 190 bp, Glycine max
  Clone ID: 700679550H1
ctagtataccttaataaataatttaagatactatgatgagagacacggttcccattactgttgctgggacttgttttcctggcttcagtttctgtctcatttggcattgcttactgggaaaaagagaaccccaaacacaacaagtgtctccagagttgcaatagcgagagagactcgtacaggaaccaag

SEQ ID NO: 56546 - DNA, 181 bp, Glycine max
  Clone ID: 700679551H1
aagtgattaggtaactctcactcacatcactgcaatgtgcaacttatttgagaagaagaaagaataaagaatcaccaaagctctttattacaaacaaattgtgtgtcaaggggatctagcttagttgattgactaaccataggaaccatgaaacaagagccactggcatcaccaacgacat

SEQ ID NO: 56547 - DNA, 264 bp, Glycine max
  Clone ID: 700679554H1
ctcatcagtcatcaccatggccaagctagttttttccctttgttttctgcttttcagtggctgctgcttcgctttcagttccagagagcagcctcagcaaaacgagtgccagatccaaaaactcaatgccctcaaaccggataaccgtatagagtcagaaggagggctcattgagacatggaaccctaacaacaagccattccagtgtgccggtgttgcactctctcgctgcaccctcaaccgcaacgcccttcgtagaccttc

SEQ ID NO: 56548 - DNA, 265 bp, Glycine max
  Clone ID: 700679555H1
cttccaatctcccttcgccgatgcatcccttccccgatctgacgcgcattccgccaccgcttcagcaaaagtatgtacagtgcttcataatcctccctcgccaccggtgaatgtttgattggcaatcctgtacttattagtcaagtttttagaataaaaagaagcttcaatggccaagaaaccaggacaaagatccagtaaattgtctgtgtacctttacattcctaatataattggatacatgcgggttcttttaaactgtttt

SEQ ID NO: 56549 - DNA, 265 bp, Glycine max
  Clone ID: 700679556H1
cgttaacaagcctggtagatttgagagtttcttcctatctagcactgaagctcaacaatcctacttgcaaggattcagcaggaacattttagaggcctcctacgataccaaattcgaggagataaacaaggttctgtttagtagagaggaagggcagcagcaaggggagcagaggctgcaagagagcgtgattgtggaaatctcgaaggaacagattcgggcactgagcaaacgtgccaaatctagttcaaggaaaaccatttct

SEQ ID NO: 56550 - DNA, 259 bp, Glycine max
  Clone ID: 700679557H1
cctggtcttactgtgtggtgactgtgctctgctctcatctcattcatattcatttcaatggcaactcaaggtcaagtcattacctgcaaagctgcggtggcctgggaacccaacaagcccttaaccgtccaagacgttcaggttgctccgcctcaggccggcgaggtccgtgtccaaatcctcttcaccgctctctgccacaccgatgcttacacttggggcggcaaggatcccgaagtctcttcccctgtattctcgg

SEQ ID NO: 56551 - DNA, 103 bp, Glycine max
  Clone ID: 700679560H1
taggagcacgaatggcatcgcaaggaggaaaaacacggaggaaagggaagtgaagaggaacaagatgaacgtgaacacccacgcccacaccaacctcatcaaa

SEQ ID NO: 56552 - DNA, 103 bp, Glycine max
  Clone ID: 700679561H1
cagagcacgagcagaaggaggaacacgaatggcatcgcaaggtggaaaaacacggaggaaagggcagtgaagaggaacaagatgaacgtgaacacccacgccc

SEQ ID NO: 56553 - DNA, 114 bp, Glycine max
  Clone ID: 700679562H1
cctagtataccttaatagataatttacgatactatgatgagagcacggttcccattactgttgatgggacttgtattcctggcttcagtttccgtctcatttggcattgcttac

SEQ ID NO: 56554 - DNA, 214 bp, Glycine max
  Clone ID: 700679563H1
gcagcaacaggaagagcaacctttggaagtgcggaaatatagagctgaattgtctgaacaagatatatttgtaatcccagcaggttatccagttgtggtcaacgctacctcagatctgaatttctttgcttttggtatcaatgccgagaacaaccagaggaacttccttgcaggttcgaaagacaatgtgataagccagatacctagtcaagtg

SEQ ID NO: 56555 - DNA, 266 bp, Glycine max
  Clone ID: 700679564H1
gagaattcaacagccttatgtatggggtggagaaccagagctattgatggcttctcatgttttgaagacaccaatttctgttttcatgagagacacaggctcggttgaattggtaaacatagcaaaatatggtgaagaatacaggaacgataaggacatttccatcaatgtgctatttcatgggtatggtcactatgacatactagagaccttacgaccataattacctgaaaaatgaaaataaacacttagtacagcacaaaact

SEQ ID NO: 56556 - DNA, 267 bp, Glycine max
  Clone ID: 700679565H1
tgttgttgccgtttctattattgacaccaacagcttggagaaccagctcgaccagatgcctaggagattctatcttgctgggaaccaagagcaagagtttctaaaatatcagcagcagcagcaaggaggttcccaaagccagaaaggaaagcaacaagaagaagaaaacgaaggaagcaacatattgagtggcttcgcccctgaattcttgaaagaagcgttcggcgtgaacatgcagatagtgagaaacctacaaggtgagaacga

SEQ ID NO: 56557 - DNA, 260 bp, Glycine max
  Clone ID: 700679566H1
attctctccattggtccttaaacactcatcagtcatcaccatggccaagctagttttttccctttgttttctgcttttcagtggctgctgcttcgctttcagttccagagagcagcctcagcaaaacgagtgccagatccaaaaactcaatgccctcaaaccggataaccgtatagagtcagaaggagggctcattgagacatggaaccctaacaacaagccattccagtgtgccggtgttgcctctctcgctgcacctc

SEQ ID NO: 56558 - DNA, 266 bp, Glycine max
  Clone ID: 700679568H1
ctccgcagcagccacacttcttcgccgtttcagctgaagagccatccgcaggtaagcaatggttaagcataataatgttatccccaatgggcacttccggaaacactggcaaaactatgtgaagacttggtttaatcaaccagcccgaaagaccagaagacggttggctcggcagaagaaggctgtcaagattttccccaggcctactgcctggatctctcaggcctattgttcatggccagactctgaaatacaacatgaaagtc

SEQ ID NO: 56559 - DNA, 264 bp, Glycine max
  Clone ID: 700679569H1
gtttcagtttcggatccctttcttctctcacaccaatttccaggatttgaaacatggcagattcaaaatcaggattgaggaaaccagtgttcatcaaggttgatcagcttcgcccggggacaagtgggcacactttaactgtgaaggtagtcaatgctaagatggtgatgcagagaggtcgttctgatggtcctcaatcccggcaaatgcaaattgctgagtgcttggttggtgatgagactggaatgatcatattcactgcca

SEQ ID NO: 56560 - DNA, 263 bp, Glycine max
  Clone ID: 700679570H1
caataattccttcacttgcagaacttagttctctgttgcatcatcatcatcttcattagtgttagccctaaacttcaccttcaaccatgaccacagtgccaccacacagtgtccaagtgcacacaacaacacaccgctacgaagccggcgtcgtcccgccggctcgttttgaggcgccgcgttacgaagccggcatcaaggcgccctcttccatttaccattccgagagaggtccgacgacctctcaggttctcgcagttgtc

SEQ ID NO: 56561 - DNA, 144 bp, Glycine max
  Clone ID: 700679571H1
tgatatgttcaactctttccctcaaactgatgcagttctactaaagtgggttttacataattggaatgacgaaaattgcataaagatcctgaaaaagtgtaaagattctatttcaagcaaaggcaacaaaggaaaagtgattat

SEQ ID NO: 56562 - DNA, 228 bp, Glycine max
  Clone ID: 700679573H1
tccaaacccaacacccttcttctcccccaccatgctgacgctgattacctcatcgttatccttaacgggactgccattcttaccttggtgaacaacgacgaccgagactcttacaaccttcaatctggcgatgccctaagagtccctgcaggaaccacatactatgtggttaaccctgacaacgacgagaatctcagaatgataacactcgccatacccgttaacaaa

SEQ ID NO: 56563 - DNA, 122 bp, Glycine max
  Clone ID: 700679575H1
gaaactggtcatgtgctcaaagttccctttcgtcgagttcacctgtctggagaagaaggacactttgatacctatgacactagcggtccccaaaatgtaaacccaaggactggactcccaca

SEQ ID NO: 56564 - DNA, 152 bp, Glycine max
  Clone ID: 700679576H1
cttgactcttgagtattttaacccaaaaccttacacacatacatcagagggacacgaactcaaaccgtttaagcttctccgagttttgacctacaacactctcgaatcccctcttgtgtgttgtagccgccccgtgaccatcaatggcggaa

SEQ ID NO: 56565 - DNA, 124 bp, Glycine max
  Clone ID: 700679579H1
caccgtttttgatgctaagcgtttgattggaaggcgtttttccgatgcatcagtacaaggtgacatgaaattgtggccgttcaaggtgattcctggccctgctgagaaagctatgattgtggtg

SEQ ID NO: 56566 - DNA, 252 bp, Glycine max
  Clone ID: 700679580H1
aatatgtcaagccttactttagtggttctaaattgaaaagctttctagctggtcataatatcaccattactgatggtattgacaaaactagtgcaactttgcaatttagaaagttagcagattgtgattttctcaagagaaactttaagcagatgtctaatgttttatgggtggctcctgaggacaaggcgagtttatggtcacaacttcattatgtttcgtgcaataatctggaaatgcaagaagcttatc

SEQ ID NO: 56567 - DNA, 259 bp, Glycine max
  Clone ID: 700679582H1
gagctgcaagagggaggggtgctgatcgttccacaaaactttgcggtggctgcaaaatcccagagcgataactttgagtatgtgtcattcaagaccaatgatagaccctcgatcggaaaccttgcaggggcaaactcattgttgaacgcattgccagaggaagtgattcagcacacttttaacctaaagagccagcaggccaggcaggtgaagaacaacaaccctttcagcttcctggttccacctcaggagtctcaga

SEQ ID NO: 56568 - DNA, 81 bp, Glycine max
  Clone ID: 700679583H1
ctcgagccgcggaatttgagtaatattcatatttccggcttattttacgacggcagatataaattctggactaaacacgag

SEQ ID NO: 56569 - DNA, 261 bp, Glycine max
  Clone ID: 700679584H1
gatatttttgaagagtttattttgttccttaaggttcttgtgatctgttctattttggagtacttacaacactcctttgcaagtttaattaattaaagaggctaatcaattttcaattggactgcagcagatggctgaggagggttgcagggttactctaaatgtttatgacttgagccaaggactagcacggcagctttcaatgtcctttttggggaaagctattgaaggcatatggcacacaggagttgtggtttatgg

SEQ ID NO: 56570 - DNA, 256 bp, Glycine max
  Clone ID: 700679586H1
ctagtataccttaataaataatttaagatactatgatgagagcacggttcccattactgttgctgggacttgttttcctggcttcagtttctgtctcatttggcattgcttactgggaaaaagagaaccccaaacacaacaagtgtctccagagttgcaatatcgagagagactcgtacaggaaccaagcatgccacgctcgttgcaacctccttaaggtggagaaagaagaatgtgaagaaggtgaaattccacg

SEQ ID NO: 56571 - DNA, 98 bp, Glycine max
  Clone ID: 700679591H1
ttaattattaacacttccttagttcaatatggggaagcccttcactctctctctttcttccctttgcttgctactcttgtcgagtgcatgctttgcta

SEQ ID NO: 56572 - DNA, 134 bp, Glycine max
  Clone ID: 700679592H1
gcatggtatagttagtaactgggatgacatggaaaagatctggcatcacacattttacaatgaattgcgtgttgctcctgaggagcacccagtgcttctgactgaggctccactcaacccaaaggccaacagag

SEQ ID NO: 56573 - DNA, 166 bp, Glycine max
  Clone ID: 700679594H1
ctcgagcgcgaggacgaggacgaagaagaagatcaacctcgtcctgatcaccctccacagcgaccaagcaggcccgaacaacaagaaccacgtggaagaggatgtcagactagaaatggggttgaggaaaatatttgcaccatgaagcttcacgagaacattgctc

SEQ ID NO: 56574 - DNA, 265 bp, Glycine max
  Clone ID: 700679596H1
caggaatgtgttcccaggacctattgtgttttaaatccacaaaatccttttgtgttaaataggtggatgggaaaactgactttcccccagggcacttcccgaagtgttaagagaatgcctctttctatagggggaggagctggtgcaaagaatgctattctcatgaatatgccaaatgctgttctttcaatgtggagatattttgttggagatctcgtctttgaagtttctaagatgacttctccctacattaaatgtacagtct

SEQ ID NO: 56575 - DNA, 255 bp, Glycine max
  Clone ID: 700679603H1
attggtccttaaacactcatcagtcatcaccatggccaagctagttttttccctttgttttctgcttttcagtggctgctgcttcgctttcagttccagagagcagcctcagcaaaacgagtgccagatccaaaaactcaatgccctcaaaccggataaccgtatagagtcagaaggagggctcattgagacatggaaccctaacaacaagccattccagtgtgccggtgttgccctctctcgctgcaccctcaa

SEQ ID NO: 56576 - DNA, 254 bp, Glycine max
  Clone ID: 700679604H1
gtgtatcatcgcttattgggcgcatatgctttgtgtgcttctggtcgttgcgtgaattgcagactatgtgctctggtgtaatgtatttgctagactgtacttttacagcctcttgacttcatctgctcccttttaagccttggttcatatgaatgttactagttaaagctgttgcgatagactagttttgtacttttagctggatcatctgggctgatacagcctgtttcaattatatagtcctggactatggt

SEQ ID NO: 56577 - DNA, 253 bp, Glycine max
  Clone ID: 700679605H1
cctgccagtagtcatatgcttgtctcaaagattaagccatgcatgtgtaagtatgaactaattcagactgtgaaactgcgaatggctcattaaatcagttatagtttgtttgatggtatctactactcggataaccgtagtaattctagagctaatacgtgcaacaaaccccgacttctggaagggatgcatttattagataaaaggtcaacacaggctctgcctgttgctttgatgattcatgataactcgt

SEQ ID NO: 56578 - DNA, 254 bp, Glycine max
  Clone ID: 700679606H1
atccaccaggagttggatactggtcgtgctagctagcgggccaaagtagtgcctaagtcttcctcatatcgtccaccctttggcttattagtgggagcaatacatatcattcattcagaggcaacaaaggagttgtagattaggagcatggctgcacaagctcttgtatcatcatcatctcttaccttctcagccgaggctacaagacaaagtcttggaccaagatcactccaatctccatttggcttctcaag

SEQ ID NO: 56579 - DNA, 254 bp, Glycine max
  Clone ID: 700679607H1
ctttctcggttcagtgtctctctttgacggtggtgctgtcagcattgacctcagcttgagcagtaaaacatcatcagcactactacggtaccatggctgtgctgcaatctttcgtttcggtccacccagattctcacttccccatacagaacctcgcttacggagtcttcaagccccaatccgcttcgcctcctcgtcccggcgtcgccatcggcgattcgtcctcgacctctccgaaatatcttccgctggtc

SEQ ID NO: 56580 - DNA, 91 bp, Glycine max
  Clone ID: 700679609H1
ggctcgaggtctccctcagtgtgattggtacatcaatattcatggagcttggtaaaagcaaaacagactcatctgacgtgggatacgttcc

SEQ ID NO: 56581 - DNA, 227 bp, Glycine max
  Clone ID: 700679610H1
ggtaaatacggtgagataacggattccgtcatcatgaaggaccggaagaccggccagccgcgtggtttcggcttcataacttacgctgatccctccgtggttgatacagtgattgaggacactcacattatcaatggcaagcaggtggagattaagcggacgataccgaggggggctgctggctcgaactcaaaggacttccgaacgaagaagatttttgtgggtgg

SEQ ID NO: 56582 - DNA, 248 bp, Glycine max
  Clone ID: 700679611H1
ctccattgtctttgaacactcatcaccatggccaagcttgttctttccctttgtgtccttcttttcagtggctgcttcgctctgagagagcaggcacagcaaaatgagtgccagatccaaaagctgaatgccctcaaaccggataaccgtatagagtcggaaggtgggttcattgagacctggaaccctaacaacaagccattccagtgtgccggtgctgccctctctcgctgcacccttaaccgcaa

SEQ ID NO: 56583 - DNA, 255 bp, Glycine max
  Clone ID: 700679614H1
tctgtctctttgctccatttcagtgctctgtcttctcccccaccaccgcactctctcagatattatcatttcatatcacacattcacatcctatcatcatcgacaacacgctatccccattgcttcttctcttctccctctctcgtttcctacttgacggcgccgtttcgttctccagaagatgcttctgagtacttcgcgctgcaactagacatgatgagttcaagtttcaagacatgggctgtgggatttgca

SEQ ID NO: 56584 - DNA, 257 bp, Glycine max
  Clone ID: 700679615H1
attctatgtacccatggtggtccccatttgtttcgtgtacttttattcttagtttcatttactttccgtacccctttttgacgtgcttcagtcatttacttaagtcattttctcgcctaatcaaaaaataaaataaatttccaacgatcatttgaattgtaatatccattaatttctgttaaaatgaaatccaaccgttcggtcatgccataaccacgttggaaaccaaaaagaagtaaaataataatataataata

SEQ ID NO: 56585 - DNA, 101 bp, Glycine max
  Clone ID: 700679616H1
ctcaaacggatggtaacagaatgtccatagcctcgttttacaatccaggcaatgatgcattgatcgctccagcaccagacttgggtgacggggatgtgact

SEQ ID NO: 56586 - DNA, 216 bp, Glycine max
  Clone ID: 700679618H1
attttgttggagatctcgtctttgaagtttctaagatgacttctccctacattaaatgtacagtctctttcttcatagcatttggaaatttggctgatgacaccatcaattttgaggcttttccccacaagctggtgcagtttggagagattcaggaaaaagttgtattgaaattttcacaagaggaatttcttacagcttggtcaactcaggtgc

SEQ ID NO: 56587 - DNA, 256 bp, Glycine max
  Clone ID: 700679619H1
aagcgagaaaggaacagaagagaaaagcaaagggctttgagttgttccaatggaagaagcgaaaccagcgatgggtcctcctcctcctcctgctcctcccactacgaagaagaggccactggaagactccaatgcccactccaattacttcaagattcgcgctgttattcgagaccttcgtcctcactttctcgaggttctccgaactccagactacaaaaattgcaaggcatcccatgaaattcaagaacagctg

SEQ ID NO: 56588 - DNA, 251 bp, Glycine max
  Clone ID: 700679622H1
atagctgtagcggcgacactaagatcggagaaagaatggcgaaaacgacgtcgttgctgctctttacactgctcctcttcggaaccctagctctcatccaggcgaagaaatcgaaggaggatttgaaggaggtgacccacaaggtttactttgatggtgagattaatggaaaagaagcaggtcgtattgtaatgggtctttatgggaaggctgttccaaaaactgcagaaaacttccgagcactttgcaca

SEQ ID NO: 56589 - DNA, 254 bp, Glycine max
  Clone ID: 700679624H1
agatcacatagcagaatggcttctactcaatgtttcttgcaccaccatgctcttaccacccctgccagatccccatcacaacgcatcatggttagcaccaagcctaaccagcttgtttgcaaggcacagaagcaagaggatattgatgtcagcccaatctctcgccggttagctctaaccgtgctcattggtgctgctgctgttggctccaaagtccaacctgctgatgcagcttatggggaagctgccaatgt

SEQ ID NO: 56590 - DNA, 246 bp, Glycine max
  Clone ID: 700679626H1
aaaccctcttttttctctctcttgcaaaacctaattttcatttcttccctcaaatttcaaaatgcgtgagatccttcacatccagggtggccaatgcggcaaccagatcggcgccaagttctgggaggtggtttgcgcggacacgggatcgaccctaccggaaggtacggtggggactcggagttgcagctcgagaggatcaatgtctactacaacgaggccagttgcggtcggttcgtgccgcgc

SEQ ID NO: 56591 - DNA, 251 bp, Glycine max
  Clone ID: 700679629H1
aattaaactacatagaaaaataaaaccaaacctttcttcctactactcccattcccacatttcgacaacatggacgaggacttcgacatgccgacggcggaggcaatgggcgaggacttcgacttcgccggcgccaccggcggcgacctcgacggcagcagcagcaaccccatcttgaaggtcggcgaggagaaggagattggaaaagagggtttgaagaagaaactacttaaagaaggtgaaggatggga

SEQ ID NO: 56592 - DNA, 242 bp, Glycine max
  Clone ID: 700679630H1
gaaggaggaagacgaagatgagcaaccacgtccaatcccattcgagcgcccacaacctcgtcaagaagaagagcacgagcagagagaggaacaggaatggcctcgcaaggaggaaaaacgcggagaaaagggaagtgaagaggaagatgaggatgaggatgaggaacaagatgaacgtcaattcccattcccacgcccacctcatcagaaggaagagcgaaacaaacaggaggatgaggatg

SEQ ID NO: 56593 - DNA, 255 bp, Glycine max
  Clone ID: 700679631H1
aaatactattactagctaatgagtatgtatctgaagcagaagcagatgatagtgggtgtggcattggtggtgttcttggtgttgatttcggtgaagggacaaagcatatgcaacgtatccttaccagatttaatgacatgcaaaccagcggtgacgcctccaaatccaacgccaccctcccaacagtgctgttctgtactctcacatgcagacttgccctgcctttgctcttacaagaactccccactattgcct

SEQ ID NO: 56594 - DNA, 258 bp, Glycine max
  Clone ID: 700679632H1
ctattgatgaggtgacatctcctgaagcttggggtcttcctcataagatgcttgtcaagttggttgattcctttgccaattggttgaaatgtggtcaggaaactcttcactgaataggaagtcttcctgctccgcctttggaattgatgcaagtcaaccttgatgagaaggaaaggtttagggatctgagggctcagaagagtcttaacaccatagaacacttagcgtaggtgtgaggacttattttatgaaagagga

SEQ ID NO: 56595 - DNA, 98 bp, Glycine max
  Clone ID: 700679633H1
attcttcagaagattttcctgaaaaggaagatcaagaaaaacccaaaaagattgatgccagattgagacagagaatagatcctcaatacaatgaggtt

SEQ ID NO: 56596 - DNA, 68 bp, Glycine max
  Clone ID: 700679634H1
cttttctttttcttgttctttaattttctgacgttcgcaaattaaaatagtagtgttattggtaggtt

SEQ ID NO: 56597 - DNA, 254 bp, Glycine max
  Clone ID: 700679635H1
gtagggtttaccatctttcgtggcctcagttgttaatcaaacaagaagcaatcttattcgcatcaaagggttgggggtgaagataatagtggtgggtgctctacaaccccttggatgccttccccaggagacagccacaagctcgttccaacgttgcaacgccacctccaacgccctcgtgcttctccacaacagcctcctgaaccaagcagtgaccaagttgaaccaattagagaccacaaggaccgttattc

SEQ ID NO: 56598 - DNA, 248 bp, Glycine max
  Clone ID: 700679636H1
cttattaacactttccttagttcaatatggggaagcccttcttcactctctctctttcttccctttgcttgctactcttgtcgagtgcatgctttgctattacctccagcaagttcaacgagtgccaactcaacaacctcaacgcgttggaacccgaccaccgcgttgagtccgaaggtggtcttattgaaacatggaactctcaacaccctgagctgcaatgcgccggtgtcactgtttccaaacgc

SEQ ID NO: 56599 - DNA, 247 bp, Glycine max
  Clone ID: 700679638H1
atctctctctcttgtgccgcccatgcatgcaagttgttgcaacggcgcgttcttccatcttattgttggagcgatcatcaccctcatcaatccaaggaataatgatctttgtttttttgtgtttgggagtacaaaatgtttcgtacgtgaaacaaatatagataatatgatatgataccagaggctagctagctaaagaataaatgtttttactgtaatgtatgtaactgatactatatactgtgat

SEQ ID NO: 56600 - DNA, 250 bp, Glycine max
  Clone ID: 700679640H1
atcccccttctaagtgttgctacttcctttgttgccgaggacattgccaagtcttcctccgctgcagatgccaaaacaaaacaacaactctcctctgtctccactgctctgctattggcactcgcccttggctttttttgaggctttagctttatacctgggagctggagcttttctccatttaattggtgttcctacacaaaatccaacatatgttcccgcacgacactttctctctttaagagctgtt

SEQ ID NO: 56601 - DNA, 90 bp, Glycine max
  Clone ID: 700679642H1
ttttgttgtgttctcttcgaaagcggaatcaatcaatccctcatctcattgctgagatctgcaagctggctatggactacgaaccctacg

SEQ ID NO: 56602 - DNA, 245 bp, Glycine max
  Clone ID: 700679643H1
atttgatcgcagtgcctactggtgttgcatggtggatgtacaacaatgaagacactcctgttgttgccgtttctattattgacaccaacagcttggagaaccagctcgaccagatgcctaggagattctatcttgctgggaaccaagagcaagagtttctaaaatatcagcaagagcaaggaggtcatcaaagccagaaaggaaagcatcagcaagaagaagaaaacgaaggaggcagcatattg

SEQ ID NO: 56603 - DNA, 250 bp, Glycine max
  Clone ID: 700679646H1
cccaaatcaaaacctaaattcccaccttcaactttctcccttaaatcgaccaccaccactgtcaagcccattcatttatattttattcgtatatatacatacagagagtgagtgagagagagagtgggaagaatggattcggatcaaggcaagcttttcatcggtgggatttcatgggatacgacggaggacaagctcaaggagcatttcggtaactacggcgacgttttgagcacttccgtcatgcggg

SEQ ID NO: 56604 - DNA, 259 bp, Glycine max
  Clone ID: 700679647H1
atttcactagctactactcttcttagtttctctgttgtatcatttttattgctatatcctaatcaaacttcactctcaaaatgagtgatcccacactagcacaacaggcatctagtcaaagtccacacaacaacacacgagaacagttgttaccacacacaatcataaccaaacaccctcaataaatgcctcaggtgaaaagaagaagattgtgggggtgttctacaaagggaatgaatatgctaaattgaatccaaat

SEQ ID NO: 56605 - DNA, 203 bp, Glycine max
  Clone ID: 700679649H1
tgacagtggcatcgagcatccgacgtctggctgatgccatggagcaaagcaaatgctcatttgatgcaagagagctattacatgctgtgatggagatagatgggatggaagagggtaaacagatgtatgcattcgaatatttaaatgctgatcctgtcaaagccagagccttcctcacctagagtgctaggatgagaagacat

SEQ ID NO: 56606 - DNA, 235 bp, Glycine max
  Clone ID: 700679650H1
tgacaatgtgaaggcaaagatccaagacaaggagggtatcccaccagaccaacagaggctcatttttgctggcaaacagcttgaagatggccgaaccttggctgattacaacatccaaaaagaatctaccctccacttggtgctccgtctgcgcggtggtatgcaaatctgtgtgaagacccttactggaaacccttacattggaggtatagagctctcagacacattgacatgt

SEQ ID NO: 56607 - DNA, 274 bp, Glycine max
  Clone ID: 700678909H1
cgaaaccctgaagaaagacacagccattgtttacttttcattgattgagccaaagctttgtattttctgcgataagtttccattgggtggaagaaagtctcaacctttatgcgacagagcaaggatctgagttgagttgagtgatcatgtgtggtggtacgattatctccgacttcataccgagcaggtcccgccagcggggcgcggcgcgtgacagacgacatcctgtggccgagtttgaggatacgcttctcgaagccgctgctggacgatg

SEQ ID NO: 56608 - DNA, 101 bp, Glycine max
  Clone ID: 700678911H1
aacattcacacgttcgaattgcaattcggagatcgtgacacggaccctacaccaccatggactccgtcgacaaattctgggctcatcgactcgctcttctc

SEQ ID NO: 56609 - DNA, 87 bp, Glycine max
  Clone ID: 700678912H1
tgcgataactgtgaaggatgattatcagcgctgcgaggaactctgggattatcagtaacagagtcgcgagctattcagatgctaaat

SEQ ID NO: 56610 - DNA, 251 bp, Glycine max
  Clone ID: 700678913H1
tgttcgcacgccttgttcggtgaagtgagtagtgagtgctgaatcgaatcgaatcgattctccgaacatggcggcgagcgatcgcacagtgttgcaattctcttcatcatcttcttcttcttcgcagatcttgtccgcgaaggtccaccctctggtcatcttcaacatcgggcgatgctatgttcgacgccctgacaaaccgagcgcgtcatcggaaccctactcggctccggtcttcccgagggaacgtc

SEQ ID NO: 56611 - DNA, 202 bp, Glycine max
  Clone ID: 700678914H1
ctttgaacactcatcaccatggccaagcttgttctttccatttgtttccttcttttcagtggctgattcgctctgagagagcaggcacagcaaaatgagtgccagatccaaaagctgaatgccctcaaaccggataaccgtatagagtcggaaggtgggttcattgagacctggtaccctaacaacaagccattccagtgtg

SEQ ID NO: 56612 - DNA, 221 bp, Glycine max
  Clone ID: 700678915H1
ccaaacccgtgttctgatgcatggagtttggaatttctgaagcgtaccggatttcattgtgatatcatttgtgtcactggatggactgccaccccaatgcaggatgttcaggttacaattgattggtttatttcctctcaggaatgtgttcccaggacctattgtgttttaaatccacaaaatccttttgtgttaaataggtggataggaaactgactttc

SEQ ID NO: 56613 - DNA, 212 bp, Glycine max
  Clone ID: 700678916H1
cttctttattccttttgtaatttcattcattcttaatctatgtgaaaaataatgttcatcgagaattttaaggttgagtgtcctaatgtgaagtacaccgagactgagattcagtccgtgtacaactacgaaaccaccgaacttgttcacgagaacaggaatggcacctatcagtgggatttcaaacccaaatctgtcaaatacgaatttaa

SEQ ID NO: 56614 - DNA, 269 bp, Glycine max
  Clone ID: 700678917H1
atttgatcgcagtgcctactggtgttgcatggtggatgtacaacaatgaagacactcctgttgttgccgtttctattattgacaccaacagcttggagaaccagctcgaccagatgcctaggagattctatcttgctgggaatcaagagcaagagtttctacaatatcagcagcagcagcaaggaggtacccaagccagacaggacagcaacaagacgaagtaaacgaagtaagcaacatattgagtggcttcgcccctgaattcttga

SEQ ID NO: 56615 - DNA, 271 bp, Glycine max
  Clone ID: 700678918H1
cttcgggaatttattctggagaaggtgaatattttggtggacatgaaggcgaaagtctctttagctggtatagagaaatggatggaggaagcattgaactgattaatcggccaaattctaaaatctatgaagttactgattcggattacaattatcgtttgttgtttggatatacacctattcgttcagattcagttgcgggggaacttgtcttatcggatccaactaacactgttctcccagagcttccatatgtggagatgcttgctct

SEQ ID NO: 56616 - DNA, 77 bp, Glycine max
  Clone ID: 700678919H1
ctcgagccgttcaaagtcattgccattactgcaacaacaatgataataaggacaactaacgctactaataataacga

SEQ ID NO: 56617 - DNA, 277 bp, Glycine max
  Clone ID: 700678922H1
gctgaagcaaagcaatggctacttcaaagttgaaaacccagaatgtggttgtatctctctccctaaccttaaccttggtactggtgctactgaccagcaaggcaaactcagcggaaactgtttctttcagctggaacaagttcgtgccgaagcaaccaaacatgatcctccaaggagacgctattgtgacctcctcgggaaagttacaactcaataaggttgacgaaaacggcaccccaaaaccctcgtctcttggtcgcgccctctactccacccc

SEQ ID NO: 56618 - DNA, 233 bp, Glycine max
  Clone ID: 700678923H1
agtcccttttctgaaattctcctaactctctctctctctcaacaatggctcgtacttttgttcttatgttggttgctgctgctgcattgttgatgagctccacgatggctcaatctccagcgtcttcgccggctttatcaccgaccaacacgccggtggccactccaccgaggagggcgttgtcaccgtgtcctgttgctgctgaggtgccaccgtcgtcttctcctccggct

SEQ ID NO: 56619 - DNA, 174 bp, Glycine max
  Clone ID: 700678925H1
ttcaaaccttgctctatactacacagtacacacactagaagaataatggcttccatcctccactactttttagccctctctctttcttgctcttgtctgggcttcttatccgactcagtcacccctacaagaccaataaaccttgttgatctacccgttcacaatgatggctcc

SEQ ID NO: 56620 - DNA, 253 bp, Glycine max
  Clone ID: 700678927H1
gattagtccactacccgtgcttaaggaaatcttccgaactgatggtgaacaggcccttaagtttcctcctcctaaagtaattcaagcagtgagtaagtctgcatggatgactgatgaagaatttgcaagagaaatgcttgctggtgtaaatccaaacttgattcgttgtcttaaggatttccctccacgaagcaagctagatagccaagtctatggtgatcatactagtcaaataaccaaagaacacctagag

SEQ ID NO: 56621 - DNA, 96 bp, Glycine max
  Clone ID: 700678928H1
cttaattattaacacttccttagttcaatatggggaagcccgtcactctctctctttcttccctttgcttgctactcttgtcgagtgcatgcgttg

SEQ ID NO: 56622 - DNA, 236 bp, Glycine max
  Clone ID: 700678929H1
atcattattattttactccgaacgagttgacaccgattccactcactcaaccatgagccgattcaggcgttttgagctcatagaacaaccacctttcttccactcctgctactctttcccttccttcgtcctccaagactcactctctctcgacctcgacctcttgccacttcccagccacttcgacgctttcgcagatctggtgcacgcgccgtcgttcgcttatcggggcgtgg

SEQ ID NO: 56623 - DNA, 246 bp, Glycine max
  Clone ID: 700678930H1
ctactagatcatcatgacccaatcatgccatatttgaggcgactaaatgcaacctccacaaaggcttatgctaccagaaccatccttttcctgaaaaatgacggaactttaaggccacttgccatagagttgagtttgccacatcctcagggagatcaatctggtgcttttagtcaagtttttctgcctgcagatgaaggtgttgaaagttctatttggctgctagcaaaggcttatgtagttgtg

SEQ ID NO: 56624 - DNA, 277 bp, Glycine max
  Clone ID: 700678931H1
gaattctaaataaagacaaaattctgtttttgggccaggtttgagcacaaagacaggttttccccctaacaaagagcttcctctttcaaaacacagggaataacaatctgacaccttaatttccttttacaagtctacaacacaacttatgtatcactaaactgtcgcatcatcacttataaatataacttcctaatccgaaattaatataaaaatacatgtccactgactttataatacaaatttataactgcctaaatcaaatgctgggctatca

SEQ ID NO: 56625 - DNA, 247 bp, Glycine max
  Clone ID: 700678932H1
gtccaattttgtctgggcttagagtactataccctgtaaaacggacatactggtttgatatttataagaatatcgacaaagttggtgcggtcaaatgtcctgttttggttatacatgggactgcagatgaagttgtggatgtgtcccatgggaagcagctctgggagttttgcaaggtaaatacgaacccttgtgggtaagtggtggtggacattgtaatcttgaactttacccagaattcattaaa

SEQ ID NO: 56626 - DNA, 56 bp, Glycine max
  Clone ID: 700678936H1
cggctcgagcagctacgggggcttgagtgtcctttaacacttaggaacatgggcaa

SEQ ID NO: 56627 - DNA, 55 bp, Glycine max
  Clone ID: 700678937H1
caccggtacatattatttcgaggcaaagaagaaatcgtttcccgtgattccattg

SEQ ID NO: 56628 - DNA, 270 bp, Glycine max
  Clone ID: 700678938H1
cgcaccacccaccacgtatccctgaaaagagagacaaacacactaagccgaagccaaagcagcaatggttacagacacaaagcctttagcctatgctgctaataatggataccagaaggaagcttttgatcccagtgctcctccaccgtttacgattgcagaaatcagagttgcaataccacaacattgctgggtcaagaatccatggagatccctcagttatgttctcagggatgtgcttgtaattgctgcattgatggctgctgcagt

SEQ ID NO: 56629 - DNA, 100 bp, Glycine max
  Clone ID: 700678940H1
ggagattctatcttgctgggaaccaagagcaagagtttctaagatatcagcaagagcacggaggtcatccaagccagaaaggtaagcatcagcaagaaga

SEQ ID NO: 56630 - DNA, 250 bp, Glycine max
  Clone ID: 700678941H1
gtgacgggtgacggagaattagggttcgattccggagagggagcctgagaaacggctaccacatccaaggaaggcagcaggcgcgcaaattaccaatcctgacacggggaggagtgacaataaataacataccgggtcattgagtctggtattggaatagtacatctaaatcccttaacgagatccatggagggcagtctggtgccacagcgcggtaattccactccaatgcgtatatttaattgttgca

SEQ ID NO: 56631 - DNA, 93 bp, Glycine max
  Clone ID: 700678942H1
cggcgagcgcaaggcttatgaataggatctatgcgtatcgatgtccacgatgatctagggcaatccagatgagcgtgaaaaccttagctcgtc

SEQ ID NO: 56632 - DNA, 181 bp, Glycine max
  Clone ID: 700678945H1
tggtggcagcattcagcaaatttagcatgttatgagcaccaggatgctcacgagtttttcatttcgatgttagatgctatccatgagaaagagagcaaaacaaggaatggaagcaaaggtaatggagactgtcaatgcattgctcataaggtgttctatgggttattgagatcagatgtta

SEQ ID NO: 56633 - DNA, 241 bp, Glycine max
  Clone ID: 700678946H1
ctcgagcgctcgtaaatgtgttacgagaattgtatttgcacagtccagaggaagctcgccaattgagaaggaaagctctctctcgtattgaatggctgcaaaaagctgatgtgcctaccatagcacagattgaagagttccattcgatgcagaggatgatgaatgctcctgattcacatgatcatattgatctactgttgagcatgatttgttgggtttacaaggagaggtaaagcttttc

SEQ ID NO: 56634 - DNA, 99 bp, Glycine max
  Clone ID: 700678947H1
ggaaaaggttcacatcaacattgtcgtcattggacatgtcgactctgggtagtcaactaccactggtcacttgatctacaagcttggaggtattgacaa

SEQ ID NO: 56635 - DNA, 213 bp, Glycine max
  Clone ID: 700678948H1
gccatggctacttcaaagttgaaaacccagaatgtggttgtatctctctccctaaccttaaccttggtactggtgctactgaccagcaaggcaaactcagcggaaactgtttctttcagctggaacaagttcgtgccgaagcaaccagacatgatcctcctaggagacgctattgtgacctcctcgggacagttacaactcaataaggttgac

SEQ ID NO: 56636 - DNA, 276 bp, Glycine max
  Clone ID: 700678949H1
gaatggatgacatgccgttgccggcgctctttgagcaagcccgcaagatccacgccgcagctaccgattccggcgccgaccaggaggttgtgaagaaggggtgcgaggctctgcatagatgcgaggacatggtcaataatctaggtttgttctctcccaacgagaccaaagaagttatcagcaccacgaatctcaaatacattctggttcgtatgtttgagtttagttacttttacttttaattaacgccattattttatataatcaaggaaaatg

SEQ ID NO: 56637 - DNA, 73 bp, Glycine max
  Clone ID: 700678950H1
caacttcctaaccctaaacgccacgtgcataacattctttcctgttttctctttccgatcggcgcttccacac

SEQ ID NO: 56638 - DNA, 277 bp, Glycine max
  Clone ID: 700678951H1
caagattctaaatacagacaaaattctgtttttgggccaggtttgagcacaaagacaggttttccccctaacaaagagcttcctctttcataacacagggaataacaatctgacaccttaatttccttttacaagtctacaacacaacttatgtatcactaaactgtcgcatcatcacttataaatataacttcctaatccgaaattgctataaagataaatgtccactgactttataatacaaatttataactgcctaaatcaaatgctgggctat

SEQ ID NO: 56639 - DNA, 97 bp, Glycine max
  Clone ID: 700678952H1
tgataaacagcaggggttatgatggagccaaagctgatatatggtcatgtggggtgatcttgtatgttctattggctggttttcttccatttagaga

SEQ ID NO: 56640 - DNA, 97 bp, Glycine max
  Clone ID: 700678953H1
ctagtataccttaataaataatttaagatactatgatgggagcacggttcccattactgttgctgggacttgttttcctggcttcagtttctgtctc

SEQ ID NO: 56641 - DNA, 251 bp, Glycine max
  Clone ID: 700678954H1
tcctgagaatacaggtatagcattagcctgtgctatgaatagttcttttacggggcgtgccagttctgatatttacaccatctgctctcaagactgtggattatggaatcctgcttgcacataagcaatgactatgtcacttaatccatacccgtgatctgatagctggagtttggcatttctgaagcgtaccggatttcatcatgacaacactggtgtcgctggatggactgccactccaatgcatgatg

SEQ ID NO: 56642 - DNA, 269 bp, Glycine max
  Clone ID: 700678955H1
ctcgagcgaatcggctcgagattttaccaacgagctagttccgacacagacaaagcactggcaaagactgagttagaggtgactgttgagagcaagaacaaagaactatagcacctgggatttgtgaggattgctgctattcaaacttttgtgattgtgtcaaatctgtatgagtacgcaaagcagaattctgggcctttgagatccgctgttggaacggttgagaacactgtaaccaccgttcttggtcctgtctgcaacaaaatcaa

SEQ ID NO: 56643 - DNA, 269 bp, Glycine max
  Clone ID: 700678957H1
ggcttaggtgctgacgattggttcctgtgttgcctacctaccaaacggtattcgtgtggctagtcagacccattccatccaggcctctttgttggggacgctggaggatttcaaagtcccacacgtgaaccacgttagtcgtccatcataacggcttcctgtggcacacgtgtggtgattgttctctcggatgcggtgcatgcagtgaacgtgggtggtctagtgcccccacattgttccttaaaatcggttgtctcggatgacgcttg

SEQ ID NO: 56644 - DNA, 271 bp, Glycine max
  Clone ID: 700678958H1
ggtggcagcattcagcaaatttagcatgttatgagcaccaggatgctcacgagtttttcatttcgatgttagatgctatccatgagaaagagagcaaaacaaggaatggaagcacaggtaatggagactgtcaatgcattgctcataaggtgttctatgggttattgacatcagatgtaacctgcatggcctgtggattcacctcaacaacctatgacacttgtgaggacatttcacttaacttggataccaatgtctccttcacagaaaa

SEQ ID NO: 56645 - DNA, 221 bp, Glycine max
  Clone ID: 700678959H1
aaataatacgactatttttgttggcaatttggatcctaatgtaaccgatgatcatctgaggcaagttttcagccagtatggagaattagttcatgtgaagattccagcaggcaagcgatgtgggtttgtccaatttgcagacaggagctgtgctgaagagggccttcgggtgttgaatgggacgctgttgggtggacaaaatgtgcgtctttcatggggtc

SEQ ID NO: 56646 - DNA, 96 bp, Glycine max
  Clone ID: 700678960H1
cattattctatatcaattttggttaagagtcttgaaaaagcaagagaaaaaaaaataccaaccatggcaaccatttctgatcaacctagagggtcc

SEQ ID NO: 56647 - DNA, 200 bp, Glycine max
  Clone ID: 700678962H1
gttcgcactgggaactgggaagaatagaaagacaaagaaaccttccgattccttcatcgccgccattattcggtggccactgcatgcacctttcccttttctcatccaacaccttctcagatctactccttttcctcttcccaaaatcattctccgattgcgcctagggttcacacctcgaatcgccgttttctgtcatg

SEQ ID NO: 56648 - DNA, 268 bp, Glycine max
  Clone ID: 700678963H1
tctcgagcgaatcggctcgacaatccttcaaaaattttgttactttgtgtgtgtatggtgatgacaacttaattagagtacatgaatatgtcaagccttactttagtggttctaaattgaaaagctttctagctggtcataatatcaccattactgatggtattgacaaaactagcgcaactttgcaatttagaaagttagcagattgtgactttctcaaaagaaactttaagcagatgtctaatgtcttgtgggtggctctgaggac

SEQ ID NO: 56649 - DNA, 274 bp, Glycine max
  Clone ID: 700678964H1
aaatgaccaagttcacaatcctcctcatctctcttctcttctgcatcgcccacacttgcagcgcctccaaatggcagcaccagcaagatagctgccgcaagcagctccagggggtgaacctcacgccctgcgagaagcacatcatggagaagatccaaggccgcggcgatgacgatgatgatgatgacgacgacaatcacattctcaggaccatgcggggaagaatcaactacataaggaggaacgaagggaaagacgaagacgaagaagaaga

SEQ ID NO: 56650 - DNA, 272 bp, Glycine max
  Clone ID: 700678965H1
atcaattttggttaagagtcttgaaaaagcaagagaaaaaaaaataccaaccatggcaaccatttctgatcaacctagagggtcctactcctatggaacctcatatggagcaccctatggaaccacgtatgagaccaacaccagcattaacaacccaccttcacgccaaacagtgaagttcataactgctgccactattggcatcacactcttgctcctgtctgggttgaccctcacaggcactgtcataggtttgatcattgcaacccctc

SEQ ID NO: 56651 - DNA, 271 bp, Glycine max
  Clone ID: 700678967H1
tggcactactgttatgacagaggccgaacgatacgaatccctgcgccattgcaaatgggaggatgaagttattcctgatgaccgctgaggtatcaatcaagagtttcttgactagcacaacattgactatgtggctcatgactctcttccttatgctgatgccagtggtgctgctaatgatgtttatgaatttgttagatctgttgcgaggtttaaggtaacataacggactgaaggcatatccacgtcagatgttatgatgaggattgtc

SEQ ID NO: 56652 - DNA, 271 bp, Glycine max
  unsure (1)..(271): unsure at all n locations
  Clone ID: 700678968H1
ggaaactcccaangaatggcaactggatctaccttgtgacaaaattcctagtgtcttgattacaactgatgagagattggtaggcacagaacatgaggggtatgatccttttcttggtggaattcaaaaatatgccactcccatgatgccccaagctgaagaaattctttctaaggttgcacaagatatggttgaggaatggtttgattgtgttgatgaggaagattcctttgaggaagtttctttaagtgcagcactcaatggtgttgag

SEQ ID NO: 56653 - DNA, 272 bp, Glycine max
  Clone ID: 700678969H1
tcgatctggagcaagtcggggtgcagtacatgggcaccacacccaattccccctccaccgcttccctgtctctcaccattcgcctcctcttcgccgccaccaaccccaaccaggtcgggatcaggtacggccagtccagcttcaccgtcatgtaccgcggcatccccctcggaaaagccaccgtccccggcttcttccagcaacctcacagcacccgacaggtgatcgccaccatcgccgtcgatcgcgtcaatttgcttcaggcggacgcg

SEQ ID NO: 56654 - DNA, 260 bp, Glycine max
  Clone ID: 700678970H1
taattgtggagtattttggaaggatgtcttacgttgctcataacgttaatcagccccaagagatagatttgttagagggaaatttttcctttgatattaaatctcgctctagattggaaaaagtttcctctacaaaagcacaatttgttagtggacaaaccttcacatatgatataattggtgctggttcacattcttcaggagattttcctgataaggaagatcaggataaacccaaaaagattgataccagattgaga

SEQ ID NO: 56655 - DNA, 95 bp, Glycine max
  Clone ID: 700678971H1
cagatctgattgttggaaactacagtgatggaaacattgtcgcttctttgttggcacataaattaggtgtcactcagtgtaccattgcacacgca

SEQ ID NO: 56656 - DNA, 269 bp, Glycine max
  Clone ID: 700678972H1
cacctttgttcactcttcttctcttgcggctagggttttagcgcagttcttctagatttaaggaagatgggtaaggaaaaggttcacatcagtattgtggtcattggccatgtcgactctgggagatccactaccactggtcacctgatttacaagcttggaggcattgacaagcgtgttattgagaggtttgagaaggaagctgctgagatgaacaagaggtctttcaagtatgcctgggtgctggacaaacttaaggctgagcgtga

SEQ ID NO: 56657 - DNA, 277 bp, Glycine max
  Clone ID: 700678973H1
gtttgattccttagccctctcaatttctctctctagtgtttaatttggtaacaaaaagagacaaaaccaaaccgctacatgcatgaatttctggaaccatcaaatgaaactgtagttaaagaaactcaccagccagctgtgccaaggagtgatgaaaagtgtgagtcatgcttgttaaatagagttgagttgtcccaattctgcaaaattaagcttacttggaatatcacaaatgggtagtagcagatggaattggtgggcttgttggggttcagaa

SEQ ID NO: 56658 - DNA, 89 bp, Glycine max
  Clone ID: 700678974H1
cctaaacttagcaaagactactttgcagcggtgtagctaggataatagttaagagtggctatctgcatctgtatcaatcagtgaattgc

SEQ ID NO: 56659 - DNA, 268 bp, Glycine max
  Clone ID: 700678975H1
aatcactctagctgttgcaaatttctactatttttcaatggcttctgcagatgttgagttccgttgctttgttggtgggcttgcttgggtcaccggcaacgatgccctcgagaaagccttttcaatctacggcgacatcgttgaatcgaaggttatcaacgaccgtgagacttgaacgtccagaggattcggatttgtgaccttcgcctcagagcagtcaatgaaagatgcgatcgcaggaatgaacggccaggacttgacggtcgta

SEQ ID NO: 56660 - DNA, 93 bp, Glycine max
  Clone ID: 700678976H1
caccactctccctcctcctccacccgctctcgtgttggcacctcggctaggttatttgcctttgctgatttcgctattgaagcctcagttcag

SEQ ID NO: 56661 - DNA, 254 bp, Glycine max
  Clone ID: 700678977H1
cctggatatatgtatacagatcttgcaacaatttatgaacgagctgggagaattgaggggcgtaaaggctctattacacaaattccaattctaaccatgcccaatgatgatattacgcacccaactcctgatctaacaggatatatcactgaggggcagatatacatcgacaggcagctgtataatagacagatatagccaccaatcaatgtcctcccgtcaatatctcggttgatgaagagtgctattggtga

SEQ ID NO: 56662 - DNA, 95 bp, Glycine max
  Clone ID: 700678978H1
tatggaactcttggcagctttagctttacttcaaagccatggaaactctaccgaatcctatgaagaatccatggaagcaccagagatgaaaatta

SEQ ID NO: 56663 - DNA, 241 bp, Glycine max
  Clone ID: 700678979H1
tgaacaaattccctctcaccctcctcgccgaccaagccatggaaagcgtgaacaagacgaggacgaggacgaagatgaagataaacctcgtcctagtcgaccaagccaaggaaagcgtgaacaagaccaggaccaggacgaggacgaagatgaagatgaagatcaacctcgcaagagccgcgaatggagatcgaaaaagacacaacccagaagacctagacaaggagaaccacgtgaaaga

SEQ ID NO: 56664 - DNA, 265 bp, Glycine max
  Clone ID: 700678980H1
gtcagatgttgcctggaacatgcagcctctgtagccaaaaccttcttaatgtcagattgtgtggttgtcgagataaaggaacctgagcctgtacctgctggaaaccccatggacaattcaggatatggtatctagagacacggctgcttcagtgagaagagtattttttttctcctcggatgaaatgcaaaatttggtatagccatatagcaagagtcgaaatgtattgaagtgtggtgaactagatagtgatgcatcctctcct

SEQ ID NO: 56665 - DNA, 94 bp, Glycine max
  Clone ID: 700678982H1
attgaattagtttctgaaccgtggccaagtatctcagaaaatgctaaagaattggtaaaacagatgttggatagggacaaagagaaaagaattt

SEQ ID NO: 56666 - DNA, 92 bp, Glycine max
  Clone ID: 700678984H1
cgcctctcttcctcttcacgccgccaccattatcgatctgatctgtacgcggaggagagtgaagggaacgatgatttcagggcggagtttct

SEQ ID NO: 56667 - DNA, 266 bp, Glycine max
  Clone ID: 700678985H1
gtctaagaatgttgaaagaggatgaggatgaggatattgaggacgatgattcggatgagttttctgatgaggatgaagatcgatcaggagaaggaggatcaaggggtatggatgaggatgaaaatgatcatgtgatgaggaagagagcaaggaataagggaggtttcggtgtttcatcgatatcatcacagatgatgcagcagttgaatggtgaagtgactggtgtgttgcaagatggagggaagagtgcttgggagacaaagcag

SEQ ID NO: 56668 - DNA, 256 bp, Glycine max
  Clone ID: 700678986H1
catccatctgattttgatgagcaggaacgaaggcagttccttgcagcaggcaattggagcatcggctgaggcggagaccatggacacagacgctgctgctgcgatatggaaagaaattgaggcttcagagagttaccttgtttgttctatgtacgaagaagcggcacaattagcttcctctgttttggaacgcttgcgtcattcccatcatgatatcgatagagatgatatgttggaatcaagtgctatggtgctg

SEQ ID NO: 56669 - DNA, 94 bp, Glycine max; identical to SEQ ID NO: 55999
  Clone ID: 700678988H1

SEQ ID NO: 56670 - DNA, 266 bp, Glycine max
  Clone ID: 700678989H1
ggcttaagtgctgacgattggttcctgtgttgcctacctagcaaacggtattcgtgtggctagtcagacccattccatccaggcctctttgttggggacgctggaggatttcaaagtcccacacgtgaaccacgttagtcgtccatcataacggcttcctgtggcacacgtgtggtgattgttctctcggatgcggtgcatgcagtgaacgtgggtggtctagtgcccccacattgttccttaaaatcggttgtctcggatgacgc

SEQ ID NO: 56671 - DNA, 261 bp, Glycine max
  Clone ID: 700678990H1
tgaccattacaatcagtatcgtgaccatgatgggatggaagatgactaccatgctggacgtgcaacatctgaatcgcatgaaaaggagagaagtcatgatgtggaccgtgaatatcaacgctcagagagatcacattcccgggagtatgattattaggacttgggcatagttcttctcaactttgttggtaagattttataatttggtatgtttacttttgaatcttgctcacctgccggtattggtagttgttgaatgga

SEQ ID NO: 56672 - DNA, 270 bp, Glycine max
  Clone ID: 700678991H1
ctcagtatagccctcctcaactacatttgcaatctcataatgaaccccaaccactacagtatcagcctcagcctcatccacacttactgtctcagcccccacccccaccacacttgcatcctcagccccaaccccagccacaatatcagccccaacccgggcccattcagcaacctcaaccgcagtcacaatttcagaatcaacattttgaataccctgcaagatatcctcccccaccatgggccgctacacctggatatgccaactatc

SEQ ID NO: 56673 - DNA, 94 bp, Glycine max
  Clone ID: 700678993H1
gattagtccactacccgtgcttaaggaaatcttccgaactgatggtgaacaggcccttaagtttcctgcctcctaaagtaattcaagcagtgag

SEQ ID NO: 56674 - DNA, 267 bp, Glycine max
  Clone ID: 700678994H1
gttattatcaaataattaattaaattcctcgtggaatcttgttgaagccatgtctacagctggtcaggtcatcaagtgcagagctgcggtggcatgggaagcagggaagccactatcgatagaaaccatagaagtggcaccaccccagaaaggtgaagtgcgtttgaagatcctcttcaactccctttgccgtacagatgtttactggtgggatgctaagggccagactccgctgtttcctcgtatcttaggccacgaagcttcggg

SEQ ID NO: 56675 - DNA, 264 bp, Glycine max
  unsure (1)..(264): unsure at all n locations
  Clone ID: 700678995H1
ctcgagccgctgtggcagaggtcacaggaagcaacgttgtgtaggttgcggaggacgaactcatgagaatcctcattctaatgaggaatttcatgccagggtaccatcaggctgttaatggggaatggaatgttgctggcattgcacatagagcttatgatcttgaaggaaagacagtaggaaccgttggcgctggtcgaatagggaagcttttgctccagaggttgaaaccttttagctgtaatcttctntattttgatcgac

SEQ ID NO: 56676 - DNA, 257 bp, Glycine max
  Clone ID: 700678996H1
ctgctgcaactattggcatcacactcttactcctgtctgggttgaccctcacaggcactgtcataggtttgatcattgcaacccctcttcttgttatcttcagccccatccttgtccctgctgcgtttgtgctgttcctggttgcttctggctttttgttctctgggggctgtggtgtggctgccattgctgctttatcttggatttacaactacgtttctgggaaccagcctgcgggttctgacacccttgactat

SEQ ID NO: 56677 - DNA, 96 bp, Glycine max
  Clone ID: 700679003H2
cggctcgacgggaaacttggaaacgctacctttttggcaggtctcattacttcattgccaactttgggagcaggccaatctgcattcacaattaat

SEQ ID NO: 56678 - DNA, 101 bp, Glycine max
  Clone ID: 700679004H2
gtgaaaggacgcacctgctgttggcttgttgttcaaggatggcaatttgtaagagagatgtctggagagttgaatgtggaatcccttctggatttccgctc

SEQ ID NO: 56679 - DNA, 90 bp, Glycine max
  Clone ID: 700679005H2
attcctagtgtcttgactacaactgatgaaagattggtaggcacagaacatgagggctataatccttgtcttcggtggaattcaaaaata

SEQ ID NO: 56680 - DNA, 101 bp, Glycine max
  Clone ID: 700679006H2
ggtcatcgttgggatctccatacgccggatctgctaaaatacgcttgatccatatgggcctcctcgaccacttgtgggacgacaccgtcgccggcccaagg

SEQ ID NO: 56681 - DNA, 97 bp, Glycine max
  Clone ID: 700679007H2
gtcttcttctctaagatatgagaccctaacttctgaacctttcaccgcatcgccaccgattccctatctccactagtcaaagaaaagcaaatgagtg

SEQ ID NO: 56682 - DNA, 102 bp, Glycine max
  Clone ID: 700679008H2
cggctcgagctctgtctctctctctctctctcgatcaatcatggctttgcccaatcagcaaactgtcgattaccctagtttcaaactcgtcatcgtcggtga

SEQ ID NO: 56683 - DNA, 99 bp, Glycine max
  Clone ID: 700679009H2
gtctgatatacacgctgaattgaataatacaagttattgtcaggcatggataaatgcagcctcctagaatggggtgattcaatgtcctggaatgatggc

SEQ ID NO: 56684 - DNA, 101 bp, Glycine max
  Clone ID: 700679010H2
gcgagagagcgaagaaagtgaagattctgagttacgaagacataagaataagaacccttttctcttcggctctaacaggttcgaaactctcttcaaaaacc

SEQ ID NO: 56685 - DNA, 101 bp, Glycine max
  Clone ID: 700679011H2
tctccattggtccttaaacactcatcagtcatcaccatggccaagctagttttttcgctttgttttctgcttttcagtggctgctgcttcgctttcagttc

SEQ ID NO: 56686 - DNA, 101 bp, Glycine max
  Clone ID: 700679013H2
ctcgagccgcttcgggagaaattatatgttggaactgccgtagggtctctcttgatagttttgggactctattctgttctctggggaaagagtgaaaaggt

SEQ ID NO: 56687 - DNA, 101 bp, Glycine max
  Clone ID: 700679014H2
cttaattattaacacttccttagttcaatatggggaagcccttcactctctctctttcttccctttgcttgctactcttgtcgagtgcatgctttgctatt

SEQ ID NO: 56688 - DNA, 105 bp, Glycine max
  Clone ID: 700679016H2
caacatctctctgaaaatcactcaaacgcagaagagagagggagagaatcgaaacagccctacgcagcacagcacaatcgcaacgcaagcgattaataataatcg

SEQ ID NO: 56689 - DNA, 100 bp, Glycine max
  Clone ID: 700679017H2
cctttggccgatgcgcaactcgcaataacaatcttggatcttgtgcaacaagctgccaactacaagcaactaaaaaagggtgctaatgaagcgactaaga

SEQ ID NO: 56690 - DNA, 98 bp, Glycine max
  Clone ID: 700679018H2
cttattaacactttccttagttcaatatggggaagcccttcttcactctctctctttcttccctttgcttgctactcttgtcgagtgcatgctttgct

SEQ ID NO: 56691 - DNA, 98 bp, Glycine max
  Clone ID: 700679021H2
ggtgaactcagtgagtgagtgagagatggcggagagtgaagtggaggtgattcattcttggtctgctccaagatccctcagtactagtctcatgtatt

SEQ ID NO: 56692 - DNA, 98 bp, Glycine max
  Clone ID: 700679022H2
ctcgagccgtttttacagtagctaatgctagtcaccgaacttagtcaatgagctagaatgggttataaagatatctatagatatatatagatatattt

SEQ ID NO: 56693 - DNA, 99 bp, Glycine max
  Clone ID: 700679023H2
ttctctctctccattccgtgttttcagctccggtaacctctccttctccgccgccgttgctatctccgccgtgaccttccatccctcaacgccccacag

SEQ ID NO: 56694 - DNA, 97 bp, Glycine max
  Clone ID: 700679024H2
gtttgaagaagaagaggaaggtggcgaacgggatggagcagaaggcgtggcggattcttgctaaccagctcgggcagttcagatagatggcgacgcg

SEQ ID NO: 56695 - DNA, 99 bp, Glycine max
  Clone ID: 700679025H2
aacccagatatagagtacccagagaccatgcaacaacaacaacagcagaaaagtcatggtggacgcaagcaggggcaacaccagcaggaggaagaggaa

SEQ ID NO: 56696 - DNA, 97 bp, Glycine max
  Clone ID: 700679026H2
gtcttacgttgctcataacgtaaatcagccccaagagaaagatttgttggagggaaatttttcctttgatattaaatctcgttctagattggaaaaa

SEQ ID NO: 56697 - DNA, 95 bp, Glycine max
  Clone ID: 700679027H2
gttttagttactgatcctagggaactagagaaaattcgtcaaagagaggccgatatgactaaggaacgcattgaaaaactgctgaaggctggagc

SEQ ID NO: 56698 - DNA, 98 bp, Glycine max
  Clone ID: 700679028H2
caacaaggtaagggtatttttggcatgatatacccgggttgtcctagcacatttgaagagcctcaacaacctcaacaaagaggacaaagcagcagacc

SEQ ID NO: 56699 - DNA, 99 bp, Glycine max
  Clone ID: 700679029H2
gcctctacaatgagcaacgacaaggacacattcaacgtcgccgatctcacttctgctctcaacgaggacaatagagcagaccttgtcaatgctcttaag

SEQ ID NO: 56700 - DNA, 99 bp, Glycine max
  Clone ID: 700679030H2
agcgagcgagcgagcagtttcaaagagaggatttgggattgggaaggcgagggattgcgctgcgtctcttcctcttctctttcgattcatccctcattc

SEQ ID NO: 56701 - DNA, 101 bp, Glycine max
  Clone ID: 700679031H2
cggtggccttttccctctctttctctggaaaattcccccgattttctcgagaaagtgaaacggaattatgagctttcaggacatcgaggctgggcggccct

SEQ ID NO: 56702 - DNA, 98 bp, Glycine max
  Clone ID: 700679033H2
gcttccgctaccaaggcacaattcgatagtgggcaaaccttcgctaacgccctagaagacggtgatgccactaacccattgggctcttggagaggaaa

SEQ ID NO: 56703 - DNA, 97 bp, Glycine max
  Clone ID: 700679034H2
agcagaccacaagaccgtcaccaggagatctataacttcagagagggtgatttgatcgcagtgcctactggtgttgcatggtggatgtacgacaatg

SEQ ID NO: 56704 - DNA, 92 bp, Glycine max
  Clone ID: 700679035H2
gtcgcagcaaaaccaaaccacatattaacttgtttgctctaagtcatggctctgatcttgcacgcaaccaaagcaagcaagaatgctttcaa

SEQ ID NO: 56705 - DNA, 96 bp, Glycine max
  Clone ID: 700679036H2
caggaatgtgttcccaggacctattgtgttttaaatccacaaaatccttttgtgttaaataggtggatggggaaactgacttttccccagggcact

SEQ ID NO: 56706 - DNA, 97 bp, Glycine max
  Clone ID: 700679038H2
caattccttcacttgcagcactgttgcatcatcatcttcattgcaaaaccctaaacttcaccttcaaccatgaccacacaagtaccaccacacagtg

SEQ ID NO: 56707 - DNA, 97 bp, Glycine max
  Clone ID: 700679039H2
ctcgagccggtcttccatagccccccaaaaatgaagagcaccatcttctttgctctctttctcttttgtgccttcaccacctcatacctaccttcag

SEQ ID NO: 56708 - DNA, 97 bp, Glycine max
  Clone ID: 700679040H2
atgctaatcccactttggaagatatcccacattcagcttgggcccttgttcgctgggacagtgagaaaactttgccaaataatgtgtctgcagaatt

SEQ ID NO: 56709 - DNA, 96 bp, Glycine max
  Clone ID: 700679041H2
atctgaatgcaaacagtgtgatctatgtgactcgaggacaaggaaaggttagagttgtgaactgccaagggaatgcagtgttcgacggtgagctta

SEQ ID NO: 56710 - DNA, 94 bp, Glycine max
  Clone ID: 700679042H2
gcttttccaaacaagattgtttttgatgataagcttgtgttggctaacacacaagaattctttgatggaaattttccagtggattcttggttac

SEQ ID NO: 56711 - DNA, 96 bp, Glycine max
  Clone ID: 700679044H2
cggctcgagcggctcgagctctccattgtctttgaacactcatcaccatggccaagcttgttctttccctttgtttccttcttttcagtggctgct

SEQ ID NO: 56712 - DNA, 95 bp, Glycine max
  Clone ID: 700679046H2
ctctgaaccaacaaattaataaacttatcccagtccaaatacatgtggttgataaagtgttggtaactagagttggattgcactagccattagtg

SEQ ID NO: 56713 - DNA, 94 bp, Glycine max
  Clone ID: 700679047H2
gtaaaaacagatcaagcaaaactaggccaggtgacagaccatgtagacttgctggggaaaattagatggggaatggttagggctcgttcatcta

SEQ ID NO: 56714 - DNA, 92 bp, Glycine max
  Clone ID: 700679050H2
caagaaacggggttgaggaaaatatctgcaccttgaagcttcacgagaacatcgctcgcccttcacgcgctgacttctacaaccctaaagct

SEQ ID NO: 56715 - DNA, 92 bp, Glycine max
  Clone ID: 700679051H2
tttttggtttctcttttggttcctttcttatatgccatatttgcatctgatgcagcaattcctctgtaacggttattatttttgtgaagggg

SEQ ID NO: 56716 - DNA, 94 bp, Glycine max
  Clone ID: 700679052H2
cgttagtcagataatacccacatccgaaaccaaatgggtttgctctgagaaccgaaatgggtgacgaacaaccgtcgactaccgccgtctccgg

SEQ ID NO: 56717 - DNA, 77 bp, Glycine max
  Clone ID: 700679053H2
ctcgagccgctttagttcgttgaacaatgtgatgatgacggtgtatggtaagtcttatgagtcttacgagggtgagg

SEQ ID NO: 56718 - DNA, 95 bp, Glycine max
  Clone ID: 700679055H2
tgagaaacttcagtctccagacgacgaaaggaagcagatcgtgacagtggaaggaggtctcagcgttatcagccccaagtggcaagaacaacaag

SEQ ID NO: 56719 - DNA, 95 bp, Glycine max
  Clone ID: 700679056H2
gaagcagcagagggaggagcggcattaaaaatgcagatcttcgtgaaaaccctaacggggaagaccataaccctcgaggtcgaaagcagcgacac

SEQ ID NO: 56720 - DNA, 93 bp, Glycine max
  Clone ID: 700679057H2
cttaattattaacacttccttagttcaatatggggaagcccttcactctctctctttcttccctttgcttgctactcttgtcgagtgcatgct

SEQ ID NO: 56721 - DNA, 93 bp, Glycine max
  Clone ID: 700679058H2
ctcccctttcacttcacaccagtgctcattttcacttccccatactctcccttttaccattctacctgcgttaaacccccctagaatctcccg

SEQ ID NO: 56722 - DNA, 92 bp, Glycine max
  Clone ID: 700679059H2
ctctgtttctgtctctgtgtttgcggctgaggattccgaacgagcgaccttcttcgtttctcgcaaagtttaagtcatcatgggtaaggaaa

SEQ ID NO: 56723 - DNA, 94 bp, Glycine max
  Clone ID: 700679060H2
tcggcccagacccatcatccctggcccagtaactgccctgttagggatctttactggctccacgcctcaccgtgctttatccaaactcgcccgt

SEQ ID NO: 56724 - DNA, 93 bp, Glycine max
  Clone ID: 700679061H2
acctcaacctgttagcttcagacccatccttatacctgctgcggttgagcagtacctggatgcatcaggctagctgttcactgggggccgagg

SEQ ID NO: 56725 - DNA, 96 bp, Glycine max
  Clone ID: 700679063H2
gttttcctggcttcagtttctgtctcatttggcattgcttactgggaaaaagagaaccccaaacacaacaagtgtctccagagttgcaatagcgag

SEQ ID NO: 56726 - DNA, 97 bp, Glycine max
  Clone ID: 700679064H2
gaacacttttgtaccagggctgattgatcttgccatcgcgaggaacactttgattggtggagatgacttcaagagtggtcagaccaaaatgaaatct

SEQ ID NO: 56727 - DNA, 94 bp, Glycine max
  Clone ID: 700679065H2
gcgatagggatggcgaagttcaatgtggtgcagaagaaaagaagagctctaatagcagagaagaagagacagcttcacggagaccctttaaccg

SEQ ID NO: 56728 - DNA, 92 bp, Glycine max
  Clone ID: 700679067H2
gaaataccactacttttaacgttattttacttattccgtgaatcggaagcggggcactgcccctctttttggacccaaggtcggcttcggcc

SEQ ID NO: 56729 - DNA, 91 bp, Glycine max
  Clone ID: 700679068H2
attttcaccccctcttgccgttcatctctgttatttgagtcaaaggattatcgccatgtcagttgcaccagttgacagtattccctcatta

SEQ ID NO: 56730 - DNA, 92 bp, Glycine max
  Clone ID: 700679069H2
ttctctctctccattccgtgttttcagctccggtaacctctccttctccgccgccgttgctatctccgccgtgaccttccatccctcaacgc

SEQ ID NO: 56731 - DNA, 92 bp, Glycine max
  Clone ID: 700679070H2
gtgcagtgagagcagtagtagaagacgacgacacgagttacgcacagtcccggtgccgccaccaccaccattggtttcagtcagctaatggc

SEQ ID NO: 56732 - DNA, 92 bp, Glycine max
  Clone ID: 700679071H2
ccggaactcttgggatccaccaaatccacacatcggaattaacgtcaattctatcagatccatcaaaacgacgtcttgggatttggccaaca

SEQ ID NO: 56733 - DNA, 93 bp, Glycine max
  Clone ID: 700679072H2
cacaacacccggagagggaacctcagcaacccggtgagaaggaggaagacgaagatgagcaaccacgtcctatcccattcccacgcccacaac

SEQ ID NO: 56734 - DNA, 92 bp, Glycine max; identical to SEQ ID NO: 56704
  Clone ID: 700679076H2

SEQ ID NO: 56735 - DNA, 92 bp, Glycine max
  Clone ID: 700679077H2
ctcttcttctcttgcggctagagttttagcgcacttcttctagatttaaggaagatgggtaaggaaaaggttcacatcagtattgtggtcat

SEQ ID NO: 56736 - DNA, 93 bp, Glycine max
  Clone ID: 700679078H2
ttttcatcaactgctaagctaactgaactctctctcgttgttcccttggcctctcgctctataaatacacatcgcatcattctctcacttgca

SEQ ID NO: 56737 - DNA, 93 bp, Glycine max
  Clone ID: 700679079H2
gttggtgacacagaatctctcttttgttgttgctggggccactgtagttgctttactactcaactcatctttgaagttgacaaatttctcagc

SEQ ID NO: 56738 - DNA, 91 bp, Glycine max
  Clone ID: 700679081H2
agaaaagcagttataaaaaaaattgaaaaaattaaaaaggggcttgtaatttcagagacaaatattcattcaagcaaaacaacttatgata

SEQ ID NO: 56739 - DNA, 89 bp, Glycine max
  Clone ID: 700679083H2
aaatgaccaagttcacaatcctcctcatctctcttctcttctgcatcgcccacacttgcagcgcctccaaatggcagcaccagcaagat

SEQ ID NO: 56740 - DNA, 90 bp, Glycine max
  Clone ID: 700679084H2
tgccttggtcggcgccgtgggtgctctccggcggccatattcgtcgggaggtggcggcatctcctccgccgtgaactcaatgctcctccg

SEQ ID NO: 56741 - DNA, 75 bp, Glycine max
  Clone ID: 700679086H2
atatagccgcacttcgaggcagacaatgaatggaatacaatacaccatcaatacctagttccaaagaacgtttta

SEQ ID NO: 56742 - DNA, 90 bp, Glycine max
  Clone ID: 700679088H2
gtgactcgaggacaaggaaaggttagagttgtgaactgccaagggaatgcagtgttcgacggtgagcttaggaggggacaattgctggtg

SEQ ID NO: 56743 - DNA, 89 bp, Glycine max
  Clone ID: 700679090H2
accaaactttctttagctatctttttctttttgcttttagccttattttcaaacctagcctttggcaaatgtaaagaaaccgaggtaga

SEQ ID NO: 56744 - DNA, 91 bp, Glycine max
  Clone ID: 700679093H2
cggggacaacgagcttctgcgcacggagaagaagttcaaggttttcatggagaattacgggaggagctactccacagaggaggagtatttg

SEQ ID NO: 56745 - DNA, 92 bp, Glycine max
  Clone ID: 700679094H2
agtcccatagcagcgatgggaatcgatcttaaggctgggggtaagagcaaaaagaccaaaagaacagcaccaaaatccaatgacatctacct

SEQ ID NO: 56746 - DNA, 90 bp, Glycine max
  Clone ID: 700679095H2
ctcgagccgctgtggcagaggtcacaggaagcaacgttgtgtcggttgcggaggacgaactcatgagaatcctcattctaatgaggaatt

SEQ ID NO: 56747 - DNA, 92 bp, Glycine max
  Clone ID: 700679096H2
gtctttgaacactcatcaccatggccaagcttgttctttccctttggatccgtcgtttcagtggctgcttcgctctgagagagcaggcacag

SEQ ID NO: 56748 - DNA, 280 bp, Glycine max
  Clone ID: 700679101H1
cagaattataaacatggcctcaaaagacccagtccgagtgaaatacttgtccaccttagtgagtcaaaagacagtctccacggccccaatcgcttcgggccaggccttcaacatcggcaactatgtggtgagggtcaaattgggaacacccggtcaacttttgttcatggtcctcgacaccagcactgacgaggccttcgtaccctgctcgggctgcactggctgctccgacaccactttctcgcccaaagcctcaaccagttacggcccattagactgc

SEQ ID NO: 56749 - DNA, 272 bp, Glycine max
  Clone ID: 700679102H1
caacaacagaggcagcaacaggaagagcaacctttggaagtgcggaaatatagagctgaattgtctgaacaagatatatttgtaatcccagcaggttatccagttgtggtcaacgctacctcagatctgaatttctttgcttttggtatcaatgccgagaacaaccagaggaacttccttgcaggttcgaaagacaatgtgataagccagatacctagtcaagtgcaggagcttgccttccctgggtctgcaaaagatattgagaccctaat

SEQ ID NO: 56750 - DNA, 274 bp, Glycine max
  Clone ID: 700679103H1
ctttgaacactcatcaccatggccaagcttgttctttcccattgtttccttcttttcagtggctgcttcgctctgagagagcaggcacagcaaaatgagtgccagatccaaaagctgaatgccctcaaaccggataaccgtatagagtcggaaggtgggttcattgagacctggaaccctaacaacaagccattccagtgtgccggtgttgccctctctcgctgcacccttaaccgcaatgcccttcgtagaccttcctacaccaacggtcccc

SEQ ID NO: 56751 - DNA, 261 bp, Glycine max
  Clone ID: 700679105H1
atcggagagaagctttttcagattcaaggtctaatagtggtcactctagaaagcaaaagaagcacgatactgggttttcccatgaacttggtttatcgtctccttcacctggggggaaacaggtgagtcagaggggttctattctgggaaaagcaggcgagagagcagtggaagttctggacacaattggaagtggcatgcctaagttaaacactaatagcgggtttgtctctggcacaacttctagagggaataagatat

SEQ ID NO: 56752 - DNA, 273 bp, Glycine max
  Clone ID: 700679106H1
agaaagtcttccatagccccccaaaaatgaagagcaccatcttctttgctctctttctcttttgtgccttcaccacctcatacctaccttcagccatcgctgatttcgtgctcgataatgaaggtaaccctcttgaaaatggtggcacatattatatcttgtcagacataacagcatttggtggaataagagcagccccaacgggaaatgaaagatgccctctcactgtggtgcaatctcgcaatgagctcgacaaagggattggaacaatca

SEQ ID NO: 56753 - DNA, 263 bp, Glycine max
  Clone ID: 700679107H1
ccaacatctgaaaggggtagagtaggtatttcacatctattatccatattgtgatgaagaaggaacaagaagagggtctcaagattgaggttgctacactcacagttacagtagttgttgtgatgctgtcattgctatgcacatgtggggcaagcaacctcgaccctttgattctaataccaggtaacggagggaaccaactagaagcaaggttgaccaatcagtacaagccctctactttcatctgcgaatcatggtaccct

SEQ ID NO: 56754 - DNA, 266 bp, Glycine max
  Clone ID: 700679109H1
ctttgacttcttccctgtggaggttgatagtcaagagggaattgctcacattggtgaattgaaatctggtgtctatgttccactgcctacaaaaactaatttgatggaaactcccaaggaatggcaactggatctaccttgtgacaaaattcctagtgtcttgactacaactgatgagagattggtaggcacagaacatgagggatatgatccttttcttggtggaattcaaaaatatgccactcccatgatgcccctagatgaag

SEQ ID NO: 56755 - DNA, 269 bp, Glycine max
  Clone ID: 700679110H1
gcttggtcaactcaggtgcgtcctgcaacaactctgttggctgatgggtgtccatatttgtatgctatggtgcatgatagttcagtgtctacaataccaggtgattttgtcattggtgttaagttgacaaccataaacaatatgtgtgcatatgggcttaatcctggtatttcaggttctcgtcttttgggcaccattcctcagtccatttcacagcaaactgtttggaatcaaatggcaacagtgagaacaccattgaattttgattc

SEQ ID NO: 56756 - DNA, 265 bp, Glycine max
  Clone ID: 700679111H1
tgttgttcctggcggtgatcttgccaaggttcagagggctgtgtgcatgatctccaattccaccagtgttgttgaggtcttctctcgcatcgaccacaaatttgacctcatgtatgccaagagggcttttgttcattggtatgttggtgagggtatggaagagggagagttctctgaggctcgtgaagatcttgctgccctggagaaagattatgaggaagtcggtgcagaggcaactgaagaagatggtgatgaaggagaagat

SEQ ID NO: 56757 - DNA, 267 bp, Glycine max
  Clone ID: 700679112H1
ctaagtgcaccgatataagccctcataataacaacaattgttgtttggtttgtcattgctctaattctactcgttcaccaacttctaccttgtttggcatgtctcatttttctcctccattatcaccaccttctccttcttcgccttctatgtttgagaccaacaaccatcatcatggtgttgtgaaatataataaggatgttttctctgagcttgtgtgttccatggagggtttgaattttgatgaggcttcttcactgttgtctg

SEQ ID NO: 56758 - DNA, 261 bp, Glycine max
  Clone ID: 700679113H1
tgaaattttgataaaccgcgatcacaggttgccgcaccttaaaaccggaaacaaaagcaatcgttacttgatttcaagaatctctcaatttcttcctacttctttgtgtacgatttcttaagggaaagaaaatcactctctgtgctggccacagacttcgtgaattattttcttctccattcttagtttatttgctgaacactctcctatttgatataggacttcgtgtcagataaaacttcttctgtctctaactcagtt

SEQ ID NO: 56759 - DNA, 269 bp, Glycine max
  Clone ID: 700679114H1
gattcaaagagatcaaagacaattaccagatcagctaaccgattcctggaccaacgatgaagtgcttgcacttttcagaatcagatctagcatggaaaattggctcccagagctcacatgggaccatgtctcaaggaggctagcagaggttgggtttaagaagagtgctgagaagtgcaaggagaagtttgaagatgagagtagatatttcgacaacatcaataactaacggcaagaacaatttccggttccttattagcgagctggag

SEQ ID NO: 56760 - DNA, 271 bp, Glycine max
  Clone ID: 700679115H1
cataaagatcacacagggtatcaaacttccattcctccctttcaacggcaacaaaaaaatgcgtaacaataatttcactgtctcatcaatgcatggtgacatgcctcagaaagaaagagatgctattatgggagaatttcgtgctggaacaacccgtgtactaataacaactgatgtttgggcccgtggtcttgatgtacagcaggtttctctagttatcaattatgaccttccaaataatcgtgagctttacattcatcgaattggccgt

SEQ ID NO: 56761 - DNA, 254 bp, Glycine max
  Clone ID: 700679116H1
tcatggtgcagcacgagctgtagggggatgtccaatttatgtcagtgacaagcccggacaccatgactttgatcttttgaagaagcttgcactacctgatggttctatattaagggctaaacttccaggacgaccaacaaaggattgcttatttactgatcctgccagagatggaaagagtcttctgaagatttggaacatgaatgattttcctggagttgttgcggtattcaattgccaaggagctgggtggt

SEQ ID NO: 56762 - DNA, 279 bp, Glycine max
  Clone ID: 700679117H1
tgatactggtaattaatgaaggagatgcaaacattgaacttgttggcctaaaagaacaacaacaggagcagcaacaggaagagcaacctttggaagtgcggaaatatagagccgaattgtctgaacaagatatatttgtaatcccagcaggttatccagttgtggtcaacgctacctcaaatctgaatttctttgctattggtattaatgccgagaacaaccagaggaacttcctcgcaggttcgcaagacaatgtgataagccagatacctagtcaag

SEQ ID NO: 56763 - DNA, 273 bp, Glycine max
  Clone ID: 700679118H1
tgctcctcttacataactggacaagtccttcaccccaatggtggaaccgttgtgaatggttaaaccgttggtgatgatgatattcgggatgaatatatgtggcgagagtagtaggccagtgttacgttttgtgtgaatgttttacgatgtgttttaatgcatggctaactcactcaggtcctctctgcactgttagaggtggggcttggaggattatccacttttgaatgtacgagttattagcctaagaaaatgtgtcttttgtagccaatt

SEQ ID NO: 56764 - DNA, 272 bp, Glycine max
  Clone ID: 700679119H1
ttcgaagatcattgaagtggacaacaatgtaagggaggatcgtgctctcttaaatggtgcacagaagctacttggcattttgatagctgttggtgaggcagttgcatatgttctttctggaatgtatggtagtgtgggtcaacttggagtgggaaatgccatcctcatcatcctccagctatgttttgcgggtattattgtgatatgtttggatgagctccttcaaaaaggctatggcttgggatctggaatttctctgttcattgccacta

SEQ ID NO: 56765 - DNA, 272 bp, Glycine max
  Clone ID: 700679120H1
ctttctcttgttctttttacctcaggtattttagtctttcatggattataagatcactgagaagtgtatgcatgtaatactaagcaccatagctgttctgcttgaatttatttgtgtgtaaattgtaatgtttcagcgttggctttccctgtagctgctacaatggtactgtatatctattttttgcattgttttcattttttcttttacttaatcttcattgctttgaaattaataaaacaatataatatagtttgaactttgaactattg

SEQ ID NO: 56766 - DNA, 270 bp, Glycine max
  Clone ID: 700679123H1
tattgggcctcattggtacaagtgtttttaacaaacagcaacagtacagagcattttgatgcatgtaagtggacaaaatcggaaccacattcctgggaattgatcttcccaatagaggtatgtggtcctaataatggttttgaaatgtggagttctgagtgggcaaatcaaacttcatggcatttgagtttccttattgacaatcccaaacagtctacagtttttgatattctcttgggaatttctcaagattttgaaattgctggtaat

SEQ ID NO: 56767 - DNA, 249 bp, Glycine max
  Clone ID: 700679124H1
gggtagcattcttgcgcactcagttattctctctctctctctatagcgtcgtcgtatagttagggcacaaaaccccttatcggatcggtggagcgaacctcgccggcgagacccccgatgctgttcaatcggcgatcgagcaacggcgaaaagcgacgacgatgaaggttttcgtgaagactctcaagggcacgcacttcgaaattgaagtaaccccttaggacacttttctcgagtgagcaaaatata

SEQ ID NO: 56768 - DNA, 269 bp, Glycine max
  Clone ID: 700679125H1
tgtgtccatatttgtatgctatggtgcatgatagttcagtgtctacaataccaggtgattttgtcattggtgttaagttgacaaccataaacaatatgtgtgcatatgggcttaatcctggtatttcaggttctcgtcttttgggcaccattcctcagtccatttcacagcaaactgtttggaatcaaatggcaacagtgagaacaccattgaattttgattctagcaagcagagcttttgtcaattttctatcgaccttctcggtgga

SEQ ID NO: 56769 - DNA, 267 bp, Glycine max
  Clone ID: 700679127H1
catcttgtgacttattggctgatgaccctggcacctaccgttggatggcacctgagatgatcaaaaggaaatcctacgggaaaaaggttgatgtctacagttttgggcttatcttatgggagatgttgactggaacaataccatatgaggatatgaatccaatacaggctgcttttgcagtagtaaataagaattcaagaccgattattccatcaaactgccctcctgcaatgcgagctctaattgagcaatgttggagcttgcaac

SEQ ID NO: 56770 - DNA, 268 bp, Glycine max
  Clone ID: 700679130H1
tgtttgaggttcatctgagttagcatatccattgtcataaactatctgcatgcatttgggtgtgtcgaggtgggtcttgggattgcatgtgtcaatttgtctccatggtcagacaacagaaggtatcagtctgaaggtcttctagttgtcactaactcttgcatcatcaccaatgcatcactgacttttgcatgagcaccactaagtccaggtctgtcaagaggaagaaggtagcaatgaatttgcaaatgggggtgtaggtcttcat

SEQ ID NO: 56771 - DNA, 271 bp, Glycine max
  Clone ID: 700679131H1
gttcacaatcctcctcatctctcttctcttctgcatcgcccacacttgcagcgcctccaaatggcagcaccagcaagatagctgctcgcaagcagctccagggggtgaacctcacgccctgcgagaagcacatcatggagaagatccaaggccgcggcgatgacgatgatgatgatgacgacgacaatcacattctcaggaccatgcggggaagaatcaactacataaggaggaacgaaggaaaagacgaagacgaagaagaagaaggaca

SEQ ID NO: 56772 - DNA, 236 bp, Glycine max
  Clone ID: 700679132H1
ggtttttcgcctcttcggaagggagagacccgttcactccgttttcggcgccggaaaacctgctgatgtgctattgtggaggaacaagaaaatatctgctggcgtgcttggcggagcactgctgtttgggtccttttgagttgcttgagtatcaccttcttactctggtgtgtcacattctgatactgttgctcgcagttctgttcttgtggtctaatgcccatacttttatccac

SEQ ID NO: 56773 - DNA, 275 bp, Glycine max
  Clone ID: 700679133H1
gaaaggaaaggttaactaagaagcaatacttcaatggccacccttgttgttcataaccaaacttcttctgctcaagatgctgaggctctccaacaggctttcaaaggatggggggctgatgacaaggccattatagcaatactgggtcacagaaatgttcatcagaggcaagaaatcagaaaagcttatgaggagatttaccaagaggatctcatcaaacgccttgagtccgagatctctggtgactttgagagagctatgtaccggtggatgtt

SEQ ID NO: 56774 - DNA, 273 bp, Glycine max
  Clone ID: 700679135H1
gtggtagcaaagtatggtgacaagagtgtgtactttgatttggaggatctaggcaacactactggtcagtgggacttgtacggctccgatgcaccttcaccctacaaccctcttcagagcaagttcttcgagacatttgcctctccattcacaaaaaggggattgttactcaagtttttgatcctgggaggtggttccaccctggcatacttcagttccacagcttcaggtgacattctaccaatcaagaagggcccacaacttccaccaaag

SEQ ID NO: 56775 - DNA, 273 bp, Glycine max
  Clone ID: 700679136H1
aggtcatctaagccagaaaggaaagcatcagcaagaagaagaaaacgaaggaggcagcatattgagtggcttcaccctggaattcttggaacatgcattcagcgtggacaagcagatagcgaaaaacctacaaggagagaacgaaggggaagacaagggagccattgtgacagtgaaaggaggtctgagcgtgataaaaccacccacggacgagcagcaacaaagaccccaggaagaggaagaagaagaagaggatgagaagccacagtgcaa

SEQ ID NO: 56776 - DNA, 215 bp, Glycine max
  Clone ID: 700679138H1
aaggaaactaaaccaacccttttgagcttgcacaactctgatggtagttgcacaactacttcagactctctctctctgagtgcctcaccacacagattctgtgatataccaatggaggccctcaatgctgctggcttgacccctctatctgtgctctctgatagaacaaaaacaagaactaaacacccttctgtttctgcatgcaaagtctcaaa

SEQ ID NO: 56777 - DNA, 264 bp, Glycine max
  Clone ID: 700679139H1
gattcagcaggaacattttagaggcctcctacgataccaaattcgaggagataaacaaggttctgtttagtagagaggaagggcagcagcaaggggagcagaggctgcaagagagcgtgattgtggaaatctcgaaggaacagattcgggcactgagcaaacgtgccaaatctagttcaaggaaaaccatttcttctgaagataaaccttttaacttgagaagccgcgaccccatctactccaacaagcttggcaagttctttg

SEQ ID NO: 56778 - DNA, 269 bp, Glycine max
  Clone ID: 700679141H1
ggaatttcgatgctcagtcatctcttttaccattctcttctctcttgctcttgcaggagagagccatgtccatgcatcgctacctgaggaagattattgggaagctgtttggccaaacactcccattcccactgcactgcgagagcttctaacgcctctccctgcaggtgttgaaatcgatgaactccctaagcaaattgatgatacacagtacccaaaaacattcttctataaagaagaccttcatccaggcaaaacaatgaaagtac

SEQ ID NO: 56779 - DNA, 167 bp, Glycine max
  Clone ID: 700679142H1
ctcgagctgccatgtggaataatttatctgattccaactggcactctttatgcttggacccctacatcaacttatattcatgagccaccttattttagagatatgagcatgtctcccccaggctctcatggagtgaaagatgcttactgtttgctcaactttggaga

SEQ ID NO: 56780 - DNA, 265 bp, Glycine max
  Clone ID: 700679143H1
ctctcatcagattcgggtcgggttagcgttatcggataacttcgcccataaattctctgtttacggggcgaaaatgacagtattcttagccacgaggctcgtgttgcggagatccccgccgcttctctggcggcgcacttttctcgggcggcggtagaggccgaaaaggacactgttgccgtgccgtcgcttccgttgttcgattactctccgcctccgtatgcggggcccaccgctgacgagattctggcaaagcgcagggagt

SEQ ID NO: 56781 - DNA, 266 bp, Glycine max
  Clone ID: 700679144H1
cagcagaactctgcttcttcggattccgatcgcacgcgccgtcaccatggtgaacgttccgaaaacaaagaagacatactgcaagagtaaggagtgcaggaagcacacgctgcacaaggttacccaatacaagaagggtaaggatagcattgctgcccaaggaaaacgccgttatgatcgcaaacaatccggttatggtggacaaactaagcccgtcttccacaagaaggctaaaaccaccaagaagattgttctgaggttgcaat

SEQ ID NO: 56782 - DNA, 267 bp, Glycine max
  Clone ID: 700679145H1
acttattaacactttccttagttcaatatggggaagcccttcttcactctctctctttcttccctttgcttgctactcttgtcgagtgcatgctttgctattacctccagcaagttcaacgagtgccaactcaacaacctcaacgcgttggaacccgaccaccgcgttgagtccgaaggtggtcttattgaaacatggaactctcaacaccctgagctgcaatgcgccggtgtcactgtttccaaacgcaccctcaaccgcaacggc

SEQ ID NO: 56783 - DNA, 268 bp, Glycine max
  Clone ID: 700679147H1
cggctcgagcattggtccttaaacactcatcagtcatcaccatggccaagctagttttttccctttgtttcctgcttttcagtgcctgctgcttcgctttcagttccagagagcagcctcagcaaaacgagtgccagatccaaaaactcaatgccctcaaaccggataaccgtatagagtcagaaggagggctcattgagacatggaaccctaacaacaagccattccagtgtgccggtgttgccctctctcgctgcaccctcaaccg

SEQ ID NO: 56784 - DNA, 202 bp, Glycine max
  Clone ID: 700679148H1
gaacactctcttgaacattcatggatccagtgagcgtgtggggtaacacgcccttggcgacggtggatcccgagatccatgacctcatcgagaaggagaagcaccgccaatgccgcggcatcgagctcatcgcctccgagaacttcacctccttcgcagtcatcgaggccctcggcagcgctctcaccaacaaatactccga

SEQ ID NO: 56785 - DNA, 270 bp, Glycine max
  Clone ID: 700679151H1
gtacactggaatttttccatgtatccccccaacaatcataatgctacaatttgtcaacttgacttcttgtttactttatttagcccctattttcttgaggtgtttattgtaaactgagaagtagacaatcttaaaattgatccttattgtgatagattagagtctaccaaaggatcctacgcaaaagaatggataaaatgggaaaaacagttacgggatattctttgtggaaatgctgagtattttaattctattcaggttccatttgag

SEQ ID NO: 56786 - DNA, 269 bp, Glycine max
  Clone ID: 700679152H1
ttgccgaaatatatcagtttcttcaagtgagtgtcagcaagagcttcccacccttgctgaccttttctgtcatcagaacacggaagtggattttggcatggaatggttatcagtgtttgtggaagactgtttctctagtaggccaagttgcctcttgccaccctctggtggtggtgttcaaaccacaagcactagcaccaagccttcttcaggcacaataatgccaagaccccaacaaagtcatcactgtcctttgcagaattttgctg

SEQ ID NO: 56787 - DNA, 265 bp, Glycine max
  Clone ID: 700679153H1
gttccaactcttcaagcgctatgattggaaggttctacggaaactcctattctcatcagcaacttcaacctataaatggaagccctttgggttcgtggcgaatccccaccgccgccacaactgctcatgcgcaaagtaaccctattttcaaccgtgaatgctcgttgcatcctttgcctttgttttcaggtgaggaaatggtgaacgcgaggatggggttctccggttcgcagaccggtttggtaattatgaccccaagtccagc

SEQ ID NO: 56788 - DNA, 269 bp, Glycine max
  Clone ID: 700679154H1
gcttggtcaactcaggtgcgtcctgctcacaactctgttggctgatgggtgtccatatttgtatgctatggtgcatgatagttcagtgtctacaataccaggtgattttgtcattggtgttaagttgacaaccataaacaatatgtgtgcatatgggcttaatcctggtatttcaggttctcgtcttttgggcaccattcctcagtccatttcacagcaaactgtttggaatcaaatggcaacagtgagaacaccattgaattttgatt

SEQ ID NO: 56789 - DNA, 257 bp, Glycine max
  Clone ID: 700679155H1
atttttgatcagaatgagcgtccagacgtatagattcatttaaaagagtatgcttatttatttattactacaaactatactttattagttatctagtttttattgaacgagatgtgtcacttgcactcatggctttgtggtttgagatctcaaaccatcaaagtatgggttcgattgttgcatcaacaaaaaacaagctgtgattgatgatttaaaaggttccaaagtgtaagggtaggcaacctgataaaggatga

SEQ ID NO: 56790 - DNA, 268 bp, Glycine max
  Clone ID: 700679156H1
aaatccttcacttgttgctcgtcttagttgctgtgctgtgtcatttctattgctatatcctaattaaacttcaccctcaaaatgagtgatcccacactagcacaaccacacctagtcgaagtccacacaacactcgaaaccgttgttaccacacacaatcataagcatagaccctcaataaatgcctcaggtgaaaagaagataattgtgggggcgttctttatagggattgagtatgctatgtcgagccccattttcgtggggtgtg

SEQ ID NO: 56791 - DNA, 264 bp, Glycine max
  Clone ID: 700679157H1
ggcagaggcgcggagaagatgtggttcaccctctcaaggtctctctggaggacctttatctcgggacttctaagaagctctccctctccagaaatgtcatatgctccaagtgcactggtaagggttctaagtctggtgcttcgatgaagtgtgctggttgtcaaggaactggtatgaaggtttctataagacatcttggcccgtccatgattcagcagatgcagcatgcttgcaatgaatgcaagggtactggagaaaccatca

SEQ ID NO: 56792 - DNA, 264 bp, Glycine max
  Clone ID: 700679159H1
tgttgttgctgcaccaccgaacaacttcccctgtaaatcgcgtttcgtttgtgcaaggttttaaaagatggctgatgctgaggacattcaacctcttgttgttgataatggaactggaatggtcaaggctggttttgcaggtgatgatgctcctagggccgtgttccccagcattattgggagaccacgccatactggtgtaatggttgggatgggtcagaaggatgcttacgtgggtgatgaagcccaatcaaaaaggggtat

SEQ ID NO: 56793 - DNA, 265 bp, Glycine max
  Clone ID: 700679160H1
taaactatcaatcattgaggaagctaggaaaaggattgccgcccaacaagcaactgctgcttaaatctttaggaaatgaatagactttgagtgtttggtagtttttatttaatggttttggtttctaatttattttgtcttgaaattttatccactgaatttcgtctcttaaatgctctatagaactttttattgcggcttctatgttcatgaaggaatctttccatttcctagtaaaaaaaaaaaaaaaaaaggggcggccgcc

SEQ ID NO: 56794 - DNA, 266 bp, Glycine max
  Clone ID: 700679161H1
ccggcggcggacaactccgaccacctccaggaggtagggtggaagctcgcgcagtaggcggaggagatcaacgtgcagttcgagtaccgtggcttcgtcgcgaacagcctcgccgatctcgacgcctccatgctcgatctccgggaaggcgaagcgtcgctgtgaactctgtcttcgagtttcacaagctcctcgcccgccccggcgcggtggagaaagtactctccgtcgtacggcagattcggccggagattgtcaccgtcgtc

SEQ ID NO: 56795 - DNA, 266 bp, Glycine max
  Clone ID: 700679163H1
cggctcgagagtttcatagacccagaatggcttgatggctcgctaccaggtgactatggttttgacccactaggactaggaaaggacccggcattcctgaaatggtatagagaagctgaactcattcatgggaggtgggcaatggctgcagttgtaggcatcttcattgggcaggcatggagtggagttccatggtttgaggctggagcagatcctaatgcaattgctcctttctcatttggctctctcttaggtacccagttgct

SEQ ID NO: 56796 - DNA, 275 bp, Glycine max
  Clone ID: 700679165H1
gttcaatatcctagtacaccgtattaaagaatttaagatatactatgatgagagcgcggttccgattactgttgctgggagttgtttagctggcatcagtttctgtctcatttggcattgcgtattgggaaaagcagaaccccagtcacaacaagtgcctccgaagttgcaatagcgagaaagactcctacaggaaccaagcatgccacgctcgttgcaacctccttcaaggtggaggaagtagaagaatgcgaagatggtcaaattccacgacc

SEQ ID NO: 56797 - DNA, 100 bp, Glycine max
  Clone ID: 700679166H1
ctcgagcgattcggctcagaaaatgcagttcgtagtatttgtgttgcgcctttcagaggcggaaggcccattcgggtggttacatttccgaataacatcg

SEQ ID NO: 56798 - DNA, 129 bp, Glycine max
  Clone ID: 700679169H1
accgtatagagtcagaaggagggctcattgagacatggaaccctaacaacaagccattccagtgtgccggtgttgccctctctcgctgcaccctcaaccgcaacgcccttcgtagaccttcctacacca

SEQ ID NO: 56799 - DNA, 270 bp, Glycine max
  Clone ID: 700679170H1
cactcctgttgttgccgtttctattattgacaccaacagcttggagaaccagctcgaccagatgcctaggagattctatcttgctgggaaccaagagcaagagtttctaaaatatcagcagcagcagcaaggaggttcccaaagccagaaaggaaagcaacaagaagaagaaaacgaaggaagcaacatattgagtggcttcgcccctgaattcttgaaagaagcgttcggcgtgaacatgcagatagtgagaaacctacaaggtgagaa

SEQ ID NO: 56800 - DNA, 267 bp, Glycine max
  Clone ID: 700679173H1
ataacactcgccatacccgttaacaagcctggtagatttgagagtttcttcctatctagcactgaagctcaacaatcctacttgcaaggattcagcaggaacattttagaggcctcctacgataccaaattcgaggagataaacaaggttctgtttagtagagaggaagggcagcagcaaggggagcagaggctgcaagagagcgtgattgtggaaatctcgaaggaacagattcgggcactgagcaaacgtgccatatctagttca

SEQ ID NO: 56801 - DNA, 266 bp, Glycine max
  Clone ID: 700679174H1
gaagaatgtgaagaaggtgaaattccacgaccacgaccacgtccacaacacccggagagggaacctcagcaacccggtgagaaggaggaagacgaagatgagcaaccacgtccaatcccattcccacgcccacaacctcgtcaagaagaagagcacgagcagagagaggaacaggaatggcctcgcaaggaggaaaaacgcggagaaaagggaagtgaagaggaagatgaggatgaggatgaggaacaagatgaacgtcaattccc

SEQ ID NO: 56802 - DNA, 264 bp, Glycine max
  Clone ID: 700679175H1
ggcacatattatatcttgtcagacataacagcatttggtggaataagagcagccccaacgggaaatgaaagatgccctctcactgtggtgcaatctcgcaatgagctcgacaaagggattggaacaatcatctcgtccccatatcgaatccgttttatcgccgaaggcatcctttgagccttaagttcgattcatttgcagttataatgctgtgtgttggaattcctaccgagtggtctgttgtggaggatctaccagaaggac

SEQ ID NO: 56803 - DNA, 265 bp, Glycine max
  Clone ID: 700679177H1
tgctcctcttacataactggacaagtccttcaccccaatggtggaaccgttgtgaatggttaaaccgttggtgatgatgatattcgggatgaatatatgtggcgagagtagtaggccagtgttacgttttgtgtgaatgttttacgatgtgttttaatgcatggctaactcactcaggtcctctctgcactgttagaggtggggcttggaggattatccacttttgaatgtacgagttattagcctaagaaaatgtgtcttttgt

SEQ ID NO: 56804 - DNA, 264 bp, Glycine max
  Clone ID: 700679178H1
atcctgcttgcacaaaagcaatgactatgtcatttaatccaaacccgtgttctgatgcatggagtttggaatttctgaagcgtaccggatttcattgtgatatcatttgtgtcactggatggactgccaccccaatgcaggatgttcaggttacaattgcttggtttatttcctctcaggaatgtgttcccaggacctattgtgttttaaatccacaaaatccttttgtgttaaataggtggatggggaaattgactttccccc

SEQ ID NO: 56805 - DNA, 62 bp, Glycine max
  Clone ID: 700679179H1
atgcttttgaagctcgaatctatgctgaaaatgttcaaaaagggtttcttccagccactgga

SEQ ID NO: 56806 - DNA, 181 bp, Glycine max
  Clone ID: 700679180H1
ggttgacatccctactgtagcaccataagaagaacatgatgatgacgagaatggcaacaatgcgcagactgatagtcaatccagcattcctattagttgtgagtgttctcacagctaatggagtgtctctagagttcggcgtgactgcttctcccgatgagatttccattgatagcttgtc

SEQ ID NO: 56807 - DNA, 268 bp, Glycine max
  Clone ID: 700679181H1
ctcgagccgttgcaagctcccaaggatgtgtcgcagcaaatcaaaatggccaacaagactatgaagaaggaacaatattcttgtgaccatccacctgcatcatgggattggaggaaaaaaggtgtcatcacccaagtaaagtaccaagggggctgtggaagcggttgggcgttttctgccacgggagccatagaagcagcacatgcaatagcaacaggagaccttgttagcctttctgaacaagaactcgtagactgtgtggaagaaa

SEQ ID NO: 56808 - DNA, 272 bp, Glycine max
  Clone ID: 700679182H1
tgcggctctaggaacaatggcgtgtagggttttctcgtgcttcttcttcgtgtttgctctttctctccttcttccttttcagatctccgctgaggaatcatcggagaaagagttcgtactcacattggatcactctagacttcacgacactgtcagcatgcacgatttcatcgtcgtcgagttctacgctccatggtgtggccactgtaagaagcttgctcccgagtatgagaaagctgcttctatcttgagtagtcatgatcctccggttg

SEQ ID NO: 56809 - DNA, 270 bp, Glycine max
  Clone ID: 700679183H1
ggcactatcaatcgttcgaatgggctttactgcattttttggattgccactgatgatgattatccttacagagctaaagagggtagatgcaaagccaataagatacaagacaaggttacaattgacggatatgaaactctaataatgtcagatgagagtacagaatcagagacagagcaagcgttcttaagcgccatccttgagcaaccaattagtgtctccattgatgcaaaagattttcatttatacaccgggggaatttatgatgga

SEQ ID NO: 56810 - DNA, 223 bp, Glycine max
  Clone ID: 700679184H1
ctctccattgtctttgaacactcattaccatggccaagcttgttctttcccttaggcaccttcttatcagtggctgcttcgctctgatagagcaggcacagcaaaatgagtgccagatccaaaagctgaatgccctccaaaccggataaccgtatatagtcggaaggtgggttcattgagccctggaaccctaacaacaagctattccagtgtgccggtgttg

SEQ ID NO: 56811 - DNA, 248 bp, Glycine max
  Clone ID: 700679187H1
ttcccacgcccacaacctcgccaagaagaagagctcgagcagagagaggaacaggaatggcctcgcaaggaggaaaaacgcggagaaaagggaagtgaagaggaagatgaggatgaggatgaggaacaagatgaacgtcaattcccattcccacgcccacctcatcagaaggaagagcgaaagcaagaggaagatgaggatgaggagcagcagcgagagagcgaagagagtgaagattctgagttacg

SEQ ID NO: 56812 - DNA, 265 bp, Glycine max
  Clone ID: 700679188H1
gaaaccactcccgcctcgtcgtcaccacgccgcaaggggattacattgagcgtcacagaagagactatggctaccgtctcgatcacttcgagcggaagcgcaagaaagaggcgcgtcaagttcacaaacgctctgcaattgcccagaaggctctgggtattaagggcaaaatgattgccaagaaaaattatgctgaaaaggcacagatgaagaagactttggctatgcatgaagaatcaacttctaggcgcaagactgatgataa

SEQ ID NO: 56813 - DNA, 133 bp, Glycine max
  Clone ID: 700679190H1
caaatccttcacttgttgctcgtcttaagtttctgtgttgtgtcatttttattgctatatcctaattaaacttcaccctcaaaatgagtgatcccacactagcacaaccacacctagtcgaagtccacacaac

SEQ ID NO: 56814 - DNA, 75 bp, Glycine max
  Clone ID: 700679191H1
cgcagttcgtagtatttttgttgcgcctttcagaggcggaaggcccattcgggtggttacatttccacacaacat

SEQ ID NO: 56815 - DNA, 222 bp, Glycine max
  Clone ID: 700679192H1
ggatatgaacgagggagctcttcttctaccacacttcaattcaaaggcgatagtgatactggtaattaatgaaggagatgcaaacattgaacttgttggcctaaaagaacaacaacaggagcagcaacaggaagagcaacctttggaagtgcggaaatatagagccgaattgtctgaacaagatatatttgtaatcccagcaggttatccagttgtggtcaa

SEQ ID NO: 56816 - DNA, 256 bp, Glycine max
  Clone ID: 700679193H1
ttttgatgagtaagagtgaccagtaaaagaagcggcttggagcattttggttttaccatttctttctccaatttgtttgatctaggaatgataaagttaattggcttacatatggagttatgtacatttaaatatttattttttctctttccaattttattttatgtacacaaatggacaactaaatggacctatttttgtaaatcacatgtcaaactcgaaccttttacgagcaggtaataacataatatctgga

SEQ ID NO: 56817 - DNA, 221 bp, Glycine max
  Clone ID: 700679195H1
gaaaatcgtgtggggtcatctgtgatggaagttgttgaaatgataggaccattgtatgagctggtttgatccgcttattttccctgcatcctgggttgtgagtttacaatataggttttaagctttgcatgctgcaacttttcatgtcttatgttctgtttgtctctggcatgattccttggctgtccatattgtatttttttctcccttcagtgtgtgtg

SEQ ID NO: 56818 - DNA, 267 bp, Glycine max
  Clone ID: 700679201H1
gggacttgaaatttaattactgtatccctctctacctgtttatgtaattttgtggagtatgtaccctttattttatttttatttatttgatatcatgttcgacccccactttgatggtttgagaagatatctacaaaccacaatgtcatgagaggaattgacatgttatttattatattatatactgtcaacattatatattatatattgcaactatttgatagttacccttaatagagagattaaacagactcactatacagctcc

SEQ ID NO: 56819 - DNA, 272 bp, Glycine max
  Clone ID: 700679202H1
ctcgagccgtaaaattcttccaccaagttatgggtttccttgtgttgcttcttttctccctcttaggtctctcttctagttccagcatatcaactcatcgttccatattggaccttgacctaaccaagtttaccacacagaaacaggtgtcttcactgttccaactatggaagagtgagcatggcgtgtctaccataaccacgaagaagaggcaaagagacttgagattttcaagaataacttgaactatatcagggacatgaatgcaaaca

SEQ ID NO: 56820 - DNA, 271 bp, Glycine max
  Clone ID: 700679203H1
cttctccctacattaaatgtacagtctctttcttcatagcatatggaaatttggctgatgacaccatcaattttgaggcttttccccacaagctggtgcagtttggagagattcaggaaaaagttgtattgaaattttcacaagaggaatttcttacagcttggtcaactcaggtgcgtcctgaacaaccctgttggctgatgggtgtccatatttgtatgctatggtgcatgacagttcagtgtctacaataccaggtgattttgttatt

SEQ ID NO: 56821 - DNA, 270 bp, Glycine max
  Clone ID: 700679205H1
ccatcgttaagctagtggcgatcggatccagctacagcatagagatcaaggaaggaaggaaggaagatgttgggtgttataaggcacaagagtattcgccctgccttctccgcaatcagacacttgtcttctgcagctaaagagattactgtcagggaggctctgaactccgcactcgatgagaaatgtcagctgatcctaaagtgttcttgatgggtgaagaggttggggaatatcagggtgcatacaagatatccaaggggctgctcg

SEQ ID NO: 56822 - DNA, 268 bp, Glycine max
  Clone ID: 700679207H1
attctgaggcctgtgctgtgctctgaggggccatagtttgggaccctttgaaccctaatctccacccaaacccattttcccgggaaattgccttggaaaagaaagagcgaagaggaaaatgcagaatcacaggctgaagcagcagcagcagcagcaacaacaagctcttatgcagcaagctttctccaacaacagtggctctaccaccctggcctccttgctcctcctcagattgaaccatatccaagtggaaatttgcctcctggtt

SEQ ID NO: 56823 - DNA, 265 bp, Glycine max
  Clone ID: 700679208H1
tgtggaagaggaaagagcaagcagcaacagctcgtggcggttacgattatttattaagatcaatgttgcatgcagtatctgcccctagcttttgtttaagctatcccgggaaccttcattatcctccttcttcagttcaaaaaacatgtttttctgttcgttgttcggtttcacagacaaaaatggagctaaagtggaatatactccttggctcattattggcttgggcaatcctggtaacaaataccatggcacaaggcacaat

SEQ ID NO: 56824 - DNA, 268 bp, Glycine max
  Clone ID: 700679209H1
ctccattgtctttgaacactcatcaccatggccaagcttgttctttccctttgtttccttcttttcagtggctgcttcgctctgagagagcaggcacagcaaaatgagtgccagatccaaaagctgaatgccctcaaaccggataaccgtatagagtcggaaggtgggttcattgagaccggaaccctaacaacaagccattccagtgtgccggtgttgccctctctcgctgcacccttaaccgcaatgcccttcgtagaccttccta

SEQ ID NO: 56825 - DNA, 260 bp, Glycine max
  Clone ID: 700679210H1
gcgccaagtcacaccagaaattggatccctccgccgtccacggcgtcaccaggttctccgatctcactccggcggagtttcgccgccagttcctcggcctgaagccgctccgccttccctctgacgctcagaaggctccgatcctaccgaccaacgacctccctaccgatttcgattggccgaacatggagccgttactggagtaaaaaatcagggttcgtgcggatcgtgttggtcctttagcgccgttggagcgttgg

SEQ ID NO: 56826 - DNA, 257 bp, Glycine max
  Clone ID: 700679211H1
ttgggaatctctcaagattttgaaattgctggtaatactcttatgccagctttttctgttccacaggctactgccagatcttctgaaaatgcggaatcctctgcatgatctggaattcgtgttttctttcgcttgttcgtttgtttaattcaataaaggaaattaggcatgaccctcttttgagtatgctctgcctatctgaaaatttccacacctcttttaattgtcgtaatgatgtgtgaagtgtgtgttatttt

SEQ ID NO: 56827 - DNA, 266 bp, Glycine max
  Clone ID: 700679212H1
aacacaacaagtgtctccagagttgcaatagcgagagagactcgtacaggaaccaagcatgccacgctcgttgcaacctccttaaggtggagaaagaagaatgtgaagaaggtgaaattccacgaccacgaccacgaccacaacacccggagagggaacctcagcaacccggtgagaagaggaagacgaagatgagcaaccacgtccaatcccattcccacgcccacaacctcgtcaagaagaagagcacgagcagagagaggaac

SEQ ID NO: 56828 - DNA, 255 bp, Glycine max
  Clone ID: 700678594H1
gattggaaaaagtttcctctacaaaagcacaatttgttagtggaaaaaccttcaaatatgatataattggtgctggttcacattcttcagaagattttcctgaaaaggaagatcaagaaaaacccaaaaagattgataccagattgagacaaagaatagatcctcaatacaatgaggttcaggctcagatggaaacaaatttgtttaaattgtctcttgatgatgttgaaactcccaaaggttccatgttggatc

SEQ ID NO: 56829 - DNA, 259 bp, Glycine max
  Clone ID: 700678595H1
gccggaatcttccagtttctaagctccgttgaccggaaaacctgctccgccgtgtgtcggcggtggctgcgcgtggacggcgagaaccgccagcgcctctccctgaacgcgaaggcgagcctggttgacttcgttccgtcgctcttctcgcggtttgactcggtcacgaagctcgccctgcggtgcgaccgcaagtccacgagcgtaaacgacgacgctttggtcctgatctcgctgcggtgcaggaatctggtgcggc

SEQ ID NO: 56830 - DNA, 258 bp, Glycine max
  Clone ID: 700678596H1
gtttgtcgttcctcactgacctcaccatggcgaccagagccaagctttctttagctatcttccttttctttcttttagccttgatttcaaacctagccttgggcaaacttaaagaaaccgaggtcgaagaagatcccgagctcgtaacatgcaaacaccagtgccaacagcaacggcaatacactgagagtgacaagcgaacatgcttgcaacaatgtgacagtatgaagcaagagcgagagaaacaagtcgaagagg

SEQ ID NO: 56831 - DNA, 177 bp, Glycine max
  Clone ID: 700678601H1
caagagactaagttcttttgatatgtacaagcaagaagttctccttggccatctggattggtctcccatgcacaaagatcccatattctggcgagaaaatataaacaactttgaagaaaatgatttccagattctaagggtcctactaacaattttggacacgtccagtgatccaag

SEQ ID NO: 56832 - DNA, 286 bp, Glycine max
  Clone ID: 700678602H1
tattgtttcctaccaagttctctgtctggggagttcttagcaccaccaccagcttctgcagtagctttaagctacgaaagattttccttgaccatggggcaaaagcatttagtgacggtgttctgtttatgggctttaacatgttcccttcttccatctttctcctttggaattctgagaattggtttgaagaagagacctctagatcttgatagtattaatgctgctagaaaggcaagagaaggtctaagatctgtaagaccaatgatgggtgcacatgatcagt

SEQ ID NO: 56833 - DNA, 176 bp, Glycine max
  Clone ID: 700678603H1
tttagctttctcttccttcataatttctcacctttcaaatctccattcagcttcattttctgcatagaaaaaacccttttctggagatagaatatagtcttcagctggacgaggatcattcatcttgaaagtagagttcgtgtgtgacaatctttatagttctacggagggtgcaa

SEQ ID NO: 56834 - DNA, 282 bp, Glycine max
  Clone ID: 700678606H1
gccccccaaaaatgaagagcaccatcttctttgctctctttctcttttgtgccttcaccacctcatacctaccttcagccatcgctgatttcgtgctcgataatgaaggtaaccctcttgaaaatggtggcacatattatatcttgtcagacataacagcatttggtggaataagagcagccccaacgggaaatgaaagatgccctctcactgtggtgcaatctcgcaatgagctcgacaaagggattggaacaatcatctcgtccccatatcgaatccgtt

SEQ ID NO: 56835 - DNA, 287 bp, Glycine max
  Clone ID: 700678607H1
gttaaagttaatgtagcatgtgctgctgttggcttgacatcaagttacactccaactccattgttggaatctggtttgcaaaaagacagagggttaattgtggagtattttggaaggatgtcttacgttgctcataacgttaatcagccccaagagaaagatttgttggagggaaatttttcctttgatattaaatctcgctctagattggaaaaagtttcctctacaaaagcacaatttgttagtggaaaaaccttcaaatatgatataattggtgctggttcaca

SEQ ID NO: 56836 - DNA, 287 bp, Glycine max
  Clone ID: 700678608H1
tatcagtttcattcctgaatcaattagtttcttcactttcactttctaactgggaggatcaaagtgtgtgtctttgtcctcttggtgttgtttcttcttcttcttcaagtgtgcttcataaagcagtaggatttggaagcaacaaaagagttgcaaagtgggtagtgatcatggcagctgtaaagcctgaggagataagccacccaccaatggaccaacttcaaggcttagagtattgtatagattcaaacccatcttgggctgagacaatagctttgggtttccag

SEQ ID NO: 56837 - DNA, 289 bp, Glycine max
  Clone ID: 700678609H1
gcggaagaacgaagcctcctcgttcttcttcttctgcgctttatctctccctctctagaaccgtaaccgtcgtttctttctttctctctcatcaaccagagataaagagtcaccttcttatttttctgaatctcgcggcgttgttctttctgctgctgcggctgtggttccggcggcgatgggacagcaatcgttgatctacagcttcgtcgctcgaggcaccgttatcctcgcggagtacaccgagttcaccggaaacttcaccggcgtggcggcgcagtgcctccag

SEQ ID NO: 56838 - DNA, 128 bp, Glycine max
  Clone ID: 700678610H1
cacaccccactaacaattccttcacttgcagcactgttgcatcatcatcttcattgcaaaaccctaaacttcaccgtcaaccatgaccacacaagtaccaccacacagtgtccaagtccacacaacag

SEQ ID NO: 56839 - DNA, 286 bp, Glycine max
  Clone ID: 700678611H1
tttagctttctcttccttcataatttctcacctttcaaatctccattcagcttcattttctgcatagaaaaaacccttttctggagaaagaatatagtcttcagctggacaaggatcattcatcttgaaagaagagtttgtgtgtgacaatctttatagttctaaggagggtgcaagagagaactgaatttgctgtgatggcaactcgtagatatgcttttggaagagctgatgaggccatcatccagactccatgagggccactttggctgaatttgtttctact

SEQ ID NO: 56840 - DNA, 173 bp, Glycine max
  Clone ID: 700678612H1
ggacaaagagaaccccaaacacaacaagtgtctccagagttgcaatagcgagacagactcgtacaggaaccaagcatgccacgctcgttgcaacctccttaaggtggagaaagaagaatgtgaagaaggtgaaattccacgaccacgaccacgaacacaacacccggagaggg

SEQ ID NO: 56841 - DNA, 284 bp, Glycine max
  Clone ID: 700678613H1
ttttcagtggctgcttcgctctgagagagcaggcacagcaaaatgagtgccagatccaaaagctgaatgccctcaaaccggataaccgtatagagtcggaaggtgggttcattgagacctggaaccctaacaacaagccattccagtgtgccggtgttgccctctctcgctgcacccttaaccgcaatgcccttcgtagaccttcctacaccaggggtccccaggaaatctacatacaacaaggtaatggtatttttggcatgatattccggggttgtcctagc

SEQ ID NO: 56842 - DNA, 165 bp, Glycine max
  Clone ID: 700678614H1
ccgcagcgccgcacagactcatcaaactcgttgtgactgcagctgcacagattttcctcttctctgtgcctttgcgagaacgcgcgtatggtttcaattcaatggcgggaggtaaagcgaataaggaaaaggggaagccccatcagcagcagaagcacatgccct

SEQ ID NO: 56843 - DNA, 175 bp, Glycine max
  Clone ID: 700678615H1
ccttaataaataatttaagatactatgatgagagcacggttcccattactgttgctgggacttgttttcctggcttcagtttctgtctcatttggcattgcttactgggaaaaagagaaccccaaacacaacaagtgtctcgagagttgcaatagcgagagagactcgtacagga

SEQ ID NO: 56844 - DNA, 290 bp, Glycine max
  Clone ID: 700678616H1
caagctcactgtgccgatgttggatctcatttgcttgaacgattgagatttctcatggaaagacatgacatcataggaaatgtaaggggaaggggcctaatggtaggcatagagttggtcactgaccgagacaacaagacacccgcaaaggctgaaactgctgtcgtgtttgaaaaactcagagagcttggtgtgctagttgggaaaggaggacttcatggcaatgttttcaggatcaagccaccaatgtgtttctccaaagatgatgcagattttcttgtggatgcctt

SEQ ID NO: 56845 - DNA, 266 bp, Glycine max
  unsure (1)..(266): unsure at all n locations
  Clone ID: 700678618H1
ttaattattaacacttccttagttcaatgatggggaagcccttcactctctctctttcttccctttgcttgctactcttgtcgagtgcatgctttgctattagctccagcaagctcaacgagtgccaactcaacaccctcaacgcgttggaacccgaccaccgcgttgagtccgaaggtggtttgattcaaacatggaactctcaacaccctgagctgaaatgcgccggtgtcactgtttccnactcaccctcaaccgaatggcct

SEQ ID NO: 56846 - DNA, 282 bp, Glycine max
  Clone ID: 700678619H1
tagggtaccagatgagactgcttaacgcaacctcgtgtttcgttcttctctggtgactggtgagtgcggcgacgctggcctgcagtggtgcgacttttcaccgacgacgctcgttgtgcaagcagctaagtaccacgacgctcttgtgcgagcagcttctattcgctggacggatggtggttctacgattaagtactagggttcagacttcatgagttttaaacaccgtgtataattgattttggtggtgattccaattcggaagtgcaccgcagaaagaag

SEQ ID NO: 56847 - DNA, 282 bp, Glycine max
  Clone ID: 700678620H1
gcgagtgagaatcaaatacaagtaccctataaaaccctaaaaatccattagggttttctcgttcgctcttcgcacaccacactgatggcgtgcacaatcgacttccgctgtctcgacgagggttttggcggcaaaacctacaagcgcaagagagagcagcagtcgcagcctcagcacgacgccgccgccgatgacgtcatcgacggcgcctctctgatggacaccgacgacgcactcccgccgccggcgaagcgatcggcgctaccatcgtcggagaacccg

SEQ ID NO: 56848 - DNA, 288 bp, Glycine max
  Clone ID: 700678621H1
ataaaattcttccaccaagttatgggtagaccttgtgttgcttcttttctccctcttaggtctctcttctagttccagcatatcaactcatcgttccatattggaccttgacctaaccaagtttaccacacagaaacaggtgtcttcactgttccaactatggaagagtgagcatggacgtgtctaccataaccacgaagaagaggcaaagagacttgagattttcaagaataacttgaactatatcagggacatgaatgcaaacagaaaatcaccccattctcatcg

SEQ ID NO: 56849 - DNA, 286 bp, Glycine max
  Clone ID: 700678623H1
cttaattattaacacttccttagttcaatatggggaagcccttcactctctctctttcttccctttgcttgctactcttgtcgagttcatgctttgctattagctccagcaagctcaacgagtgccaactcaacaacctcaacgcgttggaacccgaccaccgcgttgagtccgaaggtggtttgattcaaacatggaactctcaacaccctgagctgaaatgcgccggtgtcactgtttccaaactcaccctcaaccgcaatggcctccacttgccatcttactc

SEQ ID NO: 56850 - DNA, 283 bp, Glycine max
  Clone ID: 700678624H1
agcagtcaaaaggagtgattgggcctcattggtacaagtgtttttaacaaacagcaacagtacagagcattttgatgcatgcaagtggacaaaatcggaaccacattcctgggaattgatcttcccaatagaggtatgtggtcctaacaatggttttgaaatgtggagttctgagtgggcaaatcaaacttcatggcatttgagtttccttattgacaatcccaaacagtctacagtttttgatattctcttgggaatttctcaagattttgaaattgctggt

SEQ ID NO: 56851 - DNA, 282 bp, Glycine max
  Clone ID: 700678625H1
ctcgagccgtgaaatttgaacaattctgaggcatcacaataaataaacactgagataggagagaaggctgtgcttgaggcatatccttgatgggtaataacaggttcagattgtcagatatgatgccaaatgcatggttctataagctcaaagatatgagcaaatcaaggaagagaaatggccctcatgttatgaagaacaaagtagcctcaccaacaacatcacaaaggtcacagccaagatactctcattatttctccattgaaccaaacatagctggta

SEQ ID NO: 56852 - DNA, 283 bp, Glycine max
  Clone ID: 700678626H1
tttttgaatttcagtgaaagatgacgcggaattaactcaaactggactcatctttgtatctgacaacgtaggaataccaaagaaactcctttataacaactaagcttacttgctgtttcgagtagcattatgctttttggtctgtgtctaacgttcgatctcttctcttcaaggctctcctcgtcccttcaaacgggagagcatttgaattgacactgggggtgatgaaatacgtgtctgaacattgggaccaccttctctgaagccattttgatcttaaatg

SEQ ID NO: 56853 - DNA, 283 bp, Glycine max
  Clone ID: 700678627H1
ctcgagccgcaaagcactaatctaacaaacgcaatttaaaaaccgcaacaaactttctctcttgcgttcacacttattctctggcttcttcttccattttcgcttctcgtagcgttttcggaacagttatggcttccattgccggatccaactgcgtcgctctccgaaccgccaacttcggcgcctccggtaaccggaaaatcggccagatccgccaatggtctccgattctcacgaatctccgtcccgtttccggtcttcgtcaccgatcgaatactccgtt

SEQ ID NO: 56854 - DNA, 282 bp, Glycine max
  Clone ID: 700678628H1
agtgatttcagtgagtgatcggtgttcacttgatctcatcataatcgtcagcgtcaattgaagaagatgccgatcagaaacatcgccgtcggaaggcctgaagaggcgactcacccctacacgttgaaggcggctttggctgagttcatctcaaccttcatcttcgtgttcgccggctcaggctccggcatcgcctacaacaagctcaccgacaacggcgctgccacccctgccggcctcatctccgcctccatcgcccatgcattcgccctcttcgtcgcc

SEQ ID NO: 56855 - DNA, 282 bp, Glycine max
  Clone ID: 700678631H1
cagaggccagattttccccttttcttctctggtgccacacctttagttggagcgttgccttatgctcagtgctatggcgggcatcaatttggtatgtgggctgggcagctgggtgatggcagggcaatgactctaggggagatactgaattctaactctgaaaggtgggaacttcaacttaaaggagctggcaagactccttacagtcgctttgccgatggccttgccgtcctccgcagcagcgtcagggagttcctttgcagtgaggcaatgcaccacctt

SEQ ID NO: 56856 - DNA, 279 bp, Glycine max
  unsure (1)..(279): unsure at all n locations
  Clone ID: 700678632H1
gtgcatgatagttcagtgtctacaataccaggtgattttgtcattggtgttaagttgacaaccataaacaatatgtgtgcatatgggctcaatcctggtatttcaggttctcgtcttttgggcaccattcctcagtccatttcacagcaaactgtttggaatcaaatggcaacagtgagaacaccattgaattttgattctagcaagcagagcttttgtcaattttctattgaccttctcggtggaggaatnttagtggacaaactggagattgatcac

SEQ ID NO: 56857 - DNA, 286 bp, Glycine max
  Clone ID: 700678635H1
cagggatattaaggcaaccaatgtcttacttgataaacatctgcatgccaagatctctgactttggtttagccaaacttgatgaagaagagaatactcatatcagcacaagaatagctgggacaattggttacatggctcctgagtatgctatgaggggttacttgactgacaaagcagatgtctatagctttggaattgtagctttagagattgttagtggaaagagcaacacaaattataggccaaaggaggagtttgtatatcttttagattgggcctatgtc

SEQ ID NO: 56858 - DNA, 284 bp, Glycine max
  Clone ID: 700678637H1
gaggcctcatacgacaccaaattcgaggagataaacaaggttctgtttggtagagaggaggggcagcaacaaggggaggagaggctgcaagagagtgtgattgtggagatctcagagagacaaattcgggaactgagcaaacatgccagatctagttcaaggaaaaccatttcttctgaagataaaccttgcaacttcagaagccgcgaccccatctattccaacaagcttggcaagttgtttgagattaccccagggaacaaccctcagcttcgggacttgga

SEQ ID NO: 56859 - DNA, 284 bp, Glycine max
  Clone ID: 700678638H1
cagaaaaaaagagtcaagcggcgagcaatggcgacatcgctggtgcgatcgggttttcttcgaagcgccctaagaggaagcgctcgtggctcccaggttccgaagcgaaactttgcttcctctggtcatcacgatgatgcatatgagacggccaaatgggagaagattacatatctaggcattgttagttgcactggtttagccgtttataatctatcaaagggccacccacacttcaaagaacctcctgcttacccatatttgcatatccgcaataaggaatt

SEQ ID NO: 56860 - DNA, 283 bp, Glycine max
  Clone ID: 700678639H1
ctcgagccgctccaaacccaacaccctccttctccccaaccatgctgacgctgattacctcatcgttatccttaacgggactgccattctttccttggtgaacaacgacgacagagactcctacagacttcaatctggtgatgccctgagagtcccctcaggaaccacatactatgtggtcaaccctgacaacaacgaaaatctcagattaataacactcgccatacccgttaacaagcctggtagatttgagagtttcttcctatctagcactgaagctcaa

SEQ ID NO: 56861 - DNA, 284 bp, Glycine max
  Clone ID: 700678640H1
attcattctcatctttctctcttctctctccacccaaaccctaactcccgaccctgttcccctctcgtatccgtcatgaaaggaggaaagtccaagaccgaatctaagagagccgatcccaaacttgctgtgaataagaagggagccgccaccaaggctaggaaacccgccggcaaggggaaggcagcgaaagaccctaacaagccaaagaggcctccaagtgctttcttcgttttcatggaggagttcaggaaggtattcaacaaagaacatcctgaaaacaa

SEQ ID NO: 56862 - DNA, 283 bp, Glycine max
  Clone ID: 700678641H1
actcgagccgaatcggctcgagggatcacacttatacaaaattctctaattagtaacttgtagagagttgctgcttggaagataggttgtttaatggtcaagattgtgatgtctgggaatgcagcagtcaaaaggagtgattgggcctcattggtacaagtgtttttaacaaacagcaacagtacagagcattttgatgcatgtaagtggacaaaatcagaaccacattcctgggaattaatcttcccaatagaggtatgtggtcctaataatggttttgaaa

SEQ ID NO: 56863 - DNA, 283 bp, Glycine max
  Clone ID: 700678642H1
caagtcactacacaccaaatattcttcgtcctcccgctcgctcttctcactcgtcatcttcgaattcgtctgcgccctaacaaaattcatttcaattccaactcctctgatcaaaatcctaggctcgttcttgaatccctaattcgatctcctcctcctcctccgaagaataaaaggaggatcgatgtgggcagcatcttgcctggcgtcgtgctgcgcggcctgcgcatgcgacgcctgcaggaccgtcgtttcgggaatcagccgtcgttccgcccggatc

SEQ ID NO: 56864 - DNA, 275 bp, Glycine max
  Clone ID: 700678644H1
agcctggtagatttgagagtttcttcctatctagcactgaagctcaacaatcctacttgcaaggattcagcaggaacattttagaggcctcctacgataccaaattcgaggagataaacaaggttctgtttagtagagaggaagggcagcagcaaggggagcagaggctgcaagagcccgtgattgtggaaatctcgaaggaacagattcgggcactgagcaaacgtgccaaatctagttcaaggaaaaccatttcttctgaagataaacctttt

SEQ ID NO: 56865 - DNA, 275 bp, Glycine max
  Clone ID: 700678648H1
gaggttctctatttgtggataagtggggtccacctggccacgtggaccgcgccgagccgggagtgtttaacctgctgggagccgctaattcggctcgcggcgccgagctgtgtctccgtttgtttggagtggtggtggtatgagatcatgattttgttgtgtgggttgttggtggaccccactgccagcgtggcggctatggggattttaatccagactacgtccttgatctacgtttttccctcctcgctggggcttgcggtgtctacgcgcgt

SEQ ID NO: 56866 - DNA, 277 bp, Glycine max
  Clone ID: 700678651H1
ctctcgctaaccaagaaggaactagggttttacagaatacaagctctctctctctctcgtcggttttcgtcaatcaaatccaatccaatatcaaatatgagtcgtcatcccgaggttaagtgggctcagaggcttgacaaggtctatatcacggtgcaattggctgattcaaaaaatgcaaaagtggatcttacgccagatggtatttttaccttctccggtagtgctggtgctgaagaccatcagtatgagctaaaactggagctctttgataagg

SEQ ID NO: 56867 - DNA, 279 bp, Glycine max
  Clone ID: 700678652H1
ctccacggagaacacggcgagaatgaaagaggggctccgaacatcaccatggaggcctcgcctttccttagttcaatatggggaagcccttcttcactctctctctttcttccctttgcttgctactcttgtcgagtgcatgctttgctattacctccagcaagttcaacgagtgccaactcagcaacctcaacgcgttggaactcgaccacggcgttgagtccgaaggtggtcttatggaaacatggacgtctcaacaccctgagctgcaatgcgccg

SEQ ID NO: 56868 - DNA, 280 bp, Glycine max
  Clone ID: 700678653H1
aaacaattcaattcaatctgcgtcgatcatggagaggaaaacatttgggtttttgttcttgctcctccttgtcttagcttctgatgtgacggtgaagagagcagaggcgaaagattgcttgacaaggaggcacgggttccagggtagatgcttattcgacaggcaatgtgcacatgtgtgcaggagcgatggattcatcggtggtcagtgccgaggccctcttcgcaaatgcttttgcagcaggccatgttgatcgaaattactactgccaaagaggcca

SEQ ID NO: 56869 - DNA, 282 bp, Glycine max
  Clone ID: 700678654H1
aagaaaagccatttccatagcagcctaagaaaatgatcagagcactagcttgttcgctatctttctactttgcgccttcacctcatacctaccttccgccaccgcccaggacgtgctcgacgtggatggcgatccgattcggaacggtttcatatactacgttttgccggcaataagaggaaacggtggcggaatagaacgagccgcactcgggaaagacacttgccctatcactgtagtgcaatctcccaatccaaactctaaggggttagaaattaagtt

SEQ ID NO: 56870 - DNA, 280 bp, Glycine max
  Clone ID: 700678656H1
ctgcatcggaagaaaccctagccactctcccggcgtcacgatgcagatcttcgtgaaaaccctaacgggtaaaacgatcacgttggaggtggagtcttcggacaccatcgacaacgtgaaggccaagatccaggacaaggaaggcatccctccggaccagcagcgcctcatcttcgccgggaagcagctggaggacggccgcaccctcgccgactacaacatccagaaggagtccacgcttcacctcgtcatccgcctccgtggcggcgccaagaagcgc

SEQ ID NO: 56871 - DNA, 277 bp, Glycine max
  Clone ID: 700678657H1
cttaattattaacacttccttagttcaatatggggaagcccttcactctctctctttcttccctttgcttgctactcttgtcgagtgcatgctttgctattagctccagcaagctcaacgagtgccaactcaacaacctcaacgcgttggaacccgaccaccgcgttgagtccgaaggtggtttgattcaaacatggaactctcaacaccctgagctgaaatgcgccggtgtcactgtttccaaactcaccctcaaccgcaatggcctccacttgcc

SEQ ID NO: 56872 - DNA, 277 bp, Glycine max
  Clone ID: 700678658H1
gacacagagcgagagagaatcgtaacagaaacggtcactggaagttgtctctaccaccctctcagccatggcaacaattccccctagccgatcatcatcacacgcgtttgttgccatggcaaccttcacgactctgttgttgtgcacggcggcggcgaaggagagcgtgtacgagatactccccaagtacgggctcccgagtggtctgttaccggataccgtcaccgactacaaactcgacgaggatggccaattcgtcgtcgttttgccgaagccc

SEQ ID NO: 56873 - DNA, 274 bp, Glycine max
  Clone ID: 700678660H1
cttgtgttgcttcttttctccctcttaggtctctcttctagttcgagcatatcaactcattgttccatattggaccttgacttaaccaagtttaccacacagcataagaaatcgaaaactgatccaactatggaagagtgtgcatggacgtgtctaccataaccacgaagaagaggattagagacttgagattttcaagaataacttgaactatatcagggacatgaatgcaatcagagaatcaccccattctcatcgtttaggattgaacaag

SEQ ID NO: 56874 - DNA, 273 bp, Glycine max
  Clone ID: 700678661H1
cgaaccagatttcaagatgaagttcaacattgcgaatcccaccactggttgtcagaagaagctggagatcgatgatgacctgaagctacgagcattttgggacaagaggatctcacaagaggttgttggtgatgctctgggtgaggaattcaaaggctatgtcttcaaaattactggaggttgcgacaagcaaggatttccaatgaagcaaggagtgttgacccctggtcgtgttcgcctcttgctgcatagaggaactcttgtttccgtggt

SEQ ID NO: 56875 - DNA, 115 bp, Glycine max
  Clone ID: 700678663H1
attctctccattggtccttagacactcatcagtcatgaccatggccaagctagttttttccctttgttttctgcttttcagtggctgctgcttcgctttcagttccagagagcag

SEQ ID NO: 56876 - DNA, 279 bp, Glycine max
  Clone ID: 700678665H1
ggcatgtgcgccattgattgctatacttcctttggagattagggggacaattggcgatttcataatgggtgtgtttgctgtcttcaaagatctggacttcagttttttagagatgaatccatttacactggtgaatgaaaagccatatccactggatatgagaggggaattggatgacactgccgcattcaagaacttcaacaagtggggtaatatagaatttccattgccttttggaagaatctgagccctacagaaagcttcattcattcttggatg

SEQ ID NO: 56877 - DNA, 162 bp, Glycine max
  Clone ID: 700678666H1
gcaaaattgtgctgtgtggatgcctaatgttgataagactgagatgaacctcactcatgaattgaatgggaggaattttaatttgactatacgcattactgatccagatgttgtgagaattaagtgaagtgacggtgtaaatatactcagctccgactcagc

SEQ ID NO: 56878 - DNA, 288 bp, Glycine max
  Clone ID: 700678669H1
aagaacttgttgaagtgtggttggtctcctaatggaagcaaggtaacagctggtagttctgatcgaatggtttacatctgggataccacttctcgccgcatcttgtataagcttcccggtcacaatggatctgttaatgagtgtgtttttcatcccaatgagcctattattggatcttgcagcagtgacaagcagatttatcttggggagatatgaagcacaacgtttaggaaatgaaatgagcatgttggtgcttttgaccaccattagggagtggtaaactttaga

SEQ ID NO: 56879 - DNA, 274 bp, Glycine max
  Clone ID: 700678670H1
gccttcccctaccaattctttctctcaaccgaatgatctgagtgaggggtttggccaatgacgagtggttttggtgaatcaacgatagcgtctgcaccgagcccatcatgctcggggaacagttcacacgatgccggtgattttgaatgctacatatgcttcgatttggcgcaagaccctgtgatcacactctgtggtcacctattctgttggccatgcctttataggtggctcaaccatcactcccattctcaggaatgcactgttagcaagg

SEQ ID NO: 56880 - DNA, 257 bp, Glycine max
  Clone ID: 700678671H1
caagaacaatcaaacagaagaggctcaaggtcgcagaagcagcagctacaggacagtcaccagaagattcgtcacttcaatgaaggagacgtactcgtgattcctcctggtgttccttactggacctataacactggcgatgaaccagttgttgccatcagtcttcttgacacctctaacttcaataaccagcttgatcaaacccctagggtattttacattgctgggaacccagatatagagtacccagagaccat

SEQ ID NO: 56881 - DNA, 275 bp, Glycine max
  Clone ID: 700678672H1
gtgaggtgagttccttgggtacacgcgggaatggctgctgcatctggcatgccagaggaggagacagcgatgtttcccgacaaaagtgtccatcccaggttggatgtctacgtgtgggacatggatgagacccttgtactgctcaactccttgctgaaatcatcatacgctgaggctttcaatggtctgaaggatgtgcagaagggggtggaaatcgggaggacatgggaaaatctcattctacaaatatgtgatgattatttcttctatgaaca

SEQ ID NO: 56882 - DNA, 262 bp, Glycine max
  Clone ID: 700678673H1
gatccttctgcatcatcacccttcgtataataccgtctctccctttttgcatttttctctccatcattgacttctgccaagtctttcaaaaagctagctgatcgaggaataatatagcatgcacgaggtcttcgtggaagaacataccattgacacttgccacatgccaagcgagttggtgaggtgaatgttacgtatgatgttaattacactacgtccatctcagtcttaatttctaaatccgagtcctttagtcaattgc

SEQ ID NO: 56883 - DNA, 274 bp, Glycine max
  Clone ID: 700678674H1
ttcagtttctcctcgttgttcttcgctttcctgttttcaatttcgattctttcgttaatttaataagatgtttgggagggcaccgaagaagagcgataatacgaggtactacgaaatcctcggcgtctccaagaacgcttcgcaggatgatctgaagaaggcttacaagaaagccgccattaagaatcaccccgacaagggcggtgatcccgagaagtttaaagagctggcgcaacttatgaggttctgagtgaccctgagaagcgtgagatat

SEQ ID NO: 56884 - DNA, 274 bp, Glycine max
  Clone ID: 700678675H1
ctccattgtctttgaacactcatcaccatggccaagcttgttctttccctttgtttccttcttttcagtggctgcttcgctctgagagagcaggcacagcaaaatgagtgccagatccaaaagctgaatgccctcaaaccggataaccgtatagagtcggaaggtgggttcattgagacctggaaccctaacaacaagccattccagtgtgccggtgttgccctctctcgctgcacccttaaccgcaatgcccttcgtagaccttcctacacca

SEQ ID NO: 56885 - DNA, 272 bp, Glycine max
  Clone ID: 700678677H1
ccaccaccgactactatcccagtgtcagagatgatgaagaaggtgaaggaatttctaaaatacgagtgcccagacagaaacacatccctgtttccaagtcccaactcctagacgccatcatcctctctatccaagatgatattgatgcccatcactttcgtcttctcacctcatgcttagactctatacttcatgccgagtataaaactatcttagaggagatgcgttccgattatcaacttacggattcactccagcaacttgtgtccaat

SEQ ID NO: 56886 - DNA, 249 bp, Glycine max
  Clone ID: 700678678H1
cggctcgagcttgcaacgattgacaatggcttcaaccgacaagtcaccggacccaacgccggcgaagggtccggatccaactccggggaagccgatgagtgttggtcagcacgtgatcgacaagagtgcaatgatggtgcagtcgctggaccccattaagcagatgagtcagcacgtgtgctccttcgctatctacagccatgacatgtctcgccagatagagacacatcactactgctcgagactcca

SEQ ID NO: 56887 - DNA, 276 bp, Glycine max
  Clone ID: 700678680H1
ctttgctttggcactcatcttgcatgaaaagttcactgttcaagagattttctgggcattttcaatatacttggaggcagttgcaatattaccccagttggttttgttgcaaaggagtggaaatgtggacaatttgactgggcaatacatattctttcttggtgcatatcgtgcattttacatcctgaactggatatacggtatctgactgagccacattttactagatggatagcttgtgtctcaggtgttgttcagacagctttgtatgcagat

SEQ ID NO: 56888 - DNA, 278 bp, Glycine max
  Clone ID: 700678682H1
cctaaggtaaaaatgtttgaacaagcacaaaactgccttcttcctatgggaattacctccgaaaatgttgcacagcgctttggggtttcaaggaaggaacaagaccaggccgcagttgagtctcacaggcgagctgccgcagctactgcttctggtaaatttaaagatgaaattgtcccagttaccactaagattgtggacccaaaaactggtgaggagaaatctgtcaccatttctgttgatgatggaattcgacctggcacaacagtgtctgatct

SEQ ID NO: 56889 - DNA, 262 bp, Glycine max
  Clone ID: 700678684H1
actcgccatacccgttaacaagcctggtagatttgagagtttcttcctatctagcactgaagctcaacaatcctacttgcaaggattcagcaggaacattttagaggcctcctacgataccaaattcgaggagataaacaaggttctgtttagtagagaggaagggcagcagcaaggggagcagaggctgcaagagagcgtgattgtggaaatctcgaaggaacagattcgggcactgagcaaacgtgccaaatctagttca

SEQ ID NO: 56890 - DNA, 271 bp, Glycine max
  Clone ID: 700678686H1
gacccaccttcgtaaataaaaaccctatgcaactgcactattctcgtgttcgctttaaatcaaaccgctcattctcctcaatcatacctctatctctctctctttctctttctgatcacaatgtcgacctttggcgccgcggcgaatacgaatcccaacaaatcctacgaggtagcccaaccaccctctgattctatttcgagtctttgtttcagtcccaaggccaatttcctcgtcgctacttcatgggacaccaggtgcggtgttggga

SEQ ID NO: 56891 - DNA, 275 bp, Glycine max
  unsure (1)..(275): unsure at all n locations
  Clone ID: 700678687H1
tcttctaccacacttcaattcagaggcgatagtgatactggtaattaatgaaggagatgcaaacattgaacttgttggcctaaaagaacaacaacaggagcagcaacaggaagagcaacctttggaagtgcgganatatagagccgaattgtctgaacaagatatatttgtaatcccagcaggttatccagttgtggtcaacgctacctcaaatctgaatttctttgctattggtattaatgccgagaacaaccagaggaacttcctcgcaggtt

SEQ ID NO: 56892 - DNA, 274 bp, Glycine max
  Clone ID: 700678688H1
ccagactgagaggaagagagagggagattctttgtttgctaccttctctcggaaaaatggttacgttcaggtttcaccagtaccaggtggttgggagggctcttcccacggaagcagatcagcaccccaagatctaccgaatgaagctctgggccaccaacgaggttcgcgccaagtccaagttctggtattttctgaggaaactgaaaaaggtgaagaagagcaatggccaagtgcttgccatcaacgagatttttgagaagaacccaaccaa

SEQ ID NO: 56893 - DNA, 266 bp, Glycine max
  Clone ID: 700678689H1
agcggcattaaaaatgcagatcttcgtgaaaaccctaacggggaagaccataaccctcgaggtcgaaagcagcgacaccattgacaatgtcaaggctaagattcaagacaaggaaggcatccctccggatcagcagcgtttgattttcgccggaaagcaacttgaagatggaaggaccttggccgattacaacatccagaaggaatcaacccttcaccttgtcctcaggcttcgtggtggcatcatcgagccttccctcatggctt

SEQ ID NO: 56894 - DNA, 272 bp, Glycine max
  Clone ID: 700678690H1
attggtccttaaacactcatcagtcatcaccatggccaagctagttttttccctttgttttctgcttttcagtggctgctgcttcgctttcagttccagagagcagcctcagcaaaacgagtgccagatccaaaaactcaatgccctcaaaccggataaccgtatagagtcagaaggagggctcattgagacatggaaccctaacaacaagccattccagtgtgccggtgttgccctctctcgctgcaccctcaaccgcaacgcccttcgta

SEQ ID NO: 56895 - DNA, 271 bp, Glycine max
  Clone ID: 700678691H1
ctcgagccgctcattcttcatccatagacatggccaccgtcacttctgcagccgttgctattccctcattcactggcctcaaggcaagcgcaggcaaagtgagtgccgcagttaaagtctcagctccccaagccacaaggttgggcatcaaggcttcgctgaaagacgttggagtcgctgttgtggccactgccgcgagtgcagtgctggctagcaacgccatggccattgaagtgttgctgggtggtgatgacgggtctctggctttcgt

SEQ ID NO: 56896 - DNA, 269 bp, Glycine max
  Clone ID: 700678692H1
gtttacaaggagcaggtaaagcttttccgaacaagattgtttttgatgataagcttgtgttggctaacacacaagaattctttgatggaaattttccagtggattgttggttaccaatttttgtgaattgtctttatcctgtaagtcaattaccttcagaagctgtcgttgtaaatgttacatgtggtagtggacgtggtggtttacccaccactgcttggattaattctgcagttaacaatcgctcctcagatatcaataaaaagatt

SEQ ID NO: 56897 - DNA, 270 bp, Glycine max
  Clone ID: 700678693H1
gtcatcaccatggccaagctagttttttccctttgttttctgcttttcagtggctgctgcttcgctttcagttccagagagcagcctcagcaaaacgagtgccagatccaaaaactcaatgccctcaaaccggataaccgtatagagtcagatggagagctcattgagacatggaaccctagcaacaagccattccagtgtgccggtgttgccctctctcgctgcagcctcaaccgcaacgcccttcgtagaccttcgtataccaacggt

SEQ ID NO: 56898 - DNA, 283 bp, Glycine max
  Clone ID: 700678701H1
cagcgagagagcgaagaaagtgaagattctgagttacgaagacataagaataagaacccttttctcttcggctctaacaggttcgagactctcttcaaaaaccaatatggtcgcattcgcgtcctccagaggttcaaccaacgctccccacaacttcagaattttccgagactaccgcattttggagttcaactccaaacccaacaccctccttctccccaaccatgctgaagctgattagctcatcgttatccttaacgggactggcattctttcctgggtg

SEQ ID NO: 56899 - DNA, 271 bp, Glycine max
  Clone ID: 700678704H1
ggcattgggatcaactggctacaaattccacgatattactattgcagctatgccgcatattggatgaacatcagcgatactcaatcagctgctagatatcaggtgacaatatttcgtctgccatggtaggaaaaggatccctctgatttcagagagccgatgctattcctctgaataagcgtagacacaatctgctgatcatgaggagctaggagagtttgcttgcgctcacgtttctcacgtcgcatgtgatcacaaatcagcagaagct

SEQ ID NO: 56900 - DNA, 260 bp, Glycine max
  Clone ID: 700678705H1
ggctacggagcaactactacaactcaacgtaaaggaagcaaactatgcaaattacaagagccagagagtacgacgtcgcggccaagatcgtggacgttggcgaagatatcgaggaccaggatgaggcggttctcaacaaccactccaacgcattcaacaatggagatacaagttggaatccataagtgacaagaggtcatggaagacgaaattcatcgtcgaggtatgacacatcagggatcaagacctgcaattgcaac

SEQ ID NO: 56901 - DNA, 287 bp, Glycine max
  Clone ID: 700678707H1
ggaattcggatcgagcagcaggtgagtgagttagtgagcaatagttgtgagcgatgagaatggctcccaagggttgtaatcttccgtgctgtgttctgcgtctcagcactgtcactgagtcgttgtcttgcggaggatcatggactcattatgatacttctacgctgaatcatgccctcaggtcgtagacatcatcatataacaggtcaagctgctctacaagcggcacaagaacagtgctttcgcctgggtcagaaacatcttccaggtgtgtgctgtgcagagtt

SEQ ID NO: 56902 - DNA, 278 bp, Glycine max
  Clone ID: 700678709H1
agaaagtcttccatagccccccaaaaatgaagagcaccatcttctttgctctctttctcttttgtgccttcaccacctcatacctaccttcagccatcgctgatttcgtgctcgataatggaaggtaaccctcttgaaaatggtggcacatattatatcttgtcagacataacagcatttggtggaataagagcagccccaacgggaaatgaaagatgccctctcactgtggtgcaatctcgcaatgagctcgacaaagggattggacagtcatctcg

SEQ ID NO: 56903 - DNA, 278 bp, Glycine max
  Clone ID: 700678717H1
ggctgggaaacctgctgtgcttacacgtgttgtggatagcatgactgacaacttgagaccaactcgtgctgaagccacagatgttgccaatgctgttttagatggaagtgatgccatacttctgggtgctgagactttacgtgggttgtaccctattgagactatttctactgttggcagaatttgttctgaggctgagaaagttttcaatcaagacctttattttaagaggacagtcaagtatgttggagaacccatgacccacttggaatctattg

SEQ ID NO: 56904 - DNA, 277 bp, Glycine max
  Clone ID: 700678718H1
ctcactcactcacaactcagtgaaagagaatccgaggcgaagagaagagaaaaattaagatggaggggaaggagcaggatgtgtcgctgggagcgaacaagttcccggagagacagccgattgggacggcggcgcagagccaagacgacggcaaggactaccaggagccggcgccggcgccactggttgacccgacggagtttacgtcatggtccttacagagcagggatagcagagtttgtggccacttttctgtttctatacatcactgtcttaa

SEQ ID NO: 56905 - DNA, 274 bp, Glycine max
  Clone ID: 700678719H1
ctccattgtctttgaacactcatcaccatggccaagcttgttctttccctttgtttccttcttttcagtggctgcttcgctctgagagagcaggcacagcaaaatgagtgccagatccaaaagctgaatgccctcaaaccggataaccgtatagagtcggaaggtgggttcattgagacctggaacaccaacaacaagccattccagtgtgccggtgttgccctctctcgctgcacccttaaccgcaatgcccttcgtagaccttcctacacca

SEQ ID NO: 56906 - DNA, 277 bp, Glycine max
  Clone ID: 700678720H1
actcgagccgattcggctcgagatagcatctcctttaccaccatcctagatatcagagaactttgcagctctcttaggtacttaaaaaacaccacgcaaacagcaagatggccacttccgacagtaacatgctactaaattatgttccagtttatgtgatgctcccactcggagttgtcaatgttgacaatgtttttgaagacccagatggccttaaagaacagctcttgcagcttcgagctgcgggtgttgacggggttatggttgatgtgtggtg

SEQ ID NO: 56907 - DNA, 271 bp, Glycine max
  Clone ID: 700678721H1
ctcgagccgattcggctcgagagcgaagagaatggctcccaagggtttaatctttttggctgtgttatgcttctcagcactgtcactgagtcgttgtcttgcggaggataatggacttgttatgaacttctacaaggaatcatgccctcaggctgaagacatcatcaaagaacaagtcaagcttctctacaagcgccacaagaacactgctttctcctggctcagaaacatcttccatgactgtgctgttcagagttgtgatgcttcactg

SEQ ID NO: 56908 - DNA, 289 bp, Glycine max
  Clone ID: 700678722H1
ctcgagccgaatcggctcgagattggtccttaaacactcatcagtcatcaccatggccaagctagttttttccctttgttttctgcttttcagtggctgctgcttcgctttcagttccagagagcagcctcagcaaaacgagtgccagatccaaaaactcaatgccctcaaaccggataaccgtatagagtcagaaggagggctcattgagacatggaaccctaacaacaagccattccagtgtgccggtgttgccctctctcgctgcaccctcaaccgcaacgccctt

SEQ ID NO: 56909 - DNA, 269 bp, Glycine max
  Clone ID: 700678723H1
gacccctctacaagcttgggattagagaccttccagtccttctatattgggggaggagccaattcgcactcggtgctttctggattcgaacctgccatccttgaaactgcatttaatgaatcaagaacggtggtagaggaaatcttctccaaggaactagatgggccaattatgttcgtggatgattctcatgcacctagcttatggactaaattccttcaactgaagaaggatgacaaagagcaacagctgaagataatgatgcaaga

SEQ ID NO: 56910 - DNA, 265 bp, Glycine max
  Clone ID: 700678724H1
cagagtttttgtcaattttctattgaccttctcggtggaggaattttagtggacaaaactggagattggatcacacttatacaaaattctccaattagtaacttgttgagagttgctgcttggaagaaaggctgtttaatggttaagattgtgatgtctgggaatgcagcagtcaaaaggagtgattgggcctcattggtacaagtgtttttaacaaacagcaacagtacagagcattttgatgcatgtaagtggacaaaatcgg

SEQ ID NO: 56911 - DNA, 233 bp, Glycine max
  Clone ID: 700678725H1
caattccttcacttgcagcactgtagcatcatcatcttcattgcaaaaccctagacttcaccttcaaccatgaccacacaagtaccacaacacagtgtccaagtccacactacaacacgcctaaacgaagctggcgtcgtccaccccggagcccgtttcgaaccgaagcgttatgaagcaggcgtctaagcgccatccatataccattccgagagaggtccaacgaattccca

SEQ ID NO: 56912 - DNA, 273 bp, Glycine max
  Clone ID: 700678726H1
cgaaggaacagattcgggcactgagcaaacgtgccaaatctagttcaaggaaaaccatttcttctgaagataaaccttttaacttgagaagccgcgaccccatctactccaacaagcttggcaagttctttgagatcaccccagagaaaaacccccagcttcgggacttggatatcttcctcagtattgtggatatgaacgagggagctcttcttctaccacacttcaattcaaaggcgatagtgatactggtaattaatgaaggagatgcaa

SEQ ID NO: 56913 - DNA, 269 bp, Glycine max
  Clone ID: 700678727H1
cgttagcggtgtgggacttgttgacatggcttcttctacactcgctctgactctcagcctctccaccaccaccaccacctccaccacctcctactcctatcaacaccggtttccatgtcctagaataaagttattctcttccaagcaccgctccttctccgtctcagcttctgcttccacctcaaattcgcttcaggctctcatattcgactgcgatggcgtgatcctcgagtctgagcacctgcatcgccaggcctacaacgatgcct

SEQ ID NO: 56914 - DNA, 269 bp, Glycine max
  Clone ID: 700678728H1
aaaatcacaaatcacaaacataatgtgtagatcaattcatgcacccctcttgcttgttcttatgtgtttgatgaatggatcgaattttgcatatgatccttttgaatcttcccttagttttgaacctgaaccacatgtagacatcaacgtactctttgtttccttttacaatggtatggcccctaacaatccaaatgtgaacttgttctacaataaccaaaaagatggggtttatttgtcaccaggaaaaggtttctctaaattggaca

SEQ ID NO: 56915 - DNA, 259 bp, Glycine max
  Clone ID: 700678730H1
caaattttaataaaccgcgatcacaggttgccgcaccttaaaaccggaaacaaaagcaatcgttacttgatttcaagaatttctcaattgcttcctacttctttgtgtacgatttcttaaggagaaagaaaatcactctctgtgctggtcacagacttcgtcaatcattttcttgtccactcctagtttatttactgaacactctcctatatgatataggacttcgtgtcagatttagactaattctgtttcattctca

SEQ ID NO: 56916 - DNA, 266 bp, Glycine max
  Clone ID: 700678731H1
ggagagggaacctcagcaacccggtgagaaggaggaagacgaagatgagcaaccacgtccaatcccattcccacgcccacaacctcgtcaagaagaagagcacgagcagagagaggaacaggaatggcctcgcaaggaggaaaaacgcggagaaaagggaagtgaagaggaagatgaggatgaggatgaggaacaagatgaacgtcaattcccattcccacgcgcacctcatcagaaggaagagcgaaagcaagaggaagatgagg

SEQ ID NO: 56917 - DNA, 274 bp, Glycine max
  Clone ID: 700678732H1
gtataccttaataaataatttaagatactatgatgagagcacggttcccattactgttgctgggacttgttttcctggcttcagtttctgtctcatttggcattgcttactgggaaaaagagaaccccaaacacaacaagtgtctccagagttgcaatagcgagagagactcgtacaggaaccaagcatgccacgctcgttgcaacctccttaaggtggagatcagaagaatgtgaagaaggtgaaattccacgaccacgaccacgaccacaac

SEQ ID NO: 56918 - DNA, 276 bp, Glycine max
  Clone ID: 700678733H1
ggaaaaacgcaagataaatagaggaagatcgatcgagatctccctcgcgtttgtctcagttgaagaaattaaaaagcagaactagagtaactcaacggtctcagaattttcagggttttcagtacttccatattttttcttccggatttgagttgggagaagatcgaagaggtttctagttgcttcaattgttcctctgggtggtggagacttgttatatttttaaaatattgacaattcgaaatgccaaaggagagaagggatagatctttgtca

SEQ ID NO: 56919 - DNA, 272 bp, Glycine max
  Clone ID: 700678734H1
atctggttaccctaccattcaatggtttcctaagggatctctagagcctaaaaagtatgaaggtgcacttactgcagaagcccttgcggcgtttgtgaacattgaagcaggtacaaatgtgaagatagcttctgttccatccagtgtggtagttctctctccagataactttgatgaggttgtcttggatgaaacaaaagatgttctggtggaattctatgcaccatggtgcggtcattgcaaggcccttgcccctatttatgagaaggttg

SEQ ID NO: 56920 - DNA, 276 bp, Glycine max
  Clone ID: 700678735H1
gtcgcgttggaattggagggagaagagaagaggattattagcacaaaagcagaagcagaatcgcgtttggatggaagcggtggcggaggggctatggggactcgcggagtaccacgagaagagaggggaaatagggaaagcagtgaagtgcctcgaagccatatgccaaagcgacgcgtcgttttgccctatcgtcgaggtcaagactcgtcttcgcatcgccacgcttctcctccagcattctcacaacgtcaaccacgccaagtcacacctcga

SEQ ID NO: 56921 - DNA, 274 bp, Glycine max
  Clone ID: 700678736H1
tgggaaccaagagcaagagtttctaaaatatcagcagcagcagcaaggaggttcccaaagccagaaaggaaagcaacaagaagaagaaaacgaaggaagcaacatattgagtggcttcgcccctgaattcttgaaagaagcgttcggcgtgaacatgcagatagtgagaaacctacaaggtgagaacgaagaggaggatagtggagccattgtgacagtgaaaggaggtctaagagtcacagctccagccatgaggaagccacagcaagaagaa

SEQ ID NO: 56922 - DNA, 265 bp, Glycine max
  Clone ID: 700678738H1
ctatggccaagctagttttgtcgctattgttttctgcttatcagtagctgctgcttcgctttcagatccagagagtagcctacagtcaaacgagtgccagatctacaaactcaatgacctcaaaccgtataaccgtatagagtcagaaggacggctcattgagacatggaacgctaactacaagccattccagtgtgccgttgatgcactatctcgctgcacgctcaaccgcttcgcacttcgtagacgttcttacaggaatggt

SEQ ID NO: 56923 - DNA, 271 bp, Glycine max
  Clone ID: 700678739H1
aagcaggtgagtgagtgagtgagcaagagtgaagagcgaagagaatggctcccaagggtttaatctttttggctgtgttatgcttctcagcactgtcactgagtcgttgtcttgcggaggataatggacttgttatgaacttctacaaggaatcatgccctcaggctgaagacatcatcaaagaacaagtcaagcttctctacaagcgccacaagaacactgctttctcctggctcagaaacatcttccatgactgtgctgttcagagttg

SEQ ID NO: 56924 - DNA, 271 bp, Glycine max
  Clone ID: 700678740H1
aaaatggagacccacaaaaatggagaaccaacaaccggcacctatctccgtgacactgctacatctgctatccaaaacttcgctcccatcaacaaaatccaccaacatctctgcgcgtttcacttttactcatatgacatgagccggcaagtggaggcacaccatttttgcgcgcaccagaacgaggagatgaggcagtgccttatctacgacagccccgagaagaaagccaggctcatagggctggaatacatcatctccgaaaaccttt

SEQ ID NO: 56925 - DNA, 270 bp, Glycine max
  Clone ID: 700678741H1
atgctcctgattcaaatgataatattgatctactgttgagcattgatttgttgggtttacaaggagcaggtaaagcttttccaaacaagattgtttttgatgataagcttgtgttggctaacacacaagaattctttgatggaaattttccagtggattcttggttaccaatttttgtgaattgtctctatcctgtaagtcaattaccttcagaagctgtcgttgtaaatgttacatgtggtagtggacgtggtggtttacacaccactg

SEQ ID NO: 56926 - DNA, 268 bp, Glycine max
  Clone ID: 700678742H1
attggtacaagtctttttaacaaacagcaacagtacagagcattttgatgcttgtaagtggacaaaatcggaaccacattcctgggaattgatcttcccaatagaggtatgtggtcctaataatggttttgaaatgtggagttctgagtgggcaaatcaaacttcatggcatttgagtttccttattgacaatcccaaacagtctacagtttttgatattctcttgggaatttctcaagattttgaaattgctggtaatactcttatg

SEQ ID NO: 56927 - DNA, 266 bp, Glycine max
  Clone ID: 700678743H1
cggggcgaagcagaggaaactctggtggaggcccgcagcgatactgacgtgcaaatcgttcgtctgacttgggtataggggcgaaagactaatcgaaccgtctagtagctggttccctccgaagtttccctcaggatagctggagcccgcgggcgagttctatcgggtaaagccaatgattagaggcatcgggggcgcaacgccctcgacctattctcaaactttaaataggtaggacggtgcggctgctctgttgagccgcgcca

SEQ ID NO: 56928 - DNA, 271 bp, Glycine max
  Clone ID: 700678746H1
ggtgtcccttcagaagatatttcaacagcatcttttgctttgaatggtcccaattactgggaagccagtgcctccaacaacagcaatggaagcaacaacacaagtgatggcagcagagagttgacaactacaagtagcaagaacagtgtactctcttcttggggattgacagaagaaacaaagtggtctgagtacctccaaaacccaatgctaatgctggcagctcctgaatcattgtgcaaccaaattaggccagccacacatttggtac

SEQ ID NO: 56929 - DNA, 269 bp, Glycine max
  Clone ID: 700678747H1
attcctttgatattaaatctcgctctagattggaaaaagtttcctctacaaaagcacaatttgttagtggaaaaaccttcaaatatgatataattggtgctggttcacattcttcaggagattttcctgaaaaggaagatcaagaaaaacccaaaaagattgataccagattgagacaaagaatagatcctcaatacaatgaggttcaggctcagatggaaacaaatttgtttaaattgtctcttgatgatgttgaaactcctaaaggt

SEQ ID NO: 56930 - DNA, 269 bp, Glycine max
  Clone ID: 700678748H1
attttgatgcccaatgctgaacaaccattccgtctgaactgggcaacatttagcacaggagacaagggttcagataatgttcctgacctttctatttttgtaggagatttagctgcagatgttacagatagtttgttgcatgaaacttttgctagtgtatatccttctgttaaagctgcaaaagttgtttttgatgccaatactggccgttcaaagggctatggtttcgtcaggtttggagatgacaatgagagaacccaggccatgac

SEQ ID NO: 56931 - DNA, 275 bp, Glycine max
  Clone ID: 700678749H1
aaaatcacaaatcacaaacataatgtgtagatcaattcatgcacccctcttgcttgttcttatgtgtttgatgaatggatcgaattttgcatatgatccttttgaatcttcccttagttttgaacctgaaccacatgtagacatcaacgtactctttgtttccttttacaatggtatggcccctaacaatccaaatgtgaacttgttctacaataaccaaaaagatggggtttatttgtcaccaggaaaaggtttctctaaattggacaatctta

SEQ ID NO: 56932 - DNA, 272 bp, Glycine max
  Clone ID: 700678751H1
gttcaatatcctagtacaccgtattaaagaatttgagatatactatgatgagagcgcggttcccattactgttgctgggagttgttttcctggcatcagtttctgtctcatttggcattgcgtattgggaaaagcagaaccccagtcacaacaagtgcctccgaagttgcaatagcgagaaagactcctacaggaaccaagcatgccacgctcgttgcaacctccttaaggtggaggaagaagaagaatgcgaagaaggtcaaattccacgg

SEQ ID NO: 56933 - DNA, 270 bp, Glycine max
  Clone ID: 700678752H1
ctcactcactcacaactcagtgaaagagaatccgaggcgaagagaagagaaaaattaagatggaggggaaagagcaggatgtgtcgctgggagcgaacaagttcccggagagacagccgattgggacggcggcgcagagccaagacgacggcaatgactaccatgagccggcgccggcgccactggttgacccgacggagtttacgtcatggtccttacagcgcagggatagcagagtttgtcgacacttttctgattctatacatcact

SEQ ID NO: 56934 - DNA, 267 bp, Glycine max
  Clone ID: 700678753H1
attctcctccgttccctagaagcttccatagactcctcgacctcgtaagtcctccttcctcaaaatcgaagtccccgattcctgttctctgctgcaactcaaagacactgttcctcgcaccatctcttcttcttcctcttctctacatctttccctcaacagaaaggataaaattcacgccccttcgcaggaagagcccctcaactctctcggtgtcgccatcggcaacctcatcttctactctgttaaccctaccgtcttcaccct

SEQ ID NO: 56935 - DNA, 266 bp, Glycine max
  Clone ID: 700678754H1
aacttattaacactttccttagttcaatatggggaagcccttcttcactctctctctttcttccctttgcttgctactcttgtcgagtgcatgctttgctattacctccagcaagttcaacgagtgccaactcaacgacctcaacgcgttggaacccgaccagcgcgttgagtccgaaggtggtcttattgaaacatggaactctcaacaccctgagctgcaatgcgccggtgtcactgtcttcaaacgcaccctcaaccgcaacg

SEQ ID NO: 56936 - DNA, 269 bp, Glycine max
  Clone ID: 700678755H1
gggttttgctatggagaagctagaagcagagaacgttctggtccttccctctgagcaacccaacaacaataggccaaagccaaaaccatagcgtttcgtgaaaaaccaaatcccagactcaatccttaacaaccctcttctgagcgccgcaatctctgtgctcccttccaactagaacttcgaggtccacaagtgcgtctagcgcgtgctctccacgggagcaaaacgcgtggctctccagttcccgtgaggtctcctcatgtactctc

SEQ ID NO: 56937 - DNA, 268 bp, Glycine max
  Clone ID: 700678756H1
aaagaaccaaagggctgctgctaagaaggctgctggtggagatggagatgaggaggacgaagattaaattattaatggctactgatatttaggccttgcggttgttattttttctatattatctgtgttggtagacattttagatttttgaaatggtctgacttgttataattttgccatccttgtttcttgttttgaggtaaagctgtgcctgagatatcatggttttgaactgttctttctaaactattcaagttttgttccaatg

SEQ ID NO: 56938 - DNA, 263 bp, Glycine max
  Clone ID: 700678759H1
caagcttttctttttcttgttctttaattttctgattttagcaaattaaaatagtagtgttattggtaggttttggcaaagatgttttcagttccaggggtgtcgggaatcctgaacagaggaggagggcataagataaaagggacagtggtgttgatgaggaagaatgtgttggacttcaacagcgtggctgatcttactaaaggaaatgttgggggactcataggcaccggcctcaacgttgttggctcaacacttgataa

SEQ ID NO: 56939 - DNA, 120 bp, Glycine max
  Clone ID: 700678760H1
agaaaacaaaggctttagcttgccttttgttcactgtaaaataataatgtaagtactctctataatgagtcacgaaacttttgcgggaataaaaggagaaattccaatgagttttctgtc

SEQ ID NO: 56940 - DNA, 264 bp, Glycine max
  Clone ID: 700678762H1
gtataccttaataaataatttaagatactatgatgagagcacggttcccattactgttgctgggacttgttttcctggcttcagtttctgtctcatttggcattgcttactgggaaaaagagaaccccaaacacaacaagtgtctccagagttgcaatagcgagagagactcgtacaggaaccaagcatgccacgctcgttgcaacctccttaaggtggagaaagaagaatgtgaagaaggtgaaattccacgaccacgaccac

SEQ ID NO: 56941 - DNA, 271 bp, Glycine max
  Clone ID: 700678763H1
ttcgaatcctactatgttgatgctcagcctcagcagaaggaggaggggagtaagggaagaaagggtccttttccttcaatcttaggtgctctctactgaataactacgtaaatgtatgctgtaagagctcatcgtgagcgtggaatgtatctgcccatgtaactataaaaacttgagctccacctatcttctatctactacgaataaataaatccagcatatgatgcttgtgttttgtaaaaaaaaaaaaaaaaaacaaaaacaaaataaa

SEQ ID NO: 56942 - DNA, 270 bp, Glycine max
  Clone ID: 700678764H1
actgaaagcactcagtagggtttgcggtttcagagtttgtgacgcacgcatccatggccaccaccaccaacgccgccgcagccccgccgcgccagctctcccagaaggaagccgacatccagatgatgttagccgccgacgtccacctcggcaccaaaaactgcgacttccaaatggaacgttacatcttcaagcgccgcaacgacgggatttacattattaaccttgggaagacatgggagaagcttcagttagcagctagggttattg

SEQ ID NO: 56943 - DNA, 274 bp, Glycine max
  Clone ID: 700678765H1
agacagtcttccatagccccccatctatgtagagcaccatcttctttgctctctttctcttgtgtgccttcaccacctcatacctaccttcagccatcgctgatttcgtgctcgataatgaaggtaaccctcttgaaaatggtggcacatattatatcttgtcagacataacagcatttggtggaataacagcagccccaacgggacatgaaagatgccctctcactgtggtgcaatctcgcaatgagctcgacaaagggattggaacaatcat

SEQ ID NO: 56944 - DNA, 145 bp, Glycine max
  Clone ID: 700678766H1
cttcactctcggaagtcttttagacttattgctgaagatgattcctcattagccaaagtaaaatggtattctggtagtaaaccagtaaaaaaaatttcaaacaaaatagtgtaattttactttataacagaggaaagtctcactt

SEQ ID NO: 56945 - DNA, 81 bp, Glycine max
  Clone ID: 700678767H1
gatgatcatgagcggcgtcatgatagcagtatctgtaagccgagccctaatacgcaattcctacatcgacgtgtacgatgt

SEQ ID NO: 56946 - DNA, 271 bp, Glycine max
  Clone ID: 700678769H1
actcgagccgaatcggctcgagcacaggcagtattgtccaagttgacccagaatctgttgcacaattgaatgtggtggtacatgaaggtgactttaatgaggaagtagacgatgattggacaagagagcactttgaaagccacgaagtaaaggaacgtgaggggaaaaggccacttctaactggagatttgcaggttagcctaaaggaaggagtaggaacctttggtgatcttactttcacggacaattctagctggataagaagcagaaa

SEQ ID NO: 56947 - DNA, 269 bp, Glycine max
  Clone ID: 700678770H1
caattccttcacttgcagcactgttgcatcatcatcttcattgcaaaaccctaaacttcaccttcaaccatgaccacacaagtaccaccacacagtgtccaagtccacacaacaacacaccgctacgaagctggcgtcgtcccccccggagcccgtttcgaaccgccgcgttatgaagccggcgtcaaagcgccctccatttaccattccgagagaggtccaacgacttcccaggtcctcgccgtcctcgacggcctcccggtcggtgg

SEQ ID NO: 56948 - DNA, 267 bp, Glycine max
  Clone ID: 700678771H1
cttcaattcaaaggccatagtggtactagtgattaatgaaggagacagcaaacattgaacttgttggcattaaagaacaacaacagaggcagcaacaggaagagcaacctttggaagtgcggaaatatagagctgaattgtctgaacaagatatatttgtaatcccagcaggttatccagttgtggtcaacgctacctcagatctgaatttctttgcttttggtatcaatgccgagaacaaccagaggaacttccttgcaggttcga

SEQ ID NO: 56949 - DNA, 255 bp, Glycine max
  Clone ID: 700678772H1
aaacaattcaattcaatctgcctcgatcatggagaggaaaacatttgggtttttgttcttgctcctccttgtcttagcttctgatgtgacggtgaagagagcagatgcgaaagattgcttgacaaggaggcacgggttccatggtagatgcttattcgacaggcaatgtgcacatgtgtgcaggagcgatggtttcatctgtggtcagtgccgaggccctcttcgcaaatgcttttgcagcaggccatgttgatc

SEQ ID NO: 56950 - DNA, 80 bp, Glycine max
  Clone ID: 700678774H1
cgaactgcttcattgcataattgcagctgagctcaacccatctaccttcagagtcgcggaaacatggcatcacttcctgc

SEQ ID NO: 56951 - DNA, 260 bp, Glycine max
  Clone ID: 700678775H1
cttccatagccccccaaaaatgaagagcaccatcttctttgctctctttctcttttgtgccttcaccacctcatacctaccttcagccatcgctgatttcgtgctcgataatgaaggtaaccctcttgaaaatggtggcacatattatatcttgtcagacataacagcatttggtggaataagagcagccccaacgggaaatgaaagatgccctctcactgtggtgcaatctcgcaatgagctcgacaaagggattggaa

SEQ ID NO: 56952 - DNA, 265 bp, Glycine max
  Clone ID: 700678776H1
actcgagccgattcggctcgaggtgaagagcgaagagaatggctcacaagggtttaatctttactggctgtgttatgcttctcagcactgtcactgagtcgttgtcttgcggaggataatggacttgttatgaacttctacaaggaatcatgccctcaggctgaagacatcatcaaagaacaagtcaagcttctctacaagcgccacaagaacactgctttctcctggctcagaaacatcttccatgactgtgctgttcagagtt

SEQ ID NO: 56953 - DNA, 262 bp, Glycine max
  Clone ID: 700678777H1
tgatacaccgcgatcacaggttgctgaaccttaaaaccggaaacattagcaatcgttacttgatttcaagaatctctcaatttcttcctacttctttgtgtacgatttcttaagggatagaaaatcactctctgtgctggtcacagacttcgtgaatcacttactgttccactcttagtatatgatatgaacactctcctatatgatataggacttcgtgtcagatttaaacttcttctgtctcttgctcagttctctgtac

SEQ ID NO: 56954 - DNA, 259 bp, Glycine max
  Clone ID: 700678778H1
ttctcgagccgaatcggctcgagctgtattctgaggttccatctcctcctatttccctctcccatccaagttgacctttcattccactttttcgaatcccaagactcaggcctggtaaccttttgaggttgttgggtgcagaagggaacgatggctgcttcagaggagaatagtgcactgttcccaatattcattttgacgataatggccattcctattgtgccatatacaataacaaagttgtgccgtgctgccagta

SEQ ID NO: 56955 - DNA, 265 bp, Glycine max
  Clone ID: 700678779H1
cttgtatagtgaacttaacaaaattttccaagtgatgtattctaggattcagagctaggatataaggcagacatattcttgcagtacagtagtgtttttatcatcctttttgcttcataattgactgcacctgaggtagacaaatatgtgcagtattctgtaaatcagaatcaaatttactggggtctttggccttggattgtgtttggagagtatcttgtggacgactgagaattttttcttcttgattatcaaataataataa

SEQ ID NO: 56956 - DNA, 270 bp, Glycine max
  Clone ID: 700678781H1
caatatcctagtataccttaataaataatttaagatactatgatgagagcacggttcccattactgttgctgggacttgttttcctggcttcagtttctgtctcatttggcattgcttactgggaaaaagagaaccccaaacacaacaagtgtctccagagttgcaatagcgagagagactcgtacaggaaccaagcatgccacgctcgttgcaacctccttaaggtggagaaagaagaatgtgaagaaggtgaaattccacgaccacga

SEQ ID NO: 56957 - DNA, 269 bp, Glycine max
  Clone ID: 700678782H1
gagctccaagtgggccatttttggtaagcagaactagcgatgcgggatgaaccggaagctgggttacggtgcccaactgcgcgctaacctagaccccacaaagggtgttggtcgattaagacagcaggacggtggtcatggaagtcgaaatccgctaaggagtgtgtaacaactcacctgccgaatcaactagccccgaaaatggatggcgctaaagcgcgcgacctatacccggccgtcggggcaaggaccaagccccgatgagtagg

SEQ ID NO: 56958 - DNA, 265 bp, Glycine max
  Clone ID: 700678784H1
aagagaagagatctgaaaccctaaccctaaccctaaccagaggtaatggattcagtgcctcgaagaagcagaggaggaggcgttttggaaaacctcgacaaggtcctaatgcgtcgcaactgagtctacgtcaccttcgtcatcgcaggcgccttcctcggagaacgggctgtggattacggagctcacaagatcggggagcacaataacgttgggtccaaatggcacctagatggaaaggacaagatgcaaaagctaaaaagga

SEQ ID NO: 56959 - DNA, 263 bp, Glycine max
  Clone ID: 700678785H1
cctctccttctcgcagagtgagcgagcaagcgaatatcccaatcccacaccaatggcatgctcagccacctctgcttccctcttctccgcaaacccaacacccctcttctctcccaaaccctctctctccctccaccttaaccctctccccacgcgcccttctccctccctcacgcgcccttctctctccctcacgcgcccttctcactctcgccgctccttcgttgtcaaagcctcctccagcgagcttccgctggttggta

SEQ ID NO: 56960 - DNA, 262 bp, Glycine max
  Clone ID: 700678786H1
caccccactaacaattccttcacttgcagcactgttgcatcatcatcttcattgcaaaaccctaaacttcaccttcaaccatgaccacacaagtaccaccacacagtgtccaagtccacacaacaacacacctctacgaagctggcgtcgtcccccccggagcccgtttcgaaccgccgcgttatgaagccggcgtcaaagcgccctccatttaccattccgagagaggtccaacgacttcccaggtcctcgccgttctcgc

SEQ ID NO: 56961 - DNA, 262 bp, Glycine max
  Clone ID: 700678787H1
gtctgtgactcacctcttcggttccaagtcgccacccaagctttgcgtctttactctcagatgctctgctggcaatggagaaaggccttggaaaacttcaggcgctagacttatgttagaagatggatcaatctggaaagcaaagtcatttggtgcttcaggaacccaagttggagaacatgtttttaatacatcattgactgggtatcaagaaattctaacagatcctagttatgctggtcagtttgtactgatgacaaat

SEQ ID NO: 56962 - DNA, 265 bp, Glycine max
  Clone ID: 700678788H1
gggtttctctctccgctagggttcccaatttctctcccccttcccaccaaaaacatggccaccgaaaccctagaagacaccaagcctcccctccaggacgacgaccgttcgaaatcggagattcccgagaaagacgcttcctcggacgacgccgcggcaaaatcccgggacgcgaatgccggcgacaaagacggagcatctgacaatcaggaagtagaagagaaagacgccgctgaggagaagaaagaagagatcgacgaagacg

SEQ ID NO: 56963 - DNA, 259 bp, Glycine max
  Clone ID: 700678789H1
attttgatgcccaatgctgaacaaccattccgtctgaactgggcaacatttagcacaggagacaagggttcagataatgttcctgacctttctatttttgtaggagatttagctgcagatgttacagatagtttgttgcatgaaacttttgctagtgtatatccttctgttaaagtcgcaaaagttgtttttgatgccaatactggccgttcaaagggctatggtttcgtcaggtttggagatgacaatgagagaaccc

SEQ ID NO: 56964 - DNA, 261 bp, Glycine max
  Clone ID: 700678790H1
tcaatatcctagtacaccgtattaaagaatttaagatatactatgatgagagcgcggttcccattactgttgctgggagttgttttcctggcatcagtttctgtctcatttggcattgcgtattgggaaaagcagaaccccagtcacaacaagtgcctccgaagttgcaatagcgagaaagactcctacaggaaccaagcatgccacgctcgttgcaacctccttaaggtggaggaagaagaagaatgcgaagaaggtcaa

SEQ ID NO: 56965 - DNA, 259 bp, Glycine max
  Clone ID: 700678791H1
taagcttcctacagaagtaattagcacaattatgcccttaccggtggtcaaagaactctttcgtacagatggtgaacaagtcctcaagtttccaccacctcatgtcattcaagtgagtaagtctgcatggatgaccgatgaagaatttgcaagagagatggttgcgggtgtaaatccatgcgtaattcgtggtcttcaagagtttcctccaaaaagcaatctggatcctacaatctatggtgagcaaaccagtaagata

SEQ ID NO: 56966 - DNA, 259 bp, Glycine max
  Clone ID: 700678792H1
gcagttcaaaagtggacttcatctgcaatgaatgagttacgtgtctttagtgaagcaatgaaagctctgcttagtacctcttctactgatggagctgcaattttgagagtcttgcaagccttgagttcccttgtcaccttactgacggagaaagagaatgatagaggtactcctgctctttctgaggtttgggaaatcaattcagcattagaacccttgtggcatgagcttaggtgttgcataagcaagatagaatcct

SEQ ID NO: 56967 - DNA, 260 bp, Glycine max
  Clone ID: 700678793H1
caaaatttttgacaaacctaagacgcgctgcttcactattctccctatggagtttaatcttgtggttcgtcagaagtttttaaattttgtgaggttcattatgaagaaaagggacaagcttagttgtcaagttggaatcaacccatactccatggaatggactggtttggccaatagattactgagtaagggcaacgatattctgtgttgcgattatgctagttttgatggtttgattaccaagcaagttatgagcaaaa

SEQ ID NO: 56968 - DNA, 257 bp, Glycine max
  Clone ID: 700678794H1
aatgttcttcatgaatctgtcaaggagaagaaaggcaacagtgaagaagtcatcaggatccttactacaagaagcaaaactcaacttgtggcaactttcaaccgctacagagatgaacatggaatttccatcagtaagaaattgttggatcaaacatctgatgacttccacaaggtgttgcacactgctattcgctgcatcaatgaccataagaagtactatgagaaggttttgcgcaatgcagtcaagaagtttgg

SEQ ID NO: 56969 - DNA, 253 bp, Glycine max
  Clone ID: 700678795H1
ctttgattggtggagatgacttcaatagtggtcagaccaaaatgaaatctgtgttggttgatttccttgtgggggctggtatcaagccaacatctatagtcagttacaaccatctgggaaacaatgatggtatgaatctttcggctccacaaactttccgttcctaggaaatctccaagatcaacgttgttgatgatatggtcaacagcaatgccatcctctatgagcctggtgaacatccagaccatgttgt

SEQ ID NO: 56970 - DNA, 253 bp, Glycine max
  Clone ID: 700678801H1
gtgaagaataatcttgtgaatcgcgtaactctctcaactcaactggatccgggtcacaaccgtcttgaaattaagaccaactgggtcattgatcacaatctcaattggtagcacaacatcaagggaaagtgaaaaagaaaggtatatttgatcagggatatggcaactcgaagatatgagtttggaaggatgaatgaggctagccacccagactccatcagagctgccttggctgaattcctctccacttgca

SEQ ID NO: 56971 - DNA, 253 bp, Glycine max
  Clone ID: 700678802H1
cactaaccagcttgatcaaacccctagggtattttaccttgctgggaacccagatatagagtacccagagaccatgcaacaacaacaacagcagagaagtcatggtggaagcaagcaggggcaacaccagcaggaggaagacgaagaaggtggcagcgtgctcagtggcttcagcacacacttcttggcacaatccttcagcaccaatcgagggcatagctgataaacttcagtctccagacgacgaaaggaa

SEQ ID NO: 56972 - DNA, 247 bp, Glycine max
  Clone ID: 700678803H1
tgacttgtaaaaatgcacaactcatctgcacctcctcacacacacacccccctcctccgtttcccgtttcccgtttctgtctaccctgtataaaaaagtactaacttttctttcttccgctttctgctcagcgattcattctcagagtcacacacactttcttcatcttcatacatcactgtctcattatcttctcttccttgttctggtggcgcttttcattttcagatgacaacaactgggtgaa

SEQ ID NO: 56973 - DNA, 247 bp, Glycine max
  Clone ID: 700678804H1
gttcaatatcctagtataccttaataaataatttaagatactatgatgagagcacggttcccattactgttgctgggacttgttttcctggcttcagtttctgtctcatttggcattgcttactgggaaaaagagaaccccaaacacaacaagtgtctccagagttgcaatagcgagagagactcgtacaggaaccaagcatgccacgctcgttgcaacctccttaaggtggagaaagaagaatgtg

SEQ ID NO: 56974 - DNA, 247 bp, Glycine max
  Clone ID: 700678805H1
tatatatatatatatataaggatcaaattatactcacttattcctaagatttcctgagattgcacaaaatattcctacttttataacgattacagtaaccccttacagattacatggtgtgatatatttcttgagtaacatggagttcagtataatctactcataaattaaaccaatattcttgaagtgatgtgatccagcaatgtgtcaacttttaaatatctatatatgtgcagcaattcaaatt

SEQ ID NO: 56975 - DNA, 245 bp, Glycine max
  Clone ID: 700678806H1
gttacagtccaaattgtcacttctgagaaaagctattggcatgtgtacgatcctgataaatttcaaatgtttgataacagtgaaatcgggatgtatacgaatccagctttggaggtcatcccacattctgcttgggaccttttctgctgggacagtgagaaaaccttgccaaataagtattctggtgaattgctttcctgtaaattggacactgatacgggacaatattatccagaatgggctcc

SEQ ID NO: 56976 - DNA, 247 bp, Glycine max
  Clone ID: 700678807H1
cgccgcagccaaagacgcagccgttatgtcattccttcaaaaaatagccgaacaacaaaacctcggtcaagtatcgaccaacatcaacctcgtacaacaaccacaacctcaattacaagcgcagccaccactacaacaacaagtgacacaacctagtattgcagcagcacaacctcccgtacaacagccaccgcccgtggttgttacacagcccgtcctgctgccagtggtgtcacaagtgacgaat

SEQ ID NO: 56977 - DNA, 244 bp, Glycine max
  Clone ID: 700678808H1
atctggttaccctaccattcaatggtttcctaagggatctctagagcctaaaaagtatgaaggtgcacttactgcagaagcccttgcggcgtttgtgaacattacaagcaggtacaaatgtgaagatagcttctgttccatccagtgtggtagttctctctccagataactttgatgaggttgtcttggatgaaacaaaagatgttctggtggaattctatgcaccatggtgcggtcattgcaa

SEQ ID NO: 56978 - DNA, 243 bp, Glycine max
  Clone ID: 700678809H1
cttgtgttggctaacacacaagaattctttgatggaaattttccagtggattcttggttaccaatttttgtgaattgtctacatcctgtaagtcaattaccttcagaagctgtcgttgtaaatgttacatgtggtagtggacgtggtggtttacccaccactgcttggattagttctgcagttaacaatcgctcctcagacatcaacaaaaggattcgcacagcacttgggaaaggtaagaaa

SEQ ID NO: 56979 - DNA, 243 bp, Glycine max
  Clone ID: 700678810H1
aaactgaggagggaaagaaaaacattgaggcgcagctggagaaactgaagaagtatgctactgtggttcgtgttttggctcacactcagatcaggaaaatgaaagggttgaagcagaagaaagcccatatcatggaaattcaggttaatggtggtagtattgcacaaaaggtggactttgcatacagtttctttgagaaacaggttcctattgatgcagtgttccagaaggatgagatgattg

SEQ ID NO: 56980 - DNA, 242 bp, Glycine max
  Clone ID: 700678811H1
atcctagtacaccgtattaaagaatttaagatatactatgatgagagcgcggttcccattactgttgctgggagttgttttcctggcatcagtttctgtctcatttggcattgcgtattgggaaaagcagaaccccagtcacaacaagtgcctccgaagttgcaatagcgagaaagactcctacaggaaccaagcatgccacgctcgttgcaacctccttaaggtggaggaagaagaagaat

SEQ ID NO: 56981 - DNA, 244 bp, Glycine max
  Clone ID: 700678812H1
ctagtataccttaataaataatttaagatactatgatgagagcacggttcccattactgttgctgggacttgttttcctggcttcagtttctgtctcatttggcattgcttactgggaaaaagagaaccccaaacacaacaagtgtctccagagttgcaatagcgagagagactcgtacaggaaccaagcatgccacgctcgttgcaacctccttaaggtggagaaagaagaatgtgaagaagg

SEQ ID NO: 56982 - DNA, 82 bp, Glycine max
  Clone ID: 700678815H1
caacaatgtgacaatcatatgagatcaatttcacatgggcttgtttgttgtggagattttattttggataaataaaaaataa

SEQ ID NO: 56983 - DNA, 251 bp, Glycine max
  Clone ID: 700678817H1
aatctggtctgcaaaaagacagagggttaattgtggagtattttggaaggatgtcttacgttgctcataacgttaatcagccccaagagaaagatttgttggagggaaatttgtcctttgatattaaatctcgctctagattggaaaaagtttcctctacaaaagcacaatttgttagtggaaaaaccttcaaatatgacataattggtgctggttcacattcttcagaagattttcctgaaaaggaagat

SEQ ID NO: 56984 - DNA, 238 bp, Glycine max
  Clone ID: 700678818H1
ccagaacagctggtgccggagcaagccaaaagccatccctctaaattcggttttccctttcttcttcttcttcttcttattaccctaaccctaaccttagctattcgaattccactcctcttcgcagacaccatggcgacgactttggtgagctccgcgagtcggatgcttgcgatgctggactcgctctctccgacctcaacaacttagttgtttattatggtctattgtcgattct

SEQ ID NO: 56985 - DNA, 248 bp, Glycine max
  Clone ID: 700678819H1
aagcaattgatagtgaacgtctaatttcgaggttgaggactgaaacaataggattgtaaaaaactaggggaataaattcgtgaattaaattataagaggaccaaaatcaaattctgagacaaataggatcaaatttgtaattttgcctaaaattaaagaaaagtaccattttgatcaccgaaaaatagggttgacattagtttggtggtctcttaaaaaagtatgaccggcattaatttattccttga

SEQ ID NO: 56986 - DNA, 248 bp, Glycine max
  Clone ID: 700678820H1
atgtggtcgatttgaagacttctcttcccgagtgggtgaggatagggttctctgctgccacgggactcgacatacctggggaatcgcatgacgtgctttcttggtcttttgcttccaatttgccacacgctagcagtaacattgatcctttggatcttacaagctcttgtgttgcatgaggccatctaaatgtgacagatcgaaggaagaaagtgtaataagacgactctcactactcgatcgctagt

SEQ ID NO: 56987 - DNA, 246 bp, Glycine max
  Clone ID: 700678821H1
caaatcagtgctcactgagttgatacaagagatagaacctctggatgttagccacatccagaaagatgttccgccaactacaacagatgccatgaaaaggactatatctggtatgctgggcttgcttccatctgatcagtttcacgttgtcattgaacgccttgtgggaacccctttccaagttactaatttcttcaatgatgactgggtatacgctgcacaatgttgaatatagactttgtcttg

SEQ ID NO: 56988 - DNA, 244 bp, Glycine max
  Clone ID: 700678822H1
gaaattttgataaaccgcgatcacaggttgccgcaccttaaaaccggaaacaaaagcaatcgttacttgatttcaagaatctttcaatttttcctacttctttgtgcacgatttcttaagggacagataatcactctctgtgccggtcacagacttcgtgaatcattttctttaccactcttagtttatttgctgaacactctcctattttgtccgggacttcgtgtcagatttaaacttcttc

SEQ ID NO: 56989 - DNA, 240 bp, Glycine max
  Clone ID: 700678823H1
cttgaagaatgggaactctcagaaagtcctcaacatttttgtgtcaaagagaagccttatgctatccaacattcagatattgacgccatgaaagaaaatttctcaaagcttttactaggtgaagatgttacaggaggaactaagggcctcagtacagctttggcactgtctaatgccatcacaaatctatcagtgtccgtttttggtgagctgtggaaattggaaccactatctgaagaa

SEQ ID NO: 56990 - DNA, 240 bp, Glycine max
  Clone ID: 700678824H1
agatgttaaggaatggttgtggtgttggtgggaatttgagtggaagagtaaaagtgagggctgaggatgttgttgaagctgtgactcttgctgctagtaacaaggcttttgaggttgtgtattacccaagagccagtactcctgagttttgtgttaaggcttcttctgtgggggctgctatgaggattcagtggtgttccgggatgaggttcaagatggcctttgagactgaggatgcta

SEQ ID NO: 56991 - DNA, 242 bp, Glycine max
  Clone ID: 700678825H1
cttcctcacgcatttcctcgtttttttcttcccttttctctttctccggcgacgatctcagattccggccactcctctcgccggcgagcccttactcttccctcctccgtcgagccctctccgattcgaatcgttcccagcctcgcaccaccatgaatcccgaatacgattatttgttcaagcttttgctgattggagatcctggtgtaggcaagtcatgtcttctcctgaggtttgctgat

SEQ ID NO: 56992 - DNA, 243 bp, Glycine max
  Clone ID: 700678826H1
aatccaccaatttacaagccaccttcctacaatccaccaggttacaaagcaccatcttataatccaccatcttacaagtcaccttcctataatccaccagtttataaagcaccagtttacaagtcaccttcctacaatccaccaggttacaaagcaccatcttataatccaccagtttataagccaccttcctataattcacctgattacaagccaccttcctacaatgcaccagtctacaag

SEQ ID NO: 56993 - DNA, 243 bp, Glycine max
  Clone ID: 700678827H1
aaaaaccaatatggtcgcattcgcgtcctccagaggttcaaccaacgctccccacaacttcagaatctccgagactaccgcattttggagttcaactccaaacccaacaccctccttctccccaaccatgctgacgctgattacctcatcgttatccttaacgggactgccattctttccttggtgaacaacgacgacagagactcctacagacttcaatctggtgatgccctgagagtcccc

SEQ ID NO: 56994 - DNA, 240 bp, Glycine max
  Clone ID: 700678828H1
ctcgctgctgttatctacagagatgagaaggaggtacagaaatctgcattcaaacagtaccgtgtattgcgaacagctactgatttcagatacggctacaaacttgttgagaatggcaatataagagctgcactttctaccactgatgttattgagcttccaacacaagataaactaaaaaccgtgcttgacaaagtgaaagacttttttggagatgcaaaggaatcttttggaaagata

SEQ ID NO: 56995 - DNA, 244 bp, Glycine max
  Clone ID: 700678829H1
taaaattcttccaccaagttatgggtttccttgtgttgcttcttttctccctcttaggtctctcttctagttccagcatatcaactcatcgttccatattggaccttgacctaaccaagtttaccacacagaaacaggtgtcttcactgttccaactatggaagagtgagcatggacgtgtctaccataaccacgaagaagaggcaaagagacttgagattttcaagaataacttgaactatat

SEQ ID NO: 56996 - DNA, 247 bp, Glycine max
  Clone ID: 700678830H1
ctcgagccgatgattctcaattctgaggtctctaaaaagagaaccttaaccacttcagggagatgatgtggtcagtttgtaagcaaaacccatcttctgaccccatcccttgtacagtgtagatctggtttggtgtaatatcttcacataatatacttgtgagaatgaagatatcattgcagattaactcacatagtatgatagtgtgtattcctcaaaggcatgtttttttgaatccatgcattgc

SEQ ID NO: 56997 - DNA, 258 bp, Glycine max
  Clone ID: 700678832H1
ctagatttgttagcattgcagaagaaccagatactcccaacaatggaggttgtagagaaggagaagaagaagtacatcacctcagaggagctgaagggtcacaacaaggagggagatttatggatctcaattcaaggtaaggtgtacaatgtctcagattgggtgaaggagcaccctggtggtgatgttcctatctcaaaccttgctggccaggatgtcactgatgcattcatagcataccatcctggcacagcatgg

SEQ ID NO: 56998 - DNA, 249 bp, Glycine max
  Clone ID: 700678833H1
taagaaatgaagagtactatcttctttgctctctttctagtttgtgccttcaccatctcatacctgccttcagccaccgctcagttcgtgctcgacactgatgatgatcctcttcaaaacggtggcacatactatatgttgccagttatgagaggaaagggcggtggaatagaagtagattcaactggaaaagacatatgccctctcactgatgtgcaatcacccaatgagctcgataaggggattgga

SEQ ID NO: 56999 - DNA, 251 bp, Glycine max
  Clone ID: 700678834H1
tcagaagaggctcaaggtcgcagcagcaactacaagacagtcaccagaagattcgtcacttcaatgaaggagacgtactagtgattcctcctggtgttccttactggacctataacactggcgatgaaccagttgttgccatcagtcttcttgacacctccaacttcaacaatcagcttgatcaaaaccccagagtattttaccttgctgggaacccagatatagagcacccagagaccatgcaacaacag

SEQ ID NO: 57000 - DNA, 245 bp, Glycine max
  Clone ID: 700678836H1
ctcttctcacttccttgtcttcctctctctcaccctttgaaattctctcacttctattttagattctcaattcgttattgttactggttcacttggttcatattctatcccaattttggtgtctcacttattggttttccaattggcgtgattaaaaagttgattttgggagatgggtatgtgaagtttggacttgtgatttctgggtcttgaaattgaggtaagaaagttgtcaaattggagag

SEQ ID NO: 57001 - DNA, 245 bp, Glycine max
  Clone ID: 700678837H1
taaaattcttccaccaagttatgggtttccttgtgttgcttcttttctccctcttaggtctctcttctagttccagcatatcaactcatcgttccatattggaccttgacctaaccaagtttaccacacagaaacaggtgtcttcactgttccaactatggaagagtgagcatggacgtgtctaccataaccacgaagaagaggcaaagattgcagagattttcaagaataacttgaactatatc

SEQ ID NO: 57002 - DNA, 241 bp, Glycine max
  Clone ID: 700678838H1
gtttgttgttcctcactgacctcaccatggcgaccagagccaagctttctttagctatcttccttttcttacttctagccttgatttcagacctagccttgggcaaacttaaagaaaccgaggtcgaagaagatcccgagctcgtagcatgctaacaccagtgccaacagcaacggcaatacactgagagtgacaagcgaacatgcttgcaacaatgtgacagtatgaagcaagagcgaga

SEQ ID NO: 57003 - DNA, 237 bp, Glycine max
  Clone ID: 700678840H1
ctagttctagatcgcgggcggccgctcgcgatctagaactattactaacccaaattaaatatgagttaattcagtctggtctgattatgattcaatgtgacttagtctgtaaaaattcgtcaaaagttctgaaaatttggatttttataagatttgaatttcattttagagattcgaaccataattaggtttactatccgtatcagaccagcatgctttaaattgtgttgcgttgtt

SEQ ID NO: 57004 - DNA, 241 bp, Glycine max
  Clone ID: 700678841H1
ctcgcaagcaaaaagaaagaatcccaggcgaggagaaagatggaggggaaggagcaggatgtgtcgttgggagcgaacaagttccccgagagacagccgattgggacggcggcgcagagccaagacgacggcaaggactaccaggagccggcgccggcgccgctggttgacccgacggagtttacgtcatggtcgttttacagagcagggatagcagagtttgtggccacttttctgtttc

SEQ ID NO: 57005 - DNA, 240 bp, Glycine max
  Clone ID: 700678843H1
attttcagaggaaaatggcgggtacggtttcgacttgtttcttcttcgtgtttcttctttctctccttcttccttttcagatctccgctgaggaatcctcggagaaggagttcgtactcacattggatcactctaactttcacgacactgtcagcaagcacgatttcatcgtcgtcgagttctacgccccatggtgtggtcactgtaagaagcttgctccggagtatgagaaagctgctt

SEQ ID NO: 57006 - DNA, 240 bp, Glycine max
  Clone ID: 700678844H1
caccattgaattttgattctagtaaacagagcttttgtcaattttctattgaccttctcggtggaggaattttagtggacaaaactggagattggatcacacttatacaaaattctccaattagtaacttgttgagagttgctgcttggaagaaaggctgtttaatggttaagattgtgatgtctgggaatgcagcagtcaaaaggagtgattgggcctcattggtacaagtgtttttaa

SEQ ID NO: 57007 - DNA, 243 bp, Glycine max
  Clone ID: 700678845H1
aattcttggaacatgcattcagcgtggacaagcagatagcgaaaaacctacaaggagagaacgaaggggaagacaagggagccattgtgacagtgaaaggaggtctgagcgtgataaaaccacccacggacgagcagcaacaaagaccccaggaagaggaagaagaagaagaggatgagaagccacagtgcaagggtaaagacaaacactgccaacgcccccgaggaagccaaagcaaaagca

SEQ ID NO: 57008 - DNA, 68 bp, Glycine max
  Clone ID: 700678846H1
cgaccaatgtttcatgaagcttgtagttgattagtcatttagcacaaataagtgaatctggcttctct

SEQ ID NO: 57009 - DNA, 248 bp, Glycine max
  Clone ID: 700678847H1
aggaaatttttcctttgatattaaatctcgctctagattggaaaacgtttcctctacaaaagctcaatttgttagtggaaaaaccttcaaatatgatataattggtgctggttcacattcttcagaagattttcctgaaaaggaagatcaagaaaaacccaaaaagattgatgccagattgagacaaagaatagatcctcaatacaatgaggttcaggctcagatggaaacaaatttgtttaaattgt

SEQ ID NO: 57010 - DNA, 249 bp, Glycine max
  Clone ID: 700678849H1
ataaaatcaatctcaagaggtaaaacaccaccaccaggcatgcaatcaatatcactctcagattcactctcagcatcatattcagacatatgatcaagtacaatttcagactcaatgcatgaagagtgagaggcatgcagattagaataaagatcagtcatgtattcatcaacaacatggtcaattatttcagcacgaaatacagaaagatcttcagatgggtatttcatagcatccagaatattgaaa

SEQ ID NO: 57011 - DNA, 248 bp, Glycine max
  Clone ID: 700678850H1
ctcaagctcaacagtcctacttgcaagggttcagcaagaatattctagaggcctcatacgacaccaaattcgaggagataaacaaggttctgtttggtagagaggaggggcagcaacaaggggagtagaggctgcaagagagtgtgattgtggaaatctcaaagaaacaaattcgggaactgagcaaacatgccaaatctagttcaaggaaaaccatttcttctgaagataaacctttcaacttgaga

SEQ ID NO: 57012 - DNA, 246 bp, Glycine max
  Clone ID: 700678851H1
ccaactaacaataattccttcacttgcagaacttagttctctgttgcatcatcatcatcttcattagtgttagccctaaacttcaccttcaaccatgaccacagtgccaccacacagtgtccaagtgcacacaacaacacaccgctacgaagccggcgtcgtcccgccggctcgttttgaggcgccgcgttacgaagccggcatcaaggcgccctcttccatttaccattccgagagaggtccgac

SEQ ID NO: 57013 - DNA, 245 bp, Glycine max
  unsure (1)..(245): unsure at all n locations
  Clone ID: 700678852H1
gcataaggtgaagaaggtgcgaactagagcatttacaaggcggcgagaagcatagagcgaggagagaacagtttgtacgacgcactgagatccatctaccaagactccatcttcgtctccgagatctctcttctatggcctcagctccctctcctcgacaacctccgctgcggcctctggtactcccgccccgcagccttccagtcgacctttttttnagagtccaccgactgctagatcaacaa

SEQ ID NO: 57014 - DNA, 240 bp, Glycine max
  Clone ID: 700678855H1
gcagtttcctctatccactttcacaacgcccatgtcttacccgaaccagagctttttatgcacactcccggaggtaaccgcattccagcgcacgcaaccactctggcttcggcatccccagttttagcaaacgtcattgcgtccaaccgagtcgtcaaaatccacggcgttcccgacggcgatgtcacggccttcgtagcgatcctctactcctccaggtgcacggaggatgacatggac

SEQ ID NO: 57015 - DNA, 238 bp, Glycine max
  Clone ID: 700678856H1
ggcaaaactgttatgacagatgccgaacgatacgaatccctgcgccactgcaaatgggtggatgaagttattcctgatgccccctgggttatcaatcaagagtttcttgacaagcacaacattgactatgtggctcatgactctcttccttatgctgatgccagtggtgctgccaatgatgtttatgaatttgttacatctgttgggaggtttaaggctacaaaacggactgaaggaa

SEQ ID NO: 57016 - DNA, 241 bp, Glycine max
  Clone ID: 700678858H1
tgctggtagcatcacaaccgccaccagccttgacttcccagccctctggcttctcaaactcagtgcccagtatggatcactccgcaagacatgctatgttcgtgccacactacaccctgaacgcgaacagcataatatacgcattgaatgggcgggcattggtacaagtggtgaattgcaatggtgagagagtgtttgatggagagctgcaagagggaggggtgctgatcgttccacaaaa

SEQ ID NO: 57017 - DNA, 75 bp, Glycine max
  Clone ID: 700678859H1
atatactgaaaaacttttatgatgatagattttacatgttggttaacaaaaatctctctagagagggtgaatgtc

SEQ ID NO: 57018 - DNA, 246 bp, Glycine max
  Clone ID: 700678862H1
caaacaacaaggttctgcagaatataaggtgggaatggaacttaccaaactatttggtaacggctcgagctcttctcttctgcatcgcccacacttgcagcgcctccaaatggcagcaccagcaagatagctgccgcaagcagctccagggggtgaacctcacgccctgcgagaagcacatcatggagaagatccaaggccgcggcgatgacgatgatgatgatgacgacgacaatcacattctca

SEQ ID NO: 57019 - DNA, 228 bp, Glycine max
  Clone ID: 700678865H1
cggctcgagggaaaatccggccctttggtcaacccataaataacaacaagcatatatgaaggtgtggtgaggccatcttatatgaaataatatcaagatatatattgtgtaataataaaactatggcctatgtatttaccaccctccgacccagcctatgttaatatctgagtggcgttgtacctttgaatcgccttaataaaatgtcagtcttcaagttttgtcttt

SEQ ID NO: 57020 - DNA, 245 bp, Glycine max
  Clone ID: 700678866H1
cctgttaccaagagggtcactccaagcaaacaacgatggttgcatggcttggacttaaaccaaaacaatctcaacttgttctattggttcttagcaatccttagctgccttaattttttcaactacccttatagggcctcttggtacaagtacaaagctgaagacaacaattcaaaggtgaatttgaaggctctcagaacgactggtgaaaggaaacatgatgaggcagagcagaaggacatgag

SEQ ID NO: 57021 - DNA, 244 bp, Glycine max
  Clone ID: 700678867H1
gcagacttaacaacagcacaaagcgggttactgtctgttcaagctaccatctctctctctctttcttagtgcctccttgccagaagttaaaatggcccaagaaactatcctattcacatctggatcagtgaacgaggggcaccctgacaagctctgtgaccagatctccgatgctgtgctctatgcatgcttggagcaggatcctgacagcaaggttgcctgtgaaacctgcaccaagaccaac

SEQ ID NO: 57022 - DNA, 245 bp, Glycine max
  Clone ID: 700678868H1
ctcgagccgcaacggtccccaggaaatctacatacaacaaggtaatggtatttttggcatgatattcccgggttgtcctagcacttatcaagagccgcaagaatctcagcaacgaggacgaagccagaggccccaagaccgtcaccaaaaggtacatcgcttcagagagggtgatttgatcgcagtgcctactggtgttgcatggtggatgtacaacaatgaagacactcctgttgttgccgttt

SEQ ID NO: 57023 - DNA, 232 bp, Glycine max
  Clone ID: 700678869H1
agcaggacttgttgtggagtggagtgtttcggaggctttcacatacgaagattttcttatctcttcatattcttaagaggggatttcacctgataccttgagagattttgttaccctacccttagtttcttcgtttcttactttgagatttcctttctctgattccatttggtttcctttctgggtattctgaggggtttttggagggtttttctttctcattttttttcca

SEQ ID NO: 57024 - DNA, 240 bp, Glycine max
  Clone ID: 700678870H1
gctgttaccaaaagggtcactccaagcaaacaaggatggttgcatggcttggacttaaaccaaaacaatctcaacttgttctattggttcttagcaatccttagctgccttaattttttcaacttcctttatcgggcctcttggtacaagtacaaagctgaagacaacaattcaaaggtgaatttgaaggctctcagaacgactggtatttaggaaacaagatgaggaagagaagaagga

SEQ ID NO: 57025 - DNA, 239 bp, Glycine max
  Clone ID: 700678871H1
aatttaatgagatgctcattagatatagctatgaaaaattactgcgccaggctaaagctccaagtatgtatatacaatccttcaaaaattttatttctttgtgtgtgtatggtgatgataacttaattggtgtacatgggtatgtcaagccttactttagtggttctatattgaaaagctttctagctggtcataatatcaccattactgatggtattgacaaaactagtgcaactttg

SEQ ID NO: 57026 - DNA, 235 bp, Glycine max
  Clone ID: 700678873H1
ctgctttctacaagagtcttaccaatgattgggaagagcatttggctgttaagcacttttctgttgagggtcagctggagtttaaggctgtcctctttatccccaagagggcaccttttgatctttttgacactaagaagaagcctaacaacatcaaactgtatgtccgccgtgttttcatcatggacaactgtgacgagttgatgccagaatatcttagctttgttaagggtat

SEQ ID NO: 57027 - DNA, 239 bp, Glycine max
  Clone ID: 700678874H1
gaacctttcatcagctgctccagcgtgtacacctgcgcctcacccccactcttcgccacctccgctctctttactttctcctccatctccatccgcataaccgccgcgccctcctccctcgccgccgcatcagccgccatcatccccgtcctctcgtccttcttgctccgactcctctgcttcctcaccgccgccgccaagcacgccagcgagcaaaccagaacgaatatcccggccga

SEQ ID NO: 57028 - DNA, 238 bp, Glycine max
  Clone ID: 700678875H1
gtgattttgtcattggtgttaagttgacaaccataaacaatatgtgtgcatatgggctcaatcctggtatttcaggttctcgtcttttgggcaccattcctcagtccatttcacagcaaactgtttggaatcaaatggcaacagtgagaacaccattgaattttgattctagcaagcagagcttttgtcaattttctattgaccttctcggtggaggaattttagtggacaaaactgg

SEQ ID NO: 57029 - DNA, 235 bp, Glycine max
  Clone ID: 700678876H1
cgccgtgagcagctacattaaggatgtgtttagtgcgttgtggtgtgtcttgaacactacgtattccaatccttgttctcccccttgctcagccaccacaacgccgtgagcagctacattaaggatgtgtttagggcaatcccttcggaggttctttccaattcttacaaccttggccagagtcaagtgcgtcagtcaagtatcaaggaaactccggctctttggtcaacccata

SEQ ID NO: 57030 - DNA, 241 bp, Glycine max
  Clone ID: 700678877H1
gtcttttctgtttttatacaaacctcatgtaggtgggagagagagtgtctttcttggctcatagcatagcatcactatggctcttctgagtcgagcctcttcacgcttccctcagctggtttcccctcaaagagttgtttccctccacacaacgctcccatctcttaacgcatcaacatccacacccacgcccgccccatatgccccgccaccgcctccgtccgcttcccctcccgccggg

SEQ ID NO: 57031 - DNA, 222 bp, Glycine max
  Clone ID: 700678878H1
gtgccttgtaaaatggtgtgtcatcaaatcggtagtactcacccaatattggcttcattgcattgggccatagtgggagttatggaagttttgtcacttatcacttaattagtagaatgttataaataagtggatttgccgcgtaatgacttgtgtgcattgtgaaacagcttgtagcgatccatggctataatgtaaaaatatgtggaaagtgttctgctt

SEQ ID NO: 57032 - DNA, 246 bp, Glycine max
  Clone ID: 700678879H1
caacatctctctgaaaatcactcaaacgcagaagagagagggagagaatcgaaacagccctacgcagcacagcacaatcgcaacgcaagcgattaataataatcgattggcatcgatcaatcgttggttagggtttttgtttatctggtatgggcgagttgactcatgcggaggtgtactcgcctcggactcagcaagtgtggagggcactgttgagttggttagctttcttctttcagatcttct

SEQ ID NO: 57033 - DNA, 254 bp, Glycine max
  Clone ID: 700678880H1
cttcactcaaaactcttctctttcacctccataattcccacacaatatggctgaacttcactaccaaccacaacaccaataccccctccgctaccctaacgatccacaccaacaaacccgttcctccacccaccaggtcgtcaaggccgccaccgccgtcacagcgggcggctccctcttgatcctcgcctcgttgatcctcgccgccaccgtcattgccctcaccatcgtcaccccgctgttcgtcattttca

SEQ ID NO: 57034 - DNA, 246 bp, Glycine max
  Clone ID: 700678881H1
tgttctttaatgccaacaacagaggcagctacaggaagagcaacctttggaagtgcggaaatatagagctgaattgtctgaacaagatatatttgtaatcccagcaggttatccagttgtggtcaacgctacctcagatctgaatttctttgcttctggtatcaatgccgagaacaaccagaggaacttccttgcaggttcgaaagacaatgtgataagccagatacctagtcaagtgcaggagct

SEQ ID NO: 57035 - DNA, 224 bp, Glycine max
  Clone ID: 700678882H1
gttctatatgctagtattgcttaatgattagtttaagatactatgatgcgagtacgggtcccattactgttgctgggacttgttttcctgtcttcagtttctgtctcatctggcattgcttattgagataaagagaactccagacacaataagttcctccacagatgttatagcgatatggactcgtacaggatctaatcatgcgacgctcgttgctacctcct

SEQ ID NO: 57036 - DNA, 146 bp, Glycine max
  Clone ID: 700678885H1
cgaggtcacctgatcttagagcagagttatacaatgagctccatgtagatgactggcagcaacatgatagcgtcagagtcggggtttagaggtccagagagttagggctgagaacccattagtcttgaggtctgatagggtcgcaa

SEQ ID NO: 57037 - DNA, 239 bp, Glycine max
  Clone ID: 700678886H1
cttggcggaaatgcaaaattagcattggtttgtgctatttccccagcactaagttgtaagagtgaaactcttagtacattgagatttgcacaacgtgtaaaggctatcaagaataaagcagttgtcaatgaagtaatgcacgatgatgtgaatcaattacgagacgtgatatgccaactcagggatgaactgcatcgaattaaacgaaagggttacagtccaagtgatggaagtcgggg

SEQ ID NO: 57038 - DNA, 214 bp, Glycine max
  Clone ID: 700678887H1
gtcttttctgctattatacaaacctcatgtacgtgggagagagagtgtctttcttggctcatagcgtagcatcactatggctcttctgagtcgagcctcttcatgcttcactcagctggtttcccctcaaagagtagtgtccctgcacacaacgctcccatctcttaacgcatcaacatgcacacggcacgcccgccccatatgcgccgccacc

SEQ ID NO: 57039 - DNA, 236 bp, Glycine max
  Clone ID: 700678888H1
ggagtgagagagagtgttcttcgtttgctaccttctcccagaaatggttacgttcaggtttcaccagtaccaggtggtcgggagggctctcccaacggaagcagatcagcatccgaagatctaccgaatgaagctctgggccaccaacgaggttcgcgccaagtctaagttctggtattttatgaggaagctgaagaaggtgaagaagagcaatggtcaagttcttgctatcaacg

SEQ ID NO: 57040 - DNA, 234 bp, Glycine max
  Clone ID: 700678889H1
gttcaatatcctagtataccttaataaataatttaagatactatgatgagagcacggttcccattactgttgctgggacttgttttcctggcttcagtttctgtctcatttggcattgcttactgggaaaaagagaaccccaaacacaacaagtgtctccagagttgcaatagcgagagagactcgtacaggaaagaagcatgccacgctcgttgcaacctccttaaggtggag

SEQ ID NO: 57041 - DNA, 235 bp, Glycine max
  Clone ID: 700678890H1
agtaaagtaaagcaaaggaatggcgaacatagacatcgaagggatcttgaagcagcagcctgatgatgggcgcgttccgaagacgaaaatagtgtgtactttgggccccgcttctcgatccgtggaaatgactgagaagcttcttagggctgggatgaacgttgctcgtttcaatttctctcatggcacccacgactatcatcaggaaaccctcaacaatctcaagactgctatg

SEQ ID NO: 57042 - DNA, 237 bp, Glycine max
  Clone ID: 700678891H1
agttcactaagcagaagaggaatttctagtgtacaggagttactagacattccaaaagcagcattgcagactgtaactgcaaatttcccagcttcaagattgtaccaggatcttcagcatttccctcatgttaaaatgacattaaaagttcagaggaaggacactgatggtgacaggtctcgcatattatctgttagattagagaagaccaattctagacgacactcttctagagca

SEQ ID NO: 57043 - DNA, 238 bp, Glycine max
  Clone ID: 700678892H1
ttcgaatcctactttgttgatgctcagcctcagcagaaggaggaggggagtaagggaagaaagggtccttttccttcaatcttaggtgctctctactgaataactacgtaaatgtatgctgtaagagctcatcgtgagcgtggaatgtatctgcccatgtaactataaaaacttgagctccacctatcttctatctactacgaataaataaatccagcatatgatgcttgtgttttgt

SEQ ID NO: 57044 - DNA, 242 bp, Glycine max
  Clone ID: 700678893H1
cgagcagagagaggaacaggaatggcctcgcaaggaggaaaaacgcggagaaaagggaagtgaagaggaagatgaggatgaggatgaggaacaagatgaacgtcaattcccattcccacgcccacctcatcaggaggaagagcgaacaagaggaagatgaggatgaggagcagcagcgagagagcgaagaaagtgaagattctgagttacgaagacataagaataagaacccttttctcttc

SEQ ID NO: 57045 - DNA, 245 bp, Glycine max
  Clone ID: 700678894H1
actcgagccgctcgagccgctcgagccgctaaaatctcttctgctacatatgattatcaggaacagatatcagctattctatgtatccatacttacatctcccactactgggggggtaactgctagttttggcatgttgggggatatcattattgccgaaccaaatgcttatattgcatctgctggtaaaagagtaattgaacaaacattgaataaggcagtacctgaaggttcacaagcagctg

SEQ ID NO: 57046 - DNA, 237 bp, Glycine max
  Clone ID: 700678896H1
accttaataattaatttaagatactatgatgagagcacggttcccatcactggtgctgcggcttgttttcctggcttcagttactgtctcatttggcattgcttactgggaaaaagagaaccccaaacacaacaagtgtctccagagttgcaatagtcgaagagactcgtacaagaaccaagcatgccacgctggttgcaactccttaaggtggaggaagaagaatgtgaagaaggt

SEQ ID NO: 57047 - DNA, 266 bp, Glycine max
  Clone ID: 700678903H1
aaaatggtggccacagttggtattcctgagaatacaggtatagcattggcctgtgctatgaatagttcttttagggggcgtgccagttctgatatttacaccatctgctctcaagactgtgaattatggaatcctgcttgcacaaaagcaatgactatgtcatttaatccaaacccgtgttctgatgcatggagtttggaatttctgaagcgtaccggatttcattgtgatatcatttgtgtcactggatggactgccaccccaat

SEQ ID NO: 57048 - DNA, 266 bp, Glycine max
  Clone ID: 700678904H1
gttcaatatcctagtataccttaataaataatttaagatactatgatgagagcacggttcccattactgttgctgggacttgttttcctggcttcagtttctgtctcatttggcattgcttactgggaaaaagagaaccccaaacacaacaagtgtctccagagttgcaatagcgagagagactcgtacaggaaccaagcatgccacgctcgttgcaacctccttaaggtggagaaagagaatgtgaagaaggtgaaattccacga

SEQ ID NO: 57049 - DNA, 242 bp, Glycine max
  Clone ID: 700678223H1
atcatgctcggggaacagttcaaacgatgccggtgattttgaatgcaacatatgcttcgatttggcgcaagaccctgtgatcacactctgtggtcacctattctgttggccatgcctttataggtggctccaccatcactcccattctcaggaatgccctgtttgcaaggcccttgtgcaggaagagaaattggttcctctttatggaaggggcaaaacacagactgatcccaggaccaagt

SEQ ID NO: 57050 - DNA, 124 bp, Glycine max
  Clone ID: 700678224H1
gatatcctagtataccttaataaataatttaagatactatgatgcgagcacggttcccattactgttgctgggacttgttttcctggcttcagtttctgtctcatttggcattgcttactggga

SEQ ID NO: 57051 - DNA, 237 bp, Glycine max
  Clone ID: 700678225H1
gctagctattctttggcaaagcagcaatggctttagtaggtgaacaaaagcattcactcatggtgaagaaaggtccatgttcgcattgtggagttactcatactccactttggcatgatggaccaactgagaaaccagtgttgtgtagcgattgtggatcacaatacaagttaaaaggaaatttagacaattattttcccaagaatcccgttgttcagtcattccacaataagttta

SEQ ID NO: 57052 - DNA, 164 bp, Glycine max
  Clone ID: 700678228H1
taaacaattcaattcaatctgcctcgatcatggagaggaaaacatttgggtttttgttcttgctcctccttgtcttagcttctgatgtgacggtgaagagagcagaggcgaaagattgcttgacaaggaggcacgggttccagggtagatgcttattcgacagg

SEQ ID NO: 57053 - DNA, 243 bp, Glycine max
  Clone ID: 700678229H1
tctctccattggtccttaaacactcatcagtcatcaccatggccaagctagttttttcctcttgttttctgcttttcagtggctgctgcttcgctttcagttccagagagcagcctcagcaaaacgagtgccagatccaaaaactcaatgccctcacaccggataaccgtatagagtcagaaggagggctcattgagacatggaaccctaacaacaagccattccagtgtgccggtgttgccc

SEQ ID NO: 57054 - DNA, 244 bp, Glycine max
  Clone ID: 700678230H1
gtgatcttaaacttcttactgatgggaagttgtatgagggtaagcatattcctgtatctaatattagtgcaggggaaaatcatgtagttcaaatacccttaatggcacaggaggaaattctgtcttctagtgcaagtgacttcagaactgcaatggtgagtaaaaatagcaagcctcaagctactgcaatgcatgtgggagctatagaaattatcattgatagtttcgcaagtcctgactgcaa

SEQ ID NO: 57055 - DNA, 255 bp, Glycine max
  Clone ID: 700678232H1
attcggctcgagagcgaagtggaatggctcccaagggtttaatctttttggctgtgttatgcttctcagcactgtcactgagtcgttgtcttgcggaggataatggacttgttatgaacttctacaaggaatcatgccctcaggctgaagacatcatcaaagaacaagtcaagcttctctacaagcgccacaagaacactgctttctcctggctcagaaacatcttccatgactgtgctgttcagagttgtgatg

SEQ ID NO: 57056 - DNA, 253 bp, Glycine max
  Clone ID: 700678233H1
tacaacactctccaaactcacctcaaaaaaatttcaacttctcaccatggctgatggtagtagtagcaacaccaagagaaattccctcatcctccatcaccccacaaacttaaagggtggttggaatgctgccatcttcatcatatttgtggaatttgctgagagatttgcttatcaagggttggcaagtaatctcatccaatatctcactaatgttttgaatgaaccaatcacacaagcagccagagatgtg

SEQ ID NO: 57057 - DNA, 138 bp, Glycine max
  Clone ID: 700678234H1
ggctcgagcacagattgaagagttccattcgatgcagaggatgatgaatgctcctgattcaaatgataacatcgatctactgttgagcattgatctgttgggtttacaaggagcaggtaaagcttttccaaacaagat

SEQ ID NO: 57058 - DNA, 127 bp, Glycine max
  Clone ID: 700678235H1
gacttgtttaaattgtctcttgatgatgttgaaactcctaaaggttccatgttagatctgaaagtttctcaatctaaaattgcacttcccaaaaacacagttgggggaaccattctgcgtagtgatc

SEQ ID NO: 57059 - DNA, 244 bp, Glycine max
  Clone ID: 700678237H1
gtaccctcaacagcctcaccctcccagccctccgccaattccaactcagtgcccaatatgttgtcctctacaagaatggaatttactctccacattggaatctgaatgcaaacagtgtgatctatgtgactcgaggacaaggaaaggttagagttgtgaactgccaagggaatgcagtgttcgacggtgagcttaggaggggacaattgctggtggtaccacagaacttcgtggtggcggacaa

SEQ ID NO: 57060 - DNA, 274 bp, Glycine max
  Clone ID: 700678238H1
cgcgtacgtcgctccccattcggctcgagattggtccttaaacactcatcagtcatcaccatggcccagctagttttttccctttgtttcctgcttttcagtggctgctgcttcgctttcagttccagagagcagcctcagcaaaacgagtgccagatccaaaaactcaatgccctcaaaccggataaccgtatagagtcagaaggagggctcattgagacatggaaccctaacaacaagccattccagtgtgccggtgttgcactctctcgcc

SEQ ID NO: 57061 - DNA, 243 bp, Glycine max
  Clone ID: 700678240H1
ctcgagccgagaatattctagaggcctcatacgacaccaaattcgaggagataaacaaggagctgtttggtagagaggaggggcagcaacaaggggaggagaggctgcaagagagtgtgattgtggaaatctcaaagaaacaaattcgggaactgagcaaacatgccaaatctagttcaaggaaaaccatttcttctgaagataaacctttcaacttgagaagccgcgaccccatctattcca

SEQ ID NO: 57062 - DNA, 233 bp, Glycine max
  Clone ID: 700678244H1
cctttgttcactcttcttctcttgcggctagggttttagcgcacttcttctagatttaaggaagatgggtaaggaaaaggttcacatcagtattgtggtcattggccatgtcgactctgggaaatccactaccactggtcacctgatttacaagcttggaggcattgacaagcgtgttattgagaggtttgagaaggaagctgctgagatgaacaagaggtctttcaagtatg

SEQ ID NO: 57063 - DNA, 239 bp, Glycine max
  Clone ID: 700678246H1
gttttgtcaattttctattgaccttctcggtggaggaattttagtggacaaaactggagattggatcacacttatacaaaattctcgaattagtaacttgttgagagttgctgcttggaagaaaggctgtttaatggttaagattgtgatgtctgggaatgcagcagtcaaaaggagtgattgggcctcattggtacaagtgtttttaacaaacagcaacagtacagagcattttgatg

SEQ ID NO: 57064 - DNA, 242 bp, Glycine max
  Clone ID: 700678247H1
ctcgagccgctcgagccgctcgagccgtcccagtagaaaagatagtcctggcacagaagatgatgatatacaagtgtaatcttgttgggaagccagtggtgactgctacccaaatgcttgaatcaatgataaagtctcccaggccaacccgagctgaagcaactgatgtagctaatgcagttcttgatggaacagattgtgtgatgcttagtggtgaaagtgctgctggggcatacccagaa

SEQ ID NO: 57065 - DNA, 113 bp, Glycine max
  Clone ID: 700678248H1
gttacgagtcagcaagagagaaatatcttgttgagttgatttctgatcccaaattgagtttgagtttcagccatggtatctgtttctctgctcttattccgatctttctttgc

SEQ ID NO: 57066 - DNA, 167 bp, Glycine max
  Clone ID: 700678249H1
agcagcgatgggaatcgatcttaaggctgggggtaagagcaaaaagaccaaaagaacagcaccaaaatccaatgacatctacctcaaattacttgtcaagctttatcggttccttgttcgaaggactggcagcaatttcaatgctgttatactcaagcgcttgttca

SEQ ID NO: 57067 - DNA, 236 bp, Glycine max
  Clone ID: 700678251H1
gtaaggtcgcccaagaccttttccgcgctctttggtctgcttatgcttcaaccccaacaaatctcaagatcattgacctctacgtaatctatgccgtcttcaccgctctcatccaggttgtttacatggctttggtgggatcatttccatttaactccttcctatcaggagtactttcttgtgtaggaactgctgttcttgctgtctgtctcaggatccaagtgaataaagataac

SEQ ID NO: 57068 - DNA, 143 bp, Glycine max
  Clone ID: 700678253H1
tgcgttccagtttttattctcagcagccatgtgcagaatcctcgcagtgttgggccgcgtcgagaaatattacgccacctgggcacacatgatcgcacagtatcgcaggttgcggtatagaggtcatgatcagagtggcatag

SEQ ID NO: 57069 - DNA, 122 bp, Glycine max
  Clone ID: 700678257H1
gcaaaggattctacccgccgctcgatgggaattgcgcttcaaggcgtctcgtagggctaatccgcctcacgagggtcaccaacggcacgtgcctttagggggccgaggccccctactgctgg

SEQ ID NO: 57070 - DNA, 236 bp, Glycine max
  Clone ID: 700678258H1
tagtaaacagagcttttgtcaattttctattgaccttctcggtggaggaattttagtggacaaaactggagattggatcacacttatacaaaattctccaattagtaacttgttgagagttgctgcttggaagaaaggctgtttaatggttaagattgtgatgtctgggaatgcagcagtcaaaaggagtgattgggcctcattggtacaagtgtttttaacaaacagcaacagta

SEQ ID NO: 57071 - DNA, 141 bp, Glycine max
  Clone ID: 700678260H1
tggtcatgtatcccttgaagcctgttcctccttgtgctttatttttaccgcgtttgatattttgggggaatatggtcggggtaagacataaatgttgttgagttcccttttcttcatagatagacatctcagttttgcttc

SEQ ID NO: 57072 - DNA, 161 bp, Glycine max
  Clone ID: 700678262H1
gttcaatatcctagtacaccctattaaagaatttaagatatactatgatgagagcgcggttcccattactgttgctgggagttgttctcctggcatcagtttctgtctcatttggcattgcgtattgggaaaagcagaaccccagtcacaacaagtgcctc

SEQ ID NO: 57073 - DNA, 118 bp, Glycine max
  Clone ID: 700678263H1
ctaccatagcacagattgaagagttccattcgatgcagaggatgatgaatgctcctgattcaaatgataatattgatctactgttgagcattgatttgttgggtttacaaggagcagg

SEQ ID NO: 57074 - DNA, 235 bp, Glycine max
  Clone ID: 700678271H1
cagaaaaaaagagtcaagcggcgagcaatggcgacatcgctggtgcgatcgggttttcttcgaagcgccctaagaggaagcgctcgtggctcccaggttccgaagcgaaactttgcttcctctggtcatcacgatgatgcatatgagacggccaaatgggagaagattacatatctaggcattgttagttgcactggtttagccgtttataatctatcaaagggccacccacact

SEQ ID NO: 57075 - DNA, 234 bp, Glycine max
  Clone ID: 700678272H1
tactgtatagagagagatggcagctgcaacatctggtgctgtgttaaatgggttgggatcttccttcttgagtggaggaaacaggagccaaacccttctggccactgctattggaggcaaagttggtgctgctgctgttactgttagtcctagaagactcattgtggtagctgctgctgcaccaaagaagtcatggctccctggtgtcagaggtggtggcaacctcgtcgaccc

SEQ ID NO: 57076 - DNA, 236 bp, Glycine max
  Clone ID: 700678273H1
ttgggtgtccatatttgtatgctatggtgcatgatagttcagtgtctacaataccaggtgattttgtcattggtgttaagttgacaaccataaacaatatgtgtgcatatgggctcaatcctggtatttcaggttctcgtcttttgggcaccattcctcagtctatttcacagcaaactgtttggaatcaaatggcaacagtgagaacaccattgaattttgattctagcaagcag

SEQ ID NO: 57077 - DNA, 83 bp, Glycine max
  Clone ID: 700678274H1
gtgctccaatcacaaacacaatgaagagagactcgtaactcgttgagataaatcatcacagagcagcatcagtgtcgcttttg

SEQ ID NO: 57078 - DNA, 234 bp, Glycine max
  Clone ID: 700678275H1
tggcgaacttcctgaagacgaagacgaccatcgaccgcgtgaagatctacgacgtgaacccggacagcctgcgggccttcgccggcagcggcatctccgtgacggtgaccgcccccaacggcgacatcgccgccttaaccaaaatcgactcggcgacgcagtgggtggcgacgcacatcaaaccctttcaccctcagaccaaaattaattacatcctcgtcggcagcgaggttc

SEQ ID NO: 57079 - DNA, 236 bp, Glycine max
  Clone ID: 700678277H1
gggacatgatagtgaaaaggagagatttgttatggaaatggaagctattatccaggagcaagcatctttggagaaccagttagcatcattgggaacactgatcagtaatcttgcctctgaagtagaagaacaaagatccactgttgctgctgcacgggataatcttgatcaagttcagtcacagctgaaatcagttcgcctaaaaatgaaggaatgtgataaggaaatcagtgcta

SEQ ID NO: 57080 - DNA, 237 bp, Glycine max
  Clone ID: 700678278H1
gttattttcttgtcaaaatgactcctcactttaataatctatggggtattgttggtggatccgtgaagcctttaacttgatttataaataattgaaacctggcttctgaggtgtaggttagcactactttggctgctgctcaagcacgactatggaatgtgagggaagagagagaccagtttgaggaagcaaacaatcagatagttgaacacctgaaaataaaggtttgaggttcta

SEQ ID NO: 57081 - DNA, 163 bp, Glycine max
  Clone ID: 700678280H1
ggaatattaaagaacattgaaacattcaaaaactttaaattttagagataaaaaacctccaggacttctgttcaagcacctcactgaacaacatttcactcctttggtcccttattcctatgcttcacatacttccatctgtcttggcatgagatccttgcta

SEQ ID NO: 57082 - DNA, 159 bp, Glycine max
  Clone ID: 700678282H1
tttattgagtagtattaagagcattgcaatgatgatagctatctctgcaacttttatgattttcttcttgtgttcgccatcagtggctatactaatcaccaggttgccgctaccctcaccagtgacaggccctgagtccgtagcattcgaccggaacgt

SEQ ID NO: 57083 - DNA, 157 bp, Glycine max
  Clone ID: 700678283H1
ggagattggatcacacttatacaaaattctccaattagtaacttgttgagagttgctgcttggaagaaaggctgtttaatggttaagattgtgatgtctgggaatgcagcagtcaaaaggagtgattgggcctcattggtacaagtgtttttaacaa

SEQ ID NO: 57084 - DNA, 237 bp, Glycine max
  Clone ID: 700678285H1
gagcttctcaacctcaacatttatgtcccacttgcccttcagcttcttgtggcttgtggcaagtctcctcctcctggttacacctgctccctctaaaccagtgaaaggattgaggaaaatatggtcaaaatcgacatgagaggatgtcgagccacactatctctcttctgtcctgattggaactgctgttgtttgttttgctattatttgaaaaaccaatttgtttttaattgagat

SEQ ID NO: 57085 - DNA, 236 bp, Glycine max
  Clone ID: 700678288H1
ttacaacgaaaatctcagattaataacactcgccatacccgttaacaagcctggtagatttgagagtttcttcctatctagcactgaagctcaacaatcctacttgcaaggattcagcaggaacattttagaggcctcctacgataccaaattcgaggagataaacaaggttctgtttagtagagaggaagggcagcagcaaggggagcagaggctgcaagagagcgtgattgtgg

SEQ ID NO: 57086 - DNA, 231 bp, Glycine max
  Clone ID: 700678290H1
ctcgagccgcaagcaccaaccacaacgacttttcttggtctctacttcgcatttccgttctatgcttttctcgggctacgaaaaacgacgtcgttttcccaattttccccggcgaccgggaaatggtggagccggtggagcttcgcggcgaggagcagctctcgttgctgtcagattccagcaatggtgaccggtcgtggcggttgaacttcgacgggtttcagctatctt

SEQ ID NO: 57087 - DNA, 83 bp, Glycine max
  Clone ID: 700678291H1
gagaactccgacgctaacaaaatccgttttcgccgccgtaaccgcttctaggacctctcgctctcgctcccattccgcgcgac

SEQ ID NO: 57088 - DNA, 183 bp, Glycine max
  Clone ID: 700678292H1
tttgctacggtgagagagtgtttgatggagagctgcaagagggacgggtgctgatcgtgccagaaaactttgtggtggctgcaagatcacagagtgacaacttcgagtatgtgtcattcaagaccaatgatacacccatgatcggcactcttgcaggggcaaactcattgttgaacgcattac

SEQ ID NO: 57089 - DNA, 233 bp, Glycine max
  Clone ID: 700678294H1
ttgtctttgaacactcatcaccatggccaagcttgttctgtccctttgtttccttcttttcagtggctgcttcgctctgagagagcaggcacagcaaaatgagtgccagatccaaaagctgaatgccctcaaaccggataaccgtatagagtcggaaggtgggttcattgagacctggaaccctaacaacaagccattccagtgtgccggtgttgccctctctcgctgcaccc

SEQ ID NO: 57090 - DNA, 101 bp, Glycine max
  Clone ID: 700678296H1
ggacagagactcctacagacttcaatctggtgatgccctgagagtcccctcaggtaccacatactatgtggtcaaccctgacaacaacgaaaatctcagat

SEQ ID NO: 57091 - DNA, 203 bp, Glycine max
  Clone ID: 700678301H1
gcgaatttcgttcctctgtctcccatcagcttcctagatagagcagcgaaggtttgcagagacagaacctcgcttgtgtatggtactttggagtataactggggtgagacccatcaacggtgcttgaaactcgcatctgatatcaccaattggggctttcagtcgcgatgtggacgctacctatcacctaatgtccctgcatg

SEQ ID NO: 57092 - DNA, 265 bp, Glycine max
  Clone ID: 700678303H1
ctacttgcaagggttcagcaagaatattctagaggcctcatacgacaccaaattcgaggagataaacaaggttctgtttggtacagaggagggagagcaacaaggggaggagaggctgcaagagactgtgattgtggagatctcaaagatacaaattcgggaactgagcaaacatgccagatctagttacaagacaaacatttcttctgaggataaacctttcaacttgagcagccgcgacaccatctattccaacaagcttggc

SEQ ID NO: 57093 - DNA, 264 bp, Glycine max
  Clone ID: 700678304H1
gtgaaaataaatcgagccaaggaatttattaataattgtcttcatttcatattagctgactgctgcgacttccttatgcataattctactggttatagaaattgtgaagctatactgttgtaactggcatgtagattgtgccctatcgcatcttacgtgatgtggtagactccggttacttgtatccgcataagatgtcccatttgtattgcggtggctttgtataatggtacaattatctacttgtaagaagtcagattcggg

SEQ ID NO: 57094 - DNA, 262 bp, Glycine max
  Clone ID: 700678305H1
gttggaaatcacaaacaaattgttggtttccatgttgctggaagcaaaggaagattgggatatgcttcattgataccatatgttgagccagttgtgcaagctcaaagtgctgaagtttactttgacttcttcctgtggaggttgatagtcaagagggagttgctcacattggtgaattgaaatctggtgtctatgttccactgcctacaaaaactaatctggtggaaactcccaaggaatggcaactggatctaccttgtga

SEQ ID NO: 57095 - DNA, 87 bp, Glycine max
  Clone ID: 700678307H1
ggtgagcagagatgtgaacaaggaagtgaagggcagagatgaaaactctaaggcagcaccttctgcaaacacaacagggcaaccaca

SEQ ID NO: 57096 - DNA, 257 bp, Glycine max
  Clone ID: 700678308H1
agaacaagcagtatcatcatcaagcaccttgaggaacgttttcaccaatcccaaaaccctaatttcaaaaccccaattccaagtcgccgcttccccttcatggacaccacagcagccgcgctgggactggtggctcgggcataacttgaagtcctccatgacaacaacatcaacgccatcatcataccctatgccctcggagattccgtggcagaaggaactctgcaactccgtcaacctcatcggcaacgacgccg

SEQ ID NO: 57097 - DNA, 90 bp, Glycine max
  Clone ID: 700678309H1
attggtccttaaacactcatcagtcatcaccatggccaagctagttttttccctttgtattctgcttttcagtggctgcagcttcgcttt

SEQ ID NO: 57098 - DNA, 81 bp, Glycine max
  Clone ID: 700678311H1
cgaatatcttgttgtttggagcgatccgagaaaaactctgtaaacatgttggtttaccaggacctccttaccggtgatgag

SEQ ID NO: 57099 - DNA, 258 bp, Glycine max
  Clone ID: 700678312H1
cccaaacagtctacagtttttgatattctcttgggaatctctcaagattttgaaattgctggtaatactcttatgccagctttttctgttccacaggctactgccagatcttctgaaaaatgcggaatcctctgcatgatctggatttcgtgttttcttccgcttgtccgtttgtttaattcaataaaggaaattaggcatgaccctcttgttgagtatgctctgcctatctgaaaatttccacacctcttttaattg

SEQ ID NO: 57100 - DNA, 252 bp, Glycine max
  Clone ID: 700678313H1
gttaggacttttgagacacattgtggatccctgtctcagtatgggatgaaacatatgaggtcctttgcaaacttctgcaacgctggaatacgcaaagagcagatggctgagtgctcagcacaagcatgtgtcaatatcccgctagttcatggagtctatgcacacgggttcagtgcatatctctagaatgcgctccattgaagacgagtatagtcgtcgtaaaatattcttcacgagtgttatggactgtac

SEQ ID NO: 57101 - DNA, 90 bp, Glycine max
  Clone ID: 700678314H1
ccgctttctttacttactttaagcaatgaagaaagacttgcttgtcgtaaatcgctggatgggtttaccaatcacgaaagacatgggact

SEQ ID NO: 57102 - DNA, 91 bp, Glycine max
  Clone ID: 700678315H1
tccagaaatactctgattgacttatatacggatcttatttttctctattatttaatttaaacgaaatttagttgtctgtagcgccgatgag

SEQ ID NO: 57103 - DNA, 81 bp, Glycine max
  Clone ID: 700678316H1
ctggtgcagagagtgctattgtcatggatatggcatatgctgatctgtgaatgtggagacactcgaccattgcatttgtta

SEQ ID NO: 57104 - DNA, 260 bp, Glycine max
  Clone ID: 700678317H1
gccgccggaaaacactaatcaatagatggatgattctgcgttcaaacgaggcggtcactttaatcgaacttactcgtgctcttctcagagagatgtctgttacagctgtggcacttgtggttatgagctgaacctatcctcctcaaaccggaacactgcatccattggatctagatacgggaagtccataaagcgaggtattatatcattcttcagcattgatcttagcagatttactcaggttgatgaaattcagtgtg

SEQ ID NO: 57105 - DNA, 221 bp, Glycine max
  Clone ID: 700678318H1
ataaaatcaatctcaagaggtaaaacaccaccaccaggcatgcaatcaatatcactctcagatgtcatctcagcatcaaattcagacatatgatcaagtacgatctcagactcaatgcatgaagagtgagaagcatgctgattagagtaaatatcagtcatgtatgcatcagcaacatggtcaattatttcagcacgacatacagcgagatcagcagatgg

SEQ ID NO: 57106 - DNA, 91 bp, Glycine max
  Clone ID: 700678319H1
gcacagggtgagataaatgctggaataaatgtgaggaagggtcagattaccaacatcttggaggagaatgtggtgcagccccttcttgtta

SEQ ID NO: 57107 - DNA, 258 bp, Glycine max
  Clone ID: 700678321H1
gaatgaagttatatgcagagtctcttgcacgctttcaaggagggtcaccatacatatatcctttgtatggtttaggagagcttccccaggcatttgcacggcttagtgctgtttatggtgggacatatatgttgaataagcctgagtgcaaggtagaatttgatgaggaaggaaaggttgttggtgtcacatctgaaggggaaactgcaaagtgcataaaagttgtttgtgatccatcatatttgcccggcaaggtga

SEQ ID NO: 57108 - DNA, 84 bp, Glycine max
  Clone ID: 700678322H1
aaaggaaaggttaactaagaagcaatactggaatggccaccgttgttgttcataaccaaacttcttctgctcaagatgctgagg

SEQ ID NO: 57109 - DNA, 259 bp, Glycine max
  Clone ID: 700678324H1
ctcgagccgctccggctgggtaccctccacatcaaggttaccctcctgctggttacccaccagctggttatcctggttcatctcatgcaccaggttctcatgggcacggcggcatgggagcaatgctcaccgggggtgctgccgcggttgctgctgcttatggtgctcaccatgtctctcatggctcccatcgctcctatggccaatatgctgcacatggtgctcacatgccccatggaaaattcaagcagcatggaaa

SEQ ID NO: 57110 - DNA, 258 bp, Glycine max
  unsure (1)..(258): unsure at all n locations
  Clone ID: 700678325H1
tctctccattgtctttgaacactcatcaccatggccaagcttgttctttcactttgtttccttcttttcagtggctgcttcgctctgagagagcaggcacagcaaaatgagtgccagatccacaagctgaatgccctcaaacgggataaccgtatagagtcggaaggtgggttcattgagacgccanaccctaacaacaagccattcaagtgtaccggtgttgccatctctggctgcacccttaaccgcaatgccctt

SEQ ID NO: 57111 - DNA, 257 bp, Glycine max
  Clone ID: 700678327H1
gttctagccaagtcattgctcaatactaccaactgattcggcttggttttgagggatatagagacgtgtcggaaaactgcatggacaacatgctggtgctgagagagggactcgagaagacagggccgataccagttgtgtgcaaaagccagtggtgtgccctgagtgggctttgacactgaaaggtccacgaccgactttgtacgagattccggatctcaagacttcctgaggcgctttgggtgggatagagccag

SEQ ID NO: 57112 - DNA, 85 bp, Glycine max
  Clone ID: 700678329H1
cacggtattgctcaggtcaatagcgtcactggcagctaaatccttcgcatcctcaaagctcacggacttgcgcctgaaattccag

SEQ ID NO: 57113 - DNA, 85 bp, Glycine max
  Clone ID: 700678330H1
aagaagttggctctacataagcccctttgttagtggcaaaaccttcagatatgacataatcggtggtggttcacaatctcagaag

SEQ ID NO: 57114 - DNA, 78 bp, Glycine max
  Clone ID: 700678331H1
gtgagtcacagttgttctcatcgaagcagaagaagaagaaatggcgacttctctgcaactgttccaatgcaaactagc

SEQ ID NO: 57115 - DNA, 90 bp, Glycine max
  Clone ID: 700678332H1
cgctcgacccgcgcgaacagcataatctacgcattgaatgggcgggcattggtacaagtggtgcattgcaatggtgagacagtgtttgat

SEQ ID NO: 57116 - DNA, 89 bp, Glycine max
  Clone ID: 700678333H1
ctcgagccggcttgagggtcagtattctgaggttggggcaagaaaagcagctgcattggctcaccaatgccctagccacacgccaagga

SEQ ID NO: 57117 - DNA, 236 bp, Glycine max
  Clone ID: 700678334H1
ggtggaacaggagtctcagaggagagctgtggcttagagagccccttttgcatgtgctaccacacttatgtccttttgggctctagctagtgctggtagcagtaaataagactgtataaaatgaacagatgcttagatgccctctgttaagtgcagaataacgggtatagcagctatgtacccttgtgtaatgagtcactcaagtacctatgcgggaaaagcatggatataagaag

SEQ ID NO: 57118 - DNA, 60 bp, Glycine max
  Clone ID: 700678336H1
atgctccttcacgccaaatcgtgaagttcataactgccgcaactgatggcatcacactct

SEQ ID NO: 57119 - DNA, 258 bp, Glycine max
  Clone ID: 700678340H1
caatgatgatgagctccacagattttacacagcttctaataatgactcttcatgcttccttacctcaatcaagaagacaataagttggcgggacagttacagatttctttcaggggaagagctggaaacgtggtcaaatatggttttctggcaatggatctgatttttcgcacagaacttgcctcattgtaacgctgaggatagcctgtcgctctatggcatctgaagacagacttcaatttgctcaggcagttagta

SEQ ID NO: 57120 - DNA, 249 bp, Glycine max
  Clone ID: 700678342H1
tagcaagcagagtttttgtcaattttctattgaccttctcggtggaggaattttagtggacaaaactggagattggatcacacttatacaagattctccaattagtaacttcatgagatttgctgcttggcagaaaggctgtttaatggttagcatgtgatgtctgggacgcagcagtcgaaggagtgattgggcctcattggtacaagtgtatttaacaaacagcaacagtacagagcattttgatgc

SEQ ID NO: 57121 - DNA, 218 bp, Glycine max
  Clone ID: 700678344H1
ctttctctatctctccttcaaaatcgttgtcaatttcgcctctttctctctcaactcccatagattctctccatcgggtcttcaaaaatgcggtagagctgcaatcgatgtcgagttctcagaaaatgtagcagtgagaattgcagcatcagaccctgtatacaatggatcagaatcgcaggatctcaagcgagatgtactgtgtttcgtgccaagtt

SEQ ID NO: 57122 - DNA, 83 bp, Glycine max
  Clone ID: 700678349H1
gttggaaatcacaaacaaattgttagtctccatgctgctggaatcagaggaacattgagatatgcttcactgataccatatgt

SEQ ID NO: 57123 - DNA, 256 bp, Glycine max
  Clone ID: 700678350H1
ccgcgagatctgttaagaaccttcgtgggagtgaacaacaacagcaataaaaacaataacaacagtcagcaccacaatttgcctatgccagtggtgaagttagaggatgagaaagaagagctggaactaagtctcggcctttcgatgaatggtcagatatggggtggaccctacagcgaagaagatacagagagctacctggataccggagtttgtgcgcgacgaggagatgggatatgctgctacgatggggtgc

SEQ ID NO: 57124 - DNA, 257 bp, Glycine max
  Clone ID: 700678353H1
catgaagcttcacgagaacattgctcgcccttcacgtgctgacttctacaacccaaaagctggtcgcattagcaccctcaacagtctcaccctcgcagccctccgccaattcggactcagtgcccaatatgttgtcctctacaggaatggaatttactctccacattggaacttgaacgcgaacagtgtgatctatgtgactcgagggacaggaagagttagagtggtgaactgccaagggaatgcagtgttcgacg

SEQ ID NO: 57125 - DNA, 70 bp, Glycine max
  Clone ID: 700678355H1
gggtgagttggacctcactgacctcaccatggcgaccagagccaagctctcttctagctatcagcgtttc

SEQ ID NO: 57126 - DNA, 216 bp, Glycine max
  Clone ID: 700678357H1
tactcgagccgaatcggctcgaagggaaaagcagaatcccagtcacaataagtgcctctgaagatccaatagcgataaagactactacaggaaccaagcatgccacgctcgttagaacctccataaggtggactcagaacaagaatgcgaaaaggttcaattcaggatcacgacataataccggagagggaagtcagcaacacgtgagaaggagga

SEQ ID NO: 57127 - DNA, 99 bp, Glycine max
  Clone ID: 700678360H1
cacgtgcacgcggaattaggctcgagataaaattcttccaccaagttatgggtgaccttgtgttgcatctattctccctcctaggtctctattctaggt

SEQ ID NO: 57128 - DNA, 91 bp, Glycine max
  Clone ID: 700678369H1
cggatgaagttatatgcagagtgtcttgcgcgctttcaaggagggtcaacttacatatgtcctttgtatggcttaggagagcttccccagg

SEQ ID NO: 57129 - DNA, 77 bp, Glycine max
  Clone ID: 700678374H1
ggaatcgagacagaagaaactcgattgccatagcaggtgtctgatgcctgactggcagttgatgcattagagccctc

SEQ ID NO: 57130 - DNA, 250 bp, Glycine max
  Clone ID: 700678375H1
atcacaaaattctgatatatatatatagatatagaacatagctatgacaaagaatgagatgtacataattggaattgtgattataatcatgattgtgatggatttctcacaagctaattacaatcctacatttgggcaaattgatcgaaatcatgtgtctaatctagcttgtgaggataaatgtagactaaaatgtgcatttgtactaatacctccatttactcctgggtatctaatatgtctttacaag

SEQ ID NO: 57131 - DNA, 234 bp, Glycine max
  Clone ID: 700678376H1
tctgagtctcaaagagaaccacgaagacataaggatacgaacccttttcacttcaactctaaaaggttccaaactctcttcaaaaaccagtatggccacgttcgcgtcctccagaggatcaacaaacgctcccaacagcttcagaatctccgagactaccgcattatcgagttcacttcatatccaacactcttcatctcccccatcatgctgacgctgattacctcatcgtta

SEQ ID NO: 57132 - DNA, 251 bp, Glycine max
  Clone ID: 700678377H1
attctggtgaatgcgtagaaaaggaagataaagaaattagcgtcaaaaatgttgggtgtgttcagcagctccatagtgtcgccgccggacgagctcgttgccgccggcagccgtacaccgtcgcccgagatgacggcggcggcgcttcggaactggttcgaggagaagaacccctccgcagtgtcggtggaggtcggagagcatgtccagctcgcttatacgcaccagaacgagtcgccgtttcagcccag

SEQ ID NO: 57133 - DNA, 254 bp, Glycine max
  Clone ID: 700678378H1
gtcttccatagccccccaaaaatgaagagcaccatcttctttgctctctttctcttttgtgccttcaccacctcatacctaccttcagccatcgctgatttcgtgctcgataatgaaggtaaactcttgaaaatggtggcacatattatttcttgtcagacataacagcatttggtggaataagagcagccccaaacggacaatgaaagatgccctctcactgtggtgcaatctcgcaatgagctcgacaaagg

SEQ ID NO: 57134 - DNA, 55 bp, Glycine max
  Clone ID: 700678379H1
gttctcatcgaagcagaagaagaagaaatggcgacttctctggaactgttccaat

SEQ ID NO: 57135 - DNA, 73 bp, Glycine max
  Clone ID: 700678381H1
gtcatctcagggctttgaagccctttttcctttcgctctcgcgaatccacagtgccatactcaaagcacaacc

SEQ ID NO: 57136 - DNA, 243 bp, Glycine max
  Clone ID: 700678382H1
agacccccaaaaatgcagagcgccatcttctatgctctctttctctatcgtgactagagcacctcatagctacctgcagatgtcgctgcgtgcgtgctcgataatgaaagtaaccctcttgataatggtcgcacatatcgtaacttgtcagacatagcagcatttcgatggctaagagcagccccaacgggacatgaaagatgccctctcactgtggtgcaatctcgcaatgagctcgacaaa

SEQ ID NO: 57137 - DNA, 70 bp, Glycine max
  Clone ID: 700678383H1
ataggtctttattcaaatcccactttcgaagatatcccacattcagcttgggacgctttccgctgggaca

SEQ ID NO: 57138 - DNA, 170 bp, Glycine max
  Clone ID: 700678387H1
taaaattcttccaccaagttatgggtttccagtgttcttctttctacccttaggtctccttctagtgagatatcaatcatgtccaatgacctgacaccagttacagcgaaagggttctgtccattgaggtacatgcgtgtcacgacacgaagagcaaaattagttcagat

SEQ ID NO: 57139 - DNA, 250 bp, Glycine max
  Clone ID: 700678388H1
gttcctcactgacctcaccacggcgaccagagccaagctttctttagctatcttccttttctttcttttagacctgatttcaaacctagccttgggcaaacttaaagaaaccgaggtcgaagaagatcccgagctcgtaacatgcaaacaccagtgccaacagcaacggcaatacactgagagtgacaagcgaacatgcttgcaacaatgtgacagtatgaagcaagagcgagagatacaagtcgaagag

SEQ ID NO: 57140 - DNA, 79 bp, Glycine max
  Clone ID: 700678389H1
agaaaaacttagttattgtgcaggattattgcagagtaccattttggagagtctaggatgcatctggttcaaccgtaca

SEQ ID NO: 57141 - DNA, 79 bp, Glycine max
  Clone ID: 700678390H1
ctcgagccgtggaattcttggaacatgcattcagcgtggacaagcagatagcgacaaatctacgaggagagaacgaagg

SEQ ID NO: 57142 - DNA, 77 bp, Glycine max
  Clone ID: 700678391H1
tagaaaggcttatggtggatacctaggtatccagagacgaggaagggcgtagtaagcgaccataggcagggcttggt

SEQ ID NO: 57143 - DNA, 222 bp, Glycine max
  Clone ID: 700678392H1
aatctgcaaaaaagatgtttggagggttgagtgtggtatcccttctggatttccactcactgttatctgcaatagcattttcaatgagatgcttatcagatatagttatgaaagttgttgcgtcagctaaggctctagtatgttctcagtctgtaaaatttattcttgtggttatgagatgatattatagtgtcatgagtatgtagcatatgtagtgtctaa

SEQ ID NO: 57144 - DNA, 253 bp, Glycine max
  Clone ID: 700678393H1
atcgttatacttaacgggactgccattctttccttggtgaacaacgacgacagagactcctacagacttcaatctggtgatgccctgagagtcccctcaggaaccacatactatgtggtcaatcctgaccaacaacgaatatcccagattaataacactcgccatacccgttaacaagcctggtagatttgagagtttcttcctatctagcactgaagctcaacaatcctacttgcaaggattcagcaggaac

SEQ ID NO: 57145 - DNA, 298 bp, Glycine max
  Clone ID: 700678401H1
gtggaatggaattactctgaatacaattttgactagaataagtgcagcacagagagaagtgcgaatcagagagagaaagagaggcatggctgctgcaggtccagaaaacgtccctcctttcatcgccgctcagcttagccacctcctctcccacttcggtcttacagtcaaggttgaacaaatgtggtcgagtggcaaatacaactccacccccctcgatcgcttcaccctcctcatcccctactgcttagacttcatcagatgggatgttatatacgacgcggaatctccgaacacc

SEQ ID NO: 57146 - DNA, 308 bp, Glycine max
  Clone ID: 700678402H1
agatcgagcggtgatacgacatccggttcttcgagctaaacactggagctaatatcccttcactagggctgggaacttggctggctgatcctggtgttgttggtgatgttatagctcatgccgtcgaggttggttatcgccatattgattgtgctcaaatttacggcaatcaggaggagattggtttagcattaaagaagttatttgaagagggtgtagtcaagcgagaagatttatggatcacctctaaactctggtgtacagatcatgctccagaagatgtaccagaagctctggacagaacattg

SEQ ID NO: 57147 - DNA, 113 bp, Glycine max
  Clone ID: 700678403H1
atcgagccgaatcggctcgagttcaataacactttccttagttcaatatggggaagcccgtcttcactctctatctttattcccatagcatgctactcttgtcgagtgcatgc

SEQ ID NO: 57148 - DNA, 290 bp, Glycine max
  Clone ID: 700678404H1
tggcgggcgcacgcgtcgcttctagcccggattctgacttagaggcgtacagtcataatccaacgcacggtagcttcgcgccactggcttttcaaccaagcgcgatgaccaattgtgcgaatcaacggttcctctcgtactaggttgaattactattgcgacactgtcatcagtagggtaaaactaacctgtctcacgacggtctaaacccagctcacgttccctattggtgcgtgaacaatccaacacttggtgaattctgcttcacaatgataggaagagccgacatc

SEQ ID NO: 57149 - DNA, 82 bp, Glycine max
  Clone ID: 700678405H1
ctaaaatatcagcaagagcaatgaggtcatcaaagccagaaaggaaagcatcagcaagaagagggttacggaggtggctcca

SEQ ID NO: 57150 - DNA, 289 bp, Glycine max
  Clone ID: 700678407H1
tgaacaaattccctctcaccctcctcgccgaccaagccatggaaagcgtgaacaagacgaggacgaggacgaagatgaagataaacctcgtcctagtcgaccaagccaaggaaagcgtgaacaagaccaggaccaggacgaggacgaagatgaagatgaagatcaacctcgcaagagccgcgaatggagatcgaaaaagacacaacccagaagacctagacaagaagaaccacgtgaaagaggatgcgagacaagaaacggggttgaagaaaatatctgcaccttgaag

SEQ ID NO: 57151 - DNA, 289 bp, Glycine max
  Clone ID: 700678408H1
agaagaggaagtttacaaggttcaatgggcaactatgtggggagcagatactgccatggatctctcgactggtcgccacatccatgaaactcgagagtggatcctacgcaactctgctgtaccaattgggactgtgcctatttatcaagcacttgaaaaagttaatgggattgctgaggatcttaactggaaggttttcagggacaccctgattgaacaagctgagcagggtgtggattacttcaccatccatgcaggagttcttctgagatacgttccattaacggct

SEQ ID NO: 57152 - DNA, 294 bp, Glycine max
  Clone ID: 700678409H1
agcagcaaggggagcagaggctgcaagagagcgtgattgtggaaatctcgaaggaacagattcgggcactgagcaaacgtgccaaatctagttcaaggaaaaccatttcttctgaagataaaccttttaacttgagaagccgcgaccccatctactccaacaagcttggcaagttctttgagatcaccccagagagaaacccccagcttcgggacttggatatcttcctcagtattgtggatatgaacgagggagctcttcttctaccacacctcagatcaaaggcgatagtga

SEQ ID NO: 57153 - DNA, 236 bp, Glycine max
  Clone ID: 700678411H1
gccattcgtattgtcgcagagaaagaaaaccctagctcaccgtttcaagatgcaaatcttcgttaagaccctcactggtaagaccatcactctcgaagtcgagagttcagataccatagacaatgtagaggccaaaattcaagacaaggaagggatcccaccagatcagcaacggctcatttttgctggcaagcagcttgaggatggacgtacccttgctgagtataacatccaaa

SEQ ID NO: 57154 - DNA, 287 bp, Glycine max
  Clone ID: 700678412H1
aaattcttccaccaagttatgggtttccttgtgttgcttcttttctccctcttaggtctctcttctagttccagcatatcaactcatcgttccatattggaccttgacctaaccaagtttaccacacagaaacaggtgtcttcactgttccaactatggaagagtgagcatggacgtgtctaccataaccacgaagaagaggcaaagagacttgagattttcaagaataacttgaactatatcagggacatgaatgcaaacagaaaatcaccccattctcatcgttt

SEQ ID NO: 57155 - DNA, 147 bp, Glycine max
  Clone ID: 700678413H1
cttattaacactttccttagttcaatatggggaagcccttcttcagtctctctctttcttccctttgcttgctactcttgtcgagtgcatgctttgctattacctccagcaagttcaacgagtgccaactcaacaacctcaacgcgt

SEQ ID NO: 57156 - DNA, 292 bp, Glycine max
  Clone ID: 700678418H1
cccagagatctatgagtactattcactacaactcacatgcaacgaagatagcactggtgatcgatggcagagggcatcttcaaatatcatgtccacacatgtcatcaaggtcgtcacactcgaagcatgataagagtagcccttcataccatagaatcagttccgatttgaagcctggaatggtgtttgttgtccctcccggtcatcccttcgtcaccatagcttccaataaagagaatctcctcatgatttgcttcgaggttaacgctcgagacaacaagaagtttacatt

SEQ ID NO: 57157 - DNA, 203 bp, Glycine max
  Clone ID: 700678420H1
ctgaagcaaagcaatggctacttcaaagttgaaaacccagaatgtggttgtatctctctccctaaccttaaccttggtactggtgctactgaccagcaaggcaaactcagcggaaactgtttctttcagctggaacaagttcgtgccgaagcaaccaaacatgatcctccaaggagacgctattgtgacctcctcgggaaagt

SEQ ID NO: 57158 - DNA, 287 bp, Glycine max
  Clone ID: 700678423H1
tctctccattggtccttaaacactcatcagtcatcaccatggccaagctagttttttccctttgttttctgcttttcagtggctgctgcttcgctttcagttccagagagcagcctcagcaaaacgagtgccagatccaaaaactcaatgccctcaaaccggataaccgtatagagtcagatggagggctcattgagacatggaaccctaacaacaagccattccagtgtgccggtgttgccctctctcgctgcaccctcaaccgcaacgcacttcgtagaccttcc

SEQ ID NO: 57159 - DNA, 283 bp, Glycine max
  Clone ID: 700678424H1
cttaaacactcatcagtcatcaccatggccaagctagtttttaccctttgtattctgcttttcagtggctgctgcttcgctttcagttccagagagcagcctcagcaaaacgagtgccagatccaaaaactcaatgccctcaaaccggataaccgtatagagtcagaaggagggctcattgagacatggaaccctaacaacaagccattccagtgtgccggtgttgccctctctcgctgcaccctcaaccgcaacgcccttcgtagaccttcctacaccaacg

SEQ ID NO: 57160 - DNA, 286 bp, Glycine max
  Clone ID: 700678425H1
cccaatcagtggacccacccagaagatccagtgctggtgccatctccagcccactaattggggcagcactagcagcactggtctatgaatatgttgtgatcccaactgaaccccctcatcaacaccaacctttggctcctgaagattactagttgcttccactagttgtatcaaaatatgagtgttattaatagctttttgtgtatctaaatataagggtatgcttgtgttttctctagtgtttgcaccaccctcttgcttgagtggccactaggctcctgcatgt

SEQ ID NO: 57161 - DNA, 289 bp, Glycine max
  Clone ID: 700678426H1
gaggaaccgtcagccagcagcagaatcccctgcccctgctccagcatatagtggcccttcttctggtgctggctctagttctggtgctggtaattctggatccagttatgctgcacccagaaatgattatcgtcctgggtatggtggtggtggtggacgtacaggtggatggggaaacaaaagtggtggatgggatcatggcagggagcgggaagtcaatccctttgaagaagaggataacgctgaagaggcattcagtgagcaggagaatacaggaataaattttgat

SEQ ID NO: 57162 - DNA, 290 bp, Glycine max
  Clone ID: 700678427H1
aagaaagtcttccatagccccccaaaaatgaagagcaccatcttctttgctctctttctcttttgtgccttcaccacctcatacctaccttcagccatcgctgatttcgtgctcgataatgaaggtaaccctcttgaaaatggtggcacatattatatcttgtcagacataacagcatttggtggaataagagcagccccaacgggaaatgaaagatgccctctcactgtggtgcaatctcgcaatgagctcgacaaagggattggaacaatcatctcgtccccatatcg

SEQ ID NO: 57163 - DNA, 167 bp, Glycine max
  Clone ID: 700678428H1
attgcaagttgtgccccccttgtctcttgttcaataagaatcgaatttgaagtgtatgtagtcttgatctacctaggtaggcattgccattttggtttttttcgtattatcttaacttgacttcgacttctttgcttattggctaagcgtataacatggctagggct

SEQ ID NO: 57164 - DNA, 207 bp, Glycine max
  Clone ID: 700678431H1
aaacaatatgtgtgcatatgggctggatcctggtatttcagggtctcggcttttgggcaccattcctcagtccatttcacagcaaactgtttggaatcaaatggcaccagtgagaacaccattgaattttgattctagcaagcagagcttttgtcaattttctattgaccttctcggtggaggaattgtagtggacaaaactggaga

SEQ ID NO: 57165 - DNA, 201 bp, Glycine max
  Clone ID: 700678435H1
ctcgagccgctctcatcactacctctgcatttttctctcgctctctgccttccatcactcacgtcatgtccctgccccagatagtagaagatggccgacgatgacgatattcaacctcttgtctgtgacaatggaacaggtctggctaaggctagttttgctggagatgatgcgccacgtgctgtgtttcccagcattcta

SEQ ID NO: 57166 - DNA, 140 bp, Glycine max
  Clone ID: 700678437H1
tctctggcaaaactgttatgacagatggagaaccgtacgaatccctgcgccactgcaaattggtggatgaagttattcctgatgccccctgggttatcaatcatgagtttcttgacaagcacaacattgactatatggtc

SEQ ID NO: 57167 - DNA, 283 bp, Glycine max
  Clone ID: 700678439H1
gtcaatctgaaggttatgggtttattgagtttaatagtcgtgctggagctgagagaattcttcaaacatataatggggcaataatgccaaatggggggcagagtttcaggttgaattgggcaacttttagtgctggtgagaggtcgcgccacgacgattctccagattacaccatatttgttggtgacttggctgcagatgttactgattatcttcttcaggagacatttagggctcgttataactcggtgaagggtgcaaaagttgtcattgataggctaac

SEQ ID NO: 57168 - DNA, 285 bp, Glycine max
  Clone ID: 700678440H1
tggaagttgttatgcagcatatgcggtgtatcttatggtgcctgcatccaagtaagtcatctgagttttaaattaaatagtagtttaagttggccttttcttggtcaattggcaggtaactcttgacagctgaagcaccaaatatctgttacctaatccacatcaatgatcaatcaacaaccttatgtctaaagtgacaatcaaaacatacatgaatttcactgccattttttgaaaagatttcatgtgtgtatgtggggagcatagctggtgtgtgcttgagag

SEQ ID NO: 57169 - DNA, 287 bp, Glycine max
  Clone ID: 700678441H1
ttcagcttttgagtaccactaccaatggtgattttgttcaagggaaagatctcgcaatggttaaagttaatgtagcatgtgctgctgttggcttgacatcaagttacactccaactccattgttggaatctggtttgcaaaaagacagagggttaattgtggagtattttggaaggatgtctgacgttgctcataacgttaatcagccccaagagaaagatttgttggagggaaatttttcctttgatattaaatctcgctctagattggacaaagtttcctctaca

SEQ ID NO: 57170 - DNA, 290 bp, Glycine max
  Clone ID: 700678442H1
aagaaaaaagagaagaagatgggtttgaagaacaacatggtggtgctaaaggtgtgtttggtgctacttttccttgtggggggtactactagtgccaacttgaggctgagtaagcttggcctgctcatgaaaagtgatcatcatcaacactcaaatgatgatgagtcttcaaaaccatgctgtgatcaatgcgtagtgacaaagtcaaaccctcctcaatgccgctgttcagatatgaggctgaattcgtgccattcagcttgcaaatcttgtatttgcgcattatcgta

SEQ ID NO: 57171 - DNA, 288 bp, Glycine max
  Clone ID: 700678443H1
tgtacatgaaggtgaaaggtaatgttttcaagaacaagagagtcttgatggagagcattcacaagtataaggctgagaaggcaagagagaagactttgtctgatcagtttgaggctaagcgtgcaaagaacaaggctagcagggaaaggaaaattgctcggagggaggagcgcttagcccaaggtcctgttgacaagtcatttacagcacccagtgcccctgctgccacagtgccccagtctgcccaagcgccaaagaaatcgaagaagtgagcagcatatcctggaa

SEQ ID NO: 57172 - DNA, 230 bp, Glycine max
  Clone ID: 700678447H1
agtcttccatagccccccaaaaatagaagagcaccatcttctttgctctctttctcgtttgtgccctcaacaacttatacctacagttcagagaacgctgatttcgatgtcgataatgaaggtatccctcttgaaaatggtggcacatattatatcttgtcagacatatcagcatttggtggaataagagcagccccaacgggaaatgaaagatgctctctcactgtggt

SEQ ID NO: 57173 - DNA, 282 bp, Glycine max
  Clone ID: 700678450H1
atctaatggaggttgttttggaagtatctcctgaggccttattcaatgaattattcactaaagtattcaggaattccttgtttgagttatcatctcatcaacatggaaactttgttgttcaagcattaatttcttatgcaagcaatcaagatctgatggagttgatttgggaagaacttgggccaaatttggagggtcttttcaaaatgggaaagtcaggagttgttgcttcacttgttgctgccattgaaaggcttcatattaatgaacacaagtgctgtc

SEQ ID NO: 57174 - DNA, 273 bp, Glycine max
  Clone ID: 700678452H1
aaaattcttccaccaagttatgggtttccttgtgttgcttcttttctccctcttaggtctctcttctagttccagcatatcaactcatcgttccatattggaccttgacctaaccaagtttaccacacagaaacaggtgtcttcactgttccaactatggaagagtgagcatggacgtgtctaccataaccacgaagaagaggcacagagacttgagattttcaagaataacttgaactatatcagggacatgaatgccaacagaaaatcacc

SEQ ID NO: 57175 - DNA, 281 bp, Glycine max
  Clone ID: 700678455H1
gttccttatcttacgagtcaatacaaaagcacactatttatacaagatccccaatttctctatttttcctccgtttctattgcaatttctcaattactacatcgtattctgcaaattcaaactgggtcttggttttctgaaagatgggaggtggcaaggacaagcaccatgatgaatctgacaaaggatttttttcacagcttgctcatggggtagctggtgcagcacatggtggacatgggtacccacctggggcttacacaccaccacctggggcatac

SEQ ID NO: 57176 - DNA, 282 bp, Glycine max
  Clone ID: 700678456H1
caacgcacttgctaggcaatctctcattaatgctgatggcataatagagaaatcttttttgccctcaaagcattccgttgagatgtcttcagcggtttataagaattgggttttcactgatcaagcactacctgcagatcttatcaagagaggagtggcaattaaggatccatctgccccacatggacttcgacttctgatagaggactacccttatgctgttgatgggctagagatatgggctgcaattaagacatgggtccaagaatatgtgtccttgta

SEQ ID NO: 57177 - DNA, 285 bp, Glycine max
  Clone ID: 700678457H1
aagaccagttgcttggttttgctttggtacccttgtctgaagtactagtccagaatgggaaacttgagaaagagttctctctttcttcaactgatctattccattctccttcgggttttgttcagttgtcgctttcttacactggtgcttcacctgatgttatgacaatttctgcaatgccgaacaaggtggccacagatgccgcagtgcaggactcagaaacgtccgagtcactggccagggatttagacaaaatcgagttcccggatccgaagattgtcaatg

SEQ ID NO: 57178 - DNA, 284 bp, Glycine max
  Clone ID: 700678459H1
atgacccatcacagttcaaggggaacaaagatggtggctttatgattttggccaattacattggtgctgtggggaagccccagaacaccaagcctgaaaagattgccatgactgcaccggttataacaaaggacagtgttggtggggatggtgagacgattgctatgacggcccccgttgtgacgaaggagggtggcggtgaacgcgaagaagggaataagaataacaagatggtgactatgcagtttgttttgccggctgtgtatgggaaagccgaagaagcg

SEQ ID NO: 57179 - DNA, 139 bp, Glycine max
  Clone ID: 700678460H1
ctttgaacactcatcaccatggccaagcttgttctttccctttggttccttcttttcagtggctgcttcgctctgagagagcaggcacagcaaaatgagtgccagatccaaaagctgaatgccctcaaaccggataacc

SEQ ID NO: 57180 - DNA, 193 bp, Glycine max
  Clone ID: 700678461H1
caaagtagtactacttggtttcaatcaaaacaaaaactcacactttggtggccacagcaacaattacaatggcagcctcactacaagctgcagctaccttcatgcaacccaccaaggtgggcatggccactcgcaacctcaaatctacacaatgcatttctaaggcttttggcttggaacccgctgcagctaa

SEQ ID NO: 57181 - DNA, 302 bp, Glycine max
  Clone ID: 700678466H1
ttcggctcgagcaccatcaattttgaggcttttccccacaagctggtgcagtttggagagattcaggaaaaagttgtattgaaattttcacaagaggaatttcttacagcttggtcaactcaggtgcgtcctgcaacaactctgttggctgatgggtgtccatatttgtatgctatggtgcatgatagttcagtgtctacaataccaggtgattttgtcattggtgttaagttgacaaccataaacaatatgtgtgcatatgggcttaatcctggtatttcaggttctcgtcttttgggcac

SEQ ID NO: 57182 - DNA, 294 bp, Glycine max
  Clone ID: 700678467H1
gtcaaccctgacaacaacgaaaatctcagattaataacactcgccatacccgttaacaagcctggtagatttgagagtttcttcctatctagcactgaagctcaacaatcctacttgcaaggattcagcaggaacattttagaggcctcctacgataccaaattcgaggagataaacaaggttctgtttagtagagaggaagggcagcagcaaggggagcagaggctgcaagagagcgtgattgtggaaatctcgaaggaacagattcgggcactgagcaaacgtgccagatct

SEQ ID NO: 57183 - DNA, 278 bp, Glycine max
  Clone ID: 700678471H1
ctcagtgttgttcaccctatttataaactccttcaccctcactatcgtgacaccatgaacataaatggccttgctcggttatcactggtcaacgacggtggcgttatagaacaaacatttttgtggggaaggtattctgtggaaatgtctgctgtagtttacaaggattgggtttttacagatcaagcattgcctgctgatcttataaaaagaggaatggcaattgaggatccatcgtgccctcatggcattcgccttgtgatagatgactaccctta

SEQ ID NO: 57184 - DNA, 279 bp, Glycine max
  Clone ID: 700678472H1
cattgccaaggcattggcaaggccaccctcttacacaaccaagtactttggttgcgaacttggggcacagtctaaatttgacgagaaagttgggacttctcatgttaatggggcacatgacactgcaaaacttgcagctcttctgagagatctttatcaagaaatacgtccagtgttatggttgtggaaaccctgaaactgagatattgattactaagaaccaaatgatccagctgaaatacgctgcttgtggttttgtgtcagatgtggatatgagag

SEQ ID NO: 57185 - DNA, 281 bp, Glycine max
  Clone ID: 700678473H1
ttgcaaatgaaccagtaacagtcaagagtgaccagaacaatgtagaggttaaaccacagggtgtgagcaagggactagtggccacacgcctactttctgccatgcaagaaaaggggatgtgccctgattttgttttgtgtataggagatgacaggtctgatgaagacatgtttgaggtaattaccagttcaatgggcggtctgatcgctccaaaggccgaggtatttgcatgcacggtttgtcgaaaacccagtaaggctaagtactacctggatgataca

SEQ ID NO: 57186 - DNA, 258 bp, Glycine max
  Clone ID: 700678475H1
ggctcgaggttcaatatcctagtatacctacataaataatttaagatactatgatgagagcacggttcccattactgttgctgggacttgttttcctggcttcagtttctgtctcatttggcattgcttactgggaaaaagagaaccccaaacacaacaagtgtctccagagttgcaatagcgagagagactcgtacaggaaccaagcatgccacgctcgttgcaacctccttaaggtggagaaagaagaatgtgaag

SEQ ID NO: 57187 - DNA, 286 bp, Glycine max
  unsure (1)..(286): unsure at all n locations
  Clone ID: 700678476H1
cttgcactgcacattgcacaacaaggattcatcttgcaaaaagccaccacacttcgcctttttccctgttcattcgacagtaacctcaacactctattggggtctgatagagatggggtcttgctgtggtgaaagtgcagataacatgcaagtgataggtgcggataaggaccacatatggagcaagaaagtggaagcagatgagggtctgaatctgaacactgntggggtgctcagagggaggatactggctgagagacaagcttcaagggtgggcaaagatgga

SEQ ID NO: 57188 - DNA, 203 bp, Glycine max
  Clone ID: 700678477H1
tgtgcatatgggctcaatcctggtatttcaggttctcgtcttttgggcaccattcctcagtctatttcacagcaaactgtttggaatcaaatggcaacagtgagaacaccattgaattttgattctagcaagcagagtttttgtcaattttctattgaccttctcggtggaggaattttagtggacaaaactggagattggat

SEQ ID NO: 57189 - DNA, 315 bp, Glycine max
  Clone ID: 700678481H1
gcgtacgtaggctcagggttctccaacttaaagcagatcttctcatgaaaccggcaataccatcgacggaagacgtgccagcgtgcacgttgctgcgggtccatgcataacgatacagtacgtgaccaacgtcatcatccatgggattcacatacacgattgcaagcagggagggaacgctatggtgcgggactccccacggcactacggctggagaaccgtatcgtacggtgacggcgtgtccatcttcggagggagccacgtgtgggttgaccattgctcgctgtctaactgcaacgacgggttgatctacgc

SEQ ID NO: 57190 - DNA, 292 bp, Glycine max
  Clone ID: 700678482H1
tatcgagcgattcggctcgagaaagaaaggtaataattgatcagtgaaaatgcacggaggaaagaaagctggagagtacatcaaggacacagctgcaaacattggtgcttctgccaaggctggcatggagaaaaccaaggccactgtccaggagaaggcagaaagaatgacggcacgtgatccgatgcaaaaggagttggcaacccagaagaaagaggcatagatgagccaggcagagctggacaagcaggcggcgcgtcagataacacagcggcgaacaggatgccacggc

SEQ ID NO: 57191 - DNA, 294 bp, Glycine max
  Clone ID: 700678483H1
cagctcgagcgtgaaatttgaacaattctgaggcatcacaataaataaacactgagaaaagagagaaggctgtgcttgaggcatatccttgatgggtaataacaggttcagattgtcagatatgatgccaaatgcatggttctataagctcaaagatatgagcaaatcaaggaagagaaatggccctcatgttatgaagaacaaagtagcctcagcagcaacatcacaaaggtcacagccaagatactctcattatttctccattgaaccacacatagctggtaagttatacaa

SEQ ID NO: 57192 - DNA, 194 bp, Glycine max
  Clone ID: 700678485H1
ggaggttgagtagttcttcatcatagtcttaaacattaaaccttagcaaaactcaacaatgctagacatcaaaggctacctcgtactcttcttcctatggttcatatcaaccattctgatacgttccatcttcaagaaaccacagcgtctaagactctcaccgggtcctccaatttcaatacccttgctgggac

SEQ ID NO: 57193 - DNA, 278 bp, Glycine max
  Clone ID: 700678486H1
cagtggtgccttatcgctgtggttatcatcttcttcttcctctttcttagatctcttctttctctacgccgcacgccgaaaccatggccggaaaaggagagggtcctgctatcggaatcgatctcggaaccacctactcttgcgtcggtgtgtggcaacatgaccgcgttgaaatcatcgccaacgaccaacggaacagaaccacgccgtcttacgtcggattcactgacaccgagcgtctcatcggtgatgcggccaagaatcaagtcgccatgaac

SEQ ID NO: 57194 - DNA, 278 bp, Glycine max
  Clone ID: 700678488H1
ctcgtctcaaatgcgattttttctccaaattgcctgataaagttcggtgtggtctcgatcctgatctctcttttcacattgactactcaaaggcaactggcttaacagaaggggagaaagagtattacgaaaggcaattttccaccctaaggtctttcgaggaggttgattcaactgaatcttccaatgtcattgaggatggctcagtgcacgcggaacaagtgcaatctgacaaggcaatgaaaatatccaatttggcaaacgttcttttactcgct

SEQ ID NO: 57195 - DNA, 197 bp, Glycine max
  Clone ID: 700678489H1
cgcacccacaggcacaagtctctccaactcaacttcttccactctcactaatggctctcaccaatgctttcctcgctccttccttcgccgtccacggtgttggtagggtttccgatccgcgctccattcctctcttctctcttccctccgacgccttcttccgctccccaacctccctctccagggacaagaacttt

SEQ ID NO: 57196 - DNA, 265 bp, Glycine max
  Clone ID: 700678490H1
caataacaatacagaagggtatatatgcaagtttactggggttgagtgttggcaccctgatgaaaacaaggtcttgaatctcaaactgtcaaacatgggactcaagggccccttccctcgcggcattcagaattgttcaagcatgacaggattagatttttcgcttaacagactctctaaaaccattccggccgatatatccacacttcttacatttgtgacaacccttgatctttcctcaaatgattttacaggggagatacct

SEQ ID NO: 57197 - DNA, 138 bp, Glycine max
  Clone ID: 700678491H1
cactcagttatattcgcaaactttcagctgaagacagttcctgaggcttgatgcgaagtcggccgatatatgcattgggacctcagcagcatcaactgatcttccagcctattactttgagaatgatggcactgaatt

SEQ ID NO: 57198 - DNA, 209 bp, Glycine max
  Clone ID: 700678492H1
ccatcgagtcactaggggaaatgactggtagtttgcttgaaatgaatcaggatgttgccaaagtcattctagagtgccagcaagatatatggaacaagaaggacagagagctgttctccctggtggaggacttctttgaaaatagcctccagacattgaacttctgcaacgctcttgataaatgcttgaatcgagctcgcggaaggcat

SEQ ID NO: 57199 - DNA, 115 bp, Glycine max
  Clone ID: 700678493H1
gctgaagttgatcttgaaagtgggttggttttgactgattatgagtcaaaggatgtctctactcaatggcacacaaaacaaggagagataatacttactcagagatctcgtgggg

SEQ ID NO: 57200 - DNA, 273 bp, Glycine max
  Clone ID: 700678501H1
ttgcaatgtcatttgctccaagggactctcacgaagcccaagtacaatttgctcttgaaaggggtgtacctgctgtcattggtgttctgggaaccattaaattgccttatccatctgcagcctttgacatggcacattgctctcgctgcttgattccttggggagctaatgatggaatgtatatgatggaagttgaccgagttctaagacctggtggttattgggtgctttcgggtcctccaatcaattggaagattaattacaaagcctggc

SEQ ID NO: 57201 - DNA, 266 bp, Glycine max
  Clone ID: 700678502H1
gttcaatatcctagtataccttaataaataatttaagatactatgatgagagcacggttcccattactgttgctgggacttgttttcctggcttcagtttctgtctcatttggcattgcttactgggaaaaagagaaccccaaacacaacaagtgtctccagagttgcaatagcgtcagagactcgtacaggaaccaagcatgccacgctcgttgcaacctccttaaggtggagaaagaagaatgtgaagaaggtgaaattccacg

SEQ ID NO: 57202 - DNA, 121 bp, Glycine max
  Clone ID: 700678503H1
gcaaaggattctacccgccgctcgatgggaattgcgcttcaaggcgtctcgtagggctaatccgcctcacgagggtcaccaacggcacgtgcctttggggggccgaggcccactactgctg

SEQ ID NO: 57203 - DNA, 265 bp, Glycine max
  Clone ID: 700678504H1
gatccttctgcatcatcacccttcgtataataccgtctctccctttttgcatttttctctccatcattgacttctgccaagtctttcaaaaagctagctgatcgaggaataatatagcatgcacgaggtcttcgtggaagaacataccattgacacttgccacatgccaagcgagttggtgaggtgaatgttacttatgatgttaattacactacgtccatctcactcttaatttcttaatccgagtcctttagtcaattgcttt

SEQ ID NO: 57204 - DNA, 266 bp, Glycine max
  Clone ID: 700678505H1
gaacaatcaaacagaagaggctcaaggtcgcagaagcagcagctacaggacagtcaccagaagattcgtcacttcaatgaaggagacgtactcgtgattcctcctggtgttccttactggacctataacactggcgatgaaccagttgttgccatcagtcttcttgacacctctaacttcaataaccagcttgatcaaacccctagggtattttaccttgctgggaacccagatatagagtacccagagaccatgcaacaacaaca

SEQ ID NO: 57205 - DNA, 267 bp, Glycine max
  Clone ID: 700678507H1
ccttcatttgaacagtgctttccaaagagcaccaaagaacacagggaagtcactcatgaagaaactggtcatgtgctcaaagttccctttcgtcgagttcacctgtctggggaagcaggacactttgatacctatgacactagcggtccccaaaatgtaaacccaaggacaggactcccaaaattgcgcagagggtgggttgataggagggagaaactgggttatccaagattcactcagatgtactacgctaagcaaggaatcatc

SEQ ID NO: 57206 - DNA, 119 bp, Glycine max
  Clone ID: 700678511H1
cgcacttgctaggcaatctctcattaatgctgatggcataatagagaaatcttttttgccctcaaagcattccgttgagatgtcttcagcggtttataagaattgggttcttcactgat

SEQ ID NO: 57207 - DNA, 266 bp, Glycine max
  Clone ID: 700678513H1
gattttgagaccagagtcgaaactgaaggtggcagaattcgggttctcaagaagttcactgaaaaatccaagcttcttcagggcattgagaacttccgtttggccattttggaagctagagcacacacgttcgtgtctcctcgccactttgattccgaggttgtttttttcaacatcaaggggcgagccgtacctgggttggtgagtgaaagtgaaacagaaaaaatcacccttgaacctggggacatgatacacataccagctgg

SEQ ID NO: 57208 - DNA, 264 bp, Glycine max
  Clone ID: 700678514H1
agcaaactgtttggaatcaaatggcaacagtgagaacaccattgaattttgattctagcaagcagagcttttgtcaattttctattgaccttctcggtggaggaattttagtggacaaaactggagattggatcacacttatacaaaactctccaattagtaacttgttgagagttgctgcttggaagaaaggctgtttaatggttaagattgtgatgtctggaaatgcagcagtcaaaaggagtgattgggcctcattggtac

SEQ ID NO: 57209 - DNA, 262 bp, Glycine max
  Clone ID: 700678515H1
attagggtttggcgattcagagagaaagagaaatgggagaacgaaaaggaatcccaattgctctggggctcttggcgatgctcctcttcttcattgcttcttcctcttcctctcacctcgttcgtgcttccgatgacgccgacgacgcgatcttctacgagtcattcgacgaggattttgacggacggtggattgtgtccgacaaggaggattacaacggtgtctggaagcatgctaagagtgctgggcatgatgattatgg

SEQ ID NO: 57210 - DNA, 268 bp, Glycine max
  Clone ID: 700678516H1
aaacaaggttctgtttagtagagaggaagggcagcagcaaggggagcagaggctgcaagagagcgtgattgtggaaatctcgaaggaacagattcgggcactgagcaaacgtgccaaatctagttcaaggaaaaccatttcttctgaagataaaccttttaacttgagaagccgcgaccccatctactccaacaagcttggcaagttctttgagatcaccccagagaaaaacccccagcttcgggacttggatatcttcctcagtatt

SEQ ID NO: 57211 - DNA, 270 bp, Glycine max
  Clone ID: 700678517H1
cagctgctcaggtggttaattccaaatctccatcacgtttctgtttcagttattctcttcgttcgcgacgccattttgtttcgctgaaaagattcccgacgcatctcataacttttgacaaaggatggcttcaagattctggacccagggtggaagtgattccgaggaggaggagagtgattatgatgaggaggttgataccacggtgggtgaatctggtagtcaagcagtgacaagcaggtacctgcaggataatgcaagtgacagtgt

SEQ ID NO: 57212 - DNA, 268 bp, Glycine max
  Clone ID: 700678518H1
ttaataaataatttaagatactatgatgagagcacggttcccattactgttgctgggacttgttttcctggcttcagtttctgtctcatttggcattgcttactgggaaaaagagaaccccaaacacaacaagtgtctccagagttgcaatagcgagagagactcgtacaggaaccaagcatgccacgctcgttgcaacctccttaaggtggagaaagaagaatgtgaagaaggtgaaattccacgaccacgaccacgttcacaacac

SEQ ID NO: 57213 - DNA, 266 bp, Glycine max
  Clone ID: 700678519H1
gccagcaggccaggcagataaagaacaacaaccctttcaagttcctggttccacctcaggagtctcagaagagagctgtggcttagagccctttttgtatgtgctaccccacttttgtctttttggcaatagtgctagcaaccaataaataataataataataatgaataagaaaacaaaggctttagcttgccttttgttcactgtaaaataataatgtaagtactctctataatgagtcacgagacttttgcgggaataaaagg

SEQ ID NO: 57214 - DNA, 263 bp, Glycine max
  Clone ID: 700678520H1
gcatcatgggattggaggaaaaaaggtgtcatcacccaagtaaagtaccaagggggctgtggaagcggttgggcgttttctgccacgggagccatagaagcagcacatgcaatagcaacaggagaccttgttagcctttctgaacaagaactcgtagactgtgtggaagaaagcgaaggttgttacaatggatggcactatcaatcgttcgaatgggttttagaacatggtgggattgccactgatgatgattatccttacag

SEQ ID NO: 57215 - DNA, 263 bp, Glycine max
  Clone ID: 700678521H1
cctcaacaaggagctggagctggacaaatttatcactcactctgtcccattctcagagatcaacactgcatttgatcttatgctgaaaggggagggaataaggtgcctcatctgcatggaagagtaaatcaatgatgttctctgctgaacagtgtttgcgtgtaatgtgaaaagagaattgaataaatttggcatgtaattcggttattggattcatgctacatgagtgtgtaaagaggtaatgggggtgatgactttcttgg

SEQ ID NO: 57216 - DNA, 264 bp, Glycine max
  Clone ID: 700678522H1
cggctcgaggtcatgatcatgagactaatctattcaacaagggaaggcaacaacaacaacagcatcattggtctcaaacagtgacacctatggactacttcagcacaggcctcttggtaggaccttcttcatcatctgcaagaactcaacaacaccaacaccaatcttcttcagcacatttccaactgggacatgcacatgcccttccaatctctccattcagtggagaaaaccactcagagcagctgcagcatttttccttca

SEQ ID NO: 57217 - DNA, 263 bp, Glycine max; identical to SEQ ID NO: 55674
  Clone ID: 700678523H1

SEQ ID NO: 57218 - DNA, 265 bp, Glycine max
  Clone ID: 700678524H1
atcataaaattcttccaccaagttatgggtataccttgtgttgcttcttttctccctcttaggtctctcttctagttccagcatatcaactcatcgttccatattggaccttgacctaaccaagtttaccacacagaaacaggtgtcttcactgttccaactatggaagagtgagcatggacgtgtctaccataaccacgaagaagaggcaaagagacttgagattttcaagaataacttgaactatatcagggacatgaatgca

SEQ ID NO: 57219 - DNA, 109 bp, Glycine max
  Clone ID: 700678526H1
cggctcgagtgaagtgcatccgcaagcaatattatcttgtgatgccatacatcgtgagaggagcattgtattcaaacaagagattgggagaatggtgctggatttcact

SEQ ID NO: 57220 - DNA, 260 bp, Glycine max
  Clone ID: 700678527H1
ctctcctatgttgttataggccactcatctttctggtgacaccagagtatttcagtgatcatagggtgagtgaacttacaagagaagaacctggacaattacaagttgaggaattaggagatgaaagtgaggtttctgagttgttgaggaaatggagaagaagcagaagcaagagaaaaactgtactagcacatggtggtgtgccagaaaccattgttggttcatcaacatccagcattagcatgatgactactagagaa

SEQ ID NO: 57221 - DNA, 82 bp, Glycine max
  Clone ID: 700678528H1
caagtacaatagacacgtaatcaaaaccatgcagatacgaacctgccactccatcaccacccaaacccttccacaacttctg

SEQ ID NO: 57222 - DNA, 265 bp, Glycine max
  Clone ID: 700678531H1
tgactggcggggtggctttgacaagtggcttaattgcaggagtagaagaaagagttttacatgccattcctccaaatgaagcaattgatacagtggaggttctacaatcaagggcaaatccgacgtttgtgtcttggaagggtggggcgattcttggtgtccttgatttaggcagggatgcatggataagtcgggaggactggattcacaatggggtccacgttggaagtaacagaaaatacaaggattcatattatcttcaggc

SEQ ID NO: 57223 - DNA, 269 bp, Glycine max
  Clone ID: 700678532H1
atttttaaaattaaagatgaaaatttggaagtaaattgtttgaatcaagaaataccgtctcaatgtcttctaatttgatgccaaaatctaaacttggagtaaaatttcgatttgactaaatttaagcaataatatatgaaagaaataaaatttagaaataaaatgtgaaatacataacgtaggagaagccacttggggcttattgagaaagactgtaggtcttagaattcatctcacctaagaatgactacgtagatttatattttata

SEQ ID NO: 57224 - DNA, 272 bp, Glycine max
  Clone ID: 700678533H1
ggaagagcacgagcagaaggaggaacacgaatggcatcgcaaggaggaaaaacacggaggaaagggaactgaagaggaacaagatgaacgtgaacacccacgcccacaccaacctcatcaaaaggaagaggaaaagcacgaatggcaacacaagcaggaaaagcaccaaggaaaggaaagtgaagaagaagaagaagaccaagacgaggatgaggagcaagacaaagagagccaagagagtgaaggttctgagtctcaaagagaaccacgaa

SEQ ID NO: 57225 - DNA, 266 bp, Glycine max
  Clone ID: 700678534H1
gaagccacaacagcaatcaagcagaagaggctcaaggtcgcagcagcaactacaagacagtcaccagaagattcgtcacttcaatgaaggagacgtactagtgattcctcctggtgttccttactggacctataacactggcgatgaaccagttgttgccatcagtcttcttgacacctccaacttcaacaatcagcttgatcaaaaccccagagtattttaccttgctgggaaccagatatagagcacccagagaccatgcaaca

SEQ ID NO: 57226 - DNA, 144 bp, Glycine max
  Clone ID: 700678535H1
gaagaagatcaagttactgtctatacatgtatagagagaagaagatcaagttactgtctaaagtctcaatacatgtatggatgtaattttgtgatcttaatgtattaaaaatggcattagccaaaaaaaaagaaaaaaaaaaga

SEQ ID NO: 57227 - DNA, 264 bp, Glycine max
  Clone ID: 700678536H1
ttactttcttcctccgtcttcttccctttcaaaccctagaaacagcaaaatcccccttttgatgcaaatgggatcactccaccaactctagagccacacccttcaagatttagctcatgcccacttcaattatggctccattttccacttccccccacttcacagccttcaccttcctcatcttgttcctcaaaacacaagcttttgatccactctctttcttttccttcacggattttgagaaagatccaaattttaagtcaa

SEQ ID NO: 57228 - DNA, 260 bp, Glycine max
  unsure (1)..(260): unsure at all n locations
  Clone ID: 700678538H1
tatttcccttctgagctttgattagtgtggcctagttgttgttttctcgatgagaaaggcttcttccactatgcattgcgcacttctgcgcttttgggttcccttgttgctgcttgctagcttcagctatgctccttctgtttcggccacaactgaaatttcagggaatgaagtgaacacagatgggaaggtgataaatgaagagttagcaaaaccaagtctaaaaggacatgatgaagaagcanagttcaaaggatttt

SEQ ID NO: 57229 - DNA, 264 bp, Glycine max
  Clone ID: 700678539H1
gaggaagatgaggatgaggagcagcagcgagagagcgaagaaagtgaagattctgagttacgaagacataagaataagaacccttttctcttcggctctaacaggttcgaaactctcttcaaaaaccaatatggtcgcattcgcgtcctccagaggttcaaccaacgctccccacaacttcagatttgccgagactaccgcattttggagttcaactccaaacccaacaccctccttctccccaaccatgctgatgctgattac

SEQ ID NO: 57230 - DNA, 140 bp, Glycine max
  Clone ID: 700678541H1
caggaacaggtagaaaaaaattgattaatcatttaatgactttataatttcactttcaaattcttataattagtatcttttaatatctttttatttcatttgaatataatattaatatataaataaaatgaattcgaatg

SEQ ID NO: 57231 - DNA, 262 bp, Glycine max
  Clone ID: 700678542H1
gacactcctgttgttgccgtttctattattgacaccaacagcttggagaaccagctcgaccagatgcctaggagattctatcttgctgggaaccaagagcaagagtttctaaaatatcagcaagagcaaggaggtcatcaaagccagaaaggaaagcatcagcaagaagaagaaaacgaaggaggcagcatattgagtggcttcaccctggaattcttggaacatgcattcagcgtggacaagcagatagcgaaaaacctac

SEQ ID NO: 57232 - DNA, 262 bp, Glycine max
  Clone ID: 700678543H1
gttcaatatcctagtataccttaataaataatttaagatactatgatgagagcacggttcccattactgttgctgggacttgttttcctggcttcagtttctgtctcatttggcattgcttactgggaaaaagagaaccccaaacacaacaagtgtctccagagttgcaatagcgagagagactcgtacaggaaccaagcatgccacgctcgttgcgacctccttaaggtggagaaagaagaatgtgaagaaggtgaaattc

SEQ ID NO: 57233 - DNA, 260 bp, Glycine max
  Clone ID: 700678546H1
atcattttccaaacgagcatcttcgtagtttcttaagtcaagagaagaagtgaagtgctgcttcaatggcttcaagtcaggaagaggtgatcttttgggggttattggaagcccatttctgcacagggtgcagattgctctcaaattgaagggagttgaatacaaatatttggaagatgatttgaacaacaagagtgatttgctcctcaagtataacccagtttataaaatgattccagtgtttgttcacaatgaaaagc

SEQ ID NO: 57234 - DNA, 117 bp, Glycine max
  Clone ID: 700678547H1
gaaagtgaaagtgtctgagagtgtgtgtgtgacttatggagtccaattcagagttcgacgtgattatcatcggagctggcgtcatgggcagctccaccgcctaccacgccaccaaac

SEQ ID NO: 57235 - DNA, 265 bp, Glycine max
  Clone ID: 700678548H1
ggatggagaaggtggtatgtgtgaccggcggcagctgctgcattggttcatggctcgtccatctcctcttggatcgcggctacaccgttcacgccaccgtccaaaacctcaacgatgaagccgagacgaagcatcttcaatccctcgacggagcgtccacgcgcctccgcctcttccagatggatctcctccgccacgacaccgtcctcgccgccgtgcgtggctgcgccggcgtcttccacctcgcctctccctgcattgtcga

SEQ ID NO: 57236 - DNA, 264 bp, Glycine max
  Clone ID: 700678549H1
ttaaacactcatcagtcatcaccatggccaagctagttttttccctttgttttctgcttttcagtggctgctgcttcgctttcagttccagagagcagcctcagcaaaacgagtgccagatccaaaaactcaatgccctcaaaccggataaccgtatagagtcagaaggagggctcattgagacatggaaccctaacaacaagccattccagtgtgccggtgttgccctctctcgctgcaccctcaaccgcaacgcccttcgta

SEQ ID NO: 57237 - DNA, 263 bp, Glycine max
  Clone ID: 700678550H1
gttcaatatcctagtataccttaataaataatttaagatactatgatgagagcacggttcccattactgttgctgggacttgttttcctggcttcagtttctgtctcatttggcattgcttactgggaaaaagagaaccccaaacacaacaagtgtctccagagttgcaatagcgagagagactcgtacaggaaacaagcatgccacgctcgttgcaacctccttaaggtggagaaagaagaatgtgaagaaggtgaaattcc

SEQ ID NO: 57238 - DNA, 258 bp, Glycine max
  Clone ID: 700678551H1
tgatttctccctcttcgctctctctcagtgaccagagacagatgatgatggagatggcgaacgaaacgctgtcgttgcggcactcgcggcgttggtgctactcgcggcgagtgtggcggtggatgctcaggagaactcggacgtgaagacgctggtgaagtacaagcacgggaagaagtactgcgacaaaggatgggaatgtaagggctggtcaatttactgttgtaacctcaccattaccgattatttccagaccta

SEQ ID NO: 57239 - DNA, 260 bp, Glycine max
  Clone ID: 700678552H1
cataaacgatgccgaccagggatcagcggatgttgcttttaggactccgctggcaccttatgagaaatcaaagtctttgggttccggggggagtatggtcgcaaggctgaaacttaaaggaattgacggaagggcaccaccaggagtggagcctgcggcttaattcgacgtacgctgcgatgaaacccaccaagccagggttggaggagtcccaggaacagatccataagataaggatcaccctttcttccaagcacgtc

SEQ ID NO: 57240 - DNA, 252 bp, Glycine max
  Clone ID: 700678553H1
tcctacgataccaaattcgaggagataaacaaggttctgtttagtagagaggaagggcagcagcaaggggagcagaggctgcaagagagcgtgattgtggaaatctcgaaggaacagattcgggcactgagcaaacgtgccaaatctagttcaaggaaaaccatttcttctgaagataaaccttttaactaacaaagccgcgaccccatctactccaacaagctaggcaagttctttgagatcaccccagag

SEQ ID NO: 57241 - DNA, 262 bp, Glycine max
  Clone ID: 700678555H1
caaaagcgcgctcttgtgttccgtttccgtttgtttctgttttctttctctttcagatctcgaaaaatgcagagcgcggctttcactttctctccctctctccctctccgcaacccttcccctaactattggaggagaccttctctctccctccgtctctcggccaaacacggcaacagcaacagcgatgacgtgaactccaatggcgtttcttcaactttcttcactcgccgatcttggactcttcctccttcctcttcct

SEQ ID NO: 57242 - DNA, 257 bp, Glycine max
  Clone ID: 700678557H1
tgacggcaacgttagggagtccggagacgtcggcgggggccccggaaagagttatcttttctgtttaacagcctgcccaccctggaaacggctcagccggaggtagggtccagcggctggaagagcaccgcacgtcgcgtggtgtccggtgcgcccccggcggcccttgaaaatccggaggaccgagtgcctcccacgcccggtcgtactcataaccgcatcaggtctccaaggtgaacagcctctggtcgatggaa

SEQ ID NO: 57243 - DNA, 257 bp, Glycine max
  Clone ID: 700678558H1
caaaaagaaagaatcccaggcgaggagaaagatggaggggaaggagcaggatgtgtcgttgggagcgaacaagttccccgagagacagccgattgggacggcggcgcagagccaagacgacggcaaggactaccaggagccggcgccggcgccgctggttgacccgacggagtttacgtcatggtcgttttacagagcagggatagcagagtttgtggccacttttctgtttctctacatcaccgtcttaaccgtta

SEQ ID NO: 57244 - DNA, 258 bp, Glycine max
  Clone ID: 700678561H1
caggataaagcatttgaaaatgccttggcaattcaccctgaggatgcttcagaccggtgggagaagattgcagctgatgtaccagggaaaaccttggaagagattaaacaccactatgagctcttggttgaagatgttagccagatcgaatccggttatgtgcctttaccatcttataattcttctccagagggctcaacaagtcatgctagtgaagaaggagctggcaagaagggaggccactcttggaatagtaat

SEQ ID NO: 57245 - DNA, 251 bp, Glycine max
  Clone ID: 700678562H1
tgcagagcagagagagacgcagccatggggcgaagacccgcgaggtgttataggcaaattaagaacaaaccataccccaagtcacggttttgccgtggtgttcctgatcccaagatcaggatttacgatgttggtatgaagaagaagggtgttgatgagtttcctttctgtgtccatctggttagttgggagaaggaaaacgtttctagtgaggccctggaagctgctcgtattgcttgcaacaagtacat

SEQ ID NO: 57246 - DNA, 263 bp, Glycine max
  Clone ID: 700678564H1
gtgcagggtcttatcaagcatttcaggcctgagcttgagagaaggattagagagcatgcagaaagggagcttctgcaggccactggctaggcgtttactaaggggtgtgactgtactggtggatagcaagagtcagaataagacagtgccagtcattttggaatgataggtggctcaggttactgcagctttatcgctacttctgttttcttttatgctgcagcaattatggctggaccatacctgggaaaccatttgggcga

SEQ ID NO: 57247 - DNA, 260 bp, Glycine max
  Clone ID: 700678566H1
cttgttattctctttctctttcatcatttggcttaaaacacacacacaaaaggtggccaaaatgagcagtgtctgtgccaagcagcacaagttttacccctctcaccaactcctttctccaaagaaaaccctcagagaaattgacatccctccaaggaagctcctcactcgccgtgccgccgcatgcgtcggcggcaccgacgtgtactcctccgaggagaccatgctgcaaaagttcctcccttccaacgattctgacg

SEQ ID NO: 57248 - DNA, 258 bp, Glycine max
  Clone ID: 700678567H1
aaatgacaacccttgaagatggtaaccactgatatgacgaccttgatccaatttactttcgcaatgttgtttgtaatcactaaccgtttaacggtagcagttgtgtgtgttaattataactactgttcgcattcctgctatgcatggtgagatgttgtactttcaatgttgatcccatagtactaggtgattgtggaaagtaactaggacggccaagaaacatcagaaactcaactaccactgttcggtttagttgta

SEQ ID NO: 57249 - DNA, 259 bp, Glycine max
  Clone ID: 700678570H1
tctcgagccgaatcggctcgagattctctccattgtctttgaacactcatcaccatggccaagcttgttctttccctttgtgcccttcttttcagtggctgcttcgctctgagagagcaggcacagcaaaatgagtgccaaatccaaaagctgaatgccctcaaaccggataaccgtatagagtcggaaggtgggttcattgagacctggaaccctaacaacaagccattccagtgtgccggtgttgccctctctcgct

SEQ ID NO: 57250 - DNA, 259 bp, Glycine max
  Clone ID: 700678572H1
tgcaaagtgttgaaggatgaacaatctagtgtgacagagaaggaagaggaaactgggaagttgcttgaattcgagaagtatgtttatgggttgctcacgaaatatgaagtgtcatcagagattttcctaaggcaaagcagctacatgatttggtggaatcagtataaggcaattaagggaacttcttataattcagcactcgcagacttcatgagcaatcccgatcattataatgtgctgtatattaagggaacttata

SEQ ID NO: 57251 - DNA, 256 bp, Glycine max
  Clone ID: 700678573H1
aagtttgcaaaaattatgaaccttagacaaagtgttgttggtgatcttaaacttcttactgatgggaagttgtatgagggtaagcatattcctgtatctaatattagtgcaggggaaaatcatgtagttcaaatacccttaatggcacaggaggaaattctgtcttctagtgcaagtgatttcagaactgcaagggtgagtaaaaatagcaaacctcaagctactgcaatgcatgtgggagctatagaaattatca

SEQ ID NO: 57252 - DNA, 257 bp, Glycine max
  Clone ID: 700678574H1
agattactgagtaagggcaatgatattctgtgttgcgattatgctagttttgatggtttgattaccaagcaagttatgagcaagatggcagaaatgataaacagtctttgtggtggtgatgaaaaattgatgcgtgaaaggacgcacctgctgttggcttgttgttcaaggatggcaatttgtaagaatgatgtttggagagttgaatgtggaatcccttctggatttccgctcacagttatttgcaatagcatttt

SEQ ID NO: 57253 - DNA, 165 bp, Glycine max
  Clone ID: 700678576H1
agcaaaatgaccaagttcacaatcctcctcatctctcttctcttctgcatcgcccacacttgcagcgcctccaaatggcaacaccagcaagatagctgccgcaagcagctccagggggtgaacctcacgccctgcgagaagcacatcatggagaagatccaaggc

SEQ ID NO: 57254 - DNA, 256 bp, Glycine max
  Clone ID: 700678577H1
aaaattcttccaccaagttatgggtttccttgtgttgcttcttttctccctcttaggtctctcttctagttccagcatatcaactcatcgttccatattggaccttgacctaaccaagtttaccacacagaaacaggtgtcttcactgttccaactatggaagagtgagcatggacgtgtctatcataaccacgaagaagaggcaaagagacttgagattttcaagaataacttgaactatatcagggacatgaat

SEQ ID NO: 57255 - DNA, 255 bp, Glycine max
  Clone ID: 700678578H1
gttcaatatcctagtacaccgtattaaagaatttaagatatactatgatgagagcgcggttcccattactgttgctgggagttgttttcctggcatcagtttctgtctcatttggcattgcgtattgggaaaagcagaaccccagtcacaacaagtgcctccgaagttgcaatagcgagaaagactcctacaggaaccaagcatgccacgctcgttgcaacctccttaaggtggaggaagaagaagaatgcgaag

SEQ ID NO: 57256 - DNA, 261 bp, Glycine max
  Clone ID: 700678579H1
ctcgagccgttcaattctgttcatcctttgcttcccaaagaaagagaaaataaaaagcaatgggtagccttgaagcggaaagaacaacagtaggattggcagcaagagacccttcatggattctctccccatacacctacaatctaagaaacacaggccctgatgatgtttacataaaagttcactactgtggaatttgccattctgatctccaccagattaaaaatgatcttggcatgtccaactatcccatggtcccag

SEQ ID NO: 57257 - DNA, 258 bp, Glycine max
  Clone ID: 700678580H1
gtgcagtgctgaagattggtcccaacgagccatctgagctgtctatccatgagaacgcctatggcttggctagatacgctgtcatatgccaggagaatggcctggttcccattgttgagcctgagatccttgttgatggacctcatgacattcacaagtgtgccgccgtcaccgagcgtgtccttgcagcatgctacaaggctttgaatgatcaccatgtccttcttgagggtaccctattgaagccaaacatggtca

SEQ ID NO: 57258 - DNA, 155 bp, Glycine max
  Clone ID: 700678581H1
gaaaaacctttattctctgttttgggaacatctggggtctcaatttagtggaagttaaattttgaaactttggacgaagatggcgaattgggtccaaaagaagatcactgatccccttctttccattatccgaagaggagctgaaccaaaccact

SEQ ID NO: 57259 - DNA, 254 bp, Glycine max
  Clone ID: 700678582H1
ctcgagccggccattactaccactgttcgctatgaaagatgacaaacaggctccagttcctgcttctacaaccgaaggacaacctatacgatgtaaagcggcggtttctagaagagctggtgagccgttggttattgaggacatcattgtggcgccgccaaagcctcgtgaggctcggattcgtattatttgttcctctctctgccacagcgacatcacacttcggaaccttcaggaccctcctgccattttcc

SEQ ID NO: 57260 - DNA, 256 bp, Glycine max
  Clone ID: 700678583H1
ctcgagccgcttaattattaacacttccttagttcaatatggggaagcccttcactctctctctttcttccctttgcttgctactcttgtcgagtgcatgctttgctattagctccagcaagctcaacgagtgccaactcaacaacctcaacgcgttggaacccgaccaccgcgttgagtccgaaggtggtttgattcaaacatggaactctcaacaccctgagctgaaatgcgccggtgtcactgtttccaaact

SEQ ID NO: 57261 - DNA, 257 bp, Glycine max
  Clone ID: 700678584H1
aagaagaagaagaacaagaacacagaatggaagaagacgaggacgaaagcgaagaagaagaggaacaattttgggacgattgggaaggagaagacgaagaaggagagcagcgagactctgaattcgtgtgtctcttctgtgaatcccggtacagctcgtgcggttccttgttcgaccactgcgcctcccttcaccgctttgatttccacgcgattagaacaactcttagcttggatttctatgcctccttcaagctc

SEQ ID NO: 57262 - DNA, 54 bp, Glycine max
  Clone ID: 700678585H1
gttctagatcgcgagcagccgcccttttttaattattttttttttatttataaa

SEQ ID NO: 57263 - DNA, 255 bp, Glycine max; identical to SEQ ID NO: 57255
  Clone ID: 700678586H1

SEQ ID NO: 57264 - DNA, 255 bp, Glycine max
  Clone ID: 700678587H1
gggttttagggcagcttctttctttgagattaagtttcagtagtaatgggtaaggaaaaggttcacattaacatcgtggtcattggccatgtcgactctgggaagtcaaccaccaccggtcaccttatctacaagctcggaggtattgacaagcgtgtcatcgagagattcgagaaggaagctgctgagatgaataagaggtctttcaagtatgcctgggtgcttgacaagctcaaggctgagcgtgaaagagga

SEQ ID NO: 57265 - DNA, 245 bp, Glycine max
  Clone ID: 700678588H1
agcaaactgtttggaatcaaatggcaacagtgagaacaccattgaattttgattctagcaagcagagcttttgtcaattttctattgaccttctcggtggaggaattttagtggacaaaactggagattggatcacacttatacaaaactctccaattagtaacttgttgagagttgctgcttggaagaaaggctgtttaatggttaagattgtgatgtctggaaatgcagcagtcaaaaggagt

SEQ ID NO: 57266 - DNA, 240 bp, Glycine max
  Clone ID: 700678590H1
agcagattcaaaatcaggttgttaggccattccttgactgttgcagagtagtgtcaatactttgttgaggtgactgaccattgtgatgatcacaaattgattagtgatgaaacacaaatcctgtctaaatagatttgtttgctttcatgacagcacaccatgccaatgagttcaggtggaaaaaactgtagataccattcatggacttcagaactcagaacatacgcttacaattttgac

SEQ ID NO: 57267 - DNA, 257 bp, Glycine max
  Clone ID: 700678591H1
gaacacgaatggcatcgcaaggaggaaaaacacggaggaaagggaagtgaagaggaacaagatgaacgtgaacacccacgcccacaccaacctcatcaaaaggaagaggaaaagcacgaatggcaacacaagcaggaaaagcaccaaggaaaggaaagtgaagaagaagaagaagaccaagacgaggatgaggagcaagacaaagagagccaagaaagtgaaggttctgagtctcaaagagaaccacgaagacataa

SEQ ID NO: 57268 - DNA, 255 bp, Glycine max
  Clone ID: 700678592H1
tcctagtataccttaataaataatttaagatactatgatgagagcacggttcccattactgttgctgggacttgttttcctggcttcagtttctgtctcatttggcattgcttactgggaaaaagagaaccccaaacacaacaagtgtctccagagttgcaatagcgagagagactcgtacaggaaccaagcatgccacgctcgttgcaacctccttaaggtggagaaagaagaatgtgaagaaggtgaaattcc

SEQ ID NO: 57269 - DNA, 257 bp, Glycine max
  Clone ID: 700678593H1
gccccccaaaaatgaagagcaccatcttctttgctctctttctcttttgtgccttcaccacctcatacctaccttcagccatcgctgatttcgtgctcgataatgaaggtaaccctcttgaaaatggtggcacatattatatcttgtcagacataacagcatttggtggaataagagcagccccaacgggaaatgaaagatgccctctcactgtggtgcaatctcgcaatgagctcgacaaagggattggaacaatc

SEQ ID NO: 57270 - DNA, 257 bp, Glycine max
  Clone ID: 700677910H1
ccttaaacactcatcagtcatcaccatggccaagctagttttttccctttgttttctgcttttcagtggctgctgcttcgctttcagttccagagagcagcctcagcaaaacgagtgccagatccaaaaactcaatgccctcaaaccggataaccgtatagagtcagaaggagggctcattgagacatggaaccctaacaacaagccattccagtgtgccggtgttgcctctctcgctgcaccctcaaccgcaacgc

SEQ ID NO: 57271 - DNA, 271 bp, Glycine max
  Clone ID: 700677912H1
ccttatcctcgtagggggagaactggtagaaaaccaacaaggaaagatcctaatagtgagagtaggagcaatgatgtttatcttccaagagatgaggcttttggacacttgaagtcatctgactttcttacttatggactaaaatccgtatctcaaaatgttcttccattattgcaatctgcttttgatttgaatttcacaccccgtgagtttgatagctttgatgaagtcatggactctattcaggcggaattaagctgccaacagatat

SEQ ID NO: 57272 - DNA, 274 bp, Glycine max
  Clone ID: 700677914H1
tgcctctagggttatcatttctccatttccattttctctctcacttttcaagaatcgtaagctatgggaaagtcttacccaactgtgagtgctgattactagaaggccgttgagaaggcgaagaagaagctcagaggcttcatcgctgagaagagatgcgctcctctaatgctccgtttggcatggcactctgctggaacctttgacaagggcacgaagaccggtggaccttcggaaccatcaagcaccctgccgaactggctcacagcgctaa

SEQ ID NO: 57273 - DNA, 205 bp, Glycine max
  Clone ID: 700677916H1
tacaacactctccaaactcacctcaaaaaaatttcaacttctcaccatggctgatggtagtagtagcaacaccaagagaaattccctcatcctccatcaccccacaaacttaaagggtggttggaatgctgccatcttcatcatatttgtggaatttgctgagagatttgcttatcaagggttggcaagtaatctcatccaatat

SEQ ID NO: 57274 - DNA, 270 bp, Glycine max
  Clone ID: 700677917H1
tgtggattctccttgctgtctggtgacaggtgaatatgggtggacagccaacatggaaaggattatgaaagcacaggcattgagggacagcagcatggctggatacatgtcaagcaagaagacgatggagattaaccctgagaaccccatcatggaggagctgaggaagcgagcagatgctgataagaatgacaagtctgtgaaggatctcgagctcttgctctttgagactgccttctaacttctgggtttcaccttgatgatcccaac

SEQ ID NO: 57275 - DNA, 192 bp, Glycine max
  Clone ID: 700677918H1
ctcgagccgcgcaagcgaaaagaaagaatcccaggcgaggagacagatggaggggaaggcgcaggatgtgtcgttgggagcgaacaagttccccgagagacagccgattgggacggcggcgcagagccaagacgacggcaaggactaccaggagccggcgccggcgccgctggttgacccgacggagtttac

SEQ ID NO: 57276 - DNA, 216 bp, Glycine max
  Clone ID: 700677920H1
ctcgagccggaagaaaaaagagaagaagatgggtttgaagaacaacatggtggtgctaacggtgtgtttggtgctacttttccttgtggggtgtactactagtgccaacttgaggctgagtaagcttggcctgctcatgaaaagtgatcatcatcaacactcaaatgatgatgagtcttcaaaaccatgctgtgatcaatgcgcatgcacaaagtc

SEQ ID NO: 57277 - DNA, 272 bp, Glycine max
  Clone ID: 700677921H1
tctctccattgtctttgaacactcatcaccatggccaagcttgttctttccctttgtttccttcttttcagtggctgcttcgctctgagagagcaggcacagcaaaatgagtgccagatccaaaagctgaatgccctcaaaccggataaccgtatagagtcggaaggtgggttcattgagacctggaacccaaacaacaagccattccagtgtgccggtgttgccctcttcgctgcacccttaaccgcaatgcccttcgtagaccttcctac

SEQ ID NO: 57278 - DNA, 268 bp, Glycine max
  Clone ID: 700677922H1
ccaaatggctattccttcactaataaaccagccacaaagaacaccctctctcacattctccttcctcctctttctcgctatctgcaccccattggatgctgctcacaccgacttcgcaggttcagcctgcctcaaagtttcccctagccacttcgccggatcggtcaccgaagtcatcgctgccatacgtcaactcgcttcgatcctctcacgcttcgggtctcccttgctaacttccgcctcagtaccgccatcgccgcctgcctgg

SEQ ID NO: 57279 - DNA, 266 bp, Glycine max
  Clone ID: 700677924H1
tgataacttaattagtgttcatgaatatgtcaagccttactttagtggttctaaattgaaaagctttctagctggtcataatatcaccattactgatggtattgacaaaactagtgcgactttgcaatttagaaagttagcagattgtgattttctcaagagaaattttaagcagatgtctaatgttttgtgggtggctcctgaggacaaggcgagtttatggtcacacttcattatgtttcgtgtaataatctggaaatgcaaga

SEQ ID NO: 57280 - DNA, 268 bp, Glycine max
  Clone ID: 700677925H1
ctcgagcgaatcggctcgaggttttttttgttcctcactgaacaagccaccgcgatgagaaccaaactttctttagcactctttttctttttacttttagccttattttcaaacctagcctttggcaaatgtaaagaaaccgaggtagaagaagaagaccctgagctcgtaacatgcaaacaccaatgccaacagccacagcaatacactgagggtgacaagcggtatgcttgcaaagatgtgacaggtatcatcgtatgaagcaaga

SEQ ID NO: 57281 - DNA, 270 bp, Glycine max
  Clone ID: 700677926H1
tgctcgagctgcaccaccccttcttccttttcatcaggtttattccttttcttttggttcaattttgctgaatggagagtgcaagaatcagcaaatggttaaatcttctagtttgtgtactgctattgcttaaggcagaaggatctcttgttccattgactttggtgaagaatgcagacccaaaaggagctgtttgtttggatggaagccccccagcataccactttgacaacggatttgaagaagggattaagaactggattgttcact

SEQ ID NO: 57282 - DNA, 264 bp, Glycine max
  Clone ID: 700677927H1
cgaggatctttcttctctccaccatcgttgggttgtgtttgcgtgtctctccgtaaattgccttcgactgtgacaacacgcaccgatcgccatgaacatcttcaccaagaaacccaccgccaaagaggctcttcgtgagagtaaacgtgaaatgacaaacgccagtagaggtatagagaaggaaattggagctctacaatcggaagaaaaaaagcttgttgctgagtaaagagaactgctaagacgggaaatgaggcagcaact

SEQ ID NO: 57283 - DNA, 263 bp, Glycine max
  unsure (1)..(263): unsure at all n locations
  Clone ID: 700677928H1
ctcgagccgcactcatcaccatggccaagcttgttctttccctttgtttccttcttttcagtggctgcttcgctctgagagagcaggcacagcaaaatgagtgccagatccaaaagctgaatgccctcaaaccggataaccgtatagagtcggaaggtgggttcattgagacctggaaccctaacaacaagccattccagtgtgccggtgttgccctctctcgctgacccttaaccgcaatgcncttcgtagaccttcctaca

SEQ ID NO: 57284 - DNA, 269 bp, Glycine max
  Clone ID: 700677929H1
ctcgagcgcggactttgagcttgagagaccacctcccccaatcaagagtggtcctaatgcacacccgaagaagctgctacatggatccggacttaatggatctggacttcatctatctaaccacagtaatggtgatgggttggacctctctcctgtcagcagcaaaaaaaggaaggactttttccctcatggaaatgaagaagaatgttacttggctgttaatccccatctgatcgtataccagatatagaaatgcacccaaccgagcc

SEQ ID NO: 57285 - DNA, 269 bp, Glycine max
  Clone ID: 700677930H1
cagaccatggccatatcttttgaggttaccgagttaccagttagatcagccttggattctggcgagtttatactctggaactgtctgcatctggaactaccaatctcagaccatggccaaatcttttgaggttgatctatcgcattgatgtcaatgtgaaaaacctctactgggctgacagtggtgatctagtaacaattgctagcgatacatcattctacattctgagtacaatcgtgatgttgttgtatcacatttagatagtggaa

SEQ ID NO: 57286 - DNA, 239 bp, Glycine max
  Clone ID: 700677931H1
aacagagttgttgtaggacgcacctgagttggctgatgggtgtccatatttgtatgctatggtgcatgatagttcagtgtctacaataccaggtgattttgtcattggtgttaagttgacaaccataaacaatatgtgtgcatatgggctcaatcctggtatttcaggttctcgtcttttgggtaccattcctcagtctatttcacagcaaactgtttggaatcaaatggaacagtgag

SEQ ID NO: 57287 - DNA, 175 bp, Glycine max
  Clone ID: 700677932H1
tctcgagcgaatcggctcgagggtgtaggcacctagctagtagctacaatatcagcacttctctctattgataaacaattggctgtaatgccgcagtagaggacgatcacaacatttcgtgctggttactttttgttttatgggtctagcaaaggaaacaacaatgggaggtaga

SEQ ID NO: 57288 - DNA, 163 bp, Glycine max
  Clone ID: 700677933H1
cccctatgaatcccttgtattttttgtccagcatctttacatgtacactaattggtgttatgataagtggtgttggtatccaataagcctccactgaagtctgttgaacagccagatagggccaatgttgtggccacaattgatcccctgggagagttggtta

SEQ ID NO: 57289 - DNA, 260 bp, Glycine max
  Clone ID: 700677937H1
agaatctcttgattagggtggctgagagactccctgaagctcttttggatgttataaagaagaagcaagtggaaagatgtttagaaccccttaatgagattgatgtacgatggaaacttcttaatggaaaaattgcatctcctgaaactaggccattgcttttggaggcagtgtccatgtttcatgaatgctttgatcctatagttgatccagctgctggacgtgacttattcctgccatggtttatggaaggaatttgc

SEQ ID NO: 57290 - DNA, 267 bp, Glycine max
  Clone ID: 700677941H1
aattcttccaccaagttatgggtttccttgtgttgcttcttttctccctcttaggtctctcttctagttccagcatatcaactcatcgttccatattggaccttgacctaaccaagtttaccacacagaaacaggtgtcttcactgttccaactatggaagagtgagcatggacgtgtctaccataaccacgaagaagaggcaaagagacttgagattttcaagataacttgaactatatcagggacatgaatgcaaacagaaaatc

SEQ ID NO: 57291 - DNA, 265 bp, Glycine max
  Clone ID: 700677942H1
ggctattgaactctctgctgaaattctgtccaatgtgaagtttatccaggagaagcgattgattggaaaatactttgaggaaatcagccaggatactgggaagtatgtttttggggttgatgatactctaaaggctttagagatgggagctgttgagacacttattgtgtgggaaaatctggatatgaataggtatgtcttgaaaaatagtgctactggtgagttgtcattaagcacttaaacaaggaacaggatgccgatcaaa

SEQ ID NO: 57292 - DNA, 267 bp, Glycine max
  Clone ID: 700677943H1
gctgatgataccgtctggaatcatccattgatttcaatccaaagcaccaaatccccaaagcaaaagtgctactgtcttagaaagagagatagagagagtgcgtttgacgccaagagagagaaaaaatggtgaacttcatgttgatgattagtgcagaccttgagaacctcaccaatctccaaccccaaggtggttgcgacgaccctaacttctcttacctcttcagttgaaatgcggaagatgcggagaactgagccagaaagaaac

SEQ ID NO: 57293 - DNA, 250 bp, Glycine max
  Clone ID: 700677944H1
ctacaacgcctcgaatccacacagttctactcttcgctctaaaccctctctctctctctctctcgatctatcatggctttgcccaatcagcaaaccgtggattaccctagtttcaaactcgtcatcgtcggtgacggcggtacaggaaagacaacgttcgtgaaaaggcatcttaccggtgaattcgagaaaaaatacgaaccgaccattggagtggaggttcaccattggatttcttcacaaactgcgg

SEQ ID NO: 57294 - DNA, 265 bp, Glycine max
  Clone ID: 700677945H1
gggtttacaaggagcaggtaaagcttttccaaacaagattgtttttgatgataagcttgtgttggctaacacacaagaattctttgatggaaattttccagtggattcttggttaccaatttttgtgaattgtctctatcctgtaagtcaattaccttcagaagctgtcgttgtaaatgttacatgtggtagtggacgtggtggtttacccaccactgcttggatagttctgcagttaacaatcgctcctcagacatcaacaaaa

SEQ ID NO: 57295 - DNA, 269 bp, Glycine max
  Clone ID: 700677947H1
cttttccccacaagctggtgcagtttggagagattcaggaaaaagttgtattgaaattttcacaagaggaatttcttacagcttggtcaactcaggtgcgtcctgcaacaaccctgttggctgatgggtgtccatatttgtatgctatggtgcatgacagttcagtgtctacaataccaggtgattttgttattggtgttaagttgacaaccataaacaatatgtggcatatgggctcaatcctggtatttcaggttctcgtcttttgg

SEQ ID NO: 57296 - DNA, 274 bp, Glycine max
  Clone ID: 700677949H1
ctcattaccagtcccaccatcttctcttcctcgcaaaccaactgaaacttctctttcttcttatccttctttgcttcttcataacaacaacaacaatcttagtgacttgaaacccattgttgtcagtggagaccccccaacttttgtttctgctccgggtcgcagaattcttgctgttggagacctacatggagatcttaagcaagctaggtctgcacttgaaatggctgtgtattgagctctgatggtcaagacttatggactggtggagaaa

SEQ ID NO: 57297 - DNA, 265 bp, Glycine max
  Clone ID: 700677950H1
gtaaaagaccaatgaataagaaggaattagcaaaaaatgaggaggacatcatagaaacatattccaattctttaacagtgcacgagactaaactgaaggttgacctaactcagtatgtagaaaagcatgaatttgtctttgatgctgttttgaatgaagaggttacaaatgatgaggtgtatcgtgaaacagtagagcccatagttccaataatatttgaacgcactaagcaatttgctttgcatacgggcaaacaggaagtggg

SEQ ID NO: 57298 - DNA, 83 bp, Glycine max
  Clone ID: 700677952H1
gagaaagtcttccatagccccccaaaaatgaagagcaccatcttctttgctctctttctcttttgtgccttcaccacctcata

SEQ ID NO: 57299 - DNA, 253 bp, Glycine max
  Clone ID: 700677953H1
gggcctcattggtacaagtgtttttaacaaacagcaacagtacagagcattttgatgcatgtaagtggacaaaatcggaaccacattcctgggaattgatcttcccaatagaggtatgtggtcctaataatggttttgaaatgtggagttctgagtgggcaaatcaaacttcatggcatttgagtttccttattgacaatcccaaacagtctaacagtttttgatatctcttggggatttctcaagattttga

SEQ ID NO: 57300 - DNA, 261 bp, Glycine max
  Clone ID: 700677954H1
attgaagctcgtgtgaaggaccttctttctcgcatgactctgagggagaagattggtcagatgacccaaattgagcgcactgttgccacctcttctgccattagagatctctccattgggagcatactcagttctggtggcagtgcaccatttgaaaatgcactgtcgtctgattgggctgatatggtggatggctttcaaaaatcagctcttcagtcgcgactggaatacctctcatctatgggattgatgcagttcatg

SEQ ID NO: 57301 - DNA, 261 bp, Glycine max
  Clone ID: 700677956H1
tgtaaattttcctcacttctggttcttctttcttcctttcacttgtttctctaaacttctaagcctttgactaataacagaagaagaagatatttttttatttgaatgttttgaagcttcttctggaattgagctttgcccatttgttgttgatgatggagaaattagtttaaactttgtttgcttaggaagttaaaacttttgcttatcgtgttgtctacactgattcatgggtttctcaattcttgtgtaaaacttggt

SEQ ID NO: 57302 - DNA, 266 bp, Glycine max
  Clone ID: 700677957H1
gcaggcccgaacaacaagaaccacgtggaagaggatgtcagactagaaatggggttgaggaaaatatttgcaccatgaagcttcacgagaacattgctcgcccttcacgtgctgacttctacaacccaaaagctggtcgcattagcaccctcaacagtctcaccctcccagccctccgccaattcggactcagtgcccaatatgttgtcctctacaggaatggatttactctccacattggaacttgaacgcgaacagtgtgatct

SEQ ID NO: 57303 - DNA, 166 bp, Glycine max
  Clone ID: 700677958H1
atcacaaccaccactacgagtttctccctctagaaccgccgaagcgaagaagagagaagagagaagagagctgagaatcacggttggctccgccatggacgcggcatcgcagctcgtctcctgcggaatcgatcccttccctcgcgccacctctccttccacacaa

SEQ ID NO: 57304 - DNA, 271 bp, Glycine max
  Clone ID: 700677959H1
tcgatctcgagcgattcggctcgaggaaagatgtttggagagttgaaactggaatcccttctggctttccgctcacagttattacgaaatagcatttttaatgagatgctcattagatatagctaggaaaaattactgcgtcaggctaaagctccaagtatgtttttacaatccttcaaaaattttgtttctttgtgtgtgtatggtgatgataacttaattagtgtcatgaatatgtcaagccttactttagtggttctaaattgaaaag

SEQ ID NO: 57305 - DNA, 264 bp, Glycine max
  Clone ID: 700677961H1
gctatggcggcgatgcagaggccactcaagagaaccattgcaatcgctctgcaacgcgcgtgcttttcctctctcctaccctccgccgctgccgccgccgccgccgataccgtcgcgcctccgcagctccccccgttcgatcaccagccgcacccttacaacggtccctccgccgatgaagtcttcgccaagcgcaaaacgttcctcggtcctttcgtcttccacactataagatacctctgaatatcgtggaagggaagatgc

SEQ ID NO: 57306 - DNA, 256 bp, Glycine max
  Clone ID: 700677963H1
ggttcgtcctgtatttcctgcacgctctcctggagcagttaacatacctacaatatcacgcccgcctgttgcagggatccctgcagttcgcccaattattccgcctgtagtcagacctgtggtagcccctagtgttactccagctgagaagcctcagaacacagtttacattggcaagattgcaccaactgtggaaaatgagttcatgctctctctccttcaattatgggaactatcgagacctggaaacgtcctc

SEQ ID NO: 57307 - DNA, 183 bp, Glycine max
  Clone ID: 700677964H1
gtgaagactagcctggacatcagtcctgaagcaacagttacggaggaagatgacactgaagtagaggctgaaagtgacgcgaaagaagattcaaagcctgaaactgatgctgttaacgatgataatgatgtcaaggacgagttgtagattttgcatgacatccactatttaatgacggtgctg

SEQ ID NO: 57308 - DNA, 271 bp, Glycine max
  Clone ID: 700677965H1
tctccattgtctttgaacactcatcaccatggccaagcttgttctttccctttgtttccttcttttcagtggctgcttcgctctgagagagcaggcacagcaaaatgagtgccagatccaaaagctgaatgccctcaaaccggataaccgtatagagtcggaaggtggggtcattgagacctggaaccctaacaacaagccattccagtgtgccggtgttgccctctctgctgcacccttaaccgcaatgcccttcgtagaccttcctaca

SEQ ID NO: 57309 - DNA, 190 bp, Glycine max
  Clone ID: 700677966H1
gtcatgggtaacaaaactacccttttgcttttgctctttgttctttgccatggagtggccacaacaacaatggccttccatgatgatgagggtggtgataaaaagtcaccaaaaagtttgtttttgatgagcaactccacgagggttttcaagtctgatgcaggggaaatgcgtgtgctgaaaagccatg

SEQ ID NO: 57310 - DNA, 185 bp, Glycine max
  Clone ID: 700677967H1
gttctttcaatgtggagatattttgttggagatctcgtctttgaagtttctaagatgacttctccctacattaaatgtacaatctctttcttcatagcatttggaaatttggctgatgacaccatcaattttgaggcttttccccacaagctggtgcagtttggagagattcaggaaaaagttgt

SEQ ID NO: 57311 - DNA, 165 bp, Glycine max
  Clone ID: 700677968H1
gcgttggcccctaccaagaaaagctcttggtggccattcggtggcgaatccaagcctcaattcaatattttcagcaagcgtcccactatctccaacggataacgtcgtttaactgaagttggtcctgacgatgatgaaaagagttggcttcaaagactcaatctc

SEQ ID NO: 57312 - DNA, 158 bp, Glycine max
  Clone ID: 700677969H1
gtgggttctgggacatttttttttgttttgttgttgattccttctgattctgagacagaggaaggaagaaccagcaacagaggaatccaagttccttcctaggaaccgcgattcctcattcatgcttcttacaactttctaccttcttttcctccctc

SEQ ID NO: 57313 - DNA, 265 bp, Glycine max
  Clone ID: 700677971H1
aacgcgaacagtgtgatctatgtgactcgagggaaaggaagagttagagtggtgaactgccaagggaatgcagtgttcgacggtgagctaaggaggggacaattgctagtggtgccgcagaactttgtggtggctgagcaagggggagaacaaggattggaatacgtagtgttcaagacacaccacaacgccgtgagcagctacattaaggatgtgtttaggcaatcccttcggaggttctttccaattcttacaaccttggcca

SEQ ID NO: 57314 - DNA, 262 bp, Glycine max
  Clone ID: 700677973H1
ctcttttgctgcatcagaggagttgtaaattaagagcatggctgcacaagctcttgtatcatcatcttctcttaccttctcagcggaggctgcaagacaaagtcttggaccaagatcactccaatctccatttggcttctccagaaaagcctcctttcttgttaaggcagctgctaccccccctgtcaagcaaggatcagacagacctttgtggtttgcatcaagcaaagtctttcttacttggatggcagccttccgggtg

SEQ ID NO: 57315 - DNA, 261 bp, Glycine max
  Clone ID: 700677974H1
gaaagaagtacagaaatgcttgcgaaatcctctatatcctttggtataccttgaatcggaaaggatatagaggttttcagaaagaagtacagaaatgcttgcgaaatgcccactacttcaaaggccgccttgttgaggctgggattggtgcaatgcttactgaactgagcagcacggttgtgtttgagaggccacatgatgaggaatttatacgcaatggagttagcatgcaaagggaatatcgcacatgtggtggtgatg

SEQ ID NO: 57316 - DNA, 252 bp, Glycine max
  Clone ID: 700677975H1
ctcctttgacgtttagcattggaaacaccatgaaacgtatatctgtcattgtgtcttccattattatcttccacacaccagttcaacccatcaatgctcttggtgccgccattgctatccttggaaccttcttgtattcacaggcgatactatagagttggggaactaagattcctctagggacttgtttgttacagttcttcatgctcaaccagggacaagcagttgattatgtaatgtgtcactgctgga

SEQ ID NO: 57317 - DNA, 262 bp, Glycine max
  Clone ID: 700677976H1
tgatgagagtgcggtttcctttgttggtgttgctgggaactgttttcctggcatcagtttgtgtctcattaaaggtgagagaggatgagaataaccctttctacttgagaagctctaacagcttccaaactctctttgagaaccaaaacggtcgcattcgtctcctccagagattcaacaaacgctccccacaacttgagaaccttcgagactaccggatttccagtttcagtcaaaacccaacacaatccttctcccccac

SEQ ID NO: 57318 - DNA, 254 bp, Glycine max
  Clone ID: 700677977H1
cagaaaagaaggagaggctcttgaaaagggctcaggcagaggctgaaggcaaaaccgttgaagctaagaagcccattgttgtgaagtatggtctcaaccatgttacctacctcattgagcagaacaaagcacagcttgttgtgattgctcacgatgtggacccaattgaattggttgtctggcttcctgcattgtgcaggaagatggaaattccgtactgcatgtgaagggaaaggcccgttgggaacggttgt

SEQ ID NO: 57319 - DNA, 266 bp, Glycine max
  Clone ID: 700677978H1
tagttcaattattatcataatttctgtgttctgtttctgttctcttctaagtaactatttggaaacctctctttctatttctctctctagaaagttccagccagccaggggtgaagaagaatggatgctataaggaagcaagcaagtaaattgagggagcaagttgccaggcaacagcaggttatacttcgacagttaggccaaattagcaatgaaccgctcatgatgatgaatccgaaattgaatgtcaccagcaacttcaaaag

SEQ ID NO: 57320 - DNA, 264 bp, Glycine max
  Clone ID: 700677980H1
tctcgagccgattcggctcggtagattgagacaaagaatagacactcaatacaatgaggttccaggctcagatggaaacaaatttgtttaaattgtctcttgatgatgttgaaactcctaaaggttccatgttggatcttaaaatttctcaatctaaaattgcacttcccaagaacacagttggaggaaccattctgcgtagtgatctatatggcaactttttgacagagggattttagagccagtgttgatttgcagcgcact

SEQ ID NO: 57321 - DNA, 260 bp, Glycine max
  Clone ID: 700677981H1
ggccatcctttgagccttaagttcgattcatttgcagttataatgctgtgtgttggaattcctaccgagtggtctgttgtggaggatctaccagaaggacctgctgttaaaattggtgagaacaaagatgcaatggatggttggtttagacttgagagagtttctgatgatgaattcaataactataagcttgtgttctgtccacagcaagctgaggatgacaaattggggatattgggattagtattgatcatgatgat

SEQ ID NO: 57322 - DNA, 233 bp, Glycine max
  Clone ID: 700677982H1
gattcatcaggcgcagggatgatgcaccaaggcctggtcagcctggtcaagccccacgtcctgctggagtaggagctcctgcccgagcttaaaagaatgttccaagtttttggggattgtttgttcagtcttatgttgcaaacttaaattccatttgctgtttatttttgaaatctcagttttgtgtagggatattatattctcttctagttgtctgcttcagtgtcggagaa

SEQ ID NO: 57323 - DNA, 159 bp, Glycine max
  Clone ID: 700677983H1
gttgctctgagatcgaagcgtttgttattgtagaagcagctgatacatagatagataaggatagggatagggttaaggccatggagcgcatcatcggcgccaagtacaagctaggtcgcaagatcggaagcggatccttcggcgaaatctacctcgcca

SEQ ID NO: 57324 - DNA, 128 bp, Glycine max
  Clone ID: 700677984H1
ctgctcgaggatttgtctgatactgcttatatcattcacttttgctgctgcgactggatgtatcgacctttctgttgggcaggagaaattccatggtcaagccttggatacccaccatttttttgaca

SEQ ID NO: 57325 - DNA, 244 bp, Glycine max
  Clone ID: 700677985H1
aaaaatgccaccaatgttgaacaggctttcatggccatggctgctgaaattaaaaacagaatggcaagccagccagtgaacaatgcgaggcctccaacagttcaaattcgaggacagccagtgaaccagaaggctggttgctgctcgacttagagagagacgaagtatttggggtcttagaagttcatgtgtctcagtggcatctaaaactagcttttcacatgctttcatatcaagattgttc

SEQ ID NO: 57326 - DNA, 179 bp, Glycine max
  Clone ID: 700677986H1
gaaattttgatatatcgcgatcacaggttgccgcaccttaaaaccggaaacaaaagcaatcgttacttgatttcaagaatctctcaatttcttcctacttctttgtgtacgatttcttaagggaaagaaaatcactctctgtgctggccacagacttcgtgaatcattttcttttccac

SEQ ID NO: 57327 - DNA, 163 bp, Glycine max
  Clone ID: 700677987H1
atcacaaccaccactacgagtttctctctctagaaccgccgaagcgaagaagagagaagagagaagagagaagggaatcacggttggctccgccatggacgcggcatcgcagctcgtctcgtgcggaatcgatcccttccctcgcgccacctatccttccccg

SEQ ID NO: 57328 - DNA, 161 bp, Glycine max
  Clone ID: 700677988H1
cagaggaaaagcgtgtggtgtcttcttctccggtggatcctcaggcctgtaatttgggattagccactcatgaatcaaaatcaatccattaaatcaaaatacctttctcactgttaactcatcaacaatacctaatttttttggttcttttttccacacaa

SEQ ID NO: 57329 - DNA, 241 bp, Glycine max
  Clone ID: 700677989H1
gtccccgccgtaatcaccgttgcgctcctgagcctggggttcctcgcctcgagtgggttcggtgtggcggcgatcacggtgctggcgtggatctacaggtacgtcaccggcaagcaaccacctggcgcggatcagttagacagcgcgcgtcacaagatcatggacaaggcgcgtgagatcaaggactacggacagcaacaaatcagcggggtccaggcttctaattctgcactcgcacgca

SEQ ID NO: 57330 - DNA, 261 bp, Glycine max
  Clone ID: 700677990H1
aattcttccccctccacccacccagcatatctctctattcctatatattagcacccctcacattaccttgtgtcaccaactactttgactcctttaccataccattacaataattatcaaacctaaccagtaaaaatggtgaccgtggaggaaatccgcaacgctcagcgttcccatggacccgccaccatcttggccttcggcaccgccacgccgtccaatgcgtctcccaagccgattaccctgactactacttccgca

SEQ ID NO: 57331 - DNA, 257 bp, Glycine max
  Clone ID: 700677991H1
cgataccaaattcgaggagataaacaaggttctgtttagtagagaggaagggcagcagcaaggggagcagaggctgcaagagagcgtgattgtggaaatctcgaaggaacagattcgggcactgagcaaacgtgccaaatctagttcaaggaaaaccatttcttctgaagataaaccttttaacttgagaagccgcgaccccatctactccaacaagcttgcaagttctttgagatcaccccagagaaaaaccccca

SEQ ID NO: 57332 - DNA, 263 bp, Glycine max
  Clone ID: 700677992H1
gtttcttcctatctagcactcaagctcaacagtcctacttgcaagggttcagcaagaatattctagaggcctcatacgacaccaaattcgaggagataaacaaggttctgtttggtagagaggaggggcagcaacaaggggaggagaggctgcaagagagtgtgattgtggaaatctcaaagaaacaaattcgggaactgagcaaacatgccaaatctagtcaaggaaaaccatttcttctgaagataaacctttcaacttga

SEQ ID NO: 57333 - DNA, 255 bp, Glycine max
  Clone ID: 700677994H1
gcggagacatcagaagacctgcttgaatggaagacagctcttgataaagccctcacacaggcaccaagtgctgcccttgttatgggacacaatgggatttttcggagtgatgcaagtgcttctatcgaagggtctttccatcaatggagggacaagcgtccaattaagtctctggttgttggaagaccaattctgctagcactagaagatattgatggaggccatctttccttgaaaaagctcttcggtttctag

SEQ ID NO: 57334 - DNA, 193 bp, Glycine max
  Clone ID: 700677996H1
atggactctagagcaacgagcaacggctgcttcagtgagaagagtattttgttctccctcggatgaaatgcaaaatttggtggccatttagcaatgagtccaaatgtattgttagtgtggtgaactagatagtgatgcaccctttcctcccttatttttttcaagttaataataatttttttttgcttaaaaa

SEQ ID NO: 57335 - DNA, 272 bp, Glycine max
  Clone ID: 700678001H1
atcacttcccttctccaacatgccaaacgacagcgttctgagtcttttcttcttcgttaccctcttcacatgccttctctctgctaattcccacgatgaccatattttcctaccgagtcaactccatgacgatgactcagtgagttgcactgctaccgacccaaaccttaactacaagccggtgatcggaatcctgacccaccccggcgacggtgcctctggccggctcatcaacgccaccggggtttcttacatcgccgcctcctacgtta

SEQ ID NO: 57336 - DNA, 269 bp, Glycine max
  Clone ID: 700678002H1
gcagtattgcatgaaccatccagaagaaatgagtaaactatcaaaattgaaggctcaaataactgaggtcaaggggataatgatggacaatattgagaaggttttggatcgtggagagaagattgaactgctggtggacaaaacagaaaacttacagttccaggctgacagcttccagaggcagggcaggcagctgagaaagtagatgtggctgcagaatctccaaatgaagctgatggtgggaggaggaatcttatcttaattataat

SEQ ID NO: 57337 - DNA, 269 bp, Glycine max
  Clone ID: 700678003H1
cggctcgagcttgctaattgatgtgttattatatcttgatcgaagtgtgggattcttgtgtaatgtgattgataattgaaaagtgaattttgaatgacgaagtggtgaagttacgtgagctatgtttaagcaagtggtatctcatttatataatatgtatatttaattgtcttgtttctctattagctaggaatgtaataactcactcccagtttgctgtctgtgtttggatcctgtgatgatcttgaacttgcgttcggggaagcaga

SEQ ID NO: 57338 - DNA, 266 bp, Glycine max
  Clone ID: 700678004H1
cttagacaaagtgttgttggtgatcttaaacttcttactgatgggaagttgtatgagggtaagcatattcctgtatctaatattagtgcaggagaaaatcatgtagttcaaatacccctaatggcacaggaggaaattctgtcttctagtgcaagtgatttcagaactgcaatggtgagtaaaaatagcaagcctcaatttactgcaatgcatgtgggagctatagaaattatcattgatagtttcgcaagtcctgactgcaacat

SEQ ID NO: 57339 - DNA, 253 bp, Glycine max
  Clone ID: 700678005H1
tgtagatcaaactttttatatctgacaatgagttcaacctgactatcattgctaggcgctcacggcattatgctgggaccagatatttgaaacgaggagtgaatgaaaagggtagagtagccaatgatgttgagacagagcagatcatctttacagatgctcgtgatggacgcccaatgcaaatcagttctgtggtgcagatccggggttcaatccctctgttctggtctcaggaaacctctagattgaatat

SEQ ID NO: 57340 - DNA, 261 bp, Glycine max
  Clone ID: 700678006H1
gcaatgggaacattttaatttgcagaagtttccttcttatgagatcgattgggattctctctgaacttcgtctttgtttttatgtctagtcttgtggctaataataataataatttaggttagtcttgctaggtggctgctgcaattgagtttttgaagattgcagtgcttcttgtaggatttcgattttttttttttagcatttggttattggctatttggtcaatatgatgtaaatctctctaccttggtcagctgggt

SEQ ID NO: 57341 - DNA, 253 bp, Glycine max
  Clone ID: 700678007H1
cggctcgagcggctcgagcggctcgagtgtctttgaacactcatcaccatggccaagcttgatctttcccattgtttccatcttttcagtggctgcttcgctctgagagagcaggcacagcaaaatgagtgccagatccaaaagctgaatgccctcaaaccggataaccgtatagagtcggaaggtgggttcattgagacctggaaccctaacaacaagccattccagtgtgccggtgttgccctcgttcgct

SEQ ID NO: 57342 - DNA, 244 bp, Glycine max
  Clone ID: 700678008H1
aagccacagtgcaagggtaaagacagacactgccaacgctcccgaggaagccaaagcaaaagcagaagaaatggcattgacgagaccatatgcaccatgagacttcgccacaacattggccagacttcatcacctgacatctacaaccctcaagccggtagcgtcacaaccgccaccagccttgacttcccagccctctcgtggctcagactcagtgctgagtttagatctctccgcaagaatg

SEQ ID NO: 57343 - DNA, 274 bp, Glycine max
  Clone ID: 700678009H1
gttgaaattttcacaagaggaatttcttacagcttggtcaactcaggtgcgtcccgcaacgactctgttggctgatgggtgcccatatttgtatgctatggtgcatgatagttcagtgtctacaataccaggtgattttgtcattggtgttaagttgacaaccataaacaatatgtgtgcatatgggctcaatcctggtatttcaggttctcgtcttttgggcaccattcctcagtccatttcacagcaaactgtttggacatcaatggcaaca

SEQ ID NO: 57344 - DNA, 243 bp, Glycine max
  Clone ID: 700678010H1
tgcgactggaaatgtcaaaatgaacatgtttgtggaaacatgtatcgctgcaagctaactgggctgactcacatctgtgataaaaactgtaaccagagaattctgtatgacaaccatagctccctttgtcgagctagtggtcaaattttccccctttcacctgcagaggaacaggcagtgagaggcgtacgaaggaagcttgatgcagagaattcgccttccgaaagctgtggttttaagcgt

SEQ ID NO: 57345 - DNA, 247 bp, Glycine max
  Clone ID: 700678011H1
ctccacggagaacacggcgacaatgaaagaggggctccgaacatcaccatggaggcctcgcctttccttagttcaatatggggaagcccttcttcactctctctctttcttccctttgcttgctactcttgtcgagtgcatgctttgctattacctccagcaagttcaacgagtgccaactcaacaacctcaacgcgttggaacccgaccaccgcgttgagtccgaagtggtcttattgaaacatgg

SEQ ID NO: 57346 - DNA, 274 bp, Glycine max
  Clone ID: 700678016H1
cttaccggcgcgtggagaggcatctcgagaatgagttgcgttacgacagagcctctctgaccgtgtggcggactggagtcgcggttcgaccgtgtgctcggcggagatcggaagtacacgtggacagcggagatcaagggagcggagaagaacgggttcgataggaagtacaagtgggttgcggaggtcgctgaggaggaagataagaagaagaagaagaataagaagaagcaggtgaaggtgctgaaggataagagcgcgaggtggactcttc

SEQ ID NO: 57347 - DNA, 264 bp, Glycine max
  Clone ID: 700678017H1
cttaattattaacacttccttagttcaatatggggaagcccttcactctctctctttcttccctttgcttgctactcttgtcgagtgcatgctttgctattagctccagcaagctcaacgagtgccaactcaacaacctcaacgcgttggaacccgaccaccgcgttgagtccgaggtggtttgattcaacatggaactctcaacaccctgagctgaaatgcgccggtgtcactgtttccaaactcaccctcaacagcaatggc

SEQ ID NO: 57348 - DNA, 253 bp, Glycine max
  Clone ID: 700678018H1
ggatgctgaagcttggactgagcattgatgaagatgctggtgaagcagatgctgacatgcctcctctcgaggacgccgatgctgatgccgatgctgagggtagcaagatggaagaagttgattaaatctaacttaattattgatttgcctttgtgtttttagaaacaatgattggggaacagtcttttactatgtttatgttttgaattttcgaaattttggaatgttggctagttaggtgccgtttcctgga

SEQ ID NO: 57349 - DNA, 268 bp, Glycine max
  Clone ID: 700678019H1
gaagaagcattatttccacttgacttgggtgcctccgcctttctcttctcaatcaaatcaatgagcatggcttctctccccaattcccccgctctttcattctcctcatctctctccaccaccgccaatctcctcccatgtcgccgcttcaccgcattcccccgccgccgcgcctcttcattctccgtgcaagctaagatccgcgaaatcttcatgcccgcactcagctccaccatgaccgagggctaaatcgtctcctggatcaaat

SEQ ID NO: 57350 - DNA, 264 bp, Glycine max
  Clone ID: 700678020H1
gttcaatatcctattataccttaataaataatttaagatactatgatgagagcacggttcccattactgttgctgggacttgtcttcctggcttcagtttctgtctcatttggcattgcttactgggaaaaagagaaccccaaacacaacaagtttctccagagttgcaatagcgagagatactcgtacatgtaccttacatgccacgctcgttgcaacctccttaaggtggtgatagaagaacttgtagaatgtgaaattcca

SEQ ID NO: 57351 - DNA, 247 bp, Glycine max
  Clone ID: 700678021H1
atctagactcactgctgaaattaaatatatgcggaatttgagtaatattcatattgccggcttattgtacgacggcagatacaaattctggactaaacacgataaaaatcttgctttgactgaagaggataagatggctgtgattagatatagtggcattcctgctgatgttcttgcaaagcgagctcatgaatttgaaaaacatgatgctcatgatagcctcaaggatcaaattcctgctgttgac

SEQ ID NO: 57352 - DNA, 265 bp, Glycine max
  Clone ID: 700678022H1
ctcgagccgcgcaacaaaaagaaagaatcccaggcgaggagaaagatggaggggaaggagcaggatgtgtcgttgggagcgaacaagttccccgagagacagccgattgggacggcggcgcagagccaagacgacggcaaggactaccaggagccggcgccggcgccgctggttgacccgacggagtttacgtcatggtcgttttacagagcagggatagcagagtttgtggccacttttctgtttctctacatcaccgtcttaa

SEQ ID NO: 57353 - DNA, 268 bp, Glycine max
  Clone ID: 700678023H1
ctttgagatcaccccagagaaaaacccccagcttcgggacttggatatcttcctcagtattgtggatatgaacgagggagctcttcttctaccacactgcaattcaaaggcgatagtgatactggtaattaatgaaggagatgcaaacattgaacttgttggcctaaaagaacaacaacaggagcagcaacaggtagagcaacctttggaagtgcggaaatatagagccgaattgtctgaacaagatatatttgtaatcgcagcaggt

SEQ ID NO: 57354 - DNA, 242 bp, Glycine max
  Clone ID: 700678025H1
gcgagagagactcgtacaggaaccaagcatgccacgctcgttgcaacctccttaaggtggagaaagaagaatgtgaagaaggtgaaattccacgaccacgaccacgcccacaacacccggagagggaacctcagcaacccggtgagaaggaggaagacgaagatgagcaaccacgtccaatcccattcccacgcccacaacctcgtcaagaagaagagcacgagcagagagaggaacaggaa

SEQ ID NO: 57355 - DNA, 266 bp, Glycine max
  Clone ID: 700678027H1
cgcagcaaaaagaaagaatcccaggcgaggagaaagatggaggggaaggagcaggatgtgtcgttgggagcgaacaagttccccgagagacagccgattgggacggcggcgcagagccaagacgacggcaaggactaccaggagccggcgccggcgccgctggttgacccgacggagtttacgtcatggtcgttttacagagcagggatagcagagtttgtggccacttttctgtttctctacatcaccgtcttaaccgttatggg

SEQ ID NO: 57356 - DNA, 265 bp, Glycine max
  Clone ID: 700678030H1
ctttctctctactacttgtgttgtgttgtgtgtgtgggggttaagttcagcctttgattccgatggatcttcacggaaacccccacaattctgggatgaagaaacgaaagccggagcaggatactttgatcagtgatcatggaaattctgtgagtgtgggagagtcatctgggagtggtgatctctgcaagagttctacctcaggatcactgaattcaaacaatcaaaatggttccaattctgatatttcatgtcatgatgatga

SEQ ID NO: 57357 - DNA, 273 bp, Glycine max
  Clone ID: 700678031H1
catggccaccgagcacgaaaagcagttaattgtggccaaaccgaaccctaacaccataagccctcgccgatcctccacctcttcatcgctcgccatcatctacggcattttcgcgagaaaaagcttcttctacgacaggcttccctcccaaccactcagactcaccgttctcaaactcgacggttcctgcttccatattcaagtttcgaagaccgccaccgttgcggaactgaaggacgcagtggaggccgtgttcagtcacgtgcctcacaa

SEQ ID NO: 57358 - DNA, 273 bp, Glycine max
  Clone ID: 700678032H1
gagaagagggtcagagtgagaaagagagagagagagagagaaatcgagagatattcgcgaaccctaatttcggaaagatcggcgatggctgcctccaaggatcgcgagaacttcgtctacatcgccaagctcgccggacaggccgtgcgatacgaagagatggtggaatcaatgaagaacgttgcgaatctcgacgttgaactgactgtggaggagcggaatttactttctgttgggtacaagaatgtgattggtgctcggagacaatcgtgg

SEQ ID NO: 57359 - DNA, 268 bp, Glycine max
  Clone ID: 700678033H1
aagaaagtcttccatagccccccaaaaatgaagagcaccatcttctttgctctctttctcttttgtgccttcaccacctcatacctaccttcagccatcgctgatttcgtgctcgataatgaaggtaaccctcttgaaaatggtggcacatattatatcttgtcagacataacagcatttggtggaataagagcagccccaacgggaaatgaaagatgccctctcactgtggtgcaatctcgcaatgagctcgacaaagggattggaa

SEQ ID NO: 57360 - DNA, 266 bp, Glycine max
  Clone ID: 700678035H1
gttggcctaaaagaacaacaacaggagcagcaacaggaagagcaacctttggaagtgcggaaatatagagccgaattgtctgaacaagatatatttgtaatcccagcaggttatccagttgtggtcaacgctacctcaaatctgaatttctttgctattggtattaatgccgagaacaaccagaggaacttcctcgcaggttcgcaagacaatgtgataagccagatacctagtcaagtgcaggagcttgcattccctgcgtctgc

SEQ ID NO: 57361 - DNA, 231 bp, Glycine max
  Clone ID: 700678037H1
aaagtagaaagaagtagagacggagcagaagaaggatccacaccgttctcttcctctcttcttctccttcttcattaccaaacctaaaagtgatttatgatatgatggagtttggtgtgaatttgatttgctgattcaacgattaggatcaactgtcactggttttgtgttgagactaaaatgtcaatgtcaggatttgaagggcaatgtagtaatgatgagattagagag

SEQ ID NO: 57362 - DNA, 240 bp, Glycine max
  Clone ID: 700678038H1
aagccacagtgcaagggtaaagacaaacactgccaacgcccccgaggaagccaaagcaaaagcagaagaaatggcattgacgagaccatatgcaccatgagacttcgccacaacattggccagacttcatcacctgacatctacaaccctcaagccggtagcgtcacaaccgccaccagccttgacttcccagccctctcgtggctcagactcagtgctgagtttggatctctccgcaag

SEQ ID NO: 57363 - DNA, 263 bp, Glycine max
  Clone ID: 700678039H1
gcaaacattgaacttgttggcattaaagaacaacaacagaagcagaaacaggaagaggaacttttggaagtgcaaaggtacagagctgaattgtctgaagacgatgtatttgtaattccagcagcttatccatttgtcgtcaacgctacctcaaacctcaatttccttgcttttggtatcaatgctgagaacaaccagaggaacttccttgcaggcgagaaagacaatgtggtaaggcagatagaaagacaagtgcaggagct

SEQ ID NO: 57364 - DNA, 251 bp, Glycine max
  Clone ID: 700678040H1
gcagtttcctctatccactttcacaacgcccatgtcttacccgaaccagacctttttatgcacactcccggtggtaaccgcattccagcgcacgcaaccattctggcttcggcatccccagttttagaaaacgtcattgcgtccaaccgagtcgtcaaaatccacggcgttcccgacggcgccgtcacggccttcgtagcgttcctctactcctccaggtgcacggaggacgacatggacaagtacggaat

SEQ ID NO: 57365 - DNA, 242 bp, Glycine max
  Clone ID: 700678042H1
cgttcgcgtcctccagaggttcaacaaacgctcccaacagctacagaatctccgagactaccgcattttggagttcaactccaaacccaacacccttcttctcccccaccatgctgacgctgattacctcatcgttatccttaacgggactgccattcttaccttggtgaacaacgacgaccgagactcttacaaccttcaatctggcgatgccctaagagtccctgcaggaaccacatact

SEQ ID NO: 57366 - DNA, 271 bp, Glycine max
  Clone ID: 700678045H1
gccagctggtggctaactacaactcacttcaggccctgaatctgcttggaaatccaattcaaagcaacatcagtgatgatcagctgcgcaaagcagtttgtggtcttcttccaaagcttgtttacctgaacaagcaatctatcaagactcaaaggggacgagaaatactcactgatagtgttgccaaagctgcacttggtaacagcagccggacctcctacagaagagcactaaagaaaggtggcggccatggagggtcaagttccagtgt

SEQ ID NO: 57367 - DNA, 261 bp, Glycine max
  Clone ID: 700678046H1
aaattcctcgtggaatcttgttgaagccatgtctacagctggtcaggtcatcaagtgcagagctgcggtggcatgggaagcagggaagccactatcgatagaaaccatagaagtggcaccaccccagaaaggtgaagtgcgtttgaagatcctcttcaactccctttgccgtacagatgtttactggtgggatgctaagggccagactccgctgtttcctcgtatcttaggccacgaagcttcggggattgtggagagcgt

SEQ ID NO: 57368 - DNA, 268 bp, Glycine max
  Clone ID: 700678047H1
ttcttctcttgcggctagggttttagcgcacatcttctagatttaaggaagatgggtaaggaaaaggttcacatcagtattgtggtcattggccatgtcgactctgggaaatccactaccactggtcacctgatttacaagcttggaggcattgacaagcgtgttattgagaggtttgagaaggaagctgctgagatgaacaagaggtctttcaagtatgcctgggtgctggacaaacttaaggctgagcgtgaaagaggaatcacca

SEQ ID NO: 57369 - DNA, 271 bp, Glycine max
  Clone ID: 700678048H1
gccttactttagtggttctaaattgaaaagctttctagctggtcataatatcaccattactgatggtattgacaaaactagtgcaactttgcaatttagaaagttagcagattgtgattttctcaagagaaactttaagcagatgtctaatgttttgtgggtggctcctgaggacaaggcgagtttatggtcacaattcattatgtttcgtgtaataatctggaaatgcaagaagcttatcttgtcaatctcgtaaatgtgttacgagaat

SEQ ID NO: 57370 - DNA, 263 bp, Glycine max
  Clone ID: 700678049H1
aaagaatggaagatgcaaccatcttggttcctttcattaatctacattatcttccttacgcatcattaaatacaacaggccatgaaaatgtatcgaatttgcataaaaatgtgtgcaaacattataatttaatttataggataatttttaacgaacgtgtggattaatttatgtgtaattgttttaacttaactaattgagtataatggaataaaatggccacttgtattgttaaaaaaaaaaaaatacaaacaaaaaaaata

SEQ ID NO: 57371 - DNA, 84 bp, Glycine max
  Clone ID: 700678050H1
agcgaggaaagtatcgggctatgtaactatgactagagcttcaactatgaataaataaatcgacagcatatgatgcttttgttt

SEQ ID NO: 57372 - DNA, 237 bp, Glycine max
  Clone ID: 700678051H1
attcaatgtatagcctcacaattgatgaagttcagaatcatttaggtgacttagggtaaccactgagtagcatgaaccttgacgaacttctaaaaaatgtgtggaccgttgaggcaaaccagtccactggtgtggacattgagggtacagctcaaactagacaagctgcgctgcagcgtacaggctagtctttcattaactagtgctctaagcgggaagactgttgatgatgtttgg

SEQ ID NO: 57373 - DNA, 262 bp, Glycine max
  Clone ID: 700678053H1
gttcaatatcctagtataccttaataaataatttaagatactatgatgagagcacggttcccattactgttgctgggacttgttttcctggcttcagtttctgtctcatttggcattgcttactgggaaaaagagaaccccaaacacaacaagtgtctccagagttgcaatagcgagagagactcgtacaggaaccaagcatgccacgctcgttgcaacctccttaaggtggagaaagaagaatgtgaagaaggtgaaattc

SEQ ID NO: 57374 - DNA, 252 bp, Glycine max
  Clone ID: 700678055H1
atcaagtgaagagcaccaccaccatggcaaatttatagagggacctgtggtggaaagggatcaaaggaggacattactcgtcactgaatttggagagatcactgccattgacatctaggaaggactaaaggaactaccctaccatcttcagttcatcacattggagccaaactcgctatttctccctgtgcttctccaagcagacatggtcttttatgttcatacagggagtcgaaagctgacttaggcaaa

SEQ ID NO: 57375 - DNA, 244 bp, Glycine max
  Clone ID: 700678059H1
caactaaataagaaatgaagagtactatcttctttgctctctttctagtttgtgccttcaccatctcatacctgccttcagccaccgctcagttcgtgctcgacactgatgatgatcctcttcaaaacggtggcacatactatatgttgccagttatgagaggaaagggcggtggaatagaagtagattcaactggaaaagaaatatgccctctcactgttgtgcaatcacccaatgagctcga

SEQ ID NO: 57376 - DNA, 262 bp, Glycine max
  Clone ID: 700678060H1
gtacttgttcggagtcgtccccggagactatggttatgacccatttggtcttagcaagaagccagaagatttttccaaatattcggcatttgaattgattcacgccatatgggcaatgcttggtgctgctggattcatcattaccgaggccttcaacaaatatggagcaaactgcggtcctgaggctgtttggttcaagactggagctctgcttcttgatgggggtaccttgaactacttcgggaaacccatccccatcaat

SEQ ID NO: 57377 - DNA, 240 bp, Glycine max
  Clone ID: 700678061H1
cttgagccgtgataagccagatacctagtcaagtgcaggagcttgcattccctgggtctgcacaagctgttgagaagctattaaagaaccaaagagaatcctactttgtggatgctcagcctaagaagaaagaggaggggaataagggaagaaagggtcctttgtcttcaattttgagggctttttactgaataagtatgtactaaaatgtatgctgtaatagctcatagtgagcgagga

SEQ ID NO: 57378 - DNA, 269 bp, Glycine max
  Clone ID: 700678062H1
aaaatggctgatacaggtggaggagatgcagtgagaccagtggtaatatgtgataacaagtgtggctgcacacttccatgcactggtggttccacttgcaggtgcacaagtgctggcactgccacaggagggggtgatcacgtgacatgctcgtgcggagagcactgtggttgcaatccatgctcatgtcccaagattgcggctgctggaagtggttgcagatgtggcacagattgtgcatgtgcctcctgccgcacttagtatcacac

SEQ ID NO: 57379 - DNA, 257 bp, Glycine max
  Clone ID: 700678066H1
attcttcagaagattttcctgaaaaggaagatcaagaaaaacccaaaaagattgatgccagattgagacagagaatagatcctcaatacaatgaggttcaggctcagatggaaacaaatttgtttaaattgtctcttgatgatgttgaaactcctaaaggttccatgttggatcttaaaatttctcaatctaaaattgcacttcccaaaaacacagttggaggaaccatcctgcgtagtgatctattggcaaatttt

SEQ ID NO: 57380 - DNA, 253 bp, Glycine max
  Clone ID: 700678067H1
caactaaataagaaatgaagagtactatcttctttgctctctttctagtttgtgccttcaccatctcatacctgccttcagccaccgctcagttcgtgctcgacactgatgatgatcctcttcaaaacggtggcacatactatatgttgccagttatgagaggaaagggcggtggaatagaagtagattcaactggaaaagaaatatgccctctcactgttgtgcaatcacccaatgagctcgataaggggat

SEQ ID NO: 57381 - DNA, 262 bp, Glycine max
  Clone ID: 700678068H1
agctagtttcacaatttccaaatggctaggggattgaagaagcatctcaagaggctcaatgctcctaagcattggatgcttgacaaactgggtggtgcatttgcgcccaaaccctcatctggaccacacaaatctagggagtgccttcccctcatactcatcctacgaaaccggctaaagtatgctctgactccccgtgaagtcatcgctattctgatgcagagacatgttcttgttgatggaaaagtcaggactgacaaga

SEQ ID NO: 57382 - DNA, 257 bp, Glycine max
  Clone ID: 700678069H1
tctgctctcaatatcacttttctacttctcctcgttgctgctgctgttgttgcttgtttaactctcccagttgacaaggattgctgcttacattcctttgactgtcttgtctgttccagcctctgtacttactcttggtggtggttatctatttggccttccaattggcttcattgctgactctattggtgcaaccgttggtgctgtagctgcatttcttcttggtagaacaattgggaaatcacttgttgtttcta

SEQ ID NO: 57383 - DNA, 263 bp, Glycine max
  Clone ID: 700678071H1
ccatcattgacacctgttaaagctcttgctctcctttttctttccacttcttcgctggaatcccctttctctctcttaaatcttctcattcttcttcttcttctccctcccgccacctcacttaccctcttcctaaaccctagcctcgccggaccaccaacaccaccgcgtcaatctgacccaaatctccgcgtccttatccaccaacaactccggtgcaccacctagccagcgccgacaacatctgcggcgtaccaccacta

SEQ ID NO: 57384 - DNA, 230 bp, Glycine max
  Clone ID: 700678072H1
caagtgttgatttgcagcgcactcatcgtattaaaggaatgattaaaatggtggccacagttggtattcctgagaatacaggtatagcattggcctgtgctatgaatagttcttttagggggcgcgccagttctgatatttacaccatctgctctcaagactgtgaattatggaatcctgcttgcacaaaagcgatgactatgtcatttaatccaaacccgtgttctgat

SEQ ID NO: 57385 - DNA, 260 bp, Glycine max
  Clone ID: 700678075H1
ctcgagctctgcgagatcttcattcgccgattttaaaagatgagtaagcttcagactgatgctttgcgtgaagccatttcaggaatcatggccgattccaaggagaagaatcgcaaatttgtggagaccatcgaactccaaatcgggttgaaaaactacgatccacagaaggacaagcgtttcagtggctctgtcaagctgccccacatccctcgccccaagatgaaaatttgcatgcttggtgatgctcagcatgttga

SEQ ID NO: 57386 - DNA, 241 bp, Glycine max
  Clone ID: 700678076H1
ctagttcaatattctagtattctctaataaataatttaagatactatgatgagagcactgttcccattactgttgctgggacttgttttcctggcttcagtttctgtctcatttggcattgcttactgggaaaaatagaatcccaaacacaacaagtgtctccagagttgcaatagcgagagagactcgtacaggaaccaagcatgccacgctcgttgcaacctccttaaggtggagaaag

SEQ ID NO: 57387 - DNA, 260 bp, Glycine max
  Clone ID: 700678078H1
tctcgagcgattcggctcactcttagtcccaattttctagggatttattcattttccgactggctctgcagatgttgaataccgttgctttgtcggtgggctcgcttgggccactgacgaccatgccctcgagagagccttctctcagtacggcgaaatcgttgaaacgaagattatcaacgatcgtgagactggcagatccaggggttttggatttgtgaccttcgcctcggagcagtccatgaaagatgcgatcggag

SEQ ID NO: 57388 - DNA, 254 bp, Glycine max
  Clone ID: 700678081H1
aaacactcatcagtcatcaccatggccaagctagttttttccctttgttttctgcttttcagtggctgctagttcgctttcagttccagagagcagcctcagacaaaacgagtgccagatccaaaaactcaatgccctcaaaccggataaccgtatagagtcagaaggagggctcattgagacatggaaccctaacaacaagccattccagtgatgcggtgttgccccctctcgctgcaccctcaaccgcaacg

SEQ ID NO: 57389 - DNA, 229 bp, Glycine max
  Clone ID: 700678083H1
gtgctgatggtatggatactgatggtgacacacctagcaaaaaacagcgtctgagtagatcactgtcacggtccaggtcagtgtcacgcccaccacatgaagttgtgcctggagaaggcttcaaggattctgctcaaaaggtcaaggcaatcaaacttgcaaagaaatctgtcaagaagagaaacaaggccgcccgtcgtggagaagctgatagagtcatactaatctg

SEQ ID NO: 57390 - DNA, 246 bp, Glycine max
  Clone ID: 700678084H1
ctccaacaagcttggcaagttctttgagatcaccccagagaaaaacccccagcttcgggacttggatatcttcctcagtattgtggatatgaacgagggagctcttcttctaccacactttcaattcaaggcgatagtgatactgggaattcatgaaggagatgcaaacattgaacttgttggcctaaaagaacaacaacaggagcagcaacaggtagagcaacctttggaagtgcggaaatatag

SEQ ID NO: 57391 - DNA, 234 bp, Glycine max
  Clone ID: 700678085H1
gctagggactctcatgttcctgtgttagcaccacttcccattgggtttgccgtcttcatggttcacttggctacaatccctgtcactggaaccggcattaaccctgcaaggagtttcggaccagctgtgatcttcaacaacgacaaagcctgggacgaccaatggatttactgggttggaccgtttgttggagctgcggtggctgcaatctaccatcaatacattcttagaggt

SEQ ID NO: 57392 - DNA, 260 bp, Glycine max
  Clone ID: 700678086H1
attcaattcaatctgcctcgatcatggagaggaaaacatttgggtttttgttcttgctcctccttgtcttagcttctgatgtgacggtgaagagagcagaggcgaaagattgcttgacaaggaggcacgggttccagggtagatgcttattcgacaggcaatgtgcacatgtgtgcaggagcgatggtttcatcggtggtcagtgccgaggccctcttcgcaaatgcttttgcagcaggccatgttgatcgaaattacta

SEQ ID NO: 57393 - DNA, 250 bp, Glycine max
  Clone ID: 700678087H1
taaaattcttccaccaagttatgggtctccttgtgttgcttcttttctccctcttaggtctctcttctagtttaagcatatcaactcatcgttccatattggaccttgacctaaccaagtttaccacacagaaacaggtgtcttcactgttccaactatggaagagtgagcatggacgtgtctaccataaccacgaagaagaggcaaagagacttgagattttcaagaataacttgaactatatcaggga

SEQ ID NO: 57394 - DNA, 262 bp, Glycine max
  Clone ID: 700678088H1
gtgcggtttcctttgttggtgttgctgggaactgttttcctggcatcagtttgtgtctcattaaaggtgagagacgatgagaataaccctttctacttgagaagctctaacagcttccaaactctctttgagaaccaaaacggtcgcattcgtctcctccagagattcaataaacgctccccacaacttgagaacattcgagactaacggattgtccagtttcagtcaaaacccaacacaatccttctcccccaccatgctg

SEQ ID NO: 57395 - DNA, 261 bp, Glycine max
  Clone ID: 700678089H1
tagagagagaccccatcgcagcacaagcgagttgtttgtttgcttcacttcccgtttgtcctcttcatccatgaagctctcatccaagtccattctcagcccaagccgcagcagagaccctcctcagatttccctctcttcctccctcagcaggaggctcaagagcaatggcagcatcaagggtggtggaggtggtcaagcctctccaatgttcccaaccggtggtggtggcaagagaagaggctgtggctttgagaatcc

SEQ ID NO: 57396 - DNA, 237 bp, Glycine max
  Clone ID: 700678090H1
tgtctcacttcggacgttcgggtcccccagacatttccgacacttatcctcttctcgttctgaacatcaccttccgtaccaccgccgacgacctattccctctcttcgacaagtatgggaaggtcgtcgacatcttcatccccaaggatcgaaggactggtgaatcgaggggttttgcgttcgtgcgttacaagtatgctgatgaggctcagaaggccgttgagaggctcgacggga

SEQ ID NO: 57397 - DNA, 243 bp, Glycine max
  Clone ID: 700678091H1
tctcgagccgattcggctcgaccaaatgcctctccaaccaaaaccaaccacccctttttctcactcctataaacaaccttccactggagcacacaaagcgtgtgcacacaaaaaaggtcccatttttatgcagggtttgccttgttgagttcagttttcaaaagggttgttttgtttgttgaagaatggctcagtggcagggtaatgcggatgagggaattgactatatgttcaagattgtga

SEQ ID NO: 57398 - DNA, 262 bp, Glycine max
  Clone ID: 700678092H1
cttgctctaatgttgcttctgaaagttcgcacccttcatcttcaaaatttccccgatctcgaaacattggaggtcagacagcaaagggagatacaacactttaccagagtattcttagtccaagatcaagttcttttaaagaggttccaccaagaaacttgtcttctcacaggattgcagccagggagaaaattaagcgtcgtggtgacaatcatcagccaacggttgacaccttgacaaatgattcaacacacattttgga

SEQ ID NO: 57399 - DNA, 261 bp, Glycine max
  Clone ID: 700678094H1
actggagatacctcttctgcgtctgttgctggtgtctcagaagtggacacaaaagttgaatttgatttaaatgaagggttcaatgcagatgatgggaaatgtagtgagatgcctgggtctacacctgctgcaagattggtcagtcctgttccattttctgcttcatccatgtcttttggtattctctcgatcacagtagctgctgctgcaaagagcccctttgtggcacctgaagatttattgaaaagtaaaaaggagctt

SEQ ID NO: 57400 - DNA, 273 bp, Glycine max
  Clone ID: 700678101H1
gttcaatatcctagtacaccgtattaaagaatttaagatatactatgatgagagcgcggttcccattactgttgctgggagttgttttcctggcatcagtttctgtctcatttggcattgcgtattgggaaaagcagaaccccagtcacaacaagtgcctccgaagttgcaatagcgagaaagactcctacaggaaccaagcatgccacgctcgttgcaacctccttaaggtggaggaagaagaagaatgcgaagaaggtcaaattccacgac

SEQ ID NO: 57401 - DNA, 177 bp, Glycine max
  Clone ID: 700678102H1
ccacgttcgcgtcctccagaggttcaacaaacgctcccaacagcttcagaatctccgagactaccgcattttggagttcaactccaaacccaacacccttctctcccccaccatgctgacgctgattacctcatcgttctcctgaacgggactgccattttagccttggtgaacaag

SEQ ID NO: 57402 - DNA, 250 bp, Glycine max
  Clone ID: 700678103H1
cctgattctgaacttgagaaacacattccagatgcacatgtcatcatatctactccattccaccccgcctatgtcaccgcagaaagaattaagaaagccaaaaatttggagctgcttttgactgctggcattggttctgatctgttgatctcaaagctgcagctgctgctggtttacttgtggcaaagtctccaggacgcaacgttgtctcggttgcggaggacgaactcatgagaatcctcattctaat

SEQ ID NO: 57403 - DNA, 264 bp, Glycine max
  Clone ID: 700678104H1
ggacaagaaacggggttgaggaaaatatctgcaccttgaagcttcacgagaacattgctcgcccttcacgcgctgacttctacaaccctaaagctggtcgcattagtaccctcaacagcctcaccctcccagccctccgccaattccaactcagtgcccaatatgttgtcctctacaagaatggaatttactctccacattggaatctgaatgcaaacagtgtgatctatgtgactcgaggacaaggcaaggttagagttgtga

SEQ ID NO: 57404 - DNA, 263 bp, Glycine max
  Clone ID: 700678105H1
agtacaccaacgggccccaggaaatgtacatccaacaaggtaagggtatttttggcatgatatacccgggttgtcctagcacatttgaagagcctcaacaacctcatcaaagaggacaaagcagcagaccacaagaccgtcaccagaagatctataacttcagagagggtgatttgatcgcagtgcctactggtgttgcatggtggatgtacaacaatgaagacactcctgttgttgccgtttctattattgacaccaacagc

SEQ ID NO: 57405 - DNA, 255 bp, Glycine max
  unsure (1)..(255): unsure at all n locations
  Clone ID: 700678107H1
aggaaagcttagggtcctccagtatgacggtgctcatgcagtgaatggcgctggaccaagttactttcctgaggagaccatcgttggagtcagtcagtgagcaaggtttagacaaatgattggacatgtaattcaaagactgcttcacatcactgtacaactcatctgctgtctctgctgatgatctgcactcacgcancaccatattatccaatgctgagcccatgcaaccgatggtggtggacttcactcgca

SEQ ID NO: 57406 - DNA, 205 bp, Glycine max
  Clone ID: 700678108H1
ttccgctggcggccactccctatccgccgcgcatccatcccgcattccctgattctcgcttttctctaaataaaattaaaaatttctctgaagaccgtgttatcattaccggtccctgagttacgttatctgttatctctagggtgtctttattgtgtccaataacaagaggaggggtaggagagtcatgctgtaagaagatgaa

SEQ ID NO: 57407 - DNA, 247 bp, Glycine max
  Clone ID: 700678109H1
tctcgagccgaatcggctcgaggagagggtgatttgatcgcagtgcctactggtgttgcatggtggatgtacaacaatggagacactcctgttgttgccgtttctattattgacaccaacagcttggagaaccagctcgacagatgcctaggagattctatcttgctgggaaccaagagcaagagtttctaaaatatcagcagcaccagcaaggaggttcccaaacccagaagggaaagcaacaaga

SEQ ID NO: 57408 - DNA, 129 bp, Glycine max
  Clone ID: 700678110H1
aataacgagaattttaagaaacctgtgcagaaggaatccccttcattatttgcaatggggtattaacgatttgtcttttccattgtattttttttcttccatttaatcatgtgattctcaggaacttat

SEQ ID NO: 57409 - DNA, 242 bp, Glycine max
  Clone ID: 700678111H1
ggttaaatactcatgcggtgattgagccattcatcatagcaacaaaccgacaccttagtgctcttcacccaatttataagcttctaactcctcactaccgtgacaccatgaacatcaacgcacttgctaggcaatctctcgataatgctgatggcataatagagaaatcttttttgccctcaaagcattccgttgagatgtcttcagcggtttataagaattgggttttcactgatcaagca

SEQ ID NO: 57410 - DNA, 217 bp, Glycine max
  Clone ID: 700678113H1
ctccgcagcagccacacttcttcgccgtttcagctgaagagccatccgcaggtaagcaatggttaagcataataatgttatccccaatgggcacttccggaaacactggcaaaactatgtgaagacttggtttaatctaccacccgaaagaccagaagacggttggctcggcagaagaaggctgtcaagattttccccaggcctactgctggatctc

SEQ ID NO: 57411 - DNA, 130 bp, Glycine max
  Clone ID: 700678114H1
gtggctcagcatttgggtgagggcgttgtccgaaccattgccatggatgccaccgaagggtcgttagagggtggcgcgtcctcaacactggctcccctattaccgttccagttggtagggctacccttgg

SEQ ID NO: 57412 - DNA, 122 bp, Glycine max
  Clone ID: 700678115H1
atattcctcgtggaatcttgttgaagccatgtctacagctggtcaggtcatcaagtgccagagctgcggtggcatgggaagcagggaagccactatcgatagaaaccatagaagtggcacca

SEQ ID NO: 57413 - DNA, 77 bp, Glycine max
  Clone ID: 700678117H1
gtgttaaataggtggatgggaaaactgactttccctcagggcacttcccgaagtgttaagagaatgcctctttctat

SEQ ID NO: 57414 - DNA, 254 bp, Glycine max
  Clone ID: 700678118H1
ctcgagccgagataaaaaaagaaggaattttgatggtaaactaatatttctaatatcagaattcgaaagaaggaaagaagaatgggaggttcatcggaaacgaagcttatgcaagacctgttgttgtacgcggcgagcgcggcgctaagttgcttggtgttgttcgccggactgagacacctggaccctaatcgcgaatcgtcgaagaaggctctcgagcataagaaagagattgcaagcgtctcggtggcccc

SEQ ID NO: 57415 - DNA, 259 bp, Glycine max
  Clone ID: 700678120H1
ttggaatctggtttgcaaaaagacagagggttaattgtggagtattttggaaggatgtcttacgttgctcataacgttaatcagccccaagagaaagatttgttagagggaaatttttcctttgatattaaatctcgtctagattggaaaaagtttcctctacaaaagcacaatttgttagtggaaaaaccttcaaatatgatataattggtgctggttcacattcttcaggagattttcctgaaaaggaagatcaaga

SEQ ID NO: 57416 - DNA, 261 bp, Glycine max
  Clone ID: 700678121H1
ctcgagccgccttttttctccctcctccatcaaccatgggtgtgaagcacaccaccaccactaccaccacaattcttttcacttcaatgctacttcacctctccatcatagccattgccaacgatccatgcgcttctcaacacgacgacgacgactccgacatcaccatgattcccatctacggcaattgctcgcctttcaagaactactcaacctcgtgggagaacatcatcatcgacatggcctccaaggacccagaaa

SEQ ID NO: 57417 - DNA, 256 bp, Glycine max
  Clone ID: 700678122H1
gaactaaacaattcaattcaatctgcctcgatcatggagaggaaaacatttgggtttttgttcttgctcctccttgtcttagcttctgatgtgacggtgaagagagcagaggcgaaagattgcttgacaaggaggccgggttccagggtagatgcttattcgataggcaatgtgcacatgtgtgcaggatcgatggtttcatcggtggtcagtgccgaggccctcttcgcaaatgcttttgcagcaggccatgttg

SEQ ID NO: 57418 - DNA, 247 bp, Glycine max
  Clone ID: 700678124H1
tgttttttttctctgcagtaatagaaaaaaaagacagaaagaagaagaagaagaagaagaagaagaagatgttgagggttgcagctagaaggcactcttctctctcctcctcctctccgtggcggcccaaccacgccgcttccgcttatgtctctcgaaacgcagtcgttgatgaccgcagatccgatccttcttcgcatcccctttttcccttcagaggttttgctactgaatccctgatccaccc

SEQ ID NO: 57419 - DNA, 261 bp, Glycine max
  Clone ID: 700678125H1
ctgaattaaagtatggcagtcttaactccttgcaacggcaacttgaaagtgcagagaaggagttagacgaatatatgaactctgggaagtctatgctgagagaggaagttacgggaaatgatattgctgaaattgtaagcaagtggactggtatccctgtttcaaaacttcaacaatcagagagggagaagttgttgtatttagaggaagtgcttcataagcgtgttgttggccaagaccctgtagttaaggcagttgctg

SEQ ID NO: 57420 - DNA, 259 bp, Glycine max
  Clone ID: 700678126H1
agctggtgcagtttggagagattcaggaaaaagttgtattgaaattttcacaagaggaatttcttacagcttggtcaactcaggtgcgtcctgcaacaaccctgttggctgatgggtgtccatatttgtatgctatggtgcatgacagttcagtgtctacaataccaggtgattttgttattggtgttaagttgacaaccataaacaatatgtgtgcatatgggctcaatcctggtatttcaggttctcgtcttttggg

SEQ ID NO: 57421 - DNA, 246 bp, Glycine max
  Clone ID: 700678127H1
tgctgtactcggagtcactttggttctcctttgggaactagccagaacattgcatctctgtgccggcagcaataagcttggaagctttgctagatccttgctatttggcatccctccttcagtccctggtttaagtttatcgcttgctgatactgggtatgcatgtgtttctaccatcatatctgtcttcatgcatgaattgggtcatgcagttgcctgccacaagtgcggagatacaagtagagt

SEQ ID NO: 57422 - DNA, 137 bp, Glycine max
  Clone ID: 700678128H1
taacatgccgcaacttcctgttgccggttgattgtctcttttgaggggatggttctgttccggctagatctagtttccattactgttctataaaactggttctgtttgtttccgtttttatgtaacctgttgtttgt

SEQ ID NO: 57423 - DNA, 89 bp, Glycine max
  Clone ID: 700678130H1
gtgcaaggaggtcatcaaagccagataggaaagcatcagcaagaagaagaaaacgaaggaggcagcatattgagtggcttcaccctgga

SEQ ID NO: 57424 - DNA, 85 bp, Glycine max
  Clone ID: 700678131H1
aatgacgagaattttaagaaacctgtgcagaaggaatccccttcattatttgcaatggggtattcacgatttgtcttttccattg

SEQ ID NO: 57425 - DNA, 268 bp, Glycine max
  Clone ID: 700678132H1
tgctgacgctgattacctcatcgttatccttaacgggactgccattcttttcttggtgaacaacgacgagagatactcctacagacttcaatctggtgatgccctgagagtcccctcaggaacgacatactatgtggtcaacctgacaacaacgaaaatctcagattaataacactcgccatacccgttaacaagcctggtagatttgagagttgcttcctatatagcactggagctcaacaatggtagttgcacggattcagcagga

SEQ ID NO: 57426 - DNA, 258 bp, Glycine max
  Clone ID: 700678133H1
cacgagaaaaatcttgctttgacagaagaggaaaagatggaggtgattagaaatagaggcattcctgttgatgttcttgcaaagcgagctcatgaatttgaaaaacatgttgcttctgaaagcctcaaggatcaaattctgctgttgacaagttgtattctactaaggttaataagtttgcaaaaattatgaaccttagacaaaatgttgttggtgatcttaaacttcttactgatgggaagttgtatgagggtaagc

SEQ ID NO: 57427 - DNA, 255 bp, Glycine max
  Clone ID: 700678138H1
ggccgcagcaacccccacttctctgcggttcctcctctccgtttccgtaaccctaaccctaaccctgcttaacctcgccgcctcaaattccgaaggcgacgctctctacacgctgaaacggagcctctcggacccgacaacgtcctccagagctgggatcccactctcgttagtccctgtacttggttccacgtcacctgcaaccaggacaaccgagtcactcaagtggatcttggtaactctaacctatctgga

SEQ ID NO: 57428 - DNA, 258 bp, Glycine max
  Clone ID: 700678139H1
gtccaaagttcttgccgacaagggggtctccgatgtcgagaacggcgctggtcatgctaatggcaactctgcggtcgcagctgtggcggtggggaatggcggtagcaaggtggcggaagggaacgcgaagaagttggtgttttttgggaatgcggcgagggcgtttgatttggaagatttgcttagggtttcggcggaggttttggggaaagggactttcgggacggcgtacaaggcggtgttggaggccgggccggt

SEQ ID NO: 57429 - DNA, 238 bp, Glycine max
  Clone ID: 700678140H1
ttcaagctctgcaaggttaggtcagtgcagtttggccagaaaggtatcccatacctgaacacctatgatggtcgcaccatccgttacccagaccctctcatcagggccaacgacaccattaagctggatctggaggaaaacaagattgttgattttatcaaatttgatgttgggaatgtagttatggtaacaggtgggagaaacagggggcgtgttggagtgatcaagaacagggaga

SEQ ID NO: 57430 - DNA, 155 bp, Glycine max
  Clone ID: 700678141H1
ggccaacatatttcttaaatcatttgcttttgtatccatagtttggttccccctcagaattttaagtctgactgtggaaccatttatatggatctcttttgtactatgagtacctctggtacttctttttatataaatacttatctttgccgatt

SEQ ID NO: 57431 - DNA, 146 bp, Glycine max
  Clone ID: 700678142H1
cttactggtcaaaagagaaccccaaacacaacaagtgtctccaatgttgcaatagcgagagagactcgtacaggaaccaagcatgccacgctcgttgcaacctccttaaggtggagaaagaagaatgtgaagaaggtgaaattcca

SEQ ID NO: 57432 - DNA, 235 bp, Glycine max
  Clone ID: 700678143H1
gaaaagtttccttgacaatctaattctgcaaaaatggcaagcactaaggagtctaagttcccagcacagagccagaaaactcagccacaaaaagaacatgtaatgaatccactcccacaagccacaaatcctgatccaaggccgccaataaactccagggaaaggtggcgttggtgacaggacgtgactcaggaattggcagagcggtttgcctgtgtttcgcaaaagagggtgc

SEQ ID NO: 57433 - DNA, 101 bp, Glycine max
  Clone ID: 700678144H1
agcttttctttttcttgttctttaattttctgattttagcggattaaaatagtagtgttattggtaggttttggcaaagatgttttcagttccacacgaca

SEQ ID NO: 57434 - DNA, 71 bp, Glycine max
  Clone ID: 700678148H1
ctgtcgagccgaatcggctcgcgattggtgttaagttgacaacccattggcatatgtgtgcatatgggccc

SEQ ID NO: 57435 - DNA, 263 bp, Glycine max
  Clone ID: 700678149H1
ctcagtgagagaaactctctctctagaaaccctattgcacgttttgcaatcgaactcgacaatggccaacagcaacatctctctgaagaatcatcaaggaaacgcagcgtttgctcagtgagccagcaccaggaattagtgcctccccttctgaagagaatatgcgatatttcaatgtgatgatccttgggccaacccggtcgccttatgaaggaggagttttcaagttagaactatttttgccagaagaatatccaatggct

SEQ ID NO: 57436 - DNA, 252 bp, Glycine max
  Clone ID: 700678150H1
ttaacactttccttagttcaatatggggaagcccttcttcactctctctctttcttccctttgcttgctactcttgtcgagtgcatgctttgctattacgtccagcaagttcaacgagtgccaactcaacaacctcaacgcgttggaacccgaccaccgcgttgagtccgaaggtggtcttattgaaacatggaactctcaacacgctgagctggaatgcgccggtgtcactgtttccaaacgcaccctcaa

SEQ ID NO: 57437 - DNA, 255 bp, Glycine max
  Clone ID: 700678152H1
ggagaagcagaaggagcaaaagcaatggcgccgaagaagccgagaaccacgacaaggaaccctgatttggttagggggattggcaagtattcgaggtcgcagatgtaccacaagatgggcatctgggccatcaggccaaaaactgtggcgttttgccccgccacgatcccaagcccaagcccgaggccccggcccagaagccgcccaagttctaccccgcggacgatgttaagaagccctcgtcaacaagcacaa

SEQ ID NO: 57438 - DNA, 256 bp, Glycine max
  Clone ID: 700678153H1
ctcgagccgctcgagccgcgaaccccccaaaaccctaggtagagcgctcttcctcactctcattcccccctgccgcagcagcacgtcctctcgtcaccgtgcaggccctcgacagtgacatggccaccgacgcctccgccaccgtccctatccctgacgtcatgaagtcctccatccgcccggacatcgtcaacttcgtacactccaacatctccaagaacagccgacaaccctatggagtcagccgccgcgctgg

SEQ ID NO: 57439 - DNA, 83 bp, Glycine max
  Clone ID: 700678154H1
attgggcctagcagaaccccagtcacaacaagtgcttccgacgttgcagtagcgagacagactcctacaggaaccaagcatgc

SEQ ID NO: 57440 - DNA, 76 bp, Glycine max
  Clone ID: 700678156H1
ctccttctccatttccttcttctccttttccttgtatagtaccgatgttgacactcacttctccttccatggcctt

SEQ ID NO: 57441 - DNA, 256 bp, Glycine max
  Clone ID: 700678157H1
tctcagtctcaattttgttcaacactctcagagccctattctgctcccacgcatatgcataccacacaaccacgatcacctttcgagtaatatggagatcacgagcagccataacagcggcagcatgatgtggcttttcaaagataagggctttgatgacaatagtgcacaaggaatgttccgaaagtgccggcgcctcgagggtgtgcaccaagaaagagcaagtgagaattgggactatttgagaagcattggc

SEQ ID NO: 57442 - DNA, 153 bp, Glycine max
  Clone ID: 700678158H1
ctttgaacactcatcaccatggccaagcttgttctttccctttgtttccttgctttcagtggctgcttcgctctgagagagcaggcacagcaaaatgagtgccagatccaaaagctgaatgccctcaaaccgtgtaaccgtatagagtcggaa

SEQ ID NO: 57443 - DNA, 257 bp, Glycine max
  Clone ID: 700678159H1
atcacaaaattctgagatatatttatagatatagaacatagctatgacaaagaatgagatgcacataattggaattgtgattataatcatgattgtgatggatttctcacaagctaattacaatccttcatttgggcaaattgagcgaaatcatgtgtctaatctagcttgtgaggataaatgtagactaaaatgtgcatttttactaatacctccatttactcctgggtatctaatatgtctttacaagtgcatgg

SEQ ID NO: 57444 - DNA, 232 bp, Glycine max
  Clone ID: 700678160H1
cttctatcttgagtagtcatgatcctccggttgttttggctaaaattgatgccaatgaggagaagaacaaagaccttgcatctcaatatgatgttaggggatacccaacaattaagattctgagaaatgggggaagaatgttcaggaatacaaaggtccccgtgaagcagatggcatcgttgactatttgaagaaacaaagtggtcctgcttcaactgaaattaaatctgct

SEQ ID NO: 57445 - DNA, 83 bp, Glycine max
  Clone ID: 700678162H1
gtggagtcgcaaactatcgcaacctacccttcggcgggagggcgacgcgagactcgcgggatgcgtgttccacacaacatacg

SEQ ID NO: 57446 - DNA, 262 bp, Glycine max
  Clone ID: 700678164H1
caccattactgatggtattgacaaaactagtgcaactttgcaatttagaaagttagcagattgtgattttctcaagagaaactttaagcagatgtctaatgttttgtgggtggctcctgaggacaaggcgagtttatggtcacaacttcattaagcttcgtgtaataatctggaaatgcaagaagcttatcttgtcaatctcgtaaatgtgttacgagatatgtatttgcacagtccataggaagctcgccaattgagaagg

SEQ ID NO: 57447 - DNA, 245 bp, Glycine max
  Clone ID: 700678165H1
aggcgcagagtagagcagcacagaagagggaaaactgcaccgccgccgtagaagaaaacaaccatggtgtacgtctccttttacaggaactatgggaagacattcaagaagccgcgtcgtccgtacgagaaggagcgtctcgacgcggagttgaagctggttggtgagtacgggcttcggtgcaagatagagctgtggagggtgcagtacgcgctcagccgcatccgcaacaacgcgcggaacct

SEQ ID NO: 57448 - DNA, 247 bp, Glycine max
  Clone ID: 700678166H1
caatatggggaagcccttcttcactctctctctttcttccctttgcttgctactcttgtcgagtgcatgctttgctattacctccagcaagttcaacgagtgccaactcaacaacctcaacgcgttgagaacccgaccaccgcgttgagtccgaaggtggtcttattgaaacatggaactctcaacaccctgagctgcaatgcgccggtgtcactgtttccaaacgcaccctcaactgcaacggcct

SEQ ID NO: 57449 - DNA, 254 bp, Glycine max
  Clone ID: 700678167H1
catttctaatattgcttccaaaatctctctctctctctctctctggggggtatgtgtgttgttcagtacaactagttttggtatagctagctgctcttcatttgattttgctcgcagtcgcagctccaatcaaatatggaggcgatcactgcttccttagagaggtctcttcaaaactgttccttaaacaataccaacaacaaccatcagcagagcaggaggccggaagaagatgatgggtcagctacagatgg

SEQ ID NO: 57450 - DNA, 253 bp, Glycine max
  Clone ID: 700678168H1
tgcagaccgagctagctagctagcaagcaagcacagagatggaggcaaagcgaggccatgccctcatgtgcttggcacgtgtttcactcttcctctgcgctctaaccctatccgctgctcacggaagcacacggttcaagacatcgcgagaaagttgaaactcggggacaacgagcttctgcgcacggagaagaagttcaaggttttcatggagaattacgggaggagctactccacagaggaggagtatttg

SEQ ID NO: 57451 - DNA, 252 bp, Glycine max
  Clone ID: 700678169H1
ggtgcaagtagtttttttttctttctaggaatcttatatctgagactctgggtatgagtcgagagaatcttgttttccactctcggtgattctctcttttgtagtagaaagtgagaaagtgggtgatctccagactccctccccctagtacaaaggaggagtttgattctactatccttgtagtttttgtatatgtaaatcataataaacaatcattttgaatgaatgtaaatggtgtttaatcttctgaaa

SEQ ID NO: 57452 - DNA, 246 bp, Glycine max
  Clone ID: 700678170H1
gtgcagtgctgaagattggtcccaacgagccatctgagctgtctatccatgagaacgcctatggcttggctagatacgctgtcatatgccaggagaatggcctggttcccattgttgagcctgagatcctgttgatggacctcatgacattcacaagtgtgccgccgtcaccgagcgtgtccttgcagcatgctacaaggctttgaatgatcaccatgtccttcttgagggtacctattgaagcca

SEQ ID NO: 57453 - DNA, 253 bp, Glycine max
  Clone ID: 700678171H1
cagagagtgatttcagtgagtgatcggtgttcacttgatctcatcataatcgtcagcgtcaattgaagaagatgccgatcagaaacatcgccgtcggaaggcctgaagaggcgactcaccccgacacgttgaaggcggctttggctgagttcatctcaaccttcatcttcgtgttcgccggctcaggctccggcatcgcctacaacaagctcaccgacaacggcgctgccacccctgccggcctcatctccgc

SEQ ID NO: 57454 - DNA, 254 bp, Glycine max
  Clone ID: 700678172H1
cggctcgagcgcgtgacctagccaagccaacacaaagggcacagaagagggtttcttttcgtttacgtttcaatggggagcgaagaggagaacggcgaattctacctgcgatactacgtcgggcacaagggaagttcggtcacgagttcttggagttcgagttccgccccgacgggaagctccgctacgccaacaactccaactacaaaaacgacaccatcatccgcaaggaggtttacctcacccccgccgtt

SEQ ID NO: 57455 - DNA, 253 bp, Glycine max
  Clone ID: 700678173H1
gcaagaggaagatgaggatgaggagcagcagcgagagagcgaagaaagtgaagattctgagttacgaagacataagaataagaacccttttctcttcggctctaacaggttcgaaactctcttcaaaaaccatatggtcgcattcgcgtcctccagaggttcaaccaacgctccccacaacttcagaatctccgagactaccgcattttggagttcaactccaaacccaacaccctccttctcgccaaccatg

SEQ ID NO: 57456 - DNA, 245 bp, Glycine max
  Clone ID: 700678174H1
attctctccattgtctttgaacactcatcaccatggccaagcttgttctttccctttgtttccttcttttcagtggctgcttcgctctgagagagcaggcacagcaaaatgagtgccagatccaaaagctgaatgccctcaaaccggataaccgtatagagtcggaaggtgggttcattgagacctggaaccctaacaacaagccattccagtgtgccggtgttgccctctctcgctgcaccctt

SEQ ID NO: 57457 - DNA, 152 bp, Glycine max
  Clone ID: 700678175H1
ctggtagatttgagagtttcttcctatctagcactgaagctcaacaatcctacttgcaaggattcagcaggaacattttagaggcctcctacgataccaaattcgaggagataaacaaggttctgtttagtagagaggaagggcagcagcaa

SEQ ID NO: 57458 - DNA, 126 bp, Glycine max
  Clone ID: 700678176H1
attaagacttccttagttcaatatggggtagtccctcactctctctctcactgccctttagttgctactacttgtcgagtgaatgatctggtattagctcgagtaagctcaacgtgtgtcaactca

SEQ ID NO: 57459 - DNA, 246 bp, Glycine max
  Clone ID: 700678178H1
gcaagggcaacgatattctgtgttgcgattatgctagttttgatggtttgattaccaagcaagttatgagcaagatggcagaaatgataaacagtctttgtggtggtgatgaaaaattgatgcgtgaaaggaacacctgctgttggcttgttgttcaaggatggcaatttgtaagaaagatgtttggagagttgaatgtggaatcccttctggatttccgctcacagttatttgcaatagcatttt

SEQ ID NO: 57460 - DNA, 133 bp, Glycine max
  Clone ID: 700678179H1
gttcaatatcctagtacaccgtattaaagaatttaagctatactatgatgagagcgcggttcccattactgttgctgggagttgttttcctggcatcagtttctgtctcatttggcattgcgtattgggaaaa

SEQ ID NO: 57461 - DNA, 254 bp, Glycine max
  Clone ID: 700678181H1
cacaaccctcggaacctgcgacgccgctttcgccgttcaacaaatagccgacatagcagaaggcgacaaccgcggtctggcactgttgctgcccataattcctgcaatagggtgggttctgttcaacattctgcagccggcgctgaaccaactgaaccgcatgcgcacaccaaaggcgtgatcattgggttggggcttggcggcttggctggcttggtggctgcgccgcatgcatcggcggcggcggcttctga

SEQ ID NO: 57462 - DNA, 255 bp, Glycine max
  Clone ID: 700678182H1
ttcgagccgcaacaccaaaccttaaaattattttgcccctctgcatctctctctgtctttctcagaagacaactcaaaaaaaccatggacgtgggtcagatgcagagacagtggatcgactacaccaaatccctcttccttgagggcttcctggatggtcagtttctgcaacttcagcagcttcaagatgagaacaaccctgactttgtggtcgaagttgtctctctcttctttgaagattctgaaaggcttctc

SEQ ID NO: 57463 - DNA, 253 bp, Glycine max
  Clone ID: 700678183H1
gaagacactcctgttgttgccgtttctattattgacaccaacagcttggagaaccagctcgaccagatgcctaggagattctatcttgctgggaacacaagagcaagagtttctaaaatatcagcagcagagcaaggaggttcccaaagccagaaaggaaagcaacaagaagaagaaaacgaaggaagcaacatattgagtggcttcgcccctgaattcttgaaagaagcgttcggcgtgaacatgcagatag

SEQ ID NO: 57464 - DNA, 249 bp, Glycine max
  Clone ID: 700678185H1
ctccattgtctttgaacactcatcaccatggccaagcttgttctttccctttgtttccttcttttcagtggctgcttcgctctgagagagcaggcacagcaaaatgagtgccagatccaaaagctgaatgccctcaaaccggataaccgtatagagtcggaaggtgggttcattgagacctggaaccctaacaacaagccattccagtgtgccggtgttgccctctctcgctgcacccttaaccgcaat

SEQ ID NO: 57465 - DNA, 191 bp, Glycine max
  Clone ID: 700678187H1
ctcgagccgcacacagaaactgtcaaatgacagttattaaaactaagtcctaacattgcagtattttaaactgctataattattaaaactaagtcctatatttccttgaataggctttccaaataattggtctctttgggttaacagaatgtatcttatttggtagattgaattggatggcatatgacgcc

SEQ ID NO: 57466 - DNA, 250 bp, Glycine max
  Clone ID: 700678188H1
ctcgagccgcaggcagagtagagcagcacagaagagggaaaacagcaccgccgccgtagatgaaaacaaccatggtgcacgtctccttttacaggaactatgggaagacattcaagaagccgcgtcgtccgtacgagaaggagcgtctcgacgcggagttgaagctggttggtgagtacgggcttcggtgcaagagagagctgtggagggtgcagtacgcgctcagccgcatccgcaacaacgcgcggaa

SEQ ID NO: 57467 - DNA, 249 bp, Glycine max
  Clone ID: 700678189H1
aacatattatatcttgtcagacataacagcatttggtggaataagagcagccccaacgggaaatgaaagatgccctctcactgtggtgcaatctcgcaatgagctcgacaaagggattggaacaatcatctcgtccccatatcgaatccgttttatcgccgaaggccatcctttgagccttaagttcgattcatttgcagttataatgctgtgtgttggaattcctaccgagtggtctgttgtggagga

SEQ ID NO: 57468 - DNA, 95 bp, Glycine max
  Clone ID: 700678190H1
gccatagagttgagattgccacatcctcatggcgatcaatctggtgcttttagtcaagtttctctgcctgcagacgaaggtgtcgaaagttctat

SEQ ID NO: 57469 - DNA, 193 bp, Glycine max
  Clone ID: 700678191H1
atctttttctttcctctttgatggatccgggcagaataagagtaattttaatttttcaactggcaagtaacatgacaagcccaattgtaatgttttgtgtatggcttttgatagtaattgaacaaaatatgggtgaaccatatctgtgataattattagcaagagaagacaggaacaatattaatatattctt

SEQ ID NO: 57470 - DNA, 221 bp, Glycine max
  Clone ID: 700678192H1
ataaaaaaggaggctgaagcataatcagcgcggcggtgtaagatggtggcaacggcgatcgaggaagtgcgaaccctctggattggcgatttacagtactgggtcgacgagtcctacctctctcagtgcttcgcccacagcggcgaagtggtttccatcaaaatcatccgcaacaagctgacgggccagcccgagggctactgcttcgtcgatttcgtctc

SEQ ID NO: 57471 - DNA, 81 bp, Glycine max
  Clone ID: 700678193H1
tcttacagagccactaatgggctacgcatgatctctccagggagatcgttacttgaaggttcgacttccttgatgaagtgc

SEQ ID NO: 57472 - DNA, 73 bp, Glycine max
  Clone ID: 700678194H1
caaaagcgcgctcttgtgttccgtttccgtttgtttctgttttctatctctttcagatctcgaaaaatgcaga

SEQ ID NO: 57473 - DNA, 75 bp, Glycine max
  Clone ID: 700678195H1
attctctccattggtccttaaacactcatcagtcattaccatggccaagctagttgtttccctttggtttctgct

SEQ ID NO: 57474 - DNA, 131 bp, Glycine max
  Clone ID: 700678196H1
gtgaatgggactaaggttatcattgaacagtgaggagctgatacaaatgatggcagtgaaagagattggggtttgcggtatggagttgcgatggatggtcgtatgtgtacactagatgaacaacatgatgt

SEQ ID NO: 57475 - DNA, 255 bp, Glycine max
  Clone ID: 700678201H1
tccaagactacgagcagggttgggatgatcactggatcttctgggtgggacctttcattggtgctgcacttgcagcactctaccaccaggtcgtaatcagggccattcccttcaagtccaagtgattcaatcaaaccgttcatgcttaatcaagttgggaacaacaaaaaaaatcaaaacaatgtttctgggtttcggtttcatttcatcaagatgatctgtttatctttttttttttaattttaatttaaagtc

SEQ ID NO: 57476 - DNA, 112 bp, Glycine max
  Clone ID: 700678202H1
cgagaggttgcacaaggttcttgaatttgtgagtacggtgcatgatctatgtgctgtccttggtatagacttcttcactactgtaactgaggttcatccaagtctaaatgac

SEQ ID NO: 57477 - DNA, 110 bp, Glycine max
  Clone ID: 700678203H1
cttcccttttcacgtcattatcctaaaaacttgcagattttcacatcccaaacaacatgaaggggaggttcatgtttctgtcggtgctcctttgtgccacttttcatgtc

SEQ ID NO: 57478 - DNA, 152 bp, Glycine max
  Clone ID: 700678204H1
cgctcgagccgattcggctcgagcccctctcgtctcgtaactaaccgtggcagcgttccgaaggaagagcttcgaggagaatgaggatcgcccagccaagcctcgtcattttggcgtcaccgagattcaaagcccccactgcactctcttct

SEQ ID NO: 57479 - DNA, 100 bp, Glycine max
  Clone ID: 700678206H1
gccagatccaaaaactcaatgccctcaaaccggataaccgtatagtgtctgaaggagggctcattgagacatggaaccctaacaacaagccattccagtg

SEQ ID NO: 57480 - DNA, 148 bp, Glycine max
  Clone ID: 700678209H1
ttgaaactcaaaagcaagtgaaatcctcgtctttagtatttgtttcatggagaagctcatgctcgatcattttttgcatcatcaatgcctttgtcatagttccataatgtcacaattaatatgcacctaagagttgtttgcttttgtt

SEQ ID NO: 57481 - DNA, 241 bp, Glycine max
  Clone ID: 700678210H1
gagaaggcttacttgaagactattacaccaaagtttcagacccttattgacctttctgttatagaaatcttgtcaaggcatgcatctgatgaggtgtaccttggggagagggacaatccaaattggacatctgatacaagagcattagaggcttttaaaaggtttggaaataaactggcacaaattgagaataaactctcagagagaaacaacgatgagaaactgagaaaccgttgtggac

SEQ ID NO: 57482 - DNA, 242 bp, Glycine max
  Clone ID: 700678211H1
ctgccagtagtcatatgcttgtctcaaagattaagccatgcatgtgtaagtatgaactaattcagactgtgaaactgcgaatggctcattaaatcagttatagtttgtttgatggtatctactactcggataaccgtagtaattctagagctaatacgtgcaacaaaccccgacttctggaagggatgcatttattagataaaaggtcaacacaggctctgcctgttgctttgatgattcat

SEQ ID NO: 57483 - DNA, 85 bp, Glycine max
  Clone ID: 700678212H1
cccagagcatatagcatgactctttctcacttttccgctgccattttcatctctttccttctcctcactctccaccaccacgccg

SEQ ID NO: 57484 - DNA, 246 bp, Glycine max
  Clone ID: 700678214H1
gcttggagaaccagctcgaccagatgcctaggagattctatcttgctgggaaccaagagcaagagtttctaaaatatcagcaagagcaaggaggtcatcaaagccagaaaggaaagcatcagcaagaagaagaaaacgaaggaggcagcatattgagtggcttcaccctggaattcttggaacatgcattcagcgtggacaagcagatagcgaaaaacctacaaggagagaacgaaggggaagaca

SEQ ID NO: 57485 - DNA, 244 bp, Glycine max
  Clone ID: 700678215H1
cgaatctgacaccggggactattggaagcttataatagaaggaagtggaaagacttggaagcaggatcagaggattcgccttcagcatattgacactggaggctatctacatagtcatgataagaaatacagtcgtattgctgggggtcagcaggaggtttgtggtgttcgtgaaaagcgtgctgacaatgtgtggttggcagccgaaggtgtctaccttcccgttacggaaagcaaatgagtt

SEQ ID NO: 57486 - DNA, 130 bp, Glycine max
  Clone ID: 700678216H1
acgcgggattcggctcgagctcgtcgctccattgtctttgaacactcatcaccatggccaagcttgttctttccctttgtttccttcttttcagtggctgcttcgctctgagagagcaggcacagcaaaa

SEQ ID NO: 57487 - DNA, 131 bp, Glycine max
  Clone ID: 700678217H1
ccttaataaataatttaagatactatgctgagagcacggttcccattactgttgctgggacttgttttcctggcttcagtttctgtctcatttggcattgcttactgggaaaaagagaaccccaaacacaa

SEQ ID NO: 57488 - DNA, 130 bp, Glycine max
  Clone ID: 700678218H1
gagcaaagcaatggctacttcaaagttgaaaacccagaatgtggttgtatctctctccctaaccttaaccttggtactggtgctactgaccagcaaggcaaactcagcggaaactgtttctttcagctgg

SEQ ID NO: 57489 - DNA, 98 bp, Glycine max
  Clone ID: 700678220H1
ctgacgctgattacctcatcgttatccttaacgggactgccattctttccttggtgaacaacgacgacagagactcctacagacttcaatctggtgat

SEQ ID NO: 57490 - DNA, 247 bp, Glycine max
  Clone ID: 700678221H1
ccatcattgacacctgttaaagctcttgctctcctttttctttccacttcttcgctgttttcccctttctctctcttaaatcttctcattcttcttcttcttctccctcccgccacctcacttaccctcttcctaaaccctagcctcgccggaccaccaacaccaccgcgtcaatctgacccaaatctccgcgtccttatccaccaacaactccggtgcaccacctagccagcgccgacaacatctg

SEQ ID NO: 57491 - DNA, 240 bp, Glycine max
  Clone ID: 700677611H1
gaagaagctaaagctgctttattaggaagaattcaacggttgactaagttaattttggtctccactaaagcgccacacacaactagattttctaaccgtcctggtcctcgtagaagacattcctttggggaagaagagttggcataccttccctacaaaaggagggatttaatctcagatgacgaaaaccctgatatgcatgttaatttagatggaaatactgaaacagctgatgattct

SEQ ID NO: 57492 - DNA, 239 bp, Glycine max
  Clone ID: 700677612H1
attctctccattgtctttgaacactcatcaccatggccaagcttgttctttccctttgtttccttcttttcagtggctgcttcgctctgagagagcaggcacagcaaaatgagtgccagatccaaaagctgaatgccctcaaaccggataaccgtatagagtcggaaggtgggttcattgagacctggaaccctaacaacaagccattccagtgtgccggtgttgccctctctcgctgc

SEQ ID NO: 57493 - DNA, 267 bp, Glycine max
  Clone ID: 700677614H1
gtcagatactggtaaagagtcatccgaaactactgtggtagagactacatttggatcttcagtgaaacataacattgatactggatctcagtttaagactccaattaccttgccagcgaaacgtaaattatctgatttgaaggatatatcaatgttttcatcgtctggaaaacgattaaacgttggagatcaaggatttcgttctcctatttgttcaagtgtaattcgtaaaagctgcctgcagagtgactcttataaagaagacct

SEQ ID NO: 57494 - DNA, 260 bp, Glycine max
  Clone ID: 700677615H1
ggctcgagccgattcggctcgagcttattaacactttccttagttagatatggggaagcccgtcttcactctctctctttactccctttgcttgctactcttgtcgagtgcatgctttgctattacctccagcaagttcaacgagtgccaactcaacaacctcaacgcgttggaacccgaccaccgcgttgagtccgaaggtggtcttattgaaacatggaactctcagcaccctgagctgcaatgcgccggtgtcactg

SEQ ID NO: 57495 - DNA, 236 bp, Glycine max
  Clone ID: 700677616H1
ctatgaaaaattactgcgccaggctaaagctccaagtatgtttttacaatccttcaaaaattttgtttctttgtgtgtgtatggtgatgataacttaattagtgttcatgaatatgtcaagccttactttagtggttctaaattgaaaagctttctagctggtcataatatcaccattactgatggtattgacaaaactagtgcaactttgcaatttagaaagttagcagattgtg

SEQ ID NO: 57496 - DNA, 237 bp, Glycine max
  Clone ID: 700677617H1
gtcttccatagccccccaaaaatgaagagcaccatcttctttgctctctttctcttttgtgccttcaccacctcatacctaccttcagccatcgctgatttcgtgctcgataatgaaggtaaccctcttgaaaatggtggcacatattatatcttgtcagacataacagcatttggtggaataagagcagccccaacgggaaatgaaagatgccctctcactgtggtgcaatctcga

SEQ ID NO: 57497 - DNA, 218 bp, Glycine max
  Clone ID: 700677618H1
cactggtcaacgacggtggcgttatagaacaaacatttttgtggggaaggtattctgtggaaatgtctgctgtagtttacaaggattgggtttttacagatcaagcattgcctgctgatcttataaaaagaggaatggcaattgaggatccatcgtgccctcatgggattcgccttgtgatagaggactacccttatgctgttgatggacttgagata

SEQ ID NO: 57498 - DNA, 200 bp, Glycine max
  Clone ID: 700677619H1
cggctcgagtgaaattttgataaaccgcgatcacaggttgccgcaccttaaaaccggaaacaaaagcaatcgttacttgatttcaagaatctctcaatttcttcctacttctttgtgtacgatttcttaagggaaataaaatcactctctgtgctggtcacagacttcgtgaatcattttcttttccactcttagtctat

SEQ ID NO: 57499 - DNA, 264 bp, Glycine max
  Clone ID: 700677620H1
ccatcaccaccgagatggtctacatcaagcacatggtcatgagcctcggcctcaacacatggggcttcgtcttctacaacaacctcctctctcttatgatggctccctttttctccttcgtcaccggcgagaacgtcgagattatcgccgcggttagatccggcggccttttcgaccccgccgccttctacgccgtctccctgtcttgcctcttcggcttgctcattagtttcttcgggttcgcggccacgagggccgtttccg

SEQ ID NO: 57500 - DNA, 219 bp, Glycine max
  Clone ID: 700677621H1
caatatcctagtataccttaataaataatttaagatactatgatgagagcacggttcccattactgttgctgggacttgttttcctggcttcagtttctgtctcatttggcattgcttactgggaaaaagagaaccccaaacacaacaagtgtctccagagttgcaatagcgagagagactcgtacaggaaccaagcatgccacgctcgttgcaacctc

SEQ ID NO: 57501 - DNA, 198 bp, Glycine max
  Clone ID: 700677622H1
gtcgcagcaaaaccaaaccacatattaacttgtttgctctaagtcatggctctgatcttgcacgcaaccaaagcaaacaagaatgctttcaagacgctgattgcggcagagtacagtggcgtccaagtggaattggcccctaatttcgagatgggtgtctctaatagaactcctgaattccttaaaatgaatcccata

SEQ ID NO: 57502 - DNA, 263 bp, Glycine max
  Clone ID: 700677623H1
cggctcgagtaaaattcttccaccaagttatgggtttccttgtgttgcttcttttctccctcttaggtctctcttctagttccagcatatcaactcatcgttccatattggaccttgacctaaccaagtttaccacacagaaacaggtgtcttcactgttccaactatggaagagtgagcatggacgtgtctaccataaccacgaagaagaggcaaagagacttgagattttcaagaataacttgaactatatcagggacatg

SEQ ID NO: 57503 - DNA, 210 bp, Glycine max
  Clone ID: 700677624H1
ttctactaatttgaacggccgggctagacgaccacacaagttgaggtgtctcaagtaaccatagggtacgtgatggaaacgttcctcgtctcttacatttgatttcaggtatagcagcgcctaatatgctgaggatcaaggctttagcacgtacgtacgctcgtcgatttcgggatgcatctggtggctatgcacgacctcgtgatacgt

SEQ ID NO: 57504 - DNA, 220 bp, Glycine max
  Clone ID: 700677625H1
gtttgattaagaaaatagaagccttattttgctctctgttctttctctcaacaatcgttcgaacaaatcaagcttcgtttctaccactcaggtttgtttctccgaacgcgaaaatctaatacttcttttagggtttgtgatggatgatctacgagaatctatgttctgtccgacttcatttatctcagtgaagttttctgcgcttccacgatgcaaatat

SEQ ID NO: 57505 - DNA, 254 bp, Glycine max
  Clone ID: 700677626H1
tgatgattatgggcttcttgtcagtgagaaagcaaggaaatatgctatagtaaaagaacttgatgaggccgtgagtctcaaggatgaaacagttgttcttcagtttgagactcggcttcagaatggccttgagtgtggtggtgcatatctagaatatctccgaccacaggaggctggatggaaatccgaggaatttgataatgaatctccatattctatcatgtttggtcctgacaagtgtggtgccacaaaca

SEQ ID NO: 57506 - DNA, 237 bp, Glycine max
  Clone ID: 700677627H1
gttatttgcttctctgctggatgatatcggcatagatttacctaaagcaccaaataattttggtgagataatagggaaactagttttggctgggggtttggattttaaggtggtgacagaaatccttaagaaggtggaggatgaccggttccagaaagcaatattttcttctgcgttgcaggtaattacctctgcatctgggcaagctgtgctggatgcacaagcgtctgatattga

SEQ ID NO: 57507 - DNA, 73 bp, Glycine max
  Clone ID: 700677628H1
ggctcgagattgcacagcaagggcagcagtccaggccaagctatattcactgctcagtgctctcacacattcg

SEQ ID NO: 57508 - DNA, 137 bp, Glycine max
  Clone ID: 700677629H1
gttgtggtcaacgctacgtcaggtctgaatttctttgctatgggtattaatgccgacaacaaccataggaacttcctggcaggttcgcaacacaatgtgataagccaggtacctagtcgagtgcaggagcttgcatt

SEQ ID NO: 57509 - DNA, 238 bp, Glycine max
  Clone ID: 700677631H1
gcaagagaaaaaataccaaccatggcaaccatttctactgatcaaccaagaggatcctactcctatggaacctcctatggagcaccctatggaaccacctatgagaccaacagcagcattaacaaccctccttcacgccaaaccgtgaagttcataactgctgcaactattggcatcacactcttactcctgtctgggttgaccctcacaggcactgtcatagcgttgatcattgcaa

SEQ ID NO: 57510 - DNA, 239 bp, Glycine max
  Clone ID: 700677632H1
ataggcttggccttgctcttaacttttctgtattttactacgaaatccttaattctccggatcgtgcctgcaaccttgcaaaacaggcttttgatgaagctattgctgaattggatacactgggagaggagtcatacaaggatagcactttgatcatgcaactccttcgtgataacctcacactttggacctctgacatgcaggacgatggagcagatgaagttaaagaagcagcaccg

SEQ ID NO: 57511 - DNA, 212 bp, Glycine max
  Clone ID: 700677633H1
atcacatctggccttctctaagtgatgatcaatggatgaaggtggaggttgcattaagagatcttatactatcagattatgcaaagaaaaacaatgtgaatacttcagctttgactcagtctgagattcgtgatattatacttggagctgagattactccaccttctcaacagcggcaacagattgcagagattgagaaacatgcccatgat

SEQ ID NO: 57512 - DNA, 262 bp, Glycine max
  Clone ID: 700677636H1
gaaatatctatctagtgggacatcaggaactctatccactttatttgatgttggaggggtgctcggtggaattctagctggccacatttctgatcacttagaggctagagccattactgcagcaagtttcatgtactgtgcaatccccgctctcttcttctatcgaagttatgggcacgtttctttgattgtaaatggagcattgatgtgtgtcactggcatgtttgtgaacggaccttatgctcttataactactgcagtt

SEQ ID NO: 57513 - DNA, 259 bp, Glycine max
  Clone ID: 700677638H1
ggaagaaaccctagccactctcccggcgtcacgatgcagatcttcgtgaaaaccctaacgggtaaaacgatcacgttggaggtggagtcttcagacaccatcgacaacgtgaaggccaagatccaggacaaggaaggcatccctccggaccagcagcgcctcatcttcgccgggaagcagctggaggacggccgcaccctcgccgactacaacatccagaaggagtccacgcttcacctcgtcctccgcctccgtggcg

SEQ ID NO: 57514 - DNA, 229 bp, Glycine max
  Clone ID: 700677639H1
agctgatgtgcccaccatagcacaaattgaaggatttcattcaatgcagaggattatgaatgctcctgattcaaatgataatattgatcttttgttgagcatcgatttgttgggtcttcagggtgcaggcaaggccttcccaaataagattgtgtttaatgataaattgaagaatttcattcgatgcagaggattatgaatgctcctgattcaaatgataatattgatc

SEQ ID NO: 57515 - DNA, 242 bp, Glycine max
  Clone ID: 700677641H1
gttccactgcctacaaaaacagaatttggtggaaactcccaaggaatggcaactggatctaccttgtgacaaaatacctagtgtcttgactacaactgatgagagattggtaggcacagaacatgagggatatgatccttttcttggtggaattcaaaaatatgcgactcccatgatgcccctagatgaagaaattctttctaaggttgcacaagatatggttgaggaatggtttgattgtg

SEQ ID NO: 57516 - DNA, 219 bp, Glycine max
  Clone ID: 700677642H1
agaagatgccatgccagtatctagttcaaagccaagtactagaggtcgaaaagggtcatctggtgcgtctcaaactacaaccagaggaaggggcaggggaagaggaagaggtacaggttccagcaccatgaagcagacgactgttgatggagctttagggtttcgcgtttctcagaggtctgcatcagttgctgcagcaactgccatccgaagtggtgc

SEQ ID NO: 57517 - DNA, 250 bp, Glycine max
  Clone ID: 700677643H1
ggtctgcaaaagatattgagaacctaataaagagccaaagtgagtcctactttgtggatgctcagcctcagcagaaagaggaggggaacaagggaagaaagggtcctttgtcttcaattttgagggctttttactgaataagtatgtagtactaaaatgtatgctgtaatagctcatagtgagcgaggaaagtatcgggctatttaactatgacttgagctccatctatgaataaataaatcagcgtatg

SEQ ID NO: 57518 - DNA, 236 bp, Glycine max
  Clone ID: 700677644H1
cataaacaatatgtgtgcatatgggctcaatcctggtatttcaggttctcgtcttttgggcaccattcctcagtctatttcacagcaaactgtttggaatcaaatggcaacagtgagaacaccattgaattttgattctagcaagcagagcttttgtcaattttctattgaccttctcggtggaggaattttagtggacaaaactggagattggatcgcacttatacaaaattctc

SEQ ID NO: 57519 - DNA, 252 bp, Glycine max
  Clone ID: 700677645H1
gaaaaacacggaggaaagggaagtgaagaggaacaagatgaacgtgaacacccacgcccacaccaacctcatcaaaaggaagaggaaaagcacgaatggcaacacaagcaggaaaagcaccaaggaaaggaaagtgaagaagaagaagaagaccaagacgaggatgaggagcaagacaaagagagccaagaaagtgaaggttctgagtctcaaagagaaccacgaagacataagaataagaacccttttcac

SEQ ID NO: 57520 - DNA, 241 bp, Glycine max
  Clone ID: 700677646H1
gaagagaagtagaaaaaggaaggggggaggagactcgcctcaatacttcccactggacgagaggcgcacctaacccacctacccactcatcaatcacggtgttcagctgacttgcactgatagacccctattgtattggaattaggcgcccatctttttactgttgtcaactaatctcttccatgttcgattctactctatgttagaacatttctgtgaatgctattttgatctaagtggt

SEQ ID NO: 57521 - DNA, 239 bp, Glycine max
  Clone ID: 700677647H1
gttcgatatcctagtataccttaataaataatttaagatactatgatgagagcacggttcccattactgttgctgggacttgttttcctggcttcagtttctgtgtcatttggcattgcttactgggaaaaagagaaccccaaacacaacaagtgtctccagagttgcaatagcgagagagactcgtacaggaaccaagcatgccacgctcgttgcaacctgattaaggtggagaaaga

SEQ ID NO: 57522 - DNA, 266 bp, Glycine max
  Clone ID: 700677648H1
gcgaagagaatggctcccaagggtttaatctttttggctgtgttatgcttctcagcactgtcactgagtcgttgtcttgcggaggataatggacttgttatgaacttctacaaggaatcatgccctcaggctgaagacatcatcaaagaacaagtcaagcttctctacaagcgccacaagaacactgctttctcctggctcagaaacatcttccatgactgtgctgtttatagttgtgatgcttcactgttgctggactccacaag

SEQ ID NO: 57523 - DNA, 261 bp, Glycine max
  Clone ID: 700677650H1
acggaaaatcacgacgacaacacaacacccaactggtctgtgactgaggcagcaatggtgctgatgacagcttcataagtataatgggcttggtcactgttacatggacaaattatctaaaaaagcgtattccactaagaataaggtctcttcataccttgaaatgtaatcaaataggccaaattttaatgtctccacctcttgcatctctggaccttcctgacatctggagtcctatttcttcatgtcggagtattccag

SEQ ID NO: 57524 - DNA, 205 bp, Glycine max
  Clone ID: 700677652H1
agttgcagaccgagctagctagctagcaagcaagcacagagatggaggcaaagcgaggccatgccctcatgtgcttggcacgtgtttcgatcttcctctgcgctctaaccctatccgctgctcacggaagcaccacggttcaagacatcgcgagaaagttgaaactcggggacaacgagcttctgcgcacggataagaagttcaa

SEQ ID NO: 57525 - DNA, 214 bp, Glycine max
  Clone ID: 700677653H1
gttcaatatcctagtataccttaataaataatttaagatactatgatgagagcacggttcccattactgttgctgggacttgttttcctggcttcagtttctgtgtcatttggcattgcttactgggaaaaagagaaccccaaacacaacaagtgtctccagagttgcaatagcgagagagactcgtacaggaaccaagcatgccacgctcgtt

SEQ ID NO: 57526 - DNA, 263 bp, Glycine max
  Clone ID: 700677654H1
tctcaattctcaaacttgttacagataaaaaccctttcttgaaacctttctccaaaatttctcacaacccacttctactctactcattccacacccaacttacaagaacccattcttttgctcactcattttcttaacgtagattaatcattatgtgtggcggtgccatcatcgctgacttcataccccgccgtggaggccgccgcctcacggcctccgagctctggccaaactccttcgccaaagacgatgactttgacttg

SEQ ID NO: 57527 - DNA, 163 bp, Glycine max
  Clone ID: 700677655H1
tcttggcaagttctttgagatcaccccagaggtaaacccccagctacgggacttggatatcttcctcagtattgtggatatgaacgagggagctcttcttctaccacactccagttcaaaggcgatagtgatactggtaattagtgaatgagatgcaaacatt

SEQ ID NO: 57528 - DNA, 256 bp, Glycine max
  Clone ID: 700677658H1
catttggaaatttggctgatgacaccatcaattttgaggcttttccccacaagctggtgcaatttggagagattcaggaaaaagttgtattgaaattttcacaagaggaatttcttacagcttggtcaactcaggtgcgtcctacaacaactctgttggctgatgggtgtccatatttgtatgctatggtgcatgatagttcagtgtctacaataccaggtgattttgtcattggtgttaagttgacaaccataaa

SEQ ID NO: 57529 - DNA, 235 bp, Glycine max
  Clone ID: 700677660H1
ggtctgcaaaagatattgagaacctaataaagagccaaagtgagtcctactttgtggatgctcagcctcagcagaaagaggaggggaacaagggaagaaagggtcctttgtcttcaattttgagggctttttactgaataagtatgtagtactaaaatgtatgctgtaatagctcatagtgagcgaggaaagtatcgggctatttaactatgacttgagctccatctatgaataa

SEQ ID NO: 57530 - DNA, 240 bp, Glycine max
  Clone ID: 700677661H1
gaatcctggtctctgtctactcttcaattattcccaacctctcacctcttcatcttcttcttccttacctttgaccagagacagagcagcactcacattcacaacgaaggtttcctattcatcagacatggtgaaggcaatcagagttcacgaactcggtggccctcaagttctgaagtgggaggatgtggaaattggagatccaaaagaaggcgaggtccgtgtgaggaacaaagccat

SEQ ID NO: 57531 - DNA, 239 bp, Glycine max
  Clone ID: 700677662H1
tgaacaagaaggggcaacaacaatggggggtttcgcaatgggttataccttcgattccaaatctgggctgacaatggctgctttgcttttgatgattgtgtccttctatgctggcatcctttttggcaacaatgctcccctttacgtctctcagcttgtttctcattcttcatcttcttcttctcctcccaacaatgtctcatccaacggtactaccaaatttactaacaaagttgctc

SEQ ID NO: 57532 - DNA, 260 bp, Glycine max
  Clone ID: 700677663H1
ggctggaaagggttctgcaactttgtcaatggcctatgctggtgccctttttgctgatgcttgcctcaagggcctcaatggagtcccagatgttgtcgagtgctctttcgtgcaatccactgttactgaacttcccttctttggttccaaggtgaggcttgggacggttggtgtggaggaagttctgggcttggggcacctctcagattttgagcaactgggcctcgaaagccttaagcctgaactcgaatcatcaattg

SEQ ID NO: 57533 - DNA, 264 bp, Glycine max
  Clone ID: 700677664H1
ctcgagccgtcttaaaccgtccaactcttagtaggcgattcatgcctgagaaaggttctggcgagtatgaggagctgaggaagaatccccagaaggcttacttgaagactattacaccaaagtttcagacccttattgacctttctgttatagaaatcttgtcaaggcatgcatctgatgaggtgtaccttggggagagggacaatccaaattggacatctgatacaagagcattagaggcttttaaaaggtttggaaataaac

SEQ ID NO: 57534 - DNA, 139 bp, Glycine max
  Clone ID: 700677665H1
cgtttaccatttcagttatcttcgtcgtcggagtggcatggcttcgctttgtgccctaaactatcctcctgctcgcagagacgattcagtcgtcgaagattaccatggtgtcaaaattgccgatccttatcgatggctc

SEQ ID NO: 57535 - DNA, 82 bp, Glycine max
  Clone ID: 700677666H1
catatactatgatgagagtgcggtttcctttgttggtgttgctgggaactgttttcctggcatcagtttgtgtctcattaaa

SEQ ID NO: 57536 - DNA, 214 bp, Glycine max
  Clone ID: 700677667H1
tgcaaacattgaacttgttggcctaaaagaacaacaacaggagcagcaacaggaagagcaacctttggaagtgcggaaatatagagccgaattgtctgaacaagatatatttgtaatcccagcaggttatccagttgtggtcaacgctacctcaaatctgaatttctttgctattggtattaatgccgagaacaaccagaggaacttcctcgca

SEQ ID NO: 57537 - DNA, 254 bp, Glycine max
  Clone ID: 700677668H1
ggtgggactatgtcactgattttcaaattagatgccccatgaaggagaagaagtacaataaggaatgtgcaaatgctgttattaaatcactgggtctcaatacggaaaagatttaaaagtgcatgggagatccagacgccgatactgataatcctgttttgaaagaagagcaagatgcccaaattggaaagggatcgcgaggtgatgttaccatattgcctactcttgtggtcaataatcgacaatatcgagga

SEQ ID NO: 57538 - DNA, 212 bp, Glycine max
  Clone ID: 700677669H1
ctaaaccctactcattctccatacctcaacgaagaggttaaagagacggcaacactttgctgtccgccttgaccgagcagagcttcgtcttggccctcgattttgccctaaagtactctcagtcacaacagacaccgtcgtcgtcgtcgtcgtcatcaatggcaccgaagcagaccaaggctgagaagaagatcgcttacgattcgaactgt

SEQ ID NO: 57539 - DNA, 186 bp, Glycine max
  unsure (1)..(186): unsure at all n locations
  Clone ID: 700677670H1
gtcaagtacaatatacacgtaatcaaaaccatgcagatacgaacctgccactccatcaccacccaaacccttccacaacttccgcgttagactanataggcccaccaccgtcaccttcttccgccgttaaacgctgcggtctccgcggcgccgttcaaagcccgtaaggcccactcaatgcctcca

SEQ ID NO: 57540 - DNA, 263 bp, Glycine max
  unsure (1)..(263): unsure at all n locations
  Clone ID: 700677673H1
ggatcgagccgaatcggctgcgacccaaacacaacaagtgtctccacgcttgcaatagcgagagcgactcgtacaggaaccaagcatgccacgctcgttgcaacctccttaaggtggagaaagaagaatgtgaagaaggtgaaattccacgactgcgaccacagcgacaacacccgnagatggaacctcagcaacccggtgagaaggaggaagacgaatgtgagcaaccacgtccaatcccattcccacgcccacaacctcgt

SEQ ID NO: 57541 - DNA, 248 bp, Glycine max
  Clone ID: 700677675H1
gcgtagactcttcccagttctgttgtgtgagtctgtgagtctttcttagctgatatggcggttgatcgctcccttacgaggtgctgtagcctcgtactgtggtcgtggatgttgctgaggatgatgatggcgcagggtgcagccgcgagggccaaccggaatgagtgggactcggtcataaagttaccggctgaaccggtcgatgctgactcggatcatgaagtgggaacacgatgggcggttctttt

SEQ ID NO: 57542 - DNA, 253 bp, Glycine max
  Clone ID: 700677676H1
ctccattggtccttaaacactcatcagtcatcaccatggccaagctagttttttccctttgttttctgcttttcagtggctgctgcttcgctttcagttccagagagcagcctcagcaaaacgagtgccagatccaaaaactcaatgccctcaaaccggataaccgtatagagtcagaaggagggctcattgagacatggaaccctaacaacaagccattccagtgtgccggtgatgcgtaactcgttgagag

SEQ ID NO: 57543 - DNA, 243 bp, Glycine max
  Clone ID: 700677677H1
ccgattgctagaatggaatttcgatgctcagtcatctcttttaccattctcttctctcttgctcttgcaggagagagccatgtccatgcatcgctacctgaggaagattattgggaagctgtttggccaaacactcccattcccactgcactgcgagagcttctaaagcctctccctgcaggtgtagaaatcgatgaactccctaagcgaattgatgatacacagtacccaaaaacattcttc

SEQ ID NO: 57544 - DNA, 185 bp, Glycine max
  Clone ID: 700677678H1
gaaaaaattatttggagtttttcttactaaactgtacagaactcgatattctcttcacttagctgcgagatgtaatttactcggtatgatgcaagcaacacaaattttgagattgtcataaatatttgagacttcaagagtatgccttcattgatttatcaacttaggctattgtttaagagtcc

SEQ ID NO: 57545 - DNA, 262 bp, Glycine max
  Clone ID: 700677680H1
ccttaaacactcatcagtcatcaccatggccaagctagttttttccctttgttttctgcttttcagtggctgctgcttcgctttcagttccagagagcagcctcagcaaaacgagtgccagatccaaaaactcaatgccctcaaaccggataaccgtatagagtcagaaggagggctcattgagacatggaaccctaacaacaagccattccagtgtgccggtgttgccctctctcgctgcaccctcaaccgcaacgccctt

SEQ ID NO: 57546 - DNA, 146 bp, Glycine max
  Clone ID: 700677681H1
gttcaatatcctagtatgccttaatgaataatttgagatagtatgatgagagcacggttcccattactgttgctgggacttgttttcctggcttcagtttctgtctcatttggcattgcgtactgggaaagagagaaccccaaaca

SEQ ID NO: 57547 - DNA, 257 bp, Glycine max
  Clone ID: 700677683H1
aaatgaccaagttcacaatcctcctcatctctcttctcttctgcatcgcccacacttgcagcgcctccaaatggcagcaccagcaagatagctgccgcaagcagctccagggggtgaacctcacgccctgcgagaagcacatcatggagaagatccaaggccgcggcgatgacgatgatgatgatgacgacgacaatcacattctcaggaccatgcggggaagaatcaactacataaggaggaacgaaggaaaagac

SEQ ID NO: 57548 - DNA, 231 bp, Glycine max
  Clone ID: 700677684H1
gttcaatatcctagtacaccgtattaaagaatttaagatatactatgatgagagcgcggttcccattactgttgctgggagttgttttcctggcatcagtttctgtctcatttggcattgcgtattgggaaaatcagaaccccagtcacaacaagtgcctccgaagttgcaatagcgagaaagactcctacaggaaccaagcatgccacgctcgttgcaacctccttaagg

SEQ ID NO: 57549 - DNA, 254 bp, Glycine max
  Clone ID: 700677686H1
aacctttcaacttgagaagccgcgaccccatctattccaacaagcttggcaagttgtttgagattaccccagataaaaaccctcagcttcgggacttggatgtcttcctcagtgttgtggatatgaacgagggagctctttttctgccacacttcaattcaaatgccatagtggtactagtgattaattaaggagaagcgaacattgaacttgttggcattaaagaacaacaacagaggcagcaacaggtttag

SEQ ID NO: 57550 - DNA, 108 bp, Glycine max
  Clone ID: 700677687H1
atgctgttctttcaatgtggagatgttttgttgcgagacctcgtctttggggtgtctaagatgacttctccctacattaagtgtgcggtctctttctacgtagcattt

SEQ ID NO: 57551 - DNA, 258 bp, Glycine max
  Clone ID: 700677688H1
ggaagaaaccctagcctctcaccctccctgcgacacgatgcagatcttcgtgaaaaccctaacgggtaagacgatcacccttgaggtggagtcttctgacaccatcgacaacgtgaaggccaagatccaggacaaggaaggcatccctccggaccagcagcgcctcatcttcgccggaaagcagctggaggacggccgcaccctcgccgactacaacatccagaaggagtccaccctccacctcgtcctccgtctccg

SEQ ID NO: 57552 - DNA, 256 bp, Glycine max
  Clone ID: 700677689H1
gtagttctagatcgcgatctagaactagtcggctcgagcggctcgagcggctcgaggtgaaaggaggtctgagcgtgataaaaccacccacggaagagcagcaacaaagaccccaggaagaggaagaagaagaagaggatgagaagccacagtgcaagggtaaagacaaacactgccaacgcccccgaggaagccaaagcaaaagcagaagaaatggcattgacgagaccatatgcaccatgagacttcgccacaa

SEQ ID NO: 57553 - DNA, 252 bp, Glycine max
  Clone ID: 700677690H1
gaattcatgcctggaaaacaggtggggatgagtgatgtatgttaccctgacagtctgattgggaatattccaaatgtatattactatgctgcaaacaacccttctgaggccaccattgccaagcgcaggagttatgcaaacaccattagctatctgactcctccagcggaaaatgctgggctatacaaaggtcttaagcagttaagtgagctcatctcctcatatcagtccctcaaagacaccgcccgtggg

SEQ ID NO: 57554 - DNA, 227 bp, Glycine max
  Clone ID: 700677692H1
gttcaagctggtgaaatcttggattagtgctcccactctcctatctggtataggacttcgtgggtagacttttctatttctctcctttctttcactctcttcttctcactgatctgcattgccgttcaaagtggtcttatttgaaaaacacttgggcgttggtgcaaatgtttgcttcgttaattttctttggagacaacaggctcactgagaaaacaatttttact

SEQ ID NO: 57555 - DNA, 231 bp, Glycine max
  Clone ID: 700677693H1
ccgattgctagaatggaatttcgatgctcagtcatctcttttaccattctcttctctcttgctcttgcaggagagagccatgtccatgcatcgctacctgaggaagattattgggaagctgtttggccaaacactcccattcccactgcactgcgagagcttctaaagcctctccctgcaggtgttgaaatcgatgaactccctaagcaaattgatgatacacagtaccca

SEQ ID NO: 57556 - DNA, 255 bp, Glycine max
  Clone ID: 700677694H1
gtcttccatagccccccaaaaatgaagagcaccatcttctttgctctctttctcttttgtgccttcaccacctcatacctaccttcagccatcgctgatttcgtgctcgataatgaaggtaggcctcttgaaaatggtggcacatattatatcttgtcagacataacagcatttggtggaataagagcagccccaacgggaaatgaaagatgccctctcactgtggtgcaatctcgcaatgagctcgacaaaggg

SEQ ID NO: 57557 - DNA, 237 bp, Glycine max
  Clone ID: 700677695H1
attttgttggagatctcgtctttgaagtttctaagattacttctccctacattaaatgtacagtctctttcttcatagcatttggaaatttggctgatgacaccatcaattttgaggcttttccccacaagctggtgcagattggagagattcaggaaaaagttgtattgaaattttcacatgaggaatttcttacagcttggtcaactcaggtgcgtcctacaacaactctgttgg

SEQ ID NO: 57558 - DNA, 189 bp, Glycine max
  Clone ID: 700677701H1
atcgaatccaatccaccaaatcggcgacgtcgccttccgctacagatccgcggcggaaccaccgtatctgactatctccgattgatcttccgataaaagtggaccggaaatgccggttgccgcttccgccatttactttctcaacctccgcggcgacgttctcatcaaccgcctctatcgcgacgatgt

SEQ ID NO: 57559 - DNA, 224 bp, Glycine max
  Clone ID: 700677703H1
tgttggtcgaacccattgtgtgaagttggtgcaccgtttgcacccagagattgatccagctctgaaccctgaccacgtccctcacattctgaagaagtgccctgatgccattccagaccctaaggcggtgcagtacgtgagaaacgaccgtggcactcccatgattctagacaacaactactacagaaacatattagacagaagggtctcttgatagtggatca

SEQ ID NO: 57560 - DNA, 141 bp, Glycine max
  Clone ID: 700677704H1
atcaccatggccaagcttgttctttccctttgtttccttcttttcagtggctgcttcgctctgagagagcaggcacagcaaaatgagtgccagatccaaaagctgaatgccctcaaaccggataaccgtatagagtcggaa

SEQ ID NO: 57561 - DNA, 223 bp, Glycine max
  Clone ID: 700677705H1
agttgagtagttcttcatcatagtcttaaacattaaaccttagcaaaactcaacaatgctagacatcaaaggctacctcgtactcttcttcctatggttcatatcaaccattctgatacgttccatcttcaagaaaccacagcgtctaagactcccaccgggtcctccaatttcaatacccttgctgggacacgcgccattctccgttcactgctccaccaag

SEQ ID NO: 57562 - DNA, 225 bp, Glycine max
  Clone ID: 700677706H1
tgtgaagaaggtgaaattccacgaccacgaccacgaccacaacacccggagagggaacctcagcaacccggtgagaaggaggaagacgaagatgagcaaccacgtccaatcccattcccacgcccacaacctcgtcaagaagaagagcacgagcagagagaggaacaggaatggcctcgcaaggaggaaaaacgcggagaaaagggaagtgaagaggaagatgag

SEQ ID NO: 57563 - DNA, 225 bp, Glycine max
  Clone ID: 700677708H1
gcgaaaaacctacaaggagagaacgaaggggaagacaagggagccattgtgacagtgaaaggaggtctgagcgtgataaaaccacccacggacgagcagcaacaaagaccccaggaagaggaagaagaagaagaggatgagaagccacagtgcaagggtaaagacaaacactgccaacgcccccgaggaagccaaagcaaaacagaagaaatggcattgacgaga

SEQ ID NO: 57564 - DNA, 227 bp, Glycine max
  Clone ID: 700677712H1
cggctcgagatcaaattcattcctttccttctttcttctaaaccctatggccgacgaagccacagccaaaggcaacgcagccttctcctccggggactatcctgccgccatccaccacttctccgatgccatcgccctggctccctccaaccatgtcctctattccaaccgatccgccgcatacgcctccctcaaaaactacgcagatgcattagcggatgccaaaa

SEQ ID NO: 57565 - DNA, 226 bp, Glycine max
  Clone ID: 700677713H1
caacaacacaccgctacgaagctggcgtcgtcccccccggagcccgtttcgaaccgccgcgttatgaagccggcgtcaaagcgccctccatttaccattccgagagaggtccaacgacttcccaggtcctcgccgtcctcgccggcctcccggtcggtggcatcctgctcctcctggcgggattgaccctggcaggaaccctcacggactggcagttgccacgccg

SEQ ID NO: 57566 - DNA, 230 bp, Glycine max
  Clone ID: 700677714H1
tcccaatcctgagttatctgcatgttgctatcatctttttgtttttgaaaagtaagaagcatggttatactgaaattacctttgaaaaagaagactttagctgattgacatataaaataatgaaatcgtctttcatatgacatttttttcatttaagaaagaatataaaaataaagtcatctttacaacaacgatgattccttcacatatgaaatcgtgttcctaaacac

SEQ ID NO: 57567 - DNA, 230 bp, Glycine max
  Clone ID: 700677715H1
gcattttcagaggaaaatggcgggtacggtttcgacttgtttcttcttcgtgtttcttctttctctccttcttccttatcagatctccgctgaggaatcctcggagaaggagttcgtactcacattggatcactctaactttcacgacactgtcagcaagcacgatttcatcgtcgtcgagttctacgccccatggtgtggtcactgaagaagcttgctccggagtatga

SEQ ID NO: 57568 - DNA, 126 bp, Glycine max
  Clone ID: 700677717H1
caatatcctagtataccttaataaataatttaagatactatgatgagagcacggttcccattactgttgctgggacttgttttcctggcttcagtttctgtctcatttggcattgcttactgggaa

SEQ ID NO: 57569 - DNA, 221 bp, Glycine max
  Clone ID: 700677718H1
tagaaaacagagcactaaaggagcattggggcattctcatgtttgtctttggcctgataggattggaaactgctcttggattgctgagtggaattggcttagtcatcgtgcttcaattaagtaaatagcttgtaacttttgaaatgaagttaattcctggcctttagcacctgcaatgggcaaatactaaataaaacaaaatcatcatggtctctgttatg

SEQ ID NO: 57570 - DNA, 221 bp, Glycine max
  Clone ID: 700677719H1
attcttccctctctctctccagaatttcctcctcccactgcttctttcttccttgcagcgcgattgctgcatcctcctccaataagagctcgctgctagcgaaccctaacacggcggcaacgtgaggtgttcggttgaagttcagatcagccatggccgcagcaacccccacttctctgcggttcctcctctccgtttcgtaaccctaaccctaaccctgc

SEQ ID NO: 57571 - DNA, 221 bp, Glycine max
  Clone ID: 700677720H1
taaaagtgttgattttattattattttagagtaaattacacaaatctttgtaactatcctccatttttaacccctacaaaactccccctgattgtggagttaaaattacacgaacctcccctctacttttaatgaaatttggttccgaaaataccctttccttcaagtttttaacaactgaacacttgggaaaacaataagatcatccaatgctttgaaga

SEQ ID NO: 57572 - DNA, 223 bp, Glycine max
  Clone ID: 700677721H1
accgaaagcagccccaaacgaaagctcgacgaacacgacccccaaaacggcaccgaatcgaagaagaaaaagaagaagcaccacgagtccaaggggaacgccgaggaaaccaacggcgatagcaacaacaacaacggcgatggtgctaatcgcgaggaaacggcgacggatgggtctgttgtggtcaccggtaacaatgcgggagaggcgaaatacgccgcgg

SEQ ID NO: 57573 - DNA, 221 bp, Glycine max
  Clone ID: 700677722H1
gtttgttgttcctcactgacctcaccatggcgaccagagccaagctttctttagctatcttccttttctttcttttagccttgatttcaaacctagccttgggcaaacttaaagaaaccgaggtcgaagaagatcccgagctcgtaacatgcaaacaccagtgccaacagcaacggcaatacactgagagtgacaagcaacatgcttgcaacaatgtgaca

SEQ ID NO: 57574 - DNA, 222 bp, Glycine max
  Clone ID: 700677723H1
cttctctcttccatctcctcggttaaactgaaccaattcaatattcccagctagttcttcattgaagaagctatggactttcttaactttatgcttaacttgttggtccctccaggcagtatgctcatcttggctttctcatggtcaggactttgcttcctcaatgcttgtgagtggctttataatagtatatatggctaggatatcgataataaagtcgtc

SEQ ID NO: 57575 - DNA, 224 bp, Glycine max
  Clone ID: 700677725H1
cctcgagccgaatcggctcgaggtctttgaacactcatcaccatacgccaagcttgttcttaccctttgtttccttctttacagtggctgcttcgctctgagagagcaggcacagcaaaatgagtgccagatccaaaagctgaatgccctcaaaccggataaccgtatagagtcggaaggtgggttcattgagacctggaacctaacaacaagccattccagtg

SEQ ID NO: 57576 - DNA, 222 bp, Glycine max
  Clone ID: 700677726H1
gttgcaatggccgtttctttggcagtgaaccgtcctctgcttggtcttcacgagaatgtaccattagctgttgctcatccccaattcctcccgttcaaatggccacccaagtccaaactcccctccgtcgtcggaattcgatgctcctcctcccctttcaacgacaaaaccctcatttccatcacacctaacacttcccactcaatcccaaccctctcgctt

SEQ ID NO: 57577 - DNA, 224 bp, Glycine max
  Clone ID: 700677728H1
atacccccaactaacaataattccttcacttgcagaacttagttctctgttgcatcatcatcatcttcattagtgttagccctaaacttcaccttcaaccatgaccacagtgccaccacacagtgtccaagtgcacacaacaacacacctctacgaagccggcgtcgtcccgccggctcgttttgaggcgccgcgttacgagccggcatcaaggcgccctcttc

SEQ ID NO: 57578 - DNA, 226 bp, Glycine max
  Clone ID: 700677729H1
ataaaattcttccaccaagttatgggtttccttgtgttgcttcttttctccctcttaggtctctcttctagttccagcatatcaactcatcgttccatattggaccttgacctaaccaagtttaccacacagaaacaggtgtcttcactgttccaactatggaagagtgagcatggacgtgtctaccataaccacgaagaagaggcaaagagacttgagattttca

SEQ ID NO: 57579 - DNA, 171 bp, Glycine max
  Clone ID: 700677732H1
gagcacggttcccattactgttgctgggacttgttttcctggcttcagtttctgtctcatttggcatttcttactgggaaaaagagaaccccaaacacaacaagtgtctccagagttgcaatagcgagagagactcgtacaggaaccaagcatgccacgctcgttgcaacc

SEQ ID NO: 57580 - DNA, 154 bp, Glycine max
  Clone ID: 700677733H1
gtcgtcgagcacagttggtcaagtcatcaaatgcaaagctgcggtttcatgggaggcagggaagccacttgtgattgaagaagtagaggtggcaccaccacaagctggtgaagttagtttgaagatcctctacacctctctttgccacactgat

SEQ ID NO: 57581 - DNA, 217 bp, Glycine max
  Clone ID: 700677734H1
ccctgctgcataggaagaaaccctagcctctcaccctccctgcgacacgatgcagatcttcgtgaaaaccctaacgggtaagacgatcacccttgaggtggagttttctgacaccatcgacaacgtgaaggccaagatccaggacaaggaaggcatccctccggatcagcagcgcctcatcttcgccggaaagcagctgaggacggccgcaccctcg

SEQ ID NO: 57582 - DNA, 219 bp, Glycine max
  Clone ID: 700677736H1
atattctagaggcctcatacgacaccaaattcgaggagataaacaaggttctgtttggtagagaggaggggcagcaacaaggggaggagaggctgcaagagagtgtgattgtggaaatctcaaagaaacaaattcgggaactgagcaaacatgccaaatctagttcaaggaaaaccatttcttctgaagataaacctttcaactggagaagccgcgacc

SEQ ID NO: 57583 - DNA, 218 bp, Glycine max
  Clone ID: 700677738H1
ggcaaatccacctctgcatcgccatgttgccatccctaatcttcaatgatgttgggaatcattcatttaccagttttcctttcaaatagttatggaaaatgttgattcttgagaagatcaagatgactactagctcattctaaataatgctttgccaactaattttctccgctacaggccccatctggcttcttctcttcttcagccttctctccatg

SEQ ID NO: 57584 - DNA, 221 bp, Glycine max
  Clone ID: 700677740H1
ctcgagccgttctaaagcactcatccacacattctccgtcgccacgacaacaatggctccacaagaaaggtgcgaaaggtggagttgtagcagcaaagaagaaggttcaggagaaggtaacgaaccctttgttcgagaagcgtccgaagcagttcgggatcggaggcgcgctgccgccgaagcgggacctgacgcgcttcgtgaagtggccgaagaacgtc

SEQ ID NO: 57585 - DNA, 218 bp, Glycine max
  Clone ID: 700677742H1
gccaaatgcctcgtcatctaattagtgacgcgcatgaatggattaacgagattcccactgtccctgtctactatccagcgaaaccacagccaagggaacgggcttggcggaatcagcggggaaagaagaccctgttgagcttgactctagtccgactttgtgaaatgacttgagaggtgtaggataagtgggagctgaaacagcgaaagtgaaatacc

SEQ ID NO: 57586 - DNA, 222 bp, Glycine max
  Clone ID: 700677744H1
actcgagccgaatcggctcgaggattcctgggaaactcatttcaatagagtgagagagagacagagagagagagagatgtatcacagtgaaacgaagaagccctaactacgcacgcactcattcttgagagagctcaatattcattcgtccatggcactctcttctcgtctcttttccaaatccaaattgatctatggcgtcaaatacttctgcaaaaggag

SEQ ID NO: 57587 - DNA, 223 bp, Glycine max
  Clone ID: 700677745H1
aaatgaccaagttcacaatcctcctcatctctcttctcttctgcatcgcccacacttgcagcgcctccaaatggcagcaccagcaagatagctgccgcaagcagctccagggggtgaacctcacgccctgcgagaagcacatcatggagaagatccaaggccgcggcgatgacgatgatgatgatgacgacgacaatcacttctcaggaccatgcggggaaga

SEQ ID NO: 57588 - DNA, 224 bp, Glycine max
  Clone ID: 700677746H1
gagagattcaggaaaaagttgtattgaaattttcacaagaggaatttcttacagcttggtcaactcaggtgcgtcctgcaacaaccctgttggctgatgggtgtccatatttgtatgctatggtgcatgacagttcagtgtctacaataccaggtgattttgttattggtgttaagttgacaaccataaacaatatgtgtcatatgggctcaatcctggtattt

SEQ ID NO: 57589 - DNA, 227 bp, Glycine max
  Clone ID: 700677748H1
gcccattccctgtggatcttgttcgggaatttggacgtcagcttttggaatctgtagcatgtctggggattattcttggccttcagtttatttttcatgtttcattcttaagtctcttgcttccaaaacaagccatggcttttcccttggcctgctttctttgtccagggatgcagtgtatcttggctgtgtctgcttatttaattgtttcttgtactttatcatat

SEQ ID NO: 57590 - DNA, 220 bp, Glycine max
  Clone ID: 700677749H1
cgctgattacctcatcgttatccttaacgggactgccattctttccttggtgaacaacgacgacagagactcctacagacttcaatctggtgatgccctgagagtcccctcaggaaccacatactatgtggtcaaccctgacaacaacgaaaatctcagattaataacactcgccatacccgttaacaagcctggtagatttgagagtttcttcctatct

SEQ ID NO: 57591 - DNA, 218 bp, Glycine max
  Clone ID: 700677750H1
atcacacttatacaaaattctccaattagtaacttgttgagagttgctgcttggaagaaaggctgtttaatggttaagattgtgatgtctggaaatgcagcagtcaaaaggagtgattgggcctcattggtacaagtctttttaacaaacagcaacagtacagagcattttgatgcttgtaagtggacaaaatcggaaccacattcctgggaattgat

SEQ ID NO: 57592 - DNA, 217 bp, Glycine max
  Clone ID: 700677751H1
atagcatctcctttaccaccattctagatatcagagaactttgcagctctcttaggtttttaaaaaacaccacgcaaacagcaagatggccacttccgacagtaacatgctactaaattatgttccagtttatgtgatgctcccactcggagttgtcaatgttgacaatgtttttgaagacccagatggccttaagaacagctcttgcagcttcgag

SEQ ID NO: 57593 - DNA, 214 bp, Glycine max
  Clone ID: 700677752H1
gttggtgtggtttggttttactttaggtacaagaatttccaggactcgaagagggctatcgataagtcgaaatggacgttgatgtcgtttcataagctgggttttagtgaagatgagattttgaactgtcttgatgaggataatgtgattggaagcggatcgtccgggaaggtctacaaggttgtgcttagcgtggggaggttgtggctgtgaa

SEQ ID NO: 57594 - DNA, 214 bp, Glycine max
  Clone ID: 700677753H1
tggggatggtgaagagatgacattgattccaggaaccagtgttgaagaggcttacaacaagctaatagttgaacttgagaaaagtgttcctacattggttggcattgaatgtcccaaggatgagaaacttcctcgtcgcaaaatttttgacaaacctaagacgcgctgcttcactattctccctatggagtttatcttgtggtccgtcaaaagt

SEQ ID NO: 57595 - DNA, 216 bp, Glycine max
  Clone ID: 700677754H1
cagggtaagcatattcctgtatctaatattagtgcaggggaaaatcatgtagttcaaatacccctaatggcacaggaggaaattctgtcttctagtgcaagtgattttagaactgcaatggtgagtaaaaatagcaagcctcaagctactgcaatgcatgtgggagctatagacattatcattgatagtttcgaagtcctgactgcaacatagttg

SEQ ID NO: 57596 - DNA, 217 bp, Glycine max
  unsure (1)..(217): unsure at all n locations
  Clone ID: 700677756H1
tgcattcaaagtcttcgtatgantgccaaccactggtggtcctgctcctgcagctgctccagatcctggttctgagctagcaaaggcatagaatgtccaatgatgacaagcaacaatgttgtacgaaacttagaaagccagtgaatagggaccataaataaatagaggactgctgaatgaagttgcttgagtggactcaagcttggttggataatat

SEQ ID NO: 57597 - DNA, 216 bp, Glycine max
  Clone ID: 700677759H1
gctgttgacaagttgtattctactaaggttaataagtttgcaaaaattatgatggttagacgaagtgttgttggtgatctaaaacttcttactgatgggtagttgtatgagggtaagcatattcctgtatctaatattagtgcaggggaaaatcatgtagttcaaatacccctaatggcacaggaggaaattctgcttctagtgcaagtgatttca

SEQ ID NO: 57598 - DNA, 219 bp, Glycine max
  Clone ID: 700677760H1
gtttgttgttcctcactgacctcaccatggcgaccagagccaagctttctttagctatcttccttttctttcttttagccttgatttcaaacctagccttgggcaaacttaaagaaaccgaggtcgaagaagatcccgagctcgtaacatgcaaacaccagtgccaacagcaacggcaatacactgagagtgacaacgaacatgcttgcaacaatgtga

SEQ ID NO: 57599 - DNA, 221 bp, Glycine max
  Clone ID: 700677761H1
tttggtcgattttcttcaagtgtgaaaggctttcggaatatagacttgtttgtccagcacaacgatgggaaaaagatcatagatcctgaaagccagaaaaccttgtgttcatgcttaaaagaagagatgcttcatccgttgcgggtgacgatagtgaaccggggtccagacacagaacttctggttgctaatcctgtggagctgagtggaaaggggagacc

SEQ ID NO: 57600 - DNA, 221 bp, Glycine max
  Clone ID: 700677763H1
atttactctccacattggaatctgaatgcaaacagtgtgatctatgtgactcgaggacaaggaaaggttagagttgtgaactgccaagggaatgcagtgttcgacggtgagcttaggaggggacaattgctggtggtaccacagaacttcgtggtggcggacaagccggagaacaaggattctaatacatagtattcaagcacaccacaacgcagtcacta

SEQ ID NO: 57601 - DNA, 227 bp, Glycine max
  Clone ID: 700677764H1
gattcgggcactgagcaaacgtgccaaatctagttcaaggaaaaccatttcttctgaagataaaccttttaacttgagaagccgcgaccccatctactccaacaagcttggcaagttctttgagatcaccccagagaaaaacccccagcttcgggacttggatatcttcctcagtattgtggatatgaacgagggagctcttctttaccacacttcaattcaaaggc

SEQ ID NO: 57602 - DNA, 106 bp, Glycine max
  Clone ID: 700677765H1
cggaattggtcgaggaaccttttctcttcggctctaacaggttcgaaactctcttcaaaaaccaatatgcgtcgcattcgcgtcgctccagaggttcaactcaacg

SEQ ID NO: 57603 - DNA, 97 bp, Glycine max
  Clone ID: 700677766H1
gagactcgtacaggaaccaagcatgccacgctcgttgcaacctccttaaggtggagaaagaagaatgtgaagaaggtgaaattccacgagcacgacc

SEQ ID NO: 57604 - DNA, 214 bp, Glycine max
  Clone ID: 700677767H1
tctctccattgtctttgaacactcatcacgatggccaagcttgttctttccctttgtgtccttcttttcagtggctgcttcgctctgagagagcaggcacagcaaaatgagtgccagatccaaaagctgaatgccctcaaaccggataaccgtatagagtcggaaggtgggttcattgagacctggaaccctaacaacaagccattccagtgtg

SEQ ID NO: 57605 - DNA, 214 bp, Glycine max
  Clone ID: 700677771H1
cccagagaaaaacccccagcttcgggacttggatatcttcctcagtattgtggatatgaacgagggagctcttcttctaccacacttcaattcaaaggcgatagtgatactggtaattaatgaaggagatgcaaacattgaacttgttggcctaaaagaacaacaacaggagcagcaacaggaagagcaactttggaagtgcggaaatatagag

SEQ ID NO: 57606 - DNA, 216 bp, Glycine max
  Clone ID: 700677772H1
gccaaatgcctcgtctcctaattagtgacgcgcatgaatggattaacgagattcccactgtccctgtctactatccagcgaaaccacagccaagggaacgggcttggcggaatcagcggggaaagaagaccctgttgagcttgactctagtccgactttgtgaaatgacttgagacgtgtaggataagtgggagctggaaacagcgaaagtgaaat

SEQ ID NO: 57607 - DNA, 216 bp, Glycine max
  Clone ID: 700677773H1
gcagacttaacaacagcacaaagcgggttactgtctgttcaagctaccatctctctctctctttcttagtgcctccttgccaggtgctgccactctctctttctctctcttcatccttctgttgggttggtcttggagtgttgttttctgttgtgcacgtgttgtcattttttaccctcgccacagatctgaagtgttcaagtttggattttgtgc

SEQ ID NO: 57608 - DNA, 216 bp, Glycine max
  Clone ID: 700677774H1
aatacattacagcagcaaaggaaggttgtggtaagtaaatagtagtaacctaacccttgcgtttgcgagtgaggctgaggttgggtttggaaggcaaaggctggtgttgtcccaatccaagagagaagtaaagtaaagcaaaggaatggcgaacatagacatcgaagggatcttgaagcagcagcctgatgatgggcgcgttccgaagacgaaaat

SEQ ID NO: 57609 - DNA, 216 bp, Glycine max
  Clone ID: 700677775H1
cggctcgagctctttgcaacacaacaaaaaaagacaacccagagagcgcgtcttaataaacgctcttctctgaaaacccccatttcttttcttctttcttcttctctttcgcttcttcgatcttcgatcttcgtcgctgaaaatgagagagtgcatttcaatccacatcggccaggccgggattcaggttggaacgcctgctgggagctttactgc

SEQ ID NO: 57610 - DNA, 218 bp, Glycine max
  Clone ID: 700677778H1
tgatgaccttgagtttgaaaatatgccgtggaatggatcagatttggcatcggacgatacacagaagttccacaagccgaggcatagaatgcatagaacattgggatcatctcacaagaccatgagtaggtcattctctggcgattcacagtcaaagggctccgtttctatgcctcatgggtccacgaaggtagacttgagcaaacttgaaatggctg

SEQ ID NO: 57611 - DNA, 219 bp, Glycine max
  Clone ID: 700677779H1
aaagatgttcttgtggagagagtagttggacggagattagatcctgttaccggcaagatatatcacttgaagtattctcctccagagacacaagaaatagccgcaaggcttacccaacgctttgatgatacagaagaaaaggtgaaattgcgattgaatacccatcatcaaaatgtggagtcagtcctttccatgtacaagacataactgttaagatta

SEQ ID NO: 57612 - DNA, 224 bp, Glycine max
  Clone ID: 700677780H1
ttgtcctagcacttatcaagagccgcaagaatctcagcaacgaggacgaagccagaggccccaagaccgtcaccaaaaggtacatcgcttcagagagggtgatttgatcgcagtgcctactggtgttgcatggtggatgtacaacaatgaagacactcctgttgttgccgtttctattattgacaccaacagcttggagaacagctcgaccagatgcctaggag

SEQ ID NO: 57613 - DNA, 213 bp, Glycine max
  Clone ID: 700677783H1
caataattccttcacttgcagaacttagttctctgttgcatcatcatcatcttcattagtgttagccctaaacttcaccttcaaccatgaccacagtgccaccacacagtgtccaagtgcacacaacaacacaccgctacgaagccggcgtcgtcccgccggctcgttttgaggcgccgcgttacgaagcggcatcaaggcgccctcttccat

SEQ ID NO: 57614 - DNA, 212 bp, Glycine max
  Clone ID: 700677784H1
caggacattcccagtgccactgaggccacagtaaaacagcaaaacgtacaatctggaaattctcctatttcaactcctgcaaaacagaaccagagacgtgaagctagtggaagattgattaggagcatacttctaaataatgaagctcgtcaaagtcagtctacaactggggattctagaagagcattggacgaaaagttcataaaaaggga

SEQ ID NO: 57615 - DNA, 208 bp, Glycine max
  Clone ID: 700677785H1
gaccattcttctgcagtctttctgcaattgagtggctctgcctgcggatggagttactgtcaacctttgtatttgctttctgtatggtattacttgtgagttttcctcgtggaagtatcgaccccagcatggctggacttgctgtgacatatggcctgaatttaaatgcacgcctatcacggtggatatcagcttttgcaagcttgaa

SEQ ID NO: 57616 - DNA, 212 bp, Glycine max
  Clone ID: 700677788H1
atcctagtacaccttattaaagaatttaagatatactatgatgagagcgcggttcccattactgttgctgggagttgttttcctggcatcagtttctgtctcatttggcattgcgtattgggaaaagcagaaccccagtcacaacaagtgcctccgatgttgcaatagcgagaaagactcctacaggaaccagcatgccacgctcgttgcaa

SEQ ID NO: 57617 - DNA, 210 bp, Glycine max
  Clone ID: 700677789H1
atgggtgtcaacaggtcaccctccaagtgtgcctctgttggcattcaaggcattgcttgggcctttggtggcatgatctttgcccttgtctactgcactgctggaatttcagggggacacatcaacccagctgtgacctttggtctgtttttggcaaggaagctgtccctaacaagggcactgttctacatatcatgcagtgtcttggag

SEQ ID NO: 57618 - DNA, 214 bp, Glycine max
  Clone ID: 700677790H1
tgttgcgattatgctagttttgatggtttgattaccaagcaagttatgagcaagatggcagaaatgataaacagtctttgtggtggtgatgaaaaattgatgcgtgaaaggacgcacctgctgttggcttgttgttcaaggatggcaatttgtaagaaagatgtttggagagttgaatgtggaatcccttctggatttccgctcacagttattt

SEQ ID NO: 57619 - DNA, 216 bp, Glycine max
  Clone ID: 700677792H1
cggctcgaggaataaaagaaaagaaaagaattactaaaatagttggtactgtgcggggtttgacattaaggtggagcaatgaatgaaagaaactttagtagtcctagtcctccattgacattgtaatctgagtttgaaggaaatcaagaatcatcatccatcgaaatggcagcagcgtcgtcttcttctcctccaaaggacgaggatcgggaacaa

SEQ ID NO: 57620 - DNA, 218 bp, Glycine max
  Clone ID: 700677794H1
aatacattacagcagcaaaggaaggttgtggtaagtaaatagtagtaacctaacccttgcgtttgcgagtgaggctgaggttgggtttggaaggcaaaggctggtgttgtcccaatccaagagagaagtaaagtaaagcaaaggaatggcgaacatagacatcgaagggatcttgaagcagcagcctgatgatggcgcgttccgaagacgaaaatagt

SEQ ID NO: 57621 - DNA, 221 bp, Glycine max
  Clone ID: 700677795H1
gtgcatttcaatccacatcggccaggccgcgattcaggttggaaacgcctgctgggagctttactgcctcgaacacggcattcagcctgatgggcagatgccaagtgacaagaccgttggtggaggtgatgatgctttcaacaccttcttcagtgaaactggggcaggaaagcacgtgccccgtgcgatttttgtagatcttgagcccactgtgattgatg

SEQ ID NO: 57622 - DNA, 227 bp, Glycine max
  Clone ID: 700677796H1
agatggtccagattagtaccacaaaaatggagaaatagaataactgaatatcgtatagctcaaaataaagatttaaccaaatgcaattcatatgaaaaaagccaattaattctttacaaagaacaacaagtaaacgcattaaaaaaaaaaaattagaaaacaatatagatacgatcttttatcctataattttatcaattatgcagataagaaagactcatatattt

SEQ ID NO: 57623 - DNA, 266 bp, Glycine max
  Clone ID: 700677801H1
cgaaaaatgctttggaacctgatgaagaaatgaaggccggttcacctgctgtggactgggagagagaatgcttcaaaaccttgtagagcagaaatgttaaacgaggatagtaaacagataaagaatgatagatgacggtgcaaaggatgcaataggcttgagaaatcaaaatgaagataatgaaaaatacactctttcacgactctttcattttcttagcctggcaaagatattctatagtgcccttttggtgttataatggatcg

SEQ ID NO: 57624 - DNA, 265 bp, Glycine max
  Clone ID: 700677802H1
ttaaacactcatcagtcatcaccatggccaagctagttttttccctttgttttctgcttttcagtggctgctgcttcgctttcagttccagagagcagcctcagcaaaacgagtgccagatccaaaaactcaatgccctcaaaccggataaccgtatagagtcagaaggagggctcattgagacatggaaccctaacaacaagccattccagtgtgccggtgttgccctctctcgctgcaccctcaaccgcaacgccttcgtaga

SEQ ID NO: 57625 - DNA, 255 bp, Glycine max
  Clone ID: 700677803H1
ctcgagccgtgcagaccgagctagctagctagcaagcaagcacagagatggaggcaaagcgaagccatgccctcatgtgcttggcacgtgtttcactcttcctctgcgctctaaccctatccgctgctcacggaagcaccacggttcaagacatcgcgagaaagttgaaactcggggacaacgagcttctgcgcacggagaagaagttcaaggttttcatggagaattacgggaggagctactccacagaggaga

SEQ ID NO: 57626 - DNA, 261 bp, Glycine max
  Clone ID: 700677804H1
aatagacacgtaataaaaccatgcagatacgaacctgccactccatcaccacccaaacccttccacaacttccgtgttcttctagaaaagcccaccaccgccaccttcttccgccgttaaacgctgcggtttccgcggcgccgttcaaagcccggaaggcccactcaatgcctccagaaaagaaagaaattttcaagtccttggagggatgggcctcggagtgggtcctaccgctgctgaagcccgtggagaatgctggca

SEQ ID NO: 57627 - DNA, 260 bp, Glycine max
  Clone ID: 700677805H1
ctctcgctcttgcattagtcctcttccaacaatccgcacctaaactctagggttctgacatggacactggtggaaagatcaagaagggcgccggaggaagaaagggcggcggcccaaagaagaagccggtttcaaggtccgtcaaggccggtctccaattccccgtcggaagaattggccgttatttgaagaaaggaaggtacgcccagcgtgtcggtaccggtgctcccgtttacttggccgcagttctcgagtaccta

SEQ ID NO: 57628 - DNA, 258 bp, Glycine max
  Clone ID: 700677806H1
gcaagatgaagttatcttatatcggggccattggaacttgattgcgacctggatttaaatggttctgcatcaatgcaccatacaccagctgcacccccaactaggccaacacgttccaggagaagggtaaggattgaggaagaaagttctgatgaagattcaccttctgcagttcctaccacccatcattctgtaataagtcgctcacagagagcaagcaaaacggcagcaatgaacaagatgtctttgccactagat

SEQ ID NO: 57629 - DNA, 262 bp, Glycine max
  Clone ID: 700677807H1
ctaacaattccttcacttgcagcactgttgcatcatcatcttcattgcaaaaccctaaacttcaccttcaaccatgaccacacaagtaccaccacacagtgtccaagtccacacaacaacacaccgctacgaagctggcgtcgtcccccccggagcccgtttcgaaccgccgcgttatgaagccggcgtcaaagcgccctccatttaccattccgagagaggtccaacgacttcccaggtcctcgccgtctcgccggcctcc

SEQ ID NO: 57630 - DNA, 255 bp, Glycine max
  Clone ID: 700677810H1
aagaaagtgaaattctgagttacgaagacataagaataagaacccttttctcttcggctctaacaggttcgaaactctcttcaaaaaccaatatggtcgcattcgcgtcctccagaggttcaaccaacgctccccacaacttcagaatctccgagactaccgcattttggagttcaactccaaacccaacaccctccttctccccaaccatgctgacgctgattacctcatcgttatccttaacggactgccatt

SEQ ID NO: 57631 - DNA, 258 bp, Glycine max
  Clone ID: 700677811H1
acaaccttcaatctggcgatgccctaagagtccctgcaggaaccacatactatgtggttaaccctgacaacgacgagaatctcagaatgataacactcgccatacccgttaacaaacccggtagatttgagagtttcttcctatctagcactcaagctcaacagtcctacttgcaagggttcagcaagaatattctagaggcctcatacgacaccaaattcgaggagataaacaaggttctgtttggtagagaggagg

SEQ ID NO: 57632 - DNA, 259 bp, Glycine max
  Clone ID: 700677814H1
ctcgagccggttcaatatcctagtataccttaataaataatttaagatactatgatgagagcacggttcccattactgttgctgggacttgttttcctggcttcagtttctgtctcatttggcattgcttactgggaaaaagagaaccccaaacacaacaagtgtctccagagttgcaatagcgagagagactcgtacaggaaccaagcatgccacgctcgttgcaacctccttaaggtggagaaagagaatgtgaaga

SEQ ID NO: 57633 - DNA, 261 bp, Glycine max
  Clone ID: 700677815H1
gcttccccagtatccacccacctcggaggcccaagccaaagatcctgccgacatcgtaagtaaatcttataaagatggagatgataactaatgttaccgagtatgaggctattgcaaaggaaaaattgccaaagatggtttatgactactatgcatcaggggcagaggatcagtggactttgaacgagaaccgaaatgcgttctcaaggattctgttccggccgcgtattcttgttgatgtaagcaagatagacttgacta

SEQ ID NO: 57634 - DNA, 264 bp, Glycine max
  Clone ID: 700677816H1
ggaaaatagagcctgacttgcggcaatattaatcatggagcatgtcctcttgttgactaagttcggtctctctcgcttcattcctgaggaacctgcttgggtaagagccaaccgtgcaaaacacactacacaggcacaggatatgtgttctaagaagcttttaaggactatttccggaggagataagacatttagagaggggaaaaaattggaatgatgcctttccagcttattatttacttcattaccacttcacacgagaga

SEQ ID NO: 57635 - DNA, 267 bp, Glycine max
  Clone ID: 700677817H1
ctctcgctcttgcaattagtcctcttccaacaatccgcacctaaactctagggttctgacatggacactggtggaaagatcaagaagggcgccggaggaagaaagggcggcggcccaaagaagaagccggtttcaaggtccgtcaaggccggtctccaattccccgtcggaagaattggccgttatttgaagaaaggaaggtacgcccagcgtgtcggtaccggtgctcccgtttacttggccgcagttctcgagtactagctgctg

SEQ ID NO: 57636 - DNA, 261 bp, Glycine max
  Clone ID: 700677818H1
gtcatccatttactgtattccaattacaaaatcgaaacttggatgcataaaatcaggacattaaaagaaaagaagcatgtaacgacagaactgagtgaaattcaatgggacattaaagtcacagtggtctatccttgatggaatttatatattagatcaagactgatgtctggcagcgtggatgcacaaatcaaaatgagaaagattgagtgaactcattgttctagctttgtattgcatgtttcatttcaatttcatttt

SEQ ID NO: 57637 - DNA, 260 bp, Glycine max
  Clone ID: 700677819H1
aaagcaatggctcttcaaagttgaaaacccagaatgtggttgtatctctctccctaaccttaaccttggtactggtgctactgaccagcaaggcaaactcagcggaaactgtttctttcagctggaacaagttcgtgccgaagcaaccaaacatgatcctccaaggagacgctattgtgacctcctcgggaaagttacaactcaataaggttgacgaaaacggcaccccaaaaccctcgtctcttggtccgccctctact

SEQ ID NO: 57638 - DNA, 258 bp, Glycine max
  Clone ID: 700677820H1
cctcgcttccttttcttctcttcgaagtgaatcaatagtagtaattttagttaattaagatgaacctgaacacgagcagtaacttggagactcggtcactgcttgatgagctttgtaacttccacaagaagggactcttcgaccttggacatcctcttcttaatcgcatccttgagaccttcgtcaaagctgctggaattggagcagttcaagctgtgtcccgtgaggcttatttcacagccattgaaggtaccggga

SEQ ID NO: 57639 - DNA, 258 bp, Glycine max
  Clone ID: 700677821H1
gcaagagaaaaataccaaccatggcaaccatttctactgatcaaccaagaggatcctactcctatggaacctcctatggagcaccctatggaaccacctatgagaccaacagcagcattaacaaccctccttcacgccaaaccgtgaagttcataactgctgcaactattggcatcacactcttactcctgtctgggttgaccctcacaggcactgtcataggtttgatcattgcaacccctcttcttgttatcttca

SEQ ID NO: 57640 - DNA, 257 bp, Glycine max
  Clone ID: 700677822H1
aacttattaacctttccttagttcaatatggggaagcccttcttcactctctctctttcttccctttgcttgctactcttgtcgagtgcatgctttgctattacctccagcaagttcaacgagtgccaactcaacaacctcaacgcgttggaacccgaccaccgcgttgagtccgaaggtggtcttattgaaacatggaactctcaacaccctgagctgcaatgcgccggtgtcactgtttccaaacgcaccctcaa

SEQ ID NO: 57641 - DNA, 234 bp, Glycine max
  Clone ID: 700677823H1
tctcgagccgatcggctcgagggaagaatcactcccttatccacttccacaccacaccatggatacaaccaacgctcactcttcagcctccattctacgctctcccaaccgccagtctctgacccgaagagcgaaccataatggaagagtaaattaccggaaaccgaataaccgtttccccgtgaaggctcggccaaagagattgcctttgaccagcattccggtctgctatgc

SEQ ID NO: 57642 - DNA, 258 bp, Glycine max
  Clone ID: 700677824H1
tctcgagcgattcggctcgagatttggatcagggtgtctatgagtcagtggtattacgaggttcgatcgcttacaattggtctcgacccaacatgaaaactagtgttaagatcattcacgctaggtttgtcttgttataatttcttatcttttccgatactgtttttgacctaatttatttatctggatttgtcgtgcaaattctgcaatccgtgttgctttgatgttttgttcatgatttactactgtggtttgttt

SEQ ID NO: 57643 - DNA, 249 bp, Glycine max
  Clone ID: 700677825H1
agttagggtccttacacgatggagcggttgaagtgggcgcaactgggtgagaggctgaagaccggtggggcccagatggggcgaatggtgagcggaaaagtgaaggagatgcttcaggcgccgacgccggagtccaagatggtggacgaggccacgctggagaccatggaagaacccaattggggcatgaatctcagaatctgtggcatgatcaacagcgaccagttcaacggctctgaggcgttaagg

SEQ ID NO: 57644 - DNA, 230 bp, Glycine max
  Clone ID: 700677826H1
ccatattaaaatatggggagccgtacgtgcaaactatttatcagctatctatgcatgtgtccgtctctgtaacgtttgtatggaaaaatggaaataagtaacaaattgttattagttgttacctttgtggcatctactccagctttgatttcctagctagttgttatgtaatgtaaccaatataatcgaagcatgttgagaataaaatactccctactcattccaacttc

SEQ ID NO: 57645 - DNA, 252 bp, Glycine max
  Clone ID: 700677827H1
ggggagaaattgcaactgctgccatggctcagggttccactcctcctgaccattgcaatctcatatctcgatcttacaagacgctttggaaagatttagatatttcttacgacaagttcattagaacaactgatagcaagcatgaagcaattgtgaaggaattttattcaagagtgcttgccaatggtgacatctaccgagctgattatgatggactttattgtgtaaactgtgaggaatataaggatgaga

SEQ ID NO: 57646 - DNA, 257 bp, Glycine max
  Clone ID: 700677829H1
agagcattgtgatgcttgtaagtggacaaaatcggaaccacattcctgggaattgatcttcccaatagaggtatgtggtcctaataatggttttgaaatgtggagttctgagtgggcaaatcaaacttcatggcatttgagtttccttattgacaatcccaaacagtctacagtttttgatattctcttgggaatttctcaagattttgaaattgctggtaatactcttatgccagctttttctgttccacaggcta

SEQ ID NO: 57647 - DNA, 259 bp, Glycine max
  Clone ID: 700677830H1
tgacccatatgtagatgactattaccaccaagcttgtctggcaaaaaaaacttctgtggctaagtttaaacatccattttgacccaatccaaataagggaatatcctccacgatcccgtgctaatactgagccacattcatttgttcagattgatgccctagggagagtttcattttcttctattcgtcgtcctcgccctcttcttgaggttgaccctccaaacacttctgctagctctgatcaaaaatttcagagaag

SEQ ID NO: 57648 - DNA, 260 bp, Glycine max
  Clone ID: 700677831H1
cccaagagaagatttgttagagggaaatttttcctttgatattaaatctcgctctagattggaaaaagtttcctctacaaaagcacaatttgttagtggaaaaaccttcaaatatgatataattggtgctggttcacattcttcaggagattttcctgaaaaggaagatcaagaaaaacccaaaaagattgataccagattgagacaaagaatagatcctcaatacaatgaggttcaggctcagatggaaacaaatttgt

SEQ ID NO: 57649 - DNA, 267 bp, Glycine max
  Clone ID: 700677832H1
ttgcaggattgaagatgggtcaagcattcggttgctaccaagtcgatcagtcaaatgtggctatcaaggagcattttggaaaatttgatgatgtcctagagcctggatgtcactgcctgccttggtgtcttgggtaccagattgctggtagtctgtcgctgcgagtgcagcaacttgatgttcgatgtgagacgaaaaccaaggacaatgtctttgtcaatgtggttgcatctgtgcaataccgagctgtgtctgagaaagcatctg

SEQ ID NO: 57650 - DNA, 267 bp, Glycine max
  Clone ID: 700677833H1
gtgcagtgaaacagtagtagaagaagaaaacacgagttacgcacagtcccggtgccgccaccaccaccattggtttcagtcaactaatggcaaccactctcactccaatccaaaccctcaaattctgttctcccaatcccaaacctctcttcactcccaaacctctcttctctcccaaacctccttccatctccacacctcacaccttctgcgccgataaactctctctctccgtctccgccgccacctcctcctccaacggtcctc

SEQ ID NO: 57651 - DNA, 261 bp, Glycine max
  Clone ID: 700677834H1
agaacacagaaagaaggcttttttttgccaacaccagttgcaaaactaatatcctttcaaacggatttgatctacaatggcctggtttctctcttttcctctatccactctcttttttccgtggctacagagtcctaccaccgtgctgaggagaccaaagacagtgttgaatcagcagtgcaacgtgctccttctcaaagcactcatggcagcgcactcttgctgaagaaactgggactttgcttcctgaggttgcgtatg

SEQ ID NO: 57652 - DNA, 56 bp, Glycine max
  Clone ID: 700677835H1
cacaaaataagcaaaattagcacgacaaaactttatgcacttgttggcttgttgct

SEQ ID NO: 57653 - DNA, 244 bp, Glycine max
  Clone ID: 700677836H1
actaaacttacaaaagcgtgcgcattttctttgccaaccatacataggtaactagtgagacaccagcaccacttgtggagtacagagaagaagaatagaagagtgtaagaggatatggaacgggagagcgcaaggaatatgataggatctatgattatgatgtctacaatgagttgggcaacccagataagagtgtagagttagctcgtccagttcgtggagggtctagcacctttccctaccc

SEQ ID NO: 57654 - DNA, 256 bp, Glycine max
  Clone ID: 700677837H1
ctcgagcggtcctagcacatttgaagagcctcaacaacctcaacaaagaggacaaagaagcagaccacaagaccgtcaccagaagatctataacttcagagagggtgatttgatcgcagtgcctactggtgttgcatggtggatgtacaacaatgaagacactcctgttgttgccgtttctattattgacaccaacagcttggagaaccagctcgaccagatgcctaggagattctatcttgctgggaaccaagag

SEQ ID NO: 57655 - DNA, 257 bp, Glycine max
  Clone ID: 700677838H1
cccagatctgcctcactcttcttccttcctaggatgctgctcatggcctctaccctccctttcccaacactttccattcttcctcacaaggcacactgcaaatcaacaccaaaacttcatccacttcctcacatctcttcaagattgattgttgtttcataagatcctcccatattattagatcaatcttgcaatgttctaaaaaatgcctctctttccctcacatcaatcacactcccctttattggaacaaaagg

SEQ ID NO: 57656 - DNA, 256 bp, Glycine max
  Clone ID: 700677839H1
gtcagatatggtaaagagtcatccgaaactactgtggtagagactacatttggatcttcagtgaaacataacattgatactggatctcagtttaagactccaattaccttgccagcgaaacgtaaattatctgatttgaaggatatatcaatgttttcatcgtctggaaaacgattaaacgttggagatcaaggatttcgttctcctatttgttcaagtgtaattcgtaaaagctgcctgcagagtgatgctgttg

SEQ ID NO: 57657 - DNA, 78 bp, Glycine max
  Clone ID: 700677840H1
gtgtttgaacagtacagatctccccgcagtagagatttcctccaaaaatcatacttcactttttccaccaaaaaatag

SEQ ID NO: 57658 - DNA, 250 bp, Glycine max
  Clone ID: 700677841H1
atgatcgcagattgctgatgaggatcctgacgagtcaactgacaaagaaaagaaagaagatgcatcctctgacaatgatgagaagaaaggtcaatattctaagttctggaatgagtttggtaaatccattaaagttggtatcatcgaggatgccaccaacagaaatcgtttggcaaaactgctcagatttgagagcaccaagtctgagggtaaattgacatctctggatcagtacatatcagaatgaaaa

SEQ ID NO: 57659 - DNA, 250 bp, Glycine max
  Clone ID: 700677842H1
aattttcttccccaaatcgtagatctacggtttaactggagtagtgtggtaagatgggaggtggatttagagtgcttcatttagttaggccgtttctatcgtttcttcctgaagttcaaactgctgacaggaaagtgccatttagagagaaggtcatatacactgtgatctctcttttcattttcctggtttgtagtcagctccctctatatgggatacactcaacaacaggtgctgatcattctattgg

SEQ ID NO: 57660 - DNA, 250 bp, Glycine max
  unsure (1)..(250): unsure at all n locations
  Clone ID: 700677843H1
ggtctgaaaagatattgagaacctaataaagagccaaagtgagntctactttgtggatgctcagcctcagcagaaagaggaggggaacaagggaagaaagggtcctttgtcttcaattttgagggctttttactgaataagtatgtagtactaaaatgtatgctgtaatagctcatagtgagcgaggaaagtatcgggctatttaactatgacttgagctccatctatgaataaataaacagcatatgat

SEQ ID NO: 57661 - DNA, 252 bp, Glycine max
  Clone ID: 700677844H1
ctcgagcggtcctagcacatttgaagagcctcaacaacctcaacaaagaggacaaagcagcagaccacaagaccgtcaccagaagatctataacttcagagagggtgatttgatcgcagtgcctactggtgttgcatggtggatgtacaacaatgaagacactcctgttgttgccgtttctattattgacaccaacagcttggagaaccagctcgaccagatgcctaggagattctatcttgctgggaacca

SEQ ID NO: 57662 - DNA, 251 bp, Glycine max
  Clone ID: 700677845H1
cttggatagtgctcccactctcctatctggtataggacttcgtgggtagacttttctatttctctcctttctttcactctcttcttctcactgatctgcattgccgttcaaagtggtcttatttgaaaaacacttgggcgttggtgcaaatgtttgcttcgttaattttctttggagacaacaggctcactgagaaaacaatttttacttgcagagatttggacatcttggttgtttatttacaatagcaa

SEQ ID NO: 57663 - DNA, 251 bp, Glycine max
  Clone ID: 700677846H1
cagaaggtggacacgtgttcgaggaaatgcagaggccaggtaccccactatacaacatcaaggcatacctccctgtcatcgagtcctttggtttctcgagcacattgagggctgcaacatcaggccaggccttcccacaatgtgtgtttgatcactgggacatgatgtcttctgacccattggaggctggatcacaagctgcacagcttgtcactgacattcgcaagaggaagggcttgaagaacagatga

SEQ ID NO: 57664 - DNA, 254 bp, Glycine max
  Clone ID: 700677847H1
agctttgatgaagttcatggactctattcaggcggaattaagctgccaacagatataatcagcaagattagtccactacccgtgcttaaggaaatcttccgaactgatggtgaacaggcccttaagtttcctcctcctaaagtaattcaagtgagtaagtctgcatggatgactgatgaagaatttgcaagagaaatgcttgctggtgtaaatccaaacttgattcgttgtcttaaggatttcccccacgaagc

SEQ ID NO: 57665 - DNA, 264 bp, Glycine max
  Clone ID: 700677848H1
aaagcaatggctacttcaaagttgaaaacccagaatgtggttgtatctctctccctaaccttaaccttggtactggtgctactgaccagcaaggcaaactcagcggaaactgtttctttcagctggaacaagttcgtgccgaagcaaccaaacatgatcctccaaggagacgctattgtgacctcctcgggaaagttacaactcaataaggttgacgaaaacggcaccccaaaaccctcgtctcttggtcgcgcctctactcca

SEQ ID NO: 57666 - DNA, 261 bp, Glycine max
  Clone ID: 700677849H1
gcacttcccgaagtgttaagagaatgcctctttctatagggggaggagctggtgcaaagaatgctattctcatgaatatgccaaatgctgttctttcaatgtggagatattttgttggagatctcgtctttgaagtttctaagatgacttctccctacattaaatgtacagtctctttcttcatagcatttggaaatttggctgatgacaccatcaattttgaggcttttccccacaagctggtgcagttggagagattca

SEQ ID NO: 57667 - DNA, 257 bp, Glycine max
  Clone ID: 700677851H1
ccctaacacacaggcgcagacgcaaacgcaaacgcaaacgcaaacgcaaacgcagagcgtgatccattgacgaagatggtgcagcgtctcacctaccgcaagcggcacagctatgccaccaagtccaaccaacacagggtcgtcaaaacccctggtgggaagctcgtttatcagactaccaagaagagggccagcggacccaagtgccccgtcactggcaagaggattcaggggattccacacttgaggcctgcaga

SEQ ID NO: 57668 - DNA, 253 bp, Glycine max
  Clone ID: 700677852H1
ctgtgtctcggcttcagcatgttgaattgagtggacttcagggagtaacagatgcagggtttcttccattgctggagagctctgaggctggtctggttaaagttaatctaaatggctgtgtaaatctttcagacagagtagttttgtccatggtcaactcacatggatggactctcgaggtgctaagccttgatggttgtaaaagagttggtgatgctagcttgatggcaattgcaggcagttgcccattgct

SEQ ID NO: 57669 - DNA, 253 bp, Glycine max
  Clone ID: 700677853H1
agaaagcttccatagccccccaaaaatgaagagcaccatcttctttgctctctttctcttttgtgccttcaccacctcatacctaccttcagccatcgctgatttcgtgctcgataatgaaggtaaccctcttgaaaatggtggcacatattatatcttgtcagacataacagcatttggtggaataagagcagccccaacgggaaatgaaagatgccctctcactgtggtgcaatctcgcatgagctcgaca

SEQ ID NO: 57670 - DNA, 252 bp, Glycine max
  Clone ID: 700677856H1
aatggtcccaagggtttaacctttctggctgtgttaatatgcgtttcagcactgtcactgagtccttctgttgcgggggaagggcaaaataatggccttgttatgaacttctacaaggaatcatgccctcaggctgaagacatcatcacagaacaagtcaagcttctctacaagcgccacaagaacactgctttctcctggctcaggaacatcttccatgactgtgctgttcagagttgtgatgcttcactg

SEQ ID NO: 57671 - DNA, 249 bp, Glycine max
  Clone ID: 700677857H1
tagaacagaagaagtgaaagcggagaggagaaagaaggatatggaagcagcgtcagagttagaccaaggtatgaaggtgttggattcgtgtttagcgaatatcaattggcgcctcaaaccttcttccaagcgtcgcttacaattagatgttctcgctctcattacaagaatgagagcggttgtaatggtagactacggtggaatcatgcctcagctccagcaccacctctcttccctctccaactcgca

SEQ ID NO: 57672 - DNA, 249 bp, Glycine max
  Clone ID: 700677858H1
gttaatatcctagtataccttaataaataatttaagatactatgatgagagcacggttcccattactgttgctgggacttgttttcctggcttcagtttctgactcatttggcattgcttactgggaaaaagagaaccccaaacacaacaagtgtctccagagttgcaatagcgagagagactcgtacaggaaacaagcatgccacgctcgttgcaacctccttaaggtggagaaagaagaatgtgaag

SEQ ID NO: 57673 - DNA, 250 bp, Glycine max
  Clone ID: 700677859H1
gttcatatcctagtataccttaataaataatttaagatactatgatgagagcacggttcccattactgttgctgggacttgttttcctggcttcagtttctgtctcatttggcattgcttactgggaaaaagagaaccccaaacacaacaagtgtctccagagttgcaatagcgagagagactcgtacaggaaccaagcatgccacgctcgttgcaacctccttaaggtggagaaagaaaatgtgaagaa

SEQ ID NO: 57674 - DNA, 252 bp, Glycine max
  Clone ID: 700677861H1
cattctgatggtattgacaaaactagtgcaactttgcaatttagaaagttagcagattgtgattttctcaagagaaactttaagcagatgtctaatgttttatgggtggctcctgaggacaaggcgagtttatggtcacaacttcattatgtttcgtgcaataatctggaaatgcaagaagcttatcttgtcaatctcgtaaatgtgttacgagaattgtatttgcacagtccagaggaactcgccaattga

SEQ ID NO: 57675 - DNA, 251 bp, Glycine max
  Clone ID: 700677862H1
ctcgaccgaatcggttcgagcggtctcgagcggctcgagcggcacgagcggctcgaggtaccacttgcacaacaaattgacaaggtcaagcgagcactaggggactatcttggtgtcaaggttcatgcttgtgttagtgggaccagtgttcgtgaagatcaacgcatcctctcaagtggggttcatgttgttgttggtactcctggacgtgtatttgacatgctgcgcaggcaatcattgcgcctgataac

SEQ ID NO: 57676 - DNA, 257 bp, Glycine max
  Clone ID: 700677865H1
aaaattctccaccaagttatgggtttccttgtgttgcttcttttctccctcttaggtctctcttctagttccagcatatcaactcatcgttccatattggaccttgaactaaccaagtttaccacacagaaacaggtgtcttcactgttccaactatggaagagtgagcatggacgtgtctaccataaccacgaagaagaggcaaagagacttgagattttcaagaataacttgaactatatcagggactgaatgca

SEQ ID NO: 57677 - DNA, 243 bp, Glycine max
  Clone ID: 700677867H1
cagtcaggatgaagccggtgctgcggccatcaagacagttgagctggatgcagctcttggaggacgtgctgttcagtatcgtgaagtacaaggccatgaaactgaaaagtttctgtcttatttcaaaccatgtattatcccacaagaaggtggagttgcttctggtttcaaacatcctgaggctgaaaaacataagacacggttgtttgtatgcagagggaaacatgttgtacatgtcaaaga

SEQ ID NO: 57678 - DNA, 252 bp, Glycine max
  Clone ID: 700677868H1
tgaaaagtttgctgacatcactcctcaagagttcagcaaaaagtacttgcaagctcccaaggatgtgtcgcagcaaatcaaaatggccaacaagaaaatgaagaaggaacaatattcttgtgaccatccacctgcatcatgggattggaggaaaaaaggtgtcatcacccaagtaaagtaccaagggggctgtggaagcggttgggcgttttctgccacgggagccatagaagcagcacatcaatagcaaca

SEQ ID NO: 57679 - DNA, 250 bp, Glycine max
  Clone ID: 700677869H1
ggcacccatgcctactactatgcctgctgctccacatcctccagcaatacgtcctagggtgcgggccagaagaggacaggctacagatccacacagcatagctgatacgattacgcagagaaagaatagcagaaagaatcagggcattgcaagaactggttccaagtgtcaacaagacagatagagctgccatgttagatgaaattgtggattatgtcaagttcttaaggcttcaagtgaagttttgagc

SEQ ID NO: 57680 - DNA, 253 bp, Glycine max
  Clone ID: 700677870H1
caccttactgatggtattgacaaaactagtgcaactttgcaatttagaaagttagcagattgtgattttctcaagagaaactttaagcagatgtctaatgttttatgggtggctcctgaggacaaggcgagtttatggtcacaacttcattatgtttcgtgcaataatctggaaatgcaagaagcttatcttgtcaatctcgtaaatgtgttacgagaattgtatttgcacagtccagaggaagctcgccaat

SEQ ID NO: 57681 - DNA, 251 bp, Glycine max
  Clone ID: 700677871H1
cattgtccttgaatataatactcagcatggctaagcttgttctttccctttgttttgtgcttttcagtggctgctgcttcgctttcagtttcagagagcagccacagctgaacgagtgccagatccaacgcctcaatgccctcaaaccggataaccgtatagagtcagaaggtggcttcattgagacatggaaccctaacaacaagccattccagtgtgccggagttgccctctctcgctgcaccctcaac

SEQ ID NO: 57682 - DNA, 253 bp, Glycine max
  Clone ID: 700677872H1
gctgcttcgctttcagttccagagagcagcctcagcaaaacgagtgccagatccaaaaactcaatgccctcaaaccggataaccgtatagagtcagaaggagggctcattgagacatggaaccctaacaacaagccattccagtgtgccggtgttgccctctctcgctgcaccctcaaccgcaacgcccttcgtagaccttcctacaccaacggtcccacggaaatctacatccaacaaggtaagggtatttt

SEQ ID NO: 57683 - DNA, 247 bp, Glycine max
  Clone ID: 700677875H1
cgctcgagatcaaattcattcctttccttctttcttctaaaccctatggccgacgaagccaaagccaaaggcaacgcagccttctcctccggggactatcctgccgccatccaccacttctccgatgccatcgccctggctccctccaaccatgtcctctattccaaccgatccgccgcatacgcctccctcaaaaactacgcagatgcattagcggatgccaaaaagacagttgactcaagcccga

SEQ ID NO: 57684 - DNA, 250 bp, Glycine max
  Clone ID: 700677876H1
gcgattgccactgatgatgattatccttacagagctaaagagggtagatgcaaagccaataagatacaagacaaggttacaattgacggatatgaaactctaataatgtcagatgagagtacagaatcagagacagagcaagcgttcttaagcgccatccttgagcaaccaattagtgtctccattgatgcaaaagattttcatttatacaccgggggaatttatgatggagaaaactgtacaagtccgt

SEQ ID NO: 57685 - DNA, 247 bp, Glycine max
  Clone ID: 700677877H1
tttctctctcgttttttctcaaaaagttgcaagagttaaagcaaaaaccaaagtgagagagaaaatgatgaagccatcgatgctcagatctcttcactctgccgccacccgcggcgcctcccacctctcccgccgtggctacgcctccgagccggtgccggagcgcaaggtggccgttctaggtgccgccggcgggatcgggcaacccctctcccttctcatgaagctcaaccccctcgttccagcc

SEQ ID NO: 57686 - DNA, 252 bp, Glycine max
  Clone ID: 700677878H1
ggaatacttctctttctcactaacatcatatcactatacttttcccttaacatgactaggtaccacgatccctactactactacttgtgggaatacttctctttcccacttcacctcatcttcttcgtgttaatacttttctttgtgctagcattctcgtggtacataaactacgagtccttgttggaggacttgctcgtgcaggtgaagatcttcctcgccctcgtgccgctgctgctgtgctcctcgttc

SEQ ID NO: 57687 - DNA, 254 bp, Glycine max
  Clone ID: 700677879H1
atgaaagtacaattcaccaagcgtccctatgcacaaccttatggtgtatatacatggttaacggatattaaagacacctctaaagaaggatatagttttgaagagatatgcatcaagaaagaagcgtttgagggagaagagaagttttgtgcaaaatccttgggaacagtaattggttttgccatttcaaagctgggaaagaacattcaagtactttcaagttcctttgtcaataagcaagagaatacactgtg

SEQ ID NO: 57688 - DNA, 258 bp, Glycine max
  Clone ID: 700677880H1
cacaattctcaaatccaaatccaattccaattccaattcccaatcttctcaaaccctaattcctcatcttgaaaatgagagaaatcttgcacatccagggagggcaatgcgggaaccagatcggagcgaagttctgggaggtgatatgcgacgagcacggcatcgaccacaccggaaagtacagtggcgactctgaactccaattggaacgcatcaatgtttattacaacgaagcgagtggcggaaggtcgttccacg

SEQ ID NO: 57689 - DNA, 254 bp, Glycine max
  Clone ID: 700677881H1
gtgtccttttggtcctgaaatctacaggggaccagtgcttccatcctctccagctgttgcttatccacctactacgccttttccctatccaggatttccatttgaaaccaattttccattatcttcaaactctttgtctgtttgttcaacagcatttatggattcgtcaactgtgggtggattatgctttcctaccatgccctcacagccagttgggtctggtggtgttgtttcatctacgtaccccgtccata

SEQ ID NO: 57690 - DNA, 254 bp, Glycine max
  Clone ID: 700677882H1
ccccttctccccaaccatgctgacgctgattacctcatcgttatccttaacgggactgccattctttccttggtgaacaacgacgacagagactcctacagacttcaatctggtgatgccctgagagtcccctcaggaaccacatactatgtggtcaaccctgacaacaacgaaaatctcagattaataacactcgccatacccgttaacaagcctggtagatttgagagtttcttcctatctagcactgaagc

SEQ ID NO: 57691 - DNA, 251 bp, Glycine max
  Clone ID: 700677884H1
acggtccttatctatcgtattaacaatcgaaaaatggtcgaaagaaaaaatccctatttgacaaggcttcttactatacctatgaattccattggacccaaaaatgatacattggaagaatcatctgagtcttccaatatcaataggttgattgttccgctcctgtatcttccaaaaggaaaaaagatctctgagagctatttcctggatccgaaagagagtactcgggttctcccaataactaaaaagta

SEQ ID NO: 57692 - DNA, 249 bp, Glycine max
  Clone ID: 700677885H1
tctcgagtccgattcggctcgagaagcccactagaactattgatgacaaggttgttgtagaatctgtcagatctaatctgacttgcaggtttggagtacctaaagcaatcgttagtgatcaaggaacccatttttgcaacaaatcaatgcatgccatgcttaaaaagtacggggttgtacacagggtatccacaccataccacctccaaaccaatggacagacagaaatttctaacaggtgatcaagag

SEQ ID NO: 57693 - DNA, 248 bp, Glycine max
  Clone ID: 700677886H1
cgacaatgaatgctagtgagtgtgttgctaggggctgtgcgttggaatgcgcaattcttagtccaacgttcaaagtacgagaatttcaggtcaacgaaagccttcctttctcgatttctctttcatggaaaggttctggtccagatgcacaggacaatggatcagaaaatcagcagagttcccttgtttttcctaagggtaatcccataccaagtatcaaggcactgacattctgcaggcaggaacat

SEQ ID NO: 57694 - DNA, 249 bp, Glycine max
  Clone ID: 700677887H1
ataaaattcttccaccaagttatgggtctacttgtgttgcttcttttctccctcttaggtctctcttctagttccagcatatcaactcatcgttccatattggaccttgacctaaccaagtttaccacacagaaacaggtgtcttcactgttccaactatggaagagtgagcatggacgtgtctaccataaccacgaagaagaggcaaagagacttgagattttcaagaataacttgaactatatcagg

SEQ ID NO: 57695 - DNA, 247 bp, Glycine max
  Clone ID: 700677888H1
agctcactgagaaaacaatttttacttgcagagatttggacatcttggttgtttattatacaatagcaactcaatttagaaaatttctaccgcattacattaggtggcatctgtataccttgttgatctacattctcccatcttttctcactgctgaaattaaatataagcggaatttgagtaatattcacatttccggcttattttacgacggcagatacaaattctggactaaaccgagataaat

SEQ ID NO: 57696 - DNA, 245 bp, Glycine max
  Clone ID: 700677889H1
aataacttggaagatgctcatgagttgattgatacagcaatctcaactgcgctgaaagatagcaaacctgtgtatataagcattagctgtaacttgcctgggattcctcaccccactttcagtcgtgaccctgttcgtttttcattgtctccaagattgagtaataagatggggttggaggccgcagtggaggcagcggcggaattccttaacaaggcagtgaaaccagtgctggtaggtggtcc

SEQ ID NO: 57697 - DNA, 248 bp, Glycine max
  Clone ID: 700677890H1
atttgttactggagatggtgaagaaatgtcactaattcctggtaccagtgttgaagaagcatacaataaattgactgttgaactagaaaagtgtgttccaacattggttggcatagaatgtcccaaagatgaaaaacttccccgtcgcaaaatttttgataaacccaagacgcgctgcttcaccatacttcctatggaatttaatctagtggtgcgtcaaaaattcttgaattttgtgcgattcatta

SEQ ID NO: 57698 - DNA, 247 bp, Glycine max
  Clone ID: 700677891H1
cgcaaacttctgatttgagttttactcctttagatctgcaaatcaatttctgattttcatttaaacgcttggccgaattgtggagctgccaaagcaaaacacttattattatgtgagagcaataatgggctctggaaatatactaccttcttctggcagctctgacatgtctatctccgagctccgcgagaagcaccattgggagctagaaaatctgactctgaccacacaacctctcaaaacgttg

SEQ ID NO: 57699 - DNA, 247 bp, Glycine max
  Clone ID: 700677892H1
acttattaacactttccttagttcaatatggggaagcccttcttcactctctctctttcttccctttgcttgctactcttgtcgagtgcatgctttgctattacctccagcaagttcaacgagtgccaactcaacaacctcaacgcgttggaacccgaccaccgcgttgagtccgaaggtggtcttattgaaacatggaactctcaacaccctgagctgcaatgcgccggtgtcactgtttccaaac

SEQ ID NO: 57700 - DNA, 249 bp, Glycine max
  Clone ID: 700677893H1
ctttgcagacatatcttggatcccatttccatcaggtcagtgcatatgtacttttttcagaaaggttggtggtgactggtgattgttgaagagaataatggcaacttcaactatggatattcttcatttccaccacactcctttttattgtgaggagaatgtatacttgctttgcaaaaagttgtgcaatgatggaatagcaaatgctgatggatctgatctttttgttgctttcattccaacgaaaag

SEQ ID NO: 57701 - DNA, 250 bp, Glycine max
  Clone ID: 700677894H1
caccatgctgacgctgagtacctcatcgctatccttaacgggactgccattcttaccttggtgaacaacgacgaccgagactcttacaaccttcaatctggcgatgccctaagagtccctgcaggaaccacatactatgtggttaaccctgacaacgacgagaatctcagaatgataacactcgccatacccgttaacaaacccggtagatttgagagtttctgcctatctagcactcaactcaacagtc

SEQ ID NO: 57702 - DNA, 253 bp, Glycine max
  Clone ID: 700677895H1
acgtgatgaacccggatgagtgttgatgagaaaacaaaggatagagggagatctgtttaagtttgaaaacatctcttcgtcacagtctttgttctttctagttttatctcttttgttgttgttggaaggaacccgacacaactttacacagtttacacagatctgttcctttttgacactgtcaacagaactatcctttcattcactgccgccagtgatgataacttgaagaaagaatcagattggagggtga

SEQ ID NO: 57703 - DNA, 241 bp, Glycine max
  Clone ID: 700677901H1
gctgatgtgatgctttgtggaggctcagatgctgctattataccaattggtttgggaggctttgtggcatgcagggcactctcacaaaggaatactgatcctaccaaagcttcacgcccttgggacattaaccgtgatggatttgtcatgggtgaaggggctggagttttgcttttagaggaactggagcatgctaaggaaagaggtgccaccatatatgctgaattccttggtggaattt

SEQ ID NO: 57704 - DNA, 144 bp, Glycine max
  Clone ID: 700677902H1
ccaacaccagatgcattgcttaggcacaatggcctattacaagttgcagcttcgtgatagatcgatagagttggccacttttatagtcaataaatgggactcgtacttacctaagaatatggggcctcatacttttttttcata

SEQ ID NO: 57705 - DNA, 265 bp, Glycine max
  Clone ID: 700677903H1
tgtcaagacagttccagtaatagtactacacagttttggaggactgttccaaagggaacttttgtgtatgtggatcctgaattccttgcttctggtgaacttacaccaaagtcagatgtttattcatttggaatcattttattgagattgatgactgggaaaccagccctgggaataataaaggaagtgcaatatgcattagatgctggaaagttgaaatccatcttggatccttggctggagaatggccatttatgctggctga

SEQ ID NO: 57706 - DNA, 229 bp, Glycine max
  Clone ID: 700677904H1
ctattagctggtttccatggaaagcttcatttcatcacaaaagatgccaatcatgatatttctgttctgaaggctgatcactgcagtaatgtggattcttcaccatcaacctcagcacctcaatcacccaaatacatggaagatgaattgttgcgagaatcagctgaaacacatgaagctgtttggaaactagttgcaagtaagggttttgagcaggctgaactgatca

SEQ ID NO: 57707 - DNA, 127 bp, Glycine max
  Clone ID: 700677905H1
actcgagccgtttttttaattcaataaaggaaattaggcatgaccctcttgttgagtaagctctgcctatctgaaaatttccacacctcttttaattgtcgtaatgatgtgtgaagtgtgtgttatt

SEQ ID NO: 57708 - DNA, 269 bp, Glycine max
  Clone ID: 700677906H1
cctcaggtaccacatactatgtggtcaaccctgacaacaacgaaaatctcagattaataacactcgccatacccgttaacaagcctggtagatttgagagtttcttcctatctagcactgaagctcaacaatcctacttgcaaggattcagcaggaacattttagaggcctcctacgataccaaattcgaggagataaacaaggttctgtttagtagagaggaagggcagcacaaggggagcagaggctgcaagagagcgtgattgtgg

SEQ ID NO: 57709 - DNA, 265 bp, Glycine max
  Clone ID: 700677907H1
cttcttaagggcaacattacgctccatttgctatggtacggtacattcacccccacgcaacgctctatagtcatcgacttcctcgaatccctaacctccacgtcatcacctgaatccccttcagtttccacgtggtggaaaaccaccgagagctacaggggaggcccctgcaccctcgtcgtagggaaccaaatcctcgacgagaattactccctcggaaaatcactcaaaacgacaacctcgtagctctcgcgtcgaatccgaa

SEQ ID NO: 57710 - DNA, 272 bp, Glycine max
  Clone ID: 700677908H1
ttcgagcgaattcggctcgagcggctcgaggttgcagaccgacgctagctagctagcaagcaagcacagagatcgaggacaagcgaggccatgccctcatgtgcttggcacgtgtttcactcttcctctgcgctctaaccctatccgctgctcacggaagcaccacggttcaagacatcgcgagaaagttgaaactcggggacaacgagcttctgcgcacggagaagaagtcaaggttttcatggagaattacgggaggagctactccacag

SEQ ID NO: 57711 - DNA, 267 bp, Glycine max
  Clone ID: 700677909H1
gggggctggaatgagtgagttaaagcagtggaatgaattgtatggggaaggaggttcaaggaagcaagaacagttatcttatttcctatgaaaattaccgagggaagaaagaatttgtagctgcatccttctagttgctctttttctatacgagacatccatggggcaatcaggagtttgccagtgatataaaatttgtgtatgatttccagtagtatctagttgcttcaatttaatactcgattaaatgtattagtcacgtttggt

SEQ ID NO: 57712 - DNA, 254 bp, Glycine max
  Clone ID: 700677269H1
ggcaagtgttcccgccatgggaatggagcgagtgcagtgtgcctatgcctctctggacgaagcgttcgaaatagggaaagagacgtatcagggtcagcattacagccagatttacttcgcgcgccttcatttgatgcgaacactcttgtattccctcattcctcattggaaacccaattctcccgtgtgcacggtgctgggattggaagagggcaaggagtgtgtcatggttggaaccctctataaacacatga

SEQ ID NO: 57713 - DNA, 253 bp, Glycine max
  Clone ID: 700677270H1
aactgccccaagattcatcaagtgcgtgaccgttggtgatggagctgtagggaagacctgcatgctcatttgctataccagcaacaaattccccacggactatatccccactgtgtttgataatttcagtgcaaatgtggttgttgaaggcataactgtcaacttaggcctttgggatacagctgggcaagaggattacaacaggctgaggcccttgagctacaggggggcagatgtctttgtcttggctttt

SEQ ID NO: 57714 - DNA, 253 bp, Glycine max
  Clone ID: 700677272H1
tctcgagccgattcggctcgaggaagaaccacgtgaaagaggatgcaagaaacggggttgagcgaaaatatctgcaccttgaagcttcacgagaacattgctcgcccttcacgcgctgacttctacaaccctaaagctggtcgcattagtaccctcaacagcctcaccctcccagccctccgccaattccaactcagtgcccaatatgttgtcctctacaagaatggaatttactctccacattggaatctga

SEQ ID NO: 57715 - DNA, 248 bp, Glycine max
  Clone ID: 700677273H1
aacaggcatctcagtgttgttcaccctatttataaactccttcaccctcactatcgtgacaccatgaacataaatggccttgctcggttatcactggtcaacgacggtggcgttatagaacaaacatttttgtggggaaggtattctgtggaaatgtctgctgtagtttacaaggattgggtttttacagatcaagcattgcctgctgatcttataaaaagaggaatggcaattgaggatccatcgtg

SEQ ID NO: 57716 - DNA, 247 bp, Glycine max
  Clone ID: 700677274H1
cggctcgaggctaagattcaagacaaggaagggatcccacctgaccagcagagacttatctttgcgggtaaacaacttgaggatggtcgcacccttgccgattacaacatccaaaaggaatcaaccctccatctcgtgcttcgcctcaggggtggcatgcaaatctttgtcaagactttgaccgggaagaccatcacccttgaggtggaatcctcggacaccattgataatgttaaggccaagatcc

SEQ ID NO: 57717 - DNA, 90 bp, Glycine max
  Clone ID: 700677276H1
agttagtctgtgtgctattaaattcacttcggactacatgtatgcaagagaacggatgacacgaaagcggccgcactccagcacaatgaa

SEQ ID NO: 57718 - DNA, 252 bp, Glycine max
  Clone ID: 700677277H1
gctttctcttccttcataatttctcacctttcaaatctccattcagcttcattttctgcatagaaaaaacccttttctggagaaagaatatagtcttcagctggacaaggatcattcatcttgaaagaagagtttgtgtgtgacaatctttatagttctaaggagggtgcaagagagaactgaatttgctgtgatggcaactcgtagatatgcttttggaagagctgatgaggccactcatccagactccat

SEQ ID NO: 57719 - DNA, 99 bp, Glycine max
  Clone ID: 700677278H1
ctctcacaatggactccctctctctcttctgcaccggaacccttctagccggcagcctctactggttcgtctgtgatctgggcaccgccgagcagaagg

SEQ ID NO: 57720 - DNA, 92 bp, Glycine max
  Clone ID: 700677279H1
aaacactcatcagtcgtcagcatgggcaagctagtgttttccctttgtgtgctgcagttcagtggctgctgcttcgcgttcagttccagaga

SEQ ID NO: 57721 - DNA, 258 bp, Glycine max
  Clone ID: 700677280H1
taagaaagtcttccatagccccccaaaaatgaagagcaccatcttctttgctctctttctcttttgtggcttcaccagctcatacctaccttcagccatcgctgatttcgtgctcgataatgaaggtaaccctcttgaaaatggtggcacatattatatcttgtcagacataacagcatttggtggaataagagcagccccaacgggaaatgaaagatgccctctcactgtggtgcaatctcgcaatgagctcgacaa

SEQ ID NO: 57722 - DNA, 99 bp, Glycine max
  Clone ID: 700677281H1
ttggcattaaagaacaacaacagaggcagcaacaggaagagcaacctttggaagtgcggaaatatagagctgaattgtctgaacaagatatatttgtaa

SEQ ID NO: 57723 - DNA, 257 bp, Glycine max
  Clone ID: 700677282H1
gtataccttaataaataatttaagatactatgatgagagcacggttcccattactgttgctgggacttgttttcctggcttcagtatctgtctcatttggcattgcttactgtggaaaaagagaaccccaaacacaacaagtgtctccagagttgcaatagcgagagagactcgtacaggaaccaagcatgccacgctcgttgcaacctccttaaggtggagaaagaagaatgtgaagaaggtgaaactccacgacc

SEQ ID NO: 57724 - DNA, 253 bp, Glycine max
  Clone ID: 700677283H1
ctacctttgtttttctccttctttttcttctcagtttcattctcatgctcatggacatggatgtttgccgaaatatatcagtttcttcaagtgagtgtcagcaagagcttcccacccttgatgaccttttctgtcatcagaacacggaagtggattttggcatggaatggttatcagtgtttgtggaagactgtttctctagtaggccaagtaacctcttgccaccctctggtggtggtgttcaaaccacaag

SEQ ID NO: 57725 - DNA, 252 bp, Glycine max
  Clone ID: 700677284H1
gagaaccccaaacacaacaagtgtctccagagttgcaatagcgagagatgctcggtacaggaaccaagcatgccacgctcgttgcaaactccttgaggtggagaaagaggaatgtgaaggaggtgaaattccacgacgacgaccacgaacacaacacgcggagagtggacctcagaatctcggtgagaaggaggaagacgatgatgaggcaccacgtccaatcccattcccatgcccacaacctcgtcaaga

SEQ ID NO: 57726 - DNA, 251 bp, Glycine max
  Clone ID: 700677285H1
gtatacgtcctgattcaatagaagatccagaagcacaacttttgctcaaagcttcagaaactatgctcatgaaagcttatgcttttttgaagtataacaatgcgaccaatttgattgtccaggactcatttggcagaattggtcaatgaagacttttatgatgaaaaatttaatttgattggcacaattgggactccagcttttcatcgacaaattgctgcacacttggagaaaatgccattatggcaaaa

SEQ ID NO: 57727 - DNA, 243 bp, Glycine max
  Clone ID: 700677286H1
ctcgagccgttttgttggagatctcgtctttgaagtttctaagatgacttctccctacattaaatgtacagtctctttcttcatagcatttggaaatttggctgatgacaccatcaattttgaggcttatccccacaagctggtgcagtttggagagattcaggaaaaagttgtgttgaaattttcacaagaggaatttcttacagcttggtcaactcaggtgcgtcccgcaacgactctgtt

SEQ ID NO: 57728 - DNA, 96 bp, Glycine max
  Clone ID: 700677287H1
gtttaaatggtctctggatgatgttgaaactcctaaaggttccatgtgagatcttgaaatctctcaacctaaaattgcacatcccaaaaacacagt

SEQ ID NO: 57729 - DNA, 97 bp, Glycine max
  Clone ID: 700677288H1
actcgagccgaatcggctcgaggacagcgacttaatctgtgagggaccgagattccgccataaatgctttcatctcattctcgctcctcactccatt

SEQ ID NO: 57730 - DNA, 244 bp, Glycine max
  Clone ID: 700677289H1
tgtttctgtggtgaacaaattaagattttgtgctagtgtgttgttctgttgggagttgcgtcacggtggaatcattcatgagtgatggtaaggtaaatattagtggtacctactactagggtgaggcaatgtttattaagaattgggttttgttaattggtgttcttagctgattgattaagaatattatattattggagtgtgagaagaacttgcttgctacatatgatatgattaaatagtg

SEQ ID NO: 57731 - DNA, 242 bp, Glycine max
  Clone ID: 700677290H1
aatgcatgtcatccaggacatgcttgttcctttgtacaaggtgggagaggctttagaatgggttcaccgtgagatggaggtataccccatttggctctgcccacacaaattgttcaagctgcctgtcaaaactatgatttacccagagccagggttcgaactacatcgcaggcaaggagacacacaaactgctcaaatgtacacagatgttggagtttactatgcaccaggtcctgttttta

SEQ ID NO: 57732 - DNA, 81 bp, Glycine max
  Clone ID: 700677291H1
atcagagctggaatgcctgacactaggagagaatttacttcaagacatggaggatcatgaacttctcgcaggcaacgagga

SEQ ID NO: 57733 - DNA, 94 bp, Glycine max
  Clone ID: 700677292H1
tgctaacagaactatttgcagattcacttggtgggagttcaaaaaccctgatgattgtaaatgtgtgtccaaattcttcaaatttatctgagac

SEQ ID NO: 57734 - DNA, 250 bp, Glycine max
  Clone ID: 700677293H1
gtgaattaaaaacccaagggaggttcatggccaaaggtaaagatatccgagtaattgttattttggaatgtaccggttgtgataaaaagagtgttaataatgaatcaacgggtatttctagatatataactaaaaagaatcgacagaatacgcctagtcgattggaattgagaaaattttgtccccgttgttgcaaacatacaattcacgcagaaataaagaaatagatcaaattgatcgcttgtgtgtt

SEQ ID NO: 57735 - DNA, 247 bp, Glycine max
  Clone ID: 700677294H1
tggaggtgctgatgagcagttggagaagattatgaagactgataggtttaagcccgataaagggtttgctggggcttctgagagggctggtccgagggataggccggtcgagtttgagaatgaagaggctgatccgtttggtttggatcagttcttgactgaggtgaagaagggtaagaaggccatggagaaagtgggtggtggagggactatgagggcaagtgctggatcatctatgcgggatggt

SEQ ID NO: 57736 - DNA, 249 bp, Glycine max
  Clone ID: 700677295H1
attttgcttctgacaaatgttcaagtcatacccccaagcatgaggatgtcaaaaagagtcaacaaaattttgatggagacccagtaaagctcaactaatggaagcattgtgtcactctcagacacgtgcaagggaagcagaggaagcagcaaaaaaagcctacgcagagagagaggatattgttactctcattttcaaacaggcttcacaactttttgcctataagcaatggttacaatgtctgcagct

SEQ ID NO: 57737 - DNA, 86 bp, Glycine max
  Clone ID: 700677296H1
aagagcctgcatcagagataacttgacaaatgaaatcaccatgtctatcatcccaaacttgttcggtggtagacgaagcaacgtct

SEQ ID NO: 57738 - DNA, 258 bp, Glycine max
  Clone ID: 700677301H1
ctgggaatgcagcagtcaaaaggagtgattgggcctcattggtacaagtgtttttaacaaacagcaacagtacagagcattttgatgcatgcaagtggacaaaatcggaaccacattcctgggaattgatcttcccaatagaggtatgtggtcctaacaatggttttgaaatgtggagtttctgagtgggcaaatcaaacttcatggcatttgagtttccttattgacaatcccaaacagtctacagttcttgatatt

SEQ ID NO: 57739 - DNA, 229 bp, Glycine max
  Clone ID: 700677302H1
attcaaaggcgatagtgatactggtaattaatgaaggagatgcaaacattgaacttgttggcctaaaagaacaacaacaggagcagcaacaggaagagcaacctttggaagtgcgggaatatagagccgaattgtctcgaacaagatatatttgtaatcccagcaggttatccagttgtggtcaacgctacctcaaatctgaatttctttgctattggtataaatgccg

SEQ ID NO: 57740 - DNA, 247 bp, Glycine max
  Clone ID: 700677303H1
gtagaagaagataagttggatgcttgctacatcactacttgcaaaagccaaggaaaagggggtgtctctcttgttaccaagtgatgtggtgattgcagacaaatttgctcctgatgctaatagcaaggtcgtgccagcatctgccatccctgatggctggatgggattggatattggtccagattctgttaaatcattcagtgaagcattggatactacgcaaaccatcatatggaatggaccaatg

SEQ ID NO: 57741 - DNA, 183 bp, Glycine max
  Clone ID: 700677304H1
ctgttggcttgacatcaagttacactccaactccattgttggaatctggtttgcagaaagacagagggttaattgtggagtattttggaaggatgtctttacgttgcgcataacgttaatcagccccaagagaaagatttgttagagggaaatttttcctttgatattaaatcccgctctaga

SEQ ID NO: 57742 - DNA, 253 bp, Glycine max
  Clone ID: 700677305H1
gcataatagagaaatcttttttgccctcaaagcattccgttgagatggtcttcagcggtttataagaattgggttttcactgatcaagcactacctgcagatcttatcaagagaggagtggcaattaaggatccatctgctccacatggacttcgacttctgatagaggactacccttatgctgttgatgggctagagatatgggctgcaattaagacatgggtccaagaatatgtgtccttgtactatgcaa

SEQ ID NO: 57743 - DNA, 59 bp, Glycine max
  Clone ID: 700677308H1
taaattattgtaactcgcttgcttgttgttgtcaacactaagtagccatcgaatgttta

SEQ ID NO: 57744 - DNA, 70 bp, Glycine max
  Clone ID: 700677309H1
agatataatgcagcaagattagtcgagtaaccgggcttaaagaaatcttccgaactgattgtgaacaggc

SEQ ID NO: 57745 - DNA, 99 bp, Glycine max
  Clone ID: 700677312H1
tgagcagcgccggttcccattactggtgactgtggagttgtttgtcctgtgcatcagtgatctgtactcaattggcattgcgtatttgggaaaagcaga

SEQ ID NO: 57746 - DNA, 182 bp, Glycine max
  Clone ID: 700677313H1
tggacttcgacttctgatagaggactacccttatgctgttgatgggctagagatatgggctgcaattaagacatgggtccaagaatgtgtccttgtactatgcaagagatgatgatgtcaaacctgattctgaactccaacagtggttggaaaagaaagctggtaagaggagaggggtcatg

SEQ ID NO: 57747 - DNA, 204 bp, Glycine max
  Clone ID: 700677315H1
attcaggaaaaagttgtattgaaattttcacaagaggaatttcttacagcttggtcaactcaggtgcgtcctgcaacaaccctgttggctgatgggtgtccatatttgtatgctatggtgcatgacatttcagtgtctacaataccaggtgattttgttattggtgttaagttgacaaccataaaccatatgtgtgcatatggg

SEQ ID NO: 57748 - DNA, 119 bp, Glycine max
  Clone ID: 700677316H1
tgatgaagaaatgaaggccggttcacctgctgtggactgggagagagaatgcttcaaaaccttgtagagcagaaatgttaaacgaggatagtaaacagatcaagaatgataggatgacg

SEQ ID NO: 57749 - DNA, 233 bp, Glycine max
  Clone ID: 700677317H1
cgaagagaatggctcccaagggtttaatctttttggctgtgttatgcttctcagcactgtcactgagtcgttgtcttgcggaggataatggacttgttatggacttctacaaggaatcatgccctcaggctgaagacatcatcaaagaacaagtcaagcttctctacaagcgccacaagaacactggctttctcctggctcagaaacatcttccatgactgtgctgttcagag

SEQ ID NO: 57750 - DNA, 246 bp, Glycine max
  Clone ID: 700677318H1
tcggagctgtctgtgcaaatttgcgttgttcttcgcggcacacctcactcactgaacggtaagtatggcggacaaggctgttacaatccgaacccgaaagttcatgaccaacaggcttctttccaggaagcagtttgtcgttgatgtccttcatccagggagggcaaatgtttccaaggctgaacttaaggagaagctggctaggatgtatgaagtgaaaaccctaatactgtatttgtcttcaaa

SEQ ID NO: 57751 - DNA, 250 bp, Glycine max
  Clone ID: 700677320H1
aggtgctgagcgaggagctgaaaacaggctgtcacagagtgtggatactgagggttccagcgacggaagtgatggcaacactgcaggggctaatcaaacaaaaaggaaaagaagccgagaaggaacaccgatcactgatgcagaagggaaaactgagctacaaaatggtccggcttccagagagactgcatcttccaaaaagattgtgtcagctaccccagctagtgttgcaggaacattagttggacct

SEQ ID NO: 57752 - DNA, 191 bp, Glycine max
  Clone ID: 700677322H1
aattttgtgtggaatgggacattgtttgtctcggaaaagcaaagaaacatgcgtattctgggatgaaggaaaaatttgtacaaatggtgacgagcatctatgaaacagaagttacaggattggccagtaccagctgaaaatcatttctggaaccattcttgcaacaatttggggaagaaccttctgggaac

SEQ ID NO: 57753 - DNA, 192 bp, Glycine max
  Clone ID: 700677326H1
agacactcctgttgttgccgtttctattattgacaccaacagcttggagaaccagctcgaccagatgcctaggagattctatcttgctgggaaccaagagcaagaggtttctaaaatatcagcaagagcaaggaggtcatcaaagccagaaaggaaaggatcatcatgcagaagatgacgacggaggcagca

SEQ ID NO: 57754 - DNA, 252 bp, Glycine max
  Clone ID: 700677327H1
tcccgccatgggaatggagcgagtgcagtgtgcctatgcctctctggacgaagcgttcgaaatagggaaagagacgtatcagggtcagcaatacagccagatttacttcgcgcgccttcatttgatgcgaacactcttgtattccctcattcctcattggaaacccaattctcccgtgtgcacggtgctgggattggaagagggcaaggagtgtgtcattgttggaaccctctataaacacatgaagctcaa

SEQ ID NO: 57755 - DNA, 206 bp, Glycine max
  Clone ID: 700677328H1
tgcaaagctagcgaaaccctttcggtccttccctttgcgaaggtcaactccccctctgagtctgaggtgttgcgcttcgcccccttcttcctacagcatcactctcattcccggcgatggtatcggccccgaaatcatctctgtggccaaagacgttcttgtcctcgtgggttctctcgaagggatcaaattcgagttccaagagg

SEQ ID NO: 57756 - DNA, 256 bp, Glycine max
  Clone ID: 700677330H1
agcttttgtcaattttctattgaccttctcggtggaggaattttagtggacaaaactggagattggatcacacttatacaaaattctccaattagtaacttgttgagagttgctgcttggaagaaaggttgtttaatggtcaagattgtgatgtctgggaatgcagcagtcaaaaggagtgattgggcctcattggtacaagtgtttttaacaaacagcaacagtacagagcattttgatgcatgtaagtggacaa

SEQ ID NO: 57757 - DNA, 95 bp, Glycine max
  Clone ID: 700677331H1
aggttctgcatatcaggaatcttaaaaatctggaattcccgaccgaacacaaaccggagttactggaaccactgccaatatacagacagttgtga

SEQ ID NO: 57758 - DNA, 73 bp, Glycine max
  Clone ID: 700677332H1
acgcaagagaaaggaaagtgagaaaatcatagttgcttagagtatgattattcacgctattttaaattgggtt

SEQ ID NO: 57759 - DNA, 249 bp, Glycine max
  Clone ID: 700677333H1
ccattctttccttggtgaacaacgacgacatagactcctacaggcttcaatctggtgatgccctgagagtcccctcaggaaccacatactatgtggtcaagcctgacaacaacgaaaatctcagattaataacactcgccatacccggtaacaagcctggtagatttgagagtttcttcctatctagcactgaagctcaacaatcctacttgccaggattcagcaggaacattttagagggctcctacg

SEQ ID NO: 57760 - DNA, 245 bp, Glycine max
  Clone ID: 700677336H1
gctcgagtgaaactccattccactccatctccatggtagaacacagaaaagaaggcttttttttgccaacaccagttgcaaaactaatatcctgtcaaacggatttgatctacaatggcctggtttctctcttttcctctatccactctcttttttccgtggctacagagtcctaccaccgtggctgaggaaccaaagacagtgttgaatcagcagtgcaacgtgctccttctaaagcactcatg

SEQ ID NO: 57761 - DNA, 238 bp, Glycine max
  Clone ID: 700677339H1
gactctcgaaggacatcatgctgatatttggtgtcttgcagtcagtaatcgtggtgattttatcgtcactggatctcatgatcgttctattcgccgctgggatcgcactgaagagcagttcttcattgaggaagaaaaggagaaaaggttggaggaaatgtttgaggctgcatattgaccatgcatttgaaaacaaatatgcaattgagggataaataccagaggagggatctgtggc

SEQ ID NO: 57762 - DNA, 99 bp, Glycine max
  Clone ID: 700677341H1
ccgtctctctctcactcaatatgctgacgtcatttgcaatggctcgaaccttccacggtcattcacgttcgagatgtcggcgctccgatatctgaacat

SEQ ID NO: 57763 - DNA, 71 bp, Glycine max
  Clone ID: 700677342H1
atataatttcaatgcaattttcaactgtcgggattcaaattcagatacaggtggtttttatgctgcttttc

SEQ ID NO: 57764 - DNA, 241 bp, Glycine max
  Clone ID: 700677344H1
atacccgttaacaagcctggtagatttgagagtttcttcctatctagcactgaagctcaacaatcctacttgcaaggattcagcaggaacattttagaggcctcctacgataccaaattcgaggagataaacaaggttctgtttactacagaggaagggcagcagcaaggggagcagaggctgcaagagagcgtgattgtggaaatctcgaaggaacagattcgggcactgagcaaacgtg

SEQ ID NO: 57765 - DNA, 191 bp, Glycine max
  Clone ID: 700677346H1
aagattgctaccagattgagtaccagacatagatcctcaatacaatgaggttcaggctcagatcgaaacaaatttgtttaaattgtctcttgatgatgttgaaactcccaaaggttccatgttggatcttaaaatttctcaatctaagattgcacttcccaaaaacacattgggaggaaccattctgcgta

SEQ ID NO: 57766 - DNA, 253 bp, Glycine max
  Clone ID: 700677347H1
cggaaataagttatattgaaattttcacaagaggaatttcttacagcttggtcaactcaggtgcgtcctgcaacaaccctgttggctgatgggtgtccatatttgtatgctatgggtgcatgacagttcagtgtctacaatacaaggtgattttgttattggtattaagttgacaaccataaacaatatgtgtgcatatgggctcatcctggtatttcaggttctcgacttttgggcaccattcctcagtcta

SEQ ID NO: 57767 - DNA, 233 bp, Glycine max
  Clone ID: 700677349H1
ggaagtattcccaaggtgctgtcttcgatgttccaacacatgaagaagctgaagtgggtactcgcgaactcgtttcacgaactggagaaagaggtaatagactccatggctgagttatgccccataacaacggtgggcccactagtccctccatcgttactcggccaagacgaaaacatcgaaggagacgtgggaatcgaaatgtggaagcccaggactcgtgcatggagtgg

SEQ ID NO: 57768 - DNA, 237 bp, Glycine max
  Clone ID: 700677351H1
acaggagcagcaacaggaagagcaacctttggaagtgcggaaatatatagccgaattgtctgaacaagatatatttgtaatcccagcaggttatccagttgtggtcaacgctacctcaaatctgaatgtctttgctattggtattaatggccgagaacaaccagaggaacttcctcgcaggtcgcaagacaatgtgataagcagattcctagtcagttcaagagccttcattccctg

SEQ ID NO: 57769 - DNA, 148 bp, Glycine max
  Clone ID: 700677354H1
tcaattgaagaagatgccgatcagaaacatcgccgtcggaaggcctgaagaggcgactcaccccgacacgttgaacgcggctttggctgagttcatctcaaccttcatcttcgtgttcgccggctcaggctccggcatcgcctacaac

SEQ ID NO: 57770 - DNA, 251 bp, Glycine max
  Clone ID: 700677355H1
ttcctgctgaatccttgcaagtaggattgttgagcttcagtgctagataggaagggcagcagcaaggggagcagaggctgcaagagagcgtgattgtggaaatctcgaaggaacagattcgggcactgagcaaacgtgccaaatctagttcaaggaaaaccatttcttctgaagataaaccttttaacttgagaagccgcgaccccatctactccaacaagcttggcaagttcgttgagatcaccccagag

SEQ ID NO: 57771 - DNA, 207 bp, Glycine max
  Clone ID: 700677358H1
cagcttggagaaccagctcgaccagatgcctaggagattacatcttgctgggaaccaagagcaagagtttctaaaatatcagcaagagcaaggaggtcatcaaagccagaaaggaaagcatcagcaagaagaagaaaacgaaggaggcagcatattgagtggcttcaccctggaattcttggaacatgcattcagcgtggacaagca

SEQ ID NO: 57772 - DNA, 254 bp, Glycine max
  Clone ID: 700677359H1
tcgtttcatttgtctttgtctttctctttcggctttttcttctgctccactgtttctatcccttcctttctgtatgcaatgtacttttctctacttagattggcatgcttgtttggtatcagaatcgcattaactgtcatatatacttggacggagttgatcaggacttcaattagcttccatgtaaacataatagaaagaatgatcacatggacatttgggcttatctcgctgcctgcaagagttgtgaatgc

SEQ ID NO: 57773 - DNA, 230 bp, Glycine max
  Clone ID: 700677360H1
tttgacaatcgtgaaataaaagaaattctatctttagtactacgagaactctgctttggctcagcagtggtacaccaggaaggtcttgcagcagttttttggaaatggattatcaacagcatgtgttgtgaatattggtgctcaggtgacatcacttatatgcattgaggatggaggtgctctaccttcaactggaaagactttgccttttggtggtgaggatatatcaa

SEQ ID NO: 57774 - DNA, 256 bp, Glycine max
  Clone ID: 700677361H1
gagcaattggaagctttagacggaaaccactcacttcttcctccgacaacaaccgaagacaacaacaacaacaacaacgttggtgatgatgttgtcctgaacgcggttccgtgttcggttagtgcggcggcgcacgagcactcgagttcgacgacgtcgtgttcggggaagaagaagaggaagctgacgcatttctggaggggttgatgagggaagtgatagagaagcaagagacgctgcagaggaagttcgtgga

SEQ ID NO: 57775 - DNA, 228 bp, Glycine max
  Clone ID: 700677362H1
gttcaatatcctagtataccttaataaataatttaagatactatgatgagagcacggttcccattactgttgctgggacttgttttcctggcttcagtttctgtctcatttggcattgcttactgggaaaaagagaaccccaaacacaacaagtgtctccagaggttgcaatagcgagagagactcgtacaggaaccaagcatgccacgctcgttgcaacctccttaa

SEQ ID NO: 57776 - DNA, 203 bp, Glycine max
  Clone ID: 700677363H1
tccctggtaagctgatgaagcgcctgatacagtcacaggggatattgtctttgtcctacaacagaaggaacacccaaagttcaaacgaaaggcagatgacctttttgtagaacacacattgtctcttactgaggctctatgtggcttccagtatgtgctgactcacctggatagcaggcagcttctgatcaaatcaaaccctg

SEQ ID NO: 57777 - DNA, 191 bp, Glycine max
  Clone ID: 700677365H1
cgtccctcacattctgaagaagtgccctgatgccattgccagaccctaaggcggtgcagtacgtgagaaacgaccgtggcactcccatgattctagacaacaactactacagaaacatattagacagcaagggtctcttgatagtggatcaccaactagccaatgacaagaggaccaagccttatgtgaag

SEQ ID NO: 57778 - DNA, 240 bp, Glycine max
  Clone ID: 700677366H1
ggaaagccgtgaaagggaagaagaacaacaagagcagcatgaggaacaagatgaaaatccctacatttttgaggaagataaggattttgagaccagagtcgaaactgaaggtggcagaattcgggttcccaagaagttcactgaaaaatccaagcttcttcagggcattgagaacttccggttgggcattttggaagctagagcacacacgttcgtgtctcctcgccactttgattccga

SEQ ID NO: 57779 - DNA, 217 bp, Glycine max
  Clone ID: 700677367H1
gctcgagacgttgttgttcgctctgtgtctctcactctctctatatttgcatcattcatcggaaatggctctcgaggttgctgttaaggctgctgttggggctccaaatgttctcggagattgtccattttcccaaagggtcctcttaactttggaggagatgaaaatcccttacaaactccacctcatcgatctcagtaacaaacccgaatggttt

SEQ ID NO: 57780 - DNA, 251 bp, Glycine max
  Clone ID: 700677368H1
gaggaagggcagcagcaaggggagcagaggctgcaagagagcgtgattgtggaaatctcgaaggaacagattcgggcactgagcaaacgtgccaaatctagttcaagggaaaccatttcttctgaagataaaccttttaacttgagaagccgcgaccccatctactccaacaagcttggcaagttctttgagatcaccccagagaaaaacccccagcttcgggacttggatatcttcctcagtattgtgga

SEQ ID NO: 57781 - DNA, 247 bp, Glycine max
  Clone ID: 700677369H1
gatgccgcttgtttatcaacaaataaacttatggcgcaaaccaataactaaatagaacaacaaactcaactatcttcgaatcccatctacacctaggttaagaagaaagatctcaaacctctgaaaaccctgaaccgtctctttctcttcacatcattctagacccattctgcaacccctcacattatttcctccaaccatgcttcgcatagcatcaaagctatcatctaggttttcttcctcttct

SEQ ID NO: 57782 - DNA, 197 bp, Glycine max
  Clone ID: 700677370H1
ccttctttcagtggctgcttcgctctgagagagcaggcacagcaaaatgagttccagatccaaaagctgaatgccctcaaaccggataaccgtatagagtcggaaggtgggttcattgagacctggaaccctaacaacatttcattccagtgtgccggtgtggccctctctcgatggaaccttaaccgaaatgcctt

SEQ ID NO: 57783 - DNA, 160 bp, Glycine max
  Clone ID: 700677371H1
cgagaaacaaaacactcaattctcttctcttctcttctgggtttttgctttttcctcattctctcattctcaaacaccacaaaaaaatgggccttgtttcccaggatgccctcaaccaactccaagctctcatggatcaagtggcacttgaggaggagcc

SEQ ID NO: 57784 - DNA, 254 bp, Glycine max
  Clone ID: 700677373H1
cgaggagaaattgagtttctgagataaccacttttctctttgattcatcaatggcaaccgcgaggaccgtgaaggatgtttcgcctcacgatttcgtgaaggcttacgcctcccatctcaagcgttccggcaagatggagcttcctgagtggactgatattgtaaaaacagcaaaatttaaggaattggctccatatgatcctgactggtattatgttagggctgcctcaatggcaaaaaagtttatttgagag

SEQ ID NO: 57785 - DNA, 200 bp, Glycine max
  Clone ID: 700677374H1
ttttgcatttcccagtagagtaggcaaagccaaatccaaagggaacacgttcattcagattgcaattatttatattaatctaataataattcacaaattgtggtgtgggccagcactccaatcccctccctcaactacccgacaaattttccattcccggcatctcctcccagcctcgtaccccagataccttagattcg

SEQ ID NO: 57786 - DNA, 252 bp, Glycine max
  Clone ID: 700677375H1
tcgagccgattcgactcgagcggctcgagcggctcgagtatgccttgacagaggttgaagacatactttgtgctcattatgctaattgcatgatatatcatattggagtgttggttgaaaaatctcttagttggtatggtagagttacattacatgacttgattgagcagatgggtaaagaaattgtgaggcaggaatcaccagaagagccagggaagcgcagtagactatggttaccggaagatataattc

SEQ ID NO: 57787 - DNA, 208 bp, Glycine max
  Clone ID: 700677376H1
ttagggttttgcagtgatggcactgtccaaccgcgtccgatcgggaatctctctcttcaccaaatccacgttcctcacttccgagcgatccactctccaacgattcctcgttgccccttccatttccttcgcctccagaaattacgccaacgtgccggggcaaaaggaaaacaaagttaaggtccctctggctttgtttggaggttca

SEQ ID NO: 57788 - DNA, 224 bp, Glycine max
  Clone ID: 700677377H1
tataccttaataaataatttaagatactatgatgagagcacggttcccattactgttgctgggacttgttttcctggcttcagtttctgtctcatttggcattgcttactggggaaaaagaggaaccccaaacacaacaagtgtctccagagttgcaatagcgagagagactcgtacaggaaccaagcatgccacgctcgttgcaacctccttaaggtggagaa

SEQ ID NO: 57789 - DNA, 253 bp, Glycine max
  Clone ID: 700677378H1
ttggcattcttggcattgcatgggcctttggtggcatgatcttcatccttgtctactgcactgctgggatctcagggggtcacattaacccagcggtgacatttgggctgtttttggctcgcaaggtgtctttgatccgagccatcatgtacatggtggctcagtgcttaggtgctatctgtggagttggtttagttaaggctttccagaagtcttacttcaacaagtatggtggtggggtaattcctcgctg

SEQ ID NO: 57790 - DNA, 263 bp, Glycine max
  Clone ID: 700677380H1
tttgctgctttaacagaggagttgcgtctgaagatgactttggacacactctgaatcccaaactccttccaagaggagagtcatcagtttctgggcccgtagttaggctgttcaagccattcgatgaactttttgttgacttccaggatttcaatgtggaagctcttagagaagtttgttgaggaatctagtacccctgttgttactgtctttaacaatgaaccgagcaatcaccctttcgttgtcaaattcttcaacagtcc

SEQ ID NO: 57791 - DNA, 232 bp, Glycine max
  Clone ID: 700677382H1
cagtttagtgatttgtcctcttggatagatgacaatggggagcggttgaaaggaaaaaatatactcatgtattgtactggtggaatcaggtgtgaaatggcatcggcatatattaggtcaaaaggtgctggggtttgaggaatgtgtttcagttatttgggtgcatacaacggtatttggagcaattcccagatggtgggtttttcaaaggaaaaaattttgtgtttgatca

SEQ ID NO: 57792 - DNA, 249 bp, Glycine max
  Clone ID: 700677384H1
ttccaccaagttatgggtttccttgtgttgcttcttttctccctcttaggtctctcttctagttccagcatatcaactcatcgttccatattggaccttgacctaaccaagtttaccacacagaaacaggtgtcttcactgttccaactatggaagagtgagcatggacgtgtctaccataaccacgaagaagaggcaaagagacttgagattttcaagaatagaaacaactatatcagggacatgaat

SEQ ID NO: 57793 - DNA, 254 bp, Glycine max
  Clone ID: 700677385H1
cggctcgagggcgccctcttccatttaccattccgagagaggtccgacgacctctcaggttctcgcagttgtcgccggccttccggtcggcggcatcctcctgctcctggcaagactgaccctggctggaactctcaccgggatggtggtggcaacaccgctcttcatcatcttcagcccggtgctgattacggtcacggtcgcaattggcctggccgtggccgggttcctgacgtcgggagtctttgggctca

SEQ ID NO: 57794 - DNA, 243 bp, Glycine max
  Clone ID: 700677387H1
cccccaataatgaagagcaccatcttctttgctctcttactcattagtgccttcaccacctcatacctaccttcagccatcgcttatttcgtgctctgataatgacggtaaccctcttgaaaatggatgcacatattatatcatgtcagacatgacagcatttggtggaataagatcagcccctacgggatattagagattccctctcactgtggtgcaatctcgcattgagctcgacaaagg

SEQ ID NO: 57795 - DNA, 247 bp, Glycine max
  Clone ID: 700677389H1
gtgatgaaaaattgatgcgtgaaaggacgcacctgctgttggcttgttgttcaaggatggcaatttgtaagaaagatgtttggagagttgaatgtggaatcccttctggatttccgctcacagttatttgcaatagcatttttaatgagatgctcattagatatagctatgaaaaattactgcgccaggctaaagctccaagtatgtttttacaatccttcaaaaattttgtttctttgtgtgtggt

SEQ ID NO: 57796 - DNA, 259 bp, Glycine max
  unsure (1)..(259): unsure at all n locations
  Clone ID: 700677390H1
gctcgagcaacacgaatttcattgcagagtgttattttgagtatcagcatcaatggctccaattgcagtgggaaacgtgattccagacagcatnttggcttacttggatgaagaaaacaaaccccaaactgtctccattcactctctcgccaccggcaagaaagtcatcatctttggggttcccggtgccttcactcctacttgcagcttgaagcacgttcctggcttcattgagagagcagaagagctgaaagggaag

SEQ ID NO: 57797 - DNA, 260 bp, Glycine max
  Clone ID: 700677391H1
ctcgaggaaggaggaagacgaaggtgagcagccacgtccattcccattcccacgcccacgccaacctcatcaagaggaagagcacgagcagaaggaggaacacgaatggcatcgcaaggaggaaaaacacggaggaaagggaagtgaagaggaacaagatgaacgtgaacacccacgcccacaccaacctcatcaaaaggaagaggaaaagcacgaatggcaacacaagcaggaaaagcaccaaggaaaggaaagtgaag

SEQ ID NO: 57798 - DNA, 199 bp, Glycine max
  Clone ID: 700677392H1
agtgcaactttgcaatttagaaagttagcagattgtgattttctcaagagaaactttaagcagatgtctaatagttttatgggtggctcctggaggacaaggcgagtttatggtcacaacttcattatgtttcgtgcaataatctggaaatgcaagaagcatatcttgtcaatctcgtaaatgtgttacgagaattgta

SEQ ID NO: 57799 - DNA, 250 bp, Glycine max
  Clone ID: 700677394H1
cgagctccattggtccttaaacactcatcagtcatcaccatggccaagctagttttttccctttgttttctgcttttcagtggctgctgcttcgctttcagttccagagagcagcctcagctaaacgagtgccagatcccaaaactcaatgccctcaaaccggataaacgtatagagtcagaaggagggctcattgagacatggaacctaacaacaagccattccattgtgccggtgttgccctctctcg

SEQ ID NO: 57800 - DNA, 218 bp, Glycine max
  Clone ID: 700677396H1
gagaattattaacacttccttagttcaatatggggaagcccttcactctctctctttcttccctttgcttgctactcttgtcgagtgcatgctttgctattagctccagcaagctcaacgagttgccaactcaacaaccttcaacgcgttggaacccggaccaccgcgtttagtccgaagtggttttattcaaacatggaactctcaacaccctgagc

SEQ ID NO: 57801 - DNA, 245 bp, Glycine max
  Clone ID: 700677402H1
aaactcttcgtccatcatcttgataattcccacactatggctgagcttcactaccaccaacaacaccaataccctcaccgataccctaatgatccatacgaacaacaaactagctactccactcaggtcgtcaaggcggccaccgccgtcaccgcgggcggctccctcttgatcctcgcctcgttgcaccttgccggcaccatcatcgccctcaccatcgtcacaccaccgctcgtcatcttcag

SEQ ID NO: 57802 - DNA, 241 bp, Glycine max
  Clone ID: 700677403H1
aaagtcgcaggaagagaggaaagcagtggataaattatatggcaacaggattgaagatgtcaatagtccttcgctgaaaaaagatttctcaacggcaatgttggtacgtcctgataaaaatatgggtaatgagacaggctgtagaagcctttaagaaacttcaaaatgcatatgagattctaatggattcgttgaagcgaaaagcttatgatgatgagctaaggagagaggagattttgag

SEQ ID NO: 57803 - DNA, 237 bp, Glycine max
  Clone ID: 700677407H1
ggctcgagcggctcgagcactttccttagctcaatatggggaagaccttcttcactctctctcttacttgccttagcttgctactcttgtcgagtgcatgctttgctattacctccagcaagttcaacgagtgccaactcaacaacctcaacgcgttggaacccgaccaccgcgttgagtccgaaggtggtcttattgaaacatggaactctcaacaccctgagctgcaatgcgccg

SEQ ID NO: 57804 - DNA, 252 bp, Glycine max
  Clone ID: 700677408H1
gtgacagtgaaaggaggtctaagagtcacagctccagccatgaggaagccacagcaagaagaagatgatgatgatgaggaagagcagccacagtgcgtggagacagacaaaggttgccaacgccaaagcaaaaggagcagaaatggcattgatgagaccatttgcacaatgagacttcgccaaaacattggtcagaattcatcacctgacatctacaaccctcaagctggtagcatcacaaccgccaccagc

SEQ ID NO: 57805 - DNA, 252 bp, Glycine max
  Clone ID: 700677411H1
caaaagccgatcaagtcaacgtaagagagttccactgtctttccacttccacaattttcatctcccgtggtgtttggttcctcttaaattctaaactaatctagttagcttctttttttctttctctcctcaaattgtgtgtgcaacaaaaattttgtagaatggaggaacttcaagggtctcaaacccaatcatcgctcggtcaagaagatgaaaatgaagtgattactgaaagttcagcatttgttaaag

SEQ ID NO: 57806 - DNA, 248 bp, Glycine max
  Clone ID: 700677414H1
tggaacatatgtatggttggcaaagaagaagaattgaagaatttaagaggagatggaaaaggagagcgcaaagaacatgataggatctatgattatgatgtctacaatgatttgggcaatccagatcacggtgaaaattttgctcgcccaattcttggagggtctagcactcatccctaccctcgtaggggaagaactggtcgatatccaacaaggaaagatcagaattctgagaagccaggcgaagt

SEQ ID NO: 57807 - DNA, 248 bp, Glycine max
  Clone ID: 700677415H1
atcgagcgaatcggctcgagattgctggtggtggtggcatcacaccagccagatccgacaactacataacttggggacttgtgggaatcttcttcaatttctacgtttacagcaagttcaaggcatggtgggctagacacacttacatcctctcagctgctttagatgctggtgttgctttcatgggtgtcattctctattttgcccttcaaaattatggtgtttttggtccaatatggtggggtcaa

SEQ ID NO: 57808 - DNA, 249 bp, Glycine max
  Clone ID: 700677416H1
ggaattcgagtaatattcagatttccggcttattttacgacggcagatacaaattctggactaaacacgagaaaaatcttgctttgacagaagaggaaaagatggaagtgattagaaatagaggcattcctgctgatgttcttgcaaagcgagctcatgaatttgaaaaacatgttgctcatgaaagcctcaaggatcaaattcctgctgttgacaagttgtattctactcaaggtaataagtttgcaa

SEQ ID NO: 57809 - DNA, 250 bp, Glycine max
  Clone ID: 700677418H1
ttcaaacttaattattaacacttccttagttcaatatggggaagcccttcaggctctctctttcttccctttgcttgctactcttgtcgagtgcatgctttgctattagctccagcaagctcaacgagtgccaactcaacaacctcaacgcgttggaacccgaccaccgcgttgagtccgaaggtggtttgattcaaacatggaactctcaacaccctgagctgaaatgcgccggtgtcactgtttccaa

SEQ ID NO: 57810 - DNA, 246 bp, Glycine max
  Clone ID: 700677420H1
gcaatgcgtcggtgtcactgtttccaaacgcaccctcaaccgcaacggcctccacttgccatcttactcaccttatccccaaatgatcattgtcgttcaagggaagggagcaattggatttgcatttccgggatgtcctgagacgtttgagaagccacaacagcaatcaagcagaagaggctcaaggtcgcagcagcaactacaagacagtcaccagaagattcgtcacttcaatgaaggagacgt

SEQ ID NO: 57811 - DNA, 246 bp, Glycine max
  Clone ID: 700677422H1
ctgttcagcagtttctcttcaacatcccttttaagtttatccgcgaggacgatcctgttatttccaaggatgaattgttgcggtcgaaaattgcggtgtgtttggtaggtggtgccagaaggttcgaactcacgggaccttccataatcgaaatggtgctcaaagaataccccaattcggatctttttcttcacagcccgttagataaagacacgttcaagttctcgatcttgaagtttgcgccaa

SEQ ID NO: 57812 - DNA, 250 bp, Glycine max
  Clone ID: 700677424H1
caggaaccacatactatgtggtcaaccctgacaacaacgaaaatctcagattaataacactcgccatacccgttaacaagcctgggcgatttgagagtttcttcctatctagcactgaagctcaacaatcctacttgcaaggattcagcaggaacattttagaggcctcctacgataccaaattcgaggagataaacaaggttctgttgagtagagaggaagggcagcagcaaggggagcagaggctgca

SEQ ID NO: 57813 - DNA, 248 bp, Glycine max
  Clone ID: 700677425H1
gtgtttttcgtgtgcgtcgttcgttaattttgttttgtgtattcggatcgagatttttcgcgttcggttgcggggatcttcggtttaggtaaatgaatggtttttgagcaacagcagttaaaagagaaaagggattcagcgaagatgacatcggttggtgtggcaccaacttcgggtttgagagaagccagtgggcatggagcagcatcctatgatagattgccagaggagatgaacgatatgaaaat

SEQ ID NO: 57814 - DNA, 250 bp, Glycine max
  Clone ID: 700677427H1
gtcatgattctatttggtttgctcaaccaacaaattattccgagaatatacaagaagataaaaaaatacgagattgtatcaaaaattatatacaaaaaaatataagaatatcctctggtgttgagggaattggacagataaagattcaaaaaagaattgatcttattcaagttataatatatatgggatttccaaagtttttaatagagggtaagtctcaaaaaatcgaagaattacagacgaatatgca

SEQ ID NO: 57815 - DNA, 247 bp, Glycine max
  Clone ID: 700677428H1
ggctacttcaaagttgaaaacccagaatgtggttgtatctctctccctaaccttaaccttggtactggtgctactgaccagcaaggcaaactcagcggaaactgtttctttcagctggaacaagttcgtgccgaagcaaccaaacatgatcctccaaggagacgctattgtgacctcctcgggaaagttacaactcaataaggttgacgaaaacggcaccccaaaaccctcgtctcttggtcgcgcc

SEQ ID NO: 57816 - DNA, 248 bp, Glycine max
  Clone ID: 700677430H1
aaaattcttccaccaagttatgggtttccttgtgttgcttcttttctccctcttaggtctctcttctagttccagcatatcaactcatcgttccatattggaccttgacctaaccaagtttaccacacagaaacaggtgtcttcactgttccaactatggaagagtgagcatggacgtgtctaccataaccacgaagaagaggcaaagagacttgagattttcaagaataacttgaactatatcaggg

SEQ ID NO: 57817 - DNA, 247 bp, Glycine max
  Clone ID: 700677431H1
aatccttcaaaaattttgtttctttgtgtgtgtatggtgatgataacttaattagtgttcatgaatatgtcaagccttactttagtggttctaaattgaaaagctttctagctggtcataatatcaccattactgatggtattgacaaaactagtgcaactttgcaatttagaaagttagcagattgtgattttctcaagagaaactttaagcagatgtctaatgttttatgggtggctcctgagga

SEQ ID NO: 57818 - DNA, 254 bp, Glycine max
  Clone ID: 700677432H1
cgcgagtatgcttgcaaagatgtgacaggtatcatcgtatgaagcaagagcgagagaaacaaatccaagaggaaactcgtgagaagaaagaggaggaaagccgtgaaagggaagaagaacaacaagagcagcatgaggaacaagatgaaaatccctacatttttgaggaagataaggattttgagaccagagtcgaaactgaaggtggcagaattcgggttctcaagaagttcactgaaaaatccaagcttctt

SEQ ID NO: 57819 - DNA, 245 bp, Glycine max
  Clone ID: 700677434H1
gttacaattgattggtttatttcctctcaggaatgtgttcccaggacattatgtgttttaaatccacaaaatccttttgtgttaaataggtggatggggaaactgactttcccccagggcacttcccgaagtgttaaaagaatgcctctttcaatagggggaggagctggtgcaaagaatgctattctcataaatatgccaaatgctgttctttcaatgtggagatattttgttggagacctcgt

SEQ ID NO: 57820 - DNA, 246 bp, Glycine max
  Clone ID: 700677435H1
gtgcagtgaggaacgcgaagacgcgagatagggaataggcgacagtgcgtttggctgcccccagcaatcgaactccttgtgctcctcgcacctcattctctctctctctcgtatctgcaacttcaactaactaacttttatgaagccgaaggggcagtgaatcgacccccaacaccagatgtggtcgaaaatgtccctgaaagagaacccacgcttcaagagctcatcaacatcaagttgatcgag

SEQ ID NO: 57821 - DNA, 244 bp, Glycine max
  Clone ID: 700677436H1
ttggcattaaagaacaacaacagaggcagcaacaggaagagcaacctttggaagtgcggaaatatagagctgaattgtctgaacaagatatatttgtaatcccagcaggttatccagttgtggtcaacgctacctcagatctgaatttctttgcttttggtatcaatgccgagaacaaccagaggaacttccttgcaggttcgaaagacaatgtgataagccagatacctagtcaagtgcagga

SEQ ID NO: 57822 - DNA, 247 bp, Glycine max
  Clone ID: 700677439H1
gtgaagcagcagagggaggagcggcattaaaaatgcagatcttcgtgaaaaccctaacggggaagaccataaccctcgaggtcgaaagcagcgacaccattgacaatgtcaaggctaagattcaagacaaggaaggcatccctccggatcagcagcgtttgattttcgccggaaagcaacttgaagatggaaggaccttggccgattacaacatccagaaggaatcaacccttcaccttgtcctcag

SEQ ID NO: 57823 - DNA, 247 bp, Glycine max
  Clone ID: 700677441H1
gacctaactaacccacacttcatatcttctcgtgtggacacaaattggaattggaattgaaattccccactactttttcaatgccatatgctgcaaacccttcacttttcacttcttttctagctctcatttgatattcccaatctctctgtttctatttctttgttcgttgcttcacactatggcttcttggtgggatttaagaccctcggttcgttttcagtctgttaggacccgatttcaggaa

SEQ ID NO: 57824 - DNA, 248 bp, Glycine max
  Clone ID: 700677443H1
ccaagttcacaatcctcctcatctctcttctcttctgcatcgcccacacttgcagcgcctccaaatggcagcaccagcaagatagctgccgcaagcagctccagggggtgaacctcacgccctgcgagaagcacatcatggagaagatccaaggccgcggcgatgacgatgatgatgatgacgacgacaatcacattctcaggaccatgcggggaagaatcaactacataaggaggaacgaaggaaaa

SEQ ID NO: 57825 - DNA, 245 bp, Glycine max
  Clone ID: 700677449H1
caaagtcattcacctaaaccctatggccgacgaacccaaagccaaaggcaacgcagccttctcctccggcgactaccccgccgcaattcaccacttctccgacgccatcgccttggcccccaccaaccacgtcctctattccaatcgatccgccgcatacgcttctctccaaaactacaccgatgccttagccgatgctaagaagaccgttgaactcaagcccgactggtccaagggctacagcc

SEQ ID NO: 57826 - DNA, 246 bp, Glycine max
  Clone ID: 700677450H1
cttacacagagagaaaagagagagaaagaaaaggatcaaatagtcaaaacctttggttctttccctccatagttccatttttccattcaacaacacaacacctcagacagacatcatggaggcaggttacaatcctcgtaccgtcgaagaggtctttagggatttcaagggtcgcagagctgctttgattaaagccctcaccaccgatgttgaagagttctaccagcagtgcgatcccgagaagga

SEQ ID NO: 57827 - DNA, 244 bp, Glycine max
  Clone ID: 700677452H1
gttattatcaaataattaattaaattcctcgtggaatcttgttgaagccatgtctacagctggtcaggtcatcaagtgcagagctgcggtggcatgggaagcagggaagccactatcgatagaaaccatagaagtggcaccaccccagaaaggtgaagtgcgtttgaagatcctcttcaactccctttgccgtacagatgtttactggtgggatgctaagggccagactccgctgtttcctcgt

SEQ ID NO: 57828 - DNA, 241 bp, Glycine max
  Clone ID: 700677454H1
cggctcgagtactcattctccatacctcaacgaagctgttaaagagacggcaacactttgctgtccgccttgaccgagcagagcttcgtcttggccctcgattttgccctaaagtactctcagtcacaacagacaccgtcgtcgtcgtcgtcgtcatcaatggcaccgaagcagaccaaggctgagaagaagatcgcttacgatgcgaactgtgcgacctaatggaggagtacggccagat

SEQ ID NO: 57829 - DNA, 231 bp, Glycine max
  Clone ID: 700677457H1
gttgaaactttggatccacaagttaggcagtttagtgatttgtcctcttggatagatgacaatggggagcggttgaaaggaaaaaatatactcatgtattgtactggtggaatcaggtgtgaaatggcatcggcatatattaggtcaaaaggtgctgggtttgagaatgtgtttcagttatttggtggcatacaacggtatttggagcaattcccagatggtgggtttttc

SEQ ID NO: 57830 - DNA, 244 bp, Glycine max
  Clone ID: 700677459H1
cggctcgagcattgtctttgaacactcatcaccatggccaagcttgttctttccctttgtttccttcttttcagtggctgcttcgctctgagagagcaggcacagcaaaatgagtgccagatccaaaagctgaatgccctcaaaccggataaccgtatagagtcggaaggtgggttcattgagacctggaaccctaacaacaagccattccagtgtgccggtgttgccctctctcgctgcaccc

SEQ ID NO: 57831 - DNA, 242 bp, Glycine max
  Clone ID: 700677461H1
ataaaattcttccaccaagttatgggttaccttgtgttgcttcttttctccctcttaggtctctcttctagttccagcatatcaactcatcgttccatattggaccttgacctaaccaagtttaccacacagaaacaggtgtcttcactgttccaactatggaagagtgagcatggacgtgtctaccataaccacgaagaagaggcaaagagacttgagattttcaagaataacttgaacta

SEQ ID NO: 57832 - DNA, 245 bp, Glycine max
  Clone ID: 700677463H1
agcatccagtgaatcctataaatgagaatgatagtcagcaatcaagaccattgaaattttacaactctgagattcatacagcggctttctgtttgccatcttttgctaagaggaagattggttctaaaacaaattgaaaatatttttcatgggattgaaggagcaaatgtggctgtcggcattcatccttttactggattggtccatccatcaatgaaaagtgggataagagcttcaagatgaca

SEQ ID NO: 57833 - DNA, 264 bp, Glycine max
  Clone ID: 700677465H1
ctcgctcttcggatcgagaatgcgaacattgaacttgttggcataaaagatcaacaacaggagtagcaacaggaagagcaacctttggaagtgcggaaatatagagccgaattgtctgaacaagatatatttgtaatcccagcaggttatccagttgtggtcaacgctacctcaaatctgaatttctttgctattggtattaatgccgagaacaaccagaggaacttcctcgcaggttcgcaagacaatgtgataagccagata

SEQ ID NO: 57834 - DNA, 238 bp, Glycine max
  Clone ID: 700677468H1
gcaaagctcatccttgagttaaaaaatggcagcagcttcttccatggctctctcatccccatccttggctggcaaggccgtgaagctgggcccatcagccccagaagtgggaagggtgagcatgaggaagaccgtcaccaagcaggtctcctcaggaagcccatggtacggcccagaccgagtcaagtacttgggcccattctctggcgagcccccgtcctacctaaccggtgagttc

SEQ ID NO: 57835 - DNA, 243 bp, Glycine max
  Clone ID: 700677471H1
cggctcgaggaactagttcaatatcctagtataccttaataaataatttaagatactatgatgatagcacggttcccattactgttgctgggacttgttttcctggcttcagtttctgtctcatgtggcattgcttactgggacaaagagaaccccaaacacaacaagtgtctccagagttgcaatagcgagtgagactcgtacaggaaccaagcatgccacgctcgttgcaacctccttaag

SEQ ID NO: 57836 - DNA, 243 bp, Glycine max
  Clone ID: 700677474H1
acgacttaacccataatagttcttaaattcacatgtataatcgcttcatcgtcaaacagtcacttctcaccgtcactttagcagtctcttgcggtggcacaaactgtatcacgtttcaaaagactaacttggtgaccggtgaggtgttcctagttaccatacgaaagaggattttggtgtaggatgggatcgatagagaacgcttccaaaccaaggaaggaaaatccgaaatttgaattgcca

SEQ ID NO: 57837 - DNA, 246 bp, Glycine max
  Clone ID: 700677475H1
tctaactctcactcccaaacccaaactcaataacagtaaccgtttttcgttcttcacttcctcactctctctctcttccaccacactcatggcacatgctcacaaggtcctcgttcccatcgccgacggcaccgagcccatggaggccgtcatcatcatcgacgtcctccgccgctccggcgccgatgtacaccgtcgcttcctcctccgccaacctcgccgtccaagctctccacggcgtcaaga

SEQ ID NO: 57838 - DNA, 243 bp, Glycine max
  Clone ID: 700677476H1
cttctcaccctcgctctgttactcttctgcattgcctttacctcccacgttgccgtgcaggcgcacatggaggacacggccttcaacctcatgtcggacgccttggagtggcccaccacaatgtcgctctacgacgaagacgacgcccaagaggatgtcgagaacgcttacagtcggagatcgttgttctggcggcggatgaagtactacatctcctacggtgctctttctgctaaccgaatt

SEQ ID NO: 57839 - DNA, 243 bp, Glycine max
  Clone ID: 700677477H1
ctcgagccgaatcggctcgaggtactagtgattaatgaaggagaaccaaacattgaacttgactggcattaaagaacaacaacagaggcagcaacaggaagagcaacctttggaagtgcggaaatatagagctgaattgtctgaacaagatatatttgtaatcccagcaggttatccagttgtggtcaacgctacctcagatctgaatttctttgcttttggtatcaatgccgagaacaacca

SEQ ID NO: 57840 - DNA, 108 bp, Glycine max
  Clone ID: 700677478H1
tagcaaagctgatgcttagggacagagctgaataagtgaaaacattgcaatattctactaattatcatcataggagattaattagagtagatccaaatatcattgcag

SEQ ID NO: 57841 - DNA, 242 bp, Glycine max
  Clone ID: 700677479H1
ccaaattcgaggagataaacaaggttctgtttggtagagaggaggggcagcaacaaggggaggagaggctgcaagagagtgtgattgtggaaatctcaaagaaacaaattcgggaactgagcaaacatgccaaatctagttcaaggaaaaccatttcttctgaagataaacctttcaacttgagaagccgcgaccccatctattccaacaagcttggcaagttgtttgagattaccccagag

SEQ ID NO: 57842 - DNA, 242 bp, Glycine max
  Clone ID: 700677480H1
attttcctttttaagggatgctagtaatggttgtgttgatgttggtaatgttgcttcagcattgactacatcaagtgtgctcgaggcgcaaagccgaaaacccaacagatatgaggtctctcaatataggtatcgcaatgtgccgataaagcgcagagcgtgggttgagggccaaatgtcttttgatcaatcagtggtagcaattatgtcaaaatgtaaagccagtatgagaatgggaaaca

SEQ ID NO: 57843 - DNA, 242 bp, Glycine max
  Clone ID: 700677481H1
ctgctcgagcattatctttgaacactcatcaccatggccaagcttgttctttccctttgtttccttcttttcagtggctgcttcgctctgagagagcaggcacagcaaaatgagtgccagatccaaaagctgaatgccctcaaaccggataaccgtatagagtcggaaggtgggttcattgagaacaagaaccctaacaacaagccattccagtgtgccggtgttgccctctctcgctgcac

SEQ ID NO: 57844 - DNA, 240 bp, Glycine max
  Clone ID: 700677483H1
ccggataaaggtgaaaatcatgcgcgtcctgttcttggaggaaatgacacctttccttatcctcgtagggggagaactggtagaaaaccaacaaggaaagatcctaatagtgagagtaggagcaatgatgtttatctgccaagagatgaggcttttggacacttgaagtcatctgactttcttacttatggactaaaatccgtatctcaaaatgttcttccattattgcaatctgctttt

SEQ ID NO: 57845 - DNA, 241 bp, Glycine max
  Clone ID: 700677484H1
ccaacgaggacatagctgagaaacttcagtctccagactacgaaaggaagcagatcgtgacagtggaaggaggtctcagcgttatcagccccaagtggcaagaacaacaagatgaagatgaagatgaagacgaagatgatgaagatgaacaaattccctctcaccctcctcgccgaccaagccatggaaagcgtaaacaagacgaggacgaggacgaagatgaagataaacctcgtcctag

SEQ ID NO: 57846 - DNA, 235 bp, Glycine max
  Clone ID: 700677485H1
aagagagggaggtggttgaagaaacgaaccctaagagagagagagaaaaaaaatctttgctttgatttcaagctcctttaccattgcatttcgggatctcgaatcttcaatctgcaaaggtatttttgattctgcttctatggcaaattcaaagggctcatcgagtttcagaaattttatgtatcctggaaagcatcctctacttcctcctaaaagtccgtttcctagtgtttcc

SEQ ID NO: 57847 - DNA, 239 bp, Glycine max
  Clone ID: 700677486H1
tgcatacatcattatgtatatgtgaggtatcctaaaacttgttagtataatacacaatgtactcttaaaactgttttacatatgtctatagtttattaatttattcacgcatattagtaaggaaatatattttgtaattggtacgtgtgtttattaagctaattaatttacagttttgtaggtagattttatagttaatcaacaatattaaggtagaattttattcattttggctagct

SEQ ID NO: 57848 - DNA, 241 bp, Glycine max
  Clone ID: 700677487H1
gttgtgtgaagagatggagtatgatttgtcaaacagaaatgtcacctggttgtggctttttcaagaggaaacatgttgctgtgcccgaattaccttgtcctgaaattgaggtttatgttgctggttgcttctcaggaacacctattatcttaactaagacactgcaactcaattgccggaagaagcataacaggaaatgcgccttggattccattccagaatatgaaacaactgagtgcca

SEQ ID NO: 57849 - DNA, 181 bp, Glycine max
  Clone ID: 700677488H1
taagatttgaaattttgataaaccgcgatcacaggttgccgtaccttaataccggaaacaaaatcaatcgttacttgatttcaagaatttctcaatttcttcctacttctttgtgtacgatttcttaagggaaagaaaatcactctctgtgctggccacagacttcgtgaatcattttctt

SEQ ID NO: 57850 - DNA, 241 bp, Glycine max
  Clone ID: 700677489H1
aagggatatgatccttttcttggtggaattcaaaaatatgctactcccatgatgcccctagatggagaaattctttctaaggttgcacaagatatggttgaggaatggtttgattgtgttgatgaggaggattcctttgaggaagtttctttaagtgcagcactcaatggtgttgagggtttggactatatggaaagaattcctcttgccacatctgagggttttcctcatgtgctttcac

SEQ ID NO: 57851 - DNA, 240 bp, Glycine max
  Clone ID: 700677492H1
gcaggggcaaactcattgttgaacgcattgccagaggaagtgattcagcacacttttaacctaaagagccagcaggccaggcaggtgaagaacaacaaccctttcagcttcctggttccacctcaggagtctcagaggagagctgtggcttagagagccctttttgcatgtgctaccacacttttgtccttttgggctctagctagtgctggtagcagtacataagaatgaataaaagaa

SEQ ID NO: 57852 - DNA, 240 bp, Glycine max
  Clone ID: 700677493H1
gcatttagccttgcactccataatggtggaaatttgtcagaagcaataagcatagctaggaggatcaacaaaacacatgatgccagatttcctgaattattagatccttcaggtctggatgaagaggatttggaagctgagattctggatcttgcagagtctgttaaagggtcattattgcagatgaaagataggcatttcgtatctggggctatggctgactatcctcaagctcctcat

SEQ ID NO: 57853 - DNA, 241 bp, Glycine max
  Clone ID: 700677495H1
ctcttgatgaggagattctttccaaagttgcacaagacatggttgaagaatggtttgattgtgttgatgaggaggatacatttgaagaagtttctttgagtgctgcactcaatggtgttgaaggtttggactacatggaacgcattcctcttgccacttcagagggttttccccatgttctgtccaggaaaaatggtgaaaaaggcaagagaagatttgttactggagatggtgaagaaat

SEQ ID NO: 57854 - DNA, 266 bp, Glycine max
  Clone ID: 700677506H1
ttgaatggacgggcattgatacaagtggtgaattgcaacggtgagagagtgtttgatggagagctgcaagagggacgggtgctgatcgtgccacaaaactttgtggtggctgcaagatcacagagtgacaacttcgagtatgtgtcattcaagaccaatgatacacccatgatcggcactcttgcaggggcaaactcattgttgaacgcattaccagaggaagtgattcagcacactttcaacctaaaaagccagcaggccaggca

SEQ ID NO: 57855 - DNA, 224 bp, Glycine max
  Clone ID: 700677507H1
cacattggaacttgaacgcgaacagtgtgatctatgtgactcgagggaaaggaagagttagagtggtgaactgccaagggaatgcagtgttcgacggtgagctaaggaggggacaattgctagtggtgccgcagaactttgtggtggctgagcaagggggagaacaaggattggaatacgtagtgttcaagacacaccacaacgccgtgagcagctacattaag

SEQ ID NO: 57856 - DNA, 264 bp, Glycine max
  Clone ID: 700677508H1
gtacaacctccttgaaaaatcagtattctttggctggtcattttatgttataatatcccacagtgtctagagaagatgatgagcctaaaacatttttattgctgtataacattcatagcaattaaccatgcttttgtttgtgcagattgaactattagctagacttcaccattgtcatttggttcctttgcttggatactgctcggagttaaaaggaaaacatgttcagaggttactagtatttgactacatggcaaatggaaa

SEQ ID NO: 57857 - DNA, 259 bp, Glycine max
  Clone ID: 700677509H1
ttcagtgtctacaataccaggtgattttgtcattggtgttaagttgacaaccataaacaatatgtgtgcatatgggctcaatcctggtatttcaggttctcgtcttttgggtaccattcctcagtctatttcacagcaaactgtttggaatcaaatggcaacagtgagaacaccattgaattttgattctagcaagcagagcttttgtcaattttctattgaccttctcggtggaggaattttagtggacaaaactgga

SEQ ID NO: 57858 - DNA, 263 bp, Glycine max
  Clone ID: 700677510H1
gagagacagagacaccggtcacagtcacaccacaccggcaaatattttggtaagtaaagaaaagaatagtggctggagtcaacgaaatcgtgacgacaccattcgaaggacttgtttgtttaactacgactgagtatatcgtaattcgttcgtccattagcattgcttagggttttggaacagattcaattcagcgttacttcaatccaagcacatggcgaaaggaaagcatacgcatacccgagcacaggggaagaagtggt

SEQ ID NO: 57859 - DNA, 261 bp, Glycine max
  Clone ID: 700677512H1
gtctgtgatggactatcttcatcacaacatggtggattgcaatctccatgggcggcgaacccaggtcaagtatcaatggctgacattgtcaggatgggtaggccacaggccaaggcatccatgcctaactcttctctccacagtggtagccatcagaatgattttgcactcccatcagcttcacaaaacaatttgcattcagtgcaagttcatgcttccaagttgtcagagacaaataatgaccatggctttgctattgac

SEQ ID NO: 57860 - DNA, 166 bp, Glycine max
  Clone ID: 700677513H1
ctcacgcagtcgcagtgagtgaaaaggaaaacctcaattgcggtattctcagtgccttcgagagaaagaaaaaatggcagataatcttgctctccgtggcaccatgcgcgcccacaccgacgttgtgacggcgattgccactcccatcgacaactccgacatgatc

SEQ ID NO: 57861 - DNA, 259 bp, Glycine max
  Clone ID: 700677514H1
gtcattctcaggtcagacactgatattatggaacttgtaggtgcacatagagaagatttgtcttcagtcatgtcctcaaagagaatgcccacatttaaaacattgagtatcaccacaaaggacacagattcactgagggatttagaacttgagccaaaagtgagaagtaggatgagcatcgtgatatgtcagatcttcagttgagccaaaaggccaacatagatagatattcctaaccccgattttacagtgctagtgc

SEQ ID NO: 57862 - DNA, 262 bp, Glycine max
  Clone ID: 700677515H1
agcgagaaagactcctacaggaaccaagcatgccacgctcgttgcaacctccttaaggtggaggaagaagaagaatgcgaagaaggtcaaattccacgaccacgaccacaacacccggagagggaacgtcagcaacacggtgagaaggaggaagacgaaggtgagcagccacgtccattcccattcccacgcccacgccaacctcatcaagaggaagagcacgagcagaaggaggaacacgaatggcatcgcaaggaggaaa

SEQ ID NO: 57863 - DNA, 266 bp, Glycine max
  Clone ID: 700677516H1
tggccacgttcgcgtcctccagaggttcaacaaacgctcccaacagctacagaatctccgagactaccgcattttggagttcaactccaaacccaacacccttcttctcccccaccatgctgacgctgattacctcatcgttatccttaacgggactgccattcttaccttggtgaacaacgacgaccgagactcttacaaccttcaatctggcgatgccctaagagtccctattttaaccacatactatgtggttaaccctgaca

SEQ ID NO: 57864 - DNA, 145 bp, Glycine max
  Clone ID: 700677517H1
cagatctgaatttctttgcttttggtatcaatgcggagaacaaccagaggaacttccttgcaggttcgaaagacaatgtgataagccagatacctagtcaagtgcaggagcttgcgttccctgggtctgcaaaagatattgagaa

SEQ ID NO: 57865 - DNA, 270 bp, Glycine max
  Clone ID: 700677518H1
gattcacatagtatgtcagagaatggctgtggtgatgttgctattgaagctttggttacagtatgtcgtgctgtttcacaattggaaatgggcagcttggctgttgctagttttggaacgaaaggaaacatcaagttattgcacgactttgacaagccctttagcggagagtctggagtcaagatgatctccaatttgacattcaagcaagaaaatactattgcggatgagccagttgttgacctattgaagtacttaactaacaagctc

SEQ ID NO: 57866 - DNA, 183 bp, Glycine max
  Clone ID: 700677519H1
gcagaaagttcaattatttctgaacgcggctcgtactggttcaattgatctcttgaagaaattggcgttgcagctggacgagggcaaggatttggcgaaatcggtggaagcaataaaggacgccaacaagagaggagcactgcattttgccgcgcgagaaggccaaacctctgtttgcgagta

SEQ ID NO: 57867 - DNA, 161 bp, Glycine max
  Clone ID: 700677520H1
gaagattcgtcacttcaatgaaggagacgtactagtgattcctcctggtgttccttactggacctataacactggcgatgaaccagttgttgccatcagtcttcttgacacctccaacttcaacaatcagcttgatcaaaaccccagagtattttaccttg

SEQ ID NO: 57868 - DNA, 226 bp, Glycine max
  Clone ID: 700677521H1
gtgatgaggatacctggtggaaggccaatgttagagagacaaaggaagaacttgcagctagggggatgaagttccttaactggtatgagtttgttataattagaaacttctaaaggtttattttttgagtttatgccagcaatactacatattggaaacacactaaaattggactttgatgtgtagcaagttaatataattctactatgtaaggctcttcgctata

SEQ ID NO: 57869 - DNA, 259 bp, Glycine max
  Clone ID: 700677523H1
tatgaaattgcgttgagccaaataaggagcaaccgcgaggcgattgacaagattgtggaagttctattggagactgagacaatgtctggagatgaattccgagctctcctgtccgagtttgttgaaattcctgctgaaaatcgggtccctccttcaactccctcaccagttgctgtttgaattgcctatatgccactgcaatgtagtgtagctttccacttactgaattttctgaaattgtgaaatatttgtaatatac

SEQ ID NO: 57870 - DNA, 264 bp, Glycine max
  Clone ID: 700677524H1
gtcattctcaggtcagacactgatattatggaacttgtaggtgcacatagagaagatttgtcttcagtcatgtcctcaaagagaatgcccacatttaaaacattgagtatcaccacaaaggacacagattcactgagggatttagaacttgagccaaaagtgagaagtaggatgagcatcgtgatatgtcagatcttcagttgagccaaaaggccaacatagatagatattcctaaccccgattttacagtgctagtgcaattg

SEQ ID NO: 57871 - DNA, 260 bp, Glycine max
  Clone ID: 700677525H1
cggctcgagtactcattctccatacctcaacgaagaggttaaagagacggcaacactttgctgtccgccttgaccgagcagagcttcgtcttggccctcgattttgccctaatgtactctcagtcacaacagacaccgtcgtcgtcgtcgtcgtcatcaatggcaccgaagcagaccaaggctgagaagaagatcgcttacgatgcgaactgtgcgacctaatggaggagtacggccagatcctcgttgtgaactccgat

SEQ ID NO: 57872 - DNA, 133 bp, Glycine max
  Clone ID: 700677527H1
ggccagggagcttcggaaacatgtgtcgtggaggacgcatgtttgccccgaccaagatctggcgccgctggcacaggaaaatcaatgtgaaccagaagcgctacgccgttgtctccgcaatcgctgcctccgc

SEQ ID NO: 57873 - DNA, 258 bp, Glycine max
  Clone ID: 700677528H1
tgatgaaatgctttcacgtggtttcaaggatcagatctatgacatcttccagctgctgcaatccaaaattcaggttggagtgttctctgctacaatgccgccagaagcccttgaaattacaaggaagttcatgaataagccagtgagaatcctggtaaagcgtgatgaactgaccctggagggtataaagcagttttatgtcaatgttgacaaggaagagtggaagctggagacattatgtgacctttatgagactct

SEQ ID NO: 57874 - DNA, 159 bp, Glycine max
  Clone ID: 700677529H1
ctgaagcaaagcaatggctacttcaaagttgaaattccagaatgtggttgtatctctctccctaaccttaaccttggtactggtgctactgaccatcaaggcaaacttagcggaaactgtttctttcagctggaacaagttcgtgccgaagcaaccaaa

SEQ ID NO: 57875 - DNA, 199 bp, Glycine max
  Clone ID: 700677530H1
ctctaaccgtgtaattttaataaaccgcgatcacaggttgccgcaccttaaaaccggttacaaaagcaatcgttacttgatttcaagaatttctcaatttcttcctacttctttgtgtacgatttcttaagggaaagaaaatcactctctgtgctggtcacatagttcgtgtatcattttcttttccactcctagttta

SEQ ID NO: 57876 - DNA, 260 bp, Glycine max
  Clone ID: 700677531H1
gttggtttatctttcaagattggggtggttatcccaatgtacccgtaatatttccatggcttcagctgatcaatctggattggctagcaataataagggaagtgaacaatcagctactaaacagaaaaaggaagcttcaccagaggaatgcgatgaagctgttgaaggcttgagcagcataaaagcaaaagctaaggctaaacaaatgcaagaaccacataagagagcggattctattataaagaaattatgggctaaga

SEQ ID NO: 57877 - DNA, 264 bp, Glycine max
  Clone ID: 700677532H1
ttcaaaccttgctctatactacacagtacacacactagaagaataatggcttccatcctccactactttttagccctctctctttcttgctcttttcttttcttcttatccgactcagtcacccctacaaaaccaataaaccttgttgttctacccgttcaaaatgatggttccacagggctccattgggccaacctccaaaaaagaacccctctaatgcaagtaccagtcctcgtggacctcaatggaaatcacttgtgggtt

SEQ ID NO: 57878 - DNA, 117 bp, Glycine max
  Clone ID: 700677536H1
ctcacgcagtcgcagtgagtgaaaaggaaaaccctaattgcggtattctcagtgccttcgagagaaagaaaaaatggcagataatcttgttctccgtggcaccatgcgcgcccacac

SEQ ID NO: 57879 - DNA, 260 bp, Glycine max
  Clone ID: 700677537H1
gtataccttaataaataatttaagatactatgatgagagcacggttcccattactgttgctgggacttgttttcctggcttcagtttctgtctcatttggcattgcttactgggaaaaagagaaccccaaacacaacaagtgtctccagagttgcaatagcgagagagactcgtacaggaaccaagcatgccacgctcgttgcaacctccttaaggtggagaaagaagaatgtgaagaaggtgaaattccacgaccacga

SEQ ID NO: 57880 - DNA, 221 bp, Glycine max
  Clone ID: 700677538H1
ctctccattggtccttaaacactcatcagtcatcaccatggccaagctagttttttccctttgttttctgcttttcagtggctgctgcttcgctttcagttccagagagcagcctcagcaaaacgagtgccagatccaaaaactcaatgccctcaaaccggataaccgtatagagtcagaaggagggctcattgagacatggaaccctaacaacaagccat

SEQ ID NO: 57881 - DNA, 261 bp, Glycine max
  Clone ID: 700677539H1
ggctcaaggtcgcagaagcagcagctacaggacagtcaccagaagattcgtcacttcaatgaaggagacgtactcgtgattcctcctggtgttccttactggacctataacactggcgatgaaccagttgttgccatcagtcttcttgacacctctaacttcaataaccagcttgatcaaacccctagggtattttaccttgctgggaacccagatatagagtacccagagaccatgcaacaacaacaacagcagaaaagt

SEQ ID NO: 57882 - DNA, 258 bp, Glycine max
  Clone ID: 700677540H1
taagaaactgggaagagaaggtggtggtcttgttgccattctgatctaaagcttgtgtctttctgcttcgtttgcatcttctgctgcgtaaagttgattcttttctgattcttccgtagatttcatctctgaaactagttctaatactttatctacagatctctatattctaggtgaaggtttgcttttgatccggcttgggagttttgatagacttgattttaactctttaagagccatatgctcacagtggtcgga

SEQ ID NO: 57883 - DNA, 107 bp, Glycine max
  Clone ID: 700677541H1
agtggctgataggctcgccaacgatgctcggaaattggcttgtgatgatgtttgtgaggagtatcttcatcccccggctaactgtaaccagttgctcttggaggatg

SEQ ID NO: 57884 - DNA, 256 bp, Glycine max
  Clone ID: 700677542H1
gcgttgcgccccgatgcctctaatcattggctttacccgatagaactcgcccacttggagctctcgattccatggcgcggctcaacagagcagccgcaccgtcctacctatttaaagtttgagaataggtcgagggcgttgcgcccccgatgcctctaatcattggctttacccgatagaactcgcccgcgggctccagctatcctgagggaaacttcggagggaaccagctactagacggttcgattagtctttc

SEQ ID NO: 57885 - DNA, 253 bp, Glycine max
  Clone ID: 700677543H1
ctctttcttcatagcatttggaaatttggctgatgacaccatcaattttgaggcttttcctcacaagctggtgcagtttggagagattcaggaaaaagttgtattgaaattttcacaagaggaatttcttacagcttggtcaactcaggtgcgtcctacaacaactctgttggctgatgggtgtccatatttgtatgctatggtgcatgatagttcagtgtctacaataccaggtgattttgtcattggtgtt

SEQ ID NO: 57886 - DNA, 257 bp, Glycine max
  Clone ID: 700677544H1
gagatgatgacgaaaactttttaaggtgcaaaaagttttgcacgaagccaaaggcttttaggtctccacgacgcattgcacaccgaagaatcaggaatttgatgtcttccaagatactggaagacagctccaaagttgaaggactctgaactttctagatctgatctaggagtacctcgttatcataagaggaagacttgttacggttttgaaagatctcagcacaatgccattgttaaaaagaggaaattcgttga

SEQ ID NO: 57887 - DNA, 153 bp, Glycine max
  Clone ID: 700677545H1
gtggaaaaccttcaaatatgatataattggtgctggttcacattcttcagaagattttcctgaaaaggaagatcaagaacaacccaaaaagattgataccagattgagacacagaatagatcctcaatacaatgaggttcaggctcagatgga

SEQ ID NO: 57888 - DNA, 257 bp, Glycine max
  Clone ID: 700677546H1
gttcaatatcctagtataccttaataaataatttaagatactatgatgagagcacggttcccattactgttgctgggacttgttttcctggcttcagtttctgtctcatttggcattgcttactgggaaaaagagaaccccaaacacaacaagtgtctccagagttgcaatagcgagagagactcgtacaggaaccaagcatgccacgctcgttgcaacctccttaaggtggagaaagaagaatgtgaagaaggtga

SEQ ID NO: 57889 - DNA, 259 bp, Glycine max
  Clone ID: 700677547H1
actagttcaatatcctagtataccttaataaataatttaagatactatgatgagagcacggttcccattactgttgctgggacttgttttcctggcttcagtttctgtctcatttggcattgcttactgggaaaaagagaaccccaaacacaacaagtgtctccagagttgcaatagcgagagagactcgtacaggaaccaagcatgccacgctcgttgcaacctccttaaggtggagaaagaagaatgtgaagaaggt

SEQ ID NO: 57890 - DNA, 105 bp, Glycine max
  Clone ID: 700677550H1
attgtcttagaacactcatcaccatggccaagcttgttctttccctttgtgtccttcttttcagtggatgcttcgctctgagagagtaggcacagcaaaatgagt

SEQ ID NO: 57891 - DNA, 262 bp, Glycine max
  Clone ID: 700677552H1
gaatctgcgtgtgtttgtgaattgttgttgagatctgaatcaaaatcagaaacgataatggctacaccggaccacctcttcaacctccgcaacaacttctacctcggcgcttaccaagccgccatcaacagcagcgacgttgccaacctctcccaagaagataccctcgagcgcgacaccctcgtccaccgctgctacatcgccctcggccagctccagttcgtcatctccgagatccacgacgatgctcccacaccactcc

SEQ ID NO: 57892 - DNA, 260 bp, Glycine max
  Clone ID: 700677553H1
catcaaaatcacttatctctctctctagagaaaatggcagcttgcatattcacggtggcacaggacggaaccgcagatttccaaacggtgcaggaggcgatcgacgccgtgccgctcggcaacattcggcggacggtgattcgggtgtcgccgggaatctaccggcaaccggtgtatgtccccaagaccaagaatttcatcactctcgccgctctcagccccgaggacactgtgcttacctggaacaacactgccaccgg

SEQ ID NO: 57893 - DNA, 90 bp, Glycine max
  Clone ID: 700677555H1
ctttgacttcttccctgtggaggttgatagtcaagagggagttgctcacattggtgaattgaaatctggtgtctatgttccacacaacat

SEQ ID NO: 57894 - DNA, 259 bp, Glycine max
  Clone ID: 700677556H1
gagccattcatcatagcaacaaaccgacaccttagtgctcttcacccaatttataagcttctaactcctcactaccgtgacaccatgaacatcaacgcacttgctaggcaatctctcattaatgctgatggcataatagagaaatcttttttgccctcaaagcattccgttgagatgtcttcagcggtttataagaattgggttttcactgatcaagcactacctgcagatcttatcaagagaggagtggcaattaagg

SEQ ID NO: 57895 - DNA, 268 bp, Glycine max
  Clone ID: 700677557H1
gcaagatacaacaagcctgacaatgagattgttgaccattacacgtatgctattctgggtgatggttgtcaaatggagggaattgcaaatgaagcatgctcacttgctggccactggggactggggaagctgatagcattttatgatgacaatcatatttctattgatggtaacacagagattgcgttcactgagagtgttgatagtcgttttgagggacttgggtggcatgttatttgggtaaagaatggaaataatggctatgatg

SEQ ID NO: 57896 - DNA, 255 bp, Glycine max
  Clone ID: 700677558H1
cttaataaataatttaagatactatgatgagagcacggttcccattactgttgctgggacttgttttcctggcttcagtttctgtctcatttggcattgcttactgggaaaaagagaaccccaaacacaacaagtgtctccagagttgcaatagcgagagagactcgtacaggaaccaagcatgccacgctcgttgcaacctccttaaggtggagaaagaagaatgtgaagaaggtgaaattccacgaccacgac

SEQ ID NO: 57897 - DNA, 249 bp, Glycine max
  Clone ID: 700677559H1
gaaaaataaaataaaatgaacttatcaaaaagaaaaggaaacgctttacggcgcccttaccgaactcgtgctagagctagagtaatgggtgaagtagaggagatacaagagaagatgaaggccgacatggaggccattaaagagaaaatggccacaatgatggaggccatgatgagcgtgaagaagataatagaagccaatgcggttgcaattgccgctaccagcgttgttgctaaggtgaacctgatg

SEQ ID NO: 57898 - DNA, 110 bp, Glycine max
  Clone ID: 700677560H1
tgttctttaattttctgattttagcaaattaaaatagtagtgttattggtaggttttggcaaagatgttttcagttccaggggtgtcgggaattctgaacagaggaggag

SEQ ID NO: 57899 - DNA, 254 bp, Glycine max
  Clone ID: 700677562H1
gttaataagtttgcaaaaattatgaaccttagacaaagtgttgttggtgatcttaaacttcttactgatgggaagttgtatgagggtaagcatattcctgtatctaatattagtgcaggggaaaatcatgtagttcaaatacccctaatggcacaggaggaaattctgtcttctagtgcaagtgatttcagaactggaatggtgagtaaaaatagcaagcctcaagctactgcaatgcatgtgggagctataga

SEQ ID NO: 57900 - DNA, 257 bp, Glycine max
  Clone ID: 700677563H1
gcgttgcgcccccgatgcctctaatcattggctttacccgattgaactcgcccacttggagctctcgattccatggcgcggctcaacagagcagccgcaccgtcctacctatttaaagtttgagaataggtcgagggcgttgcgcccccgatgcctctaatcattggctttacccgatagaactctcccgcgggctccagctatcctgagggaaacttcggagggaaccagctactagacggttcgattagtctttc

SEQ ID NO: 57901 - DNA, 260 bp, Glycine max
  Clone ID: 700677564H1
gtcacaaaactacccttttgcttttgctcttatgttctttgccatggagtggccacaacaacaatggccttccatgatcatgagggtggtgatacaaagtcaccaaaaagtttgtttttgatgagcaactccacgagggttttcaagactgatgcaggggaaatgcgtgtgctgaaaagccatggtggtaggatattttataggcacatgcacattggcttcatctctatggaaccacagtccttgtttgttcctcagta

SEQ ID NO: 57902 - DNA, 264 bp, Glycine max
  Clone ID: 700677567H1
ctccattggtccttaaacactcatcagtcatcaccatggccaagctagttttttccctttgttttctgcttttcagtggctgctgcttcgctttcagttccagagagcagcctcagcaaaacgagtgccagatccaaaaactcaatgccctcaaaccggataaccgtatagagtcagaaggagggctcattgagacatggaaccctaacaacaagccattccagtgtgccggtgttgccctctctcgctgcaccctcaacgcaa

SEQ ID NO: 57903 - DNA, 261 bp, Glycine max
  Clone ID: 700677568H1
tctgtctctctctacgctttctcgttcgagatccctcaagggatccactaactgaaggagaaatggggttgacattcaccgagcttttcagccggcttttcgccaagaaggaaatgcgaattctgatggtgggtctcgatgcagctggtaagaccaccatcctgtacaagctcaaacttggagagatcgttaccacaattcccaccattgggttcaatgtggagactgtggaatacaagaacattagtttcactgtctggg

SEQ ID NO: 57904 - DNA, 231 bp, Glycine max
  Clone ID: 700677569H1
tttcaatgtggagatattttgttggagatctcgtctttgaagtttctaagatgacttctccctacattaaatgtacagtctctttcttcatagcatttggaaatttggctgatgacaccatcaattttgaggcttttccccacaagctggtgcaatttggagagattcaggaaaaagttgtattgaaattttcacaagaggaatttcttacagcttggtcaactcaggtgc

SEQ ID NO: 57905 - DNA, 217 bp, Glycine max
  Clone ID: 700677570H1
cgtgaagaggttgaaggatgtgacaatttccgagaaggaatttaaggagaagattgaggcggtgggagcgatggatcacgagagtttggtgcctctcagggcttactatttcagcagggatgagaagctccttgtctatgattatatgcccatgggaagcttgtctgcccttttacatggaaacaaaggagctggtaggacaccactgaattgggaa

SEQ ID NO: 57906 - DNA, 250 bp, Glycine max
  Clone ID: 700677571H1
gcgtgataaagggtttggttttgtgaggtacagtactcatgctgaagcagctctggctattcagatggggaacgcccagtctcttctatgtggaaaaccaattaagtgctcttgggggagcaagcccactccacctggaactgcttcaaatccccttcccccacctgctgctgcatctctgcctggcctgtctgcaactgatcttttggcgtatgagcgacagctagcaattagcaagatgggtggcgtc

SEQ ID NO: 57907 - DNA, 257 bp, Glycine max
  Clone ID: 700677572H1
aatccacaaaatccttttgtgttaaataggtggatggggaaactgacttttccccagggcacttcccgaagtgttaaaagaatgcctactttctatagggggaggagctggtgcaaagaatgctattctcatgaatatgccaaatgctgttctttcaatgtggagatattttgttggagatctcgtctttgaagtttctaagatgacttctccctacattaaatgtacagtctctttcttcatagcatttggaaatt

SEQ ID NO: 57908 - DNA, 185 bp, Glycine max
  Clone ID: 700677573H1
cttaaacactcatcagtcatcaccatggccaagctagttttttccctcttgttttctgcttttcagtggctgctgcttcgctttcagttccagagagcagcctcaacaacacgagtgccagatccaaaaactcaatgccctcaaaccggataaccgtatagagtcagaaggagggctcattgaga

SEQ ID NO: 57909 - DNA, 249 bp, Glycine max
  Clone ID: 700677574H1
caaaatgaccaagttcacaatcctcctcatctctcttctcttctgcatcgcccacacttgcagcgcctccaaatggcagcaccagcaagatagctgccgcaagcagctccagggggtgaacctcacgccctgcgagaagcacatcatggagaagatccaaggccgcggcgatgacgatgatgatgatgacgacgacaatcacattctcaggaccatgcggggaagaatcaactacataaggaggaacga

SEQ ID NO: 57910 - DNA, 248 bp, Glycine max
  Clone ID: 700677576H1
ctcgagccgttgaggaggactcgtctgaaaatattgacatacatatagttgccaaagaggaacaggagcctccgccggattgtcctactatactgcaaaatgagaagttagataataacaattctgactttgaaaatcaagaatcacagctgcatgaattaaataaaaggacgtacccgctagatgcagaagctatagaaattgctaatgaaggtgaagttgatttgtttgatggaaaacggatagac

SEQ ID NO: 57911 - DNA, 173 bp, Glycine max
  Clone ID: 700677577H1
ggtcatttgaattgaactacttcccctacctctaccgtttccggccaccgcggacggcgacgaaaacggcggcgacggatccaaccgaactggtttgagatctaatggatgcgcggacggtttccaaatccaagcgaaaactgattatgtgcttcgtctctgtgattgcgtgt

SEQ ID NO: 57912 - DNA, 254 bp, Glycine max
  Clone ID: 700677579H1
tctgtctcaaatcatggtaaccttcaatctttccgtcgagccgaaacccttcaccaatgacgtggtgatcatctccgataaagacacccggtggggttttgggggcactctcctcaaagcttttcaactgtgtggtttccgtgcagtcttagtcggggctggtaatgagctaggaagaaaggaaattgaagaatccatggttgttattcctgtcttctccatggaccttgtatcctctccagatcacttggagg

SEQ ID NO: 57913 - DNA, 254 bp, Glycine max
  Clone ID: 700677580H1
gtgaaggttctgagtctcaaagagaaccacgaagacataagaataagaacccttttcacttcaactctaaaaggttccaaactctcttcaaaaaccaatatggccacgttcgcgtcctccagaggttcaacaaacgctcccaacagcttcagaatctccgagactaccgcattttggagttcaactccaaacccaacacccttcttctcccccaccatgctgaacccagatacctcatcgttatccttaacggg

SEQ ID NO: 57914 - DNA, 258 bp, Glycine max
  Clone ID: 700677583H1
agatgacttctccctacattaaatgtacaatctctttcttcatagcatttggaaatttggctgatgacaccatcaattttgaggcttttccccacaagctggtgcagtttggagagattcaggaaaaagttgtattgaaattttcacaagaggaatttcttacagcttggtcaactcaggtgcgtcctgcaacaactctgttggctgatgggtgtccatatttgtatgctatggtgcatgatagttcagtgtctacaa

SEQ ID NO: 57915 - DNA, 250 bp, Glycine max
  Clone ID: 700677585H1
gtgattgcaggtatatagtttattaaataatgttgaagttgtatcaccatagatcgtcttatcaagtgtaaatctgcaccgacgattatgctgcttttgttcttttccctccttttttgggaatctccaactagctagttgtagtgctatagccaaaaatacaataaatttgatggagtgcacgagtaatgtgcatttctcctccatcttccactctctctatgttggtcacttggtcttggaactggat

SEQ ID NO: 57916 - DNA, 151 bp, Glycine max
  Clone ID: 700677586H1
tgcaacaggtacaagatcaagcagcactggggcgccattggaagaagatgcagcaggtagaagatacggcaatggggtggcattggaagatgatgcttgcactaccataaattgccatagaatcagttagttagttagttacaaccatatt

SEQ ID NO: 57917 - DNA, 253 bp, Glycine max
  Clone ID: 700677587H1
gcaggagcttgcattccctgggtctgcacaagctgttgagaagctattaaagaaccaaagagaatcctactttgtggatgctcagcctaagaagaaagaggaggggaataagggaagaaagggtcctttgtcttcaattttgagggctttttactgaataagtatgtactaaaatgtatgctgtaatagctcatagtgagcgaggaaagtatcgggctatgtaactatgactagagcttcaactatgaataaa

SEQ ID NO: 57918 - DNA, 253 bp, Glycine max
  Clone ID: 700677588H1
gccattttccttttttcagcagcactagttccgtgtttgtgtctaatcaatgatgttgtgttgtgctctgttttcctctgacttgtatggtttagttccaataggttatgattgctaacaatcagaatcagagtgtgttggggaattagagaatcttcttccattagcaaaaacaccgtgactagttgcagagggtaaatggtatatcttattgtggactacgtacgaggatcccttttcttcttttccgctt

SEQ ID NO: 57919 - DNA, 248 bp, Glycine max
  Clone ID: 700677589H1
taaagaatgtcattatctggggcaatcactcatcaacccagtatcctgatgttaatcatgcaactgttgcaacctcagctggggagaagcccgtccgtgagcttatagctgatgatgcctggttgaatggggaattcattactactgttcaacaacgtggcgctgcaattatcaaagctagaaagctttcaagtgcactatcagctgctagtgctgcttgtgaccatattagagactgggttcttgga

SEQ ID NO: 57920 - DNA, 249 bp, Glycine max
  Clone ID: 700677590H1
tgtgatcctctacaggaacaggcttagccttatgcttaaatcaaaacgtaagaagaataagcttccattaggcactcttggatggccttttatcggtgaaaccattgagtttgtttcttgtgcctactctgatcgccctgagagcttcatggacaagcgacgccgcatgtatggcaaggtgttcaagtcacacatatttggaagccctacaattgtttcaactgatgctagtgtgaataagttatactt

SEQ ID NO: 57921 - DNA, 252 bp, Glycine max
  Clone ID: 700677591H1
tggaagaaaccctagccactctcccggcgtcacgatgcagatcttcgtgaaaaccctaacgggtaaaacgatcacgttggaggtggagtcttcggacaccatcgacaacgtgaaggccaagatccaggacaaggaaggcatccctccggaccagcagcgcctcatcttcgccgggaagcagctggaggacggccgcaccctcgccgactacaacatccagaaggagtccacgcttcacctcgtcctccgcct

SEQ ID NO: 57922 - DNA, 246 bp, Glycine max
  Clone ID: 700677594H1
atggaatcaggcgtttagtgctgtctaagatctaaccattagtggttcagtttcagaaatttagagtactatcttctttgctctctttctagtttgtgccttcaccatctcatacctgccttcagccaccgctcagttcgtgctcgacactgatgatgatcctcttcagaacggtggcacatactatatgttgccagttatgagaggacagggcactggaatagaagtagattcaactggaaaaga

SEQ ID NO: 57923 - DNA, 177 bp, Glycine max
  Clone ID: 700677595H1
atgaatttgaaggagggattccacccgagtttggacatatcaccaagctgaagtatcttgatttagcagaaggtaatcttggtgttgaaattccaactgagttgggaaggctcaaattgttgaatacagttttcttgtataaaaacaaatttgaaggcaagattccaccagcaattg

SEQ ID NO: 57924 - DNA, 255 bp, Glycine max
  Clone ID: 700677596H1
aaaattcttccaccaagttatgggttgccttgtgttgcttcttttctccctcttaggtctctcttctagttccagcatatcaactcatcgttccatattggaccttgacctaaccaagtttaccacacagaaacaggtgtcttcactgttccaactatggaagagtgagcatggacgtgtctaccataaccacgaagaagaggcaaagagacttgagattttcaagaataacttgaactatatcagggacatgaa

SEQ ID NO: 57925 - DNA, 131 bp, Glycine max
  Clone ID: 700677601H1
caatggtgattttgttcaagggaaagatctcgcaatggttaaagttgatgtagcatgtgctgctgttggcttgacatcaagttacactccgactccaatgttggaatctggtttgcaaaaagacactgggt

SEQ ID NO: 57926 - DNA, 144 bp, Glycine max
  Clone ID: 700677603H1
aacagaatcacaccacagatctgcacaacatgattcatgacacattagatctgtgtcattagtccttggtttatcggaccaccacagttacaccgatcaaaaacacaaaacactactcatcacatcgtattcacatcacatcca

SEQ ID NO: 57927 - DNA, 223 bp, Glycine max
  Clone ID: 700677604H1
aatcagcctccaattcgtgccactctcttcaaaatggccgttaccttctcaaatctccacacagaatcaggtctcaagtccctcgacgacttcctctctgggaaggtctacgtttctggggatcagttcacaaaggactacatcaaagtgtatggtgctgtttttgataagccaggtgactcttttcccaatgctgccaagtggtacgaggttgtctcatctc

SEQ ID NO: 57928 - DNA, 204 bp, Glycine max
  Clone ID: 700677605H1
agctttttctgctggtttgcatggctgggcttttaccctgactaactttgccaagatgtatgcatccaagtttggagttgatgaaggaaagatgatggaaaggctctggggtgaaaacttttttgatccagccacaaagaaatggaccagcaagaatagtggttctgctacctgcaagcgtgggtttgttcagttctgttatga

SEQ ID NO: 57929 - DNA, 208 bp, Glycine max
  Clone ID: 700677606H1
attccaatatattccattctctctgtgtatttccctacctctcccttcaagatgcagatcttcgtcaagaccctcaccggcaagaccatcacccttgaggtggaaagctctgacaccatcgacaacgtcaaggccaagatccatgacaaggaaggaatccccccggaccagcaacgtctcattttcgccggaaagcagcttgaggacg

SEQ ID NO: 57930 - DNA, 268 bp, Glycine max
  Clone ID: 700677607H1
gcaccacgtatccctgagaaaagagaggaaccacactctctaagccaaagcaaaagcagcagcagcagcaatggttaaagacacaaagcctttagcctatgctgccaataatggataccaacaaaagggttcttcttttgattttgatcctagcgctcctccaccgtttaagattgcagaaatcagagcttcaataccaaaacattgctcggtcaagaatccatggagatccctcagttatgttctcagggatgtgcttgtaattgct

SEQ ID NO: 57931 - DNA, 234 bp, Glycine max
  Clone ID: 700677608H1
gttccacgttgttgttcgctctgtgtctctcactctctctatatttgcatcattcatcggaaatggctctcgaggttgctgttaaggctgctgttggggctccaaatgttctcggagattgtccattttcccaaagggtcctcttaactttggaggagaagaaaatcccttactgactccacctcatcgatctcagtaacaaacccgaatggtttttgggtgtgaatcctgaag

SEQ ID NO: 57932 - DNA, 266 bp, Glycine max
  Clone ID: 700677610H1
ctcttttctgcatgtttgatctctcaacgactcctccgcgaaagagtattattcaatattttggttgggttgaatcccggggttgaagcgttgcagacatcgcggctattctaagagtgtctcgctccctcattcatgtccgatctgtacgacggaggacgggtagttgcgtaactgccgttaacccttcgccgcacggtgggcgtggtgctttgccttctgaaggtggtagcccttcagacttgctcttcctcgctggtggtggt

SEQ ID NO: 57933 - DNA, 248 bp, Glycine max
  Clone ID: 700676984H1
ggaaacttgaaaattcttttttgcttggtccagtcttagtgtatccaacccctgtctacgtaaggtgcttgcatacactaagactggaccaagcaccttacgtagacaggggttggataagttggagattactttgcctaaggggatatggttgaattttgatttcaacgatacacatccgcatttgccagctttatacttaaaaggtggctcgcttttcccgtgggactccctcatcagcatgttgg

SEQ ID NO: 57934 - DNA, 253 bp, Glycine max
  Clone ID: 700676987H1
gtcccacgcccacaacctcgtcaagaagaagagcacgagcagagagaggaacaggaatggcctcgcaaggaggaaaaacgcggagaaaagggaagtgaagaggaagatgaggatgaggatgaggaacaagatgaacgtcaattcccattcccacgcccacctcatcagaaggaagagcgaaagcaagaggaagatgaggatgaggagcagcagcgagagagcgaaaaaagtgaagattctgagttacgaagac

SEQ ID NO: 57935 - DNA, 254 bp, Glycine max
  Clone ID: 700676989H1
cttggtccttaaacactcatcagtcatcaccatggccaagctagttttttccctttgttttctgcttttcagtggctgctgcttcgctttcagttccagagagcagcctcagcaaaacgagtgccagatccaaaaactcaatgccctcaaaccggataaccgtatagagtcagaaggagggctcattgagacatggaaccctaacaacaagccattccagtgtgccggtgttgccctctctcgctgcaccctca

SEQ ID NO: 57936 - DNA, 257 bp, Glycine max
  Clone ID: 700676991H1
caagcttgttctttccctttgtttccttcttttcagtggctgcttcgctctgagagagcaggcacagcaaaatgagtgccagatccaaaagctgaatgccctcaaaccggataaccgtatagagtcggaaggtgggttcattgagacctggaaccctaacaacaagccattccagtgtgccggtgttgccctctctcgctgcacccttaaccgcaatgcccttcgtagaccttcctacaccaacggtccccaggaaa

SEQ ID NO: 57937 - DNA, 258 bp, Glycine max
  Clone ID: 700676992H1
cgagagcaggcacagcaaaatgagtgccagatccaaaagctgaatgccctcaaaccggataaccgtatagagtcggaaggtgggttcattgagacctggaaccctaacaacaagccattccagtgtgccggtgttgccctctctcgctgcacccttaaccgcaatgcccttcgtagaccttcctacaccaacggtccccaggaaatctacatacaacaaggtaatggtatttttggcatgatattcccgggttgtcct

SEQ ID NO: 57938 - DNA, 266 bp, Glycine max
  Clone ID: 700676994H1
atagcccaagccctatacaaccaaaccctaacacacacccatttgattcagtttccatggctagcctcaaggttgcatttttggctgcagtgctctgcatggttgtggtgagtgcacccatggcacatgcagctatcacgtgcgggcaggtgacgaatagcctgatcaattgcatcggttacctccagaacggaggaacgccgccgtcgggatgctgcaacggagtgaagagcctcaatgccgccgccaagaccaccgccgaccgc

SEQ ID NO: 57939 - DNA, 267 bp, Glycine max
  Clone ID: 700676995H1
gaaaatcgtgtggggtcatctgtgatggaagttgttgaaatgataggaccattgtatgagctggtttgatccgcttattttccctgcatcctgggttgtgagtttacaatataggttttaagctttgcatgctgcaacttttcatgtcttatgttctgtttgtctctggcatgattccttggctgtccatattgtatttttttctcccttcagtgtgtgtgatcattaacatgtaccttatttgtgtaccccaaacttctgtgtttg

SEQ ID NO: 57940 - DNA, 239 bp, Glycine max
  Clone ID: 700676996H1
tcaaaaaagaagaagaagaagaagagaggaaagtagtagaagaatacagggcagagctgcagccaacaccacccatggctgaatccgtttcagtggacatggagatgatctttctcggcggaaaggaacatcatattcaaactggctgtggttctgtatctgtaatagtctgtggggatcaagaaaaaccagctctgatcacttatccagatatagcgctaaattatatgtcatgtttc

SEQ ID NO: 57941 - DNA, 275 bp, Glycine max
  unsure (1)..(275): unsure at all n locations
  Clone ID: 700677001H1
aggaaaggttaactaagaagcaatacttcaatggccacccttgttgttcataaccaaacttcttctgctcaagatgctgaggctctccaacaggctttcaaaggatggggggctgatgacaaggccattatagcaatactgggtcacagaaatgttcatcagaggcaagaaatcagaaaagcttatgaggagatttaccaagaggatctcatcanacgccttgagtccgagatctctggtgactttgagagagctatgtaccggtggatgttgca

SEQ ID NO: 57942 - DNA, 98 bp, Glycine max
  Clone ID: 700677002H1
cacaacagcaatgactatgtcatttaatccaatcccgtgttctgatgcatggagtttggaatttttgaagcgtaccggatttcattgtgatatcattt

SEQ ID NO: 57943 - DNA, 272 bp, Glycine max
  Clone ID: 700677003H1
gccgtgactgatcatcagaggcaatggcgagcaggtactgggcagtgtctcttcccgtccacaactcggcatcatctcagctctggaaccaattgcaggaacgaatctccaagcattccttcgacacacctctctacagattcaacattcccaacctccgcgtcggaaccctagactctctcctctccctcagcgatgacctcggcaagtccaacaatttcgtcgaaggagtcacgcacaagatcaggcgccagattgaggagctcgagaga

SEQ ID NO: 57944 - DNA, 103 bp, Glycine max
  Clone ID: 700677004H1
atcggcaaccaattcacataactgaagggaactatgtcaggagacaagatgtaagcatcgaatatgatgcctgcacaattcctaatgattgtggatctctggt

SEQ ID NO: 57945 - DNA, 268 bp, Glycine max
  Clone ID: 700677005H1
cgagactaccgcattttggagttcaactccaaacccaacaccctccttctccccaaccatgctgacgctgattacctcatcgttatccttaacgggactgccatagtttccttggtgaacaacgacgacagagactcctacagacttcaatctggtgatgccctgagagtcccctcaggaaccacatactatgtggtcaaccctgacaacaacgaatctcagattaataacactcgccatacccgttaacaagcctggtagatttgag

SEQ ID NO: 57946 - DNA, 238 bp, Glycine max
  Clone ID: 700677007H1
atcggagagaagctttttcagattcaaggtctaatagtggtcactctagaaagcaaaagaagcacgatactgggttttcccatgaacttggtttatcgtctccttcacctggggggaaacaggtgagtcagaggggttctattctgggaaaagcaggcgagatagcagtggaagttctggacacaattggaagtggcatgcctaagttaaacactaatagcgggtttgtctctggcac

SEQ ID NO: 57947 - DNA, 264 bp, Glycine max
  Clone ID: 700677008H1
tctcgagccgattcggctcgagaaaattcttccaccaagttatggatttccttgtgttgcttacttttctccctcttaggtctctcttctagttccagcatatcaactcatcgttccatattggaccttgacctaaccaagtttaccacacagaaacaggtgtcttcactgttccaactatggaagagtgagcatggacgtgtctaccataaccacgaagaagaggcaaagagacttgagattttcaagaataacttgaactat

SEQ ID NO: 57948 - DNA, 267 bp, Glycine max
  Clone ID: 700677009H1
ggcaacaccggcacacttaaccgcaatgcccttcgtagaccttcctacaccaacggtccccaggaaatctacatacaacaaggtaatggtatttttggcatgatattcccgggttgtcctagcacttatcaagagccgcaagaatctcagcaacgaggacgaagccagaggccccaagaccgtcaccaaaaggtacatcgcttcagagagggtgatttgatcgcagtgcctactggtgttgcatggtggatgtacaacaatgaagac

SEQ ID NO: 57949 - DNA, 280 bp, Glycine max
  Clone ID: 700677011H1
attcggctcgagtttgttcctcactgaccaagccatggcgatgagaaccaaactttctttagctatctttttcttttttcttttagccttattttcaaacctagcctttggcaaatgtaaagaaaccgaggtagaagaagaagaccctgagctcgtaacatgcaaacaccaatgccaacagccacagcaatacactgagggtgacaagcgggtatgcttgcaaagatgtgacaggtatcatcgtatgaagcaagagcgagagaaacaaatccaagaggaa

SEQ ID NO: 57950 - DNA, 110 bp, Glycine max
  Clone ID: 700677012H1
acatagtagtgttggtgggttgcaaagatgcttgggggtcttctccataggggtcataagataaaagggacagtcgtgttgatgcgcaagaatgtgttggacgtgaatag

SEQ ID NO: 57951 - DNA, 79 bp, Glycine max
  Clone ID: 700677013H1
gataccttttctttttgtcaacctctcatctcaattccctcctcaaaatcatatttgcccgcctcacagatcactaggg

SEQ ID NO: 57952 - DNA, 271 bp, Glycine max
  Clone ID: 700677014H1
agatcttttagctccttatcgtcgtggaggaaaaataggacttttcggtggagctggagtgggtaaaacggtactgattatggaattgatcaataacattgccaaagctcatggaggtgtatctgtatttggcggagtaggtgaacgtactcgtgagggaaatgatctttatatggaaatgaaagaatctggagtaattaatgaacaaaatattgcagaatcaaaagtagctctagtatatggtcaaatgaatgaaccgcccggagctcgt

SEQ ID NO: 57953 - DNA, 242 bp, Glycine max
  Clone ID: 700677015H1
aggatcgagcagattgaggcctcgattagatcctcaatacaatgaggttcaggctcagatggaaacaaattagtcaatattgcctctagatgatgttgaaactcccggaggttccatgtaggatctaacaatttctcactcgaaaattgtagttcccaaagacacagttctgaggaaccattctgcgtagtgatctattggctaattttcttgacagatggtcattctagggctagtgttga

SEQ ID NO: 57954 - DNA, 113 bp, Glycine max
  Clone ID: 700677016H1
gtgtagcagaactggcgatgcgggatgaaccggaagctgggttaaggtgcccaactgcgcgctaacctagaccccacaaagggtgttggtcgattaagacagcaggacggtgg

SEQ ID NO: 57955 - DNA, 271 bp, Glycine max
  Clone ID: 700677018H1
tctatactggaattttgattcggacattggctgatgcttcacatgaaaagcattctctatctgccccacaaattattctcaacgtcgccggcttctgtataacggtggcgacaaccatctttttcacagcttatgctaggagacggcttgatgagttacaaagagaggaggagccattgttgcagtaagtccagaagttttagtctggcttcgttcgttgtttccttatatgaagcagttccttactatgggaatggttttatgaggaaac

SEQ ID NO: 57956 - DNA, 107 bp, Glycine max
  Clone ID: 700677019H1
agcaattggatcatgcacgagtatcgtctcgccgatgtagatcgctcttgtcccctttcggagctttccctgcgtaaaacaccaaaggggacaagagcaattggatc

SEQ ID NO: 57957 - DNA, 94 bp, Glycine max
  Clone ID: 700677020H1
ggctcgaggtttttgaatctttcaagattgagccagaacccttcataggtcctctcttctctctttagtcgatcgcttcgcctgatattctttt

SEQ ID NO: 57958 - DNA, 246 bp, Glycine max
  Clone ID: 700677021H1
ctgggttgtttagatttgcttgcattagtaagagtatttctgaaatcttgtgactcaatgaactaagctttgcaagagatggatatctttttcttatgctgaaaactaaggaacgaattctccattaaatactcagtactttattaaatatgacatatatataataaatacatatttatgaatgtagttgcagaatatctctcaaggtgcaagcccaaggacaatgttctttgaagcttggacctg

SEQ ID NO: 57959 - DNA, 262 bp, Glycine max
  Clone ID: 700677022H1
tctcgctctatttctcagtctctgtgtttgcggctgaggattccgaacgagtgaccttcttcgtttctcgcaaagtttaagtaatcatgggtaaggaaaaggttcacatcaacattgtcgtcattggacatgtcgactctgggaagtcaactaccactggtcacttgatctacaagcttggaggtattgacaagcgtgtgattgagaggttcgagaaggaggctgccgagatgaacaagaggtcattcaagtatgcctgggt

SEQ ID NO: 57960 - DNA, 109 bp, Glycine max
  Clone ID: 700677023H1
acatagtagtgttggtgggttgcaaagatgcttggagggtcttctccatacgggtcataacatagaagggacagtcctgctgcatgtgcaagactgtgttggacgtgaa

SEQ ID NO: 57961 - DNA, 278 bp, Glycine max
  Clone ID: 700677025H1
attcggctcgaggtcacttttggggaagaggtcgagtttcacagcagcaatggtgtacgtcaaggctcagaaatcaaaagcctacttcaagagatatcaagtcaagttcaagagaagaagagagggaaaaaccgattaccgtgccaggattcggttgattaatcaggacaagaacaaatataacactccgaaataccgatttgttgttcgctttagcaacaaggacattgttgcacaaataatatctgctagcattgctggcgatattgttcttgctg

SEQ ID NO: 57962 - DNA, 264 bp, Glycine max
  Clone ID: 700677026H1
gtagtttctaccttccaggccccaccttcgtttttcttctaccaattctccaatttgaaaagtgggttctctgaaaaatctcgtctttttggggcccttttcacttgaatctccccagttatgattcctcaacttatggtgcaaattgtctgaaaagtttggtactttatgaaagtgatttagctcctttcttcacgcatacaaaatactcactagtcccaattccattgagcagaaaggtatcaaatccaaaaaggtttctga

SEQ ID NO: 57963 - DNA, 260 bp, Glycine max
  Clone ID: 700677027H1
cagaattacccaaattgggctctttggtgtcttttttaactgtggtgcaaaattgaaggttcttactctgattagctgctatgggatcaaagatctcaatatggaattgcctgcaatatctccttctgaatcaatttggtcattaacaatccgtgactgccctggatttggcgatgctaaccttgctttacttggaaagctgtgtcctcggattcagcatgttgaattgagtggacttcagggagtaacagatgcagggt

SEQ ID NO: 57964 - DNA, 109 bp, Glycine max
  Clone ID: 700677028H1
tctcgagtcgaattcggctcgaggtacaatgaagacactcctgttgatgccgtttctattagtgacaccaacagcttggaagaccagctcgaccagatgcctaggagat

SEQ ID NO: 57965 - DNA, 255 bp, Glycine max
  Clone ID: 700677029H1
cgagtggaagtcctataagacgcgtcagaaggaacatgatgagaatgtgaagaaggttatcaaacgtctcaaacagaggaatccatcaaaagatggtcttgtctgtactgctcgtaagccctggattgctgttgggatgcgaaatgttgactataagagagcccgtcatttcgaagttgatttgtctgctttccggaatgtacttgagatcgacaaagaacggatgattgcaagagttgagcccctagtcaacat

SEQ ID NO: 57966 - DNA, 261 bp, Glycine max
  Clone ID: 700677030H1
ttctctccattggtccttaaacactcatcagtcatcaccatggccaagctagttttttccctttgttttctgcttttcagtggctgctgcttcgctttcagttccagagagcagcctcagcaaaacgagtgccagatccaaaaactcaatgccctcaaaccggataaccgtatagagtcagaaggagggctcattgagacatggaaccctaacaacaagccattccagtgtgccggtgttgccctctctcgctgcaccctc

SEQ ID NO: 57967 - DNA, 257 bp, Glycine max
  Clone ID: 700677032H1
tgcaaacattgaacttgttggcctaaaagaacaacaacaggagcagcaacaggaagagcaacctttggaagtgcggaaatatagagccgaattgtctgaacaagatatatttgtaatcccagcaggttatccagttgtggtcaacgctacctcaaatctgaatttctttgctattggtattaatgccgagaacaaccagaggaacttcctcgcaggttcgcaagacaatgtgataagccagatacctagtcaagtgc

SEQ ID NO: 57968 - DNA, 107 bp, Glycine max
  Clone ID: 700677033H1
ctcgagccgcgaagatgaagatgaagatcaacctcgcaagagccgcgaatggagatcgaaaaagacacaacccagaagacctagacaagaagaaccacgtgaaagag

SEQ ID NO: 57969 - DNA, 257 bp, Glycine max
  Clone ID: 700677034H1
agagcatattatcagaaacttgtgcagtcttaatactgagaggaatatactggaagagtttgatggggggaaaatattaactgtggatgcatctgatgcagagagcaacatgcctagattgtcggatggaagcaagtgctgtgataatgatgatgatgatgatagtgatgaagtcttgatattggatccatctggtgttgacaaagagatatttggtcgtaagaggaagagagagtctaagtcagaaatgctaagtt

SEQ ID NO: 57970 - DNA, 222 bp, Glycine max
  Clone ID: 700677035H1
ctttcaacctaaaaagccagcaggccaggcagataaagaacaacaaccctttcaagttcctggttccacctcaggagtctcagaagagagctgtggcttagagccctttttgtatgtgctaccccacttttgtctttttggcaatagtgctagcaaccaataaataataataataataatgaataagaaaacaaaggctttagcttgccttttgttcactgt

SEQ ID NO: 57971 - DNA, 261 bp, Glycine max
  Clone ID: 700677036H1
ggaaatgacacctttccttatcctcgtagggggagaactggtagaaaaccaacaaggaaagatcctaatagtgagagtaggagcaatgatgtttatcttccaagagatgaggcttttggacacttgaagtcatctgactttcttacttatggactaaaatccgtatctcaaaatgttcttccattattgcaatctgcttttgatttgaatttcacaccccgtgagtttgatagctttgatggagttcatggactccattca

SEQ ID NO: 57972 - DNA, 261 bp, Glycine max
  Clone ID: 700677037H1
ttgaaagtttggtatccttcagcttaaattattgattgctgagatgagaatttatgcagcgttcaagaactagagtcaagcaattttgttctaattttatcagtcagttctgcatttattttgcagattgttctcatttctatttcctaggtcaggtgaatttaagtatgaaccagaacacccactgtgactaataaattatgggaatttatatagtattcagagctatggtaattttgtagttctaatttgatcaatcaa

SEQ ID NO: 57973 - DNA, 253 bp, Glycine max
  Clone ID: 700677038H1
ctttctcttgttctttttacctcaggtattttagactttcatggattataagatcactgagaagtgtatgcatgtaatactaagcaccatagctgttctgcttgaatttatttgtgtgtaaattgtaatgtttcagcgttggctttccctgtagctgctacaatggtactgtatatctattttttgcattgttttcattttttcttttacttggtcttcattgctttgaaattaataaaacaatataatatag

SEQ ID NO: 57974 - DNA, 241 bp, Glycine max
  Clone ID: 700677039H1
cttcatttgaacagtgctttccaaagagcaccacagaacacaggacagtcactcatgaagaaactggtcatgtgctcaaagttccctttcgtcgagttcacctgtctggggaagcaggacactttgatacctatgacactagcggtccccaaaatgtaaacccaaggacaggactcccaaaattgcgcggagggtgggttgatacgagggagaaacttggttatccaagagtcactcagat

SEQ ID NO: 57975 - DNA, 96 bp, Glycine max
  Clone ID: 700677040H1
ttcacaacaagtgtctccagagttgcagtagcgagagagactcgtgcaggaaccatgcatgccaggctcgttgcaaccttcttaaggtggagaaat

SEQ ID NO: 57976 - DNA, 260 bp, Glycine max
  Clone ID: 700677042H1
attggtccttaaacactcatcagtcatcaccatggccaagctagttttttccctttgttttctgcttttcagtagctgctgcttcgcgttcagttccagagagcagcctcagcaaaacgagtgccagatccaaaaactcaatgccctcaaaccggataaccgtatagagtcagaaggagggctcattgagacatggaaccctaacgacaagccattccagtgtgccggtgttgccctctctcgctgcaccctcaaccgca

SEQ ID NO: 57977 - DNA, 102 bp, Glycine max
  Clone ID: 700677043H1
atgccactttccagttatcatcatcatgctttcgttttccactctcagaagatcctcacccttactcgcacgacgcttctcaacccaacggtcccagatccg

SEQ ID NO: 57978 - DNA, 254 bp, Glycine max
  Clone ID: 700677044H1
caagggtttaacctttctggctgtgttaatatgcgtttcagcactgtcactgagtccttctgttgcgggggaagggcaaaataatggccttgttatgaacttctacaaggaatcatgccctcaggctgaagacatcatcacagaacaagtcaagcttctctacaagcgccacaagaacactgctttctcctggctcaggaacatcttccatgactgtgctgttcagagttgtgatgcttcactgttgctggact

SEQ ID NO: 57979 - DNA, 262 bp, Glycine max
  Clone ID: 700677045H1
ggagcatagagcctattgtagacttgttcgccgacgaggtagataccgaaggcgacgacggcgatgccaaggccaggggtggcgtggcggagctgattggtgagcatcggatgcttcctccatgcatcccttctcctgaagaactctccagtgtgttttccacttccagatcccattctattcttccctcccttccttcctcctcacccactcgctttgctttgcttttctttctttccttccacccttactgggctcccga

SEQ ID NO: 57980 - DNA, 264 bp, Glycine max
  Clone ID: 700677046H1
agcgcctccagatggcagcaccagcaagatatctgccgcaagcagctccagggggtgaacctcacgccctgcgagaagcacatcatggagaagatccaaggccgcggcgatgacgatgatgatgatgacgacgacaatcacattctcaggaccatgcggggaagaatcaactacataaggacgaacgaaggaaaagacgaagacgtagaagaagaaggacacatgcagaagtgctgcacagaaatgagccagctgagaagcccc

SEQ ID NO: 57981 - DNA, 103 bp, Glycine max
  Clone ID: 700677047H1
ctcgagccgttctgaggatcatttgtatgagtcgtgtaaaaaatatgtcagctattatggtggttaagacttaagaagcctgattatgttagggcaatacaat

SEQ ID NO: 57982 - DNA, 100 bp, Glycine max
  Clone ID: 700677048H1
gtcgagcctcactgagctcaccatggcgaccagagccatgcgttgatgagcaatcttcctagttctttcttctagacatgattccaaaactagcgttggg

SEQ ID NO: 57983 - DNA, 267 bp, Glycine max
  Clone ID: 700677049H1
agagagtgtgattgtggaaatctcaaagaaacaaattcgggaactaagcaaacatgccaaatctagttcaaggaaaaccatttcttctgaagataaacctttcaacttgagaagccgcgaccccatctattccaacaagcttggcaagttgtttgagattaccccagagaaaaaccctcagcttcgggacttggatgtcttcctcagtgttgtggatatgaacgagggagctctttttctgccacacttcaattcaaaggccatagt

SEQ ID NO: 57984 - DNA, 236 bp, Glycine max
  Clone ID: 700677050H1
cagaaaactctgttctcggccatggaagaattacggaaactagagaaagtacatagcatgctggaattcatggaatcacggggcgtttcaaacctcgatcatcactctaaacgcttcctcgctaatttcattctcttcttgatagaaccctccggagaccttgccataaacgacaagtgctccttgctttcgcagcttattcccactctctcatcttcattccttgaagacgcgta

SEQ ID NO: 57985 - DNA, 254 bp, Glycine max
  Clone ID: 700677051H1
agaaggtaatgctcttttgaagttgaggcagagaatagtgagtgacccttttgatgctttgtcaaattgggttgatgatgaggcttctgttgacccttgtaactggtttggagttgagtgctcagatggaagagttgtggtcttgaatttgaaggatctctgccttggaggaactctggcacctgagcttgtgaaacttgtcaacataaagtccattattttgcggaacaactctttctctgggaccatccctg

SEQ ID NO: 57986 - DNA, 256 bp, Glycine max
  Clone ID: 700677052H1
aatcaatcatccattcattattcatcatgtcgtcggcgaagaaaatcacgctgaagagttcggacggcgaggctttcgaggtggaggaggcggtggcgctggagtcgcagacgataaagcacatgatcgaggacgactgcgccgacagcggcatccctctgccgaacgtgacgagcaagatcctggcgaaggttatcgagtactgcaagaagcacgtcgaggccgcgaatcccgaagacaaaccctccgaggacga

SEQ ID NO: 57987 - DNA, 253 bp, Glycine max
  Clone ID: 700677053H1
gctcgagctgctcgagcggctcgagctctgtgtttgcggctgaggattccgaacgagcgaccttcttcgtttctcgcaaagtttaagtcatcatgggtaaggaaaagactcacatcaacattgtcgtcattggacatgtcgactctgggaagtcaactaccactggtcatttgatctacaagcttggaggtattgacaagcgtgtgattgagaggttcgagaaggaggctgctgagatgaacaaagagtcatc

SEQ ID NO: 57988 - DNA, 256 bp, Glycine max
  Clone ID: 700677054H1
cttgtccagaaatctccattctccaaaactgcttcaactcttctcattctctctatctctctctctgcctcacactggagtaccctcttcaatttccatcaattaagtttctctaataccctctgaatcatcatcatcatcatcatcattagtcatggctcttgtgatatatgttgtgctttttcttgccctcactggccattcaagtgctgcttactgtgtatgcaaagatggtgtgggtgatcaagctcttcag

SEQ ID NO: 57989 - DNA, 262 bp, Glycine max
  Clone ID: 700677055H1
tgagtctcaaagagaaccacgaagacataagaataagaacccttttcacttcaactctaaaaggttccaaactctcttcaaaaaccaatatggccacgttcgcgtcctccagaggttcaacaaacgctcccaacagcttcagaatctccgagactaccgcattttggagttcaactccaaacccaacacccttcttctcccccaccatgctgacgctgattacctcatcgttatccttaacgggactgccattcttaccttg

SEQ ID NO: 57990 - DNA, 242 bp, Glycine max
  Clone ID: 700677056H1
atatccttcacttgttgctcgtcttagtatctgtgttatgacatttttattgctataacctaagtaaacttcaccctcaaaatgagtgatcccacactagcacaaccacacctagtcgaagtccacacaacactcgaaaccgttgttaccacacacaactataaccatagaccctcaatagatgcctcaggtgataagacaagtattgtgggggttttctaaagagggaatgagtatgctaa

SEQ ID NO: 57991 - DNA, 255 bp, Glycine max
  Clone ID: 700677057H1
gagaaagggagagatttgatgagatagggaagaagatcaagagggaaggagatgtttcatctcaaatgggaagaagacacatgttaggccctccaggaaccctaaatactatcaccccttgtgcggcatgtaagttgttgagaagaagatgtgcccaagaatgtcccttttctccatatttctctccccatgagccccaaaaatttgcttctgtccacaaagtttttggtgccagcaacgtctcaaagatgctca

SEQ ID NO: 57992 - DNA, 246 bp, Glycine max
  Clone ID: 700677059H1
tctcgagccgaatcggctcgagggtttttgggtgtgaatcctgacgttaaggtgccagtgattctttttgatggcaaatggctggctgattctgatgtaattgtggggatactagaggtagagtacccagaaccctctctaatcactcctcctgaatttgcctccgtgggatcaaagatatttgggtcttgtctgagttttctgaagagcaaggatactaacgatggaactgagcacgcattggtt

SEQ ID NO: 57993 - DNA, 257 bp, Glycine max
  Clone ID: 700677060H1
ctctccattgtctttgaacactcatcaccatggccaagcttgttctttccctttgtttccttcttttcagtggctgcttcgctctgagagagcaggcacagcaaaatgagtgccagatccaaaagctgaatgccctcaaaccggataaccgtatagagtcggaaggagggttcattgagacctggaaccctaacaacaagccattccagtgtgccggtgtagccctctctcgatgaacccttaaccgatatgcgctt

SEQ ID NO: 57994 - DNA, 260 bp, Glycine max
  Clone ID: 700677061H1
accttaataaataatttaagatactatgatgagagcacggttcccattactgttgctgggacttgttttcctggcttcagtttctgtctcatttggcattgcttactgggaaaaagataaccccaaacacaacaagtgtctccagagttgcaatagcgagagagactcgtacaggaaccaagcatgccacgctcgttgcaacctccttaaggtggagaaagaagaatgtgaagtaggtgaaattccacgaccacgaccac

SEQ ID NO: 57995 - DNA, 261 bp, Glycine max
  Clone ID: 700677062H1
gtattcttccaccaagttatgggtttccttgtgttgcttcttttctccctcttaggtctctcttctagttccagcatatcaactcatcgttccatattggaccttgacctaaccaagtttaccacacagaaacaggtgtcttcactgttccaactatggaagagtgagcatggacgtgtctaccataaccacgaagaagaggcaaagagacttgagattttcaagaataacttgaactatatcagggacatgaatgcaaac

SEQ ID NO: 57996 - DNA, 198 bp, Glycine max
  Clone ID: 700677064H1
gaagaaagaggaggggaataagggaagaaagggtcctttgtcttcaattttgagggctttttactgaataagtatgtactaaaatgtatgctgtaatagctcatagtgagcgaggaaagtatcgggctatgtaactatgactagagcttcaactatgaataaataaatcgacagcatatgatgcttttgttttgtgtc

SEQ ID NO: 57997 - DNA, 262 bp, Glycine max
  Clone ID: 700677065H1
acggaagttcttatgttgagcctgctgcacaattctaatcttgtcaagttaattggctactgcactgatggagatcaaaggctttggtttatgagtacatgcccatgggttcacttgaagaccatctatttgatcttcacccagacaaagaaccactaagttggagtactcgaatgaagattgctgttggagctgctcgtggccttgaatatctccattgtaaagcagatccacctgttatctacagggacttgaaatctgc

SEQ ID NO: 57998 - DNA, 226 bp, Glycine max
  Clone ID: 700677066H1
tggattttgattctcgttatctgtgattgttgactcggcagatgcagatcttcgtcaagaacctcaccggcaagagcatcaccctatatgtggaaagctctgacaccatcgtcaacgtcaaggtcaagatccacgacaaggatggtatccccccggaccagcaatgtctcattttcgccggaaagctactttgcagaggtcgtacccttgctgagtataacattca

SEQ ID NO: 57999 - DNA, 238 bp, Glycine max
  Clone ID: 700677067H1
ctcggttaaactgaaccaattcaatattcccagctagttcttcattgaagaagctatggactttcttaactttatgcttaacttgttggtccctccaggcagtatgctcaccttggctttctcatggccagcactttgcttcctcaatgtttgtgagtggctttataatagtatatatggtgaggatatcgataatacagtcgtcataatccctggggcatcttcaggcataggagag

SEQ ID NO: 58000 - DNA, 242 bp, Glycine max
  Clone ID: 700677069H1
cgtcgcccagagtttcaccgagttctacgataaatgggtttggaagctcgaggagatcctccaccagctccttgacgtgtccaagcagagaacccaggtggtgaaaactgaacaagagctgcacgttttgatttccaaggtcacatcccatttgaaggaaaattacactgtcaagtgggcttcggctcatgaaaacgtgctcgtgtacttctcgccaagtggctgagtcctttggagaatgc

SEQ ID NO: 58001 - DNA, 101 bp, Glycine max
  Clone ID: 700677070H1
gttgccactgcatgagactcgcaataagtaacatgccaggacgtgtctagatccttggaaggatatagcaccgagatttgccagggtctacataagctctg

SEQ ID NO: 58002 - DNA, 245 bp, Glycine max
  Clone ID: 700677071H1
ggctcgaggtttttgaatctttcaagattgatccagaacccttcaaagtcctctcttctctctttcttacgatcgcttcgcctgatattctttttggctgagatcaagcaaaaatgagcgtggttggatttgattttggtaatgagagctgcattgttgctgtcgcaagacaaagggggattgacgttgtgctcaacgatgagtcaaagcgtgaaacacctgcaattgtatgctttggtgacaaa

SEQ ID NO: 58003 - DNA, 252 bp, Glycine max
  Clone ID: 700677072H1
gttcaatatcctagtacaccgtattaaagaatttaagatatactatgatgagagtgcggttcccattactgttgtttggagttgttttcctggcatcagtttctatctcatttggcattgcgtattgggaaaagcagaaccccagtcacaaaaagtgcctccgaagttgcaatagcgagaaagactcctacaggaaccaagcatgccacgctcgttgcaacctccttaaggtggaggaagaagaagaatgcg

SEQ ID NO: 58004 - DNA, 97 bp, Glycine max
  Clone ID: 700677073H1
cagtgttctctctatcttccactttcttgctttattgccaagtaaaaagagtctagaatgtctgtgcaatttatgaaatgtactatctaagtattac

SEQ ID NO: 58005 - DNA, 252 bp, Glycine max
  Clone ID: 700677074H1
gaaaatgaagaaggaacaatattcttgtgaccatccacctgcatcatgggattggaggaaaaaaggtgtcatcacccaagtaaagtaccaagggggctgtggaagcggttgggcgttttctgccacgggagccatagaagcagcacatgcaatagcaacaggagaccttgttagcctttctgaacaagaactcgtagactgtgtggaagaaagcgaaggttgttacaatggatggcactatcaatcgttcga

SEQ ID NO: 58006 - DNA, 249 bp, Glycine max
  Clone ID: 700677075H1
cttgttcaccaattaagctttcaagagacaaactgctttgaaaaatgggatccaaggttgttgcatccgttgcccttctcctctccatcaacattcttttcatttccatggttagctccagcagccactacgatccacagccccaaccttctcacgtcactgctcttattacacgacctagttgtccggatctgagtatttgcctcaatattttaggcgggtctctaggaaccgtggatgattgttgtg

SEQ ID NO: 58007 - DNA, 255 bp, Glycine max
  Clone ID: 700677077H1
ctttgttcactcttcttctcttgcggctagggttttagcgcacttgcttctagatttaaggaagatgggtaaggaaaaggttcacatcagtattgtggtcattggccatgtcgactctgggaaatccactaccactggtcacctgatttacaagcttggaggcattgacaagcgtgttattgagaggtttgagaaggaagctgctgagatgaacaagaggtctttcaagtatgcctgggtgctggacaaacttaa

SEQ ID NO: 58008 - DNA, 253 bp, Glycine max
  Clone ID: 700677078H1
caatcccacaaagtagaaaaagaggttatgttatggcgggcaaaggtgttagttcggtggctaaggcggtagcagaatatcagtatccttggcgtgagaagttggggaaatataaggatgagcttgccaagggtgtgtggggatactgggagctgggggcatggaagccgctgagtatcagtgctcggcatcgtgctagaattcgcaaggaagtcctccttgctggggaagattggccctacgatcctgaaag

SEQ ID NO: 58009 - DNA, 261 bp, Glycine max
  Clone ID: 700677079H1
tctcgagccgattcggctcgactcttctctctccacccaaacccagtctcccgaccctgttgtcctctcgtatccgtcatagtaggaggaaagtccaagaccgaatctaagagagccgatcccaaacttgctgtgaataagaagggagccgccaccaaggctaggaaacccgccggcaaggggaaggcagcgaaagaccctaacaagccaaagaggcctccatatgctttcttcgttttcatggaggagttcaggaaggta

SEQ ID NO: 58010 - DNA, 259 bp, Glycine max
  Clone ID: 700677080H1
gaaaaaaccaatttcattttttcagtattgttgatcggttaagatagtgtgaatgtagttttcccattcagactatcttaacttatatatatacattctttacattcttctatcttgtatcaaatttatggtttcgattggtgcaaacccaatagtcttaatttacaatttaagatgagaaggactttcccatcggtaacaaaacaaatataaagttacccgttaagcggagaaaatacctattcaattaaagataaag

SEQ ID NO: 58011 - DNA, 228 bp, Glycine max
  Clone ID: 700677081H1
atcttctccgtctctctctctgagtcgcctcataccatgttcatctataaatggatccagtatcagtagcatctccagattcaatctcgtcatgatatgtttgcatcgtaggtgttccacttacaccaatgggtagatttcgattgcatctgacatctctatctgtcaccgagttatcgcctatggctattgaagctgctccttaaagggccaatgttgatccatccc

SEQ ID NO: 58012 - DNA, 200 bp, Glycine max
  Clone ID: 700677082H1
tgaatatgctagtgtagcttattaactaatttccgatcatatgattagagcaccgttcccattactgttgctacagattgttgtcctggcttcagatgctgtctcacttggcattgctcactgggccaaagagaaccccaaacagaacaggagtctccagagttgcaatatcgagataggatcgtaccggcaacaagcat

SEQ ID NO: 58013 - DNA, 244 bp, Glycine max
  Clone ID: 700677083H1
ggcactatcaatcgttcgaatgggttttagaacatggtgggattgccactgatgatgattatccttacagagctaaagagggtagatgcaaagccaataagatacaagacaaggttacaattgacggatatgaaactctaataatgtcagatgagagtacagaatcagagacagagcaagcgttcttaagcgccatccttgagcaaccaattagtgtctccattgatgcaaaacttttcattat

SEQ ID NO: 58014 - DNA, 230 bp, Glycine max
  Clone ID: 700677085H1
ggaaccatcctgcgtagtgatctattggcaaattttttgacagagggcaattttagagcaagtgttgatttgcagcgcactcatcgtattaaaggaatgattaaaatggtagccacagttggtattcctgagaatacaggtatagcattggcctgtgctatgaatagttcttttagggggcgtgccagttctgatatttacaccatctgctctcaagactgtgaattatg

SEQ ID NO: 58015 - DNA, 95 bp, Glycine max
  Clone ID: 700677086H1
aatggattccacaaactcaaatgatggagagcctgccccatcaaagccagagaacacgcatccatcttatcctatgttatatcctgcgtattatt

SEQ ID NO: 58016 - DNA, 101 bp, Glycine max
  Clone ID: 700677087H1
gtcgagccgattcggctcgagaaaattcttccaccaagttatggacgtccttgtgttgcttacgtttctccctcttaggtctgctctctagttccagcata

SEQ ID NO: 58017 - DNA, 254 bp, Glycine max
  Clone ID: 700677088H1
tgaacccattcctgaagctaacgatgaacctgttaaagtggtagttgggaacagtcttgaggacattgttttcaaatctgggaagaatgttctgctggagttttatgctccctggtgtggtcattgcaaacagttggctccaatattggacgaagttgctatctcatatcaaagtgatgctgatgttgttattgcaaaactggatggaactgccaacgatatcccaagtgaaacctttgatgtccaaagttatc

SEQ ID NO: 58018 - DNA, 251 bp, Glycine max
  Clone ID: 700677089H1
gttcaatatcctagtacaccgtattaaagaatttaagatatactatgatgagagcgcggttcccattactgttgcttggagttgtgttcctggcatcagtttctgtctcatttggcattgcgtattgggaaaatcagaaccccagtcataacaagtgcctccgaagttgcaatagcgagaaagactcctacaggaaccaagcatgctacgctcgttgcaacctccttaaggtggaggatgaagatgaatgc

SEQ ID NO: 58019 - DNA, 249 bp, Glycine max
  Clone ID: 700677091H1
tctcgagccgattcggctcgaggatcaacaagatgctttcgtgtgatggagctgataggctccaaactggaatgagaggtgattttggaaagccacagggtacttgtgctagagtggctattggacaggtccttctttctgtccgctgcaaggacagcaacagccatcatgcccaggaggcccttcgccgtgccaagttcaagttccctggtcgtcaaaagattattgttagcaggaaatggggcttca

SEQ ID NO: 58020 - DNA, 254 bp, Glycine max
  Clone ID: 700677092H1
agagagcaggcacagcaaaatgagtgccagatccaaaagctgaatgccctcaaaccggataaccgtatagagtcggaaggtgggttcattgagacctggaaccctaacaacaagccattccagtgtgccggtgttgccctctctcgctgcacccttaaccgcaatgcccttcgtagaccttcctacaccaacggtccccaggaaatctacatacaacaaggtaatggtatttttggcatgatattcccgggttg

SEQ ID NO: 58021 - DNA, 244 bp, Glycine max
  Clone ID: 700677094H1
gaaagcgccatggattcttcttcacacatggcttcgcttccggaagatatcatcaccgacgagcatttacaacagcaaactcaacccgcctcagcctctgctttcgcttccgttcctcagcgcccgccaactaagagctcttcagaaaaatatgcacctttagattggtccgtgtattttgacaaagaagacgatgttgcaattcccgaatcgaacgatgcttttcatgtttacacggcaggaa

SEQ ID NO: 58022 - DNA, 258 bp, Glycine max
  Clone ID: 700677096H1
catggccaagctagttttttccctttgttttctgcttttcagtggctgctgcttcgctttcagttccagagagcagcctcagcaaaacgagtgcaagatctataacttcagagagggtgatttgatcgcagtgcctactggtgttgcatggtggatgtacaacaatgaagacactcctgttgttgccgtttctattattgacaccaacagcttggagaaccagctcgaccagatgcctaggagattctatcttgctgg

SEQ ID NO: 58023 - DNA, 104 bp, Glycine max
  Clone ID: 700677101H1
cgaggcttagttgagcctataaataaccccacacacttgtccggcctcctaagactcgctacatcttctttccagatcccgactgactactcacactcactgca

SEQ ID NO: 58024 - DNA, 268 bp, Glycine max
  Clone ID: 700677103H1
tgaaaaggaagatcgagaaaaacccaaaaagattgatgccagattgagacagagaatagatcctcaatacaatgaggttcaggctcagatggaaacagatttgtttaaattgtctacttaatgatgttgaaactcctaaaggttccatgtcggatcttaaaatttctcaatctaaaattgcacttcgcaaaaacacagttggaggaaccatcctgcgtgatgatctattggcaaattgtttgacagagggcaattttagagccagtgt

SEQ ID NO: 58025 - DNA, 279 bp, Glycine max
  Clone ID: 700677104H1
caggaacattttagaggcctcctacgataccaaattcgaggagataaacaaggttctgtttagtagagaggaagggcagcagcaaggggagcagaggctgcaagagagcgtgattgtggaaatctcgaaggaacagattcgggcactgagcaaacgtgccaaatctagttcaaggaaaaccatttcttctgaagataaaccttttaacttgagaagccgcgaccccatctactccaacaagcttggcaagttctttgagatcaccccagagaaaaaccc

SEQ ID NO: 58026 - DNA, 239 bp, Glycine max
  Clone ID: 700677105H1
tggcataatagagaaatcttttttgccctcaaagcattccgttgagatgtcttcagcggtttatacgaattaggttttcactgatcaagcactacctgcagatcttatcaagaagaggagtggcaattaaggatccatctgccccacatggccttcgacttctgatagaggactacccttatactgttaatcggctagagatattggctgcgattaagacatgggtccaagaatatgtg

SEQ ID NO: 58027 - DNA, 209 bp, Glycine max
  Clone ID: 700677106H1
tatagtacgacggcagatacaaattctggactacacacgagaaaaatctggctttgacagaagagggaaagatggaagtgattagagatagaggcattcctactgatcttcttacaaagcgagctcatgaatttcaaaaacatgttgctcatgaaagcgtcaaggagcaaattcgtgctgtcgaaaagttctattctactaaggtgaat

SEQ ID NO: 58028 - DNA, 258 bp, Glycine max
  Clone ID: 700677107H1
gaaggaacaatattcttgtgaccatccacctgcatcatgggattggaggaaaaaaacgtgtcatcacccaagtaaagtaccaagggggctgtggaagcggttgggcgttttctgccacgggagccatagaagcagcacatgcaatagcaacaggagaccttgttagcctttctgaacaagaactcgtagactgtgtggaagaaagcgaaggttgttacaatggatggcactatcaatcgttcgaatgggttttagaac

SEQ ID NO: 58029 - DNA, 263 bp, Glycine max
  Clone ID: 700677108H1
cgacgacaccgacctcgacttcgtcgacgacagcaatgtcagccctgctgaagaggaggaacccataaaatccgacattctcggcggcgagaatttcaatcgccgcagggaatttcgggtggtgctggacccgcgaggcaagtgggttcaagaatggaacagggtgttcctcctcgtgtgctgcaccgggttgttcgtggactcgctgttcttctacgcgctgtcgataagcgacaacgtgtatgtgcctcttcgtggatggg

SEQ ID NO: 58030 - DNA, 277 bp, Glycine max
  Clone ID: 700677110H1
gtcattctcaggtcagacactgatattatggaacttgtaggtgcacatagagaagatttgtcttcagtcatgtcctcaaagagaatgcccacatttaaaacattgagtatcaccacaaaggacacagattcactgagggatttagaacttgagccaaaagtgagaagtaggatgagcatcgtgatatgtcagatcttcagttgagccaaaaggccaacatagatagatattcctaaccccgattttacagtgctagtgcaattgcaagaatggctga

SEQ ID NO: 58031 - DNA, 270 bp, Glycine max
  Clone ID: 700677111H1
aagtagaaggaaatcagtggctttggctctctccaagtacttttcattggatcctagtgttgttccagccgatagttcagacagtgatattaagagtctttacttgaacatcatagcggtttctggacatagggttaatcactctgatgaggtgttgaagtgggtagcatttgcagaagccttccccgtggcccttgatgcatgctttgagaatctcaagagattagatgatgaactgtctggaaaggctgtgcttctgggcaatggatt

SEQ ID NO: 58032 - DNA, 106 bp, Glycine max
  Clone ID: 700677112H1
cgaaaatctcagattaataacactggcgatacccgtgaacaagcctggtagagttgagagtgtctgcctatctaggattgttgagcgtcagtgctagataggaaga

SEQ ID NO: 58033 - DNA, 272 bp, Glycine max
  Clone ID: 700677113H1
aactcctgtgtaatcccatccttaaactcactctgctatttcgcttttctctctctcaacaaaaccttcattgatgttctcatgcttggtgcacccttttggcactgttcaaccattcgattaaagggtaagcgcctttcatccaaagtttgctcctctttgcttatgttgaaaatattggtgtttgtgttgatggaacccaatgggctaggtagtggaatgttctctgggttggtacgagtggaaaaccctttacaacaacagcagcaaca

SEQ ID NO: 58034 - DNA, 258 bp, Glycine max
  Clone ID: 700677114H1
ctcaaacctggggttgaatatgatgagagtgattttactaaaaatcagcgatatttgctggaaacttggtttcatgatcattatgttgtagaccaaacttttgagtcttatgctgatctgctggcacattgttggtactaagtgggagagacatgttaaggagcaagagtcaaatctgtctcaaataaagcgcaagataagtgaaagtggtcattggaataactgtgcacagcttatggatttggctgtctcagggat

SEQ ID NO: 58035 - DNA, 276 bp, Glycine max
  Clone ID: 700677115H1
tccgcatcctgatgatagagttgagtacgagctatggaccaatagcaacgatgagtgtgggccaaagtgtgacagtctaattaattttctgaaggagtttaaaggggtagctcagcagcttgagaagacatggttcactcaatttacccctcgctatataacttggttctgtcctgaagcatttctcttgagcagacagtgcaaatctcattgcataaacaatggactgtactgtgctcctgatcctgcagcaagatttcagtagagggtatgatg

SEQ ID NO: 58036 - DNA, 275 bp, Glycine max
  Clone ID: 700677116H1
cttattaacactttccttagttcaatatggggaagcccttcttcactctctctctttcttccctttgcttgctactcttgtcgagtgcatgctttgctattacctccagcaagttcaacgagtgccaactcaacaacctcaacgcgttggaacccgaccaccgcgttgagtccgaagtggtcttattgaaacatggaactctcaacaccctgagctgcaatgcgccggtgtcactgtttccaaacgcaccctcaaccggaacggcctccacttgc

SEQ ID NO: 58037 - DNA, 99 bp, Glycine max
  Clone ID: 700677117H1
gaaagtctagttcaagttacagtacttctgagtttggtcactttggagtgcgacttcccgttctgcggtgatcacagttggactttcaacttgcatggt

SEQ ID NO: 58038 - DNA, 274 bp, Glycine max
  Clone ID: 700677120H1
tcaatctccgatctataaacccccaaaccctcctccattcccagccatctctctctctctctctaaaaccaagtctcgtttctctctcctcttgctgggcctcttcttcgggcttcccggctcatcgccgactccaacgccacaacctttttctgctttttcgatttagggttttcgcgcgctctcccttccttctcctggatctgctaggagaagcgctgaatgctctgagcttcaacgctgtttgttagacatggcgtcttcgtatcccggt

SEQ ID NO: 58039 - DNA, 265 bp, Glycine max
  Clone ID: 700677122H1
ggtgatcatactagtcaaataaccaaagaacacctagagcccaacttagaagggctcactgtagatgaggcaattcaaaacaagagattgttcctactagatcatcatgacccaatcatgccatatttgaggcgaataaatgcaacctccacaaaggcttatgctaccagaaccatccttttcctgacaaatgacggaactttaaggccacttgccatagcattgagtttgccacatcctcagggagatcattctggggctttta

SEQ ID NO: 58040 - DNA, 269 bp, Glycine max
  Clone ID: 700677123H1
ctaaggagaggaacatagcattgctcttaatatcctaactcctagattcccatctctggcttctcaccttgcataatggctacaaaagtgaaacgcaagactttttcaattgctgcagcaacatggatggtcttgtgtatcatcactatgatctgcaatgtcagtttagcagatagaattttgaaagaaaaagaattaggaaatgatgttccgaaagagagacaaggaattctcaaagccattgtgaattgcttatgggaggaaggaaa

SEQ ID NO: 58041 - DNA, 255 bp, Glycine max
  Clone ID: 700677124H1
tgtcaatctcgtaaatgtgttacgagaactgtatttgcacagtccagaggaagctcgccaattgagaaggaaagctctctctcgtattgaatggctgcaaaaagctgatgtgcctaccatagcacagattgaagagttccattcgaggcagaggatgatgaatgctcctgattcaaatgataatattgatccactgttgagcattgatttgttgggtgtacagggagcaggaaaagcttttccaagcaggattgt

SEQ ID NO: 58042 - DNA, 240 bp, Glycine max
  Clone ID: 700677125H1
gtgaaggttctgagtctcaaagagaaccacgaagacataagaataagaacccttttcacttcaactctaaaaggttccaaactctcttcaaaaaccaatatggccacgttcgcgtcttccagaggttcaacaaacgctcccaacagcttcagaatctccgagactaccgcattttggagttcaactccaaacccaacacccttcttctcgcccaccatgctgacgctgttacctcatcgt

SEQ ID NO: 58043 - DNA, 257 bp, Glycine max
  Clone ID: 700677126H1
tgaccaagttcacaatcctcctcatctctcttctcttctgcatcgcccacacttgcagcgcctccaaatggcagcaccagcaagatagctgccgcaagcagctccagggggtgaacctcacgccctgcgagaagcacatcatggagaagatccaaggccgcggcgatgacgatgatgatgatgacgacgacaatcacattctcaggcacatgcggggaagaatcactacataaggaggacgaaggaaagacgagacg

SEQ ID NO: 58044 - DNA, 272 bp, Glycine max
  Clone ID: 700677127H1
ccattggtccttaaacactcatcagtcatcaccatggccaagctagttttttccctttgttttctgcttttcagtggctgctgcttcgctttcagttccagagagcagcctcagcaaaacgagtgccagatccaaaaactcaatgccctcaaaccggataaccgtatagagtcagaaggagggctcattgagacatggaaccctaacaacaagccattccagtgtgccggtgttgccctctctcgctgcaccctcaaccgcaacgcccttcg

SEQ ID NO: 58045 - DNA, 263 bp, Glycine max
  Clone ID: 700677128H1
tctcgagccgattcggctcgagagtaaaccacaaaaagcataactctttcagaaaaaagacaaagtctcaatcataaacttcaacaaatgacaatgagaatactaatttgtcaagtagaattgttattatgaagcctgggcagataggctttcaaaattttgaaactggaaacaaccttgcctcatcccaagatactcatgattctgtcaaatacaatggttctccagggagaggtagttcacatttttctcttacagagata

SEQ ID NO: 58046 - DNA, 194 bp, Glycine max
  Clone ID: 700677129H1
cgaagacatgagaatgagaacccttttcacttcaactctagaaggttccagactctcttcaaaaaccaatatggccacgttcgcgtcctccagaggggcagcagacgctcccaacagcgtcagaatctccgagactaccgcagtttggagttcaactccaaacccgacacccttcttctgccccagcatgctga

SEQ ID NO: 58047 - DNA, 272 bp, Glycine max
  Clone ID: 700677130H1
gtcccttctttatagaccacaaaatagtctctattcaaaagccatcccaaccccccacaaaccgcatttcatttcaaggcttgaaattgcgtgcagcctaatttcaagaatggccaaagcagcagaacaaagtcctgattctgggaatgtgtacacgctagcttctgtgagagaggatttggttaggcaagaggataccatcatttatggtctcattgagagagccaagttccctagacattctcacacctatgatgaaaagtatgctcaaa

SEQ ID NO: 58048 - DNA, 186 bp, Glycine max
  Clone ID: 700677131H1
gtcattctcaggtcagacactgatattatggaacttgtaggtgcacatagagaagatttgtcttcagtcatgtcctcaaagagaatgcccacatttaaaacattgagtatcaccacaaaggacacagattcactgagggatttagaacttgagccaaaagtgagaagtaggatgagcatcgtgata

SEQ ID NO: 58049 - DNA, 226 bp, Glycine max
  Clone ID: 700677132H1
tggagcaccgccatatccggtcgcgtgtttcctcgttcggggacattgatgattctgcttgttccgccactggctgctgttgtcgtgttacgcttctgggatcaccgcccagtgcctaaaggaacaatcttttggcgctaaattgtggtggggttcctctatttctttctttttttctcccaatatctatagatctggagcaggcatggcttggaccgtgtttagg

SEQ ID NO: 58050 - DNA, 241 bp, Glycine max
  Clone ID: 700677134H1
ggaggggagaccatgaaactgttcttccaaatagtttgtggtcccacttgtacttcaaatcctttaaccacagtggaatggtacttggttttcacttctctatccattgtcctgtctcagcttccaaacctcaattcaactgtaggactctcactcatcggggcagttacagccataacttactcccccatggtttgggtagtctctgtaagccaacaaaggccaccctccatctattatg

SEQ ID NO: 58051 - DNA, 268 bp, Glycine max
  Clone ID: 700677135H1
cgctgatttcgtgctcgataatgaaggtaaccctcttgaaaatggtggcacatattatatcttgtcagacataacagcatttggtggaataagagcagccccaacgggaaatgaaagatgccctctcactgtggtgcaatctcgcaatgagctcgacaaagggattggaacaatcatctcgtccccatatcgaatccgttttatcgccgaagccatcctttgagccttaagttcgattcatttgcagttataatgctgtgtgttggaa

SEQ ID NO: 58052 - DNA, 271 bp, Glycine max
  Clone ID: 700677136H1
tagacacgtaatcaaaaccatgcagatacgaacctgccactccatcaccacccaaacccttccacaacttccgtgttccactagaaaagcccaccaccgccaccttcttccgccgttaaacgctgcggtttccgcggcgccgttcaaagcccggaaggctcactcaatgcctccagaatagaaagaaattttcaagtcctttgagggatgggccccgcatcggtcctacgctgctgaagcccgtggagcaatgctggcagccacaaaactt

SEQ ID NO: 58053 - DNA, 256 bp, Glycine max
  Clone ID: 700677138H1
cagaaaagaaggctttttttttgccaacaccagttgcaaaactaatatcctttcaaacggatttgatctacaatggcctggtttctctcttttcctctatccactctcttttttccgtggctacagagtcctaccaccgtgctgaggagaccaaagacagtgttgaatcagcagtgcaacgtgctccttctcatagcactcatggcagcggactcttgctgaagaaactgggactttgcttcctgagtgttgcgta

SEQ ID NO: 58054 - DNA, 182 bp, Glycine max
  Clone ID: 700677140H1
ctagtataccttaataaataatttaagatactatgatgagagcacggttcccattcatgttgctgggacttgttttcctggcttcagtttctgtctcatttggccttgcttactgggaaaaagagaaccccaaacacaacaagtctctccagagttgcaatagcgagagagactcgtacagg

SEQ ID NO: 58055 - DNA, 265 bp, Glycine max
  Clone ID: 700677142H1
cggaccttgggctgcgtcttcccggagttgctgtcccgcaacggggtgaagttcggagaagccgtgtggttcaaggccgggtcccagatcttcagcgagggtgggctcgactacttgggcaacccaagcctgatccacgcccagagcatcctcgccatctgggccacacaagttatcctaatgggtggcgttgaaggttaccgtattgctggtggcccctcggtgaggtcacctgacccatctacccagtggcagctcggaccat

SEQ ID NO: 58056 - DNA, 270 bp, Glycine max
  Clone ID: 700677144H1
aaattctgcttcaccaacaagtctccttatcatgaaactgttgattttgatgtacatgttggtcacttctcttactttgagcaacatgcaaaagatgagcatttcacccctttgctggagcagattgggaagttggaggaagctctatacaacattcagtttgaacagcattggttagaggctcagactgaccgccaagcaatagtgaacgatgcaatgagcagaagagcagtacacaaggcaatttttgaatcagcagcactgattggg

SEQ ID NO: 58057 - DNA, 270 bp, Glycine max
  Clone ID: 700677145H1
cgaaaagaggattagagggtcgccacgtttagcaataaccaaaccctctctactcttttttcttctccttctcttcgctagggttttagcttcttcctcttcacttcgttctttttcgcctctacaatgagcaacgacaaggacacattcaacgtcgccgatctcacttctgctctcaacgaggacaatagagcagaccttgtcaatgctcttaagagcaagatacagagtttggctggacaacactcggatattctagagtctctgtcg

SEQ ID NO: 58058 - DNA, 263 bp, Glycine max
  Clone ID: 700677146H1
ctgcgaatggctcattaaatcagttatagtttgtttgatggtatctactactcggataaccgtagtaattctagagctaatacgtgcaacaaaccccgacttctggaagggatgcatttattagataaaaggtcaacacaggctctgcctgttgctttgatgattcatgataactcgtcggatcgcacggcctttgtgccggcgacgcatcattcaaatttctgccctatcaactttcgatggtaggatagtggcctaccatg

SEQ ID NO: 58059 - DNA, 240 bp, Glycine max
  Clone ID: 700677147H1
cacattccagatgcccatgtcatcatatctactccatttcaccccgcctatgtcaccgcggaaagaataaagaaagcgcaaaaattggagctgcttttgactgctggcattggttctgatcacgttgatctcaaagctgcagctgctgctggtttaactgtggcagaggtcacgggaagcaatgtcgcctcggttgcggaggatgaactcatgagaatcctcattctaatgaggaatttc

SEQ ID NO: 58060 - DNA, 270 bp, Glycine max
  Clone ID: 700677148H1
gatcagatctcgttccctcgccactcatcctcggccgcgcgtcgctcgccacgcgccaccatcaaccgcacctctcgccgtgaatgatcaataatatattcaatattttattgcaacttggaactagcaatggcatctgaagaagttctgaaggctgttttccctttcctggacggtgttgatcttgcttcttgtatggctgttgataagcagtggaaagacatagctagcgatgatttcctttggaaatgtctgtgtgccaagagatgg

SEQ ID NO: 58061 - DNA, 267 bp, Glycine max
  Clone ID: 700677149H1
cctggtctctgtctactcttcaattattcccaacctctcacctcttcatcttcttcttccttacctttgaccagagacagagcagcactcacattcacaacgaaggtttcctattcatcagacatggtgaaggcaatcagagttcacgaactcggtggccctcaagttctgaagtgggaagatatggagattggagatccaatagaaggcgaggtccgtgtgaggaacagagccattgggggtaatttcattgatgtctactttcgc

SEQ ID NO: 58062 - DNA, 258 bp, Glycine max
  Clone ID: 700677150H1
gccgctcgccatccttgagcaaccaattagtgtctccattgatgcaaaagattttcatttatacaccgggggaatttatgatggagaaaactgtacaagtccgtatggcattaatcactttgttttacttgtgggttatggttcagcggatggtgtagattactggatagcgaagaattcatggggagaagattggggagaagatggttacatttggatccaaagaaacacgggtaatttattatgagtgtgtgggat

SEQ ID NO: 58063 - DNA, 273 bp, Glycine max
  Clone ID: 700677152H1
ggaggttcccaaagccagaaaggaaagcaacaagaagaagaaaacgaaggaagcaacatattgagtggcttcgcccctgaattcttgaaagaagcgttcggcgtgaacatgcagatagtgagaaacctacaaggtgagaacgaagaggaggatagtggagccattgtgacagtgaaaggaggtctaagagtcacagctccagccatgaggaagccacagcaagaagaagatgatgatgatgaggaagagagccacagtgcgtggagacagaca

SEQ ID NO: 58064 - DNA, 244 bp, Glycine max
  Clone ID: 700677153H1
gcagatactgtagataatcgatgagaagaacgcagatccagccgcttcctcttgttcgatcgctacagacgcttgtatcggattattcatgattgattcataagcagcatgtcttcctccggctatagttgttgcagatctcggatgttgtaaaattatggtatgatgtagagacaaggggctggaaaatgttgatgtaggagatttcgggactaaaggcctcaaaacgcttcgtcgtttgtgg

SEQ ID NO: 58065 - DNA, 179 bp, Glycine max
  Clone ID: 700677154H1
tctaaaaccacaaattacaaaatcccctcatattatctctctctctcttaaaccatcatgtcctccaccgcgcctcccgtcctccccatctccaacccccaaaccaccgcgggaaccaccggttcaagcggcggcgccatcgaggctccggccaataacccggccttccgcgctttcat

SEQ ID NO: 58066 - DNA, 241 bp, Glycine max
  Clone ID: 700677156H1
cggacacgtcggcagcaagacctcttgtggttatggagtggccactggaggacctttggcctggggtctttgttacaatcatgaaatgagtcctatgcagtcatactgtgatgactacttcaaactcacatacccctgtactcctggtgctgactactatggacgtggagccattcccattttttggaactacaactatggtgctgtcggagaagctttgaagattgacctactaagccat

SEQ ID NO: 58067 - DNA, 270 bp, Glycine max
  Clone ID: 700677157H1
agcaagcagagcttttgtcaattttctattgaccttctcggtggaggaattttagtggacaaaactggagattggatcacacttatacaaaattctccaattagtaacttgttgagagttgctgcttggaagaaaggttgtttaatggtcaagattgtgatgtctgggaatgcagcagtcaaaaggagtgattgggcctcattggtacaagtgtttttaacaaacagcaccagtacagagcattttgatgcctgtaagtggacaaaatca

SEQ ID NO: 58068 - DNA, 233 bp, Glycine max
  Clone ID: 700677158H1
cggctcgagccagttgcttttgatgatctggatcttgctcttggcattctgtgttatgatgaacactatgactgcaggttttattgcaatgtatgccactcttgctagcagctacgtggactgctgcttgattccagagtggcgctgctacattggaggaaagggtgtacttattccattgatccacatactgctcaaatgcactgcctatatggtcatagtcatagcttagg

SEQ ID NO: 58069 - DNA, 269 bp, Glycine max
  Clone ID: 700677159H1
gttcaatatcctagtataccttaataaataatttaagatactatgatgagagcacggttcccattactgttgctgggacttgttttcctggcttcagtgtctgtctcatttggcattgcttactgggcaaaagagaaccccaaacacaacaagtgtctccagagttgcaatagcgagagagactcgtacaggaaccaagcatgccacgctcgttgcaacctccttaaggtggagaaagaagaatgtgaagaaggtgaaattccacgacc

SEQ ID NO: 58070 - DNA, 266 bp, Glycine max
  Clone ID: 700677160H1
ctcgagccgctagggaatgggaggagtttttgattggtaatgttgctgtcagcatatcacaacttgcaggtgttgctcgacgcccaaagtagaaagcccaacagatatgaagtgtcccaatacagatatcgcaatgtgccaatagagcgcagagcatgggttgaaggccagatgtctttcgatcagtctgtagtagcaattatgtctagatgcaaagccagcatgagaatcgtgaacactgatgctcaaattttgaaggttccagg

SEQ ID NO: 58071 - DNA, 269 bp, Glycine max
  Clone ID: 700677163H1
cttaattattaacacttccttagttcaatatggggaagcccttcactctctctctttcttccctttgcttgctactcgtgtcgagtgcatgctttgctattagctccagcaagctcaacgagtgccaactcaacaacctcaacgcgttggaacccgaccaccgcgttgagtccgaaggtggtttgattgcagcatggaactctcaacaccctgagctgaaatgcgccggtgtcactgtttccagactcaccctcagccgcaatggcctc

SEQ ID NO: 58072 - DNA, 93 bp, Glycine max
  Clone ID: 700677164H1
ctttgacacagggtctagcaaaggaaacaacaatgggaggtagacgtcgtgtggccaaagtggaagttcaagggaagaagcctctctcaaggg

SEQ ID NO: 58073 - DNA, 91 bp, Glycine max
  Clone ID: 700677165H1
cttgatgatgttgaaactcctaaaggttccatgttggatcttaaaatttctcaatctaaaattgcacttcccaaaaacacagttggaggaa

SEQ ID NO: 58074 - DNA, 269 bp, Glycine max
  Clone ID: 700677166H1
tttggtcgattttcttcaagtgtgaaaggctttcggaatatagacttgtttgtccagcacaacgatgggaaaaagatcatagatcctgaaagccagaaaaccttgtgttcatgcttaaaagaagagatgcttcatccgttgcgggtgacgatagtgaaccggggtccagacacagaacttctgggttgctaatcctgtggagctgagtggacaggggagaccccgtgtattctatgatgttacgtggactttaaaagcgttgggagtag

SEQ ID NO: 58075 - DNA, 98 bp, Glycine max
  Clone ID: 700677168H1
ggcttccttaagctcctcattagtgctgctccttgcagctctaattctatcccctcaagttcatgctgactatgagaagcccccaatttacaagccac

SEQ ID NO: 58076 - DNA, 92 bp, Glycine max
  Clone ID: 700677170H1
atatcctagtataccttaatagataatttaagatactatgatgagagcacggttcccattactgttgctgcgacgtggttgcctggcttcag

SEQ ID NO: 58077 - DNA, 72 bp, Glycine max
  Clone ID: 700677171H1
gacatctcgtcagacatctggctcagaaagtgcgagtcgaaatcgttacatctggagagagtaactggcatg

SEQ ID NO: 58078 - DNA, 93 bp, Glycine max
  Clone ID: 700677173H1
tacaaggtgagaacgaagaggaggatagtggagccattgtgacagtgaaaggaggtctaagcttcacagctccagccatgaggaagccacatc

SEQ ID NO: 58079 - DNA, 256 bp, Glycine max
  Clone ID: 700677174H1
caaataggttttatttttcaattatcccagctccacattcaggtctatagcacacattgcaccaattgtctgtgttcatataatctttttgtggccatccctttgatcttgaataaaccatggccaaccttgagaattttagcaacccatacacgcaccttgcttttgaataacttcgaaagaatctgcaactccattatgcacatgtccattcacatctccaattttcgtagtttgttgtgcttatctatgcttc

SEQ ID NO: 58080 - DNA, 232 bp, Glycine max
  Clone ID: 700677175H1
gatcttgagaaaagtgttcctacattggttggcattgaatgtcccaagggtgagaaacttcctcgtcggaaaatttttgacaaacctaagacgcagtggttgactattctccctatgtggtttgatcttgtggttcgtcgaagattttacattttgtgaggttcagtatgaggatagggggctagcttaactgtcacggtgggatcaccccgtactccatggaattgactgg

SEQ ID NO: 58081 - DNA, 228 bp, Glycine max
  Clone ID: 700677176H1
tatcctgtgacggaattggcaccttatcatactaggctcttgtctaaggcgcttttccacaaataaattgtggcggtaatttctactttcttcagtctgtcaatgttaccgtctgttgctaatcatggaccttgacgagttaccttacatcggtctaaaaataggcttaatatgccattacgtcggtataagtatgtcaattttttgtgagcccttgttaaatttttg

SEQ ID NO: 58082 - DNA, 253 bp, Glycine max
  Clone ID: 700677178H1
gtgatgaggatacctggtggaaggccaatgttagagagacaaaggaagaacttgcagctagggggatgaagttccttaactggtatgagtttgttataattagaaacttctaaaggtttattttatgagtttatgccagcaatactacatattggaaacacactaaaattggactttgatgtgtagcaagttaatataattctactatgtaaggctcttcgctataggatgataaattaacccttttttaaaa

SEQ ID NO: 58083 - DNA, 91 bp, Glycine max
  Clone ID: 700677179H1
aaaagaagcaaggatctgcacatgcatatgcatgttcctgccggagactccattatttatagccgggaaaagcagaagaaaacgccggaaa

SEQ ID NO: 58084 - DNA, 244 bp, Glycine max
  Clone ID: 700677180H1
cggctcgagtctccattgtctttgaacactcatcaccatggccaagcttgttctttccctttgattccttcttttcagtggctgcttcgctctgagagagcaggcacagcaaaatgagtgccagatccaaaagctgaatgccctcaaaccggataaccgtatagagtcggaaggtgggttcattgagacctggaaccctaacaacaagccattccagtgtgccggtgtggccctctctcgctgc

SEQ ID NO: 58085 - DNA, 197 bp, Glycine max
  Clone ID: 700677181H1
cgcgttggaacccggccaccgcgttgagtccgaaggtggtttgattcaaacatggaactctcaacaccctgagctgaaatgcgccggtgtcactgtttccaaactcaccctcaaccgcaatggcctccacttgccatcttactcaccttatccccggatgatcatcatctcccaagggaaaggagcacttggagttg

SEQ ID NO: 58086 - DNA, 91 bp, Glycine max
  Clone ID: 700677183H1
aaatttgattttattggcacaattgggactccagcttttcatcgacaaattgctgcacacttggagacaatgccattatggcaaaaagcaa

SEQ ID NO: 58087 - DNA, 255 bp, Glycine max
  Clone ID: 700677184H1
cttggaggatttggtcttggctgctcaggaaggtgtgtttgtcaacattgatagtgagtttgacttggaaaacattgtagaggctgcaaaaagggctgggaagaaggtcaatgttttacttcggattaatcctgatgtggatccacaggttcatccttatgttgccactgggaataagaactctacatttggcattagaaatgagaagctgcagtgctttttagatgcagtgaaggaacatcctaatgagctcaa

SEQ ID NO: 58088 - DNA, 267 bp, Glycine max
  unsure (1)..(267): unsure at all n locations
  Clone ID: 700677185H1
tgaggaaggagctcataacgcacacgaataacatcatcacgaggatgataatggggaagaagagtaatgcggaaaacgatgaggtggccaggttgaggaaggtggtgagggaggtcggggagttgcttggggcgtttaacttgggggatgttattgggttcatgaggcctttggatctgcaagggtttgggaagaagaacatgganactcaccacaaggtggatgcgatgatggagaaggtgttgagggagcatgaggaggctaggg

SEQ ID NO: 58089 - DNA, 181 bp, Glycine max
  Clone ID: 700677186H1
tttagatgtgtccttgccttctattcatgatattagatggagcttagcacggttgttatacttatttaacatgcagcttgatagaaatgttgccatgtaagttaatcacttcatcatttatttggctgagaacttttctatccactggttgtttaataaacttgaagcacctcacttgacg

SEQ ID NO: 58090 - DNA, 243 bp, Glycine max
  Clone ID: 700677187H1
cgtaaacaaaaagttaatacagtctcttgaccaattatgtcccattatgacattatcaaaaagtatctgctgatacttgatacaacctgataatgaagttatatttcttagtctaaaatattgtttagtacaatggaaggcagacattttaatggaataaaaaatcaagttcattattataggcttaggatgatcaaatacaactaaaaaaatagtcaaaattaatataaaactttattttct

SEQ ID NO: 58091 - DNA, 89 bp, Glycine max
  Clone ID: 700677188H1
ccaagccccactcaaccaccacacgagtctctctgctcttcttctacctttcaagttgttaaagtattaagatggcagagacattccta

SEQ ID NO: 58092 - DNA, 266 bp, Glycine max
  Clone ID: 700677189H1
gtctttgaacactcatcaccatggccaagcttgttctttccctttgtttccttcttttcagtggctgcttcgctctgagagagcaggcacagcaaaatgagtgccagatccaaaagctgaatgccctcaaaccggataaccgtatagagtcggaaggtgggttcattgagacctggaaccctaacaacaagccattccagtgtgccggtgttgccctctctcgctgcacccttaaccgcaatgcccttcgtagaccttcctacacc

SEQ ID NO: 58093 - DNA, 267 bp, Glycine max
  Clone ID: 700677190H1
aattgattggtttatttcctctcaggaatgtgttcccaggacctattgtgttttaaatccacaaaatccttttgtgttaaataggtggatggggaaactgacttttccccagggcacttcccgaagtgttaaaagaatgcctctttctatagggggaggagctggtgcaaagaatgctattctcatgaatatgccaaatgctgttctttcaatgtggagatattttgttggagatctcgtctttgaagtttctaagatgacttctcc

SEQ ID NO: 58094 - DNA, 267 bp, Glycine max
  Clone ID: 700677192H1
agacaaaagataagaagatgggtttgaagaacaacatggtggtgctaaaggtgtgtttggtgctacttttccttgtggggggtactactagtgccaacttgaggctgagtaagcttggcctgctcatgacaagtgatcatcatcaacactcaaatgatgatgagtcttcaaaaccatgctgtgatcaatgcgcatgcacaaagtcaaaccctcctcaatgccgctgttcagatatgaggctgaattcgtgccattcagcttgcaaat

SEQ ID NO: 58095 - DNA, 268 bp, Glycine max
  Clone ID: 700677195H1
cgaaaatctcagattaataacactcgccatacccgttaacaagcctggtagatttgagagtttcttcctatctagcactgaagctcaacaatcctacttgcaaggattcagcaggaacattttagaggcctcctacgataccaaattcgaggagataaacaaggttctgtttagtagagaggaagggcagcagcaaggggagcagaggctgcaagagagcgtgattgtggaaatctcgaaggaacagattcgggcactgagcaaacgt

SEQ ID NO: 58096 - DNA, 90 bp, Glycine max
  Clone ID: 700677196H1
ctccattgtctttgaacactcatcaccatggccaagcttgttctttccctttgtttccttcttttcagtggctgcttcgctctgagagag

SEQ ID NO: 58097 - DNA, 279 bp, Glycine max
  Clone ID: 700677201H1
ctcatattcattgcatttttggatggactattcgttgagagagctagaaggaaagcaagcacatgactctctattcctagagaaaatgaagagtttcattatcacagacgtattactaactagtgagagaatgtgtgtgggtggccagggccattggatttggggagaagggctttcagggccttgcaacagcagcatatctcaaagagaaaggattgccaagcctaatcttggaaagatccaactgcatagcatccttgtggcaactcaagacctatg

SEQ ID NO: 58098 - DNA, 107 bp, Glycine max
  Clone ID: 700677202H1
cccattttatttttccaaaaagatcacaactttgcttcaatctagaagactcctctttgtcccgtcctgtttcatggggatctcctggaatcggggaatcatagaca

SEQ ID NO: 58099 - DNA, 111 bp, Glycine max
  Clone ID: 700677203H1
tgcagattatgttcacggcaagggtcttaagcttggaatttattcagatgctgggtatctcacttgtagcaaacagatgcctggttcctcttggtcatgagtttcaagatg

SEQ ID NO: 58100 - DNA, 73 bp, Glycine max
  Clone ID: 700677205H1
tctctccattgtctgtgaacactcatcaccatggccaagcttggtctttcccgttgtttgcttctgttcagtg

SEQ ID NO: 58101 - DNA, 104 bp, Glycine max
  Clone ID: 700677206H1
ggtcgagttccgctcgagctagcctagcccaagcatcttcttcggctcgagcagatcgtgccctaattcggttattccccaatggcatcgggctagtcagttga

SEQ ID NO: 58102 - DNA, 91 bp, Glycine max
  Clone ID: 700677207H1
ctcgagccgctcgagccgcacggagcgagcatcaacaaagaccccatgaagaggaagtacaagatgaacatgagaagccacagtgcaaggg

SEQ ID NO: 58103 - DNA, 104 bp, Glycine max
  Clone ID: 700677208H1
aaaggtttcttcctgagaaaggcaccccaggagtatgaagaaatggtgaaaagtcatcgaaaggcttatttgaggaactattgacatcaaagtttcaaactcta

SEQ ID NO: 58104 - DNA, 259 bp, Glycine max
  Clone ID: 700677211H1
gtctttgaacactcatcaccatggccaagcttgttctttccccttgtttccttcttttcagtggctgcttcgctctgagagagcaggcacagcaaaatgcgtgccagatccaaaagctgaatgccctcaaaccggataaccgtatagagtcggacggtgggttcattgagacctggaaccctaacaacaagcaattccagtgtgccggtgttgccctctctcgctgcacccttaaccgcaatgcccttcgtagaccttc

SEQ ID NO: 58105 - DNA, 257 bp, Glycine max
  Clone ID: 700677213H1
taaacactcatcagtcatcaccatggccaagctagttttttccctttgttttctgcttttcagtggctgctagttcgctttcagttccagagagcagcctcagcacaacgagtgccagatccaaaaactcaatgccctcaaaccggataaccgtatagagtcagaaggagggctcattgagacatggaacctaacaacaagccattccagtgtgccggtgttgccctctctcgctgaaccttcaacgcaacgccttc

SEQ ID NO: 58106 - DNA, 77 bp, Glycine max
  Clone ID: 700677214H1
gagaaatataactttcgttcttccgatatttccatgatgaaaacgtttggagaccagaactgaagatcattctaggg

SEQ ID NO: 58107 - DNA, 263 bp, Glycine max
  Clone ID: 700677215H1
gaagcagcagctacaggacagtcaccagaagattcgtcacttcaatgaaggagacgtactcgtgattcctcctggtgttccttactggacctataacactggcgatgaaccagttgttgccatcagtcttcttgacacctctaacttcaataaccagcttgatcaaacccctatggtattttaccttgctgggaacccagatatagagtacccagagaccatgcaccaacaacaacagcagaaaagtcatggtggacgcaagc

SEQ ID NO: 58108 - DNA, 268 bp, Glycine max
  Clone ID: 700677216H1
cgccattctaccacacgacgagcctgctcatcgttctgtctctcacgcgccgcttggctctcagccccggcctgcagggttttgcataatctagctcttttttctccgtccaaaatgggtaaagctaaaataggaccaaagtttgctgttatgaagaagattgttacttccaaagcaatcaaaagctacaaagaagaggttttgaacccagaaaagaagaatcttatgaaggaaaagttacccagaaatgttccagctcattcttcag

SEQ ID NO: 58109 - DNA, 79 bp, Glycine max
  Clone ID: 700677217H1
cgcgcaacattattcgagtacgtagcttaacaatattttaagcaattgctgctacaatgatagcgcggtttcctttgtt

SEQ ID NO: 58110 - DNA, 261 bp, Glycine max
  Clone ID: 700677218H1
caaaaatatgccactcccatgatgcccctagatgaagaaattctttccaaggttgcgcaagatatggttgaggaatggtttgattgtgttgatgaggaggattcctttgaggaagtttctttaagtgcagaactcaatggtgttgagggtttggactacatggaaagaattcctcttgcaacatctgagggttttcctcaggtgctttcacgcaaaaatggtgaaaaaggtaagaggagattcgtatctggggatggtgaa

SEQ ID NO: 58111 - DNA, 260 bp, Glycine max
  Clone ID: 700677219H1
cggctcgagtggggaagcccttcactctctctctttcttccctttgcttgctactcttgtcgagtgcatgctttgctattagctccagcaagctcaacgagtgccaactcaacaacctcaaggcgttggaaacccgccaaccgcgttgagtccgaaggtggtttgattcaaacatggaactctcaacaccctgagttgaaatgcgccggggtcactgtttccaaactcaccctcaaccgcaatggcctccacttgccatc

SEQ ID NO: 58112 - DNA, 262 bp, Glycine max
  Clone ID: 700677220H1
cagatagcgaaaaacctacaaggagagaacgaaggggaagacaatggagccattgtgacagtgaaaggaggtctgagcgtggtaaaaccacccacggacgagcagcaacaaagaccccaggaagaggaagaagaagaagaggatgagaagccacagtgcaagggtaaagacaaacactgccaacgcccccgaggaagccaaagcaaaagcagaagaaatggcattgacgagaccatatgcaccatgagacttcgccacaaca

SEQ ID NO: 58113 - DNA, 248 bp, Glycine max
  Clone ID: 700677221H1
gcaaaggattctacccgccgctcgatgggaattgcgcttcaaggcgtctcgtagggctaatccgcctcacgagggtcaccaacggcacgtgcctttggtgggccgaggcccctactgctggtcggcaaacggacggcgggctgacgcgtcgcttctagcccggattctgacttagaggcgttcagtcataatccaacgcacggtagcttcgcgccactggcctttcaaccaagcgcgatgaccaattg

SEQ ID NO: 58114 - DNA, 105 bp, Glycine max
  Clone ID: 700677222H1
ctcgagccgatgaggatgaggatgaggaacaagatgaacgtcaattcccattcccacgaccacctcatcatgaggaatagcgaaagcaagaggaagatgaggatg

SEQ ID NO: 58115 - DNA, 121 bp, Glycine max
  Clone ID: 700677223H1
tcagccttgtgtgaaagctaatggcaatcaaatatcataattgcccatatatgttgtcctttgtgaccgaggccatgctggggtactgtaagataaaatgacggaaaaccagattttacaa

SEQ ID NO: 58116 - DNA, 257 bp, Glycine max
  Clone ID: 700677224H1
tgattaggtgagtcatcactccgattctcttcacacctaagatccattctttcttaattctcacctccctcactcgttcattcgaacaaaaccctttttagtttttttcctcctctgtttctctctctgctctgcattttggtggcatcatcagagatagagacttgagtgtgagagccacaacttctccaattcttcaaaagggtgtaactttgaaggataagaaatggttggtgctataaaagcagcgattggag

SEQ ID NO: 58117 - DNA, 256 bp, Glycine max
  Clone ID: 700677225H1
ctagttcaatatcctagtataccttaataaataatttaagatactatgatgagagcacggttcccattactgttgctgggacttgttttcctggcttcagtttctgtctcatttggcattgcttactgggaaaaagagaaccccaaacacaacaagtgtctccagagttgcaatagcgagagagactcgtacaggaaccaagcatggccacgctcgttgcaacctccttaaggtggagaaagaagaatgtgaagaa

SEQ ID NO: 58118 - DNA, 255 bp, Glycine max
  Clone ID: 700677226H1
gaactaatggagtctaaaggtgggaaaaagaagtctagtagtagtagtagtaaatcattgttctacgaagctcccctcggatacagcattgaagacgttagaccaaacggtggaatcaagaaattcagatctgctgcttactccaactgcgctcgcaaaccttcctggatatccatccagattgatagttcattacatgcaaccatagttttattaggttttttctactttggtttcaattaggtttttgctgct

SEQ ID NO: 58119 - DNA, 99 bp, Glycine max
  Clone ID: 700677227H1
agtaattaacctcactcaaactcgggatcacagaaaccaacaacagttcttgcactgaggtttcacgatgttgctggaacttgcacttggtttgtttgt

SEQ ID NO: 58120 - DNA, 257 bp, Glycine max
  Clone ID: 700677229H1
gcttcgctctgagagagcaggcacagcaaaatgagtgccagatccaaaagctgaatgccctcaaaccggataaccgtatagagtcggaaggtgggttcattgagacctggaaccctaacaacaagccattccagtgtgccggtgttgccctctctcgctggacccttaaccggaatgcccttcgtagaccttcctacaccaacggtcccatggaaatctacatacaacaaggtaatggtatttttggcatgatattc

SEQ ID NO: 58121 - DNA, 172 bp, Glycine max
  Clone ID: 700677230H1
agagacttcgatgatgatgaaatggacgaccttcctcctagtaaaatgtaactagcgcccatgatgatgaatgctcctcccaatggtgccagtaatggcggtgatgggaagacaggaggaggacccgttcctgttcctgttcaggtgcatggaatccccggcaatggaggag

SEQ ID NO: 58122 - DNA, 255 bp, Glycine max
  Clone ID: 700677231H1
tgatgaccttgagtttgaaaatatgccgtggaatggatcagatttggcatcggacgatacacagaagttccacaagccgaggcatagaatgcatagaacattgggatcatctcacaagaccatgagtaggtcattctctggcgattcacagtcaaagggctccgtttctatgcctcatgggtccacgaggtagacttgagcaaacttgaaatggctgcattgtggagatattggcgacattttaatctagtggat

SEQ ID NO: 58123 - DNA, 91 bp, Glycine max
  Clone ID: 700677232H1
ctcgagccgaaaatttatggaattttagaacaggattttaaacagctggaaatctgcaaactcaatttccttctgaaagatgagaaattag

SEQ ID NO: 58124 - DNA, 267 bp, Glycine max
  Clone ID: 700677233H1
aaacaacttttcacacatgaccatgctacctcattcattaactatgattgcaacactaataatcatttttcttgcacaaacacttgtgggggtgagttcacttcctgaagctgataaaataaccaatttgccggggaagccacgggtcgaatttcagcaatattctggtaatgtcaccgtggatgatcaaaatcaaagagctttgttttactaactttgttgaggctgaagaaaacccttcttccaagccattagtcctatggttga

SEQ ID NO: 58125 - DNA, 264 bp, Glycine max
  Clone ID: 700677235H1
cttgcgaaaccgagagagcgaaggggcaaacacaattttttttactcttcttttttattttttgtagagagagagagagagaaaatgttggggatcttcagcagttcagtggtgtcgccgccggaggagctggtggtcgctggcagcagaacgccgtcgccgaagacgacggcgggggaagctgctgaaccggttcgtggagagcaaggcgtcggcggtgtcgctgcaggtgggggaacacgtgcagttggcttacacacacca

SEQ ID NO: 58126 - DNA, 58 bp, Glycine max
  Clone ID: 700677236H1
tacttttaagatatcagaactatataaaatctatgactagtgcgtaaataatgcaggg

SEQ ID NO: 58127 - DNA, 222 bp, Glycine max
  Clone ID: 700677237H1
tacttttaagatatcagaactatataaaatctatgactagtgcgtaaataatgcagggaaattgtcggtttcactcatgtcttggagaactatactgctttacacacaccctctccctgaattatttacgcactagtcatagattttatatagttgtccaagacataagtggtgccgaccatttccccggctttgataactttttttctctatatatatacc

SEQ ID NO: 58128 - DNA, 252 bp, Glycine max
  Clone ID: 700677238H1
ctcgagcgtgaagcagaaaaaagtgacattgctactgaatttagggatgatgagcaaaaattgtctttcattgatgaagattagatagagaagcatgatgaacttcttgcccttccagctcatggttctgaagtctttattggtggatatcctcgggatgtatgtgaagatgatttaagggaattgtgcgagcccatgggtgatattcttgaggtgcgattaatgaaagacagggacactggagaaaacaag

SEQ ID NO: 58129 - DNA, 101 bp, Glycine max
  Clone ID: 700677239H1
ccgctacaactactgaacaatacgaaaccgacattctacaatgtcaatttgtgtgtgctacttgacttcaatttctctcttcgaaaccccagttctccttc

SEQ ID NO: 58130 - DNA, 248 bp, Glycine max
  Clone ID: 700677240H1
gttcaatatcctagtacaccgtattaaagaatttaagatatactatgatgagagcgcggttcccattactgttgctgtcagttgttttcctggcatcagtttctgtctcatttggcattgcgtattgggacaagcagaaccccagtcacaacaagtggcctccgaagttgcaatagcgagaaagactcctacaggaaccaagcatgccacgctcgttgcaacctccttaaggtggaggaagaagaaga

SEQ ID NO: 58131 - DNA, 248 bp, Glycine max
  Clone ID: 700677241H1
atttgatcgcagtgcctactggtgttgcatggtgcatgtacaacaatgaatacactcctgttgtacccgtttctattatggacaccaacagcttgcagaaccagctcgaccagatgcctaggagactctatcttggtgggaaccaatagcaatagtttctataatatcagcacgagcaatgaggtcatcaaagccagacaggaaagcatcagctagaagaagacaacgaaggaggcagcatattgagt

SEQ ID NO: 58132 - DNA, 254 bp, Glycine max
  Clone ID: 700677242H1
tggccacgttcgcgtcctccagaggttcaacaaacgctcccaacagcatcagaatctccgagactaccgcattttggagttcaactccaaacccaacacccttcttctcccccaccatgctgacgctgattacctcatcgttatccttaacgggactgccattcttaccttggtgaacaacgacgaccgagactcttacaaccttcaatctggcgatgccctaagagtccctgcaggaaccacatactatgtgg

SEQ ID NO: 58133 - DNA, 254 bp, Glycine max
  Clone ID: 700677243H1
tgaacttaacttgtgctcagagattgttaaagcttgtgattctgcttcagcagattctggcaaagtgacatttatctgtgggcgtgctggtgtttgtgctcttggtgctgtgatagctaagcatactggtgatgaaagattacttgactattacctgaggcaattcaaagagattgcgatacctcgcgagtctccctatgagctattgtatggcagagcaggttacttatgggcttgttcattcttaaacaagc

SEQ ID NO: 58134 - DNA, 89 bp, Glycine max
  Clone ID: 700677244H1
attctacaaagctgaattgtcagcacattacttgctggtaccaccgttagatcatttactggtagatcaattgttagccaatcaggaag

SEQ ID NO: 58135 - DNA, 256 bp, Glycine max
  Clone ID: 700677245H1
ttttcctccctttcactctcgtagacatcacaaaccttccctccattcatcccacgcatggctgccatgaactctagcgtattggcctgtagctatgccatatcatgtgcagcgtgttcggagctcaatgggaaggtcacttccgtggcctatgttgcatgctctggctacaagttgccattgatcaaagctgaggccagagttcctaaagccatagaatctgaaggacgaatgagaggtgcccttgttctcttgg

SEQ ID NO: 58136 - DNA, 97 bp, Glycine max
  Clone ID: 700677246H1
gtcatatagtcatgacatattcaatttgaaattatattgttcttgatcttattgcccattatcaaagtgcttatgtgcaggccttacacaatattag

SEQ ID NO: 58137 - DNA, 103 bp, Glycine max
  Clone ID: 700677247H1
tgaacgatgaaatgaaatggagttcccagacacgcgtttgtctctgagatcgagcttgacgttcggagagacgctgtgctcggtgtttcattccgctcatagg

SEQ ID NO: 58138 - DNA, 252 bp, Glycine max
  Clone ID: 700677248H1
actagttcaatatcctagtataccttaataaataatttaagatactatgatgagagcacggttcccattactgttgctgggacttgtattcctggcttcagtttctgtctcatttggcattgcttactggggaaaatcagaaccccaaacacaacaagtgtctccagagttgcattagcgagagagactcgtacaaggaacaagcatgccacgctcgttggaaacctccttaatgtggagaagaagaatgtg

SEQ ID NO: 58139 - DNA, 264 bp, Glycine max
  Clone ID: 700677249H1
gtccttaaacactcatcagtcatcaccatggccaagctagttttttccctgtgttttctgcttttcaatggctgctgcttcgcttcagttccagagagcagcctcagcaaaacgagtgccagatccaaaaactcaatgccctcaaaccggataaccgtatagagtcagaaggagggctcattgagacatggaaccctaacagcaagccattccaatgtgccggtgttgccttctctggctgaacctgaaaccgcaacgcccttg

SEQ ID NO: 58140 - DNA, 258 bp, Glycine max
  Clone ID: 700677250H1
gaactaatggagtctaaaggtgggaaaaagaagtctagtagtagtagtagtaaatcattgttctacgaagctcccctcggatacagcattgaagacgttagaccaaacggtggaatcaagaaattcagatctgctgcttactccaactgcgctcgcaaaccttcctgatatccatccagattgatagttcattgcatgcaaccatagttttattaggtttttacttctttgttttcaattaggtttttgctgctctcc

SEQ ID NO: 58141 - DNA, 252 bp, Glycine max
  Clone ID: 700677251H1
gcaaccttaattcatgtaccgatttggaaggattccctcgtttgtgttggtgttaaaaggcagaatcagtggtgaagtagtagctgcttgcccctggggagacatctgttgtaccttcagaagattcattcccatcagaagttgaccatagttctcagaaaaccccatgttcaaaggatgcatcagattaaaccttgggtaaaggtgtcacaggtttctcattagatgcttctgatctagccaacttcctca

SEQ ID NO: 58142 - DNA, 85 bp, Glycine max
  Clone ID: 700677252H1
tcggggcgaacaggaggaaactctggtggaggcccgcagcgatactgacgtgcaaatcgttcgtctgacttgggtataagggcga

SEQ ID NO: 58143 - DNA, 256 bp, Glycine max
  Clone ID: 700677253H1
cgccaacgtgccggggcaaaaggaaaccaaagttaaggtccctctggctttgtttggaggttcaggaaactatgcctctgctttgtatattgcatctgtgaaagccaatgcagtggaaaaggttgagactgagcttctgcaatttgttgaggcagtaaagaatagtcccatattttcacagtttataagggacttgtctgtggctaaggatgttagagtgaaagttatccaggatatttgtggggaagccaagttt

SEQ ID NO: 58144 - DNA, 256 bp, Glycine max
  Clone ID: 700677254H1
cgcttgtgctgccttcgtttgcgtttttatcacagaggaattaacatatatatagcaagcatggcagtcacactctacgaccttagctcttcctctgggttgaagaaacttgatgagtaccttctcccacgcagttacatcaccgggtaccaagctacaaaggatgatcttactgtttatggcagctttgccaactgctccatcagatgaatatggaaatgtttccaggtggtacaagcacattgatgctttgttg

SEQ ID NO: 58145 - DNA, 254 bp, Glycine max
  Clone ID: 700677255H1
caagaataacttgaactatatcagggacatgaatgcaaacagaaaatcaccccattctcatcgtttaggattgaacaagtttgctgacatcactcctcaagagttcagcaaaaagtacttgcaagctcccaaggatgtgtcgcagcaaatcaaaatggccaacaagagaatgaagaaggaacaatattcttgtgaccatccacctgcatcatgggattggaggaaaaaaggtgtcatcacccaagtaaagtacc

SEQ ID NO: 58146 - DNA, 251 bp, Glycine max
  Clone ID: 700677257H1
gaccaaacagcatccgcggcagcgacggtaaccctccaacaacaacacttccgctgcgaaaaatgtctctggtggcgaacgaggatttccagcacattctgcgtgtgctgaacaccaacgtggatgggaagcagaagataatgttcgcaatgacctccatcaagggtattggaaggagattcgccaacatcgcttgcaagaaggctgatgttgacatgaacaaaagggctggtgagttgactgctgctgag

SEQ ID NO: 58147 - DNA, 99 bp, Glycine max
  Clone ID: 700677258H1
ctcgagccgttttgtttctttcaactactctgaagggttgtcgattgtgatattctttacgaggaagatcggaaccagaagtcaaagcatgcgaagcaa

SEQ ID NO: 58148 - DNA, 78 bp, Glycine max
  Clone ID: 700677260H1
atcacgtgaaagagcttcgcgaacgcgctaaagagttacctgatgagtactttgtgagtgttcgtaagtgatatggtc

SEQ ID NO: 58149 - DNA, 259 bp, Glycine max
  Clone ID: 700677263H1
aattcttggcagagattctatcttgctgggaaccaagagcaagagtttctaaaatatcagcagcagcagcaaggaggttcccaaagccagaaaggaaagcaacaagaagaagaaaacgaaggaagcaacatattgagtggcttcgcccctgaattcttgaaagaagcgttcggcgtgaacatgcagatagtgagaaacctacaaggtgagaacgaagaggaggatagtggagccattgtgacagtgacaggaggtctaa

SEQ ID NO: 58150 - DNA, 262 bp, Glycine max
  Clone ID: 700677264H1
cagcaacaaagaccccaggaagaggaagaagaagaagaggatgagaagccacagtgcaagggtaaagacaaacactgccaacgcccccgaggaagccacagcaaaagcagaagaaatggcattgacgagaccatatgcaccatgagacttcgccacaacattggccagacttcatcacctgacatctacaaccctcaagccggtagcgtcacaaccgccaccagccttgacttcccagccctctcgtggctcagactcagtg

SEQ ID NO: 58151 - DNA, 54 bp, Glycine max
  Clone ID: 700677266H1
cctggtgttggcttgacatcaagttacactccaactccatctgtaggaatctgg

SEQ ID NO: 58152 - DNA, 257 bp, Glycine max
  Clone ID: 700677267H1
agccacagttggtattcctgagaatacaggtatagcattggcctgtgctatgaatagttcctttagggggcgtgccaattctgatatttacaccatctgctctcaagactgtgaattatggaatcctgcttgcacaaaagcaatgactatgtcatttaatccaaacccgtgttctgatgcatggagtttggaatttctgaagcgtaccggatttcattgtgatatcatttgtgtcactggatggactgccactccaa

SEQ ID NO: 58153 - DNA, 264 bp, Glycine max
  Clone ID: 700677268H1
cagaccataaatacagcaaaaagagtgatgatataatccaaagtggacatgttagtgatcctgggattggcaaggctgacttttggcgtatctcctaagctcaagcattcctgctctgacctggaaagaaaggatgtactaaggaagacttctcatctctttccgtcttcaaagtcacagtcttttgaagaatgtgcaggggttatcagcatatcagatggttaatctagaaagccccaggtcagtgaatgatcacggcagtgc

SEQ ID NO: 58154 - DNA, 252 bp, Glycine max
  Clone ID: 700676679H1
gaagattcgtcacttcaatgaaggagacgtactagtgattcctcctggtgttccttactggacctataacactggcgatgaaccagttgttgccatcagtcttcttgacacctccaacttcaacaatcagcttgatcaaaaccccagagtattttaccttgctgggaacccagatatagagcacccagagaccatgcaacaaggccagcagcagaagagtcatggtggacgcaacaggggcaacaccagcag

SEQ ID NO: 58155 - DNA, 255 bp, Glycine max
  Clone ID: 700676680H1
acttattaacactttccttagttcaatatggggaagcccttcttcactctctctctttcttccctttgcttgctactcttgtcgagtgcatgctttgctattacctccagcaagttcaacgagtgccaactcaacaacctcaacgcgttggaacccgaccaccgcgttgagtccgaaggtggtcttattgaaacatggaactctcaacaccctgagctgcaatgcgccggtgtcactgtttccaaacgcaccctc

SEQ ID NO: 58156 - DNA, 247 bp, Glycine max
  Clone ID: 700676681H1
gtcagttgcaggaaaaatggtttcgctgaaactgcagaagcggctcgcagccagcgtcctcaagtgtggcagaggaaaggtttggcttgaccccaatgaagtcaacgaaatctccatggctaattctcgccaaaacataaggaagctggttaaggatgggtttattatcaggaagcccaccaagattcactctcgctcacgtgcccgccgaatgaaggtagcgccgatgaaaggacgtcactctgga

SEQ ID NO: 58157 - DNA, 200 bp, Glycine max
  Clone ID: 700676682H1
atcgagccgaatcggctcgaggttcaatatcctagtacaccgtaagtaagaatttaagatattctatgatgagagcgcggatcccattactgttgctgggagttgttttcctggcatcagtttctgtctcatttggcattgcgtattgggaaaagcagaaccccagtcacaacaagtgcctccgaagttgcaatagcgag

SEQ ID NO: 58158 - DNA, 235 bp, Glycine max
  Clone ID: 700676683H1
ggctcgagcggctcgagtgcgagtcaacgggagagtaaacccgtaagacgcaaggaagctgattggtacgatccccccgtgggttgcaccgccgaccgaccctgatcttctgtgaagggttcgagtgagagcatacctgtcgggacccgaaagatggtgaactatgcctgagcggggcgaagcagatgaaactctggtggaggcccgcagcgatactgacgtgcaaatcgttcgt

SEQ ID NO: 58159 - DNA, 247 bp, Glycine max
  Clone ID: 700676684H1
ctcgagccgctctggttgattcggatctagagtcttcagtttctcctcgttgttcttcgcattcctgttttcaatttcgattctttcgttaatttaataagatgtttgggagggcaccgaagaagagcgataatacgaggtactacgaaatcctcggcgtctccaagaacgcttcgcaggatgatctgaagaaggcttacaagaaagccgccattaagaatcaccccgacaagggcggtgatcccga

SEQ ID NO: 58160 - DNA, 245 bp, Glycine max
  Clone ID: 700676686H1
gcgaagagaatggctcccaagggtttaatctttttggctgtgttatgcttctcagcactgtcactgagtcgttgtcttgcggaggataatggacttgttatgaacttctacaaggaatcatgccctcaggctgaagacatcatcaaagaacaagtcaagcttctctacaagcgccacaagaacactgctttctcctggctcagaaacatcttccatgactgtgctgttcagagttgtgatgcttc

SEQ ID NO: 58161 - DNA, 247 bp, Glycine max
  Clone ID: 700676687H1
ggggataacgttgttatgcttaaccatatcttacctgcacggaagaccagaaggcgtttagctcggcagaagaaggctgtcaagattttcccaaggcctactgctggacctctcaggccaattgttcatggccagactctgaaatacaacatgaaagtcagatctgggagaggattttctctcgaagagttgaaggctgtgggaattcccaagaaacttggtccaactattgggatttctgttgatc

SEQ ID NO: 58162 - DNA, 250 bp, Glycine max
  unsure (1)..(250): unsure at all n locations
  Clone ID: 700676688H1
gactgccattcttaccttggtgaacaacgacgaccgagactcttacaaccttcaatctggcgatgccctaagagtccctgcaggaaccacatactatgtggttaaccctgacaacgacgagaatctcagaatgataacactcgccatacccgttaacaaacccggtagatttgagagtttctacctatctagcactcaagctcaacattggtnattgcaagggttcagcaagaatattctagaggcctca

SEQ ID NO: 58163 - DNA, 244 bp, Glycine max
  Clone ID: 700676690H1
cggctcgagcggctcgagcggctcgagtggaggtcttatgacaaatgcctacaattatttgctcgagtctgatgggttggaggaggagtcttcatatccctacactggggagagaggtgaatgcaagtttgatccagagaaaatagcagttaagatcacaaatttcaccaatatccctgctgatgagaaccaaattgccgcatatttagtaaaaaatggtccacttgctatgggcgtgaatgca

SEQ ID NO: 58164 - DNA, 248 bp, Glycine max
  Clone ID: 700676691H1
tggttacacgtctaggttgcctaagtctcctaatgagaaacatttggagcttattgtgaggttggttatggaatctaagaaaccggttttgtatgttggtggtggttgtttgaattctagtgaggaattgcgagcgttttgtcgagctcaccggtgttcctgttgctagcactttgatgggtcttggtgcttatcccattgctgatgataattctcttcagatgcttgggatgcatgggactgtttat

SEQ ID NO: 58165 - DNA, 249 bp, Glycine max
  Clone ID: 700676692H1
agaaattgcacgtgttgaatggatcagagaaggtagagttcctctacaaaccattcgagcgaaaatcgattattgttgctatacagttcgaactatttatggggttttagggatcaaagtttggatattttctaaataaagaaaaatatattattctttatcttaaatgtgctatattttatcttaaatgtgctatatttttttttagaaaacaaaaaatgaaaaattactcgatttttatttctccaa

SEQ ID NO: 58166 - DNA, 249 bp, Glycine max
  Clone ID: 700676694H1
ataaaattcttccaccaagttatgggtttccttgtgttgcttcttttctccctcttaggtctctcttctagttccagcatatcaactcatcgttccatattggaccttgacctaaccaagtttaccacacagaaacaggtgtcttcactgttccaactatggaagagtgagcatggacgtgtctaccataaccacgaagaagaggcaaagagacttgagattttcaagaataacttgaactatatcagg

SEQ ID NO: 58167 - DNA, 221 bp, Glycine max
  Clone ID: 700676695H1
gtgaattttgagaatgctgatgatgctgctagggctgttgaggctctcaatggcaaaaattttgatgacaaagaatggtatgttggaaaagctcagaagaaatctgaaagggagaatgaattgaaacaacgatttgagcagagcatgaaagaagctgctgataaatatcaaggcgcaaacttgtatgtaaaaaatttagatgatagcattggtgatgaaaa

SEQ ID NO: 58168 - DNA, 260 bp, Glycine max
  Clone ID: 700676701H1
tgttgttgctgcaccaccgaacaacttcccctgtaaatcgcgtttcgtttgtgcaaggttttaaaagatggctgatgctgaggacattcaacctcttgttgttgataatggaactggaatggtcaaggctggttttgcaggtgatgatgctcctagggccgtgttccccagcattattgggagaccagccatactggtgtaatggttgggatgggtcagaaggatgcttacgtgggtgatgaagcccaatcaaaaagggg

SEQ ID NO: 58169 - DNA, 259 bp, Glycine max
  Clone ID: 700676702H1
tctctctagattctgctcttaaacgccgtcgttttcaaactctttttttccccttcgcttctctgtctttgtaaccgaaaggggggaaaatataattaacaccgatttcgcgaccaattcttcttctgcgttgaattgggacaacgagaaattggatctcagtttttggcaggaaataaaaattgcatttgagtgtaaaataacagagtatagtgtagggccttgttcttgatactgtgctaaatttgttggatggcgg

SEQ ID NO: 58170 - DNA, 258 bp, Glycine max
  Clone ID: 700676703H1
cttggaatgagggaaatgccaagttagaagacagagaaagttctggcaagaagttaaagacaggtttcggtgggatttatggttctggaggtagagactcttttaatgacagttttacatctcttggaaataatcttggctcctgttcttcagttgaggacaaaggatgtgaggaagcttgtgatgagaaaatcatccgggaggacttgggaaccctggaaagaaccttctttccagttggcacacagaatattacca

SEQ ID NO: 58171 - DNA, 257 bp, Glycine max
  Clone ID: 700676704H1
cactgatctccattcccattccatggcttccactgaatcatcccctttcaagaaaattcagattcaaagggatgacactacatttgacgcatatgtggttggaaaagaggatgctcctggaattgttgtgattcaggagtggtggggtgtggattacgaaattaagaaccatgccgtgaagatttctcagcttggtagtgggtttaaagctcttattccagatttatacagaggaaaggttggtctggatgttgctg

SEQ ID NO: 58172 - DNA, 261 bp, Glycine max
  Clone ID: 700676706H1
gtctgtgatgataatgatgatgatgatgtgttccatgtggatgtgggttgtccttgtggccattgctggtgcccttttagtcctaagatctatcctcaagaatgtaaattggtggctctatgaatccaaattgggtgtgaagcagtactctttgccaccaggtgacatgggatggcccttcattggcaacatgtggtcctttctcagtgctttcaagtccaaggaccctgattccttcatctcctcctttgtctccagatt

SEQ ID NO: 58173 - DNA, 261 bp, Glycine max
  Clone ID: 700676707H1
accgtattaaagaatttaagatatactatgatgagagcgcggttcccattactgttgctgggagttgttttcctggcatcagtttctgtctcatttggcattgcgtattgggaaaagcagaaccccagtcacaacaagtgcctccgaagttgcaatagcgagaaagactcctacaggaaccaagcatgccacgctcgttgcaacctccttaaggtggaggaagaagaagaatgcgaagaaggtcaaattccacgaccacga

SEQ ID NO: 58174 - DNA, 265 bp, Glycine max
  Clone ID: 700676708H1
gggtagcattcttgcgcactcagttattctctctctctctctagagcgtcgtcgtttagttagggcagaaaaccccttttcggatcggtggagcgaacctcgccggcgagacccccgaggctgttcaatcggcgatcgagcaacggcgaaaagcgacgaagatgaaggttttcgtgaagactctcaagggcacgcacttcgaaattgaagtgaacccttcggacacgctttctgaagtgaagaaaaatatagaaactgttcaggg

SEQ ID NO: 58175 - DNA, 264 bp, Glycine max
  Clone ID: 700676709H1
aaagtcttccatagccccccaaaaatgaagagcaccatcttctttgctctctttctcttttgtgccttcaccacctcatacctaccttcagccatcgctgatttcgtgctcgataatgaaggtaaccctcttgaaaatggtggcacatattatatcttgtcagacataacagcatttggtggaataagagcgccccaacgggaaatgaaagatgccctctcactgtggtgcaatctcgcaatgagctcgacaaagggattggaa

SEQ ID NO: 58176 - DNA, 266 bp, Glycine max
  Clone ID: 700676710H1
caccggggcaatggtggccatagggaacatgatggagaagaagatcacgatgccggcgcaccttatgtacgatggggatgaccccaggctattcgagcactactccgctgtggcgcacgcataggcgtgtacaccgccaacgactacgcagacatcttggagtttctcgttgaacggtggagattggagaagcttgaaggattgatggctgaggggaagcgggcgcaggatttcgtgtgtgggttggcgccgaggattaggaggtt

SEQ ID NO: 58177 - DNA, 264 bp, Glycine max
  Clone ID: 700676711H1
ctcgatcacttgtgggatgataccctcgccggtcctcgcccggagaacggcctcggcaagctccgaaagcaccactccttcgctttccgatctgcctccgccaaggaatcagacagcggaagcgtgaaatcgtacggtgaggattcgcccaagaatgcggtgagagtgacgcgaagtataatgatcgtgaaacacctggtaaccagagtcccagtggatccgctccggcttcccccgccggttctactcctccggtgtctccgt

SEQ ID NO: 58178 - DNA, 269 bp, Glycine max
  Clone ID: 700676712H1
caatatcctagtataccttaataaataatttaagatactatgatgagagcacggttcccattactgttgctgggacttgttttcctggcttcagtttctgtctcatttggcattgcttactgggaaaaagagaaccccaaacacaacaagtgtctccagagttgcaatagcgagagagactcgtacaggaacaagcatgccacgctcgttgcaacctccttaaggtggagaaagaagaatgtgaagaaggtgaaattccacgaccacga

SEQ ID NO: 58179 - DNA, 272 bp, Glycine max
  Clone ID: 700676713H1
tgaaattttgataaaccgcgatcacaggttgccgcaccttaaaaccggaaacaaaagcaatcgttacttgatttcaagaatctctcaatttcttcctacttctttgtgtacgatttcttaagggaaagaaaatcactctctgtgctggccacagacttcgtgaatcattttcttttccactcttagtttatttgctgaacactctcctatttgatataggacttcgtgtcacatttaaacttcttctgtctctttctcagttctctgtttaa

SEQ ID NO: 58180 - DNA, 275 bp, Glycine max
  Clone ID: 700676714H1
atggaagccacggcctccgcaatgagcttcgcccttccctcaacaaaagcccaagcccaagcccaactcctgacccggcccaccaatccattcaccattccctcccgcagcccagcccaccgccccccgccgcgcctccccaccatccgcgccgcaattccccgcacaaagaaagaggcaacggtggagactgtgcgggagcagctcgagaactgttacctcctcgccggcatcaactacaagggcttcacggtgaagcagttccaggagcttcg

SEQ ID NO: 58181 - DNA, 278 bp, Glycine max
  Clone ID: 700676716H1
gttccttgcagcaacaattttctattggggtcaacgatgtaactcgtgtccttgagcgcatgaaaccatgcacggagttagaaagctctactgaactcatctctttgagaagcaaccatacagcatcttcagttaagcttcaggttgatttcctctgtttgtctaatgtagaatatgtaaatcttttgttaatcacttatttagtaccttcaccttttcttattaagtaaatcattcaataacaatcatttttattctcaaataatattagaaggttt

SEQ ID NO: 58182 - DNA, 258 bp, Glycine max
  Clone ID: 700676717H1
attgagcgcaccgaaagcaaagtgtctctctaacctctgcaaaagtccaaggttgcacggttttaactgcttaggtttttgtcttcaaaattaaaactgtgcaactttggttgcaaagtcataggggttaagttgtgtttgcatgaaagtgggcttgagataattgtgcctcttgtatgatggaatcccttggaagcttttgtatttgctggagcctgcgcctgtcacacttatcactacagctgtggctgtgacatt

SEQ ID NO: 58183 - DNA, 257 bp, Glycine max
  Clone ID: 700676718H1
ggttgcattggatatagagtaccaccacaatatgttaatatcccaccaaaaagtgaatccaaaggaaatcatagtaggatggtattcaaccggtcttggagtaactggtggtagtgcattaatccacgagttttattctcgagaagtgcccaatcccatacacttgactgttgatacaggatttacaaatggagcgggtacgattaaagcatacgtgtctaacaatttatctcttggagaacgtcaaattgctgcac

SEQ ID NO: 58184 - DNA, 259 bp, Glycine max
  Clone ID: 700676719H1
cacacaactactacaagtacttccttacaatcaaaaccaacaacaactatggcaagttatcaaaagcactacgatgatcagggtcgcaaggttgacgagtatggcaacgttgagaagcaaaccgacgaatacggcaaccctgttcatgctgctagtgtcacctatgtagccaccagaactgctgctggtggttacagtgatgacattaataagcaacatgataccaccaatgcctacggcgtagacactggtagacagc

SEQ ID NO: 58185 - DNA, 260 bp, Glycine max
  Clone ID: 700676720H1
tgttgatctacattctcccatcttttctcactgctgaaattaaatataagcggaatttgagtaatattcatatttccggcttattttacgacggcagatataaattctggactaaacacgagacaaatcttgctttgacagaagaggaaaagatggaggtgattagaaatagaggcattcctgctgatgttcttgcaaagcgagctcatgaatttgaaaaacatgttgctcatgaaagcctcaaggatcaaattcctgct

SEQ ID NO: 58186 - DNA, 257 bp, Glycine max
  Clone ID: 700676721H1
caacactacacgcactttgtacctttctttttctttgcttgctattgctattctgcactgtgtctttactcttgttcttgttgctgcagctggtggttgcattgaatcggaggggtaagtgggaagacgtgtcttgttttgtagctttcccttccctctctcttttccccgccgcatgtgccggattagacgcgaactgcttccataattcacctcctccaatcaaccatcacaagatttcccactgattggatgga

SEQ ID NO: 58187 - DNA, 260 bp, Glycine max
  Clone ID: 700676722H1
tcaaaaaagaagaagaagaagaagagaggaaagtagtagaagaatacagggcagagctgcagccaacaccacccatggctgaatccgtttcagtggacatggagatgatctttctcggcggaaaggaacatcatattcaaactggctgtggttctgtatctgtaatagtctgtggggatcaagaaaaccagctctgatcacttatccagatatagcgctaaattatatgtcatgtttccaaggattatttttctgtccag

SEQ ID NO: 58188 - DNA, 260 bp, Glycine max
  Clone ID: 700676723H1
tgaagcttggatcttctctcgcattgtggaatctatttggtggcagtctttgactccacatatgcagcttgctgatgcaaagatcactcataaggattcagcaaaaaactatacaaatatgtctagttcatgcgatcaagagtggggaaatttatcactagatatttggaagaatgcttttagagaagcctgtgaaaggctttgccctatccgagctggagggcacgagtgtggctgtttgtctgtgctacctaaattgt

SEQ ID NO: 58189 - DNA, 266 bp, Glycine max
  Clone ID: 700676726H1
ccaagttatgggtttccttgtgttgcttcttttctccctcttaggtctctcttctagttccagcatatcaactcatcgttccatattggaccttgacctaaccaagtttaccacacagaaacaggtgtcttcactgttccaactatggaagagtgagcatggacgtgtctaccataaccacgaagaagaggcaaagagacttgagattttcaagaataacttgaactatatcagggacatgaatgcaaacagaaaatcaccccatt

SEQ ID NO: 58190 - DNA, 269 bp, Glycine max
  Clone ID: 700676727H1
gaaaaggaaagagataggagctgggatacagtgtttgagagggataggagaagggaaaaggaaagagatagaagtagggacagaacaataggtggcaagagagatagagacccggagaatgaaagggatgataagaatcgggaaaggcgagatgatagcatatgggcacaaagatagagacactgcaaatggtaaggataggcatctgcgtcatgaggatggtaatgacaacggagatagatatagaaaacattcaaggcatgaagaaa

SEQ ID NO: 58191 - DNA, 267 bp, Glycine max
  Clone ID: 700676728H1
gcaaagcaatggctacttcaaagttgaaaacccagaatgtggttgtatctctctccctaaccttaaccttggtactggtgctactgaccagcaaggcaaactcagcggaaactgtttctttcagctggaacaagttcgtgccgaagcaaccaaacatgatcctccaaggagacgctattgtgacctcctcgggaaagttacaactcaataaggttgacgaaaacggcaccccaaaaccctcgtctcttggtcgcgccctctactcca

SEQ ID NO: 58192 - DNA, 268 bp, Glycine max
  Clone ID: 700676729H1
cttattttcaagtctaagcctgatatggatccaacgaaacttcattggatgatcggaattatggtgtgtgtgactgtagtgaagttcattcttatggtctactgtcgaagattcaaaaatgaaattgttagagcatatgcacaagatcacttttttgatgtcattactaattctgttggattagctgctgctgtgctagctgtcaagttctactggtggattgatccaacaggagctattattatagcattgtatacaatcaatacat

SEQ ID NO: 58193 - DNA, 274 bp, Glycine max
  Clone ID: 700676730H1
accgtattaaagaatttaagatatactatgatgagagcgcggttcccattactgttgctgggagttgttttcctggcatcagtttctgtctcatttggcattgcgtattgggaaaagcagaaccccagtcacaacaagtgcctccgaagttgcaatagcgagaaagactcctacaggaaccaagcatgccacgctcgttgcaacctccttaaggtggaggaagaagaagaatgcgaagaaggtcaaattccacgaccacgaccacaacacccgg

SEQ ID NO: 58194 - DNA, 271 bp, Glycine max
  Clone ID: 700676731H1
gaaaggaaaggttaactaagaagcaatacttcaatggccacccttgttgttcataaccaaacttcttctgctcaagatgctgaggctctccaacaggctttcaaaggatggggggctgatgacaaggccattatagcaatactgggtcacataaatgttcatcagaggcaagaaatcagaaaagcttatgaggagtttaccaagaggatctcatcaaacgccttgagtccgagatctctggtgactttgagagagctatgtaccggtggat

SEQ ID NO: 58195 - DNA, 260 bp, Glycine max
  Clone ID: 700676733H1
tcccgaccctgttcccctctcgtatccgtcatgaaaggaggaaagtccaagaccgaatctaagagagccgatcccaaacttgctgtgaataagaagggagccgccaccaaggctaggaaacccgccggcaaggggaaggcagcgaaagaccctaacaagccaaagaggcctccaagtgctttcttcgttttcatggaggagttcaggaaggtattcaacaaagaacatcctgaaaacaaagcagtgtctgctgtgggcaa

SEQ ID NO: 58196 - DNA, 256 bp, Glycine max
  Clone ID: 700676734H1
aagaaagaaggtttttttagtatagttaacagcatggagagggaggaagatgttaaggttggagcacagaaattctcggagaggcaagcactgggtacaggagctaagagtgacaaggactacaaggaggcaccaccagcacccttgtttgagccaggggagttaaagtcatggtctttttacagagctgggatcgcagagtttgtggccacattcttgttcctctacatcactgtcttgactgtcatgggtgtca

SEQ ID NO: 58197 - DNA, 259 bp, Glycine max
  Clone ID: 700676735H1
gatactggtaattaatgaaggagatgcaaacattgaacttgttggcctaaaagaacaacaacaggagcagcaacaggaagagcaacctttggaagtgcggaaatatagagccgaattgtctgaacaagatatatttgtaatcccagcaggttatccagttgtggtcaacgctacctcaaatctgaatttctttgctattggtattaatgccgagaacaaccagaggaacttcctcgcaggttcgcaagacaatgtgata

SEQ ID NO: 58198 - DNA, 181 bp, Glycine max
  Clone ID: 700676736H1
gaggaagggcagcagcaaggggagcagaggctggaagagagcgtgattgtggaaatctcgaaggaacagattcgggcactgagcaaacgtgccaaatctagttcaaggaaaaccatttcttctgaagataaaccttttaacttgagaagccgcgaacccatctactccaacaagcttggca

SEQ ID NO: 58199 - DNA, 254 bp, Glycine max
  Clone ID: 700676737H1
caagggtttaacctttctggctgtgttaatatgcgtatcagcactgtcactgagtccttctgttgcgggggaagggcaaaataatggccttgttatgaacttctacaaggaatcatgccctcaggctgaagacatcatcacagaacaagtcaagcttctctacaagcgccacgagtacactgctttctcctggctcaggaacatcttccatgactgtgctgatcagagttgtgatgcttcactgttgctggact

SEQ ID NO: 58200 - DNA, 259 bp, Glycine max
  Clone ID: 700676739H1
atcttcatcatgcacaagagctcttcagattccacgttgggcccgggtggcctggacctctcccaggccttcttcaggcccataaacaacgccgcccctccctccccgaccaagcgccacaacaagatctccgtcatcggcgccggcaacgtgggaatggccatcgcgcagaccatcctcactcagacctcaccgacgagctcgtcctcgtcgacaccaactccgacaagctccgcggcgagatgctcgacctccagca

SEQ ID NO: 58201 - DNA, 257 bp, Glycine max
  Clone ID: 700676740H1
tgccaccgcttcagtggcatttaagtccagggaggaccaccgcaagcagattgagttggaggaggcgcgtaaagcggggcttgcgccactgaactcgatgaagatggaaaggaaatcaatcctcacattccccagtatatgtcctctgctccttggtatcttaatgctgagagacctagtttgaaaatcaaaggaaatggaaatctgaccccaattacaccaaatcatggtacgatagaggtgctaaaatctttcag

SEQ ID NO: 58202 - DNA, 263 bp, Glycine max
  Clone ID: 700676741H1
atttattttctgaaaatctaaaggaccaaggagctttacattttagttgttaggtgaaaggatttctctatcagttcatttatcttcaattgttgcgaatgtgtatttaatagcctaagatgattacttcccaataattattatattattcattcttacacagtagtgtctatgcagtataattgtagataattatttatttattgttattgagtgacagtacacattcatcctaattgcaagcaaagaattacctaagcaat

SEQ ID NO: 58203 - DNA, 267 bp, Glycine max
  Clone ID: 700676744H1
tgaaaccttccgagcgatgaacctcttttaggaagttctgatgatacaaggctcattgacctgactgatattgatatccgtcttccccttcttgtttatgtttctcgagagaagcgcccaggctatgatcacaacaaaaaagccggggccatgaatgcattggttcgagcctcagctataatgtctaatggccttttatactcaatcttgactgtgatcactatatctacaactcaaaggcaatgagggaaggcatgtgctttatga

SEQ ID NO: 58204 - DNA, 269 bp, Glycine max
  Clone ID: 700676745H1
gttcaatatcctagtacaccgtattaaagaatttaagatatactatgatgagagcgcggttcccattactgttgctgggagttgttttcctggcatcagtttctgtctcatttggcattgcgtattgggaaaagcagaaccccagtcacaacaagtgcctccgaagttgcaatagcgagaaagactcctacaggaaccaagcatgccacgctcgttgcaacctccttaaggtggaggaagaagaagaatgcgaagaaggtcaaattcca

SEQ ID NO: 58205 - DNA, 271 bp, Glycine max
  Clone ID: 700676748H1
tactcgagcgaattcggctcgaggggaagagtacccagataggatgatgcttactttctacgtttttccttctccaaaggtttcggacactgttgtggaaccctacaatgctactctctctgttcaccagcttgttgaaaacgcagacgagtgcatggtgcttgacaatgaagctttgtatgacatttgcttccgaccctcaagctaaccaccccaagctttggtgacttgaaccatctgatctcagctacaatgtctggtgtcacttgtt

SEQ ID NO: 58206 - DNA, 252 bp, Glycine max
  Clone ID: 700676752H1
ataaaattcttccaccaagttatgggtttccttgtgttgcttcttttctccctcttaggtctctcttctagttccagcatatcaactcatcgttccatattggaccttgacctaaccaagtttaccacacagaaacaggtgtcttcactgttccaactatggaagagtgagcatggacgtgtctaccataaccacgaagaagaggcaaagagacttgagattttcaagaataacttgaactatatcagggac

SEQ ID NO: 58207 - DNA, 254 bp, Glycine max
  Clone ID: 700676753H1
gaagaaaagggacaagcttagttgtcaagttggaatcaacccatactccatggaatggactggtttggccaatagattactgagtaagggcaacgatattctgtgttgcgattatgctagttttgatggtttgattaccaagcaagttatgagcaaaatggcagaaatgataaacagtctttgtggtggtgatgcaaaattgatgcgtgaaaggacacacctgctgttggcttgttgttcaaggatggcaattt

SEQ ID NO: 58208 - DNA, 254 bp, Glycine max
  Clone ID: 700676754H1
gaatttacatataaatattacatgctttgattttaataaacttctatatgaaaaaatggttcatgcaatattttcttaggacctaaatattatattcaacttgctattctaaaataattaatattatttcagtctcaaatattggtgtatttagactaaaagggttaatgttattttatcttgacttactaaattatttttttgatgttagaatatcatgcttactataaattgttgatgatagtttttgatat

SEQ ID NO: 58209 - DNA, 256 bp, Glycine max
  Clone ID: 700676755H1
gaacaagtttgctgacatcactcctcaagagttcagcaaaaagtacttgcaagctcccaaggatgtgtcgcagcaaatcaaaatggccaacaagaaaatgaagaaggaacaatattcttgtgaccatccacctgcatcatgggattggaggaaaaaaggtgtcatcacccaagtaaagtaccaaggggctgtggaagcggttgggcgttttctgccacgggagccatagaagcagcacatgcaatagcaacaggag

SEQ ID NO: 58210 - DNA, 256 bp, Glycine max
  Clone ID: 700676756H1
actccattccactccatctccatggaagaacacagaaaagaaggcttttttttgccaacaccagttgcaaaactaatatcctttcaaacggatttgatctacaatggcctggtttctctcttttcctctatccactctcttttttccgtggctacagagtcctaccaccgtgctgaggagaccaagacagtgttgaatcagcagtgcaacgtgctccttctcaaagcactcatggcagcgcactcttgctgaagaa

SEQ ID NO: 58211 - DNA, 262 bp, Glycine max
  Clone ID: 700676759H1
taacaacgtccctatttccggtttcaaattccctccggcgacacattcggattccaatatgaggacccgtttatcctcgactcgggtcatcttcgtggcctcgctctgtttcctcgcaagcttcgaattcattgcaagccaaaaccatcgacccctacaaggttcttggggttgataaaaatgcaagtcagcgggaaattcagaaggcttttcacaagctatctcttcagtatcaccctgacaagaacaaagccaagggtgc

SEQ ID NO: 58212 - DNA, 264 bp, Glycine max
  Clone ID: 700676760H1
aaggaaacaaaaccaacccttttgagcttgcacaactctgatggtagttgcacaactacttcagactctctctctctgagtgcctcaccacacagattctgtgatataccaatggaggccctcaatgctgctggcttgacccctctatctgtgctctctgatagaacaaaaacaagaactaaacacccttctgtttctgcatgcaaagtctcaaacttttccacctccaccaacaagaaacaagcattgctgcaaagttgcata

SEQ ID NO: 58213 - DNA, 266 bp, Glycine max
  Clone ID: 700676762H1
gaatttacatataaatattacatgctttgattttaataaacttctatatgaaaaaatggttcatgcaatattttcttaggacctaaatattatattcaacttgctattctaaaataattaatattatttcagtctcaaatattggtgtatttagactaaaagggttaatgttattttatcttgacttactaattatttttttgatgttagaatatcatgcttactataaattgttgatgatagtttttgatatttcaaatagaaaa

SEQ ID NO: 58214 - DNA, 269 bp, Glycine max
  Clone ID: 700676763H1
gcggaaggcccattcgggtggttacatttccaaataccatcgtgcatattgaaccagacatgaattcaaggtttcagcttttgagtaccactaccaatggtgattttgttcaaggaaaagatctcgcaatggttaaagttaatgtagcatgtgctgctgttggcttgacatcaagttacactccaactccattgttggaatctggtttgcaaaaagacagagggttaattgtggagtattttggaaggatgtcttacgttgctcataac

SEQ ID NO: 58215 - DNA, 269 bp, Glycine max
  Clone ID: 700676764H1
atttgattctgcagtcagaataatggctacttatttcttcttcagtaatgactaaatggttctttcattgtatgctgcatgatggattacttatttacttgacactaatttcataaaaaggaacttggcttctgagtatgccatagttgccatcctactcctacctgcatttttatgaaaacttggagctttgctgcttctgtgtaatgaaaagctaggatgctttgaactctgttggagtggttatactgaaatttttcatactatgc

SEQ ID NO: 58216 - DNA, 209 bp, Glycine max
  Clone ID: 700676765H1
caaccattgactttgtcatgctcaaaaatttagtttaatttacaaattatggcaagggttacacctggctagcttccgcgtttagatcatttgtttatagtgctatggccacgacaagagtgttatgggtgcatgaatgtaaaacgaaaaaaaaaaaaattgtgtttattttgtacttcagttatgaataaaagaatttcactgtttgt

SEQ ID NO: 58217 - DNA, 249 bp, Glycine max
  Clone ID: 700676766H1
gtgggcaacttcaatgctggatcgtgtgatcggcatggttgagagagataaaaatcacacatgtattatctcctggtctttagggaatgaatctggatttggaacaaatcattttgctttagctggttggattcggggaagagattcatctcgggtattgcattatgaaggaggtggaccaggactccgtgcactgatattgtgtgtcctatgtatatgcgtgtttgggacatggtgaaaatagccaat

SEQ ID NO: 58218 - DNA, 252 bp, Glycine max
  Clone ID: 700676767H1
cttagcttcagatctattcgattcactcttttttttctttaaattatttttacttcaacttagttatcattgtttcgcacgctttttgttacctccaaaagcatgattttttcaaggattgcgcgctccgtttcgcgttcgcctcgcgctagaaattttttgcacggtgatgtgagattcgtaactcatgtcggagtgccactgacgaatgcgtattctgaaggagccgagacggtattaggatttgctagg

SEQ ID NO: 58219 - DNA, 254 bp, Glycine max
  Clone ID: 700676768H1
ggaaacaaatttgtttaaattgtctcttgatgatgttgaaactcctaaaggttccatgttggatcttaaaatttctcaatctaaaattgcacttcccaaaaacacagttggaggaaccattctgcgtagtgatccattggcaaattttctgacagagggcaattttagagcaagtgttgatttgcagcgcactcatcgtattaaaggaatgattaaaatggtggccacagttggtattcctgagaatacaggta

SEQ ID NO: 58220 - DNA, 252 bp, Glycine max
  Clone ID: 700676769H1
ctcaccgaggttcgcaagaacggtacctgcccttggctgaggcctgatgggaagacccaagtgaccgttgagtattacaatgacaatggtgccagggttcctattcgtgtacacaccgtgctaatctccacccaacacgacgagactgtcaccaatgacgaaattgctgctgacctcaaagagcatgtgatcaagcctgtgatcccagagaagtaccttgatgagaagaccattttccacttgaacccttca

SEQ ID NO: 58221 - DNA, 256 bp, Glycine max
  Clone ID: 700676770H1
aaaaccacccacggacgagcagcaacaaagaccccaggaagaggaagaagaagaagaggatgagaagccacagtgcaagggtaaagacaaacactgccaacgcccccgaggaagccaaagcaaaagcagaagaaatggcattgacgagaccatatgcaccatgagacttcgccacaacattggccagacttcatcacctgacatctacaaccctcaagccggtagcgtcacaaccgccaccagccttgacttccca

SEQ ID NO: 58222 - DNA, 80 bp, Glycine max
  Clone ID: 700676772H1
ggctcgagccgaatcggctcgagctctctctcaccaacgatggcgagtcagatcctctctcggatcttccccaaaaccct

SEQ ID NO: 58223 - DNA, 257 bp, Glycine max
  Clone ID: 700676774H1
agatgacttctccctacattaaatgtacagtctctttcttcatagcatttggaaatttggctgatgacaccatcaattttgaggcttttccccacaagctggtgcaatttggagagattcaggaaaaagttgtattgaaattttcacaagaggaatttcttacagcttggtcaactcaggtgcgtcctacaacaactctgttggctgatgggtgtccatatttgtatgctatggtgcatgatagttcagtgtctaca

SEQ ID NO: 58224 - DNA, 259 bp, Glycine max
  Clone ID: 700676775H1
gttcaatatcctagtataccttaataaataatttaagatactatgatgagagcacggttcccattactgttgctgggacttgttttcctggcttcagtttctgtctcatttggcattgcttactgggaaaaagagaaccccaaacacaacatatgtctccagagttgcaatagcgagagagactcgtacaggaaccaagcatgccacgctcgttgcaacctccttaaggtggagaaagaagaatgtgaagaaggtgaaa

SEQ ID NO: 58225 - DNA, 264 bp, Glycine max
  Clone ID: 700676777H1
gcaatttgctgcagaagaaatctcttctatggtgctcatcaagatgcgtgagattgctgaggcttaccttggctccacggtgaagaatgctgttgtcactgtccctgcttacttcaatgattctcagcgtcaagctaccaaggatgctggagtcattgctggtcttaatgtgatgcgaattatcaatgagcctactgcagctgccattgcttatggtcttgataagaaggccacaagtgttggtgagaagaatgtgttgatttt

SEQ ID NO: 58226 - DNA, 266 bp, Glycine max
  Clone ID: 700676778H1
ccctcacccacgtctctccccgcttcagatcttaaacgtctttcgctgttccaagatgggtgtggctgagaacattcccgatatggaggagggtaccttggagattggaatggaatacagaactgtatctggagttgctggaccattggtcattcttgacaaagttaagggacccaaatttcaagagatgttaatattcgtttaggagatggaactactcggcgtggacaagttctagaggttgatggtgaaaaagctgttgttca

SEQ ID NO: 58227 - DNA, 266 bp, Glycine max
  Clone ID: 700676779H1
ggcagaggcgcggagaagatgtggttcaccctctcaaggtctctctggaggacctttatctcgggacttctaagaagctctccctctccagaaatgtcatatgctccaagtgcactggtaagggttctaagtctggtgcttcgatgaagtgtgctggttgtcaaggaactggtatgaaggtttctataagacatcttggcccgtccatgattcagcagatgcagcatgcttgcaatgaatgcaagggtactggagaaaccatcaac

SEQ ID NO: 58228 - DNA, 267 bp, Glycine max
  Clone ID: 700676780H1
gtaatactggttgtcgtcctgatacttctgtctacaatgcgctaattacagctcaccttcattcgcgggacaaaacaaaggctttggctaaagccattggctactttcagaagatgaaaggaatggagcggtgtaagcccaacattgttacatacaacattcttttgagagcttttgctcaagctcggaacgtggagcaggtcaattctttgtttaaggatcttgatgagagcattgtttcgcccgatatttacacttttaatggtg

SEQ ID NO: 58229 - DNA, 251 bp, Glycine max
  Clone ID: 700676783H1
gtaatttgcagttaatattaaactcctgtggacgaagctacccgtcaaacgccacttgcccccgaacctatgaacagaatatgtatggcactaattaccatattacttcgtatcatggtgtttgtttgtttgtctgtgtttaaagttaaggatgttatacccttcgtgcctgctacatatatatagtgggcactataatattaccaataaattaacgtccatatataagaataataataaataaataaatt

SEQ ID NO: 58230 - DNA, 253 bp, Glycine max
  Clone ID: 700676784H1
tcaatatcctagtataccttaataaataatttaagatactatgatgagagcacggttcccattactgttgctgggacttgttttcctggcttcagtttctgtctcatttggcattgcttactgggaaaaagagaaccccaaacacaacaagtgtctccagagttgcaatagcgagagagactcgtacaggaaccaagcatgccacgctcgttgcaacctccttaaggtggagaaagaagaatgtgaagaaggt

SEQ ID NO: 58231 - DNA, 249 bp, Glycine max
  Clone ID: 700676785H1
gtatgatgtcaagttcccttatgtggtggatcgtggtccaccggtgtaaatctattcggtgtttactcccctcgaattccccaataaactttcaatcacaccttgcgagaaggaaatgcttgcatctattggttggctaaatgaggagcaaactctcaagataacttccttttgattattcttgttcttcacccatgcatcatttgttaattgttaaaaaatacaaattatgctagatatattgttaat

SEQ ID NO: 58232 - DNA, 253 bp, Glycine max
  Clone ID: 700676786H1
cggtcatatttcattagagagagagagagagagagatgcggaagagaaagggtgcatctgcagtggtagaagacgaagaagaaaacgaaaacgaggattgtgaaggaaatggtttctttgcttgctacctcttgacatccctcagcccccgctacaaaggccacacttatatcggattcacagtgaatccgaggcgccggatcaggcaacacaatggggagattgggtgtggagcttggagaacgaggaagag

SEQ ID NO: 58233 - DNA, 252 bp, Glycine max
  Clone ID: 700676787H1
ggaacctaaccttcaccacttgtggtgcttatggtatcttggcctatatctctatctggtccaacctccctcataggaaaactgattctgatgagttccatgttccgggattccctcaaaactaccgtttccacaaaacacaactgcctaggtttcttcaagcggctgatggcaccgatgactggtcaagattcctcgttccacagattcaactttctatgaagtctgatgggtggatttgcaatacgattg

SEQ ID NO: 58234 - DNA, 257 bp, Glycine max
  Clone ID: 700676788H1
gagaaaagggaagtgaagaggaagatgaggatgaggatgaggaacaagatgaacgtcaattcccattcccacgcccacctcatcagaaggaagagcgaaagcaagaggaagatgaggatgaggagcagcagcgagagagcgaagaaagtgaagattctgagttacgaagacataagaataagaacccttttctcttcggctctaacaggttcgaaactctcttcaaaaaccaatatggtcgcattcgcgtcctccag

SEQ ID NO: 58235 - DNA, 259 bp, Glycine max
  Clone ID: 700676789H1
aaaaaccttcccttctcttctcacccccacactcccatctcacacacccctcgcatccaacaatgtctctcaccattccctccaacctctccaagcccgccgccctccgccccaaactaagcccaaagctaaggtccgccgccacaaccaccatcgtctgcagcaccaccaacaacaacaacaacaacaacgtgtcctccgacctgaaggcgttctccgccgcgctggccctctcctccatcctcctctccgcccctct

SEQ ID NO: 58236 - DNA, 260 bp, Glycine max
  Clone ID: 700676791H1
agttatcttctagtatttttcaagtaacttaaggtttcaaacctaggaagttggaagtcatggcagcaacattgatggcagcaacaagttctggcactcttaaagcaactcctttcctaggccaaggcaagggtgccaatgccaatgctcttagggatgttgtttccatgggaactgggaagtaaccatgggcaatgatttgtggtatggaccagacagagtgaaatacttgggacccttttcagctcagaccccttcat

SEQ ID NO: 58237 - DNA, 261 bp, Glycine max
  Clone ID: 700676792H1
ctccattgtctttgaacactcatcaccatggccaagcttgttctttccctttgtttccttcttttcagtggctgcttcgctctgagagagcaggcacagcaaaatgagtgccagatccaaaagctgaatgccctcaaaccggataaccgtatagagtcggaaggtgggttcattgagacctggaacctaacaacaagccattccagtgtgccggtgttgccctctctcgctgcacccttaaccgcaatgcccttcgtagac

SEQ ID NO: 58238 - DNA, 264 bp, Glycine max
  Clone ID: 700676794H1
ccttctctttattttcaattttcatccaaaagattcttatgatagttacagcataggtgtagaagaagctggggaatatcaaattattctaaacacagatgaaataaagtatggaggtcaagggatccttaaagaagaacagtattttctaaaaactatcagcagaagagttgatggccttcgaaacgcttagaggtgtcactacccagcagaacttctcaggtttacaagttaaggcggattttgagaatataaggcacactg

SEQ ID NO: 58239 - DNA, 67 bp, Glycine max
  Clone ID: 700676795H1
gggaaacataactaccctttagcttttgctcttagttcttttccatggagtggccacaacaacaatg

SEQ ID NO: 58240 - DNA, 100 bp, Glycine max
  Clone ID: 700676796H1
tgtctttgaacactcatcaccatggccaagcttgttctttccctttgtttccttcttttcagtggctgcttcgctctgagagagcaggcacagcaaaatg

SEQ ID NO: 58241 - DNA, 266 bp, Glycine max
  Clone ID: 700676801H1
tctcatcaaaaccatttcccattacccagatctcctccgatctccgaccactctccggccacaaagccaccttccaaatccaccaaatgtgctaactttgccacttccaaccatcttctccacactcttcttataataccacttcttacacacacccttttcaatttgtgatcgacccagaaggctattcaacgttgttgggtcgaatctggtccaaagttgtgttctttgggaggtttgaggaggacccttctgaagcttgagat

SEQ ID NO: 58242 - DNA, 264 bp, Glycine max
  Clone ID: 700676802H1
atgagtttgaagaacaacatggtggtgctaaaggtgtgtttgttgcttcttttccttgtgggggttacagctgcacgcatggaactgagcttcttcaaaagtgatcagtcatcaagttatgatgatgatgagtattcaaaccatgctgtgatctctgcatgtgcacacgctcaatgcctcctcaatgcagctgtgaagatattaggctgaattcatgccactcagattgtaagagctgtatgtgcacacgctcacagccaggac

SEQ ID NO: 58243 - DNA, 257 bp, Glycine max
  Clone ID: 700676803H1
ttctggcatgctttctcgaaagataataagaaagatatttttgtttttccgaataaaagaatgattagttgattaattaataaatagcactacacacacacacctctcaactaaaaaggaattcaaacaaatgctgagttagatcagtctggattaatacttaagcaacctaactcctaagtaacattgcttaagcgttaatatattcctttttttatattttggatgtactttagggtaatcatgtatttatgttc

SEQ ID NO: 58244 - DNA, 87 bp, Glycine max
  Clone ID: 700676804H1
cacaagtatgactggagaggagtgcttgtggtccttttgcttaagaaaatacttgtccacaaaaggtgttgaatcaatgaagaagaa

SEQ ID NO: 58245 - DNA, 261 bp, Glycine max
  Clone ID: 700676806H1
cggcggcgccactgtcgaagaggtttccgccgttccgccccttgaaatctctatcaacgattctagccagctcacgctctcgtttcgcggccaagtctatgtcttcgacgctgttacacctgataaggttcaagcagtttgttgctgttgggaggaaatgaactaacttcgggttcgcaatgtgcggagctatcatctcaaaatcagactggtgaggaggaatatcctgcaaaatgtagtctaccacagcgagcagcgtca

SEQ ID NO: 58246 - DNA, 257 bp, Glycine max
  Clone ID: 700676808H1
gggtagcattcttgcgcactcagttattctctctctctctctagagcgtcgtcgtttagttagggcagaaaaccccttttcggatcggtggagcgaagctcgccggcgagacccccgaggctgttcaatcggcgatgagcaacggcgaaaagcgacgaagatgaaggttttcgtgaagactctcaagggcacgcacttcgaaattgaagtgaacccttcggacacgctttctgaagtgaagaaaaatatagaaactg

SEQ ID NO: 58247 - DNA, 254 bp, Glycine max
  Clone ID: 700676811H1
ctagattttctctctaactggttttccttagatctctcacaatgacctttaatcttatgcttttgttctgtttggttgcagtgatcaacaatgttgttgttccaactagtgcaagacaactcatgagtaccacactacttcaccagacgagaaagaagtgatgatgaatattggcactgcaaatagagggcatgatgaaaaacatgatcatcaagtacaagtagatgatccaacaagcaagaactataacgtgg

SEQ ID NO: 58248 - DNA, 252 bp, Glycine max
  Clone ID: 700676812H1
gagaatggctcccaagggtttaatctttttggctgtgttatgcttctcagcactgtcactgagtcgttgtcttgcggaggataatggacttgttatgaacttctacaaggaatcatgccctcaggctgaagactcatcaaagaacaagtcaagcttctctacaagcgccacaagaacactgctttctcctggctcagaaacatcttccatgactgtgctgttcagagttgtgatgcttcactgttgctggac

SEQ ID NO: 58249 - DNA, 251 bp, Glycine max
  Clone ID: 700676814H1
ataaaattcttccaccaagttatgggtttccttgtgttgcttcttttctccctcttaggtctctcttctagttccagcatatcaactcatcgttccatattggaccttgacctaaccaagtttaccacacagaacaggtgtcttcactgttccaactatggaagagtgagcatggacgtgtctaccataaccacgaagaagaggcaaagagacttgagattttcaagaataacttgaactatatcagggac

SEQ ID NO: 58250 - DNA, 253 bp, Glycine max
  Clone ID: 700676816H1
gtttgtgttggagctgaaattacatgcttcgcttgtagttataggaatgaatgttttttttattattgtgttgtttgtttggtttaattcttttgaaccccaatcatctaaacatgacattttcttcataatttcgaaccctggaggcttcagtttactgttgattttcgtgttatgcttctaccaatgccataagcttggtactccaccactttgcatcttgtttaagccttaaaacaacccgttctgaacc

SEQ ID NO: 58251 - DNA, 263 bp, Glycine max
  Clone ID: 700676817H1
cttccattcgcagttccaccttgcaatgtctcgagcgaactttgcgagttctagggttcccccactgccatggaccaggccgaattaacctccgaacaggttctgaggagggacatcccatgggagacctacatgtccacaagctcatctcaggcaccagccttcagctcttaaggcgctacgatcaccggccagagagtcacagagcacagttgctcgatgatgatggtccctctgatgttcgcgtgtttgttcgagttttg

SEQ ID NO: 58252 - DNA, 263 bp, Glycine max
  Clone ID: 700676818H1
gaaatgaagagtactatcttctttgctctctttctagtttgtgccttcaccatctcatacctgccttcagccaccgctcagttcgtgctcgacactgatgatgatcctcttcaaaacggtggcacatactatatgttgcagttatgagaggaaagggcggtggaatagaagtagattcaactggaaaagaaatatgccctctcactgttgtgcaatcacccaatgagctcgataaggggattggactagtctttacatctcca

SEQ ID NO: 58253 - DNA, 258 bp, Glycine max
  Clone ID: 700676819H1
gtggtgactgtgctctgctctcatctcattcatattcatttcaatggcaactcaaggtcaagtcattacctgcaaagctgcggtggcctgggaacccaacaagcccttaaccgtccaagacgttcaggttgctccgcccaggccggcgaggtccgtgtccaaatcctcttcaccgctctctgccacaccgatgcttacacttggggcggcaaggatcccgaaggtctcttcccctgtattctcggccacgaagctgca

SEQ ID NO: 58254 - DNA, 258 bp, Glycine max
  Clone ID: 700676821H1
cgagactaccgcattttggagttcaactccaaacccaacaccctccttctccccaaccatgctgacgctgattacctcatcgttatccttaacgggactgccaatctttccttggtgaacaacgacgacagagactctacagacttcaatctggtgatgccctgagagtcccctcaggaaccacatactatgtggtcaaccctgacaacaacgaatctcagattaataacactcgccatacccgttaacaagcctggt

SEQ ID NO: 58255 - DNA, 250 bp, Glycine max
  Clone ID: 700676822H1
acgatattctgtgttgcgattatgctagttttgatggtttgattaccaagcaagttatgagcaagatggcagaaatgataaacagtctttgtggtggtgatgaaaaattgatgcgtgaaaggacgcacctgctgttgcttgttgttcaaggatggcaatttgtaaaaaagatgtttggagagttgaatgtggaatcccttctggatttccgctcacagttatttgcaatagcatttctaatgagatgctc

SEQ ID NO: 58256 - DNA, 256 bp, Glycine max
  Clone ID: 700676823H1
acaccgtattaaagaatttaagatatactatgatgagagcgcggttcccattactgttgctgggagttgttttcctggcatcagtttctgtctcatttggcattgcgtattgggaaaagcagaaccccagtcacacaagtgcctccgaagttgcaatagcgagaaagactcctacaggaaccaagcatgccacgctcgttgcaacctccttaaggtggaggaagaagtagaatgcgaagaaggtcaaattccacga

SEQ ID NO: 58257 - DNA, 256 bp, Glycine max
  Clone ID: 700676824H1
caagaatctcagcaacgaggacgaagccagaggccccaagaccgtcaccaaaaggtacatcgcttcagagagggtgatttgatcgcagtgcctactggtgttgcatggtggatgtacaacaatgaagacactcctttgttgccgtttctattattgacaccaacagcttggagaaccagctcgaccagatgcctaggagattctatcttgctgggaaccaagagcaagagtttctaaaatatcagcagcagcagca

SEQ ID NO: 58258 - DNA, 254 bp, Glycine max
  Clone ID: 700676825H1
tctcgagccgaatcggctcgacgtaagcttcaagagcttagcataattcctggttgcccctacattatgttaccagccaaactatcctcgcacaccttatattcgaaagggttggctgtttcgccaacttgtcaactgataatatttacaggagttatgggatttataatagaacaatacattaatcccattgtacaaaattcacagcatcctctcaagggaaaccttctttacgccatcgagagagttctgaa

SEQ ID NO: 58259 - DNA, 247 bp, Glycine max
  Clone ID: 700676826H1
caatatcctagtacaccgtattaaagaatttaagatatactatgatgagagcgcggttcccattactgttgctgggagttgttttcctggcatcagtttctgtctcatttggcattgcgtattgggaaaagcagaccccagtcacaacaagtgcctccgaagttgcaatagcgagaaagactcctacaggaaccaagcatgccacgctcgttgcaagctccttaaggtggacgaagaagaagaatgc

SEQ ID NO: 58260 - DNA, 253 bp, Glycine max
  Clone ID: 700676827H1
ttgtcttgcggaggataatggacttgttatgaacttctacaaggaatcatgccctcaggctgaagacatcatcaaagaacaagtcaagcttctctacaagcgccacaagaacactgctttctcctggctcagaacatcttccatgactgtgctgttcagagttgtgatgcttcactgttgctggactccacaagaaggagcttgtctgagaaggaaacagatagaagctttgggttgagaaatttcaggtaca

SEQ ID NO: 58261 - DNA, 252 bp, Glycine max
  Clone ID: 700676828H1
tgcaagctcctgcacttgactaggtatctggcttatcacattgtctttcgaacctgcaaggagcttgcgttccctgggtctgcaaaagatattgagaacctaataaagagccaaagtgagttcctactttgtagtgctccgcctcatcagaaagaggaggggaacaaaggaccctttcttcccttgttcccctcctctttctgctgaggctgagcatccacaaagtaggaggggaacaagggaagaaagggt

SEQ ID NO: 58262 - DNA, 250 bp, Glycine max
  Clone ID: 700676829H1
aagaaagtcttccatagccccccaaaaatgaagagcaccatcttctttgctctctttctcttttgtgccttcaccacctcatacctaccttcagccatcgctgatttcgtgctcgataatgaaggtaaccctctgaaaatggtggcacatattatatcttgtcagacataacagcatttggtggaataagagcagccccaacgggaaatgaaagatgccctctcactgtggtgcaatctcgcaatgagct

SEQ ID NO: 58263 - DNA, 255 bp, Glycine max
  Clone ID: 700676831H1
aggaaataatcttaagtggaaccttctgcgaaattagccttccttcgtcccttgattgaagtataaattaggggtgttgaaattcaaagccatatccgtcattaaccaaatttgtgtttctccgattgcaagcatggactccttcaattccttcttcgattcaacaaaccgatggaattacgatactctcaaaaacttccgtcaaatttctccggtcgttcagaatcacctcaagcaggtttattttactctgtg

SEQ ID NO: 58264 - DNA, 85 bp, Glycine max
  Clone ID: 700676833H1
tcccgaccctgttaccctctcgtatccgtcatgagaggaggaaagtccaagaccgaatctaagagagccgatcacaaacttggtg

SEQ ID NO: 58265 - DNA, 259 bp, Glycine max
  Clone ID: 700676834H1
tggcacaggaggaaattctgtcttctagtgcaagtgatttcagaactgcaatggtgagtaaaaatagcaaacctcaagctactgcaatgcatgtgggagctatagaaattatcattgatagtttcgcaagtcctgttgcaacatagttggtgcaatgcttttggttgatacttatcataccaatcctgaaaatgcagttcgtagtatttttgttgcgcctttcagaggcggaaggcccattcgggtggttacatttccg

SEQ ID NO: 58266 - DNA, 257 bp, Glycine max
  Clone ID: 700676835H1
gccacagcaagaagaagatgatgatgatgaggaagagcagccacagtgcgtggagacagacaaaggttgccaacgccaaagcaaaaggagcagaaatggcattgatgagaccatttgcacaatgagacttcgccaaacattggtcagaattcatcacctgacatctacaaccctcaagctggtagcatcacaaccgccaccagccttgacttcccagccctctggcttctcaaactcagtgcccagtatggatcact

SEQ ID NO: 58267 - DNA, 257 bp, Glycine max
  Clone ID: 700676836H1
ccggcggcgcacaactccgaccacctccaggaggtagggtggaagctcgcgcagctggcggaggagatcaacgtgcagttcgagtaccgtggcttcgtcgcgaacagcctcgccgatctcgacgcctccatgctcatctccgggaaggcgaacgtccgctgtgaactctgtcttcgagtttcacaagctcctcgctcgccccggcgcggtggagaaagtactctccgtcgtacggcagattcggccggagattgtca

SEQ ID NO: 58268 - DNA, 256 bp, Glycine max
  Clone ID: 700676837H1
gttgaaactcctaaaggttctatgttggatcttaaaatttctcaatctaaaattgcacttcccaagaacacagttggaggaaccattctgcgtagtgatctattggcaaattttttgacagagggcaattttaggcaagtgttgatttgcagcgcactcatcgtattataggaatgattaaaatggtggccacagttggtattcctgagattacaggtatagcattggcctgtgctatgaatagttcttttagggg

SEQ ID NO: 58269 - DNA, 255 bp, Glycine max
  Clone ID: 700676838H1
ggtgttggaaagagttgccttcttctacgattctctgatggttctttcacaactagtttcatcacaaccataggcattgattttaagataagaaccattgagcaggatggaaaacggatcaagctccaaatttggatactgcaggtcaggagcggttccgaacaattacaactgcttactatcgtggtgctatgggcatattgctagtctatgacgttacagacgaatcttcatttaacaatatcaggaattgga

SEQ ID NO: 58270 - DNA, 254 bp, Glycine max
  Clone ID: 700676839H1
gcgcattatagcacaccacacaaaaaagcaaaacagagagaacaactgttactcacacacgccatgggtaaatgaatggtttttgagcaacagcagttaaaagagaaaagggattcagcgaagatgacatcggtggtgtggcaccaacttcgggtttgagagaagccagtgggcatggagcagcagctgcggatagattgccagaggagatgaacgatatgaaaattagggatgatagagagatggaagccaca

SEQ ID NO: 58271 - DNA, 249 bp, Glycine max
  Clone ID: 700676843H1
gttcaatatcctagtacaccgtattaaagaatttaagatatactatgatgagagcgcggttcccattactgttgctgggagttgttttcctggcatcagtttctgtctcatttggcattgcgtattgggaaagcagaaccccagtcacaacaagtgcctccgaagttgcaatagcgagaaagactcctacaggaaccaagcatgccacgctcgttgcaacctccttaaggtggaggaagaagaagaatg

SEQ ID NO: 58272 - DNA, 248 bp, Glycine max
  Clone ID: 700676844H1
agaaaacagatcatacatagtagtgttggtgggttgcaaagatgcttgggggtcttctccataggggtcataagataaaagggacagtggtgttgatgcgcaagaatgtgttggacgtgaatagcgtaacagcgttgggggaattattggtcaaggtctcgacttagttggctcaacactcgatactcttactgccttcttgggccgatccgtgtctctccagcttattagtgctaccaaagctgatg

SEQ ID NO: 58273 - DNA, 251 bp, Glycine max
  Clone ID: 700676846H1
agcgcctccaaatggcagcaccagcaagatagctgccgcaagcagctccagggggtgaacctcacgccctgcgagaagcacatcatggagaagatccaaggccgcggcgatgacgatgatgatgatgacgagacaatcacattctcaggaccatgcggggaagaatcaactacataaggaggaacgaaggaaaagacgaagacgaagaagaagaaggacacatgcagaagtgctgcacagaaatgagcgag

SEQ ID NO: 58274 - DNA, 250 bp, Glycine max
  Clone ID: 700676847H1
tctacgaccgaattcggctcgagggaaccctaacaacaagccatttcagtgtgccggtgtttctctctctcgctgcacccttaaccgcaatgcccttcgtagaccttcctacaccaacggtccccaggaaattacatacaacaaggtaatggtatttttggcatgctattcccgggttgtcctagcacttatcaagagccgcaagaatctcagcatcgaggacgaagccagaggccccaagaccgtcacc

SEQ ID NO: 58275 - DNA, 253 bp, Glycine max
  Clone ID: 700676848H1
cactgacctcaccatggcgaccagagccaagctttctttagctatcttcctattctttctgttagccttgatttcaaacctagccttgggcaaacttaaagaaaccgaggtcgaagaagatcccgagctcgtacatgcaaacaccagtgccaacagcaacggcaatacactgagagtgacaagcgaacatgcttgcaacaatgtgacagtatgaagcaagagcgagagatacaagtcgaagaggcaactcgcg

SEQ ID NO: 58276 - DNA, 258 bp, Glycine max
  Clone ID: 700676849H1
cacaaggcacctagaaaggttgcaactgttgatcaaaattctggacattccaagctgaagattactattcctagagagcctgacctagaaacagctcacagagcacaaaggattagacctaaacctgctgcagagcagaagttgtgacagtggctgtccccagattcaaagcacgcccgttaaacagaaaaattctaaatgctccttcgtttccacttcccaagaggagcactccacgattgccagaatttctagaat

SEQ ID NO: 58277 - DNA, 244 bp, Glycine max
  Clone ID: 700676850H1
cagaaaactctgttctcggccatggaagaattacggaaactagagaaagtacatagcatgctggaattcatggaatcacggggcgtttcaaacctcgatcatcactctaaccgcttcctcgctaattcattctcttcttgatagaaccctccggagaccttgccataaacgacaagtgctccttgctttcccagcttattcccactctctcatcttcattccttgaagacgcgtatcaacacca

SEQ ID NO: 58278 - DNA, 250 bp, Glycine max
  Clone ID: 700676851H1
aaatatcattttgcgaggcaatcccattctcatcttccatttccaccatcaatactattttcttgtcgttgagaagcttcgcgaacgaaagcaaagaaccctagaccgtcacagaaccattccatagccatgctggtgttggccctctttctcaggattgggaacctgtcgtcctccgcaagaaggctcccaccgccgccgccaagaaggacgagaaagccgtcaacgccgcccgccgctctggcgccga

SEQ ID NO: 58279 - DNA, 253 bp, Glycine max
  Clone ID: 700676852H1
gagagattggtaggcacagaacatgagggatatgatccttttcttggtggaattcaaaaatatgccactcccatgatgcccctagatgaagaaattctttctaaggttgcacaagatatggttgaggaatggttgattgtgttgatgaggaggattcctttgaggaagtttctttaagtgcagcactcaatggtgttgagggtttagactatatggaaagaattcctcttgccacatctgagggttttcctca

SEQ ID NO: 58280 - DNA, 250 bp, Glycine max
  Clone ID: 700676854H1
atggatttcatttgtaatcaagatgatgtatatccaatttttgtacaactaatgaatagatttatggaagcaatattcaatcttaccattttaaattactacttggacgaattggtgcacttgtcaataagtaacagtgctaggaagataattcagaaaagtgaaggctaatccaggaaagattgaatattgcttccatcttgattacaaatgaaatccatatggaagcaatattcaatcttaccatttt

SEQ ID NO: 58281 - DNA, 251 bp, Glycine max
  Clone ID: 700676855H1
ctatgatgagagtgcggtttcctttgttggtgttgctgggaactgttttcctggcatcaggttgtgtctcattaaaggtgagtgaggatgaggataaccctttctacttgagaagctctaacagcttccaagtctctttgagaaccagaacggtcggattcgtctccttcagagattcaacaaacggtccccacaacttgagaacgttcgagactaccggattgtccagtttcagtcatgacccagcacaa

SEQ ID NO: 58282 - DNA, 248 bp, Glycine max
  Clone ID: 700676856H1
atcctagtacaccgtattaaagaatttaagatatactatgatgagagcgcggttcccattactgttgctgggagttgttttcctggcatcagtttctgtctcatttggcattgcgtattgggaaaagcaaaccccagtcacaacaagtgcctccgaagttgcaatagcgagaaagactcctacaggaaccaagcatgccacgctcgttgcaacctccttaaggtggaggaagaagaagaatgcgaaga

SEQ ID NO: 58283 - DNA, 249 bp, Glycine max
  Clone ID: 700676857H1
agaaacttcggtctccagatgacgaaaggaagcagatcgtgacagtggagggaggcctcagcgttatcagccccaagtggcaagaacaagaagacgaagacgaagatgaagacgaagaatatgaacaaatccctcttatcctccacgacgaccaagccatggaaagcatgaagatgacgaggacgaggacgaagaagaagatcaacctcgtcctgatcaccctccacagcgaccaagcaggcccgaaca

SEQ ID NO: 58284 - DNA, 249 bp, Glycine max
  Clone ID: 700676858H1
ttctcgagccgattcggctcgagcggctcgagagaggacaaagcagatgaccacaagaccgtcaccagaagatctataacttcagagagggtgatttgatcgcagtgcctactggtgttgcatggtggattacaacaatgaagacactcctgttgttgccgtttctattattgacaccaacagcttggagaaccagctcgaccagatgcctaggagattctatcttgctgggaaccaagagcaagagtt

SEQ ID NO: 58285 - DNA, 247 bp, Glycine max
  Clone ID: 700676859H1
tctcgagccgaatcggctcgagggtttttgggtgtgaatcctgaaatggaaggtgccagtggatctttttgatggcaaatgggtggctgattctgatgtaattgtggggatactagaggaaaagtaccagaaccctctctaatcactcctcctgaatttgcctccgtgggatcaaagatatttgggtcttttgtgagttttctgaagagcaaggatacaaacgatggaactgagcaagcattggttg

SEQ ID NO: 58286 - DNA, 238 bp, Glycine max
  Clone ID: 700676861H1
atcaaaatgaccaagttcacaatcctcctcatctcacttctcttccgcatcgcccacacttgcagcgcctccaagatggcagcaccagcaagatagctgccgcaagcagctccagggggtgaacctcagccctgagagaagcacatcatggagaagatccaaggccgcggcgatgacgatgatgatgatgacgacgacaatcagattctcaggaccatgcggggaagaatcaactaca

SEQ ID NO: 58287 - DNA, 246 bp, Glycine max
  Clone ID: 700676862H1
ctttgaacactcatcaccatggccaagcttgttctttccctttgtttccttcttttcagtggctgcttcgctctgagagagcaggcacagcaaaatgagtgccagatccaaaagctgaatgccctcaaccggataaccgtatagagtcggaaggtgggttcattgagacctggaaccctaacaacaagccattccagtgtgccggtgttgccctctctcgctgcacccttaaccgcaatgcccttc

SEQ ID NO: 58288 - DNA, 251 bp, Glycine max
  Clone ID: 700676863H1
atcaaaacaaggtgccatctttgtttgttatacatgaccatggccatgcccctgtttctgatgttccttcttctgcacatagcttgggtggcatcgtcggatctccgacctgggttttactcaaaaacatgtccaaaagcggaactcatagtccgagatgtgatgaagaaggcccttatgagggaacccagaagtgttgcctctgttatgcgcttccagttccatgattgctttgtcaacgggtgtgatgg

SEQ ID NO: 58289 - DNA, 250 bp, Glycine max
  Clone ID: 700676864H1
aggacttgaaatttaattactgtatccctctctacctgtttatgtaattttgtggagtatgtaccctttatttgatgcttatttatttgatatcatgttcgacccccactttgatggtttgagaagatattacaaaccacaatgtcatgagaggaattgacatgttatttattatattatatatctgtcaacattatatattatatattgcaactatttgatagttacccttaatagagagattaaacag

SEQ ID NO: 58290 - DNA, 253 bp, Glycine max
  Clone ID: 700676865H1
aaaccctcttttttctctctcttgcaaaacctaattttcatttcttccctcaaatttcaaaatgcgtgagatccttcacatccagggtggccaatgcggcaaccagatcggcgccaagttctgggaggtggttgcgcggacacgggatcgaccctaccggaaggtacggtggggactcggagttgcagctcgagaggatcaatgtctactacaacgaggccagttgcggtcggttcgtgccgcgcgcggttct

SEQ ID NO: 58291 - DNA, 250 bp, Glycine max
  Clone ID: 700676866H1
tgagaattgaggaaggtgtaaggtagcatttctgttggatgaaatatttaaaagcagagtaaaggagggaagagtgacagagatggagaatagttggttatgagtggggtaagtctctcaggctgggggctaatctttggttatgagtggggtaggtcttttttttctctctcataaatttcatttttattcctttgttattccaagaaaatctataatcactgttatgaagatagcaatacagattata

SEQ ID NO: 58292 - DNA, 243 bp, Glycine max
  Clone ID: 700676867H1
cccaagtaaagtaccaagggggctgtggaagcggttgggcgttttctgccacgggagccatagaagcagcacatgcaatagcaacaggagaccttgttagcctttctgaacaagaactcgtagactgtgtgaagaaagcgaaggttgttacaatggatggcactatcaatcgttcgaatgggttttagaacatggtgggattgccactgatgatgattatccttacagagctaaagagggtag

SEQ ID NO: 58293 - DNA, 247 bp, Glycine max
  Clone ID: 700676868H1
ggcacatattatatcttgtcagacataacagcatttggtggaataagagcagccccaacgggaaatgaaagatgccctctcactgtggtgcaatctcgcaatgagctcgacaaagggattggaacaatcactcgtccccatatcgaatccgttttatcgccgaaggccatcctttgagccttaagttcgattcatttgcagttataatgctgtgtgttggaattcctaccgagtggtctgttgtgga

SEQ ID NO: 58294 - DNA, 250 bp, Glycine max
  Clone ID: 700676869H1
tgactacacagcttttgcagcaactacttagccctcctccagctgcagttcttgtagcagatgtgaagttgcatcatgagagtgtggtctactctgttgccagattagcattaggagaagcatgcagttaatctcatggtccagatgtgatacacttttgcctcctggcaacaagaacctgctgccagagaagtgcaaatcatccgataaaattgatcattacattttgaaagttacggactttgttgat

SEQ ID NO: 58295 - DNA, 250 bp, Glycine max
  Clone ID: 700676870H1
gctgaattgatgagaatcgcaataagtgacttgaataacgtgtctacatccttggaagataggcaccgtgctttacaggagcttcttgagcttgttgagtcgattgataatgcaaatgatttaagcaacttggaggacttctcgcggttagagaagaactttattgctctgatcctggtataaggacaattgctgcatgggttcttggaaaagctagtcaaaataatgcaattgttcagcagcagatctt

SEQ ID NO: 58296 - DNA, 245 bp, Glycine max
  Clone ID: 700676872H1
ctagttcaatatcctagtataccttaataaataatttaagatactatgatgagagcacggttcccattactgttgctgggacttgttttcctggcttcagtttctgtctcatttagcattgcttactggaaaaagagaaccccaaacacaacaagtgtctccagagttgcaatagcgagagagactcgtacaggaaccaagcatgccacgctcgttgcaacctccttaaggtggagaaagaagaa

SEQ ID NO: 58297 - DNA, 245 bp, Glycine max
  Clone ID: 700676874H1
tgataaggtgcgacttgtcctccgatgactgcaaaaaaagtactactaacacatatatgtgttagtttatgctagctagaagaacgtataagctatctccgtatgttgtatattagtaaaaagatctcactggtgaatggtgatcgtgtatgtaacgtagtgggcaatggaagcacttagagtgtgctttgtggctcttgccctctgttttgataactgagacttttgcgaataccgttcgtttt

SEQ ID NO: 58298 - DNA, 236 bp, Glycine max
  Clone ID: 700676875H1
attgtctttgaacactcatcaccatggccaagcttgttctttccctttgtttccttcttttcagtggctgcttcgctctgagagagcaggcacagcaaaatgagtgccagatccaaaagctgaatgcctcaaaccggataaccgtatagagtcggaaggtgggttcattgagacctggaaccctaacaacaagccattccagtgtgccggtgttgccctctctcgctgcaccctta

SEQ ID NO: 58299 - DNA, 244 bp, Glycine max
  Clone ID: 700676878H1
ggctggctataaaatcctcttaaccagttgttgctgctgcgttgcacttcagtttacagctcccgaaaatggctcctccaagaggtcgtggtggttttggtggtggcggtgggttcaggggtggtgtaggggtgacagaggcagaggaaggggcggtggaggaagaggaggagacaggggcactcccttcaaagctagaggaggtggcagaggtggtggtggacgtggcggaggcaagggtggt

SEQ ID NO: 58300 - DNA, 253 bp, Glycine max
  Clone ID: 700676881H1
cccttctccttctctctctctttttcgcctcattccattttcatctatcaatggctccagtagcagcagcatcttcagattcaatcaagccaagagatgtttgcatcgttggtgttgcacgtacaccaagggtggatttcttggtactctgtcatctctatctgccaccaagctaggctctatagctattgaagctgctcttaaaagggccaatgttgatccatcccttgtggaagaagtattttttgggaat

SEQ ID NO: 58301 - DNA, 249 bp, Glycine max
  Clone ID: 700676882H1
tgaagacgaagatgatgaagatgaacaaattccctctcaccctcctcgccgaccaagccatggaaagcgtgaacaagacgaggacgaggacgaagatgaagataaacctcgtcctagtcgaccaagccaggaaagcgtgaacaagaccaggaccaggacgaggacgaagatgaagatgaagatcaacctcgcaagagccgcgaatggagatcgaaaaagacacaacccagaagacctagacaagaagaa

SEQ ID NO: 58302 - DNA, 250 bp, Glycine max
  Clone ID: 700676883H1
agatgacttctccctacattaaatgtacagtctctttcttcatagcatttggaaatttggctgatgacaccatcaattttgaggcttttccccacaagctggtgcaatttggagagattcaggaaaagttgtattgaaattttcacaagaggaatttcttacagcttggtcaactcaggtgcgtcctacaacaactctgttggctgatgggtgtccatatttgtatgctatggtgcatgatagttcagtg

SEQ ID NO: 58303 - DNA, 248 bp, Glycine max
  Clone ID: 700676884H1
cccaagtaacctgtcatttgttcttcagcaacccgaatccagaaaagacaaggacactgctggcgcatgttagcaccatagctgacctgccacgaccaatacgtgttatcgtgcgccgcctctctctcctctcgcgcgttctctcttccatgaagaaccatttcttccatgggaaccaaatcgctgaaacggagacctcgtgagtcgcagaaccctcccatggccgccgtggcccctccgcgacgcaa

SEQ ID NO: 58304 - DNA, 236 bp, Glycine max
  Clone ID: 700676885H1
gtatgatgtcaagttcccttatgtggtggatcgtggtccaccggcgtaaatctattcggtgtttactcacctcgaattcaccaataaactttcaatcacaccttgcgagaaggaaatgcttgcatcattagttggctaaatgaggagcaaactctcaagataacttccttttgattagttcttgttcttcacccatgcatcatttgttaattgttaaaaaatacaaattatgctag

SEQ ID NO: 58305 - DNA, 52 bp, Glycine max
  Clone ID: 700676889H1
attggtccttaaacactcatcagtcatcaccatggcaaagctagcattttcc

SEQ ID NO: 58306 - DNA, 241 bp, Glycine max
  Clone ID: 700676893H1
gaagaaagaatcaagcttagtcaaagtgtctgtgactgtcacacacagtctttaagatctggaagcgcttctcacttgcccacaacaacaattcctctcaatttcaaaattttcagcttcaaataataaaaccctaagagaggggttgcaagcaaaatgagaagcgcaaagatgtggacggttttgatgtgtctgatggtgagcttcttcgctcgcattgaatcgctgtctgtgacggtga

SEQ ID NO: 58307 - DNA, 245 bp, Glycine max
  Clone ID: 700676895H1
tctcgagccgaatcggctcgaggtctgggttgaccctcacaggcactttcataggtttgatcattgcaacccctcttcttgtactcttcagccccatccttgtccctgctgcgtttgtgctgttccggttgcttctggctttttgttctctgggggctgtggtgtggctgccattgctgctttatcttggatttacaactacgtttctgggaaccagcctgcgggttctgacacccttgactatg

SEQ ID NO: 58308 - DNA, 243 bp, Glycine max
  Clone ID: 700676896H1
cactttttggtacagaaaatgagaggatgcaattggactggcccagaagaatgacaatttgtgtggggattgcaaagggattagcttatcttcatgaggagtcaaggttgcaaattgtgcacagggtattaaggcaaccaatgtcttacttgataaacatctgcatgccaagatctctgactttggtttagccaaacttgatgaagaagagaacactcatatcaggacaaggatagccgggac

SEQ ID NO: 58309 - DNA, 268 bp, Glycine max
  Clone ID: 700676901H1
cagaattataaacatggcctcaaaagacccagtccgagtgaaatacttgtccaccttagtgagtcaaaagacagtctccacggccccaatcgcttcgggccaggccttcaacatcggcaactatgtggtgagggtcaaattgggaacacccggtcaacttttgttcatggtcctcgacaccagcactgacgaggccttcgtaccctgctcgggctgcactggctgctccgacaccactttctcgcccaaagcctcaaccagttacggc

SEQ ID NO: 58310 - DNA, 261 bp, Glycine max
  Clone ID: 700676902H1
taaactatcaatcattgaggaagctaggaaaaggattgccgcccaacaagcaactgctgcttaaatctttaggaaatgaatagactttgagtgtttggtagtttttatttaatggttttggtttctaatttattttgtcttgaaattttatccactgaatttcgtctcttaaatgctctatagaactttttattgcggcttctatgttcatgaaggaatctttccatttcctagtaaaaaaaaaaaaaaaaaaaggggggc

SEQ ID NO: 58311 - DNA, 264 bp, Glycine max
  Clone ID: 700676903H1
gaaaaattagagtagacaaaaaatgctcagacggaggctatctgttctctcaacatcaatcaccagaagctcaaattatagcaaacccagtctcggatacccatctatccaatctcatccctttcagctccctcactctcccagtgcttatcaaataattagtcctaatgcattcccggattttcaaggttttagagcttacagtcttctgagcttgaatgatctgagagataaggttcccagaaaacagccgacgaggaaggg

SEQ ID NO: 58312 - DNA, 264 bp, Glycine max
  Clone ID: 700676904H1
tttggaaggcaagggcttgtgttgtcacaatccaagagagaagtaatggcgaacatagacatcgaagggatcttgaagcagcagcagccttatgatgggcgcgttccgaagacgaagatagtgtgtactttgggccctgcttctcgatccgtagaaatgaccgagaagcttctgagggcagggatgaacgttgctcgtttcaatttctctcatggcactcacgactatcaccaggaaaccctcaacaatctcaagactgccatg

SEQ ID NO: 58313 - DNA, 262 bp, Glycine max
  Clone ID: 700676906H1
gagtaatagaaacctctcagcccctctccgatcaaatggccaccgtaatcgacggcaaagcgttgcgcaaaccatccgatctgaaatcgccgacgaggtgcgccagctctctcaaaaatacggcaaggttccgggattagcggtggtgatagtagggaacagaaaagattcacagagctatgttggaatgaagagaaaggcatgcgctgaattgggaatcaaatccttcgatgtggaccttcccgaacaagtctcccaagct

SEQ ID NO: 58314 - DNA, 266 bp, Glycine max
  Clone ID: 700676911H1
cggctcgagaaagaaggaaagcaaagtagacgagtgattgcgttgcgattgacgacgacgaggaatcatgtcttccggcggcggcggtggtaagccgttcttctgccacgtgtgcagtcagaggattacgtgctccgatgagtcggaaccattctgcccgatgtgtatggaaagtttcgtagaagaatgcaaccctaacaatcccaaccctaatctcttccccgacagtgatgaatcttcggatcccgaactccccttccaccgct

SEQ ID NO: 58315 - DNA, 194 bp, Glycine max
  Clone ID: 700676913H1
ggaagaaagggtcctttgtcttttgaatatgtatgcttaggagactaggagttcacagcgagcgaggaaagtatagggatatgtaactagaataacttgagatccacctttctactactagtaaataaaataaataaatcgagcaagatggttttgtttactaaaaaaaaaaaaaaaaaaaagaaaagggaaaa

SEQ ID NO: 58316 - DNA, 277 bp, Glycine max
  Clone ID: 700676914H1
ctatgatgagagcgcggttcccattactgttgctgggagttgttttcctggcatcagtttctgtctcatttggcattgcgtattgggaaaagcagaaccccagtcacaacaagtgcctccgaagttgcaatagcgagctagactcctacaggaaccaagcatgccacgctcgttgcaacctccttaaggtggaggaagaagatgaatgcgaagaaggtcaaattccacgaccacgaccacaacacccggagagggaacgtcagcaacacggtgagaa

SEQ ID NO: 58317 - DNA, 275 bp, Glycine max
  Clone ID: 700676915H1
taacaacaagccattccagtgtgccggtgttgccctctctcgctgcacccttaaccgcaatgcccttcgtagaccttcctacaccaacggtccccaggaaatctacatacaacaaggtaatggtatttttggcatgatattcccgggttgtcctagcacttatcaagagccgcaagaatctcagcaacgaggacgaagccagaggccccaagaccgtcaccaaaaggtacatcgcttcagagagggtgatttgatcgcagtgcctactggtgttg

SEQ ID NO: 58318 - DNA, 281 bp, Glycine max
  Clone ID: 700676916H1
attgtctttgaacactcatcaccatggccaagcttgttctttccctttgtttccttcttttcagtggctgcttcgctctgagagagcaggcacagcaaaatgagtgccagatccaaaagctgaatgccctcaaaccggataaccgtatagagtcggaaggtgggttcattgagacctggaaccctaacaacaagccattccagtgtgccggtgttgccctctctcgctgcacccttaaccgcaatgcccttcgtagaccttcctacaccaacggtccccag

SEQ ID NO: 58319 - DNA, 266 bp, Glycine max
  Clone ID: 700676917H1
attgtctttgaacactcatcaccatggccaagcttgttctttccctttgtttccttcttttcagtggctgcttcgctctgagagagcaggcacagcaaaatgagtgccagatccaaaagctgaatgccctcaaaccggataaccgtatagagtcggaaggtgggttcattgagacctggaaccctaacaacaagccattccagtgtgccggtgttgccctctctcgctgcacccttaaccgcaatgcccttcgtagaccttcctac

SEQ ID NO: 58320 - DNA, 265 bp, Glycine max
  Clone ID: 700676918H1
ctcatttggcattgcgtattgggaaaagcagaaccccagtcacaacaagtgcctccgaagttgcaatagcgagaaaggctcctacaggaaccaagcatgccacgctcgttgcaacctccttaaggtggaggaagaagaagaatgcgaagaaggtcaaattccacgaccacgactacaacacccggagagggatcgtcagctacacggtgagaaggaggaagacgacggtgagcagccacgtccattcccatttccacgcccacgc

SEQ ID NO: 58321 - DNA, 259 bp, Glycine max
  Clone ID: 700676919H1
gtgcatatgggctcaatcctggtatttcaggttctcgtcttttgggtaccattcctctgtctatttcacagcaaactgtttggaatcaaatggcaacagtgagaacaccattgaattttgattctagcaagcagagcttttgtcaattttctattgaccttctcggtggaggaattttagtggacaaaactggagattggatcacacttatacaaaactctccaattagtaacttgttgagagttgctgcttggaagaa

SEQ ID NO: 58322 - DNA, 260 bp, Glycine max
  Clone ID: 700676920H1
tgatctcttgctggttgccacactacaccgatatttccaccaaacccgtttgcgttgttgtgagtgtcgcctccaaagtttgaatcttttctgcgtttcctcatctgggtcctgatccctttctcgtttttggatttgggtttgcgcaggtttgcgaataaatggcaactaagaggagcgtgggaacgttgaaggagggtgatttgaaggggacgagggtattcgtgagggtcgatctgaacgtgcctttggatgacaac

SEQ ID NO: 58323 - DNA, 240 bp, Glycine max
  Clone ID: 700676921H1
gtcccccaaaaatgaagagcaccatcttctaatgctctctttcacttctgtgccttcaccacctcatacctaccttcagccatcgctgatttcgcgctcgctaatgacggtaaccctcttgcaaaatgtgtggcacatattatatcttgtcagacataacagcatttggtggactaagagcagccccaacggggcatgatagctgccctctcactgtggtgcaatctcgcactgtgctcg

SEQ ID NO: 58324 - DNA, 232 bp, Glycine max
  Clone ID: 700676922H1
cctcgctctatttctcaatctctgtgtttacggctgacgattccgcacgagtgcaattcttcgaatctcgcaaagtttaagtcatcatgggtatggtccaggttcacatgaacattgtcgtcattggacacgtcgactctgggaagtcaactaccaccggtcacttgatctacaagctcggaggtattgacaagcgtgtgattgagatgttcgagaaggcggctaccgagat

SEQ ID NO: 58325 - DNA, 261 bp, Glycine max
  Clone ID: 700676923H1
tcccgaccctgttcccctctcgtatccgtcatgaaaggaggaaagtccaagaccgaatctaagagagccgatcccaaacttgctgtgaataagaagggagccgccaccaaggctaggaaacccgccggcaaggggaaggcagcgaaagaccctaacaagccaacgaggcctccaagtgctttcttcgttttcatggaggagttcaggaaggtattcaacaaagaacatcctgaaaacaaagcagtgtctgctgtgggcaaa

SEQ ID NO: 58326 - DNA, 262 bp, Glycine max
  Clone ID: 700676924H1
cttggaatgagggaaatgccaagttagaagacagagaaagttctggcaagaagttaaagacaggtttcggtgggatttatggttctggaggtagagactcttttaatgacagttttacatctcttggaaataatcttggctcctgttcttcagttgaggacaaaggatgtgaggaagcttgtgatgagaaaatcatccgggaggacttgggaaccctggaaagaaccttctttccagttggcacacagaatattaccaactc

SEQ ID NO: 58327 - DNA, 264 bp, Glycine max
  Clone ID: 700676925H1
ggaacattgttacagatttgagggaacctttcaatcttcaaaagggttggcttttgtgggctggaattggacttgctggtgccatacttgccatttcattgaccggagttgctgtgtctttcttcaatggagaaaccccacaaagagagactgatgctcttgttcgcttgcttccgttaattggatcttcaaatctcagcactgcctgcttggtgggcatcacaggtgttcttgctccactccttgaggagactgtttttcggg

SEQ ID NO: 58328 - DNA, 260 bp, Glycine max
  Clone ID: 700676926H1
ctagattttctctctaactggttttccttagatctctcacaatgacctttaatcttatgcttttgttctgtttggttgcagtgatcaacaatgttgttgttccaactagtgcaagacaactcatgagtaccaccactacttcaccagacgagaaagaagtgatgatgaatattggcactgcaaatagagggcatgatgaaaaacatgatcatgcagtacaagtagatgatccaacaagcaagaactataacgtggaaaag

SEQ ID NO: 58329 - DNA, 272 bp, Glycine max
  Clone ID: 700676928H1
ggttcaaccaacgctccccacaacttcagaatctccgagactaccgcattttggagttcaactccaaacccaacaccctccttctccccaaccatgctgacgctgattacctcatcgttatccttaacgggactgccattctttccttggtgaacaacgacgacagaacctcctacagacttcaatctggtgatgccctgagagtcccctcaggaaccacatactatgtggtcaaccctgacaacaacgaaaatctcagattaataacactc

SEQ ID NO: 58330 - DNA, 262 bp, Glycine max
  Clone ID: 700676929H1
tgaagactcatcccatcttttggaggatttcagggtcacgcccatgaagcttatggatgtgaaggatgccttgatcatgaggaagtttggatctgttgagccggataactactggtatagagtctgtgaaggagagacagaatccgtcgtgcaaaggccgtggcatttgttatggaaatcaaggcggttgatggatatagtgtctgcaatatcttcaaagttgaactgggactatgattctgttcatgttgtgagaggggaa

SEQ ID NO: 58331 - DNA, 250 bp, Glycine max
  Clone ID: 700676931H1
cacacttctcacattgctgtcaagttttctgaaatcttgacgatgagtgacaggcgatctggtaaggagcttgagaaggagcccaactttttgaagaatggtgatgcaggtatggttaagatgattccaaccaagcccatggtggttgaaactttctctgagtatcctccccttggtcgttttgctgtgagggacatgcgtcaaactgaggctgtcggagtcatcaagagtgttgagaagaaagacccca

SEQ ID NO: 58332 - DNA, 249 bp, Glycine max
  Clone ID: 700676932H1
cttaattattaacacttccgtagttcaatatggggaagacctacagtctctcgctttcttccctttgcttgcgagtcttgtcgaatgcatactttgctattagctccaacaagctctacgagtgcgaactccagaacctcaacgcgctagctacccgtctaacgcgctgagctccgaaggtggtatgactcaaacatggaactctcaatactctgaggctgaaatgcgccggtgtcactgtttccaaac

SEQ ID NO: 58333 - DNA, 268 bp, Glycine max
  Clone ID: 700676933H1
cggttcaaggcagaacaaagagcgacagctacttttggacctagacctggacctgctgggcatccaggcaacccttttgatctctcagcaatgtctggtctgctcaatgatccaagtatcaaggaattggctgaacagatagcaaaagatccatcgttcaatcagatggctgagcagcttcagaaaacttttcaaggagctccacaagatgctatccctagcttcgataatcaacaatatttttcaaccatgcaacaggttatgcaga

SEQ ID NO: 58334 - DNA, 260 bp, Glycine max
  Clone ID: 700676934H1
gggcctcctacgataccaaattcgaggagataaacaaggttctgtttagtagagaggaagggcagcagcaaggggagcagaggctgcaagaaggcgtgattgtggaaatctcgaaggaacagattcgggcactacgcaaacgtgccaaatctagttcaaggaaaaccatttcttctgaagataaaccttttaacttgagaagccgcgaccccatctactccaacaagcttggcaagttctttgagatcaccccagagaaa

SEQ ID NO: 58335 - DNA, 259 bp, Glycine max
  Clone ID: 700676935H1
ggaaaggttaactaagaagcaatacttcaatggccacccttgttgttcataaccaaacttcttctgctcaagatgctgaggctctccaacaggctttcaaaggatggggggctgatgacaaggccattatagcaatactgggtcacagaaatgttcatcagaggcaagaaatcagaaaagcttatgaggagatttaccaagaggatctcatcaaacgccttgagtccgagatctctggtgactttgagagagctatgta

SEQ ID NO: 58336 - DNA, 257 bp, Glycine max
  Clone ID: 700676936H1
caccatgccaccgaaactcacactcgtgttggtggtgctgtttttcgcccccgttgacgcgcattttccggcaaccggagagcttccaacgttccgacgaagcgccggcattccgcaacggaagagaatgccgcaaccgcgcgcggagcgactccgtgatccacatcgcgatgacgctgaacgcgacctacctccgcggctccgtcgccggtgtgttctccgtactgcggcagcatcatgtccggagaacacgtgtt

SEQ ID NO: 58337 - DNA, 259 bp, Glycine max
  Clone ID: 700676937H1
caaatatatcttgttcagacaattcggctctatatttgtaataccagcaggttatccagttgtggtcaacgctacctcaaatctgaatttctttgcacttggtattaatgccgagaacaaccagaggaacttcctcgcaggttcgcaagacaatgtgataccgcagatacctagtcaagtgcaggagcttgcattccctgggtctgcacaagctgttgagaagctctttaagaaccaaagagaatcctactttgtggat

SEQ ID NO: 58338 - DNA, 238 bp, Glycine max
  Clone ID: 700676938H1
ctagaagctaataagcacaattcaagttaaggtgtcaattttctgaaaactcatcctcttcctactccaatcatttctatcatacatttctaacatatgcttccatagaaaaaaggcgtaaccacgtcccatatcctaacaatgtcatgagccggttcctgttgcctaagtctttatgcttacaaattaagagtttaactgcaaaggtctttcgagaaaggtaatgagagttaaaaga

SEQ ID NO: 58339 - DNA, 260 bp, Glycine max
  Clone ID: 700676939H1
gataacagcagattcccttgatctagatgggtacacaatggacgaggcacttggtagtcgaaggttatttatgttagattaccatgatatcttcatgccatatgtgaggcagataaatcagctgaattctgccaagacttatgcgacaaggactatcctttttttgagagaagatggaactttaaagccagtggccatcgaattaagtttgccacattctgctggggatctgtcagctgccgtcagtcaagtcgtcttac

SEQ ID NO: 58340 - DNA, 85 bp, Glycine max
  Clone ID: 700676940H1
agcacttagagtgtgctttgtggccttgccctctgttttgataactgagacttttgcgaataccgttcgttagtgccgacaaaaa

SEQ ID NO: 58341 - DNA, 260 bp, Glycine max
  Clone ID: 700676942H1
ttgggaatcccatgtggaataatttatctgttccaactggcactctttatgcttgggaccctacatcaacttatattcatgagccaccttattttagagatatgagcatgtctcccccaggctctcatggagtgaaagatgcttactgtttgctcaactttggagacagtatcacaactgaccacatctctccagctggcagcatacataaggacagtcctgcagccagataccttatagaacgtggggttgatagacgg

SEQ ID NO: 58342 - DNA, 263 bp, Glycine max
  Clone ID: 700676943H1
gagaaaaacccccagcttcgggacttggatatcttcctcagtattgtggatatgaacgagggagctcttcttctaccacacttcaattcaaaggcgatagtgatactggtaattaatgaaggagatgcaaacattgaacttgttggcctaaaagaacaacaacaggagcagcaacaggtagagcaacctttggaagtgcggaaatatagagccgaattgtctgaacaagatatatttgtaatcccagcaggttatccagttgt

SEQ ID NO: 58343 - DNA, 264 bp, Glycine max
  Clone ID: 700676944H1
ctgatatttacaccatctgctctcaagactgtgaattatggaatcctgcttgcacaaaagcaatgactatgtcatttaatccaaacccgtgttctgatgcatggagtttggaatttctgaagcgtaccagatttcattgtgatatcatttgtgtcactggatggactgccaccccaatgcaggatgttcaggttacaattgattggtttatttcctctcaggaatgtgttcccaggacccattgtgttttaaatccacaaaatc

SEQ ID NO: 58344 - DNA, 270 bp, Glycine max
  Clone ID: 700676945H1
tgatagggtgcgacttgtcctccgatgactgaaaaaaaagtactactaacacatatatgtgttagtttatgctagctagaagaacgtataagctatctccgtatgttgtatattaataaaaagatcatcactggtgaatggtgatcgtgtatgtaacgtagtacgcaatggaagcacttagagtgtgctttgtggccttgccctctgttttgataactgagacttttgcgaataccgttcgtttttcccatcaaaaaaagttttctgctt

SEQ ID NO: 58345 - DNA, 271 bp, Glycine max
  Clone ID: 700676946H1
ttcggaacactttatggaaaaagaagggatattttacaacattgaaagctttttcattagcgcaatctatttttacggggaattcaaaaagctttttttgtaacaaatacaaacgttagactaatttcaattaactaggttcaacgaatatttttaaatacaaaaagaaatacgaatataaatttcatatataatctaatatagtataatattcattttggatatttacattatatctatatatctatctatatatagatagatatataga

SEQ ID NO: 58346 - DNA, 276 bp, Glycine max
  Clone ID: 700676948H1
ctagagcggagatagcaatctcatctcattcatttcaatggcaactcaaggtcaagtcattacctgcaaagctgcggtggcctgggaacccaacaagcccttaactgtccaagacgttcaggtggctccgcctcaggccggcgaggtccgtgtccaaatcctcttcaccgctctctgccacaccgatgcttacacttggggcggcaaggatcccgaaggtctcttcccctgtattcttggccatgaagctgcagggattgtggagagtgttggaga

SEQ ID NO: 58347 - DNA, 259 bp, Glycine max
  Clone ID: 700676949H1
cattcttccaccaagttatgggtttccttgtgttgcttcttttctccctcttaggtctctcttctagttccagcatatcaactcatcgttccatattggaccttgacctaaccaagtttaccacacagaaacaggtgtcttcactgttccaactatggaagagtgagcatggacgtgtctaccataaccacgaagaagaggcaaagagacttgagattttcaagaataacttgaactatatcagggacatgaatgcaaa

SEQ ID NO: 58348 - DNA, 257 bp, Glycine max
  Clone ID: 700676950H1
tttctctctcgctcgcaaacgcaaataataaaaaacaaggttttagccatggcatcgaagcggatcttgaaggaactcaaggatactccaaaaggatcctcctacctcatgcagcgccggtcctgttgctgaagacatgtttcactggcaagcaacaattatgggtcctccagacagtccttatgctggaggtgttttcctagtcactattcatttccctccagattatccctttaagccacccaaggttgcattca

SEQ ID NO: 58349 - DNA, 254 bp, Glycine max
  Clone ID: 700676952H1
tgataagaaatgaagagtactatcttctttgctctctttctagtttatgccctcaccatctcatacctgccttcagccaccgctcaattcgtgctcgccactgatgatgatcctcttcaaaacggtggcacatactatatgttgccagttatgagaggaaagggcggtggaatagaagtcgattcgactggaaaagaaatatgccctctcactgttgtgcgatcacccaatgagctcgataacgggattggact

SEQ ID NO: 58350 - DNA, 254 bp, Glycine max
  Clone ID: 700676953H1
ggctggctataaaatcctcttaaccagttgttgctgctgcgttgcacttcagtttacagctcccgaaaatggctcctccaagaggtcgtggtggttttggtggtggcggtgggttcaggggtggtggtaggggtgacagaggcagaagaaggggcggtggaggaagaagaggagacaggggcactcccttcaaagctagaggaggtgggcagagtgatggtggccgtgtgcggagcaagggtggtggccgtggt

SEQ ID NO: 58351 - DNA, 255 bp, Glycine max
  Clone ID: 700676955H1
ctctccattggtccttaaacactcatcagtcatcaccatggccaagctagttttttccctttgttttctgcttttcagtggctgctgcttcgctttcagttccagagagcagcctcagcaaaacgagtgccagatccaaaaactcaatgccctcaaaccggataaccgtatagagtcagaaggagggctcattgagacatggaaccctaacaacaagccattccagtgtgccggtgttgccctctctcgctgcac

SEQ ID NO: 58352 - DNA, 260 bp, Glycine max
  Clone ID: 700676957H1
gctaaggatcccttcttcccttggtgacttggaacatcttctgaagttgaatctaagcagaaacaatttaacaggaattattccagcagaatttggaaatcttagaagtgttatggaaattgatctttcaaataatcaactctctggcttgattcctgatgaacttagtcagcttcaaaacatgatatccttgagacttgaaaataacaaattgactggcgatgtggcatcactttcaaattgcattagtctctctctac

SEQ ID NO: 58353 - DNA, 237 bp, Glycine max
  Clone ID: 700676958H1
cgtacggatgccttcttcccatggtgagtgagaacagcttctgaagctgaatctacgcagctctaattgaacaggtattcttccaacagaatttggggatcttagatgtgttacggaaattggtctttcacataatcaactcgctggcgtgagtcctgatagacttaggcagctgcaaaccgtgagatccttgagacttgaggataacaaattgactggcgatgtggcatcactttc

SEQ ID NO: 58354 - DNA, 219 bp, Glycine max
  Clone ID: 700676959H1
tctcgagccgaatcggctcgagcggctcgaggtgtaattggcatggattgaattataattgggcaacattcttcatgtaaggaagttgagtatctggttacatgaagaatgttgctgaattataattcaattcatgccaatttcccttccagtaaccagttagttaatttggcaaaacgtgggaagtcactattcactagtgtatcctatatttcgttt

SEQ ID NO: 58355 - DNA, 261 bp, Glycine max
  Clone ID: 700676960H1
caaccataaacaatatgtgtgcatatgggctcaatcctggtatttcaggttctcgtcttttgggcaccattcctcagtccatttcacagcaaactgtttggaatcaaatggcaacagtgagaacaccattgaattttgattctagcaagcagagcttttgtcaattttctattgaccttctcggtggaggaattttagtggacaaaactggagattggatcacacttatacaaattctccaattagtaacttgttgagagt

SEQ ID NO: 58356 - DNA, 235 bp, Glycine max
  Clone ID: 700676961H1
attttcttaggctgctatggatatgatgagcactagcttgttcgctatcttgctactttgcgccttcacctcagacctagcttccgtcaccgttcaggacgtgctcgacgtggatggcgatccgattcggaacgggtgcatatactacgttttgccggcaataagctgatacggtggcggaatataccgcgctggactcgggctcgatactggggctatcgctgtagtgcaatct

SEQ ID NO: 58357 - DNA, 263 bp, Glycine max
  Clone ID: 700676962H1
gttcgagtctccaatgccggatcatcccgcagctttcatatttcccctgttcaagaaaagctgcttaggacacatgacgactttgtctggcctgtggatacaacttttgttggtcgcttcatcattgatgttgagtttctagacctaaagatatgccctcctaatggtggagaaactagtcctgtatggccatctgatggaaattctcaatccattacatttcaaagtagcattcttcgttgcctctctcgtatgcttgatga

SEQ ID NO: 58358 - DNA, 238 bp, Glycine max
  Clone ID: 700676963H1
ctggtatcctgcttgcacaatagcaatgactatgtcatttaatccaaactcgtattctgatgcatagtgtttggaatttctgaagcgtaccaggtttcattgtgatatcatttgtgtcactggatggactgccaccccaatgcaggatgttcaagtgtaaattgcttggttagatttcctctcagaaatgtgttcccaggacctattgtgtgttaaatccacaaaatcctttgtgtta

SEQ ID NO: 58359 - DNA, 257 bp, Glycine max
  Clone ID: 700676966H1
agatgggagacccctctgtcgaggttactgaagagaatcgtgatgcatcgcagatggccaaaattaaagccatggatgctatttctgaaggtaagttggaggaggcgattgagaacttaacagaagctatttcactcaatcctacctctgccataatgtatggaactagagccagtgtttacatcaaaatgaagaaacccaatgctgcgatccgtgatgcaaatgctgctttggagattaatcctgattctgctaaa

SEQ ID NO: 58360 - DNA, 254 bp, Glycine max
  Clone ID: 700676967H1
gttccttgcagcaacaattttctattggggtcaacgatgtaactcgtgtccttgagcgcatgaaaccatgcacggagttagaaagctctactgaactcatctctttgagaagcaaccatacagcatcttcagttaagcttcaggttgatttcctctgtttgtctaatgtagaatatgtaaatcttttgttaatcacttatttagtaccttcaccttttcttattaagtaaatcattcaataacaatcattttta

SEQ ID NO: 58361 - DNA, 253 bp, Glycine max
  Clone ID: 700676968H1
ggttcaaccaacgctccccacaacttcagaatctccgagactaccgcattttggagttcaactccaaacccaacaccctccttctccccaaccatgctgacgctgattacctcatcgttatccttaacgggactgccattctttccttggtgaacaacgacgacagagacacctacagacttcaatctggtgatgccctgagagtcccctcaggaaccacatactatgtggtcaaccctgacaacaacgaaaa

SEQ ID NO: 58362 - DNA, 255 bp, Glycine max
  Clone ID: 700676969H1
ctcggttaaactgaaccaattcaatattcccagctagttcttcattgaagaagctatggactttcttaactttatgcttaacttgttggtccctccaggcagtatgctcaccttggctttctcatggccagcactttgcttcctcaatgtttgtgagtggctttataatagtatatatggtgaggatatcgataataaagtcgtcataatcactggggcatcttcaggcataggagagcaaattgcatatgagta

SEQ ID NO: 58363 - DNA, 256 bp, Glycine max
  Clone ID: 700676970H1
ctggtgatgccctgagagtcccctcaggaaccacatactatgtggtcaaccctgacaacaacgaaaatctcagattaataacactcgccatacccgttaacaagcctggtagatttgagagtttcttcctatctagcactgaagctcaacaatcctacttgcaaggattcagcaggaacattttagaggcctcctacgataccaaattcgaggagataaacaaggttctgtttagtagagaggaagggcagcagca

SEQ ID NO: 58364 - DNA, 256 bp, Glycine max
  Clone ID: 700676971H1
cacttattaacactttccttagttcaatatggggaagcccttcttcactctctctctttcttccctttgcttgctactcttgtcgagtgcatgctttgctattacctccagcaagttcaacgagtgccaactcaacaacctcaacgcgttggaacccgaccaccgcgttgagtccgaaggtggtcttattgaaacatggaactctcaacaccctgagctgcaatgcgccggtgtcactgtttccaaacgcaccctc

SEQ ID NO: 58365 - DNA, 89 bp, Glycine max
  Clone ID: 700676972H1
catacatagtagtgttggtgggttgcaaagatgcttgggggtcttctccataggggtcataagataaaagggacagtggtgttgatgcg

SEQ ID NO: 58366 - DNA, 258 bp, Glycine max
  Clone ID: 700676973H1
ctttacaaaagcgtgcgcattttctttgccaaccatacatatgaccctagtgagacaccagcaccacttgtggagtacagagaagaagaattgaagagtttaagaggaaatggaacgggagagcgcaaggaatatgataggatctatgattatgatgtctacaatgatttgggcaacccagataagagtgaaaagttagctcgtccagttcttggagggtctagcacctttccctaccctcgtaggggaagaactggt

SEQ ID NO: 58367 - DNA, 261 bp, Glycine max
  Clone ID: 700676975H1
tcttcatcatgcacaagagctcttcagattccacgttgggcccgggtggcctggacctctcccaggccttcttcaggcccataaacaacgccgcccctccctccccgaccaagcgccacaacaagatctccgtcatcggcgccggcaacgtgggaatggccatcgcgcacgaccatcctcactcaggacctcaccgacgagctcgtcctcgtcgacaccaactccgacaagctccgcggcgagatgctcgacctccagcac

SEQ ID NO: 58368 - DNA, 261 bp, Glycine max
  Clone ID: 700676976H1
ggcaagttgtttgagattaccccagagaaaaaccctcagcttcgggacttggatgtcttcctcagtgttgtggatatgaacgagggagctctttttctgccacacttcaattcaaaggccatagtgtactagtgattaatgaaggagaagcaaacattgaacttgttggcattaaagaacaacaacagaggcagcaacaggaagagcaactttggaagtgcggaaatatagagctgaattgtctgaacagatatatttgta

SEQ ID NO: 58369 - DNA, 260 bp, Glycine max
  Clone ID: 700676977H1
tgcagatctcaattgcatcgctgtccatggctaccatcgttagcatcaaggcccgccagatcttcgacagtcgtggcaatccaactgtcgaggtggatttgacttgctccgatggtacttttgccagagctgctgttccaagtggtgcatccactgggatttatgaggcccttgaattgagagatggaggatctgactaccttggaaagggtgtatcaaaggctattgacaatgtgaacaccgtcattggccctgctttg

SEQ ID NO: 58370 - DNA, 269 bp, Glycine max
  Clone ID: 700676979H1
cgctcgagccgattcggctcgagctcttctctctccacccaaaccactactcccgaccctgagtccctctcgtatccgtcaactaaggaggaaagtccaagaccgaatctaagagagccgatcccaaacttgctgtgaataagaagggagccgccaccaaggctaggaaacccgccggcaaggggaaggcagcgaaagaccctaacaagccaaagaggcctccaagtgctttcttcgttttcatggaggagttcaggaaggtattcaac

SEQ ID NO: 58371 - DNA, 262 bp, Glycine max
  Clone ID: 700676980H1
caaggatcctttatcgctttcacaatgggcaagaatttgcaaaggcagatccagaaactagtacatttggcagatctttgggtctaattggtggctactccttctatggtcatttggtgaatgtttatctattacctatatgtcagataatcctagaaactcagcaaactaggcgtcgcttgagctttttaagaagatcaaagtatgttcttgtggctgcttcatccacatacagtagaaagttgtttttcctcaactgtac

SEQ ID NO: 58372 - DNA, 256 bp, Glycine max
  Clone ID: 700676981H1
cgcaaaaatggtgaaaaaggtaagaggagattcgtatctggggatggtgaagagatgacattaattccgggaaccagtgttgaggaggcttacaataagctaatagttgaactcgagaaaagtgttcctacattggttggcattgaatgtcccaaggatgagaaacttcctcgtcgcaaaatttttgacaaacctaagacgcgctgcttcactattctccctatggagtttaatcttgtggtccgtcagaagtttt

SEQ ID NO: 58373 - DNA, 254 bp, Glycine max
  Clone ID: 700676982H1
gtcgagccgattcggctcgagctccgaaacacagttcctatactgtcttgccacatactagtagattattatgtatgctacgagtgtgaagccaaacttataccactagatacgtctctttaatttgtgttatctatataatgattagaaaccaagatgtaacatttatgaaagtaaagctggatttgcaacattccctgatagatttatacatcaaagatattcgtttttggcattcaaaattcataatttgg

SEQ ID NO: 58374 - DNA, 255 bp, Glycine max
  Clone ID: 700676983H1
ggcactatcaatcgttcgaatgggttttagaacatggtgggagcgccagtgctgatgattatccttacagagctaaagagggtagatgcaaagccaataagatacaagacaaggttacaattgacggatatgaaactctaataatgtcagatgagagtacagaatcagagacagagcaagcgttcttaagcgccatccttgagcaaccagccagtgtctccattgatgcaaaagattttcatttatacaccgggg

SEQ ID NO: 58375 - DNA, 266 bp, Glycine max
  Clone ID: 700676373H1
ttctctccattgtctttgaacactcatcaccatggccaagcttgttctttccctttgtttccttcttttcagtggctgcttcgctctgagagagcaggcacagcaaaatgagtgccagatccaaaagctgaatgccctcaaaccggataaccgtatagagtcggaaggtgggttcattgagacctggaaccctaacaacaagccattccagtgtgccggtgttgccctctctcgctgcacccttaaccgcaatgcccttcgtagac

SEQ ID NO: 58376 - DNA, 263 bp, Glycine max
  Clone ID: 700676374H1
ggtagcgcttttttgaagtcggagaagaaacgttgatgctgttgcgtaaccctgcgttgacagcgtcgctgctatcagccaccacaaagaagctctacaaccaccgttattctacacctgctgcattcatggcgtcttcaggtgtcgcgtgcagtttgctggttttgtgtggcaaatcactggcagagaatgaaactgctaaagctataaagaccaataacacactgaagctccctgaggatgaaaaactctcactcgttttg

SEQ ID NO: 58377 - DNA, 260 bp, Glycine max
  Clone ID: 700676375H1
taccgaatgagagcatcaaactcttcttcttcgatttccattgcgaacgttactttttcttcttctttctcttcattttcttcgctcttcgatcttcgtccggggactgctccgaataccaccaccaccactcgccgatggccacgatcggaggcttacacgactcccaaggctctcaaaacagcgtcgaaaccgaagccctcgctcgattcgccgtagacgaacacaacaagaagcagaattcgcttctggagtttgct

SEQ ID NO: 58378 - DNA, 262 bp, Glycine max
  Clone ID: 700676376H1
tgcaaagccaataagatacaagacaaggttacaattgacggatatgaaactctaataatgtcagatgagagtacagaatcagagacagagcaagcgttcttaagcgccatccttgagcaaccaattagtgtctccattgatgcaaaagattttcatttatacaccgggggaatttatgatggagaaaactgtacaagtccgtatgggattaatcactttgttttacttgtgggttatggttcagcggatggtgtagattact

SEQ ID NO: 58379 - DNA, 263 bp, Glycine max
  Clone ID: 700676377H1
gtgcccagcgctgaaaatatcagctttttgggcaattaactattgacagaatggatcccaaaattgatagtaattattaagggttgtgcccagcgctcaaaaatcttgttttgctttgtattttataaatacttagtttttcctagtaattcagagagatattacgcgtctactgttaaataatagatacatagacaagatacctcaccagtggacaattcatgggttctttaacttgtgtgttagtggaccttacgctatat

SEQ ID NO: 58380 - DNA, 75 bp, Glycine max
  Clone ID: 700676378H1
caacaacgaggtttctccaccaggatagccatgattcttctgcgtcaaaaatcttaatcagcggctgtctctctg

SEQ ID NO: 58381 - DNA, 262 bp, Glycine max
  Clone ID: 700676379H1
gtactcttcacctcgtcctccgtctccgtggtggcatgcagatcttcgttaagacactcaccggcaagaccataaccctagaggttgaaagctccgacaccatcgataacgtcaaggccaagatccaggacaaggagggtatccccccggaccagcaacgtctcatcttcgccggaaagcagctcgaggacggccgcaccctcgccgactacaacatccagaaggaatcaacccttcacctcgtcctccgtctccgtggtgg

SEQ ID NO: 58382 - DNA, 254 bp, Glycine max
  Clone ID: 700676380H1
cctgattctgaacttgagaaacacattccagatgcacatgtcatcatatctactccattccaccccgcctatgtcaccgcagaaagaattaagaaagccaaaaatttggagctgcttttgactgctggcattggttctgatcatgttgatctcaaagctgcagctgctgctggtttaactgtggcagaggtcacaggaagcaacgttgtgtcggttgcggaggacgaactcatgagaatcctcattctaatgag

SEQ ID NO: 58383 - DNA, 214 bp, Glycine max
  Clone ID: 700676381H1
ctcgagccgcccaaatccattgcccagcgtttcagaggcatccaccacagcccgcggaaccagtggtgtaataacaaccgttgcgaaacgcaggtccaaagtgctgggcccgtggcttctctcctcaagtcccgttccgtcatacggttccgcgggcctgacaccctcaagttccttcagggactgttgaccaacgctgtacggaggttgggtg

SEQ ID NO: 58384 - DNA, 157 bp, Glycine max
  Clone ID: 700676382H1
attcaattcagagacaaaaagaggcggagttgcaattcaaacggctgactctaacatccatatacactggaaaggtgctgctgagatagtcctagcctgctgtacaggctatgttgatgtgaatgaccagctggttgggatggatgatgagaagatg

SEQ ID NO: 58385 - DNA, 259 bp, Glycine max
  Clone ID: 700676385H1
tgtagattcattggtgaagagagcatatgaaaattgggatcaggttgtggattatgatggcaaatcactcgagaatgctaaaattgcttctgaaaatgaacttcgggtggagtcaattgattatggtagtggtttagatcatcaactgcaactgccggcacttcccgtgtctgttccttctgagcagcaaatcaattcagggatgcctgttggaggttataatgataataatatagtaatacgatatccaacccagtca

SEQ ID NO: 58386 - DNA, 264 bp, Glycine max
  Clone ID: 700676387H1
tctctccattgtctttgaacactcatcaccatggccaagcttgttctttccctttgtttccttcttttcagtggctgcttcgctctgagagagcaggcacagcaaaatgagtgccagatccaaaagctgaatgccctcaaaccggataaccgtatagagtcggaaggtgggttcattgagacctggaaccctaacaacaagccattccagtgtgccggtgttgccctctctcgctgcacccttaaccgcaatgcccttcgtaga

SEQ ID NO: 58387 - DNA, 252 bp, Glycine max
  Clone ID: 700676388H1
gttcctcactgaccaagccatggcgatgagaaccaaactttctttagctatctttttcttttttcttttagccttattttcaaacctagcctttggcaaatgtaaagaaaccgaggtagaagaagaagaccctgagctcgtaacatgcaaacaccaatgccaacagccacagcaatacactgagggtgacaagcgggtatgcttgcaaagatgtgacaggtatcatcgtatgaagcaagagcgagagataca

SEQ ID NO: 58388 - DNA, 144 bp, Glycine max
  Clone ID: 700676389H1
ctcgagccgaaaaaatcagagtcactggtggcattcataacttgtatcatctgctgctataacaccgtaatactttggattggttccttcgttgctgctcaaactttatgttatatatattattgtcaaagaaaaaaaaataaa

SEQ ID NO: 58389 - DNA, 185 bp, Glycine max
  Clone ID: 700676390H1
caaaggtaaggtaggttaacactcttcttcatcgtcgtcgcaatgggacgtgtgatccgtgcgcacgtaagggagcaggctcggtcttcaagtcccacacgcaccaccgcaagggccctgcacgcttccggagcctggacttcggggagcgcaacggctacctcaagggcgtggtcaccgacgtc

SEQ ID NO: 58390 - DNA, 260 bp, Glycine max
  Clone ID: 700676391H1
tcctagtataccttaataaataatttaagatactatgatgagagcacggttcccattactgttgctgggacttgttttcctggcttcagtttctgtctcatttggcattgcttactgggaaaaagagaaccccaaacacaacaagtgtctccagagttgcaatagcgagagagactcgtacaggaaccaagcatgccacgctcgttgcaacctccttaaggtggagaaagaagaatgtgaagaaggtgaaattccacgac

SEQ ID NO: 58391 - DNA, 178 bp, Glycine max
  Clone ID: 700676392H1
cctaaacttcaccttcaaccatgaccacagtgccaccacacagtgtccaagtgcacacaacaacacaccgctacgaagccggcgtcgtcccgccggctcgttttgaggcgccgcgttacgcagccggcatcaaggcgccctcttccatttaccattccgagagaggtccgacgacctc

SEQ ID NO: 58392 - DNA, 261 bp, Glycine max
  Clone ID: 700676396H1
tgaggatacccatgacatactagctgaagtttcacctgatgcttctgtgtcaagcgaaagacctattatcacaatgacagaacctttatgctccagaaacttcataacttctgacagtctatattcaaagtcactcggaagctaccccttggaaattgaatcttgcaaaaacaattcaggtgatgctactctgtgtatttcagatagttccatgatgcatatatgttgtgaatcatccccccatgtagctcgtcaaatcat

SEQ ID NO: 58393 - DNA, 219 bp, Glycine max
  Clone ID: 700676401H1
cactaacaattccttcacttgcagcactgttgcatcatcatcttcattgcaaaaccctaaacttcaccttcaaccatgaccacacaagtaccaccacacagtgtccaagtccacacaacaacacaccgctacgaagctggcgtcgtcccccccggagcccgtttcgaaccgccgcgttatgaagccggcgtcaaagcgccctccatttaccattccgag

SEQ ID NO: 58394 - DNA, 129 bp, Glycine max
  Clone ID: 700676406H1
ctggtacctcccaggccgactgtgctgtccttattattgactccaccactggtggttttgaagctggtatttctaaggatggacagatccgtgagcatgctcttcttgctttcaccctaggtgtgaagc

SEQ ID NO: 58395 - DNA, 254 bp, Glycine max
  Clone ID: 700676410H1
actgctttcttagatcctgatggatggaaaactgttttggttgacaatcaagattttctgaaggagctggagtaaagagttatggctttttaatttaaagtactaatgctattgtatgaataagtgatcagctcctgtatttatcagtgaagtagtagtgttcaatacggtttctctgatgtgtttgcctgtttggttgagattctagacagtctacagtgacatccaacagtatttcaatatatttagtaaaa

SEQ ID NO: 58396 - DNA, 245 bp, Glycine max
  Clone ID: 700676411H1
tctcattttcatagactgcgttaataggtagccgtacctaataatcggcaagcaaagtactcattacttcagctcatgaatctcgcaatggcaacagacatattcgcatacggtattacaatggtgggaaaatcactaccctgtgcatgttacaagcttcgtgaataacgctcatctgcgatgcctcgtttagtatctaatcaatctactatcagatctagctcattaaggctgattaagacctc

SEQ ID NO: 58397 - DNA, 255 bp, Glycine max
  Clone ID: 700676413H1
ctcttaagaagctttttgatgatggtgtggtgaagcgtgaggacttatggatcacctccaaactctggtgttcagatcatgcttcagaagatgtgcccaaagcattggataaaacattgcaggatttgcaacttgattaccttgacctctatctgatccactggccagtgcgcatgaaaagcggatcagttggattcaagaaggaatatctcgatcaaccggacattcccagcacatggaaagcaatggaggcac

SEQ ID NO: 58398 - DNA, 257 bp, Glycine max
  Clone ID: 700676414H1
gagaaactttaagcagatgtctaatgttttgtgggtggctcctgaggacaaggcgagtttatggtcacaacttcattatgtttcgtgtaataatctggaaatgcaagaagcttatcttgtcaatctcgtaaatgtgttacgagaattgtatttgcacagtccagaggaagctcgccaattgagaaggaaagctctctctcgtattgaatggctgcaaaaagctgatgtgcctaccatagcacagattgaagagttcc

SEQ ID NO: 58399 - DNA, 253 bp, Glycine max
  Clone ID: 700676420H1
atcgaatccgttttatcgccgaagccatcctttgagccttaagttcgattcatttgcagttataatgctgtgtgttggaattcctaccgagtggtctgttgtggaggatctaccagaaggacctgctgttaaaattggtgagaacaaagatgcaatggatggttggtttagacttgagagagtttctgatgatgaattcaataactataagcttgtgttctgtccacagcaagctgaggatgacaatgtgggg

SEQ ID NO: 58400 - DNA, 250 bp, Glycine max
  Clone ID: 700676422H1
caagcctgtactgggcagattgaaaattactctagtgagtcttgcaacttcattacttgtatgtgcacttatcctcattaacattgatggggaccaaaacctgacatcaaaagaacctagagttcgagttgtacctggagtttacaatgatgattctgcaagattatttgaaccagatgcctttcgtgatgaacttgatcttcaataatacatgttgaccgcttatactaaagaattatcaacgctggac

SEQ ID NO: 58401 - DNA, 137 bp, Glycine max
  Clone ID: 700676423H1
gaaattttgataaaccgcgatcacaggttgccgcaccttaaaaccggaaacaaaagcaatcgttacttgatttcaagaatctttcaatttttcctactgctttgtgcacgatttcttaagggaaagagaatcactct

SEQ ID NO: 58402 - DNA, 254 bp, Glycine max
  Clone ID: 700676425H1
ttcaagctctgcaaggttaggtcagtgcagtttggccagaaaggtatcccatacctgaacacctatgatggtcgcaccatccgttacccagaccctctcatcagggccaacgacaccattaagctggatctggaggaaaacaagattgttgattttatcaaatttgatgttgggaatgtagttatggcgacaggtgggagaaacagggggcgtgttggagtgatcaagaacagggagaagcataagggtagctt

SEQ ID NO: 58403 - DNA, 253 bp, Glycine max
  Clone ID: 700676428H1
agtctttgtggtggtgatgcaaaattgatgcgtgaaaggacacacctgctgttggcttgttgttcaaggatggcaatttgtaagaaagatgtttggagagttgaatgtggaatcccttctggatttccgctcacagttatttgcaatagcatttttaatgagatgctcattagatatagctatgacaaattactgcgccaagctagagctccaagcatgtttttacaatccttcaaaaattttgtgtctctgt

SEQ ID NO: 58404 - DNA, 256 bp, Glycine max
  Clone ID: 700676429H1
ctctaatgacattgcaccccgtgtgttgccttacgttgttcacaccatcgctaaatacggtaagagttcatttatgtggcttggtccaacaccaagggtattcatcttggatcctgacaaattcaaagaaatggctactaaggtctatgattttcaaaagcccgacactagtccacttttcaagcttctagcatcagggtttgcaaattatgatggcgacaagtgggctaaacacagaaagatcgtgagtccagca

SEQ ID NO: 58405 - DNA, 245 bp, Glycine max
  Clone ID: 700676430H1
ggctcgagagtccctgcaggatccacaacctatgtggttaacactgacaacgacgagaatctacgaatgataacactcgccatacccgttaacaaacccggtagatttgagagtttcttcctatctagcactcaagctcaacagtcctacttgcaagggttcagcaagaatattctagaggcctcatacgacaccaaattcgaggagataaacaaggttctgtttggtagagaggaggggcagca

SEQ ID NO: 58406 - DNA, 260 bp, Glycine max
  Clone ID: 700676431H1
ctccgcagcagccacacttcttcgccgtttcagctgaagagccatccgcaggtaagcaatggttaagcataataatgttatccccaatgggcacttccggaaacactggcaaaactatgtgaagacttggtttaatcaaccagcccgaaagaccagaagacggttggctcggcagaagaaggctgtcaagattttccccaggcctactgctggatctctcaggcctattgttcatggccagactctgaaatacaacatga

SEQ ID NO: 58407 - DNA, 256 bp, Glycine max
  Clone ID: 700676432H1
tcggctcgaggccccccaaaaatgaagagcaccatcttctttgctctctttctcttttgtgccttcaccacctcatacctaccttcagccatcgctgatttcgtgctcgataatgaaggtaaccctcttgaaaatggtggcacatattatatcttgtcagacataacagcatttggtggaataagagcagccccaacgggaaatgaaagatgccctctcactgtggtgcaatctcgcaatgagctcgacaaatgga

SEQ ID NO: 58408 - DNA, 240 bp, Glycine max
  Clone ID: 700676434H1
gttcaatatcctagtataccttaataaataatttaagatactatgatgagagcacggttcccattactgttgctgggacttgttttcctggcttcagtttctgtctcatttggcattgcttactgggaaaaagagaaccccaaacacaacaagtgtctccagagttgcaatagcgagagagactcgtacaggaaccaagcatgccacgctcgttgcaacctccttacagtggagaaagaa

SEQ ID NO: 58409 - DNA, 256 bp, Glycine max
  Clone ID: 700676435H1
caagaattgcagtataatactgacaaattgaaagatttaatgattaaaaatgcagacagtaaagctgctgcattatataatgaggtttgtaatttaaaggaacagtgtgatttgtcattggattctcaatctcaagtagtatcagctaatactgaagtggaagatgatgtaacaacttttgataatcagagacttaaggatccagaagttattggttcttatttgcccgagtcagccagtttccttcatgtctcaa

SEQ ID NO: 58410 - DNA, 255 bp, Glycine max
  Clone ID: 700676436H1
gctcctgccaattcttgaggaaaataatgtggatatgtacattaatgggcatgaccattgcttggaacacataagtagcagaagcagccaaatccaattcttaaccagtggtggaggttcaaaggcatggaaaggagacatggataaagataagaaagatgggatcaagttttactatgatggacaaggatttatgtccgtggagctggaagaaaccaatgccaaagttgtttatttcgatatttatgggagagt

SEQ ID NO: 58411 - DNA, 253 bp, Glycine max
  Clone ID: 700676437H1
ggcaaaaggagatttgtttctggggatggtgaagagatgacattgattccgggaaccagtgttgaagaggcttacaacaagctaatagttgaacttgagaaaagtgttcctacattggttggcattgaatgtcccaaggatgagaaacttcctcgtcgcaaaatttttgacaaacctaagacgcgctgcttcactattctccctatggagtttaatcttgtggttcgtcagaagtttttaaattttgtgaggt

SEQ ID NO: 58412 - DNA, 248 bp, Glycine max
  Clone ID: 700676438H1
cttgcggatgatcacaaaaacatgtcttcctctctctaccaaactctaattcgtccaccacctttgctgctacaacaacagaatctgatgaacaacacaagagacctagaaggcaaagattttggtattggtattggtaatggtaataatggtatctttcctagtttaactttgccttttcctattcatcatcaaagccaaagcctactcttccctttctcaacctcaagcagctcttttgataccaa

SEQ ID NO: 58413 - DNA, 251 bp, Glycine max
  Clone ID: 700676439H1
agctttttgatcaacagaacgagggaagtattttcgcaataagcagagaacaggtgcgtgcgttggcccctaccaagaaaagctcttggaggccattcggtggcgaatccaagcctcaattcaatattttcagcaagcgtcccactatctccaacggatatggtcgtttaactgaagttggtcctgacgatgatgaaaagagttggcttcaaagactcaatctcatgcttacctttaccaacatcacccag

SEQ ID NO: 58414 - DNA, 250 bp, Glycine max
  Clone ID: 700676440H1
tatcaccattactgatggtattgacaaaactagcgcaactttgcaatttagaaagttagcagattgtgactttctcaaaagaaactttaagcagatgtctaatgtcttgtgggtggctcctgaggacaaggcgagtttatggtcacaacttcattatgtttcatgtaacaatctggaaatgcaagaagcttatcttgtcaatctcgtaaatgtgttacgagaattgtatttgcacagtccagaggaagct

SEQ ID NO: 58415 - DNA, 251 bp, Glycine max
  Clone ID: 700676442H1
gaaggagagtccttctttgccgtcgggggttcaaggattgggcatgggtttacccgatttgagaacgaagaaaaaggggaaacagaaggcttccaaagacagccacgtgtcggaggcgctcaacaagctcagggagcagaccaaagaggctgtgaaggggccggagtctatatccccacccactgccgatgatttaggtaaggatgccttgatggaagattgggtcaaacaatttgagcagctgctggctc

SEQ ID NO: 58416 - DNA, 249 bp, Glycine max
  Clone ID: 700676443H1
acaacatacaaaaatcaacgtgtgcgcttttcttctctttacccgttgaaacatccttagttttcagattctgaaatcttgattctgaattcatcacaatgaattcgtcaactacagtgaggaagttgcaggtggtgtcccctgttcctgcggacatagacattgcaaactccgttgaaccagttcatatctcccagattgccacagagctcaaccttagtcccaatcactatgagctttacggtaaat

SEQ ID NO: 58417 - DNA, 252 bp, Glycine max
  Clone ID: 700676446H1
agagagttttttttgttcctcactgaccaagccatggcgatgagaaccaaactttctttagctatctttttcttttttcttttagccttattttcaaacctagcctttggcaaatgtaaagaaaccgaggtagaagaagaagaccctgagctcgtaacatgcaaacaccaatgccaacagtcacagcaatacactgagggtgacaagcgggtatgcttgcaaagatgtgacaggtatcatcgtatgaagcaa

SEQ ID NO: 58418 - DNA, 127 bp, Glycine max
  Clone ID: 700676447H1
gggtgctgtcatagttcaacattttctgtgatcactcactttatctcgcttccaaccttgccatgctctgcgggcattttccgctatggccgaagaatttgtgaagggctctgttcatcaagacggc

SEQ ID NO: 58419 - DNA, 254 bp, Glycine max
  Clone ID: 700676448H1
atggattttggtccaagagggtcatctatgttatctcccaatgctcagatgggtggactgcgtggattgcctactcaagttcgcgggtatggttctcaggatgctcgcatggaagacaggcaaacttatgaggctaggacattgtcagttcccttgcctcagagacctttaggtgatgaatccataaccttgggaccacagggtggccttgccagaggaatgtccattagaggtccacctgcagtttcaagttc

SEQ ID NO: 58420 - DNA, 255 bp, Glycine max
  Clone ID: 700676449H1
ggagattggtggaagtagctcgtatagatactcaggtacttttgatgcggtacttaaaatgatacgttatgaaggactacctggcttttataaggggatgagcacaaagatagtacaaagtgtttttgcagcttctgttctattcatggttaaggaggagcttgttaaggcttttatggttgtggcagataagagcaaaaaagttgtatcaaatataagtagtctcttttcttcttttggataaagaagtaaaac

SEQ ID NO: 58421 - DNA, 251 bp, Glycine max
  Clone ID: 700676451H1
ctccattggtccttaaacactcatcagtcatcaccatggccaagctagttttttccctttgttttctgcttttcagtggctgctgcttcgctttcagttccagagagcagcctcagcaaaacgagtgccagatccaaaaactcaatgccctcaaaccggataaccgtatagagtcagaaggagggctcattgagacatggaaccctaacaacaagccattccagtgtgccggtgttgccctctctcgctgc

SEQ ID NO: 58422 - DNA, 239 bp, Glycine max
  Clone ID: 700676452H1
gttgcagcgcggtggttcacacttcacacggagaacggagtcggaggatccgttttcgcatgcctgcaaccccaccgagtaacaaaggaagaatctctaccctcttcgctttcacttctcgccaagtttagttaagcaaccagacaatgaagcacactgacaatggagctttcaactcggaacacaaagttcttcttcaccaatccattgcccgttacttgaaacacagtggcttctcc

SEQ ID NO: 58423 - DNA, 177 bp, Glycine max
  Clone ID: 700676453H1
attaccatgatatcttcatgccatatgtgaggcagataaatcagctgaattctgccaagacttatgcgacaaggactatcctttttttgagagaagatggaactttaaagccagtggccatcgaattaagtttgccacattctgctggggatctgtcagctgccgtcagtcaagtcg

SEQ ID NO: 58424 - DNA, 247 bp, Glycine max
  Clone ID: 700676454H1
cccgctggtgctcacttcgatcccgttggcgctctcttcgattcagatgcagatgcaacaaacgcagcagcaggccacggcgacaccattctcgacctgcactcctcctccttcctccggtggctccgcgtccgaggcaccgccaaagcaggtggctcaagcaatggacaagctcggacaggccgaacgaatcatcgccgacatccgaatcggcgccgaccgcctcctcgaagcgctcttcgtcgcg

SEQ ID NO: 58425 - DNA, 248 bp, Glycine max
  Clone ID: 700676455H1
tacattccagaacccctctcttggcgcaccccagaactctctagtctctatccagtaccttttggttttctataagctcttctctttccacttgttcaaatcaaattcattcctttccttctttcttctaaaccctatggccgacgaagccaaagccaaaggcaacgcagccttctcctccggggactattctgccgccatccaccacttctccgatgccatcgccctggctccctccaaccatgtcc

SEQ ID NO: 58426 - DNA, 251 bp, Glycine max
  Clone ID: 700676456H1
gtccaaaaattatttgatgagatgaaagcaagacgcatttatcctaatgatctaacttactcaacattgattaaaatatacactaaaggtagaatgtatgctgaggcgatggatgtttatagagagctaaagcaggaaggcatgaagacagatgttgtattttacagtgctctaattgatgctttatgcaaaaatggtttgattgaatcttctctgaggctgctggatgtgatgacagagagaggaagtag

SEQ ID NO: 58427 - DNA, 250 bp, Glycine max
  Clone ID: 700676457H1
gtaatagaaacctctcagcccctctccgatcaaatggccaccgtaatcgacggcaaagccgttgcgcaaaccatccgatctgaaatcgccgacgaggtgcgccactctctcaaaaatacggcaaggttccgggattagcggtggtgatagtagggaacagaaaagattcacagagctatgttggaatgaagagaaaggcatgcgctgaattgggaatcacatccttcgatgtggaccttcccgaacaagt

SEQ ID NO: 58428 - DNA, 244 bp, Glycine max
  Clone ID: 700676458H1
aacgggtatggcgagtgttattaatctgagattttcttcctatctagcactgaagctcaacaatcctacttgcaaggattcagcaggaacattttagaggcctcctacgataccaaattcgaggagataaacaaggttctgtttagtagagaggaagggcagcagcaaggggagcagaggctgcaagagagcgtgattgtggaaatctcgaaggaacagattcgggcactgagcaaacgtgcca

SEQ ID NO: 58429 - DNA, 248 bp, Glycine max
  Clone ID: 700676459H1
gaaagtgagaggagagagaaagtagcagatcctccatggcctccaccaaggaacgtgaaaacttcgtctacgtcgccaagctcgccgaacaagccgaacgctatgaagaaatggtggaagcaatgaagaatgtggcgaactaaacgtggaattgacggtagaggagcggaaccttctgtcggttgggtacaagaacgtggtgggtgctcgtagggcttcgtggaggattctttcctcgattgaacaga

SEQ ID NO: 58430 - DNA, 112 bp, Glycine max
  Clone ID: 700676461H1
tggcaagatgtcgaagagatgacgcggtggttcggcggggaacaagttccggatgtcgctgggtctgccggtggcggcgaccgtgaactgcgccgacaatacgggggcgaag

SEQ ID NO: 58431 - DNA, 253 bp, Glycine max
  Clone ID: 700676462H1
ctctccattgtctttgaacactcatcaccatggccaagcttgatctttccctttgtttccttcttttcagtggctgcttcgctctgagagagcaggcacagcaaaatgagtgccagatccaaaagctgaatgccctcaaaccggataaccgtatagagtcggaaggtgggttcattgagacctggaaccctaacaacaagccattccagtgtgccggtgttgccctctctcgctgcacccttaaccgcaatgc

SEQ ID NO: 58432 - DNA, 254 bp, Glycine max
  Clone ID: 700676463H1
attgtgttttaaatccacaaaatccttttgtgttaaataggtggatgggaaaactgactttccctcagggcacttcccgaagtgttaagagaatgcctctttatatagggggaggagctggtgcaaagaatgctattctcatgaatatgccaaatgctgttctttcaatgtggagatattttgttggagatctcgtctttgaagtttctaagatgacttctccctacattaaatgtacagtctctttcttcata

SEQ ID NO: 58433 - DNA, 197 bp, Glycine max
  Clone ID: 700676464H1
ctggtataatgcctaatgatctgcagatttatgtcacaactgcatccaatgcacaagagaatagttggggaacttattgtcctggaatggatccttctccacctccagagtacatcacttgcctaggggatttgtacagtgatgcttggatggaagatagtgagactcataatctaaaaagggagtccgtgaaacaa

SEQ ID NO: 58434 - DNA, 258 bp, Glycine max
  Clone ID: 700676465H1
gtcataatatcaccattactgatggtattgacaaaactagtgcaactttgcaatttagaaagttagcagattgtgattttctcaagagaaactttaagcagatgtctaatgttttgtgggtggctcctgaagacaaggcgagtttatggtcacaacttcattatgtttcgtgtaataatctggaaatgcaagaagcttatcttgtcaatctcgtaaatgtgttacgagaactgtatttgcacagtccagaggaagctc

SEQ ID NO: 58435 - DNA, 252 bp, Glycine max
  Clone ID: 700676466H1
ttcagaatgaggttctctgtcgtttcacctttccagaaagacctggtgctttgatgaaatttttggaccccttcagtccacgttggaatatcagtttattccattaccgaggggagggtgaaactggagcaaatgtgctagttggaatacaggtacccaaaagtgagatggatgagttccacgatcgtgccaacaaacttggatatgattataaagtggtgaataatgatgatgacttccagcttctaatgc

SEQ ID NO: 58436 - DNA, 192 bp, Glycine max
  Clone ID: 700676467H1
gtacaattctgttacgcttccgacaaactttgctgcaatggctactcactctgctgcgacggagaggacttacaaagaatcattcgattccgctgcaaacaagcgctacgctgatcacataattcctcatattctgcatctgtatggatcatctgcaacctctcgcgactttgaaatctatgccgcaaatgc

SEQ ID NO: 58437 - DNA, 132 bp, Glycine max
  Clone ID: 700676469H1
ttctctccattggtccttaaacactcatcagtcatcaccatggccaagctagttttgtccctttggtttctgcctgtcagtggctggtgcttcgctttcaggtccagagagcagcctgagcaaaacgagtgc

SEQ ID NO: 58438 - DNA, 246 bp, Glycine max
  Clone ID: 700676470H1
aataaaatcaagaaagcatgcatatgatgaagaaggtgtgtgggtttgcaatagtggtgatggcagcactttttctggtggagatgagtcccatggcagaggctgtgacttgtagccctgtggagttgagtccctgtttgggggcaatcacgtcctcttcaccaccatcgacaacttgttgccagaaggtgagggaacaaaggccatgcctctgtggttacctcaaaaaccctagtctgaggccat

SEQ ID NO: 58439 - DNA, 243 bp, Glycine max
  Clone ID: 700676471H1
gaaagacaagccatggtggcctaagttgcagacaattgaagagcttgttgaaatttgcaccattatcatatggactgcttcagctctccatgcagccgttaactttggtcaatatccatatggaggtttcattctgaatcgcccaacttcttctagaaggttgcttcctgagaaaggcaccccagaatatgaagagatggtgattagtcatcacaaggcttatttgagaactattacatcaaa

SEQ ID NO: 58440 - DNA, 243 bp, Glycine max
  Clone ID: 700676472H1
ctcatcgttatccttaacgggactgccattctttccttggtgaacaacgacgacagagactcctacagacttcaatctggtgatgccctgagagtcccctcaggaaccacatactatgtggtcaaccctgacaacaacgcaaatctcagattagataacactcgccatacccgttaacaagcctggtagatttgagagtctcttcctatctagcacagaagctcaacaatcctacttgcaagg

SEQ ID NO: 58441 - DNA, 244 bp, Glycine max
  Clone ID: 700676474H1
ggtagcgcttttttgaagtcggagaagaaacgttgatgctgttgcgtaaccctgcgttgacagcgtcgctgctatcagccaccacaaagaagctctacaaccaccgttattctacacctgctgcattcatggcgtcttcaggtgtcgcgtgcagtttgctggttttgtgtggcaaatcactggcagagaattaccctgctaaagctataaagaccaataacacactgaagctccctgaggatga

SEQ ID NO: 58442 - DNA, 247 bp, Glycine max
  Clone ID: 700676475H1
taacgcacgatccaaaagcagaaagcaaagttgtttgactgataccagtttattgattttgatatccgaacacacattctttcagcaaataagtacggaactatatatgtaaaaaaatgaacaaaaaagctttgtccattttgatgcgcgccagaatgaagcccaacgatcgtacaagcctttctctctctcctattcctctaacaaacgcgacgagtcaaatgcagcagcagaattcccgccaaaa

SEQ ID NO: 58443 - DNA, 248 bp, Glycine max
  Clone ID: 700676477H1
gccacaacggaacaggtgaatgctgctggtgacatgtgtgctatatgccaggagaagatgcaggctcccatattgttgagctgtaaacacatgttctgtgaggagtgtgtatctgaatggtttgagagagaacgaacttgtccattatgcagggcattggtaaaaccagctgatctgcggaccttcggagatggatcaacaagtctattttttcagttgttttaagttcattttctttgacttgttgg

SEQ ID NO: 58444 - DNA, 248 bp, Glycine max
  Clone ID: 700676478H1
caaaagggagttttgggatttctggagtctcaggaaaattttcctttcacaagacaaggcattgttcctgatattgtcataaatccgcatgcatttccctcacgacaaactcctgggcaactcctagaggctgctttaggaaaggggattgcttgtggtggtatactgaaacaagctacgcctttctccactccttctgttgatgccattactgaacagcttcacagagctgggttttcaagatgggg

SEQ ID NO: 58445 - DNA, 253 bp, Glycine max
  Clone ID: 700676479H1
atatcctagtataccttaataaataatttaagatactatgatgagagcacggttcccattactgttgctgggacttgttttcctggcttcagtttctgtctcatttggcattgcttactgggaaaaagagaaccccaaacacaacaagtgtctccagagttgcaatagcgagagagactcgtacaggaaccaagcatgccacgctcgttgcaacctccttaaggtggagaaagaagaatgtgaagaaggtgaa

SEQ ID NO: 58446 - DNA, 120 bp, Glycine max
  Clone ID: 700676484H1
aagagaaccccacacacaacaagtgtctccagagttgcaatagcgagagagactcgtacaggagccaagcatgccacgctcgttgcaacctccttaaggtggagaaagaagaatgtgaag

SEQ ID NO: 58447 - DNA, 163 bp, Glycine max
  Clone ID: 700676485H1
tgtagattcattggtgaagaaagcatatgaaaattgggatcaggttgtggattatgatggcaaatcactcgtgaatgctaaaattgcttctgaaaatgaacttcgggtggagtcaattgattatggtagtggtttagatcatcagctgcaactgccggcactt

SEQ ID NO: 58448 - DNA, 243 bp, Glycine max
  Clone ID: 700676486H1
gcaggcccgaacaacaagaaccacgtggaagaggatgtcagactagaaatggggttgaggaaaatatttgcaccatgaagcttcacgagaacattgctcgcccttcacgtgctgacttctacaacccaaaagctggtcgcattagcaccctcaacagtctcaccctcccagccctccgccaattcggactcagtgcccaatatgttgtcctctacaggaatggaatttactctccacattgga

SEQ ID NO: 58449 - DNA, 247 bp, Glycine max
  Clone ID: 700676491H1
ggcgagcaacagagagagagaagaatcgctgacattcacaatcccttcttcctcttcccattcttcccccatcagcgtctccgaccaactcgacagttacctcgccgaccccagaagcgcctccggaagcttccagaacgacggccttctctcctccggagacgcctccgccgccgatcccgacttcggtttctcccgccccgatttccggcagagctccctcgtcggcaccgtcgagttctaccga

SEQ ID NO: 58450 - DNA, 246 bp, Glycine max
  Clone ID: 700676492H1
agcaagttttgttttgtttggtgttgtgttgcactgtcactgttacagttgtcggtgtaaaggaacagcggtgggtgagtgagagagggaggaaacatggctacggcgtcggcgtcggcgtcgtgggaggaactgacgctgaaagtgaaatggagcggcaacgaatacaccgtccgcgtctgctgcgacgacaccgtgggcgaactcaaacgtcgaatctgcgagctaaccaacgtcttacccctt

SEQ ID NO: 58451 - DNA, 231 bp, Glycine max
  Clone ID: 700676493H1
gctggtaatactcttatgccagctttttctgttccacaggctactgccagatcttctgaaaatgcggaatcctctgcatgatctggaatttgtgttttctttcgcttgttcgtttgtttaattcaataaaggaaattaggcatgaccctcttgttgagtatgctctgcctatttgaaaatttccacacctcttttaattgtcgtaatgatgtgtgaagtgtgtgttatttt

SEQ ID NO: 58452 - DNA, 250 bp, Glycine max
  Clone ID: 700676494H1
tctcgagccgattcggctcgaggacagtggctgcagcgggtctaacatgtgcatctccgcattggtccatacgtgtgtgacggatggaactatggtggtttccctctttggctacacttcattccgggaatcaagttccgaactgacaatgaacccttcaaggcagaaatgaagcgattcactgccaaaattgtggatatgatcaaggaagagaatctatatgcctcacatggaggacctgttgatatat

SEQ ID NO: 58453 - DNA, 167 bp, Glycine max
  Clone ID: 700676495H1
ctgatgagagattggttggcacagaacatgagggatatgatccgtttcttggcggaattcaaaagtatgtcactcccatgatgcccctagatgaagaaattctttccaaggtttcgcaagatatggttgaggaatggtttgattgtgttgatgatgaggattccttt

SEQ ID NO: 58454 - DNA, 254 bp, Glycine max
  Clone ID: 700676496H1
agcattgttgctgacaagggtctaaaaaagccactctatacatctgctcgtttaaagaagggagaagttctttatctggagacacactcctgcagatatgagctctgttttactggagaaaagatggcgaaggctataccagcaactcagatgcatgacctagatacagagaagtctcaaaatcaccatcaccatcccacaaatggtgacaaagctgattctgataatgttatggttgatgtatttcgatggtc

SEQ ID NO: 58455 - DNA, 255 bp, Glycine max
  Clone ID: 700676502H1
ctcaagacgcgcaaatcctgattgttcaatctttggtgcaatgcttttggttgaaacttcatctaccaatcctgaaaatgcagttcgtagtatgtttgttgcgcctttcagaggcggaaggcccattcgggtggttacatttccgaataccattgtgcagcttgaaccagacatgaattcaaggtttcagcttttgagtaccactaccaatggtgattttgttcaatccggaaatgtcgcaatggttaaagttaa

SEQ ID NO: 58456 - DNA, 254 bp, Glycine max
  Clone ID: 700676504H1
gtgttacaacttacggctaaattctcaaagatttaaactttgtctcagagtttccaaattcacccaaccccagagagaaaatgtctctaatcccaaatttcttcggtggcagaaggatcaacgttttcgatcctttatccctcgacgtctgggaccccttcaaggattttcctttcccaaacactctttcttcagcttcctttcctgaattttctcgggaaaattctgcattcgtgaggactcgtgtggattgg

SEQ ID NO: 58457 - DNA, 252 bp, Glycine max
  Clone ID: 700676505H1
ataatatcatttccgttctcaaaatcataacagtacttcgcgtgccctagctcactccgtcgctcctcacccttccggcagtgcttggtcgtggccgtcacggttcaaacttcaaaagttataattggttcagcttgatcaggaaggagggtcatctgcagttcaaaaggtgtgaaagcaaagaagatgcagcatagaaaattgacttctggaaggccttctggaactgatggctctgattactcctaccgt

SEQ ID NO: 58458 - DNA, 256 bp, Glycine max
  Clone ID: 700676506H1
caaggaagtgaagaggaacaagatgaacgtgaacacccacgcccacaccaacctcatcaaaaggaagaggaaaagcacgaatggcaacacaagcaggaaaagcaccaaggaaaggaaagtgaagaagaagaagaagaccaagacgaggatgaggagcaagacaaagagagccaagaaagtgaaggttctgagtctcaaagagaaccacgaagacataagaataagaacccttttcacttcaactctaaaaggttcc

SEQ ID NO: 58459 - DNA, 253 bp, Glycine max
  Clone ID: 700676507H1
atgtgatcaaggccatgactcaaaagggttatagtttcgtcgggtatctacctttgattcccattgaagagatagccaaggcattcaagcagggagaggcgaacttaaaaggagataatgcagcctctgaggaacaaagattagaatctgcatctgattctgattaaattcagctttacttcttcaaaaaaatttgcttatgagtgaacttgttttgtgggttgtgacattctaggcaatgtggtggttgtga

SEQ ID NO: 58460 - DNA, 92 bp, Glycine max
  Clone ID: 700676508H1
tgtcagtgtcagacatgaacatgaggcagcaggtagcatcatcagatcacagtgcatccacatgagaggagaccggatgcacggtgagggag

SEQ ID NO: 58461 - DNA, 254 bp, Glycine max
  Clone ID: 700676509H1
gacaagcttagttgccaagttggaatcaatccatactccatggaatggaccggtttggccaacagactactgagtaagggcaacgatattctgtgttgcgattatgctagttttgatggtttgattaccaagcaagttatgagcaagatggcagaaatgataaacagtctttgtggtggtgatgaaaaattgatgcgtgaaaggacgcacctgctgttggcttgttgttcaaggatggcaatttgtaaaaaaga

SEQ ID NO: 58462 - DNA, 254 bp, Glycine max
  Clone ID: 700676510H1
ctctccattgtctttgaacactcatcaccatggccaagcttgtactttccctttgtttccttcttttcagtggctgcttcgctctgagagagcaggcacagcaaaatgagtgccagatccaaaagctgaatgccctcaaaccggataaccgtatagagtcggaaggtgggttcattgagacctggaaccctaacaacaagccattccagtgtgccggtgttgccctctctcgctgcacccttaaccgcaatgcc

SEQ ID NO: 58463 - DNA, 254 bp, Glycine max
  Clone ID: 700676512H1
tgatcagaaggataagctgtggcctatgctgcaaaagcttggggtcaccatgaaatctgaggagaaggacctaatgggcaaagcattgatgaagcgtgtcatgcaaacctggcttccagcaagtagtgcattactggaaatgatgatatttcatctaccctctccatcaacagcccagaagtatcgtgtggagaatttgtatgagggtccccttgatgatcaatatgcttcggctatcagaaactgtgatcctg

SEQ ID NO: 58464 - DNA, 258 bp, Glycine max
  Clone ID: 700676514H1
gcacgagcggctcgagcggctcgagcgacaccaaattcgaggagataaacaaggttctgtttggtagagaggaggggcagcaccaaggggaggagaggctgcaagagagtgtgattgtggaaatctcaaagaaacaaattcgggaactgagcaaacatgccaaatctagttcaaggaaaaccatttcttctgaagataaacctttcaacttgagaagccgcgaccccatctattccaacaagcttggcaagttgtttg

SEQ ID NO: 58465 - DNA, 257 bp, Glycine max
  Clone ID: 700676515H1
atgagtgccagatccaaaagctgaatgccctcaaaccggataaccgtatagagtcggaaggtgggttcattgagacctggaaccctaacaacaagccattccagtgtgccggtgttgccctctctcgctgcacccttaaccgcaatgcccttcgtagaccgtcctacaccaacggtccccaggagatctacatacaacaaggtaatggtatttttggcatgatattcccgggttgtcctagcacttatcaagagccg

SEQ ID NO: 58466 - DNA, 251 bp, Glycine max
  Clone ID: 700676517H1
cttgctctaccgtgttgcaactatgaaagggttggtttggctactatgtgtttatggggtgccattgctcattgtgaacggttttcttgtgaccatcacatatctgcagcacacacactatgccttgcctcactatgattcatcagaatgggattggctgaggggtgctttggcaactatggacagagattatggaattctgaacaaggtgtttcaccacataactgatactcatgtggctcaccatcttt

SEQ ID NO: 58467 - DNA, 251 bp, Glycine max
  Clone ID: 700676518H1
gctggtaatactcttatggcagctttttctgttccacaggctactgccagatcttctgaaaatgcggaatcctctgcatgatctggaatttgtgtattctttcgcttgttcgtttgtttaattcaataaaggaaattaggcatgaccctcttgttgagtatgctctgcctatttgaaaatttccacacctcttttaattgtcgtaatgatgtgtgaagtgtgtgttatttttatacaatgaataaaatgat

SEQ ID NO: 58468 - DNA, 249 bp, Glycine max
  Clone ID: 700676522H1
caagcctgtactgggcagattgaaaattactctagtgagtcttgcaacttcattacttgtatgtgcacttatcctcattaacattgatggggaccaaaacctgacatcaaaagaacctagagttcgagttgtacctggagtttacaatgatgattctgcaagattatttgaaccagatgcctttcgtgatgaacttgatcttcaataatacatgttgaccgcttatactaaagaattatcaacgctgga

SEQ ID NO: 58469 - DNA, 252 bp, Glycine max
  Clone ID: 700676523H1
agcctaacccaggttttcgaagtgacgcacctatacagaatggattttaccctgggtcttcatctgggcccaaggaaccatcgattaacatctcttcaattagctatgactatctcaatcataaaaatgattgtaagataattcctgatcacttcatcaacaatgtttcgtcaaaatcctgtaagggttcagattcaaattgcaatgacatgaagtctggaaaagatattgacttgaatgtgctgcttccga

SEQ ID NO: 58470 - DNA, 250 bp, Glycine max
  Clone ID: 700676524H1
ctcgtctttgaagtttctaagatgacttctccctacattaaatgtacagtctctttcttcatagcatttggaaatttggctgatgacaccatcaattttgaggcttttccccataagctggtgcagtttggagagattcaggaaaaagttgtattgaaattttcacaagaggaatttcttacagcttggtcaactcaggtgcgtcctgcaacaactctgttggctgatgggtgtccatatttgtatgcta

SEQ ID NO: 58471 - DNA, 249 bp, Glycine max
  Clone ID: 700676525H1
tgcctctagggttatcatttctccatttccattttctctctcacttttcaagaatcgtaagctatgggaaagtcttacccaactgtgagtgctgattaccagaaggccgttgagaaggcgaagaagaagctcagaggcttcatcgctgagaagagatgcgctcctctaatgctccgtttggcatggcactctgctggaacctttgacaagggcacgaagaccggtggacccttcggaaccatcaagcac

SEQ ID NO: 58472 - DNA, 250 bp, Glycine max
  Clone ID: 700676526H1
aaaaaagatcatacatagtagtgttggtgggttgcaaagatgcttgggggtcttctccataggggtcataagataaaagggacagtggtgttgatgcgcaagaatgtgttggacgtgaatagcgtaaccagcgttgggggaattattggtcaaggtctcgacttagttggctcaacactcgatactcttactgccttcttgggccgatccgtgtctctccagcttattagtgctaccaaagctgatgcca

SEQ ID NO: 58473 - DNA, 251 bp, Glycine max
  Clone ID: 700676527H1
gattctgtagagaagaagagcaatggcgtccaacgattccgattcgcagatgaagatcgtacatggcgatgctggttacatacttgaagacgttcctcacttcgccgactatattccaaatcttcctgtattttctctctctctctctctctttaggagttcttcgattacatatgcgaactgcattgcattgacgcattcacttgcggatcgtttgtgtactacttttttttttttgcagacatatccga

SEQ ID NO: 58474 - DNA, 251 bp, Glycine max
  Clone ID: 700676528H1
catttctaatattgcttccaaaatctctctctctctctctctctggggggtatgtgtgttgttcagtacaactagttttggtatagctagctgctcttcatttgattttgctcgcagtcgcagctccaatccaaatatggaggcgatcactgcttccttagagaggtctcttcaaaactgttccttaaacaataccaacaacaaccatcagcagagcaggaggccggaagaagatgatgggtcagctacag

SEQ ID NO: 58475 - DNA, 254 bp, Glycine max
  Clone ID: 700676529H1
ctcgagccgggaaaaacagtaaagatgggtttgaagaacaacatggtggtgctaaaggtgtgtttcttggttcttttccttgtgggggttactaatgcacgcatggaactgaacctcttcaaaagtgatcactcatcaagtgatgatgagtcttcaaaaccatgctgtgatctctgcatgtgcacagcctcaatgccacctcaatgccattgtgcagatattaggttgaatacatgtcactcagcttgtgatcg

SEQ ID NO: 58476 - DNA, 92 bp, Glycine max
  Clone ID: 700676530H1
ggcggataaatcagacatatgcctcgaccactgtgtatccatctagatcaagggcatctgctgttatcttactggatcctaagatctatggt

SEQ ID NO: 58477 - DNA, 219 bp, Glycine max
  Clone ID: 700676531H1
gcacggttcccattactgttgctgggacttgttttcctggcttcagtttctgtctcatttggcattgcttactgggaaaaagagaaccccaaacacaacaagtgtctccagagttgcaatagcgagagagactcgtacaggaaccaagcatgccacgctcgttgcaacctccttaaggtggagaaagaagaatgtgaagaaggtgaaattccacacaac

SEQ ID NO: 58478 - DNA, 256 bp, Glycine max
  Clone ID: 700676532H1
tggccacgcgcgctagagttgctgcatacaaggtatgctggaaaggagggtgtttcagctctgacattcttgccgcaattgaaagggcaatattggacaacgtgaatgttctttctttatctctcggtggtggcatttctgattattacagagacagtgtcgctattggagctttttcagcgatggagaaagggattttggtatcatgctccgctgggaactcgggtccgggtccctacagtctctccaatgtggt

SEQ ID NO: 58479 - DNA, 254 bp, Glycine max
  Clone ID: 700676533H1
gcatggtggatgtacaacaatgaagacactcctgttgttgccgtttctattattgacaccaacagcttggagaaccagctcgaccagatgcctaggagattctatcttgctgggaaccaagagcaagagtttctaaaatatcagcaagagcaaggaggtcatcaaagccagaaaggaaagcatcagcaagaagaagaaaacgaaggaggcagcatattgagtggcttcaccctggaattcttggaacatgcatt

SEQ ID NO: 58480 - DNA, 250 bp, Glycine max
  Clone ID: 700676535H1
cgtgaaggagcacgaaacggtggctgtgaactgcgttttgcagcttcacaagacactctacgacggaagcggaggagccttgagggacttcttgggtctaatccgcagcacaaatcccagcgttgtcgtggtggcagagcaagaagcagaacataacgaaaacaggttggagggaagggtgtgtaactcgttgaaatactactcggcattgtttgattccattgacgagagtgggcttccgcaagagagt

SEQ ID NO: 58481 - DNA, 250 bp, Glycine max
  Clone ID: 700676536H1
aaaattcttccaccaagttatgggtttccttgtgttgcttcttttctccctcttaggtctctcttctagttccagcatatcaactcatcgttccatattggaccttgacctaaccaagtttaccacacagaaacaggtgtcttcactgttccaactatggaagagtgagcatggacgtgtctaccataaccacgaagaagaggcaaagagacttgagattttcaagaataacttgaactatatcagggac

SEQ ID NO: 58482 - DNA, 249 bp, Glycine max
  Clone ID: 700676538H1
ttctctccattgtctttgaacactcatcaccatggccaagcttgttctttccctttgtttccttcttttcagtggctgcttcgctctgagagagcaggcacagcaaaatgagtgccagatccaaaagctgaatgccctcaaaccggataaccgtatagagtcggaaggtgggttcattgagacctggaaccctaacaacaagccattccagtgtgccggtgttgccctctctcgctgcacccttaaccg

SEQ ID NO: 58483 - DNA, 249 bp, Glycine max
  Clone ID: 700676539H1
gttttccctttgttgcctttcccttcccatccaaacagctgagttctatgaagcctgaagcccactgcctaaactggaagaccagatcaaccaggttttgacaaactcatggcccaccttgacacctctacctaggggaccaaacatgtggagactattgatattggccatgtccattttaccttatttcacaagcttgataactaatgctcccccaagaacctataaagctggcttgcctttttggct

SEQ ID NO: 58484 - DNA, 79 bp, Glycine max
  Clone ID: 700676540H1
ttggttcatcaatattcatgggatctggtataaggaaaacagtctcatctgacgtgggatacgttccacttgactctgg

SEQ ID NO: 58485 - DNA, 250 bp, Glycine max
  Clone ID: 700676542H1
caagcaaatcctaaaaagttgattgagatatatagaaactagcttcaatttcacaaaatgaagaaagtgtttgtcacatttttagctgtgctagttgtatttgttcttacagcgaaagcttcagaggcacgactaccagttaaaacaaattcagcatcaaatgactacaattgttcacaagtctataacctgttagtttcgtgcgtagattacatgattggtggagatgatggtgccccttcaggtgttt

SEQ ID NO: 58486 - DNA, 246 bp, Glycine max
  Clone ID: 700676543H1
cttattgacaatcccaaacagtctacagtttttgatattctcttgggaatttctcaagattttgaaattgctggtaatactcttatgccagctttttctgtcccacaggctactgccagatcttctgaaaatgcggaatcctctgcatgatctggaatttgtgttttctctcgcttgttcgtttgtttaattcaataaaggaaattaggcatgaccctcttgttgagtatgctctgcctatttgaa

SEQ ID NO: 58487 - DNA, 250 bp, Glycine max
  Clone ID: 700676544H1
gcaatccacaagctaagccgcttacttcctgaggcaagaaattgaaaagtgaaggttccaagattttgcttattgaaatatgaaacaattagcatccttgtgaatgctactgcttatttttgatgcattgtcattttttaaggggtttgctgatacttttatatattttggcatctttatgaacagttgttctaggacacgaccctctctctaaaatgccttgtaacatgggttgtatcgttacgttaca

SEQ ID NO: 58488 - DNA, 252 bp, Glycine max
  Clone ID: 700676546H1
ctctgttctttctctctcaaaggaaagaaaaggaaagaaaagaacagaaaaagaagagagtgtaggtaaacagaagcacacactacacagttaacaaaatcaggttcaaacgcacagatctgggagaagagaagaagaagaagaagaagatgggacaggatcagaaccagagatcgctgatctacgcgttcgtgtctcgcggcacggtgattctcgccgagtacactgaattcagtggcaacttcaacacaa

SEQ ID NO: 58489 - DNA, 253 bp, Glycine max
  Clone ID: 700676547H1
ctccaggctccaactgaagacacccacctgattttgaattaagttaagggatgtattaagtatatgctaaataagaggtgtatctacaaccattgactttgtcatgctcaaaaatttagtttaatttacaaattatggcaagggttacacctggctagcttccgcgtttagatcatttgtttatagtgctatggccacgacaagagtgttatgggtgcatgaatgtaaaacgaaaaaaaaaaaaaattgtgtt

SEQ ID NO: 58490 - DNA, 254 bp, Glycine max
  Clone ID: 700676548H1
ctgcttcattgcataattgcagataagatcaacccttctaccttcagaatcatgggtgtgaaactgcattatatacatccttgccccacaaatacatgaactatatgataaagaagtagaaggaagacttgaattttctacgaaagtgatctcagattcgcgggaagatggcatcacttcatgctaatgtgacatcagttgtttacaacagtggcaaccgtgtttctcaatcgaaatttgcaagctcttccttc

SEQ ID NO: 58491 - DNA, 248 bp, Glycine max
  Clone ID: 700676551H1
tccggataaaggtgaaaatcatgcccgtcctgttcttggaggaaatgacacctttccttatcctcgtagggggagaactggtagaaaaccaacaaggaaagatcctaatagtgagagtaggagcaatgatgtttatcttccaagagatgaggcttttggacacttgaagtcatctgactttcttacttatggactaaaatccgtatctcaaaatgttcttccattattgcaatctgcttttgatttga

SEQ ID NO: 58492 - DNA, 247 bp, Glycine max
  Clone ID: 700676554H1
cgggttcctgacgtcgggagtctttgggctcacggcgctgtcgtccttctcctggatcctgaactacatccgggagacccagccggcgtcggagaatctggccgctgcggcgaacaccatctggcggaggcggcggagtacgtggggcagaagaccaaagaagtagggcagaaaacccatgaagttgggcaggatattcagagcaaggcacaagatacaagggaagcagctgcaagagatgcaagag

SEQ ID NO: 58493 - DNA, 109 bp, Glycine max
  Clone ID: 700676556H1
atttgttgaaactatatacaaatttcacattgatcagatctaaacacaacctttgcaagttgcaacaacattcaaaggttgtgactagatctgatcaatgtaaaatttg

SEQ ID NO: 58494 - DNA, 248 bp, Glycine max
  Clone ID: 700676557H1
taataatctggaaatgcaagaagcttatcttgtcaatctcgtaaatgtgttacgagaattgtatttgcacagtccagaggaagctcgccaattgagaaggaaagctctctctcgtattgaatggctgcaaaaagctgatgtgcctaccatagcacagattgaagagttccattcgatgcagaggatgatgaatgctcctgattcaaatgataatattgatcttctgttgagcattgatttgttgggtt

SEQ ID NO: 58495 - DNA, 244 bp, Glycine max
  Clone ID: 700676558H1
cccttgtaaaacttcttattgtgatgtctaaaagcgaagacttgaagcttttgggaggctggttcagcccatttgccctgagggtgcagattgcccttaacctcaagggtctagaatatgaggttgttgaagagaccttgaatcccaaaagtgacctgcttcttaagtccaaccctgtgcacaagaaaatcccagttttcttccatggagataaagtcatttgtgaatctgcgatcatagttga

SEQ ID NO: 58496 - DNA, 245 bp, Glycine max
  Clone ID: 700676559H1
gtgcccagcgctgaaaatatcagctttttgggcaattaactattgacagaatggatcccaaaattgatagtaattattaagggttgtgcccagcgctcaaaaatcttgttttgctttgtattttataaatacttagtttttcctagtaattcagagagatattacgcgtctactgttaaataatagatacatagacaagatacctcaccagtggacaattcatgggttctttaacttgtgtttta

SEQ ID NO: 58497 - DNA, 246 bp, Glycine max
  Clone ID: 700676560H1
ctgcaaaggattctacccgccgctcgatgggaattgcgcttcaaggcgtctcgtagggctaatccgcctcacgagggtcaccaacggcacgtgcctttggggggccgaggccccctactgctggtcggcaaacggacggcgggcgcacgcgtcgcttctagcccggattctgacttagaggcgttcagtcataatccaacgcacggtagcttcgcgccactggcttttacaccaagcgcgatgacc

SEQ ID NO: 58498 - DNA, 249 bp, Glycine max
  Clone ID: 700676561H1
aaatccttcacttgttgctcgtcttagtttctgtgttgtgtcatttttattgctatatcctaattaaacttcaccctcaaaatgagtgatcccacactagcacaaccacacctagtcgaagtccacacaacactcgaaaccgttgttaccacacacaaccataaccatagaccctcaataaatgtgtgttactgaatatttaattatttgtacacctgaccatgattaatatttaattcttcaactttg

SEQ ID NO: 58499 - DNA, 248 bp, Glycine max
  Clone ID: 700676562H1
cgacctgtggtggaaagatgaggtttgctttggttggttggtactttgttgtagcatatagtcagtaagattatatgtttcttttttctgttttataaaaaaagttgtttattttttgggagaataaataaaagtccgatcagagagggaatttaagatagagaccaataaagaagaagaggggacttaattaaggttgtatttttttttttttttatctccatcttgttttttaagatcgttcctgg

SEQ ID NO: 58500 - DNA, 251 bp, Glycine max
  Clone ID: 700676563H1
atttaatccaaacccgtgttctgatgcatggagtttggaatttctgaagcgtaccggatttcattgtgatatcatttgtgtcactggatggactgccactccaatacaggatgttcaggttacaattgattggtttatttcctctcaggaatgtgttcccaggacctattgtgttttaaatccacaaaatccttttgtgttaaataggtggatggggaaatcgactttcccccagggcacttcccgaagtg

SEQ ID NO: 58501 - DNA, 121 bp, Glycine max
  Clone ID: 700676564H1
aagatttgaaattttgataaaccgcgatcacaggttgccgcaccttaaaaccggaaacaaaagcaatcgttacttgatttcaagaatctctcaatttcttcctacttctttgtgtacgatt

SEQ ID NO: 58502 - DNA, 245 bp, Glycine max
  Clone ID: 700676566H1
taagatatgaagagtactatcttctttgctctctttctagtttgtgccttcaccatctcatacctgccttcagccatcgctcagttcgtgctcgacactgatgatgatcctcttcaaaacggtggcacatactatatgttgccagttatgagaggatagggcggtggaatagaagtagattcaactggaaaagaaatatgccctctcactgttgtgcaatcacccaatgagctcgataaggggat

SEQ ID NO: 58503 - DNA, 85 bp, Glycine max
  Clone ID: 700676567H1
cagtcatcaagccagtcgctagtgctactagatgcggttggtggaggaacaaacccccttgaaggagcagcattaggaatggcat

SEQ ID NO: 58504 - DNA, 245 bp, Glycine max
  Clone ID: 700676569H1
attatcaatgaaggtaataactaaaaatattgctcgtatactattttttcaatttcccgaatggtcggaagattttagggattggaagagagaaatgtatattaaatgcacatataatggtgttcaattatccgaaagagaatttccaaaaaaatggctaacagatggtattcagataaagatcttatttccttttcgtctcaaaccttggcacaaatctaagctacgatccaatgaaaagaaaa

SEQ ID NO: 58505 - DNA, 246 bp, Glycine max
  Clone ID: 700676570H1
tgccacattaaaaaactggaggttgatagttaatctatctgcaacagcaacattgtgacagtgacagtgtcgtaggatggagaaggtggtatgtgtgaccggcggcagcggcctgcattggttcatggctcgtccatctcctcttggatcgcggctacagcgttcacgccaccgtccaaaacctcaacgatgaagccgagacgaagcatcttcaatccctcgacggagcgtccacgcgcctccgcc

SEQ ID NO: 58506 - DNA, 258 bp, Glycine max
  Clone ID: 700676572H1
gcattatttgcccattcatagagaagctcctgcttttgttgagcaagaaaccgcacagcagattcttgttactggaatcaaggttgttgacctgcttgcaccatatcaaagaggaggaaagattgggttgtttggtggtgctggtgtaggaaaaactgtgcttattatggaacttattaacaatgttgcaaaagctcatggtggtttctctgcgtttgctggtgttggagagcgaacccgagagggtaatgacttgta

SEQ ID NO: 58507 - DNA, 246 bp, Glycine max
  Clone ID: 700676573H1
gcatcattgaagatgtatgaagatatcaagcaaaaaagtgaatcagctcgaaatgcataccataattgcagaactatcagggctgaaaaattttaattctcaaagtatatgaatttttttctgctgtgcttgcttgacattaatttatattatcaaaaacacccaaaataaaactatagacgcatgatcatggtccttgttggagaaagaaatttgtgagatgaaaaatggggtgtaagtgtctgt

SEQ ID NO: 58508 - DNA, 245 bp, Glycine max
  Clone ID: 700676574H1
gtgagtcaggattacacattttgtctgatattttgtaaacccatgcatacaagatcatgtgaaggagctgagaattgttaatatacattctagttgattttgacttctcatattttgtagttggatgaattacaacctatgattattgaagggagaccttgttgagtaatatcaaatattcttgacaggattcacctttgtaagaaattaatatgcaagggaattttcttccttcccgaaactga

SEQ ID NO: 58509 - DNA, 243 bp, Glycine max
  Clone ID: 700676575H1
ctcgagccgcgcaaaaatggtgaaaaaggcaaaaggagatttgtttctggggatggtgaaacgatgacattgattccgggaaccagtgttgaagaggcttacaacaagctaatagttgaacttgagaaaagtgttcctacattggttggcattgaatgtcccaaggatgagaaacttcctcgtcgcaaaatttttgacaaacctaagacgcgctgcttcactattctccctatggagtttaat

SEQ ID NO: 58510 - DNA, 249 bp, Glycine max
  Clone ID: 700676577H1
gagaaagaagaatgtgaagaaggtgaaattccacgaccacgaccacgaccacaacacccggagagggaacctcagcaacccggtgagaaggaggaagacgaagatgagcaaccacgtccaatcccattcccacgcccacaacctcgtcaagaagaagagcacgagcagagagaggaacaggaatggcctcgcaaggaggaaaaacgcggagaaaagggaagtgaagaggaagatgaggatgaggatgag

SEQ ID NO: 58511 - DNA, 250 bp, Glycine max
  Clone ID: 700676579H1
aaaaatcctctcatcattctgcctcagcctcattgcatcccacaaactataggatcctcacattgctagcaccatgatcaagaccttgaatccttacccaaatccagcaaaaactgctgagatcatgtcaaggtaccggccaatagcaccaaagcctgaaacctctccaaactccatgagtgagggcccttcttcctcttctctctcccagaagatcaagtcatctccttaccttaggaatttatggcca

SEQ ID NO: 58512 - DNA, 251 bp, Glycine max
  Clone ID: 700676580H1
gatgaacgtcaattcccattcccacgcccacctcatcagaaggaagagcgaaagcgagaggaagatgaggatgaggagcagcagcgagagagcgaagaaagtgaagattctgagttacgaagacataagaataagaacccttttctcttcggctctaacaggttcgaaactctcttcaaaaaccaatatggtcgcattcgcgtcctccagaggttcaaccaacgctccccacaacttcagaatctccgaga

SEQ ID NO: 58513 - DNA, 246 bp, Glycine max
  Clone ID: 700676581H1
cctcgtttgattggacctctctttctctggagtatcctcccctttatttcctcgtcctccaaactccaaagccgtttccaagtgtaatggattcgagttccattaacagcaacagtaaggagataaccatggagattccaagcttggttcgactttacaaggatggcaccattgaacgcctccaaaactcaccaattgtgccacccacgcttcaagatccaacttcttccaaagacgtcgtcatct

SEQ ID NO: 58514 - DNA, 243 bp, Glycine max
  Clone ID: 700676582H1
cactattctccctatggagtttaatcttgtggttcgtcagaagtttttaaattttgtgaggttcattatgaagaaaagggacaagcttagttgtcaagttggaatcaacccatactccatggaatggactggtttggccaatagattactgagtaagggcaacgatattctgtgttgcgattatgctagttttgatggtttgattaccaagcaagttatgagcaaaatggcagaaatgataaa

SEQ ID NO: 58515 - DNA, 245 bp, Glycine max
  Clone ID: 700676583H1
gttcaacgagtgccaactcaacaacctcaacgcgttggaacccgaccaccgcgttgagtccgaaggtggtcttattgaaacatggaactctcaacaccctgagctgcaatgcgccggtgtcactgtttccaaacgcaccctacaaccgcaacggcctccacttgccatcttactcaccttatccccaaatgatcattgtcgttcaagggaagggagcaattggatttgcatttccgggatgtcct

SEQ ID NO: 58516 - DNA, 242 bp, Glycine max
  Clone ID: 700676584H1
ggaaccattcgctttgtttgcaactcatgggtttataacactaaactttacaaaagcgtgcgcattttctttgccaaccatacatatgttccaagtgagacaccagcagcacttgtggggtacagagaagaagaattgaagaatttaagaggagatggaaaaggagagcgcaaagaacatgataggatctatgattatgatgtctacaatgatttgggcaatccagatcacggtgaaaattt

SEQ ID NO: 58517 - DNA, 243 bp, Glycine max
  Clone ID: 700676585H1
gacaaactgaacaggacaattgagttctactattcactctcttcttagttagagaagcctattattgagactttaaataatgatttacttttttctttgttcacaaatatagggagctcttcttctaccacactttaattcaaaggcgatagtgatactggtaattaatgaaggagatgcaaacattgaacttgttggcctaaaagaacaacaacaggagcagcaacagtaagagcaaccttt

SEQ ID NO: 58518 - DNA, 243 bp, Glycine max
  Clone ID: 700676586H1
cggctcgagccgggcacgggttgaagcttttgcaactcagtttgccatgccgggttttgacattacgaacatgaagtggctggtgaattgccattattgattatttacatattcaacaatggtgggttgttgtccctgctttttacaaaagcacatattgtgcatatattttgtggagcttctctcctctctgcattgtatgcagctgtcaggttttcacatgttgcagagttgcaatctggt

SEQ ID NO: 58519 - DNA, 243 bp, Glycine max
  Clone ID: 700676587H1
tgcagtttcctcgctctcttttctgcaattttcttttttgttccttctctgcggttatctttttgagcttcaatggcggacgctgaaaccttcgctttccaggctgagatcaaccagcttctcagcctcatcatcaacaccttctacagcaacaaggagattttcttgcgtgaactcatcagcaacgcttctgatgctttggataagattcgatttgagagtttaaccgacaagagcaagctc

SEQ ID NO: 58520 - DNA, 244 bp, Glycine max
  Clone ID: 700676589H1
agcaaagccaataagatacaagacaaggttacaattgacggatatgaaactctaataatgtcagatgagagtacagaatcagagacagagcaagcgttcttaagcgccatccttgagcaaccaattagtgtctccattgatgcaaaagattttcatttatacaccgggggaatttatgatggagaaaactgtacaagtccgtatgggattaatcactttgttttacttgtgggttatggttcag

SEQ ID NO: 58521 - DNA, 242 bp, Glycine max
  Clone ID: 700676590H1
cggctcgagcggctcgagcggctcgagtggaggtcttatgacaaatgcctacaattatttgctcgagtctggacggttggaagaggagtcttcatatccctacactggggagagaggtgaatgcaagtttgatccagagaaaatagcagttaagatcacaaatttcaccaatatccctgctgatgagaaccaaattgccgcatatttagtagaaaatggtccacttgctatgggcgtgaatg

SEQ ID NO: 58522 - DNA, 241 bp, Glycine max; identical to SEQ ID NO: 55968
  Clone ID: 700676591H1

SEQ ID NO: 58523 - DNA, 243 bp, Glycine max
  Clone ID: 700676592H1
ctcaaacctcttcgttccttcgattcattccatttcttccaaaatggccaaagacccagttcgcgttctcgtcactggagccgcaggcaaattggatatgctcttgtccctatgattgctaggggagtgatgctgggtcctgaccagcccgtgatcctccacatgcttgacattcctccagcagcagagtcgttgaatggggttaaaatggaattggtggatgctgcattccctcttcttaaa

SEQ ID NO: 58524 - DNA, 246 bp, Glycine max
  Clone ID: 700676594H1
cttggagaaaatgccattatggcaaaaagcaattttgtgtggaatgggacattgtttgtctcggaaaagcaaagaaacatggtatcatgggattggaggaaaaaaggtgtcatcacccaagtaaagtaccaagggggctgtggaagcggttgggcgttttctgccacgggagccatagaagcagcacatgcaatagcaacaggagaccttgttagcctttctgaacaagaactcgtagactgtgtg

SEQ ID NO: 58525 - DNA, 247 bp, Glycine max
  Clone ID: 700676595H1
ctccattggtccttaaacactcatcagtcatcaccatggccaagctagttttttccctttgttttctgcttttcagtggctgctgcttcgctttcagttccagagagcagcctcagcaaaacgagtgccagatccaaaaactcaatgccctcaaaccggataaccgtatagagtcagaaggagggctcattgagacatggaaccctaacaacaagccattccagtgtgccggtgttgccctctctcg

SEQ ID NO: 58526 - DNA, 246 bp, Glycine max
  Clone ID: 700676596H1
cttaattattaacacttccttagttcaatatggggaagcccttcactctctctctttcttccctttgcttgctactcttgtcgagtgcatgctttgctattagctccagcaagctcaacgagtgccaactcaacaacctcaacgcgttggaacccgaccaccgcgttgagtccgaaggtggtttgattcaaacacggaactctcaacaccctgagctgaaatgcgccggtgtcactgtttccaaac

SEQ ID NO: 58527 - DNA, 278 bp, Glycine max
  Clone ID: 700676603H1
cactcgtaattaagctcgagggaatatttacattgccagatttgatctctgggataattttgccaagtttgctgaaacttgatagagcaacatctgtgctctctataagatcaatagagcttaagcaaaatggtattccatcctttgacatttgaacaggacagtcaagaacatccacaccatctgaaatagctttttccctagtacaccgtattaaagaatttaagatatactatgatgagagcgcggttcccattactgttgctgggagttgtttt

SEQ ID NO: 58528 - DNA, 255 bp, Glycine max
  Clone ID: 700676604H1
gtgttacaacttacggctaaattctcaaagatttaaactttgtctcagagtttccaaattcacccaaccccagagagaaaatgtctctaatcccaaatttcttcggtggcagaaggagcaacgttttcgatcctttttccctcgacgtctgggaccccttcaaggattttcctttcccaaacactctttcttcagcttcctttcctgaattttctcgggaaaattctgcattcgtgagcactcgtgtggattgga

SEQ ID NO: 58529 - DNA, 257 bp, Glycine max
  Clone ID: 700676605H1
gcttgttgatgatgagcaactggctgaattagttgctgcacatggtgcagttattcctcttgttggcctactttatggtaggaattatgtacttcacgaggccatttgcagagctctggtcaagttaggaaaagacaggccagcttgtaaaatggaaatggtgaaagctggagttattgaaagcatacttgacatccttcatgaagcacctgattatctgtgtgcagcttttgcagaattgttgcgtatattgacca

SEQ ID NO: 58530 - DNA, 203 bp, Glycine max
  Clone ID: 700676606H1
cacagaagcagaaggaggagaagcagaaagaggagacgaagcaatggcgccgagaaagccccgaaccacgtcgaggaaccctgatttggtcaggggaattggcaaatattcgaggtcgcagatgtaccacaagaggggcatctgggccatcaaggccaaaaacggcggtgttttgcccctccacgatcccaagcccaaacccg

SEQ ID NO: 58531 - DNA, 257 bp, Glycine max
  Clone ID: 700676607H1
ccacctcatacctaccttcagccatcgctgatttcgtgctcgataatgaaggtaaccctcttgaaaatggtggcacatattatatcttgtcagacataacagcatttggtggaataagagcagaccccaacgggaaatgaaagatgccctctcactgtggtgcaatctcgcaatgagctcgacaaagggattggaacaatcatctcgtccccatatcgaatccgttttatcgccgaagccatcctttgagccttaag

SEQ ID NO: 58532 - DNA, 258 bp, Glycine max
  Clone ID: 700676609H1
ctgagattcagatgatggcgagtgagtcgcaaaactgggtgttcatggtcactgcacagacaccaaccaacattgccgttatcaagtattgggggaaaagagacgaaaccctcatcttaccggttaacgacagtatcagtgtcactctcgatcccagccacctctgcaccaccaccactgctgccgtcagtcccgctttccaccaagatcgcatgtggctcaatggaaaggagatttctctttctgggggcaggttcc

SEQ ID NO: 58533 - DNA, 255 bp, Glycine max
  Clone ID: 700676610H1
cgcaatcttcactacattcaccgagcatttgcattcacattgaatatggctgagactacacaatctaatgctgagttgttggagtggcctaagaaagataagcgccgcttcctgcatgttgtgtatcgtgttggtgatcttgatcgcaccattaagttttatactgaatgttttgggatgaagcttttgaggaaaagagatattccagaggagaaatatgccaatgcttttcttggatttggccctgaacaatcc

SEQ ID NO: 58534 - DNA, 256 bp, Glycine max
  Clone ID: 700676611H1
ctttctctcaaatcctctttcttactctaaaatgtctcgtcgaggtggctctaaacaacaaccagattcacgccatccagcaccaccgtctgcggcgccttctcccgccggaagaggacgcggccgtggccgcggagaattctcctcagttcccgctccttctccggtgaatgcaccatccgctcctcctccggcttccaccatcggcgttccttccggcgccgcacctgttcgtgccgcgtctccgtctccggcg

SEQ ID NO: 58535 - DNA, 258 bp, Glycine max
  Clone ID: 700676612H1
tcggctctaacaggttcgaaactctcttcaaaaaccaatatggtcgcattcgcgtcctccagaggttcaaccaacgctccccacaacttcagaatgtccgagactaccgcattttggagttcaactccaaacccaacaccctccttctccccaaccatgctgacgctgattacctcatcgttatccttaacgggactgccattctttccttggtgaacaacgacgacagagactcctacagacttcaatctggtgatg

SEQ ID NO: 58536 - DNA, 255 bp, Glycine max
  Clone ID: 700676613H1
gattcatcaggcgcagggatgatgcaccaaggcctggtcagcctggtcaagccccacgtcctgctggagtaggagctcctgcccgagcttaaaagaaaattccaagtttttggggcttgtttgttcagttttatgttgcaaacttaaattccatttgctgtttatttttgaaatttcagttttgtgtagggatattatattctcttctagttgtttgcttcagtggtcggagaaaattttctattgttatcattt

SEQ ID NO: 58537 - DNA, 252 bp, Glycine max
  Clone ID: 700676614H1
ggtagcttcgcgccactggcttttcaaccaagcgcgatgaccaattgtgcgaatcaacggttcctctcgtactaggttgaattactattgcgacactgtcatcagtagggtaaaactaacctgtctcacgacggtctaatcccagctcacgttccctattggtgggtgaacaatccaacacttggtgaattctgcttcacaatgataggaagagccgacatcgaaggatcaaaaagcaacgtcgctatgaac

SEQ ID NO: 58538 - DNA, 261 bp, Glycine max
  Clone ID: 700676615H1
gccgagaacaaccagaggaacttccttgcaggttcgaaagacaatgtgataagccagatacctagtcaagtgcaggagcttgcgttccctgggtctgcaaaagatattgagaacctaataaagagccaaagtgagtcctactttgtggatgctcagcctcagcagaaagaggaggggaacaagggaagaaagggtcctttgtcttcaattttgagggctttttactgaataagtatgtagtactaaaatgtatgctgtaat

SEQ ID NO: 58539 - DNA, 204 bp, Glycine max
  Clone ID: 700676617H1
cttaattattaacacttccttagttcaatatggggaagcccttcactctctctctttcttccctttgcttgctactcttgtcgagtgcatgctttgctattagctccagcaagctcaacgagtgccaactcaacaacctcaacgcgttggaacccgaccaccgcgttgagtccgaaggtggtttgattcaaacatggaactctc

SEQ ID NO: 58540 - DNA, 256 bp, Glycine max
  Clone ID: 700676618H1
gtttgatcagactcaagggtttaagccatgggaaaaaggaaggcaaaggcaaagcctcctccaaagaagcgaatggataagctcgataccgtcttcagctgccctttctgcaatcatggcagcagcgtcgaatgccgccttgacatgaagaacttgataggggaagctatttgcgggatatgccaagagagctttagcactaccatcacagctttatcagagccaatagacatatacagtgagtggattgatgaat

SEQ ID NO: 58541 - DNA, 222 bp, Glycine max
  Clone ID: 700676619H1
gtcgccggccttccggtcggcggcatcctcctgctcctggcaggactgaccctggctggaactctcaccgggctggtggtggctacaccgctcttcatcatcttcagcccggtgctgattccggccacggtcgcaattggcctggccgtggccgggttcctgacgtcgggagtctttgggctcacggcgctgtcgtccttctcctggatcctgaactacatc

SEQ ID NO: 58542 - DNA, 255 bp, Glycine max
  Clone ID: 700676620H1
cggctcgagttgcagtgttcccatgtctcctacccactgaagtcgaacccctatttttcctctccctaatggcttctcaagttcttcttcagcaggcactgtttgcccccaagctaagtttcccttcttcttctcgtaacgtggcgttaatttctagggttccttccaccccaatttcatggcgttgcactcccctcattgctaagcctagtttcgtagtgagagctgacaccaacctcgatggcggtggtgaag

SEQ ID NO: 58543 - DNA, 217 bp, Glycine max
  Clone ID: 700676621H1
ggtggaaccaggagtctcagaggagagctgtggcttagagagccctttttgaatgtgctaccacacttttgtccttttgggctctagctagtgctggtagcagtaaataagaatgaataaaagaaacaaaggcttagatgccctttgttaagtgtagaataacgggtatagtaactatgtacccttgtgtaatgagtcactcaagtacctatgcggg

SEQ ID NO: 58544 - DNA, 251 bp, Glycine max
  Clone ID: 700676623H1
ctcgagccgaatcggctcgagacggggaacatctccactttccgtactttccacagatactgcgatctgcaccagcccagtcgcagcatctttggaaagaggggcagagacaggcagcgatgaggctggtgctgagtgctgcgacgggcagaggatggaccacgggttcagggatggacggcccctctgttccagtagttggtagggatagcgaatcggggacggggaacatctccatttcccaaggtctc

SEQ ID NO: 58545 - DNA, 258 bp, Glycine max
  Clone ID: 700676624H1
gttttccctttgttgcctttcccttcccatccaaacagctgagttctatgaagcctgaagcccactgcctaaactggaagaccagatcaaccaggttttgacaaactcatggcccaccttgacacctctacctaggggaccaaacatgtggagactattgatattggccatgtccattttaccttatttcacaagcttgataactaatgctcccccaagaacctataaagctggcttgcctttttggctgcttttcaa

SEQ ID NO: 58546 - DNA, 86 bp, Glycine max
  Clone ID: 700676625H1
gcaaagcatgttgaacgtgatttctatgagactgattttgaatttgattcaacgtcaaacctaacaaagccttaatcattatgctg

SEQ ID NO: 58547 - DNA, 252 bp, Glycine max
  Clone ID: 700676626H1
ggcgtcttcataaacgcctttcttctccgtttccgtttcctcgttcgaattcgctttttgatctgcgaaaatgagagagtgcatctcgatccacattggtcaggctggtatccaggtcggaaatgcttgctgggagctctactgcctcgagcacggcatcgggcccgatgggcaaatgccaagtgacaagacagttggcggtggtgatgatgctttcaatactttcttcagcgagactggtgctggaaagca

SEQ ID NO: 58548 - DNA, 252 bp, Glycine max
  Clone ID: 700676627H1
tgacaatcccaaacagtctacagtttttgatattctcttgggaatttctcaagattttgaaattgctggtaatactcttatgccagctttttctgttccacaggctactgccagatcttctgaaaatgcggaatcctctgcatgatctggaatttgtgttttctttcgcttgttcgtttgtttaattcaataaaggaaattaggcttgaccctcttgttgagtatgctctgcctatttgaaaatttccacac

SEQ ID NO: 58549 - DNA, 230 bp, Glycine max
  Clone ID: 700676628H1
ggaagacgagggagaatgagggttggattcaagggcggtgacgcggttgataaggctatcaagcttttccgaaacgtggatatggctagtagcgagtttggcaattgcctcctgaaggcgatcaaaggacttggaacgggtagattcagccatggctcaatgaaagcaccagttggtatgacccgaggtcaaggctagaattcgaggttctagcatctcctagagaaaag

SEQ ID NO: 58550 - DNA, 233 bp, Glycine max
  Clone ID: 700676629H1
acgaggtagaagaagaagaccctgagctcgtaacatgcaaacaccaatgccaacagccacagcaatacactgagggtgacaagcgggtatgcttgcaaagatgtgacaggtatcatcgtatgaagcaagagcgagagaaacaaatccaagaggaaactcgtgagaagaaagaggaggaaagccgtgaaagggaagaagaacaacaagagcagcatgaggaacaagatgaaaat

SEQ ID NO: 58551 - DNA, 259 bp, Glycine max
  Clone ID: 700676630H1
aactgaaaccaaaactgaaaaaaaaaacaaacaataccataacatggcttcttccaccatcacctcctccttcctaacatcacccccttcatctctcttcaacaaatcatcatccccttccttccatgccacccctaatctccgccccctcgtgccaaggcctccatgtccgcctcagcgccgccctacgacttcggatcgttccggttcgatccgattagagagtcgattgtgtcgcgcgagatgacccgcaggtaca

SEQ ID NO: 58552 - DNA, 222 bp, Glycine max
  Clone ID: 700676633H1
cacacttgatccaatgattgaggctaacaagaatctcagtgaaaaagagcaaaatcatgttgaaaatggggctaaaaattcgagaaaaggattgggattttttataacttctgcagccaaagcaatgctcacggtagttggtgtggtatcaatattaagtttgtctggttttgggcctaagttgggcgttcgtttcagtgtgcaaggctggcgtcacagagt

SEQ ID NO: 58553 - DNA, 212 bp, Glycine max
  Clone ID: 700676634H1
tgagttgatcagcaaagggcagcagcttgatgcggttcactttacctatgaagtgggtctggtggaaaagttccctcctgatcgcttgttgaagtcttttctcaaggatgctaagaaagttgcggcttctattttggaagatcctaataatgcaggccgagctgcgtacctagctgcaaggaaagagcagttagcactcagggctgtgatta

SEQ ID NO: 58554 - DNA, 251 bp, Glycine max
  Clone ID: 700676635H1
gtgttgctcattttctgaagcttccttttgcgaatcaattccagcattatcaacaacaccctgctgtcaatggcacagatgacggttgtaatctgttaaagatggtaactaatgctgatgctgaatctgaattggatactgttgcctctgctgaacccagtaagagaatgcgtctcacgcctcttgcagatgcaagcaatcccattatggctcaggctgcattcctgtctgctttggctgggtcagaggtt

SEQ ID NO: 58555 - DNA, 210 bp, Glycine max
  Clone ID: 700676636H1
gctcctgccaattcttgaggataataatgtggatatgtacattaatgggcatgaccattgcttggaacacataagtagcagaagcagccaaatccaattcttaaccagtggtggacgttcaaaggcatggaaaggagacatggataaagatgagtcagatgggatcaagtcttactatgatggacaaggatttatgtccgtggagctgga

SEQ ID NO: 58556 - DNA, 228 bp, Glycine max
  Clone ID: 700676637H1
gaaagaagctgtagagaaaggtcatggtgatctgaaagacaagccatggtggcctaagttgcaaacaattgaagagcttgttgaaatttgcaccattatcatatggactgcttcagccctccatgcagccgttaactttggtcaatatccatatggaggtttcattctgaatcgcccaacttcttctagaaggttgcttcctgagaaaggcaccccagaatatgaaga

SEQ ID NO: 58557 - DNA, 219 bp, Glycine max
  Clone ID: 700676638H1
gaacactcatcaccatggccaagcttgttctttccctttgtttccttccattcagtggctgcttcgctctgagagagcaggcacagcaaaatgagtgccagatccaaaagctgaatgccctcaaaccggataaccgtatagagtcggaaggtgggttcattgagacctggaaccctaacaacaagccattccagtgtgccggtgttgccctctctcgct

SEQ ID NO: 58558 - DNA, 253 bp, Glycine max
  Clone ID: 700676639H1
agctttttgatcaacagaacgagggaagtattttcgcaataagcagagaacaggtgcgtgcgttggcccctaccaagaaaagctcttggaggccattcggtggcgaatccaagcctcaattcaatattttcagcaagcgtcccactatctccaacggatatggtcgtttaactgaagttggtcctgacgatgatgaaaagagttggcttcaaagtatcgatctcatgcttacctttaccaacatcacccagag

SEQ ID NO: 58559 - DNA, 209 bp, Glycine max
  Clone ID: 700676640H1
tatcaccattactgatggtattgacaaaactagcgcaactttgcaatttagcaagttagcagattgtgactttctcaaaagagactttaagcagatgtctaatgtcttgtgggcagctcctgaggacaaggcgagtttatggtcacaacttcattatgtttcatgtaacaatctggaaatgcaagaagcttatcttgtcaatctcgtaa

SEQ ID NO: 58560 - DNA, 255 bp, Glycine max
  Clone ID: 700676641H1
tctctccattgtctttgaacactcatcaccatggccaagcttgttctttccctttgtttccttcttttcagtggctgcttcgctctgagagagcaggcacagcaaaatgagtgccagatccaaaagctgaatgccctcaaaccggataaccgtatagagtcggaaggtgggttcattgagacctggaaccctaacaacaagccattccagtgtgccggtgttgccctctctcgctgcacccttaaccgcaatgcc

SEQ ID NO: 58561 - DNA, 251 bp, Glycine max
  Clone ID: 700676642H1
caagcaaatcctaaaaagttgattgagatatatagaaactagcttcaatttcacaaaatgaagaaagtgtttgtcacatttttagctgtgctagttgtatttgttcttacagcgaaagcttcagaggcacgactaccagttaaaacaaattcagcatcaaatgactacaattgttcacaagtctataacctgttagtttcgtgcgtagattacatgattggtggagatgatggtgccccttcaggtgtttg

SEQ ID NO: 58562 - DNA, 252 bp, Glycine max
  Clone ID: 700676643H1
caaaagcacaatttgttagtggaaaaaccttcaaatatgatataattggtgctggttcacattcttcaggagattttcctgaaaaggaagatcaagaaaaacccaaaaagattgataccagattgagacaaagaatagatcctcaatacaatgaggttcaggctcagatggaaacaaatttgtataaattgtctcatgatgatgttgaaactcctaaaggttctatgttggatcttaaaatttctcaatcta

SEQ ID NO: 58563 - DNA, 251 bp, Glycine max
  Clone ID: 700676644H1
gcggaaagaataaagaaagcgcaaaaattggagctgcttttgactgctggcattggttctgatcacgttgatctcaaagctgcagctgctgctggtttaactgtggcagaggtcacgggaagcaatgtcgtgtcggttgcggaggatgaactcatgagaatcctcattctaatgaggaatttcttgcctgggtaccatcaggctgttaagggtgaatggaatgttgctggcattgcacatagagcttatga

SEQ ID NO: 58564 - DNA, 254 bp, Glycine max
  Clone ID: 700676645H1
cttaattaacattattttttcacagtgcttttctttctttccttctgagattgctagctgaagagagaaaagcaaaatcgaattatcatagaaagaagtgaattgaatttcattgacagagtcagagtgaagtgttgcgcaaatctgaggtgcgcattgcattgtggttgatttgtaagaatggcgccagtgtcggctctcgcaaagtacaagctggtgttcttgggtgatcagtccgatgggaaaaccagcat

SEQ ID NO: 58565 - DNA, 253 bp, Glycine max
  Clone ID: 700676646H1
agtttcatgaagaaacatgtcgaaaaattaaagctcttcatctttatgactgcctgagagccaataaatcaactgcagcatggggtgtagaggcacgtgtaccattcttggataaagaatttatcaacgtagccatgagtatagatccggaatggaaaatgataaggcctgatcttggaaggatagagaagtgggtattacgcaatgcatttgatgacgataagaatccatatttaccaaagcacatattgta

SEQ ID NO: 58566 - DNA, 254 bp, Glycine max
  unsure (1)..(254): unsure at all n locations
  Clone ID: 700676647H1
gaaagaagcaagcatgtgtggcggacaatcatcgcagatttcatacctcggcagcgtccccgcaccctcacagcctccgaactctggcccaagcgcacgnnacctcaacctcaacctcctcctcctccaggtgagtcaatatcttcttctctttcaacattaatttcccaactaacaaaacaagctcacgtgacgtgacagttaagaggcagaggaaaaacctctacagagggatcaggcagcggccctggggc

SEQ ID NO: 58567 - DNA, 260 bp, Glycine max
  Clone ID: 700676648H1
tcttaattaacattattttttcacagtgcttttctttctttccttctgagattgctagctgaagagagaaaagcaaaatcgaattatcatagaaagaagtgaattgaatttcattgacagagtcagagtgaagtgttgcgcaaatctgaggtgcgcattgcattgtggttgatttgtaagaatggcgccagtgtcggctctcgcaaagtacaagctggtgttcttgggtgatcagtccgttgggaaaaccagcatcatca

SEQ ID NO: 58568 - DNA, 241 bp, Glycine max
  Clone ID: 700676649H1
atcaccgatttcaccattatcatcatcattattataattattttctcgctcgatttgtttcaattacgaaataatcgcgataattattttttttttttgttatatcaggaatctctctgaatcgcgggattaagagaggaatatgcaacagaggcttaagttgcagcaacaacaacaagccctcatgcagcaagctttgcttcaacagcagcagatgtaccaccctggcatgctcgcggct

SEQ ID NO: 58569 - DNA, 232 bp, Glycine max
  Clone ID: 700676650H1
gtttatggtcacaacttcattatgtttcgtgcaataatctggaaatgcaagaagcttatcttgtcaatctcgtaaatgtgttacgagaattgtatttgcacagtccagaggaagctcgccaattgagaaggaaagctctctctcgtattgaatggctgcaaaaagctgatgtgcctaccatagcacagattgaagagttccattcgatgcagaggatgatgaatgctcctga

SEQ ID NO: 58570 - DNA, 252 bp, Glycine max
  Clone ID: 700676651H1
cacaatccttcaacaccaacgaggacacagctgagaaacttcggtctccagatgacgaaaggaagcagatcgtgacagtggagggaggcctcagcgttatcagccccaagtggcaagaacaagaagacgaagacgaagatgaagacgaagaatatgaacaaactccctcttatcctccacgacgaccaagccatggaaagcatgaagatgacgaggacgaggacgaagaagaagatcaacctcgtcctgatc

SEQ ID NO: 58571 - DNA, 231 bp, Glycine max
  Clone ID: 700676652H1
gaagtagtttactctggcataagtaggtctatagttcttccattcagattgaccaataggaatgtacagacataacaatactcccatcaatgcaagaactttgtttttatatggttggatctatggcattaaccattgatctctggatgtataacctgaaacttgaatgatgacttggtgatggtctcacccaataccttgaatttaattttacacgtagattttttgttc

SEQ ID NO: 58572 - DNA, 251 bp, Glycine max
  Clone ID: 700676653H1
tttcctccctttcactctcgtagacatcacaaaccttccctccattagtcccacgcatggctgccatgaactctagcgtattggcctgtagctatgccatatcaggtgcagcgtgttcggagctcaatgggaaggtcacttccgtggcctatgttgcatgctctggctacaagttgccattgatcaaagctgaggccagagttcctaaagccaaagaatctgaaggaggaaggagaggtgcccttgttctc

SEQ ID NO: 58573 - DNA, 186 bp, Glycine max
  Clone ID: 700676654H1
agaaagcgtaaagaggagaaaaagcgtttgcgtgatcagcgtagaaagcagaagaaaaagctaaaatacggggatgaatagaattgtatacataactgagccattagttaaaattttgcatcaaccaaagttttcattagttgctgaattttttaaggcagcgtctgtagtttctccttcctagtt

SEQ ID NO: 58574 - DNA, 217 bp, Glycine max
  Clone ID: 700676655H1
gcaaagttagagacgagagagagagagagaaagggaaagaaacctaatacaataccctttttctcagaaatcacactctcacacccacttcccccaattcccattctctctgaattacgagggttttcgaaatcgaagagtctctgatcgatttcgattcggaaaaatggcgtcttcgagcgcaaccggtgctggatccaccgatcccacagctgcc

SEQ ID NO: 58575 - DNA, 250 bp, Glycine max
  Clone ID: 700676657H1
atttatcttccctctccatcgttcgttcattcattcactctgggcgcgcgcacgtgctaggaaccatcgattcgagaatgggcaacgactgtgtgccgtcgacggcggcggcggaggtcatggcggtggtggccgttgagctcactgacgcctccagctggtggcacgacatcgacgactctccggcgtggcaggatcgtatcttctacactctcgccgtactctacggtatcgaggccaccgtagcttt

SEQ ID NO: 58576 - DNA, 249 bp, Glycine max
  Clone ID: 700676658H1
cccttgtaaaacttcttattgtgatgtctaaaagcgaagacttgaagcttttgggaggctggttcagcccatttgccctgagggtgcagattgcccttaacctcaagggtctagaatatgaggttgttgaagagaccttgaatcccaaaagtgacctgcttcttaagtccaaccctgtgcacaagaaaatcccagttttcttccatggagataaagtcatttgtgaatctgcaatcatagttgagtaca

SEQ ID NO: 58577 - DNA, 207 bp, Glycine max
  Clone ID: 700676659H1
gaaagtgagaggagagagaaagtagcagatcctccatggcctccaccaaggaatgtgaaaacttcgtctacgtcgccaagctcgacgaacaagccgaacgctatgaagaaatggtacgagcaatgaagaatgtggcgaagctaaacgtggaattgacggtagaggagcggaaccttctgtcggttgggtacaagaacgtggtgggtg

SEQ ID NO: 58578 - DNA, 249 bp, Glycine max
  Clone ID: 700676660H1
ctgcaaaggattctacccgccgctcgatgggaattgcgcttcaaggcgtctcgtagggctaatccgcctcacgagggtcaccaacggcacgtgcctttggggggccgaggccccctactgctggtcggcaaacggacggcgggcgcacgcgtcgcttctagcccggattctgacttagaggcgttcagtcataatccaacgcacggtagcttcgcgccactggctttataaccaagcgcgatgaccaat

SEQ ID NO: 58579 - DNA, 250 bp, Glycine max
  Clone ID: 700676661H1
atgcgccgtttctgtgcttttactctgctaccttgtgacaatggtgagggttagtgtgttgaatgatgctcttaagagcatgtacaatgctgagaaacgggggaagcgccaggtcatgattaggccatcctcaaaagtgattataaaattccttttggtgatgcaaaagcatgggtacattggagagtttgagtacgttgatgatcacagagctggaaaaattgttgttgaattgaatggtagactgaac

SEQ ID NO: 58580 - DNA, 253 bp, Glycine max
  Clone ID: 700676662H1
gacgcatgtgtcaaatccttcttcattggccacaagtttgagcagctcaagagaaggtagccctgataggacaagcttgccaatgctctctggaatgccttcaactgcatcaaaactattggctactaatccaaataacgtgaattcttgggacccttcaccccatttgaggccagcacttactttgcctcaaatgccagtttttgcagcttggacagatgcatagttcatagctcaatagtccttttaattt

SEQ ID NO: 58581 - DNA, 255 bp, Glycine max
  Clone ID: 700676663H1
attttggttaagagtcttgaaaaagcaagagaaaaaaaaataccaaccatggcaaccatttctgatcaacctagagggtcctactcctatggaacctcatatggagcaccctatggaaccacgtatgagaccaacaccagcattaacaacccaccttcacgccaaacagtgaagttcataactgctgccactattggcatcacagcattgctcctgtctgggttgaccctcacaggcactgtcataggtttgatc

SEQ ID NO: 58582 - DNA, 212 bp, Glycine max
  Clone ID: 700676664H1
ctctcatacacttcctgcttctctctctctctctcgtccttttacctcattctcttcttcacaaaacatcactcttttttcatttcaccgataacacaacaacgtgagttaaacaaaaaacagtaactccacgcagccatgacagacagggtgtacccatccgccaagcccgccgtggttaacggcggcgcgccaacccatctttcccggcg

SEQ ID NO: 58583 - DNA, 252 bp, Glycine max
  Clone ID: 700676666H1
taagaaatgaagagtactatcttctttgctctctttctagtttgtgccttcaccatctcatacctgccttcagccaccgctcagttcgtgctcgacactgatgatgatcctcttcaaaacggtggcacatactatatgttgccagttatgagaggaaagggcggtggaatagaagtagattcaactggaaaagaaatatgccctctcactgttgtgcaatcacccaatgagctcgataaggggattggacta

SEQ ID NO: 58584 - DNA, 248 bp, Glycine max
  Clone ID: 700676667H1
aaagaatgtaactaaaactattctaattgcgtctcagtttctctcaggttggcttcccctctcccctatcgctctctccctaatcgcatctcaacttgtcgtcgtcggtgattcattctccctaatcataaccctaatcgcatcttaaatcgaactcaatcagagacaaaacaaagttgttgattctgttacaaaacatagcacggtggacaaacgttaaacaaggctacagatctttgattcagttg

SEQ ID NO: 58585 - DNA, 248 bp, Glycine max
  Clone ID: 700676668H1
atccgatgtagttaaacgatattacgcttaaggtctggggcaatcgagaggaccgttgcacgtttttatttctgagtttttttcgttcctcttggtctcctctagggattcccattcattgtatttgtctcgtttctttgaaaagaaagatgggcggggttttagtcctccctttggtgtttcaaactttgtgctttagatttgttataacttgagccctcttcgctcggtgtatggggtgccgcaaa

SEQ ID NO: 58586 - DNA, 248 bp, Glycine max
  Clone ID: 700676669H1
gattagtccactacccgtgcttaaggaaatcttccgaactgatggtgaacaggcccttaagtttcctcctcctaaagtaattcaagcagtgagtaagtctgcatggatgactgatgaagaatttgcaagagaaatgcttgctggtgtaaatccaaacttgattcgttgtcttaaggatttccctccacgaagcaagctagatagccaagtctatggtgatcatactagtcaaataaccaaagaacacc

SEQ ID NO: 58587 - DNA, 248 bp, Glycine max; identical to SEQ ID NO: 58585
  Clone ID: 700676670H1

SEQ ID NO: 58588 - DNA, 250 bp, Glycine max
  Clone ID: 700676671H1
ctcgagccgctcgagccgctcgagccgtcccagtagaaaagattagtcctggcacagaagataggtgatatacaagtgtaatcttattgggaagccagtggtgactgctacccaaatgcttgaatcaatgataaagtctcccaggccaacccgagctgaagcaactgatgtagctaatgcagttcttgatggaacagattgtgtgatgcttagtggtgaaagtgctgctggggcatacccagaacttgct

SEQ ID NO: 58589 - DNA, 246 bp, Glycine max
  Clone ID: 700676672H1
gttcaatatcctagtacaccgtattaaagaatttaagatatactatgatgagagcgcggttcccattactgttgctgcgagttgttttcctggcatcagtttctgtctcatttggcattgcgtattgggaaaagcagaaccccagtcacaacaagtgcctccgaagttgcaatagcgagaaagactcctacaggaaccaagcatgccacgctcgttgcaacctccttaaggtggaggaagaagaag

SEQ ID NO: 58590 - DNA, 250 bp, Glycine max
  Clone ID: 700676673H1
gagaaagagatagtgtggtagagagagaggagcggaggagagaaaatgacgacgaggttcaagaagaacaggaagaagagaggccacgtcagcgccggtcacggtcgtatcgggaagcaccgcaagcatcccggtggtcggggtaacgccggtggcatgcaccaccaccgcatcctcttcgacaagtaccatcccggtttcttcggaaaggtgggtatgcgctacttccacaaactccgcaacaaattct

SEQ ID NO: 58591 - DNA, 247 bp, Glycine max
  Clone ID: 700676674H1
aagagagtttttttttgttcctcactgaccaagccagagcgatgagaaccaaactttctttagctatctttttcttttttcttttagccttattttcaaacctagcctttggcaaatgtaaagaaaccgaggtagaagaagaagaccctgagctcgtaacatgcaaacaccaatgccaacagccacagcaatacactgagggtgacaagcgggtatgcttgcaaagatgtgacaggtatcatcgtat

SEQ ID NO: 58592 - DNA, 249 bp, Glycine max
  Clone ID: 700676675H1
gcttggaccagtgtcacaaaattgcctaaattatcatttcttgaatacctgaacatgagtaactgtactattgattctatacttgaagatgataaagctcctttggcaaagcttattctctctggggccatgttcatgaatgaagctgaagctttgttatatgcaaatacaaatttcctatcctttttggacgtggccaattccagctttcacagattcttcttcttaagtaaaatgaaagtgatagaa

SEQ ID NO: 58593 - DNA, 239 bp, Glycine max
  Clone ID: 700676676H1
atggcactgagcaaacgtgccaaatctagttcaaggaaaaccatttcttctgaagataaaccttttaacttgagaagccgcgaccccatctactccaacaagcttggcaagttctttgagatcaccccagagaaaaacccccagcttcgggacttggatatcttcctcagtattgtggatatgaacgagggagctcttcttctaccacactgtaattcaaaggcgatagtgatactggt

SEQ ID NO: 58594 - DNA, 249 bp, Glycine max
  Clone ID: 700676677H1
gtcacaacggaacaggtgaatgctgctggtgacatgtgtgctatatgccaggagaagatgcaggctcccatattgttgagctgtaaacacatgttctgtgaggagtgtgtatctgaatggtttgagagagaacgaacttgtccattatgcagggcattggtaaaaccagctgatctgcggaccttcggagatggatcaacaagtctattttttcagttgttttaagttcattttctttgacttgttggg

SEQ ID NO: 58595 - DNA, 250 bp, Glycine max
  Clone ID: 700676678H1
caagttcacaatcctcctcatctctcttctcttctgcatcgcccacacttgcagcgcctccaaatggcagcaccagcaagatagctgccgcaagcagctccagggggtgaacctcacgccctgcgagaagcacatcatggagaagatccaaggccgcggcgatgacgatgatgatgatgacgacgacaatcacattctcaggaccatgcggggaagaatcaactacataaggaggaacgaagaaaagacg

SEQ ID NO: 58596 - DNA, 256 bp, Glycine max
  Clone ID: 700676057H1
gtgaaacgcaacgcaacgcaacgctagcagagcagtgtcaaacgaacgacggtttcgttgaaccttgcagaatttgcctttcatctagagattgttgattaattaaaccccaagacttcttcactccaactaccacatctgtatcaaaatcctctggatgaaaaatggctgatggccgccaacacgaaaatggcaggcataagatggaatactatagaggagcacattccctgtggaatactgattcccagcatca

SEQ ID NO: 58597 - DNA, 255 bp, Glycine max
  Clone ID: 700676058H1
aagaggctcaaggtcgcagaagcagcagctacaggacagtcaccagaagattcgtcacttcaatgaaggagacgtactcgtgattcctcctggtgttccttactggacctataacactggcgatgaaccagttgttgccatcagtcttcttgacacctctaacttcaataaccagcttgatcaaacccctagggtattttaccttgctgggaacccagatatagagtacccagagaccatgcaacaacaacaaca

SEQ ID NO: 58598 - DNA, 260 bp, Glycine max
  Clone ID: 700676060H1
cgaaccattcgctttgtttgcaactcatgggtttataacactaaactttacaaaagcgtgcgcattttctttgccaaccatacatatgttccaagtgagacaccagcagcacttgtggggtacagagaagaagaattgaagaatttaagaggagatggaaaaggagagcgcaaagaacatgataggatctatgattatgatgtctacaatgatttgggcaatccagatcacggtgaaaattttgctcgcccaattcttgg

SEQ ID NO: 58599 - DNA, 259 bp, Glycine max
  Clone ID: 700676062H1
cggctcgagtaacaattccttcacttgcagcactgttgcatcatcatcttcattgcaaaaccctaaacttcaccttcaaccatgaccacacaagtaccaccacacagtgtccaagtccacacaacaacacaccgctacgaagctggcgtcgtcccccccggagcccgtttcgaaccgccgcgttatgaagccggcgtcaaagcgccctccatttaccattccgagagaggtccaacgacttcccaggtcctcgccgtcc

SEQ ID NO: 58600 - DNA, 259 bp, Glycine max
  Clone ID: 700676064H1
aatctcagcaacgaggacgaagccagaggccccaagaccgtcaccaaaaggtacatcgcttcagagagggtgatttgatcgcagtgcctactggtgttgcatggtggatgtacaacaatgaagacactcctgttgttgccgtttctattattgacaccaacagcttggagaaccagctcgaccagatgcctaggagattctatcttgctggaaccaagagcaagagtttctaaaatatcagcagcagcagcaaggaggt

SEQ ID NO: 58601 - DNA, 264 bp, Glycine max
  Clone ID: 700676065H1
gttgtcctctacaggaatggaatttactctccacattggaacttgaacgcgaacagtgtgatctatgtgactcgagggaaaggaagagttagagtggtgaactgccaagggaatgcagtgttcgacggtgagctaaggaggggacaattgctagtggtgccgcagaactttgtggtggctgagcaagggggagaacaaggattggaatacgtagtgttcaagacacaccacaacgccgtgagcagctacattaaggatgtgttt

SEQ ID NO: 58602 - DNA, 259 bp, Glycine max
  Clone ID: 700676066H1
atttggcgctgtattcttcttcacaggcatggttgtggtggttcctcttgattggctctcttttcagcattgtcttcgcaatcgcacaacccatttgcccctctcctccagattcaccaccaccaccaccacctctctctgcttccactctcccataattcaagccaagttgccttttttcaccaattccgactcctttcaagtgggtcgacccattggcacttatggcttcatcaacgtcaccagctactctgccttt

SEQ ID NO: 58603 - DNA, 260 bp, Glycine max
  Clone ID: 700676067H1
gaagaggaaccctagctagggcttggaagaagctgatccgagaagatggtgcagcgtctcacctaccgcaaacgccacagctatgctaccaaatccaaccagcacagagtcgtcaagactcccggtggcaagcttgtttatcagaccacgaagaagagggccagcggacccaagtgccctgtcactggaaagaggattcaagggattccacatttaaggccagcagagtataatagatcaaggttacacagaaaccgaag

SEQ ID NO: 58604 - DNA, 256 bp, Glycine max
  Clone ID: 700676070H1
tctccctctgcgcaggaattgggaacattcgacaggtagagtttcttcaatggctcctaaagttgataagaagaacgacccaaaggcacaggccttgaagactgctaaggcagttaagtctggtgctacctttaagaagaaggcaaagaagatccgaacttctgtcactttccacagaccgaggacattgaagaaggataggaaccccaagtaccctcgcattagcgcgcctccaagaaataagcttgatcattat

SEQ ID NO: 58605 - DNA, 254 bp, Glycine max
  Clone ID: 700676074H1
gggttttagggcagcttctttctttgagattaagtttcagtagtaatgggtaaggaaaaggttcacattaacatcgtggtcattggccatgtcgactctgggaagtcaaccaccaccggtcaccttatctacaagctcggaggtattgacaagcgtgtcatcgagagattcgagaaggaagctgctgagatgaataagaggtctttcaagtatgcctgggtgcttgacaagctcaaggctgagcgtgaaagagg

SEQ ID NO: 58606 - DNA, 256 bp, Glycine max
  Clone ID: 700676075H1
caaaaagatagaatcccaggcgaggagtcagatggaggggaaagagcaggatgactcgttgggagcgaacaagttccccgagatacagccgattgggacggcagcgcagagtcaagacgacggcaaggactaccaggagacggcgccggcgccgctggttgacaccgacggagtttaacgtcatggtcgtgttacagaccagggatagcagagtttgtggccacttttcatgctctctacatcgaccgtcttaacc

SEQ ID NO: 58607 - DNA, 256 bp, Glycine max
  Clone ID: 700676076H1
ctaaattgaaaagctttctagctggtcataatatcaccattactgatggtattgacaaaactagtgcaactttgcaatttagaaagttagcagattgtgattttctcaagagaaactttaagcagatgtctaatgttttatgggtggctcctgaggacaaggcgagtttatggtcacaacttcattatgtttcgtgcaataatctggaaatgcaagaagcttatcttgtcaatctcgtaaatgtgttacgagaatt

SEQ ID NO: 58608 - DNA, 258 bp, Glycine max
  Clone ID: 700676078H1
taacaacacaggcgcagacgcaaacgcaaacgcaaacgcaaacgcaaacgcagagcgtgatccattgacgaagatggtgcagcgtctcacctaccgcaagcggcacagctatgccaccaagtccaaccaacacagggtcgtcaaaacccctggtgggaagctcgtttatcagactaccaagaagagggccagcggacccaagtgccccgtcactggcaagaggattcaggggattccacacttgaggcctgcagagta

SEQ ID NO: 58609 - DNA, 258 bp, Glycine max
  Clone ID: 700676079H1
cactgctctgtttcaccgagtttgggcgtttagatcagaaccaaatcgtgttctcttccattggcaaacatggcaacgcatctgagcaagaagagaaagtttgttgcggacggagtgttctttgccgaactgaacgaggttctgacacgtgaattggcggaggacggttactccggcgtcgaagttagggttacgccgatgcgcaccgagatcatcatcagagccacagaaacccaagtcgttctaggtgagaaggga

SEQ ID NO: 58610 - DNA, 258 bp, Glycine max
  Clone ID: 700676080H1
tgatcaagcactacctgcagatcttatcaagagaggagtggcaattaaggatccatctgccccacatggacttcgacttctgatagaggactacccttatgctgttgatgggctagagatatgggctgcaattaagacatgggtccaagaatatgtgtccttgtactatgcaagagatgatgatgtcaaacctgattctgaactccaacagtggtggaaagaagctgtagagaaaggtcatggtgatctgaaagacaa

SEQ ID NO: 58611 - DNA, 258 bp, Glycine max
  Clone ID: 700676082H1
acaccgtattagagaatttaagatatactatgatgagagcgcggttcccattactgttgcttggagttgttttcctggcatcagtttctgtcacatttggcattgcgtattcggaaaagcagaaccccagtcacaatatgtgcctccgaagttgcaatatcgagatagactcctacaggaaccaagcatgccacgctcgttgcaacctccttaaggtggaggaagtagaactatacgaagaaggtcaaattccacgac

SEQ ID NO: 58612 - DNA, 256 bp, Glycine max
  Clone ID: 700676084H1
tctcgagccgtattcggctcgaggttttttttgttcctcactacccaagccatggcgatgagaaccaaactttctttagctatctttttcttttatcttttagccttattttcaaacctagcctttggcaaatgtaaagaaaccgaggtagaagaagaagaccctgagctcgtaacatgcaaacaccaatgccaacagccacagcaatacactgagggtgacaagcgggtatgcttgcaaagatgtgacaggtatc

SEQ ID NO: 58613 - DNA, 252 bp, Glycine max
  Clone ID: 700676087H1
gggtatttttggcatgatatacccgggttgtcctagcacatttgaagagcctcaacaacctcaacaaagaggacaaagcagcagaccacaagaccgtcaccagaagatctataacttcagagagggtgatttgatcgcagtgcctactggtgttgcatggtggatgtacaacaatgaagacactcctgttgttgccgtttctattattgacaccaacagcttggagaaccagctcgaccagatgcctaggag

SEQ ID NO: 58614 - DNA, 254 bp, Glycine max
  Clone ID: 700676088H1
ccactaacaattccttcacttgcagcactgttgcatcatcatcttcattgcaaaaccctaaacttcaccttcaaccatgaccacacaagtaccaccacacagtgtccaagtccacacaacaacacaccgctacgaagctggcgtcgtcccccccggagcccgtttcgaaccgccgcgttatgaagccggcgtcaaagcgccctccatttaccattccgagagaggtccaacgacttcccaggtcctcgccgtca

SEQ ID NO: 58615 - DNA, 249 bp, Glycine max
  Clone ID: 700676090H1
agaaaaatgatctttgctccttggtgtgacgaggaggaggtggaggctgatgtcaaagccaggacaaagggtgagatgggagcagctaagactctttgcagcccctttgatcagccagaactcccagaaggcaccaagtgctttgcatcaggaaagcccgcaacaaagtggacatactggggcagaagttactagactactggctgttgattttggtattttctggatttaatttggtatttaatgatg

SEQ ID NO: 58616 - DNA, 249 bp, Glycine max
  Clone ID: 700676091H1
atcccccttctaagtgttgctacttcctttgttgccgaggacattgccaagtcttcctccgctgcagatgccattacacaacaacaactctcctctgtctccactgctctgctattggcactcgcccttggctttttttgaggctttagctttatacctgggagctggagcttttctccatttaattggtgttcctacacaaaatccaacatatgttcccgcacgacactttctctctttaagagctgt

SEQ ID NO: 58617 - DNA, 257 bp, Glycine max
  Clone ID: 700676092H1
ctctgttctttctctctcaaaggaaagacaaggaacgcaaagaagcgtcaaagaagagagtgtaggtaaacagcagcacacactacacagttgccaaaatcaggttcaaacgcacagatctgggagaagagaagaagaagaagcagaagatgggacatgatcagaaccagagatcgctgatctacgcgttcgtgtctcgcggcacggtgattctcgccgagtacactgcattcagtggcaacttcaacacaatcgcg

SEQ ID NO: 58618 - DNA, 245 bp, Glycine max
  Clone ID: 700676093H1
ggcggagaagccggagaacaaggattcgaatacatagtattcaagacacaccacaacgcagtcactagctacttgaaggatgtgtttagggcaattccctcagaggttcttgcccattcttacaaccttcgacagagtcaagtgtctgagcttaagtatgaaggaaattggggtcctttggtcaaccctgagtctcaacaaggctcaccccgtgttaaagtcgcataaatgacaagcatgatggt

SEQ ID NO: 58619 - DNA, 254 bp, Glycine max
  Clone ID: 700676094H1
gtggtgccttatcgctgtggttatcatcttcttcttcctctttcttagatctcttctttctctacgccgcacgccgaaaccatggccggaaaaggagagggtcctgctatcggaatcgatctcggaaccacctactcttgcgtcggtgtgtggcaacatgaccgcgttgaaatcatcgccaacgaccaagggaacagaaccacgccgtcttacgtcggattcactgacaccgagcgtctcatcggtgatgcggc

SEQ ID NO: 58620 - DNA, 258 bp, Glycine max
  Clone ID: 700676095H1
gcagacacagtccttcagtctgtctgtcgttctatttaattcccctctccaaatttcaatctctgtctcctctccttaacagcatcatcacatgcacccgcgattcctacgatcccttcccatggtctcttctctgcaccctcgccgtaccttctagaaccttccctcagatctcaattccccttccgctttctcctttcatggaaatggcttccactccccgcaccgtcgaagagatcttcaaggactacaccgccc

SEQ ID NO: 58621 - DNA, 268 bp, Glycine max
  Clone ID: 700676101H1
ggcaacagtgagaacaccattgaattttgattctagcaagcagagcttttgtcaattttctattgaccttctcggtggaggaattttagtggacaaaactggagattggatcacacttatacaaaattctccaattagtaacttgttgagagttgctgcttggaagaaaggttgtttaatggtcaagattgtgatgtctgggaatgcagcagtcaaaaggagtgattgggcctcattggtacaagtgtttttaacaaacagaacagta

SEQ ID NO: 58622 - DNA, 254 bp, Glycine max
  Clone ID: 700676102H1
ataagagaaccccaaacacaacaagtgtctccagagttgcaatagcgagagagactcgtacaggaaccaagcatgccacgctcgttgcaacctccttaaggtggagaaagaagaatgtgaagaaggtgaaattccacgaccacgaccacgaccacaacacccggagagggaacctcagcaacccggtgaaacggtggaagccgaagatgagcaaccacgtccaatcccattcccacgcccacaacctcgtcaag

SEQ ID NO: 58623 - DNA, 264 bp, Glycine max
  Clone ID: 700676103H1
cggctcgagcggctcgagtaagaaagtcttccatagccccccaaaaatgaagagcaccatcttactttgctcactttctcttttgtgccttcaccacctcatacctaccttcagccatcgctgatttcgtgctcgataatgaaggtaaccctcttgaaaatggtggcacatattatatcttgtcagacataacagcatttggtggaataagagcagccccaacgggaaatgaaagatgccctctcactgtggtgcaatctcgca

SEQ ID NO: 58624 - DNA, 255 bp, Glycine max
  Clone ID: 700676106H1
cagatgcatatctttctgtactgaaggcacttgcatgcttctgttcttgcaatcatgagcttgttgtggatttggttcccgctgaacatctcgaagatgatacctctaaagaggatcctgatgcatataaagctgcttggggtcttttgaagggagctaatgggattctagttccaggaggttttggtgacagaggagtggaaggaaaaattcttgctgccaagtatgctcgagaaaatagcattccatactggg

SEQ ID NO: 58625 - DNA, 244 bp, Glycine max
  Clone ID: 700676108H1
ctttgttctttcttttgttatgcccatggctgcaactgcaaccgcaaaaaccaacaatgacaacaaccctgaaataacaagggaggaaatccaaactgccatagccaaagcagtggaattaagggcccttcatactgcattaacacaaggaagtagtccaggcacaaacaatgctagatttccgtcaccttccccggcttctcacttctctgcccaagactaccctgttttcacaccaagttat

SEQ ID NO: 58626 - DNA, 259 bp, Glycine max
  Clone ID: 700676109H1
ggagtggcgaatggcgctgtggtccaaattttatgcatagtcactctgctgttatgcagcgattgtgcagcatcttttgccaaggagcagcaaaaggaccgggttggtaggctcccaggtcaaggcttcaacatcagcttcgcacactatgctgggtacatcaccgtcaatgagaaagctgggagaacactcttctactggttcattgaggcacttgaagatcctcattctaagccccttgttttgtggctcaatggag

SEQ ID NO: 58627 - DNA, 261 bp, Glycine max
  Clone ID: 700676110H1
actgaaagcactcagtagggtttgcggtttcagagtttgtgacgcacgcatccatggccaccaccaccaacgccgccgcagccccgccgcgccagctctcccagaaggaagccgacatccagatgatgttagccgccgacgtccacctcggcaccaaaaactgcgacttccaaatggaacgttacatcttcaagcgccgcaacgacgggatttacattattaaccttgggaagacatgggagaagcttcagttagcagcta

SEQ ID NO: 58628 - DNA, 259 bp, Glycine max
  Clone ID: 700676111H1
tctccaattaacctcctctctcactattccatcttcttaattactcatcactcttcttagaaactagtctaacaattaggttttgaagggcacacaaatatattccaaggttgtgtgaaaatgcgaatgagttgtaacggatgtcgtgttttgcgcaaagggtgtagcgaagattgtagcataagaccgtgtttgcaatggatcaagaacccggagtcgcaagctaatgccactgtgtttcttgctaagttctatgccg

SEQ ID NO: 58629 - DNA, 262 bp, Glycine max
  Clone ID: 700676112H1
tttctgagagattcaaaagtgggtggtggtggtgttgatggggtttttcactcaaaacccaccaaggttgttgttgttggtggtggtggtggcagcagctcagggtttcaagagttgaccctcagctacctttgtgataacccaaaattcaatcttgctgagaaagagattcctggtaaaagcctgctgaattccttggaaaaaatgagccacaaagggaaagaggttgtgatctgtgagaattcaaatcaagatgggaaat

SEQ ID NO: 58630 - DNA, 266 bp, Glycine max
  Clone ID: 700676113H1
gtgccctcacagagaacacttcacggaggcatatttagagcatgttcagattttgaaaacgaggctgcagtgctcttcaacagcaagctctcatcccaaatggatgctcttaagaaacagtttcaagaggctagatttgtctaccttgacctttacaacccagtactaaatttgattcaaaacccagctaaatatggttttgaagtaatggaccaaggatgctgtggcactggaaaattggaagtaggcccgttgtgcaacatttc

SEQ ID NO: 58631 - DNA, 272 bp, Glycine max
  Clone ID: 700676115H1
agaacttagttctctgttgcatcatcatcatcttcattagtgttagccctaaacttcaccttcaaccatgaccacagtgccaccacacagtgtccaagtgcacacaacaacacaccgctacgaagccggcgtcgtcccgccggctcgttttgaggcgccgcgttacgaagccggcatcaaggcgccctcttccatttaccattccgagagaggtccgacgacctctcaggttctcgcagttgtcgccggccttccggtcggcggcatctcct

SEQ ID NO: 58632 - DNA, 205 bp, Glycine max
  Clone ID: 700676116H1
ataaaattcttccaccaagttatgggtttccttgtgttgcttcttttctccctcttaggtctctcttctagttccagcatatcaactcatcgttccatattggaccttgacctaaccaagtttaccacacagaaacaggtgtcttcactgttccaactatggaagagtgagcatggacgtgtctaccataaccacgaagaagagg

SEQ ID NO: 58633 - DNA, 258 bp, Glycine max
  Clone ID: 700676118H1
aagagatcaataatgggatctggggccggcaatttcctcaaggtgcttctcataaacttcgatgtgcttgctgagcctgtcattagtcttgtttatcctctatatgctacaattagggcaattgagagcaagtctcctattgatgatcagcagtggctcacttactgggttctctactccttgatcaccctcttagagcttacttatgctaaagtctttgagtggattccaatatggccctatgcaaagctgatgcaa

SEQ ID NO: 58634 - DNA, 262 bp, Glycine max
  Clone ID: 700676119H1
atcccaatggatccgaccaagaagcgcaagctccgacgagaacggcttcatcaacaacgactcctccgagcccctcaagctctccccctccgacgcccgcaagctcatcgagcgcttcaccactgaccagctcctcgacatcctccaggacacggtggcgcgccaccccgacgtcctcgctgccgtgcgcgctgtctcagaccccgacgtctcccagcgtaagctcttcatccgcggcctcggctgggacaccacaccgacg

SEQ ID NO: 58635 - DNA, 237 bp, Glycine max
  Clone ID: 700676120H1
tagttcaatatcctagtataccttaataaataatttaagatactatgatgagagcacggttcccattactgttgctgggacttgttttcctggcttcagtttctgtctcatttggcattgcttactgggaaaaagagaaccccaaacacaacaagtgtctccagagttgcaatagcgagagtgactcgtacaggaaccaagcatgccacgctcgttgcaacctccttaaggtggaga

SEQ ID NO: 58636 - DNA, 255 bp, Glycine max
  Clone ID: 700676121H1
taaaattcttccaccaagttatgggtttccttgtgttgcttcttttctccctcttaggtctctcttctagttccagcatatcaactcatcgttccatattggaccttgacctaaccaagtttaccacacagaaacaggtgtcttcactgttccaactatggaagagtgagcatggacgtgtctaccataaccacgaagaagaggcaaagagacttgagattttcaagaataacttgaactatatcagggcatgaa

SEQ ID NO: 58637 - DNA, 254 bp, Glycine max
  Clone ID: 700676122H1
ctgaataattaagaaaagccatttccatagcagcctaagaaaatgaagagcactagcttgttcgctatctttctactttgcgccttcacctcatacctaccttccgccaccgcccaggacgtgctcgacgtggatggcgatccgattcggaacggtttcatatactacgttttgccggcaataagaggaaacggtggcggaatagaacgagccgcactcgggaaagacacttgccctatcactgtagtcaatct

SEQ ID NO: 58638 - DNA, 257 bp, Glycine max
  Clone ID: 700676123H1
atttgttctcacagttacagcttcagaaccagagccaccagttacaccttcaggaccaccaaaggcagggccaccaaaggcagggccgccaagggcactgattacaacttcgggcccaccaaaggcagggccaccaaaggcaccagttacagcttcagaaccagagccaccagttacaccttcagggccaccaagagcaccaatttcaacttcagggccaccaacggcagggccaccaagggcaccgattacaactt

SEQ ID NO: 58639 - DNA, 257 bp, Glycine max
  Clone ID: 700676125H1
tgaaattttgataaaccgcgatccaggttgccgcaccttaaaaccggaaacataagcaatcgttacttgatttcaagaatctttcaatttttcctacttctttgtgcacgatttcttaagggaaagaaaatcactctctgtgccggtcacagacttcgtgaatcattttcttttccactcttagtttatttgctgaacactctcctatttgatataggacttcgtgtcagatttaaacttctcctgtctcttctcag

SEQ ID NO: 58640 - DNA, 258 bp, Glycine max
  Clone ID: 700676127H1
ctttgttcactcttcttctcttgcgctagggttttagcgcacatcttctagatttaaggaagatgggtaaggaaaaggttcacatcagtattgtggtcattggccatgtcgactctgggaaatccactaccactggtcacctgatttacaagcttggaggcattgacaagcgtgttattgagaggtttgagaaggaagctgctgagatgaacaagaggtctttcaagtatgcctgggtgctggacaaacttaggctga

SEQ ID NO: 58641 - DNA, 258 bp, Glycine max
  Clone ID: 700676128H1
gtttttatctaacttcttattgaggaaggcatttgccaagaggtttggagctgttcaaaatgagaggggcaaaaagaaggacctgtctcctcaagatgctgccttgttgatccagatcagctttagagcttacttgatccgtaggtcaaaggctctccgtgcccttagagaactggccattgcaaagtctaaattaaaggaaatcagagcccagttcaataacttttcctaccgacgtcatgtagctcgtgatgcgga

SEQ ID NO: 58642 - DNA, 266 bp, Glycine max
  Clone ID: 700676129H1
gttcaatatcctagtataccttaataataatttaagatactatgatgagagcacggttcccattactgttgctgggacttgttttcctggcttcagtttctgtctcatttggcattgcttactgggaaaaagagaaccccaaacacaacaagtgtctccagagttgcaatagcgagagagactcgtacaggaaccaagcatgccacgctcgttgcaacctccttaaggtggagaaagaagaatgtgaagaaggtgaaattcacgac

SEQ ID NO: 58643 - DNA, 267 bp, Glycine max
  Clone ID: 700676130H1
tcctagtataccttaataaataatttaagtactatgatgagagcacggttcccattactgttgctgggacttgttttcctggcttcagtttctgtctcatttggcattgcttactgggaaaaagagaaccccaaacacaacaagtgtctccagagttgcaatagcgagagagactcgtacaggaaccaagcatgccacgctcgttgcaacctccttaaggtggagaaagaagaatgtgaagaaggtgaaattccacgaccacgccac

SEQ ID NO: 58644 - DNA, 270 bp, Glycine max
  Clone ID: 700676131H1
gtttttgatattctcttgggaatttctcaagattttgaaattgctggtaatactcttatgccagctttttctgttccacaggctactgccagatcttctgaaaatgcggaatcctctgcatgatctggaatttgtgttttctttcgcttgttcgtttgtttaattcaataaaggaaattaggcatgaccctcttgttgagtatgctctgcctatttgaaaatttccacacctcttttaattgtcgtaatgatgtgtgaagtgtgtttatt

SEQ ID NO: 58645 - DNA, 272 bp, Glycine max
  Clone ID: 700676132H1
gaaactgaacatcagcctccgcagcagtatatatggattcactgcttcttcgatctttccctaatattaataacgcctcttctctcaccaccactggtgcaaatttctccaggactaaatctttcgccaacatttaccatgcaagttcttatgtgccaaatgcttcatggcacaataggaaaatccaaaaagaatataattttttgaggtttcggtggccaagtttgaaccatcattacaaaggcattgagggagcgtgtacatgtaaaaat

SEQ ID NO: 58646 - DNA, 254 bp, Glycine max
  Clone ID: 700676134H1
gagttgatcagcaaagggcagcagcttgatgcggttcactttacctatgaagtgggtctggtggaaaagttccctcctgttcccttgttgaagtcttttctcaaggatgctaagaaagttgcggcttctattttggaagatcctaataatgcaggccgagctgcgtacctagctgcaaggaaagagcagtctgcactcagggctgtgattaaatgcattgaagaatacaaacttgaggatgagttccctccaga

SEQ ID NO: 58647 - DNA, 258 bp, Glycine max
  Clone ID: 700676135H1
ctaatttctggaaaaagaaccagttgcggggatgaagatcctgattactttggagtttctaaaggaaaaattccttttggtgaacaatcttctagaacactttttgttagaaacatcaatagcaatgtagaagattctgagctaaaggctctctttgagcaatatggagatatccgaaccatatatactgcctgcaagcatcgtggatttgttatgatttcttattatgatataagggcagcacaaaatgcatgaaag

SEQ ID NO: 58648 - DNA, 255 bp, Glycine max
  Clone ID: 700676137H1
aacactttccttagttcaatatggggaagcccttcttcactctctctctttcttccctttgcttgctactcttgtcgagtgcatgctttgctattacctccagcaagttcaacgagtgccaactcaacaacctcaacgcgttggaacccgaccaccgcgttgagtccgaaggtggtcttattgaaacatggaactctcaacaccctgagctgcaatgcgccggtgtcactgtttccaaacgcaccctcaccgcaa

SEQ ID NO: 58649 - DNA, 249 bp, Glycine max
  Clone ID: 700676138H1
cttcagagcctgcacttgtccacccttcaacataccactcctcatcttccccaattctcttatccgtaatctggcactcttcagagaagactttgtaagataaaaagagaaatggccttagaccagtattttgatgaggctgtgccccagttggattccttggaagataaatcgtctctcgaaacatggaaatgtggcagtgacgatattgcagattcggatagaaatgcctctggtggctttgatgca

SEQ ID NO: 58650 - DNA, 253 bp, Glycine max
  Clone ID: 700676140H1
tgctaaagttgtctctaaacaagatcatatacccaagcagaagtttctcagaagttaaaagatcaacttggctacaagcttaatgttaaaccttctcaaatatctcacaaggattctggccaaggtctatttttagatggtgcagctgatgttggtgccgtaattgccttttatcctggtgtggtctattctccagcttattaccaatatattcccggataccttgatgagcagaacccctatttgatacaag

SEQ ID NO: 58651 - DNA, 254 bp, Glycine max
  Clone ID: 700676141H1
agatgacccaaattatgtttgagactttcaatgtgcctgccatgtatgttgcaattcaggctgtcttgtctctgtatgccagtggacgtactacaggtattgtgcttgattctggtgatggtgtgagccacacggtgcccatatatgaagggtatgctcttcctcatgcaattcttcggttggaccttgctggccgtgatttaacagagtacttggtgaaaatccttaccgagagaggatactccttcacacct

SEQ ID NO: 58652 - DNA, 256 bp, Glycine max
  Clone ID: 700676142H1
ttccttagttcaatatggggagcccttcactctctctctttcttccctttgcttgctactcttgtcgagtgcatgctttgctattagctccagcaagctcaacgagtgccaactcaacaacctcaacgcgttggaacccgaccaccgcgttgagtccgaaggtggtttgattcaaacatggaactctcaacaccctgagctgaaatgcgccggtgtcactgtttccaaactcaccctcaaccgcaatggctccact

SEQ ID NO: 58653 - DNA, 255 bp, Glycine max
  Clone ID: 700676143H1
gtagggtttaccatctttcgtggcctcagttgttaatcaaacaagaagcaatcttattcgcatcaaagggttgggggtgaagaaaatagtggtgggtgctctacaaccccttggatgccttccccaggagacagccacaagctcgttccaacgttgcaacgccacctccaacgccctcgtgcttctccacaacagcctcctgaaccaagcagtgaccaagttgaaccaattagagaccaccaaggaccgttttcc

SEQ ID NO: 58654 - DNA, 258 bp, Glycine max
  Clone ID: 700676144H1
atcctagtacaccgtattaaagatttaagatatactatgatgagagcgcggttcccattactgttgctgggagttgttttcctggcatcagtttctgtctcatttggcattgcgtattgggaaaagcagaaccccagtcacaacaagtgcctccgaagttgcaatagcgagaaagactcctacaggaaccaagcatgccacgctcgttgcaacctccttaaggtggaggaagaagaagaatgcgaagaaggtcaattc

SEQ ID NO: 58655 - DNA, 265 bp, Glycine max
  Clone ID: 700676146H1
caaatatgggcacccatcagccaacagagtcgttgcgggacgcacctgagttgaccaagctgtagacactgaactatcatgcaccatagcatacaaatatggtcacccatcagccaacagagtcgttgcgggacgcacctgagttggctgatgggtgcccatatttgtatgctatggtgcatgatagttcagtgtctacaataccaggtgattttgtcattggtgttaagttgactaagtgcgcactatgtgtgcatagggctcc

SEQ ID NO: 58656 - DNA, 266 bp, Glycine max
  Clone ID: 700676147H1
ctgctcgagctgctcgagcggctcgacggctcgagcagaatctccgagactaccgcattttggacttcaactgcaaacccaacacccttcatctcccccaccatgctgacgctgattacctcatcgttatccttaacgggactgccattcttaccttggtgaacaacgacgaccgagactcttacaaccttcaatctggcgatgccctaagagtccctgcaggaaccacatactatgtggttaaccctgacaacgacgagatctca

SEQ ID NO: 58657 - DNA, 259 bp, Glycine max
  Clone ID: 700676148H1
atgaggttgagtagttcttcatcatagtcttaaacattaaaccttagcaaaactcaacaatgctagacatcaaaggctacctcgtactcttcttcctatggttcatatcaaccattctgatacgttccatcttcaagaaaccacagcgtctaagactcccaccgggtcctccaatttcaatacccttgctgggacacgcgccatatctccgttcactgctccaccaagcattgtacaagctatcactgcgctatggacc

SEQ ID NO: 58658 - DNA, 250 bp, Glycine max
  Clone ID: 700676149H1
cgagataaaattcttccaccaagttatgggtttccttgtgttgcttcttttctccctcttaggtctctcttctagttccagcatatcaactcatcgttccatattggaccttgacctaaccaagtttaccacacagaaacaggtgtcttcactgttccaactatggaagagtgagcatggacgtgtctaccataaccacgaagaagaggcaaagagacttgagattttcaagaataacttgaactatatc

SEQ ID NO: 58659 - DNA, 253 bp, Glycine max
  Clone ID: 700676150H1
gcaagctcaaagtgctgaagttactttgacttcttccctgtggaggttaatagtcaagagggagttgctcatattggtgaattgaaatctggtgtatatgttccactgcctacaaaaactaatttggtggaaactcccaaggaatggcaactggatctaccttgtgacaaaattcctagtgtcttgactacaactgatgagagattggtaggcacagaacatgagggatatgatccttttcttggtggattca

SEQ ID NO: 58660 - DNA, 254 bp, Glycine max
  Clone ID: 700676152H1
gagtttttggtaccaactctttctctctctctctctctctctctccccctcttctccagcgtagtttcagcagaatttcagggccaaattaaaaacgcacctaaatctcaagagatgctataaagaggaggataagagcacagaactttgctacaaggagagtgagaagaaaggctttgatcagctttgggattgtaaaagtggtagtggtcggaaaaaaaaatctccctacacccatcatccaagtcgatcaa

SEQ ID NO: 58661 - DNA, 250 bp, Glycine max
  Clone ID: 700676153H1
tcctacgataccaaattcgaggagataaacaaggttctgtttagtagagaggaagggcagcagcaaggggagcagaggctgcaagagagcgtgattgtggaaatctcgaaggaacagattcgggcactgagcaaacgtgccaaatctagttcaaggaaaaccatttcttctgaagataaaccttttaacttgagaagccgcgaccccatctactccaacaagcttggcaagttctttgagatcacccaga

SEQ ID NO: 58662 - DNA, 251 bp, Glycine max
  Clone ID: 700676154H1
gcggcttgtctgcaactgtggcaatgcaaactagcgagaccctttgactcattaccggtgcgaaggtcaattcctttgagtctgaggtgttcggccgcgccctcttcttccaagccgacgcgctcctacagcatcactctcatccccggcgacggcatcggccccgaaatcatctcggtggccaaagacgttcttgtcctcgccggttatctcgaagggattaaatacgacttccgcgagatgcttatggg

SEQ ID NO: 58663 - DNA, 248 bp, Glycine max
  Clone ID: 700676155H1
tttatccctgctagaactctgcttcattacattgcctgttgacttctgagtatagtgtagctgccctgttggctttttcttggatgttaattgttaggtgagtaaaaatttaaaggttttggtaggaggtgaggactgcaaagctttattggttggggcatgctgtatggtctatctggttgaagtgaaatatatggaatttcaaggagatatattatcctctatgaagccccgataattaacaaaga

SEQ ID NO: 58664 - DNA, 254 bp, Glycine max
  Clone ID: 700676156H1
gaactcgcagcaccaccaccagcaccaccaccagcaccgttctattcttcttccacaatgggtatctctcgtgattccatgcacaagaggcgcgccaccggcggcaagaagaaggcttggaggaagaagagaaagtatgagcttgggaggcagccagcaaacacaaagctatcaagcaacaagacggtgaggaggattagggttcgcgatggaaacgtgaagtggcgtgctttgaggcttgataccgggaacta

SEQ ID NO: 58665 - DNA, 255 bp, Glycine max
  Clone ID: 700676157H1
gctctttgatcaattatctcaggaaacttctggaacctccttatgttgatacccttgaatggtccagatggcacgtgttttgggtggatgagagagtcgtgcctaagactcacgaagatagcaactacaagcttgctttagatggacttctctccaaggtgccaattcccccgggcaatgtttatgcaatcgatgatgcgctttcagccgagggagcggcagatgattatgagacgtgtctcagacactggtcaa

SEQ ID NO: 58666 - DNA, 253 bp, Glycine max
  Clone ID: 700676158H1
aaggaagactgggatatgcttcattgataccatatgttgagccagttgtgcaagctcaaagtgctgaagtttactttgacttcttccctgtggaggttgatagtcaagagggagttgctcacattggtgaattgaaatctggtgtctatgttccactgcctacaaaaactaatttgatggaaactcccaaggaatggcaactggatctaccttgtgacaaaattcctagtgtcttgactacaactgatgagag

SEQ ID NO: 58667 - DNA, 256 bp, Glycine max
  Clone ID: 700676159H1
cgacctgtggtggaaagatgagtttgctttggttggttggtactttgttgtagcatatagtcagtaagattatatgtttcttttttctgttttataaaaaaagttgtttattttttgggagaataaataaaagtccgatcagagagggaatttaagatagagaccaataaagaagaagaggggccttaattaaggttgtatttttttttttttttatcttcatcttgttttttatgttcgttcctggtgcgtaaat

SEQ ID NO: 58668 - DNA, 262 bp, Glycine max
  Clone ID: 700676160H1
caacatacaaaaatcaacgtgtgcgcttttcttctctttacccgttgaaacatccttagttttcagattctgaaatcttgattctgaattcatcacaatgaattcgtcaactacagtgaggaagttgcaggtggtgtcccctgttcctgcggacatagacattgcaaactccgttgaaccagttcatatctcccagattgccaaagagctcaaccttagtcccaatcactatgacctttacggtaaatacaaggctaaggtt

SEQ ID NO: 58669 - DNA, 261 bp, Glycine max
  Clone ID: 700676161H1
atcacacagtgagagaggtatacgtacgaggatgtctgacattgctatgttggtggcggaggagtatgagaggagggtcaagagtttaagaaaggccggtggtggtggaaccggagcgggggaatttgacatggtttcttgtgtttcggtgatggtgtctaggctcaaggaaaagaagcagcttcttcaatgggtttgggagcccaagacccaagttgccatggctgcttccaacagcttcttctctgcttaaacaatcat

SEQ ID NO: 58670 - DNA, 269 bp, Glycine max
  Clone ID: 700676162H1
cggctcgagtaacaattccttcacttgcagcactgttgcatcatcatcttcattgcaaaaccctaaacttcaccttcaaccatgaccacacaagtaccaccacacagtgtccaagtccacacaacaacacaccgctacgaagctggcgtcgtcccccccggagcccgtttcgaaccgccgcgttatgaagccggcgtcaaagcgccctccatttaccattccgagagaggtccaacgacttcccaggtcctcgccgtcctcgcggcctc

SEQ ID NO: 58671 - DNA, 270 bp, Glycine max
  Clone ID: 700676163H1
atcatccccttccttccatgccacccctactctccgccccctcgcgccacgcgcctccatgtccgcctcagcgccgccctacgacttcggatcgttccggttcgatccgattagagagtcgattgtgtcgcgcgagatgacccgcaggtacatgatcgacatggtcacccacgccgacaccgacgtcgtcatcgttggcgcgggctccgcgggtctctcgtgcgcctacgagctctccaaaaacccctccatcaacatcgccatgttgag

SEQ ID NO: 58672 - DNA, 256 bp, Glycine max
  Clone ID: 700676165H1
gacaatcttataggtttagcatgctggggagtgtgtatagggcagagcttccagatggaaagatacttgctgtgaagaaactagacaagagagtttctgatcaacaaacagatgatgagtttctcgaattgataaacagtattgacagaatccggcatccaaatattgttgagcttattgggtactgtgcagagcatggccaaaggcttcttatttatgagtattgcagtaatgggtcgttgcaggatgcatccat

SEQ ID NO: 58673 - DNA, 256 bp, Glycine max
  Clone ID: 700676166H1
taaaattcttccaccaagttatgggtttccttgtgttgcttcttttctccctcttaggtctctcttctagttccagcatatcaactcatcgttccatattggaccttgacctaaccaagtttaccacacagaaacaggtgtcttcactgttccaactatggaagagtgagcatggacgtgtctaccataaccacgaagaagaggcaaagagacttgagattttcaagaataacttgaactatatcagggaatgaat

SEQ ID NO: 58674 - DNA, 254 bp, Glycine max
  Clone ID: 700676167H1
caaaaaaagacaacccagagagcgcgtcttaataaacgctcttctctgaaaacccccatttcttttcttctttcttcttctctttcgcttcttcgatcttcgatcttcgtcgctgaaaatgagagagtgcatttcaatccacatcggccaggccgggattcaggttggaaacgcctgctgggagctttactgcctcgaacacggcattcagcctgatgggcagatgccaagtgacaagaccgttggtgcaggtg

SEQ ID NO: 58675 - DNA, 254 bp, Glycine max
  Clone ID: 700676168H1
aggaggttgagtagttcttcatcatagtcttaaacattaaaccttagcaaaactcaacaatgctagacatcaaaggctacctcgtactcttcttcctatggttcatatcaaccattctgatacgttccatcttcaagaaaccacagcgtctaagactcccaccgggtcctccaatttcaatacccttgctgggacacgcgccatatctccgttcactgctccaccaagcattgtacaagctatcactgcgctat

SEQ ID NO: 58676 - DNA, 251 bp, Glycine max
  Clone ID: 700676169H1
agatgatctacggctgagaaccttgcggagtgtggtggggctactgtcgccgcagcaggctattgagttcttgattgcatcggcggagttgctagttgggatacgcggttggggattgaatcatgaccgtccacgtggcagatgaaagtggaattgagtttaggccacaatttctctattttgattgaaattcattgtggccttaaaatgattgtgtattatttattactagttactagaactagacagtc

SEQ ID NO: 58677 - DNA, 238 bp, Glycine max
  Clone ID: 700676170H1
aatctccattccaagagtacacagatctattggcaaaaccaacagggaagactctaatcttggaggaggaaagggtggatgcttgatttgctagttttggttttatggatgttttagagacattgttatttacctttgttggttctgtgctttacttttggttttgatagacggtggtatgtctctgtatggattttgattgtttcaagttttaatttaattgactgtagttttgaat

SEQ ID NO: 58678 - DNA, 250 bp, Glycine max
  unsure (1)..(250): unsure at all n locations
  Clone ID: 700676171H1
ctctgcgacatgttcnacaccacctccttgttcacatcatcatcatcatcatcatcatcatcttcttcttcttcaatcagttgactcttcgttcctccctctattcatctgatggagcccatggacatcgttgggaaggccaaggaagacgcttctcttcctaaagcgacaatgacgaaaattattaaagagatgttgcccccggacgtgcgtgtcgccagagatgcacaggatttattgatcggtgttg

SEQ ID NO: 58679 - DNA, 252 bp, Glycine max
  Clone ID: 700676172H1
cttaccctgaggtgcaagacaagtaacgtaacggtgcttacaaatattaacagcggaagaagtgaagggcccagacggccaccgtctagggtagggttagggttttaattttcgccacacaacaacaacagtcactacctcactgcttccgtttacggatttcaatcgcttcgactcgcagctcccatggcaaaagctacttccggaaccgtcaatcctcacagccgtaccggagttcggattgtctcgccg

SEQ ID NO: 58680 - DNA, 253 bp, Glycine max
  Clone ID: 700676173H1
tagttctgcagttaacaatcgctcctcagatatcaagaaaaagattcgcacagcacttgtgaaaggtaagaaaattgcttttcataccagaggtgatccttttccagtagcttgactggctgttctttatggcgttaagacatgaaattctgagttctaacgccactaaccctatgctgacgcgacttcgttggaactgtaatagtctcaaatatctggtctgatcagagtcctattgcatttgtgaccagta

SEQ ID NO: 58681 - DNA, 253 bp, Glycine max
  Clone ID: 700676174H1
agatggtcaagtttgtttcaatagtgagttaatcacatgtgctaccattgcagtttctacaattgcaatggtagcacatgtgattaactcactatttgaaacaaacttgcccgtcttgatagaaacacagaaggccccaacaatggctgatcgaacaaacaaaccaactaaatcaacggattcagaaatcatgcctaaagacatgagacatttttcaaccaatcccaaagcacaggaactagccagaatacac

SEQ ID NO: 58682 - DNA, 255 bp, Glycine max
  Clone ID: 700676175H1
gcacttcccaaaaacacagttggaggaaccattctgcgtagtgatctattggcaaattttttgacagagggcaattttagagcaagtgttgatttgcagcgcacgcatcgtattaaaggaatgattaaaatggtggccacagttggtattcctgagaatacaggtatagcattggcctgtgctatgaatagttcttttagggggcgtgccagttctgatatttacaccatctgctctcaagactgtgaatatgga

SEQ ID NO: 58683 - DNA, 257 bp, Glycine max
  Clone ID: 700676176H1
agcaaaatgaccaagttcacaatcctcctcatctctcttctcttctgcatcgcccacacttgcagcgcctccaaatggcagcaccagcaagatagctgccgcaagcagctccagggggtgaacctcacgccctgcgagaagcacatcatggagaagatccaaggccgcggcgatgacgatgatgatgatgacgacgacaatcacattctcaggaccatgcggggaagaatcaactacataaggaggaacgaagaaaa

SEQ ID NO: 58684 - DNA, 258 bp, Glycine max
  Clone ID: 700676177H1
gcagacggtgaacccaccgaatgcggcgacgttttcggtgtctccaccgccgcggagcctcacgctgcgccggtggtgtccgccggtatcggttcggctgccatagatggcgacaccataaccatcggagaagctctggaagcggcggcaatatcgatcggggataaaccagtggaccaaaatgacgccgatgcgattggcgtcgcggagattagggccaccggagagaataaggtgaggtccggtggggtgggtaaa

SEQ ID NO: 58685 - DNA, 263 bp, Glycine max
  Clone ID: 700676178H1
cgatgccctaagagtccctgcaggcaccacatactatgtggttaaccctgacaacgacgagaatctcagaatgataacactcgccatacccgttaacaaacccggtagatttgagagtttcttcctatctagcactcaagctcaacagtcctacttgcaagggttcagcaagaatattctagaggcctcatacgacaccaaattcgaggagataaacaaggttctgtttggtagagaggaggggcagcaacaaggggagagag

SEQ ID NO: 58686 - DNA, 264 bp, Glycine max
  Clone ID: 700676179H1
tagtgactcttcatctgcctatctcaaacatcttgcatatcatacagcaaaatgtggatggaaagttgttgtcagtaatcaccgaggacttggaggtgtttcaatcacgtctgattgtttctacaatgctggatggactgaggatgtccgcacagtggttaattatctacacaaagagaaccccagggcacctttgtttgttgttgggactagcattggagctaatattctgataaaatatcttggtgaggatggtgagatatt

SEQ ID NO: 58687 - DNA, 267 bp, Glycine max
  Clone ID: 700676180H1
gtcataatatggaacagaatggacttttattcaagataactatttgcttgaactgtatgtaagactttaattttacaatatgtacataccagtatcattttgctgaatttgagattctgtcctttgcaagtcaatttcttcaactcaaatgctcatttcttattacaagttaatggtagtgatctttctttatttatggtgaacttgtccagtgattatttgtgttgctggcatttgggttgagtgttagttaaattatttgacata

SEQ ID NO: 58688 - DNA, 250 bp, Glycine max
  Clone ID: 700676181H1
gaaaaacctttattctctgttttgggaacatctggggtctcaatttagtggaagttaaattttgaaactttggacgaagatggcgaattgggtccaaaagaagatcactgatccccttctttccattatccgaagaggagctgaaccaaaccacttggctttctctgctgctcttggtgttacattgggactatttcctatatgtggtgtcactgtgttcctctgtggaatggctattgcattgcttgga

SEQ ID NO: 58689 - DNA, 242 bp, Glycine max
  Clone ID: 700676183H1
ctcgagccgcaacaattccaagccttgcgagctatggtgcaggctaatccacaaatattgcagccaatgctacaagagcttggcaagcaaaatccccatcttatgagattgattcgagaccatcaagctgacttccttcgcttgataaatgaacctgctgaaggtggcgaagggaatatattggggcagatggttctggaatgccaccagccagtaactgtcacccctgaggagcgccaagc

SEQ ID NO: 58690 - DNA, 250 bp, Glycine max
  Clone ID: 700676184H1
gttcaatatcctagtaaccttaataaataatttaagatactatgatgagagcacggttcccattactgttgctgggacttgttttcctggcttcagtttctgtctcatttggcattgcttactgggaaaaagagaaccccaaacacaacaagtgtctccagagttgcaatagcgagagagactcgtacaggaaccaagcatgccacgctcgttgcaacctccttaaggtggagaaagaagaatggaagaa

SEQ ID NO: 58691 - DNA, 248 bp, Glycine max
  Clone ID: 700676186H1
cttaattattaacactccttagttcaatatggggaagcccttcagtctctctctgtcttccctttgcttgctactcttctcgagtgcatgctttgctattagctccagcaagctcaacgagtgccaactcaacaacctcaacgcgttggaacccgaccaccgcgttgagtccgaaggtggtttgattcacacatggaactctcaacactctgagctgaaatgcgccggtgtcactgtttccaactcac

SEQ ID NO: 58692 - DNA, 247 bp, Glycine max
  Clone ID: 700676187H1
aaattctcaaatccaaatccaattccaattccaattcccaatcttctcaaaccctaattcctcatcttgaaaatgagagaaatcttgcacatccagggagggcaatgcgggaaccagatcggagcgaagttctgggaggtgatatgcgacgagcacggcatcgaccacaccggaaagtacagtggcgactctgaactccaattggaacgcatcaatgtttattacaacgaagcgagtggcggaagta

SEQ ID NO: 58693 - DNA, 247 bp, Glycine max
  Clone ID: 700676188H1
cttaattattaacactccttagttcaatatggggaagcccttcactctctctctttcttccctttgcttgctactcttgtcgagtgcatgctttgctattagctccagcaagctcaacgagtgccaactcaacaacctcaacgcgttggaacccgaccaccgcgttgagtccgaaggtggtttgattcaaacatggaactctcaacaccctgagctgaaatgcgccggtgtcactgtttccaactca

SEQ ID NO: 58694 - DNA, 254 bp, Glycine max
  Clone ID: 700676189H1
tttgaacactcatcaccatggccaagcttgttctttccctttgtttccttcttttcagtggctgcttcgctctgagagagcaggcacagcaaaatgagtgccagatccaaaagctgaatgccctcaaaccggataaccgtatagagtcggaaggtgggttcattgagacctggaaccctaacaacaagccattccagtgtgccggtgttgccctctctcgctgcacccttaaccgcaatgcccttcgagacctt

SEQ ID NO: 58695 - DNA, 249 bp, Glycine max
  Clone ID: 700676190H1
acaataccaggtgatttttcattggtgttaagttgacaaccataaacaatatgtgtgcatatgggcttaatcctggtatttcaggttctcgtcttttgggcaccattcctcagtccatttcacagcaaactgtttggaatcaaatggcaacagtgagaacaccattgaattttgattctagcaagcagagcttttgtcaattttctatcgaccttctcggtggaggaattttagtggacaaaactggga

SEQ ID NO: 58696 - DNA, 257 bp, Glycine max
  Clone ID: 700676191H1
ctcttgtccagaaatctccattctccaaaactgcttcaagtcttctcattctctctatctctctctctgcctcacactggagtaccctcttcaatttccatcaattaagtttctctaataccctctgaatcatcatcatcatcatcatcattagtcatggctcttgtgatatattttgtgctttttcttgccctcactggccattcaagtgctctttactgtgtatgcaaagatggtgtgggtgatcaagtcttcag

SEQ ID NO: 58697 - DNA, 260 bp, Glycine max
  Clone ID: 700676192H1
cctaaacttcaccttcaaccatgaccacagtgccaccacacagtgtccaagtgcacacaacaacacaccgctacgaagccggcgtcgtcccgccggctcgttttgaggcgccgcgttacgaagccggcatcaaggcgccctcttccatttaccattccgagagaggtccgacgacctctcaggttctcgcagttgtcgccggccttccggtcggcggcatcctcctgcacctggcaggactgaccctggctggactctca

SEQ ID NO: 58698 - DNA, 261 bp, Glycine max
  Clone ID: 700676194H1
ggccatcctttgagccttaagttcgattcatttgcagttataatgctgtgtgttggaattcctaccgagtggtctgttgtggaggatctaccagaaggacctgctgttaaaattggtgagaacaaagatgcaatggatggttggtttagacttgagagagtttctgatgatgaattcaataactataagcttgtgttctgtccacagcaagctgaggatgacaaatgtggggatattgggattagtattgatcatgagatg

SEQ ID NO: 58699 - DNA, 263 bp, Glycine max
  Clone ID: 700676196H1
atgcttgtctcaaagattaagccatgcatgtgtcagtatgaactaattcagactgttgaactgcgaatggctcattaaatcagttatagtttgtttgatggtatctactactcggataaccgtagtaattctagagctaatacgtgtaacaaaccccgacttctggatgggatgcatttattagatagaaggtcaacacaggctctgcctgttgctttgatgattcatgataactcgtcggatcgccggcctttgtgccgcga

SEQ ID NO: 58700 - DNA, 274 bp, Glycine max
  Clone ID: 700676201H1
aattcaggaagaaaaaattgacagctcccttgagtttcttattctggccagtgacgggctatgggatgttgtcacaaatgaggaagctgttgctatgattaaatcaattgaggatgctgaggaggcagcaaagaggctgatgcaagaagcatatcagagaggtagtgctgacaatatcacatgtgttgtcgttcgtttcttgatgaaccaaggtggatccaaagacaaagaggtagtagctcctcctcataatagtagctctgccagtaggaat

SEQ ID NO: 58701 - DNA, 273 bp, Glycine max
  Clone ID: 700676203H1
gacaaatactatttacagatccactttgtaccccaaaggcgaacaaagaacagttggtgcaactaatgtttgaaacattcaatatatcaggattttatgcctcagaacaagcagtgttatcactctatgctgtgggacgtatctcaggctgcactgttgatattggacatggaaaaatagatattgcaccggtaattgagggtgctgttcaccacatcgcctcgagaagatttgagtttggaggtactgatctaactaatttcctggctcaag

SEQ ID NO: 58702 - DNA, 272 bp, Glycine max
  Clone ID: 700676204H1
caatcttaaaaaactgtgtggctccttgttctacttgcggggtaatcatggacgaaactaaaagcacagaaccaagtgaattttcaagtcctctgcttcccataggagcacaagggtatggtggcaaccatgactatgaggaaaagaggcagaaagaaacttggtgggatattcatctcctgctcagactggaatcatggatgatctcaatgttggtgtggccgagtattcactttttggatcaatactgacaattggagcaatgataggtg

SEQ ID NO: 58703 - DNA, 272 bp, Glycine max
  Clone ID: 700676206H1
gtggttctaaattgaaaagcttgacatattcatgaacactaattttgtttctttgtgtgtgtatggtgatgataacttaattagtgttcatgaatatgtcaagccttactttagtggttctaaattgaaaagctttctagctggtcataatatcaccattactgatggtattgacaaaactagtgcatctttgcaatttagaaagttagcagattgtgattttctcaagagaaactttaagcagatgtctaatgttttgtgggtggctcctg

SEQ ID NO: 58704 - DNA, 274 bp, Glycine max
  Clone ID: 700676207H1
aaagtatctgaagctggtgtttctgaccaggaaaatcaagtagtgcaagaaaatgcattggaagatatggaacatgaggagaacttgtccgagacgggtttagttggcaacgccgtagcaaaacttagcaccaataaatctgaagctggtgttagtaaccaggaaaaacaagaaaatgcattgaaagacattgaaaagtcccctccttctgcagcagagggctgttcttagaagattttcagtgcctgctcagaaatacatcaggaatcaaaag

SEQ ID NO: 58705 - DNA, 271 bp, Glycine max
  Clone ID: 700676208H1
ctttgttctttcttttgttatgcctcatggctgcaactgcaaccgcaaaaaccaacaatgacaacaaccctgaaataacaagggaggaaatccaaactgccatagccaaagcagtggaattaagggcccttcatactgcattaacacaaggaagtagtccaggcacaaacaatgctagatttccgtcaccttccccggcttctcacttctctgcccaagactaccctgttttcacaccaagttatgaagatgaggcacaccagaacccaac

SEQ ID NO: 58706 - DNA, 265 bp, Glycine max
  Clone ID: 700676210H1
attgtctttggacactcatcatcatggccaagcttgttctttccctttgcttccttctaatcagtggctgcttcgctctgagagagcaggcacagcataatgagtgccagatccatcagctgcatgccctcaaaccggctaaccgtatagagtcggaaggtgggcttcattgagacctggaaccctaccaacaagccattccagtgtgccggtgatgcccactctcgctgcacccttaaccgaaatgcccttcgaagaccttcct

SEQ ID NO: 58707 - DNA, 263 bp, Glycine max
  Clone ID: 700676211H1
tgcaaactgaagtaaatgctgagtcaggatctccaacattagaggcttccaatggttcaattaaccaagagcaagggtcagaagcatctcctaagtcacaatctgcaaccaaacgacctaacctgactgcaagagagaggttaaaggcagctcgatccctcaaccgatacgccgaatcaaaagcatctaaacaagacctgagcagcagggtgttggaggcttcaaaacaaagtgacaaagggtcagggaagaaaaaatctgga

SEQ ID NO: 58708 - DNA, 264 bp, Glycine max
  Clone ID: 700676212H1
aatctccattccaagagtacacagatctattggcaaaaccaacagggaagactctaatcttggaggaggaaagggtggatgcttgatttgctagttttggttttatggatgttttagagacattgttatttacctttgttggttctgtgctttacttttggttttgatagacggtggtatgtctctgtatggattttgattgtttcaagttttaatttaattgactgtagttttgaataaaaaaataaaaaaagggcggccgcc

SEQ ID NO: 58709 - DNA, 268 bp, Glycine max
  Clone ID: 700676214H1
cttcaggcgctgctgcttcctcaaaacgcctcaaggtgaatccagaggctcagccaatgaaggaaaatctgaacaccgtgaagccgaaaatgaaccagatgttcaattttggtcacaatctggagggctactacagcccaatagatcaggtggaacagaaaccactggttaaccagtatgttaaccctgccccgttccctggaaacggagttcaagtctcacctgttactccatctgctgatgttactgcttacttcagctctgagca

SEQ ID NO: 58710 - DNA, 273 bp, Glycine max
  Clone ID: 700676215H1
tttggcattgcgtattgggaaaagcagaaccccagtcacaacaagtgcctccgaagttgcaatagcgagaaagactcctacaggaaccaagcatgccacgctcgttgcaacctccttaaggtggaggaagaagaagaatgcgaagaaggtcaaattccacgaccacgaccacaacacccggagagggaacgtcagcaacacggtgagaaggaggaagacgaaggtgagcagccacgtccattcccattcccacgcccacgccaacctcatcaa

SEQ ID NO: 58711 - DNA, 271 bp, Glycine max
  Clone ID: 700676216H1
ataaaattcttccaccaagttatgggttcccttgtgttgcttcttttctccctcttaggtctctcttctagttccagcatatcaactcatcgttccatattggaccttgacctaaccaagtttaccacacagaaacaggtgtcttcactgttccaactatggaagagtgagcatggacgtgtctaccataaccacgaagaagaggcaaagagacttgagattttcaagaataacttgaactatatcagggacatgaatgcaaacagaaaat

SEQ ID NO: 58712 - DNA, 249 bp, Glycine max
  Clone ID: 700676217H1
tggagtatcttggtacaagttgtcttctgttgaaattggtcttcttactagtggatcattgtatggtgccttaattggctccttgttggccttcaatgttgctgacttcttaggtagaagaaaggagctgattggagctgcagtagtttatcttgttggagctcttgtaacagcattagctcctaattttcctgtattggtgcttgggagacttgtatttggcataggaattggactggcaatgcatgc

SEQ ID NO: 58713 - DNA, 270 bp, Glycine max
  Clone ID: 700676218H1
ggtagcgcttttttgaagtcggagaagaaacgttgatgctgttgcgtaaccctgcgttgacagcgtcgctgctatcagccaccacaaagaagctctacaaccaccgttattctacacctgctgcattcatggcgtcttcaggtgtcgcgtgcagtttgctggttttgtgtggcaaatcactggcagagaatgaaactgctaaagctataaagaccaataacacactgaagctccctgaggatgaaaaactctcactcgttttgcattcgg

SEQ ID NO: 58714 - DNA, 271 bp, Glycine max
  Clone ID: 700676220H1
ctacagacttcaatctggtgatgccctgagagtcccctcaggaaccacatactatgtggtcaaccctgacaacaacgaaaatctcagattaataacactcgccatacccgttaacaagcctggtagatttgagagtttcttcctatctagcactgaagctcaacaatcctacttgcaaggattcagcaggaacattttagaggcctcctacgatacgagattcgaggagataaacaaggttctgtttagtagagaggaagggcagcagcag

SEQ ID NO: 58715 - DNA, 268 bp, Glycine max
  Clone ID: 700676221H1
agaagatgatgatgatgaggaagagcagccacagtgcgtggagacagacaaaggttgccaacgccaaagcaaaaggagcagaaatggcattgatgagaccatttgcacaatgagacttcgccaaaacattggtcagaattcatcacctgacatctacaaccctcaagctggtagcatcacaaccgccaccagccttgacttcccagccctctggcttctcaaactcagtgcccagtatggatcactccgcaagaatgctatgttcgtg

SEQ ID NO: 58716 - DNA, 271 bp, Glycine max
  Clone ID: 700676222H1
cttaattattaacacttccttagttcaatatggggaagcccttcactctctctctttcttccctttgcttgctactcttgtcgagtgcatgctttgctattagctccagcaagctcaacgagtgccaactcaacaacctcaacgcgttggaacccgaccaccgcgttgagtccgaaggtggtttgattcaaacatggaactctcaacaccctgagctgaaatgcgccggtgtcactgtttccaaactcaccctcaagcgcaatggcctcca

SEQ ID NO: 58717 - DNA, 269 bp, Glycine max
  Clone ID: 700676224H1
gaggcagggaatattggattggttcaatcttgagttggaatggcgtttgaagactttgatcctatcttcagtaaacccaaagtgaagtgggattctgaaagttgttcttcctcgtgtccctttttccttcatgcctatgcccctgattcttctcaccttgtaattcatgtcaccaatatctacgatgcctgggaaactcgtctttcgctctccatgcttgaggacattagggatattgttggtatagggggctcttggtcagactttgc

SEQ ID NO: 58718 - DNA, 267 bp, Glycine max
  Clone ID: 700676225H1
ctcttcttctcttgcggctagggttttagcgcacttcttctagatttaaggaagatgggtaaggaaaaggttcacatcagtattgtggtcattggccatgtcgactctgggaaatccactaccactggtcacctgatttacaagcttggaggcattgacaagcgtgttattgagaggtttgagaaggaagctgctgagatgaacaagaggtctttcaagtatgcctgggtgctggacaaacttaaggctgagcgtgaaagaggaatc

SEQ ID NO: 58719 - DNA, 261 bp, Glycine max
  Clone ID: 700676227H1
gtgagtcacagttgttctcatcgaagcagcagacgaagaaatggagacttctctgcaactgttccaatgcaaactagcgagactctttcggccattccctttgcgaagttcaaatcaccctctgagtctgaggtgttgcgcttcgccagcttcttcctacagcatcactctcattcccggcgatggaatcggacccgaaatcatctccgtgggcacagacgttcttgtcctcgtgggttctctcgaagggatcaaatacga

SEQ ID NO: 58720 - DNA, 261 bp, Glycine max
  Clone ID: 700676228H1
aattcttccaccaagttatgggtttccttgtgttgcttcttttctccctcttaggtctctcttctagttccagcatatcaactcatcgttccatattggaccttgacctaaccaagtttaccacacagaaacaggtgtcttcactgttccaactatggaagagtgagcatggacgtgtctaccataaccacgaagaagaggcaaagagacttgagattttcaagaataccttgaactatatcagggacatgaatgcaaaca

SEQ ID NO: 58721 - DNA, 263 bp, Glycine max
  Clone ID: 700676229H1
ctcgagccgcaacaattccaagccttgcgagctatggtgcaggctaatccacaaatattgcagccaatgctacaagagcttggcaagcaaaatccccatcttatgagattgattcgagaccatcaagctgacttccttcgcttgataaatgaacctgctgaaggtggcgaagggaatatattggggcagatggcttctggaatgccacaagcagtaactgtcacccctgaggagcgccaagcaattgaacgtcttgaagcaat

SEQ ID NO: 58722 - DNA, 265 bp, Glycine max
  Clone ID: 700676230H1
atcttttctcactgctgaaattaaatataagcggaatttgagtaatattcatatttccggcttattttacgacggcagatataaattctggactaaacacgagaaaaatcttgctttgacagaagaggaaaagatggaggtgattagaaatagaggcattcctgctgatgttcttgcaaagcgagctcatgaatttgaaaaacatgttgctcatgaaagcctcaaggatcaaattcctgctgttgacaagttgtattctactaag

SEQ ID NO: 58723 - DNA, 271 bp, Glycine max
  Clone ID: 700676231H1
agcaaaatgaccaagttcacaatcctcctcatctctcttctcttctgcatcgcccacacttgcagcgcctccaaatggcagcaccagcaagatagctgccgcaagcagctccagggggtgaacctcacgccctgcgagaagcacatcatggagaagatccaaggccgcggcgatgacgatgatgatgatgacgacgacaatcacattctcaggaccatgcggggaagaatcaactacataaggaggaacgaaggaaaagacgaagacgaag

SEQ ID NO: 58724 - DNA, 233 bp, Glycine max
  Clone ID: 700676232H1
tgctagctagctagcaagcaagcacagagatggaggcaaagcgaggccatgccctcatgtgcttggctcgtgtttcactcttcctctgcgctctaaccctatccgctgctcacggaagcaccacggttcaagacatcgcgagatagttgaaactcggggacaacgagcttctgcgcacggagaagaagttcaaggttttcatggagaattacgggaggagctactccacagag

SEQ ID NO: 58725 - DNA, 199 bp, Glycine max
  Clone ID: 700676234H1
cctcagtattgtggatatgaacgagggagctcttcttctaccacacttcaattcaaaggcgatagtgatactggtaattaatgaaggagatgcaaacattgaacttgttggcctaaaagaacaacaacaggagcagcaacaggaagagcaacctttggaagtgcggaaatatagagccgaattgtctgaacaagatata

SEQ ID NO: 58726 - DNA, 270 bp, Glycine max
  Clone ID: 700676236H1
tataacactcgccatacccgttaacaagcctggtagatttgagagtttcttcctatctagcactgaagctcaacaatcctacttgcaaggattcagcaggaacattttagaggcctcctacgataccaaattcgaggagataaacaaggttctgtttagtagagaggaagggcagcagcaaggggagcagaggctgcaagagagcgtgattgtggaaatctcgaaggaacagattcgggcactgagcaaacgtgccacatctagttcaag

SEQ ID NO: 58727 - DNA, 265 bp, Glycine max
  Clone ID: 700676237H1
ttaaacactcatcagtcatcaccatggccaagctagttctttcccattgtttactgcttttcagtggctgctgcttcgctttcagttccagagagcagcctcagcagaacgagtggcagatccaaaaactcaatgccctcaaaccggatgaccgtatagagtcagaaggagggctcattgagacatggaaccctaacaacaagccattccagtgtgccggcgttgccctctctcgctgaaccctcaaccgcaacgcccttcgtag

SEQ ID NO: 58728 - DNA, 265 bp, Glycine max
  Clone ID: 700676238H1
attctctccattggtccttaaacactcatcagtcatcaccatggccaagctagttttttccctttgttttctgcttttcagtggctgctgcttcgctttcagttccagagagcagcctcagcaaaacgagtgccagatccaaaaactcaatgccctcaaaccggataaccgtatagagtcagaaggagggctcattgagacatggaaccctaacaacaagccattccagtgtgccggtgttgccctctctcgctgcaccctcaac

SEQ ID NO: 58729 - DNA, 269 bp, Glycine max
  Clone ID: 700676239H1
tcttcactcaaaactcttctctttcattttcataattcccacacattatggctgagcttcactaccaaccacaacaccaataccccctccgctaccctaacgatccacaccaacaaacccgttcctccacccaccaggtcgtcaaggccgccaccgccgtcacagcgggcggctccctcttgatcctcgcctcgttgatcctcgccgccaccgtcattgccctcaccatcgtcaccccgctgttcgtcattttcagtccggttctcgtc

SEQ ID NO: 58730 - DNA, 219 bp, Glycine max
  Clone ID: 700676243H1
gtggctagctaagcgaactcaaaaccaaactcttcagcagtttgtttttgcttagcttcttcttctgcttttgctttctccaccaccacaaccaccatgtattctgccactgcctccaacactttcttccttctctcttgtttccttctcttctgtctcctctcagctccttcctgtgtttccatgttctctggtattgagacaggagatttagaaaaa

SEQ ID NO: 58731 - DNA, 264 bp, Glycine max
  Clone ID: 700676244H1
aacttattaacactttccttagttcaatatggggaagcccttcttcactctctctctttcttccctttgcttgctactcttgtcgagtgcatgctttgctattacctccagcaagttcaacgagtgccaactcaacaacctcaacgcgttggaacccgaccaccgcgttgagtccgaaggtggtcttattgaaacatggaactctcaacaccctgagctgcaatgcgccggtgtcactgtttccaaacgcactctcaaccgcaa

SEQ ID NO: 58732 - DNA, 144 bp, Glycine max
  Clone ID: 700676245H1
catggcaacacgccttacgctcactcttccttactgtcgctccatctctccactcttatctcgttccctttcacaactcaaacaattcccaaaatcccagccttgtgccctgctggtcatgctccttctccttctgcctccaca

SEQ ID NO: 58733 - DNA, 265 bp, Glycine max
  unsure (1)..(265): unsure at all n locations
  Clone ID: 700676246H1
cgaacattttctcttatttttagtatcaattacaatgcttagtgtttttatatgcttgatcacctttcaaatgttgtgctggctcatttttatgatactaataatgagatataagtagtatgcttgctgcgtttggtaacataatgaagttaatccagggaaaaacaactttgggcaattgcttcttgcactccattttttgtttcctacactttcaaatgtnttaaaattctaatattacccgcctttattatggaatgatcat

SEQ ID NO: 58734 - DNA, 160 bp, Glycine max
  Clone ID: 700676247H1
gcagaaagtttagagcttggctgtctttgaagtcatgttgtgaatgagagacaattgagcttgtatactctattctaaactgagcttcaagatgtcaaactcaaggagcactcttctcaagttagctcagagggaagcatccattgtgattatctgagat

SEQ ID NO: 58735 - DNA, 271 bp, Glycine max
  Clone ID: 700676248H1
gaggttctctatttgtggataagtggggtccacctggccacgtggaccgcgccgagccgggagtgtttaacctgctgggagccgctaattcggctcgcggcgccgagctgtgtctccgtttgtttggagtggtggtggtatgagatcatgattttgttgtgtgggttgttggtggaccccactgccagcgtggcggctatggggattttaatccagactacgtccttgatctacgtttttccctcctcgctggggcttgcggtgtctacgc

SEQ ID NO: 58736 - DNA, 273 bp, Glycine max
  Clone ID: 700676249H1
ctccattggtccttaaacactcatcagtcatcaccatggccaagctagttttttccctttgttttctgcttttcagtggctgctgcttcgctttcagttccagagagcagcctcagcaaaacgagtgccagatccaaaaactcaatgccctcaaaccggataaccgtatagagtcagaaggagggctcattgagacatggaaccctaacaacaagccattccagtgtgccggtgttgccctctctcgctgcaccctcaaccgcaacgcccttc

SEQ ID NO: 58737 - DNA, 199 bp, Glycine max
  Clone ID: 700676250H1
tgattctctgcttcgtcctttcattcctcttccgaatcgttaatcgttcgatcgatccatctcccgcttccaatgacaacccctactgacaacaataacaaccctgcacaggaaaaccctaacaaaaccctagaccccaccgaaccagcatccaatccctgccaccgaggacgacgccgccgccgacactaaggactcc

SEQ ID NO: 58738 - DNA, 266 bp, Glycine max
  Clone ID: 700676251H1
cgaacgtttttgagggttgatagagcacgatggttcagtacaattttaagaagattaccgtggtgccaaatgggaaggatgtggtcgacattatcctctctcgcacccagcgtcagacaccaaccgttgtgcacaaaggatatgcgatttcacggctgcgccaattctacatgcgcaaagtgaagtatactcagcagaattttcacgacaagctctccaccataatcgacgagttcccccggcttgacgacattcatccattctac

SEQ ID NO: 58739 - DNA, 266 bp, Glycine max
  Clone ID: 700676252H1
cttaattattaacacttccttagttcaatatggggaagcccttcactctctctctttcttccctttgcttgctactcttgtcgagtgcatgctttgctattagctccagcaagctcaacgagtgccaactcaacaacctcaacgcgttggaacccgaccaccgcgttgagtccgaaggtggtttgattcaaacatggaactctcaacaccctgagctgaaatgcgccggtgtcactgtttccaaactcaccctcaaccgcaatggc

SEQ ID NO: 58740 - DNA, 256 bp, Glycine max
  Clone ID: 700676253H1
aaacaattcaattcaatctgcctcgatcatggagaggaaaacatttgggtttttgttcttgctcctccttgtcttagcttctgatgtgacggtgaagagagcagaggcgaaagattgcttgacaaggaggcacgggttccagggtagatgcttattcgacaggcaatgtgcacatgtgtgcaggagcgatggtttcatcggtggtcagtgccgaggccctcttcgcaaatgcttttgcagcaggccatgttgatcg

SEQ ID NO: 58741 - DNA, 264 bp, Glycine max
  Clone ID: 700676255H1
aagcactttactttttttttcagccatggagtttcattgccttccaatatttctttatctcaatttgatgttgatgacagccaatgctgcgttaactcctagacattactgggaaacgatgcttccaagaactcccttgccgaaagcaatcacagagctactaagccttgaaagtaggtccatatttgaatatgccgggaatgatgaccagtcagaaagtaggtccatattaggatacgctggctataatcaagacgaggatga

SEQ ID NO: 58742 - DNA, 269 bp, Glycine max
  Clone ID: 700676257H1
gtggcatacagttactctggacggaagtgtaaatgggtcagtgtgtgggtgtgctacttcccgagctgcaccatctttccctgatcgccagtgcaagctctcccctaagcaccttcatcaacctactgcctctttccaaatcgctcttctccgcgtacgggcttctctagccaacagcagcaactacaacactagcaccagtacgatgaaatgtcgtaggctcaagagtgactccgagatctgcaatgctctgcgtcaattcctcgatt

SEQ ID NO: 58743 - DNA, 235 bp, Glycine max
  unsure (1)..(235): unsure at all n locations
  Clone ID: 700676258H1
caaaaaccctaggtagagagctcttcctccctttctcacagcaatggccgccgcagcacgccctctcgtcaccgtgcaggccctcgacggtgacatggcaaccgatgcctccgacaccgttcncatccctgacgtcatgaaggcctctatccgccccgacatcgtcaatttcgtacactcgaacatctccaagaacagccgccagccatacgccgtcagtcgtcgcgctggtcac

SEQ ID NO: 58744 - DNA, 262 bp, Glycine max
  Clone ID: 700676260H1
gagaaaagagaattagggtcacgagggtttcatcctgcggcatcagacatgggaggaggcaatgggcaaaaggcaaagatggctcgcgagaagaacatcgagaagcagaaggccgcctcaaagggaagccagctggattcaaacaagaaagcaatgtcgatccagtgcaaggtgtgcatgcaaacatttatgtgcaccacatcggaagtgaagtgtagggagcatgctgaagccaaacaccctaaatctgatgtttatgctt

SEQ ID NO: 58745 - DNA, 269 bp, Glycine max
  Clone ID: 700676263H1
atcagcttgatcaaaaccccagagtattttaccttgctgggaacccagatatagagcacccagagaccatgcaacaacagcagcagcagaagagtcatggtggacgcaagcaggggcaacaccagcagcaggaggaagaaggtggcagtgtgctcagtggcttcagcaaacatttcttagcacaatccttcaacaccaacgaggacacagctgagaaacttcggtctccagatgacgaaaggaagcagatcgtgacagtggagggaggc

SEQ ID NO: 58746 - DNA, 259 bp, Glycine max
  Clone ID: 700676264H1
gtatttttgttgcgcctttcagaggcggaaggcccattcgggtggttacatttccaaataccatcgtgcatattgaaccagacatgaattcaaggtttcagcttttgagtaccactaccaatggtgattttgttcaaggaaaagatctcgcaatggttaaagttaatgtagcatgtgctgctgttggcttgacatcaagttacactccaactccattgttggaaatctggtttgcaaaaagacaaagggtaattgtgga

SEQ ID NO: 58747 - DNA, 163 bp, Glycine max
  Clone ID: 700676265H1
ttgtcctctacaggaatggaatttactctccacattggaacttgaacgcgaacagtgtgatctatgtgactcgagtgaaaggaagagttagagtggtgaactgccaagggaatgcagtgttcgacggtgagctaaggaggggacaattgctagtggtgccgca

SEQ ID NO: 58748 - DNA, 131 bp, Glycine max
  Clone ID: 700676266H1
aattggcgctgtagtcatcttcacaggcatggttgtggtggatcctcctgattggctctcttgtcagcattgtcctcgcaatggcacaacccatttgaccctctcctccagaatcaccacgaccatcacca

SEQ ID NO: 58749 - DNA, 261 bp, Glycine max
  Clone ID: 700676268H1
aaaaaaaccaacccaactccacactttccacactcaatttttcgtcatcaacatgaacaatccaactcttataatcttcttccttgttattttctccgtcttcttcgcggcgtcggcggacggcggcgacgatgagccgctgatcatgcaggtggtggagggcagcggcgtccggttgggagcagagcaccactttttggacttcaagcgcaggttcgggaaggcgtacgcttcccaggaggagcacaattacaggttcga

SEQ ID NO: 58750 - DNA, 262 bp, Glycine max
  Clone ID: 700676270H1
gttcaatatcctagtacaccgtattaaagaatttaagatatactatgatgagagcgcggttcccattactgttgctgggagttgttttcctggcatcagtttctgtctcatttggcattgcgtattgggaaaagcagaaccccagtcacaacaagtgcctccgaagttgcaatagcgagaaagactcctacaggaaccaagcatgccacgctcgttgcaacctcctaaaggtggaggaagaagaagattgcgaagagggtct

SEQ ID NO: 58751 - DNA, 266 bp, Glycine max
  Clone ID: 700676271H1
gcaagtacgtcgtatatgtggttgatcttttgctggttgtttgttttgttccttccaattgtcagatctgaatcaccggactcactcttcacactcactcacactgaatggcttctgaaggcgaccatcaccaccaccaccaccaccatcaagatcacgatcatcatcatcatgatcatgatcaccatcatcatcacgatggagagggagagaccaactcatgggtaggtaaggatgggaaggtgtaccatagccacgatggtctg

SEQ ID NO: 58752 - DNA, 257 bp, Glycine max
  Clone ID: 700676272H1
cttaataaataatttaagatactatgatgagagcacggttcccattactgttgctgggacttgttttcctggcttcagtttctgtctcatttggcattgcttactgggaaaaagagaaccccaaacacaacaagtgtctccagagttgcaatagcgagagagactcgtacaggaaccaagcatgccacgctcgttgcaacctccttaaggtggagaaagaagaatgtgaagaaggtgaaattccacgaacacgacca

SEQ ID NO: 58753 - DNA, 260 bp, Glycine max
  Clone ID: 700676276H1
agagaatccgaggcgaagagaagagaaaaattaagatggaggggaaggagcaggatgtgtcgctgggagcgaacaagttcccggagagacagccgattgggacggcggcgcagagccaagacgacggcaaggactaccaggagccggcgccggcgccactggttgacccgacggagtttacgtcatggcccttatacagcacgggtatcacaatttggtggccacttttctgtttctatacatcactgtcttaaccgtca

SEQ ID NO: 58754 - DNA, 264 bp, Glycine max
  Clone ID: 700676277H1
tctcgagccgaatcggctcgaggactcaatgattgccgaaggatccaccctgcaaaaagatactaatttgctgcaagagggtttgggtgcaacacatggttctgccggcacatttgactcatgttcctcttcaaaaaagaataacgaaaaaacataaagtaatggagctttaagtgaacttactcctgatgatattgcttcatcacaagccactgctgctactggggaaggatcttttcccagtttctccagtgaaactagccc

SEQ ID NO: 58755 - DNA, 266 bp, Glycine max
  Clone ID: 700676278H1
ctcgagccgaatcggctcgagcaagaagacgaagacgaagatgaagacgaagaatatgaacaaactccctcttatcctccaagacgaccaagccatggaaagcatgaagatgacgaggacgaggacgaagaagaagatcaacctcgtcctgatcaccctccacagcgaccaagcaggcccgaacaacaagaaccacgtggaagaggatgtcagactagaaatggggttgaggaaaatatttgcaccatgaagcttcacgagaacat

SEQ ID NO: 58756 - DNA, 265 bp, Glycine max
  Clone ID: 700676279H1
accttgtcctcgaaacaaggagttgagcatcctctgcttctatcagtccatgagtttgtcaaaggtgccttgttccacaatcttgatctcaagggcccctattgatttatctgacacacgcccttggcgatacacgctgttgagcgactcctcaacggttaagcaacaatcctagatatataagagataagttgatgagagataagatagtaaactatttgcatatttggtttgctgttggaaatcttagaacacatgttcctat

SEQ ID NO: 58757 - DNA, 268 bp, Glycine max
  Clone ID: 700676280H1
gtcataatatggaacagaatggacttttattcaagataactatttgcttgaactgtatgtaagactttaattttacaatatgtacataccagtatcattttgctgaatttgagattctgtcctttgcaagtcaatttcttcaactcaaatgctcatttcttattacaagttaatggtagtgatctttctttatttatggtgaacttgtccagtgattatttgtgttgctggcatttgggttgagtgttagtttaattatttggacata

SEQ ID NO: 58758 - DNA, 246 bp, Glycine max
  Clone ID: 700676283H1
cttattaacactttccttagttcaatatggggaagcccttcttcactctctctctttcttccctttgcttgctactcttgtcgagtgcatgctttgctattacctccagcaagttcaacgagtgccaactcaacaacctcaacgcgttggaacccgaccaccgcgttgagtccgaaggtggtcttattgaaacatggacctctcaacaccctgagctgcaatgcgccggtgtcactgtttccaaac

SEQ ID NO: 58759 - DNA, 219 bp, Glycine max
  Clone ID: 700676284H1
ctcaccctaacgttttgctccgttcgtaagaacacttcgactttgcccttcgcctcgcctcgcctcgcctcgcctccgatttccttctttctccaccaatggaagttccttcggaggtaccatctactgacactggcaccagcaccggcaccggcgaaaccatgagcaagaatgcgttgaagcgggagctgaagaacaaacagagagaggaagaaagga

SEQ ID NO: 58760 - DNA, 266 bp, Glycine max
  Clone ID: 700676286H1
ataacttttgcaggcgaacaatatcacaatcatgcccattttgccgcgacagtctgaagagagtgaactcaggtgatctctgggtattcaccgatagaagggatgtggtagacatggcaacagtgacaagggagaatctcagaaggcttttcatgtacatagataagttgcctctgattgttccagactccctttttgacacatatgactctcacataaggtaagtgattgcaacagaacagattttaatgcatgctgttttcttg

SEQ ID NO: 58761 - DNA, 266 bp, Glycine max
  Clone ID: 700676288H1
aattgatagggtcaggcagacggatcgtatgttggtgggaagcattgcttgttgcagttacttcttgtcattagtagttactagctgtcagctgattatcggcagtctctgcagtttcagaatttgaatgcagtaaaacaaaatatacaattggaggctattagaggtgggagaacaattaaaatttcaatatttgatattgttgttggtgatgttataccccttaaaataggagatcaggttcctgctgatggagtattaatcac

SEQ ID NO: 58762 - DNA, 265 bp, Glycine max
  Clone ID: 700676289H1
caagaccgtcaccaaaaggtacatcgcttcagagaggagtgatttgatcgcagtgcctactggtgttgcatggtggatgtacaacaatgaagacactcctgttgttgccgtttctattattgacaccaacagcttggagaaccagctcgaccagatgcctaggagattctatcttgctgggaaccaagagcaagagtttctaaaatatcagcagcagcagcaaggaggttcccaaagccagaaaggaaagcaacaagaagaagaa

SEQ ID NO: 58763 - DNA, 263 bp, Glycine max
  Clone ID: 700676293H1
gcaagatagctgccgcaagcagctccagggggtgaacctcacgccctgcgagaagcacatcatggagaagatccaaggccgcggcgatgacgatgatgatgatgacgacgacaatcacattctcaggaccatgcggggaagaatcaactacataaggaggaacgaaggaaaagacgaagacgaagaagaagaaggacacatgcagaagtgctgcacagaaatgagcgagctgagaagccccaaatgccagtgcaaagcgctgc

SEQ ID NO: 58764 - DNA, 264 bp, Glycine max
  Clone ID: 700676294H1
ccctggcaggaaccctcaccggactggcagttgccacgccgctcttcgtcctcttcagcccggtgctggttccagccacggtcgccatcggcctggccgtggccgggttcctgacgtcgggggccttcgggctcacggcgctgtcttccttctcctggatcctgaactacatccgggagacccagccagcctcggagaacctcgccgccgccgcgaagcatcacctcgccgaggcggcggagtacgtggggcagaagacgaaag

SEQ ID NO: 58765 - DNA, 266 bp, Glycine max
  Clone ID: 700676295H1
caagttattatcaaataattaattagattcctcgtggaatcttgttgaagccatgtctacagctggtcaggtcatcaagtgcagagctgcggtggcatgggaagcagggaagccactatcgatagacaccatagaagtggcaccaccccagaaaggtgaagtgcgtctgaagatcctcttcaactccctttgccgtacagatgtttactggtgggatgctaagggccagactccgctgtttcctcgaatcttaggccacgaagctt

SEQ ID NO: 58766 - DNA, 265 bp, Glycine max
  Clone ID: 700676296H1
atgcttgtctcaaagattaagccatgcatgtgtaagtatgaactaattcagactgtgaaactgcgaatggctcattaaatcagttatagtttgtttgatggtatctactactcggataaccgtagtaattctagagctaatacgtgcaacaaaccccgacttctggaagggatgcatttattagataaaaggtcaacacaggctctgactgttgctttgatgattcatgataactcgtcggatcgcacggctttgtgccggcgac

SEQ ID NO: 58767 - DNA, 281 bp, Glycine max
  Clone ID: 700676301H1
ggctcagcgtgccccatatcttccaccctttggctattcctaaccattgagtacaacttcacattttagaagaataccccctcttttgctgcatcagaggagttgtaaattaagagcatggctgcacaagctcttgtatcatcatcttctcttaccttctcagcggaggctgcaagacaaagtcttggaccaagatcactccaatctccatttggcttctccagaaaagctcctttcttgttaaggcagctgctaccccacctgtcaagcaaggatcagac

SEQ ID NO: 58768 - DNA, 261 bp, Glycine max
  Clone ID: 700676304H1
cctacttggcctccaatagctccagtcccctctggtatgcagttaggcgtgcgtctgctcatataattgtgctatccagctattcaccatttgtgaaatacactcctcaatacatgtggcttaaagaagagctgaagcgagttgagagggagaagactccttggctcattgtgctcatgcacgtgccgctctacaatagtaatggagctcactatatggagggtgagagcatgcgatctgtttttgagagctggttcatcg

SEQ ID NO: 58769 - DNA, 194 bp, Glycine max
  Clone ID: 700676306H1
atcttctctttatcctctcatctcctctcgccgtctcctgcacgaaacccataacctcacgcaaccaaacacgcccttagctccaacccattcccctcgtcatcggaaaattcaaccgccacgccgtgaaatatggaggctccggcggtggttggcgatcttgttgggatccaattgacgttgtcgtgccgcta

SEQ ID NO: 58770 - DNA, 273 bp, Glycine max
  Clone ID: 700676307H1
tcattttctgcatagaaaaaacccttttctggagaaagaatatagtcttcagctggacaaggatcattcatcttgaaagaagagtttgtgtgtgacaatctttatagttctaaggagggtgcaagagagaactgaatttgctgtgatggcaactcgtagatatgcttttggaagagctgatgaggccactcatccagactccatgagggccactttggctgaatttgtttctactttcatctttgtctttgctggagaaggctctggccttgc

SEQ ID NO: 58771 - DNA, 277 bp, Glycine max
  Clone ID: 700676309H1
caatttgtaagaaagatgtttggagagttgaatgtggaatcccttctggatttccgctcacagttatttgtaatagcatttttaatgagatgctcattagatatagctatgaaaaattactgcgccaggctaaagctccaagtatgtttttacaatccttcaaaaattttgtttctttgtgtgtgtatggtgatgataacttaattagtgttcatgaatatgtcaagccttactttagtggttctaaattgaaaagctttctagctggtcataatat

SEQ ID NO: 58772 - DNA, 271 bp, Glycine max
  Clone ID: 700676311H1
gttcaatatcctagtataccttaataaataatttaagatactatgatgagagcacggttcccattactgttgctgggacttgttttcctggcttcagtttctgtctcatttggcattgcttactgggaaaaagagaatcccaaacacaacaagtgtctccagagttgcaatagcgagagagactcgtacaggaaccaagcatgccacgctcgttgcaacctccttaaggtggagaaagaagaatgtgaagaaggtgaaattccacgaccac

SEQ ID NO: 58773 - DNA, 270 bp, Glycine max
  Clone ID: 700676312H1
attgtctttgaacactcatcaccatggccaagcttgttctttccctttgtttccttcttttcagtggctgcttcgctctgagagagcaggcacagcaaaatgagtgccagatccaaaagctgaatgccctcaaaccggataaccgtatagagtcggaaggtgggttcattgagacctggaaccctaacaacaagccattccagtgtgccggtgttgccctctctcgctgcacccttaaccgcaatgcccttcgtagaccttcctacacca

SEQ ID NO: 58774 - DNA, 270 bp, Glycine max
  Clone ID: 700676314H1
gagaaactttaagcagatgtctaatgttttgtgggtggctcctgaggacaaggcgagtttatggtcacaacttcattatgtttcgtgtaataatctggaaatgcaagaagcttatcttgtcaatctcgtaaatgtgttacgagaattgtatttgcacagtccagaggaagctcgccaattgagaaggaaagctctctctcgtattgaatggctgcaaaaagctgatgtgcctaccatagcacagattgaagagttccattcgatgcagag

SEQ ID NO: 58775 - DNA, 274 bp, Glycine max
  Clone ID: 700676315H1
agaacttagttctctgttgcatcatcatcatcttcattagtgttagccctaaacttcaccttcaaccatgaccacagtgccaccacacagtgtccaagtgcacacaacaacacaccgctacgaagccggcgtcgtcccgccggctcgttttgaggcgccgcgttacgaagccggcatcaaggcgccctcttccatttaccattccgagagaggtccgacgacctctcaggttctcgcagttgtcgccggccttccggtcggcggcatcctcctg

SEQ ID NO: 58776 - DNA, 272 bp, Glycine max
  Clone ID: 700676316H1
aagaagcaatgcaatcatgatcacaagcaccatcactgttgtgcttttcagcacagtggtgtttggtctgttgactaagccactaataaggcttttactgccccatactccacatcataaagaatcaagcatcacgataaccacagatccatctactccaagtccaaaatcagtcactgtcccacttcttgggagtgcccaagaatctgaagtcgatattgatggccatgatattcatcgtccaagcagcatccgtgctttactttccactc

SEQ ID NO: 58777 - DNA, 199 bp, Glycine max
  Clone ID: 700676320H1
atcgaatccgttttatcgccgaaggccatcctttgagccttaagttcgattcatttgcagttataatgctgtgtgttggaattcctaccgagtggtctgttgtggaggatctaccagaaggacctgctgttaaaattggtgagaacaaagatgcaatggatggttggtttagacttgagagagtttctgatgatgaatt

SEQ ID NO: 58778 - DNA, 257 bp, Glycine max
  Clone ID: 700676322H1
ctgaataattaagataagccatttccatagcagcctaagataatgaagagcactagcttgttcgctatctttctactttgcgccttcacctcatacctaccttccgccaccgcccaggacgtgctcgacgtggatggcgatccgattcggaacggtttcatatactacgttttgccggcaataagaggtaacggtggcggaatagaacgagccgcactcgggaaagacacgtgccctatcactgtagtgcaatctcc

SEQ ID NO: 58779 - DNA, 266 bp, Glycine max
  Clone ID: 700676323H1
ggaagctaagaagaagatttacaatgtttcctgtgagaggtactttggattcggctgcgagattgatgaagaaacttctaataagctcgaagggttgcctggtgttctgtttgtgctgccggattcgtatgttgatcctgagaacaaggactatggtgctgaattatttgtgaatggagagatcgtccagagatcacctgaaagacagagaagggtggaaccacagccacaaaggcatcaggacagacacgatacaatgatagaac

SEQ ID NO: 58780 - DNA, 270 bp, Glycine max
  Clone ID: 700676324H1
attcccgggttgtcctagcacttatcaagagccgcaagaatctcagcaacgaggacgaagccagaggccccaagaccgtcaccaaaaggtacatcgcttcagagagggtgatttgatcgcagtgcctactggtgttgcatggtggatgtacaacaatgaagacactcctgttgttgccgtttctattattgacaccaacagcttggagaaccagctcgaccagatgcctaggagattctatcttgctgggaaccaagagcaagagtttct

SEQ ID NO: 58781 - DNA, 271 bp, Glycine max
  Clone ID: 700676325H1
aattcttccaccaagttatgggttcccttgtgttgcttcttttctccctcttaggtctctcttctagttccagcatatcaactcatcgttccatattggaccttgacctaaccaagtttaccacacagaaacaggtgtcttcactgttccaactatggaagagtgagcatggacgtgtctaccataaccacgaagaagaggcaaagagacttgagattttcaagaataacttgaactatatcagggacatgaatgcaaacagaaaatcacc

SEQ ID NO: 58782 - DNA, 240 bp, Glycine max
  Clone ID: 700676326H1
gtctttttgactagagttgatccttttcctgtggccttgttagctgttctttttggtgttaagaacgaaattctgagttctaatgccacaaatccaatgttgacaaggcttcttgagaactgcaagagtcttaaatatttggttgatgagtgtcctttcgcatttgttaactagtttgtaatattttgttcacttaaataaagcgcattactatgtgcaataagtgtgtttaaatataaa

SEQ ID NO: 58783 - DNA, 270 bp, Glycine max
  Clone ID: 700676327H1
cttagagatttagagtttaacacaaaatattattatgaagttggaattgggcatactactaggcaattttggtttgtgactcctcctgaagttcaccctgatgcgccttatacatttggtctcattggtgatctgggtcaaacttttgattcaaacaagacccttgttcactatgaatcaaaccctcacaaaggacaagctgtgttgtatgttggagacctctcttatgcagataatcacccaaatcatgataacgttaggtgggatacg

SEQ ID NO: 58784 - DNA, 268 bp, Glycine max
  Clone ID: 700676328H1
tctctccattgtctttgaacactcatcaccatggccaagcttgttctttccctttgtttccttcttttcagtggctgcttcgctctgagagagcaggcacagcaaaatgagtgccagatccaaaagctgaatgccctcaaaccggataaccgtatagagtcggaaggtgggttcattgagacctggaaccctaacaacaagccattccagtgtgccggtgttgccctctctcgctgcacccttaaccgcaatgcccttcgtagacctt

SEQ ID NO: 58785 - DNA, 267 bp, Glycine max
  Clone ID: 700676330H1
cacactcactcgctccctcggaatcccaatggcggagaacggtgaaggcggcgaggaatacctgttcaagatagtgctgattggggactccgcggtggggaagtccaacctcctctcgcggttcgcgcggaacgagttcgatagcaactccaaggccaccattggggtcgagttccagacgcagctcgtcgagatcgacggcaaagagatcaaggcgcagatctgggacactgcgggacaagagaggtttcgagctgtcacctctgc

SEQ ID NO: 58786 - DNA, 196 bp, Glycine max
  Clone ID: 700676331H1
attgtcgatgaacactcatcaccatggccaagcttgtactttcccgttgtttccctcatgtcagtggctgcttcgctctgagagagcaggcacagcactatgagtgccagatccacaagctgaatgccctcaaaccggataaccgtatagagtcggaaggtgggttcatagagacctggaaccctaacaacaagcc

SEQ ID NO: 58787 - DNA, 277 bp, Glycine max
  Clone ID: 700676333H1
cgctctcaaggaggctctattgctctctgcttcgaacccccaatgcatatcgccacttctccaccgatcaccttttcgactcggacgaggccgactcagcacccgacccacccgcacccgacgccgttcaagaagaagaaaagttcgtcatcgatcgccccctcgagaatggcctcgacgttggcatctacagggctattctggtagggaaggcggggcaggctcctttgcagaagaagcttaagagtggcacctccgtcactcttctctccgtcgg

SEQ ID NO: 58788 - DNA, 185 bp, Glycine max
  Clone ID: 700676335H1
caagaattgcagtataatactgacaaattgaaagatttaatgattaaaaatgcagacagtaaagctgctgcattatataatgaggtttgtaatttaaaggaacagtgtgatttgtcattggattctcaatctcaagtagtatcagctaatactgaagtggaagatgatgtaacaacttttgataa

SEQ ID NO: 58789 - DNA, 263 bp, Glycine max
  Clone ID: 700676336H1
gctccttgctccaaaaccccttcttcagggtcaccgctgtcagggttagggtttttccaccttctttatttaccaatcttcttctactaccacttttccctcgttccctctcttagtctcttcaattgtaagctttttgcgctagggtttcctctgcaatctcttgtacttgaagctcgttccttcttccggatctcgatctatggatacccgcaagaggggaagacccgaacccggcttcagcttaaatggcggattccaga

SEQ ID NO: 58790 - DNA, 195 bp, Glycine max
  Clone ID: 700676337H1
gtcggaaggtgggttcattgagacctggaaccctaacaacaagccattccagtgtgccggtgttgccctctctcgctgcacccttaaccgcaatgcccttcgtagaccttcctacaccaacggtccccaggaaatctacatacaacaaggtaatggtatttttggcatgatattcccgggttgtcctagcactta

SEQ ID NO: 58791 - DNA, 214 bp, Glycine max
  Clone ID: 700676338H1
ggaatcttgttgaagccatgtctacagctggtcaggtcatcaagtgcagagctgcggtggcatgggaagcagggaagccactatcgatagaaaccatagaagtggcaccaccccagaaaggtgaagtgcgtttgaagatcctcttcaactccctttgccgtacagatgtttactggtgggatgctaagggccagactccgctgtttcctcgtat

SEQ ID NO: 58792 - DNA, 269 bp, Glycine max
  Clone ID: 700676340H1
tcctgctcctattccaatcaagcgcgagggaggatatgaaagactaagggatgattaccaaagtcactactaacataaccaacctttcagctatgaacgctctagcagccaccaaccgtaacttccgacgtgcagctcacattctcggtttggacactaagcttgagaatagccttctcattcccttcagggaaatcaaagttgaatgcacgatcccaaaagatgacggaacgctagtatcgtatgtaggattcaggattcaacatgac

SEQ ID NO: 58793 - DNA, 245 bp, Glycine max
  Clone ID: 700676342H1
gcctcggttgagataggacttttaattgcagtctctatatcctttgcaaagatcctattacaagtcacaaggccacgaactgcaattctggggaagatccctaggactactgtctacagaaacatccaacaataccctgaagccacaagggttcctggtgtactgattattagagttgattctgcaatatatttttccaactccaactatgttaaagaaaggatattaagatggctgatggatga

SEQ ID NO: 58794 - DNA, 267 bp, Glycine max
  Clone ID: 700676344H1
atcaaatttagctaaaggctttaagcatgttgcttcttcagggacagagaagtcaggagcagctccaaatattcctgtaaataaccatgatcgcagagccctgccacagagaacaagaacccattcaaaccactttgtggcaaattttggttccaacatgcaaagttcaaatccacagatggcagggccattcaaggaaagtttcaataaacacacaagggatctgaatatgcctgcaggaattgttccaacaaagaggcattttac

SEQ ID NO: 58795 - DNA, 263 bp, Glycine max
  Clone ID: 700676345H1
gcttatgatactttctgcctattttgtgtattggctctttgaaattggagctgggatctgtgacatgtttgggcgcttgattgacttgcttggatgttgtttcttggtggggtttgtcctggcaatgggagctttatatagaagcagcatgatgagaggagcagcagccctgtgcagctttccaagtatttagggcgtgacaaagatgacggtgtccgtcgcagtgctgtatctggcaagaagattcatctgaaacttgagaa

SEQ ID NO: 58796 - DNA, 262 bp, Glycine max
  Clone ID: 700676347H1
tgatgataagcttgtgttggctaacacacaagaattctttgatggaaattttccagtggattcttggttaccaatttttgtgaattgtctttatcctgtaagtcaattaccttcagaagctgtcgttgtaaatgttacatgtggtagtggacgtggtggtttacccaccactgcttggattagttctgcagttaacaatcgctcctcagatatcaacaaaaagattcgcacagcacttgggaaaggtaagaaaattgttttt

SEQ ID NO: 58797 - DNA, 262 bp, Glycine max
  Clone ID: 700676349H1
cagaggttcaacaaacgctcccaacagcttcagaatctccgagactaccgcattttggagttcaactccaaacccaacacccttcttctcccccaccatgctgacgctgattacctcatcgttatccttaacgggactgccattcttaccttggtgaacaacgacgaccgagactcttacaaccttcaatctggcgatgccctaagagtccctgcaggaaccacatactatgtggttaaccctgacaacgacgagaatctca

SEQ ID NO: 58798 - DNA, 143 bp, Glycine max
  Clone ID: 700676350H1
ggtgaatctgaatcaattcaaactcaaaattccagattggatcggattgaaaaattgcaattctgatttgtttggattgcatcacggatttcactttgaaaatcctatctaatcctatccatcaaattgcttagtattttttt

SEQ ID NO: 58799 - DNA, 193 bp, Glycine max
  Clone ID: 700676351H1
gaggatttaaaacgggttctaagtcatccacaggctcttgctcaatgtgagaacacactgacgaaatttggattggtgcgagaagcagttgacgatactgctggcgctgctaagcatgtcgcctaccacaaactacaagatgcaggagcagttgctagttctgctgcagcaaagatctatggcttgaatatac

SEQ ID NO: 58800 - DNA, 267 bp, Glycine max
  Clone ID: 700676354H1
gcataacctaaacttacccttcttctctctgtgtgtgtgcgcatcaaacgcaaccagaagcagccatggccactgcaagaactgtgaaggacgtttctcctcatgagttcgtcaaagcttactcttctcacctcaagcgatctggcaagatggagctgccagagtggactgatattgtgaaaactgcaagatttaaggagttggctccttatgatcctgactggtactatgtcagagctgcttccatggcaagaaagatctacttga

SEQ ID NO: 58801 - DNA, 193 bp, Glycine max
  Clone ID: 700676355H1
catgaatatgtcaagccttactttagtggttctaaattgaaaagctttctagctggtcataatatcaccattactgatggtattgacaaaactagtgcaactttgcaatttagaaagttagcagattgtgattttctcaagagaaactttaagcagatgtctaatgttttgtgggtggctcctgaggacaagg

SEQ ID NO: 58802 - DNA, 269 bp, Glycine max
  Clone ID: 700676356H1
ggccgtgactgatcatcagaggcaatggcgagcaggtactgggcagtgtctcttcccgtccacaactcggcatcatctcagctctggaaccaattgcaggaacgaatctccaagcattccttcgacacacctctctacacattcaacattcccaacctccgcgtcggaaccctagactctctcctctccctcagcgatgacctcgccaagtccaacaatttcgtcgaaggagtcacgcacaagatcaggtgccagattgaggagctcga

SEQ ID NO: 58803 - DNA, 268 bp, Glycine max
  Clone ID: 700676357H1
ctgatttaaaatcaaacaacactgagcaaagcgtaaagaatgtcagcaagtccgaagtagactcaagcaaggataaaaacaaagttgaggtaaattaatctattgctttttcacaaaagttccaatatatatttttgcttttatttttctctataggaagacgacctagataaagagatatgacatgattaggttatgaccaatgataatgataaaaagacttttccggagaaaagaaatttgttggtgaaccagtcttgatccttgt

SEQ ID NO: 58804 - DNA, 263 bp, Glycine max
  Clone ID: 700676358H1
tccgaaaccggttcaggcgaaaatgagaaccgaaccggttcttcttcttcttcctattcggttggattgagtaagcctaagccttcgttggttggtgtgacaattgaggtgcctccgagggacgagaattttcaaaacgagttgcaaccgagttgcgactcatcctcctcgtttcggtcgccgatgagtcgcatgctgtcgtttacgaggatgctcggcagggaaaagaaggggaacgtgtcgccgtcgtcgtgcggcggcgg

SEQ ID NO: 58805 - DNA, 263 bp, Glycine max
  Clone ID: 700676360H1
attgctgtgaagttttctgaaatcttgaccaagattgacaggcgatctggtaaggagcttgagaaggagcccaaatttttgaagaatggtgatgctggtatggttaagatggttccaaccaagcccatggtggttgaaactttctctgagtatcctccccttggtcgttttgctgtgagggacatgcgtcagaccgtagctgttggagtcatcaagagtgttgagaagaaagaccccaccggagccaaggtcacaaaggctgc

SEQ ID NO: 58806 - DNA, 264 bp, Glycine max
  Clone ID: 700676361H1
ggcaagatgtcgaagagaggacgcggtggttcggcggggaacaagttccggatgtcgctgggtctgccggtggcggcgacggtgaactgcgccgacaatacgggggcgaagaacctctacatcatatcggtgaaagggatcaaagggcgtttgaaccgtctcccctcggcttgcgttggcgacatggtgatggccaccgtgaagaaggggaaacccgatctgaggaagaaggttttgccagctgtcattgttcgccagcgcaag

SEQ ID NO: 58807 - DNA, 265 bp, Glycine max
  Clone ID: 700676363H1
gaggtctttcaagtatgcctgggtgcttgataagcttaaggctgagcgtgaaagaggaatcacaattgatattgccttgtggaagtttgaaaccaccaagtactattgcacagtcattgatgcccctggacacagggatttcatcaagaacatgatcactgggacatcccaagctgactgtgctgttcttatcattgattccactactggtggttttgaagctggaatttcaaaggatggacagactcgtgaacatgctctgctt

SEQ ID NO: 58808 - DNA, 264 bp, Glycine max
  unsure (1)..(264): unsure at all n locations
  Clone ID: 700676364H1
agggtataatgcctaaggatctgcagatttatgtcacaactgcatccaatgcacaagagaatagttggggaacttattgtcctggaatggatccttctccacctccagagtacatcacttgcctaggggatttgtacagtgttgcttggatggangatagtgagactcataatctaaaaagggagtccgtgaaacaacaatacaaatcggtaaagcaacggacttcaaatttcaacaactatgcgatgggttctcatgtgatgc

SEQ ID NO: 58809 - DNA, 262 bp, Glycine max
  Clone ID: 700676365H1
ctagtcctgatcctgaattgaagaactatattgagaaggctaggagcatttctggtgtctccgttgatccaaagcttgccaaattacaagaaaaggatatcatagagatgatattctttcctgtggtgaatgaggcttgtcgggtccttgatgaaggtatcgcagtcaaagcagcagatcttgatatttctgctatcatgggcatgggttttcccccttacaggggaggcatcatattctgggctgattctcttggatccaa

SEQ ID NO: 58810 - DNA, 223 bp, Glycine max
  Clone ID: 700676366H1
ttctctccattgtctttgaacactcatcaccatggccaagcttgttctttccctttgtttccttcttttcagtggctgcttcgctctgagagagcaggcacagcaaaatgagtgccagatccaaaagctgaatgccctcaaaccggataaccgtatagagtcggaaggtgggttcattgagacctggaaccctaacaacaagccattccagtgtgccggtgtt

SEQ ID NO: 58811 - DNA, 237 bp, Glycine max
  Clone ID: 700676367H1
cttaaacactcatcagtcatcaccatggccaagctagttttttcactttgttttctgcttttcagtggctgctgcttcgctttcagttccagagagcagcctcagcaaaacgagtgccagatccaaaaactcaatgccctcaaaccggataaccgtatagagtcagaaggagggctcattgagacatggaaccctaacaacaagccattccagtgtgccggtgttagcctctctcgc

SEQ ID NO: 58812 - DNA, 239 bp, Glycine max
  Clone ID: 700676368H1
gattctgtagagaagaagagcaatggcgtccaacgattccgattcgcagatgaagatcgtacatggcgatgctggttacatacttgaagacgttcctcacttcgccgactatattccaaatcttcctgtattttctctctctctctctctctttaggagttcttcgattacatatgcgaactgcattgcattgacgcattcacttgcggatcgtttgtgtactacttttttttttttgc

SEQ ID NO: 58813 - DNA, 269 bp, Glycine max
  Clone ID: 700676369H1
atctctccattggtccttaaacactcatcagtcatcaccatggccaagctagttttttccctttgttttctgcttttcagtggctgctgcttcgctttcagttccagagagcagcctcagcaaaacgagtgccagatccaaaaactcaatgccctcaaaccggataaccgtatagagtcagaaggagggctcactgagacatggaaccctaacaacaagccattccagtgtgccggtgttgccctctctcgctgcaacctcaaccgcaa

SEQ ID NO: 58814 - DNA, 191 bp, Glycine max
  Clone ID: 700676370H1
atgaacactcatcaccatggccaagcttgttctttccctttgtatccttcttttcagtggctgcttcgctctgagagagcaggcacagcaaaatgagtgccagatccaaaagctgaatgccctcaaaccggataaccgtatagagtcggaaggtgggttcattgagacctggaaccctaacaacaagccat

SEQ ID NO: 58815 - DNA, 268 bp, Glycine max
  Clone ID: 700676371H1
ctcactacaagctgcagctaccttcatgcaacccaccaaggttggcatagcctctcgcaacctcaaatctacacaatgcatttctaaggcttttggcttggaacctgctgcagctaaactcacttgctcccttcagcctgatctcaaagaatttgctcaaaaatgtgtcgacgctaccaaaattgcaggattcgcccttgccacctctgctctcgttgtttctggagcaagtgcagaaggtgttccaaaaaggctaaccttcgacgaa

SEQ ID NO: 58816 - DNA, 267 bp, Glycine max
  Clone ID: 700676372H1
gttcaatatcctagtataccttaataaataatttaagatactatgatgagagcacggttcccattactgttgctgggacttgttttcctggcttcagtttctgtctcatttggcattgcttactgggaaatagagaaccccaaacacaacaagtgtctccagagttgcaatagcgagagagactcgtacaggaaccaagcatgccacgctcgttgcaacctccttaaggtggagaaagaagaatgtgaagaaggtgaaattccacga

SEQ ID NO: 58817 - DNA, 254 bp, Glycine max
  Clone ID: 700675767H1
ctctccgcaagactgcaatgttcgtgccacactacaacctgaacgcgaacagcataatatacgcattgaatggacgggcattgatacaagtggtgaattgcaacggtgagagagtgtttgatggagagctgcaagcgggacgggtgctgatcgtgccacaaaactttgtggtggctgcaagatcacagagtgacaacttcgagtatgtgtcattcaagaccaatgatacacccatgatcggcactcttgcaggg

SEQ ID NO: 58818 - DNA, 253 bp, Glycine max
  Clone ID: 700675770H1
gccagaagatgtggggctaagtagagatctgcagttcttcaagcctggaaatattgtcaaagagaaccaaagggtcacttatacaaccgtgtacaagtgtgacaatttctcactctgcatctttttcatacctgaaggaggagtcattcctctccacaaccacccggacatgactgttttcagcaagcttttattaggactaatgcacattaagtcctatgattgggctgaccctgaggcctctgatgataac

SEQ ID NO: 58819 - DNA, 250 bp, Glycine max
  Clone ID: 700675771H1
caaacccgtgttctgatgcatggagtttggaatttctgaagcgtaccggatttcattgtgatatcatttgtgtcactggatggactgccaccccaatgcaggatgttcaggttacaattgattggtttatttcctctcaggaatgtgttcccaggacctattgtgttttaaatccacaaaatccttttgtgttaaataggtggatgggaaaactgactttccctcagggcacttcccgaagtgttaagag

SEQ ID NO: 58820 - DNA, 254 bp, Glycine max
  Clone ID: 700675772H1
tccacgacgaccaagccatggaaagcatgaagatgacgaggacgaggacgaagaagaagatcaacctcgtcctgatcaccctccacagcgaccaagcaggcccgaacaacaagaaccacgtggaagaggatgtcagactagaaatggggttgaggaaaatatttgcaccatgaagcttcacgagaacattgctcgcccttcacgtgctgacttctacaacccaaaagctggtcgcattagcaccctcaacagtc

SEQ ID NO: 58821 - DNA, 253 bp, Glycine max
  Clone ID: 700675773H1
cttggtccttaaacactcatcagtcatcaccatggccaagctagttttttccctttgcattctgcttttcagtggctgctgcttcgctttcagttccagagagcagcctcagcaaaacgagtgccagatccaaaaactcaatgccctcaaaccggataaccgtatagagtcagaaggagggctcattgagacatggaaccctaacaacaagccattccagtgtgccggtgttgccctctctcgctgcaccctc

SEQ ID NO: 58822 - DNA, 254 bp, Glycine max
  Clone ID: 700675774H1
ttcgggactttcactagccgcagcagcctcaggaggagaataaggatgtctcacaggaagttcgagcacccaaggcacgggtcactgggatttctccccaggaagcgtgctgctcgtcacaggggaaaagtgaaggcattccccaaggatgacccatccaaggcacccaagctcactgcattcttgggttacaaggctggtatgactcacattgttagagaggtcgagaagccaggatcaaagcttcacaagaa

SEQ ID NO: 58823 - DNA, 252 bp, Glycine max
  Clone ID: 700675775H1
ctggtagatttgagagtttcttcctatctagcactgaagctcaacaatcctacttgcaaggattcagcaggaacattttagaggcctcctacgataccaaattcgaggagataaacaaggttctgtttagtagagaggaagggcagcagcaaggggagcagaggctgcaagagagcgtgattgtggaaatctcgaaggaacagattcgggcactgagcaaacgtgccaaatctagttcaaggaaaaccattt

SEQ ID NO: 58824 - DNA, 254 bp, Glycine max
  Clone ID: 700675776H1
cacaacgcagctgcgcacagcacagtcctgaccctcccagaaaaccctaatcagcgtatcgaatagttggaatctccaattcttgtctttatctcttgaccagaaaaaatgtgcgaagcgtagaaattgaagaaaggcccaaatacaaagatatcagacgctattactgcgagtactgcggtatctgcagatccaaaaaaacccttatcacctcccacatcaatttgcaccacaaggaagagtatgaaaaagca

SEQ ID NO: 58825 - DNA, 253 bp, Glycine max
  Clone ID: 700675777H1
gtggtttgctaggtttgtcaagttgtacactaatcaaagagctgtatcttgttaggaacaagataagtgatgttgaagggctacacaggctattgaagctaacagttctagacttgagcttcaacaagatcacaacagcaaaagcattaggccagcttgtggctaacttcaactcacttaaggcccttaatctccttggaaattcaattcaaagcaacatcagcgatgaccagctaagcaaagcagtctgtgg

SEQ ID NO: 58826 - DNA, 255 bp, Glycine max
  Clone ID: 700675778H1
cttattttcttgtcaaaatgactcctcactttaataatctatggggtattgttggtggatccgtgaagcctttaacttgatttataaataattgaaacctggcttctgaggtgtaggttagcactactttggctgctgctcaagcacgactatggaatgtgagggaagagagagaccagtttgaggaagcaaacaatcagatagttgaacacctgaaaataaaggtttgaggttctatttttcatggctgtgaat

SEQ ID NO: 58827 - DNA, 255 bp, Glycine max
  Clone ID: 700675779H1
cgaggctctggagtatggtgattgccgtttatcccttgcggtgagttaaaattatgatgttgtaaagctactagattctgctcctgtcagtgttttgtacaatcaattgtctggagttccctctgttatttcagattccccaatatggaatatttgaaaatgtaaattcactggacgagcttgcaaaaatgcctcaatggacagaagaaaagcctctacgagttgctactggtttcacctacgtaagttttaaag

SEQ ID NO: 58828 - DNA, 251 bp, Glycine max
  Clone ID: 700675781H1
caacggagccctctcttcaggtcaccatctagactgcaatcatggctgatggaccacagcatccatcagttgttcagaagctagctggacagtcttacctggtgtccaggcttagccccaactttaactctaggaattattctgcaactggttcttacgtcaatggcggcatgcactcgcctgggttggctgatgtgtcacctgtatctccagttactgtgcatgctccagcagagcaaggagtgagtgga

SEQ ID NO: 58829 - DNA, 179 bp, Glycine max
  Clone ID: 700675782H1
ggtagcaatcctgttactcctcaagttgggagaaaccctgttccaccatccttccccgatggatcttctcctccagttgttaaaacccgattgtgcaacaagtttaatacagctgaaggttgcaaatttggtgacaaatgtcactttgcccatggtgagtgggagcttggcaggcctac

SEQ ID NO: 58830 - DNA, 251 bp, Glycine max
  Clone ID: 700675783H1
gagttccctccaaaaagtaatctggatcctgcaatctatggtgatcaaagcagtaagataacagcagattcccttgatctagatgggtacacaatggacgaggcacttggtagtcgaaggttatttatgttagattaccatgatatcttcatgccatatgtgaggcagataaatcagctgaattctgccaagacttatgcgacaaggactatcctttttttgagagaagatggaactttaaagccagtggc

SEQ ID NO: 58831 - DNA, 249 bp, Glycine max
  Clone ID: 700675784H1
gtgaaatggactgaggaatggcaacagtgagaacaccattgaattttgattctagcaagcagagcttttgtcaattttctatcgaccttctcggtggaggaattttagtggacaaaactggagattggatcacacttatacaaaattctccaattagtaacttgttgagagttgctgcttggaagaaaggctgtttaatggtcaagattgtgatgtctgggaatgcagcagtcaaaaggagtgattggg

SEQ ID NO: 58832 - DNA, 251 bp, Glycine max
  Clone ID: 700675786H1
gttcaatatcctagtataccttaataaataatttaagatactatgatgagagcacggttcccattactgttgctgggacttgttttcctggcttcagtttctgtctcatttggcattgcttactgggaaaaagagaaccccaaacacaacaagtgtctccagagttgcaatagcgagagagactcgtacaggaaccaagcatgccacgctcgttgcaacctccttaaggtggagacagaagaatgtgaaga

SEQ ID NO: 58833 - DNA, 251 bp, Glycine max
  Clone ID: 700675787H1
cttcagagcctgcacttgttccacccttcaacataaaccatcaacatcttccccaattctcttatccgtaatctggcactcttcagagaagactttgtaagataaaaagagaaatggccttagaccagtattttgatgaggctgtgccccagttggattccttggaagataaatcgtctctcgaaacatggaaatgtggcagtgacgatattgcagattcggatagaaatgcctctggtggctttgattgc

SEQ ID NO: 58834 - DNA, 252 bp, Glycine max
  Clone ID: 700675789H1
ctcgagccgcttaattattaacacttccttagttcaatatggggaagcccttcactctctctctttcttccctttgcttgctactcttgtcgagtgcatgctttgctattagctccagcaagctcaacgagtgccaactcaacaacctcaacgcgttggaacccgaccaccgcgttgagtccgaaggtggtttgattcaaacatggaactctcaacaccctgagctgaaatgcgccggtgtcactgtttcca

SEQ ID NO: 58835 - DNA, 250 bp, Glycine max
  Clone ID: 700675790H1
gccatagagttgagtttgccacatcctcagggagatcaatctggtgcttttagtcaagtttttctgcctgcagatgaaggtgttgaaagttctatttggctgctagcaaaggcttatgtagttgtgaatgactcgtgctatcatcaacttgtcagccattggttaaacactcatgcagttgttgagccattcatcatagcaacaaacaggcatctcagtgttgttcaccctatttataaactccttcacc

SEQ ID NO: 58836 - DNA, 250 bp, Glycine max
  Clone ID: 700675791H1
ctcagtcgcaacttccaacctccactcattgcacagtgcacaccactttcacaacacaaaccctttccgttacaatcaatccattttccccatcctctcattaccctctcgattccatttccatcatttgcatttcggtagagcgagcgaggggagtgtgtgtgactgtgatgtattgtggcgaggaagcgaacaatggagttgtggaaaagctggggcagtaaatttgcggaaagtgagttccatcgtg

SEQ ID NO: 58837 - DNA, 250 bp, Glycine max
  Clone ID: 700675792H1
gttgcaacggtgagagagtgtttgatggagagctgcaagagggacgggtgctgatcgtgccgcaaaactttgtggtggctgcaagatcacagagtgacagcttcgagtatgtgtcattcaagaccaatgatacacccatgatcggcactcttgcaggggcaaactcattgttgaacgcattaccagaggaagtgattcagcacactttcaacctaaaaagccagcaggccaggccgataaagaacaacaa

SEQ ID NO: 58838 - DNA, 254 bp, Glycine max
  Clone ID: 700675793H1
gcagaaagagtcacaaatgctctacgcttgatctctccaaagagatctttacaccaaggctcgtcttccttatcaagatcaaaatcaacagggtcctctattgattctcatagaactgctgctgttgaggactgcattgagttcatccactcttccttttccagatcaaattcatcaaccgaagcaccccgccaagattctattcaagctccttgagttgagatgcttgcaatcatgtgcttgctactatgctt

SEQ ID NO: 58839 - DNA, 231 bp, Glycine max
  Clone ID: 700675795H1
ggctcgagactagcgatagctgataagagaggtaccaaactgaaaagcgtaaaagaagagttgagattcccttgaagaaaagatggcatcccataggcaaagctatgaagctggtcaaactaagggccgaactgaggaaaagacgaaccagacgatgggcaatattggagagaaggctcaagctgcaaaggagaagacccaggaaatggcccaagctgcaaaggagaagac

SEQ ID NO: 58840 - DNA, 251 bp, Glycine max
  Clone ID: 700675796H1
gtggaatggtgatgctcattaacttggctttcagtgcgggtgagtatcctggcagcactctcagcatgcttagagaggaatcctgttcaggagactgttacggaaatgctcattgttggatgcacgggcgtgttcaggtttaccaagggctatgtcattgctaagagtcttatagaaattactgacaatgagcattttgtggtggagtatcatgtcactgtttctcatccttagatcttatatgtctttgg

SEQ ID NO: 58841 - DNA, 273 bp, Glycine max
  Clone ID: 700675801H1
aattaagaaaagccatttccatagcagcctaagaaaatgaagagcactagcttgttcgctatctttctactttgcgccttcacctcatacctaccttccgccaccgcccaggacgtgctcgacgtggatggcgatccgattcggacggtttcatatactacgttttgccggcaataagaggaaacggtggcggaatagaacgagccgcactcgggaaagacacttgccctatcactgtagtgcaatctcccaatccaaactctaaggggttag

SEQ ID NO: 58842 - DNA, 275 bp, Glycine max
  Clone ID: 700675803H1
gttagagagagagttattatggtgactatggaagagagtccaaggagcccagaggcgaagctggggttgcgagtggaggatttatgggacattcaagaaccacagctaagtcatgatgagaagctcaatgcttgctttgaaacatccctgtctctgccttccctccacctccttcgaatcaagaagttgagataatatcagatgccaccctagccgaggcagtgaaactacttgcagaacacagcattctcagtgcacctgtggtggatgtagat

SEQ ID NO: 58843 - DNA, 217 bp, Glycine max
  Clone ID: 700675806H1
gccagatccaaaaactcaatgccctcaaaccggataaccgtatagagtcagaaggagggctcattgagacatggaaccctaacaccaagccattccagtgtgccggtgttggcctctctcgctgtaccctcaaccgcaacgccttcgtataccttcctacaccaacggtctccaggaaatctacatccaacaaggtaagggtatttttggcatgata

SEQ ID NO: 58844 - DNA, 271 bp, Glycine max
  Clone ID: 700675809H1
ctcgagcgattcggctcgacgcaagaatgcaatgttcgtgacacactacaacctgaacgcgaacagcataatatacgcattgaatggacgggcattgatacaagtggtgaattgcaacggtgagagagtgtttgatggaagctgcaagagggacgggtgctgatcgtgccacaaaactttgtggtggctgcaagatcacagagtgacaacttcgagtatgtgtcattcaagaccaatgatacacccatgatcggcactcttgcaggggcaa

SEQ ID NO: 58845 - DNA, 273 bp, Glycine max
  Clone ID: 700675810H1
attggtccttaaacactcatcagtcatcaccatggccaagctagtttgttccctttgttttctgcttttcagtggctgctgcttcgctttcagttccagagagcagcctcagcaaaacgagtgccagatccaaaaactcatgccctcaaaccggataaccgtatagagtcagaaggagggctcattgagacatggaaccctaacaacaagccattccagtgtgccggtgttgccctctctcgctgcaccctcaaccgcaacgcgcttcgtaga

SEQ ID NO: 58846 - DNA, 272 bp, Glycine max
  Clone ID: 700675811H1
tctctccattgtctttgaacactcatcaccatggccaagcttgttctttccctttgtttccttcttttcagtggctgcttcgctctgagagagcaggcacagcaaaatgagtgccagatccaaaagctgaatgccctcaaccggataaccgtatagagtcggaaggtgggttcattgagacctggaaccctaacaacaagccattccagtgtgccggtgttgccctctctcgctgcacccttaaacgcaatgcccttcgtagaccttcctac

SEQ ID NO: 58847 - DNA, 272 bp, Glycine max
  Clone ID: 700675812H1
atctcgagcgattcggctcgaggccagaattaaggattaaggattattcagtcacaaggtatttgctcataaccatgggtgttggtacataaaatttgagcgtgattaagctgtatttaatttgaccgtgattaagctgtattaatttgaccatacttagtgtcactttttaattagtcctcttgaacaggaatggctttataccttgcacaggaagttataaacaatgcttttgctgatttaagtattattgagcataagaatagtggcat

SEQ ID NO: 58848 - DNA, 273 bp, Glycine max
  Clone ID: 700675813H1
gaagaagagcacgagcagagagaggaacaggaatggcctcgcaaggaggaaaaacgcggagaaaagggaagtgaagaggaagatgaggatgaggatgaggaacaagatgaacgtcaattcccattcccacgcccacctcatagaaggaagagcgaaagcaagaggaagatgaggatgaggagcagcagcgagagagcgaagaaagtgaagattctgagttacgaagacataagaataagaacccttttctcttcggctctaacaggttcgaaa

SEQ ID NO: 58849 - DNA, 272 bp, Glycine max
  Clone ID: 700675814H1
tcagtttctcctcgttgttcttcgctttcctgttttcaatttcgattctttcgttaatttaataagatgtttgggagggcaccgaagaagagcgataatacgaggtactacgaaatcctcggcgtctccaagaacgcttgcaggatgatctgaagaaggcttacaagaaagccgccattaagaatcaccccgacaagggcggtgatcccgagaagtttaaagagctggcgcaactatatgaggttctgagtgaccctgagaagcgtgagata

SEQ ID NO: 58850 - DNA, 190 bp, Glycine max
  Clone ID: 700675817H1
aggtgaaattccacgaccacgaccacgagcacaacacccggagagggaacctcagcaacccggtgagaaggaggaagacgaagatgagcaaccacgtccaatcccattcccacgcccacaacctcgtcaagaagaagagcacagcagagagacggacaggaatggcctcgcaaggaggaaaaacgcggag

SEQ ID NO: 58851 - DNA, 190 bp, Glycine max
  Clone ID: 700675818H1
agcttcagttgtgtatctcctctttggcttccatctcattgttatcatgtcaagttccttacccgcaactagtgaagtgtttgcaaaacagtatccatccacagaacccgtggaagaaaaactcacccaactccacttcatttccataacaacataacgggggaacacccaactgctatgaaaactgttt

SEQ ID NO: 58852 - DNA, 266 bp, Glycine max
  Clone ID: 700675819H1
ggtatttttggcatgatattcccgggttgtcctagcacttatcaagagccgcaagaatctcagcaacgaggacgaagccagaggccccaagaccgtcaccaaaaggtacatcgcttcagagagggtgatttgatcgcagtcctactggtgttgcatggtggatgtacaacaatgaagacactcctgttgttgccgtttctattattgacaccaacagcttggagaaccagctcgaccagatgcctaggagattctatcttgctggg

SEQ ID NO: 58853 - DNA, 273 bp, Glycine max
  Clone ID: 700675820H1
aacaaacccactaagatggcttcctttgtatccttcctagtgctgcttcttgcagcccttatcctcatgcctcaagggcttgctacttactacaaaccaattaagaagccaccagtgtacaagcctccagtgtacaagccaccagtgtacaaaccaccggtttataagccaaaaccaccggtttacaagccgaaaccaccggtttacaagccaccatataagaagccaccatacaagatgccaccttatggaaagtaccctccagtagaggac

SEQ ID NO: 58854 - DNA, 157 bp, Glycine max
  Clone ID: 700675821H1
gttcaatatcctagtataccttaatgaataatgtaagatactatgatgagagcacggttcccattactgttgctgggacttgttttcctgggctgcagggtctgtctcatttggcattgcttactgggaaaaagagaacccaaacacagcaagtgtc

SEQ ID NO: 58855 - DNA, 212 bp, Glycine max
  Clone ID: 700675823H1
caagttcacaatcctcctcatctctcttctcttcggcatcgcccacacttgcagcgcctccaaatggcagcaccagcaagatagctgccgcaagcagctccagggggtgaacctcacgccctgcgagaagcacatcatgggaagatccatggccgcggcgatgacgatgatgatgatgacgacgacagtcacattctcaggaccatgcgggg

SEQ ID NO: 58856 - DNA, 213 bp, Glycine max
  Clone ID: 700675825H1
ctttctttcattctgtttggagatggaagtcacactttcagcgtgcaagtccattagctcgcctgctgtgcccgtcgcagctatatttgcggggaaagcagtgactaagagttcgcaatgcagttttttaactggagcaacaaagtgaggtttcctaggcaagtcggtcaagttagccacggtcgcaaacagcgccaaacgcgtcactgtagt

SEQ ID NO: 58857 - DNA, 265 bp, Glycine max
  Clone ID: 700675826H1
ataaaattcttccaccaagttatgggttcccttgtgttgcttcttttctccctcttaggtctctcttctagttccagcatatcaactcatcgttccatattggaccttgacctaaccaagtttaccacacagaaacagtgtcttcactgttccaactatggaagagtgagcatggacgtgtctaccataaccacgaagaagaggcaaagagacttgagattttcaagaataacttgaactatatcagggacatgaatgcaaacag

SEQ ID NO: 58858 - DNA, 271 bp, Glycine max
  Clone ID: 700675827H1
gcgaagaaggtcaaattccacgaccacgaccacaacacccggagagggaacgtcagcaacacggtgagaaggaggaagacgaaggtgagcagccacgtccattcccattcccacgcccacgccaacctcatcaagaggagagcacgagcagaaggaggaacacgaatggcatcgcaaggaggaaaaacacggaggaaagggaagtgaagaggaacaagatgaacgtgaacacccacgcccacaccaacctcatcaaaaggaagaggaaaag

SEQ ID NO: 58859 - DNA, 269 bp, Glycine max
  Clone ID: 700675831H1
caatatcctagtataccttaataaataatttaagatactatgatgagagcacggttcccattactgttgctgggacttgttttcctggcttcagtttctgtctcatttggcattgcttactgggaaaaagagaaccccaacacaacaagtgtctccagagttgcaatagcgagagagactcgtacaggaaccaagcatgccacgctcgttgcaacctccttaaggtggagaaagaagaatgtgaagaaggtgaaattccacgaccacga

SEQ ID NO: 58860 - DNA, 269 bp, Glycine max
  Clone ID: 700675832H1
attaattattaacacttccttagttcaatatggggaagcccttcactctctctctttcttccctttgcttgctactcttgtcgagtgcatgctttgctattagctccagcaagctcaacgagtgccaactcaacaacctaacgcgttggaacccgaccaccgcgttgagtccgaaggtggtttgattcaaacatggaactctcaacaccctgagctgaaatgcgccggtgtcactgtttccaaactcaccctcaaccgcaatggcctcc

SEQ ID NO: 58861 - DNA, 211 bp, Glycine max
  Clone ID: 700675833H1
ggaaactcccaaggaatggcaactggatctaccttgtgacaaaattcctagtgtcttgattacaactgatgagagattggtaggcacagaacatgaggggtatgatccttttcttggtggaattcgaaaatatgccactccatgatgcccctagatgaagaaattctttctaaggttgcacaagatatggttgaggaatggtttgactgtg

SEQ ID NO: 58862 - DNA, 271 bp, Glycine max
  Clone ID: 700675834H1
agaggattaatgtggagcaacattgtctggccagggatattgtgaatatcattgcttgtgaaggcaaggaaagggttgagagacatgaactgttcggcaagtggaagtcgaggttaacgatggccggcttccgtcagttcctttgagttcttatgtgaattctgtcataagaagccttttgatgtgctattcagaacactatacactggtggagaaggatggagccatgttgttggggtggaaggacagaaatttgatatcagcttcagca

SEQ ID NO: 58863 - DNA, 268 bp, Glycine max
  Clone ID: 700675836H1
tgaccagattggacttgcattccaatagaatcacggagcttcctgattctgttgggaatcttcttagtctgctttatcttgatctgaggggaaatcagttaacactattgcctgcttcttttagcaggttggtgcgctagaggagctcgatttgagttcaaatcagctttcagcgcttcctgactctatagggtcgcttgttagactaaaaatattgaatgtggagacaaatgatatagaggaacttctacattctgttggtagttgt

SEQ ID NO: 58864 - DNA, 179 bp, Glycine max
  Clone ID: 700675837H1
ctcggttgtggctactgtggcaaaccccccaaaaagcacaagcctggtaaaacaccagagacacccaaaacacccgttgttaggccaccagtcagcatccctcccattaatgttcctcccgttgttcttccaccactatgaagcccccaggtattctccctccaattccaattattaac

SEQ ID NO: 58865 - DNA, 268 bp, Glycine max
  Clone ID: 700675838H1
cacctttgttcactcttcttctcttgcggctagggttttagcgcacttcttctagatttaaggaagatgggtaaggaaaaggttcacatcagtattgtggtcattggccatgtcgactctgggaaatccactaccatggtcacctgatttacaagcttggaggcattgacaagcgtgttattgagaggtttgagaaggaagctgctgagatgaacaagatgtctttcaagtatgcctgggtgctggacaaacttaaggctgagcgtga

SEQ ID NO: 58866 - DNA, 267 bp, Glycine max
  Clone ID: 700675839H1
tgatgagaccatttgcacaatgagacttcgccaaaacattggtcagaattcatcacctgacatctacaaccctcaagctggtagcatcacaaccgccaccagccttgacttcccagccctctggcttctcaaactcatgctcagtatggatcactccgcaagaatgctatgttcgtgccacactacaccctgaacgcgaacagcataatatacgcattgaatgggcgggcattggtacaagtggtgaattgcaatggtgagagagtg

SEQ ID NO: 58867 - DNA, 268 bp, Glycine max
  Clone ID: 700675840H1
atcagcatatgagcagaggtctgagtattgtgatcgtgatctcacgaaggcagatttggagatggtgactagattggatccacttcgggtgtatccttatagatatcgcgcagcaggtatgatggacaatcataaggagaggtagccattgcggaagtctctagagcaattgcatttacagctgatgtgcacctcctgcatctacgtgcagcattccatgtacacaatcgagatgtcttaggtgcgctaagagactgtcgtgctgcgc

SEQ ID NO: 58868 - DNA, 269 bp, Glycine max
  Clone ID: 700675841H1
gatgggcaggtcatcaccattggcgatgagcgtttcagatgtccagaggttctgttccaaccatccatgattggaatggaagcttcaggcattcacgagacaacatacaactccataatgaagtgcgatgttgatacaggaaggacctctatggtaacattgttctttcaggaggaacaatcatgttccctggtattgctgacagaatgagcaaggaaatttcggcattggcacccagcagcatgaagatcaaggttgtagcaccaccg

SEQ ID NO: 58869 - DNA, 267 bp, Glycine max
  Clone ID: 700675843H1
gttcaatatcctagtataccttaataaataatttaagatactatgatgagagcacggttcccattactgttgctgggacttgttttcctggcttcagtttctgtctcatttggcattgcttactgggaaaaagagaccccaaacacaacaagtgtctccagagttgcaatagcgagagagactcgtacaggaaccaagcatgccacgcgcgttgcaacctccttaaggtggagacagaagaatgtgaagcaggtgaaattccacgac

SEQ ID NO: 58870 - DNA, 267 bp, Glycine max
  Clone ID: 700675845H1
aaaaaagtgattctgctcacagtcgtttcggggtagcattcttgcgcactcagttattctctctctctctctagagcgtcgtcgtttagttagggcagaaaaccccttttcggatcggtggagcgaacctcgccgcgagacccccgaggctgttcaatcggcgatcgagcaacggcgaaaagcgacgaagatgaaggttttcgtgaagactctcaagggcacgcacttcgaaattgaagtgaacccttcggacacgctttctgaagt

SEQ ID NO: 58871 - DNA, 266 bp, Glycine max
  Clone ID: 700675848H1
aactgagggaaatggccgtgagagaagttatatttctcgccaatctgatgatggagcaaggtcaaacacttcattggtgcaacttgaacggagaaaaaaagtagatgatggcattcatgtgtacacttgctcgaggttgatcaatccaatgataaaatgctggagagttttaatgggaaaaaattgactccttttggtgctaggaatttttgttattcagttgctgtgcaaaatggtggtgacaaggatacaacacaatttggctt

SEQ ID NO: 58872 - DNA, 261 bp, Glycine max
  Clone ID: 700675849H1
caaaacactcataacacaaagcacaaagcaaagctcatccttgagttaaaaaatggcagcagcttcttccatggctctctcatccccatccttggctggcaaggccgtgaagctgggcccatcagccccagaagtggaagggtgagcatgaggaagaccgtcaccaagcaggtctcctcaggaagcccatggtacggcccagaccgagtcaagtacttgggcccattctctggcgagcccccgtcctacctaaccggtgag

SEQ ID NO: 58873 - DNA, 141 bp, Glycine max
  Clone ID: 700675851H1
agaggcgttctttctttctcttctcattctctcacttcatctcatctcctacatttagtttgtatcatcgtgtgttttgatcaaatctcgctttctctctctctctctctctctccaatcttcagcgtttctgtattctca

SEQ ID NO: 58874 - DNA, 268 bp, Glycine max
  Clone ID: 700675852H1
gcaatagcgagaaagactcctacaggaaccaagcatgccacgctcgttgcaacctccttaaggtggaggaagaagaagaatgcgaagaaggtcaaattccacgaccacgaccacaacacccggagagggaacgtcacaacacggtgagaaggcggaagacgaaggtgagcagccacgtccattcccattcccacgcccacgccaacctcatcaagaggaagagcacgagcagaaggaggaacacgaatggcatcgcaaggaggaaaaa

SEQ ID NO: 58875 - DNA, 223 bp, Glycine max
  Clone ID: 700675853H1
agcggctggaagagcaccgcacgtcgcgtggtgtccggtgcgcccccggcggcccttgaaaatccggcggaccgattgcctcccacgcccggtcgtactcataaccgcatcaggtctccaaggtgaacagcctctgtcgatggaacaatgtacccaatgcaagtcggctgcatggatccgtaacctctggaaaaagattagctctgaggcctaggcacagggg

SEQ ID NO: 58876 - DNA, 266 bp, Glycine max
  Clone ID: 700675854H1
tgagtgttgaaatgctacaatctcaccaagttcatgcaatttgcagggtctttttctgtcagtattgcagcaggattcagaaatacgtctagcgggctatagaatgctaagtggattggttgcccgaccatggtcttgatggagatatgttcaaaacaagagattataaataaagttacggacccaagtactgaaacgacaaaaataggtatggaaggcagatataactgctgcaaggcaatacacaaatcattgacagtgtctag

SEQ ID NO: 58877 - DNA, 265 bp, Glycine max
  Clone ID: 700675855H1
ggagaattttgactgatgggaggctcaatgccagagtcaagtgtgattttgccgaaaatctcacttttaaagccaatgctcagctcacaaatgagccgcatatgtctcatgcgatgatcaactttgattacaaggaaaagactatagaacccaatttcaacttggtaatggagccttgctaggagcaagttatattcagagtgtgacacagcatttatcattgggtggggaggtattttgggccggtcagcatcggaagtctggt

SEQ ID NO: 58878 - DNA, 222 bp, Glycine max
  Clone ID: 700675857H1
tctccaattaacctcctctctcactattccatcttcttaattacttatcactcttcttagaaactagtctaacaattaggttttgaagggcacacaaatatattccaaggttgtgtgaaaatgcgaatgagttgaacggatgtcgtgttttgcgcaaagggtgtagcgaagattgtagcataagaccgtgtttgcaatggatcaagaacccggagtcgcaag

SEQ ID NO: 58879 - DNA, 158 bp, Glycine max
  Clone ID: 700675858H1
gtgccagtgtcaccggacaaaaatccttgaaatttctcccttcggcacagagtttagggttttacactttcttccttccttcctacattctcgttccgttccgtcactatccaagtatggatgaaacacccgaaacgtctcatactgtccgttgtcgc

SEQ ID NO: 58880 - DNA, 262 bp, Glycine max
  Clone ID: 700675859H1
gcagtgggtgtgatctgaaagtgaaggtgaagaaatgcttcttcaaacgaggcaatttggcacagcgtgtccatgggtcagactcacacccgcaagcaaaagaaatagctcagtctcattgagaaggagcaatttggcccaaaatgttcggtgtcccaattggaattgaagagtgagagtgagagcaaaacgaagccgtatccagcagaggcatcgaggaccataatggagttggctaaggtgggcacgctgtgtacgttga

SEQ ID NO: 58881 - DNA, 265 bp, Glycine max
  Clone ID: 700675860H1
atcatctccactaccaacccacaatgtcataacattctaactattaatttaatacaataaaatccaaaaaaataaataaataaccgttatttttttggttctgtgcagctcctgcgttctgctaaggattgctccaccaaaaatcattgctttttagttgattctgtttcccttttgtttggttgattgagatgtggagagatccgggagtttcagttgattctttctatgaaatccgccccgaatgcaccgatgttcccgttac

SEQ ID NO: 58882 - DNA, 264 bp, Glycine max
  Clone ID: 700675861H1
attatataattgcaaatatatattctaattttgagtataaataacagcatgtgagggtgcagcaaaacacacactgagtgcaacaaagttttaacatgaaaggcaataatacacttttgttgcatttattctacctactctcttcgtgtttcttgtagtgtcaagttcatcttcaacagggaatgaaagtaacgatgacactaacagtaaagaagtttatatcgtgtacatgggagctgcagattcaacaaaagcttctcttaa

SEQ ID NO: 58883 - DNA, 265 bp, Glycine max
  Clone ID: 700675862H1
ctgaacttgtttatagtaaacatttgagttctctagaggcatgcttaaagaatgctactgatggtaagttccctgagtgtggtttaatagatgatagagttaagtttcacaagcatttgatggaggcgcaagctaatccttgttggatgactctggtgaggaagaggcgggggatgaacttgagaggatagtgtgtgactgtaaggatgggaggaagttgtgtggtagtaatagagtgaagtatgtgaaaccggagtcaaatgtg

SEQ ID NO: 58884 - DNA, 264 bp, Glycine max
  Clone ID: 700675863H1
ctaccatagcacagattgaagagttccattcgatgcagaggatgatgaatgctcctgattcaaatgataatattgatctactgttgagcattgatttgttgggtttacaaggagcaggcaaagcttttccaaacagattgtttttgatgataagcttgtgttggctaacacacaagaattctttgatggaaattttccagtggattcttggttaccaatttttgtgaattgtctttatcctgtaagtcaattaccttcagaagc

SEQ ID NO: 58885 - DNA, 266 bp, Glycine max
  Clone ID: 700675864H1
tctctccattggtccttaaacactcatcagtcatcaccatggccaagctagttttttccctttgttttctgcttttcagtggctgctgcttcgctttcagttccagagagcagcctcagcaaaacgagtgccagtccaaaaactcaatgccctcaaaccggataaccgtatagagtcagaaggagggctcattgagacatggaaccctaacaacaagccattccagtgtgccggtgttgccctctctcgctgcaccctcaaccgca

SEQ ID NO: 58886 - DNA, 269 bp, Glycine max
  Clone ID: 700675865H1
caagaacaatcaaacagaagaggctcaaggtcgcagaagcagcagctacaggacagtcaccagaagattcgtcacttcaatgaaggagacgtactcgtgattcctcctggtgttccttactggacctataacactgcgatgaaccagttgttgccatcagtcttcttgacacctctaacttcaataaccagcttgatcaaacccctagggtattttaccttgctgggaacccagatatagagtacccagagaccatgcaacaacaacaa

SEQ ID NO: 58887 - DNA, 267 bp, Glycine max
  Clone ID: 700675866H1
gcatcattgaagatgtatgaagatatcaagcaaaaaagtgaatcagctcgaaatgcataccataattgcagaactatcagggctgaaaaattttaattctcaaagtatatgaatttttttctgctgtgcttgctgacattaatttatattatcgaaaacacccaaaataaaactatagacgcatgatcatggtccttgttggagaaagaaatttgtgagatgaaaaatggggtgtaagtgtctgtaaatgagctgcatgttatgatg

SEQ ID NO: 58888 - DNA, 262 bp, Glycine max
  Clone ID: 700675868H1
tataccttaataaataatttaagatactatgatgagagcacggttcccattactgttgctgggacttgttttcctggcttcagtttctgtctcatttggcattgcttactgggaaaaagagaaccccaaacacacaagtgtctccagagttgcaatagcgagagagactcgtacaggaaccaagcatgccacgctcgttgcaacctccttaaggtggagaaagaagaatgtgaagaaggtgaaattccacgaccacgaccac

SEQ ID NO: 58889 - DNA, 267 bp, Glycine max
  Clone ID: 700675869H1
ttctcgagccgaatcggctcgagcttattaacactttccttagttcagtttatggggaagcccatcttcactctctctctttcttccctttgcttgctactcttgtcgagtgcatgctttgctattacctccagcaattcaacgagtgccaactcaacaacctcaacgcgttggaacccgaccaccgcgttgagtccgaaggtggtcttattgaaacatggaactctcaacaccctgagctgcaatgcgccggtgtcactgtttcca

SEQ ID NO: 58890 - DNA, 261 bp, Glycine max
  Clone ID: 700675872H1
aagaattccttagttggggatactgtttctggaagttgggccactgttggagtattgaccgagaaggggactcagaagacaagttcaacagggaagagctattgtatatggaaaattggctgtttagatgaactactgtttctctgttcttgtttggagatgcttatcagatgaacatgcaagagcaggctggaaccgtctttgcactctttaattctaccgtccgcatagataatgcgggtaatggtttttctttgagta

SEQ ID NO: 58891 - DNA, 252 bp, Glycine max
  Clone ID: 700675873H1
attggtccttaaacactcatcagtcatcaccatggccaagctagtgttttccctgtgtattctgctgtgcagtggccgctgcttcgctttcagttccagagagcagcctcagcaaaacgagtgccagatccaaaactcaatgccctcaaaccggataaccgtatagagtccgaaggagggctcattgagacatggaaccctaacaacaagccattccagtgtgccggtgttggcctctctcgctgcaccctc

SEQ ID NO: 58892 - DNA, 263 bp, Glycine max
  Clone ID: 700675874H1
aggaggagtacatgctgcaatggttgggtcacttcaccctacacctgttgcaacactcccttttctatctccacattctgctgttgtggcattctgtgaggggattttaaagcatggcactgcctgggaagactgagaaaggatcttgcagcccaaaaggttgctatgactctagaggaggttagagaacgaatgaggaatgttctgtctctcacagatgtcacacgctttccaattcccaaaaaccccaatgctgtaatctt

SEQ ID NO: 58893 - DNA, 260 bp, Glycine max
  Clone ID: 700675875H1
aattattaacacttccttagttcaatatggggaagcccttcactctctctctttcttccctttgcttgctactcttgtcgagtgcatgctttgctattagctccagcaagctcaacgagtgccaactcaacacctcaacgcgttggaacccgaccaccgcgttgagtccgaaggtggtttgattcaaacatggaactctcaacaccctgagctgaaatgcgccggtgtcactgtttccaaactcaccctcaaccgcaatg

SEQ ID NO: 58894 - DNA, 264 bp, Glycine max
  Clone ID: 700675876H1
cttgagagaaagagaggagagaatgggagaaaccggtatcattctcagcttccccggaaacttagacccgagagcagaagagttcagacccaacaccataaatattcaatgccaatggtaccctcttcctcccctcttcctcttcctcttcccatacccctccctcctcctaacctcaccacctcctccacccgctccctcctcctcaccccggtccctctcacctcccactccgccctccgagccgagctccaggccttcgga

SEQ ID NO: 58895 - DNA, 261 bp, Glycine max
  Clone ID: 700675878H1
cttattttcttgtcaaaatgactcctcactttaataatctatggggtattgttggtggatccgtgaagcctttaacttgatttataaataattgaaacctggcttctgaggtgtaggttagcactactttgctgctgctcaagcacgactatggaatgtgagggaagagagagaccagtttgaggaagcaaacaatcagatagttgaacacctgaaaataaaggtttgaggttctatttttcatggctgtgaattgttaaa

SEQ ID NO: 58896 - DNA, 162 bp, Glycine max
  Clone ID: 700675879H1
ctcagcttctggttacaacaacaatagcgacataccagtctttgatctaacgagaagtacaggcttatcagaaatttcaggtgagttaggcttggaagggaatcaactaagtggagcagaacttccattgtcaattttagctacattctagcagcaacaaac

SEQ ID NO: 58897 - DNA, 265 bp, Glycine max
  Clone ID: 700675880H1
tccacgacgaccaagccacggaaagcatgaagatgacgaggacgaggacgaagaagaagatcaacctcgtcctgatcaccctccacagcgaccaagcaggcccgaacaacaagaaccacgtggaagaggatgcagactagaaatggggttgaggaaaatatttgcaccatgaagcttcacgagaacattgctcgcccttcacgtgctgacttctacaacccaaaagctggtcgcattagcaccctcaacagtctcaccctcccag

SEQ ID NO: 58898 - DNA, 261 bp, Glycine max
  Clone ID: 700675881H1
gcatcattgaagatgtatgaagatatcaagcaaaaaagtgaatcagctcgaaatgcataccataattgcagaactatcagggctgaaaaattttaattctcaaagtatatgaatttttttctgctgtgcttgttgacattaatttatattatcagaaacacccaaaatataactatagacgcatgatcatggtccttgttggagaaagaaatttgtgagatgataaatggagtgtaagtgtctgtaaatgagctgcatgta

SEQ ID NO: 58899 - DNA, 262 bp, Glycine max
  Clone ID: 700675882H1
caaccctgacaacaacgaaaatctcagattaataacactcgccatacccgttaacaagcctggtagatttgagagtttcttcctatctagcactgaagctcaacaatcctacttgcaaggattcagcaggacattttagaggcctcctacgataccaaattcgaggagataaacaaggttctgtttagtagagaggaagggcagcagcaaggggagcagagggctgcagagagcgtgattgtggaaatctcgaaggaacaga

SEQ ID NO: 58900 - DNA, 183 bp, Glycine max
  Clone ID: 700675883H1
gagcacttggagttgcaattccaggatgtcctgagacgtttgaggagccacaagaacaatcaaacagaagaggctcaaggtcgcagaagcagcagctacaggacagtcaccagaagattcgtcacttcaataaggagacgtactcgtgattcctcctggtgttccttactggacctataacac

SEQ ID NO: 58901 - DNA, 261 bp, Glycine max
  Clone ID: 700675884H1
gttacgagtcagcaagagagaaatatcttgttgagttgatttctgatcccaaattgagtttgagtttcagccatggtatctgtttctctgctcttattcctatctttctttgccttctttgcaccctctgatctcacgacaaagtctcgttggaattgtactacgaaagcttatgcccctacagcgccaacttcatcgtgaatcacctcccaaaaatcttcaccccagatcttgccccaatcgttcacctcaaactcgttc

SEQ ID NO: 58902 - DNA, 259 bp, Glycine max
  Clone ID: 700675885H1
gggaaacaaaactacccttttgcttttgctctttgttctttgccatggagtggccacaacaacaatggccttccatgatgatgagggtggtgataaaaagtcaccaaaaagtttgtttttgatgagcaactcacgagggttttcaagactgatgcaggggaaatgcgtgtgctgaaaagccatggtggtaggatattttataggcacatgcacattggcttcatctctatggaaccaaagtccttgtttgttcctcagt

SEQ ID NO: 58903 - DNA, 261 bp, Glycine max
  Clone ID: 700675886H1
ttctttatctaatattggagtggcttttatttgttgtctccttcattatgcactatcccactttcaccaccctgatgagacaagcacacgtaatgttaagagggaagatgataagtgctggcttttgccctcatcctttttctattcaagtcaatacaggcccgttttgtgaattggcacatagcgaatctagaaattgaagatttttctctatattgtccggatccagatgctttttgggctcatgaacctggtttatga

SEQ ID NO: 58904 - DNA, 262 bp, Glycine max
  Clone ID: 700675888H1
ggaggttcacatttgcttagtcatgtgtctccaccaaagtcatcaagcttctttgcagactttggaatggatagtggctttccaaagaaatctgggccaagctcctccaaagtgcaaattcaggaaactgtgaagcaagaaggaagttctcaaatgctaaatctatttcttcatcccaatattttggagatcagaacaaggctgcagatgtggattctcaagctacattgtctaagttttcgggttcaagtgccatctccag

SEQ ID NO: 58905 - DNA, 257 bp, Glycine max
  Clone ID: 700675889H1
ctcgagccgcttaattattaacacttccttagttcaatatggggaagcccttcactctctctctttcttccctttgcttgctactcttgtcgagtgcatgctttgctattagctccagcaagctcaacgatgccaactcaacaacctcaacgcgttggaacccgaccaccgcgttgagtccgaaggtggtttgattcaaacatggaactctcaacaccctgagctgaaatgcgccggtgtcactgtttcaaactcac

SEQ ID NO: 58906 - DNA, 261 bp, Glycine max
  Clone ID: 700675891H1
tgaacactcatcaccatggccaagcttgttctttccctttgtttccttcttttcagtggctgcttcgctctgagagagcaggcacagcaaaatgagtgccagatccaaaagctgaatgccctcaaaccggtaaccgtatagagtcggaaggtgggttcattgagacctggaaccctaacaacaagccattccagtgtgccggtgttgccctctctcgctgcacccttaaccgcaatgcccttcgtagaccttcctacacca

SEQ ID NO: 58907 - DNA, 261 bp, Glycine max
  Clone ID: 700675892H1
attgcaacggtgagagagtgtttgatggagagctgcaagagggacgggtgctgatcgtgccacaaaactttgtggtggctgcaagatcacagagtgacaacttcgagtatgtgtcattcaagaccaatgtacacccatgatcggcactcttgcaggggcaaactcattgttgaacgcattaccagaggaagtgattcagcacactttcaacctaaaaagccagcaggccaggcagataaagaacaacaaccctttcaagtt

SEQ ID NO: 58908 - DNA, 256 bp, Glycine max
  Clone ID: 700675893H1
gatatttcccttctgagctttgattagtgtggcctagttgttgttttctcgatgagaaaggcttcttccactatgcattgcgcacttctgcgcttttgggttcccttgttgctgcttgctagcttcagcatgctccttctgtttcggccacaactgaaatttcagggaatgaagtgaacacagatgggaaggtgataaatgaagagttagcaaaaccaagtctaaaaggacatgatgaagaagcaaagttcaaagg

SEQ ID NO: 58909 - DNA, 261 bp, Glycine max
  Clone ID: 700675894H1
tcctagtacaccgtattagagaatttaagatatactatgatgagagcgcggttcccattactgttgctgggagttgttttcctggcatcagtttctgtctcatttggcattgcgtattgggaaaagcagaccccagtcacaacaagtgcctccgaagttgcaatagcgagaaagactcctacaggaaccaagcatgccacgctcgttgcaacctccttaaggtggaggaagaagaagaatgcgaagaaggtcaaattccac

SEQ ID NO: 58910 - DNA, 257 bp, Glycine max
  Clone ID: 700675896H1
gagagatctaactattatgattctcttcttgctgctgaatcgcgtgcaatttctggaaggaaaggcacccactctgccaaggatcctccagtgatgcatataactgatttgaccatggcatcggctaagaagccagagacttcttgcctttcctgcaccgaagtagaagagttcctgctgttgtggaatatgtgctcagtggccatcgttttaaattgttaattccaaaagaaacttgcagcattgcgttctctttt

SEQ ID NO: 58911 - DNA, 278 bp, Glycine max
  Clone ID: 700675901H1
gtctaactctgcttccgctctttacttccttttatgcctatcgcccatcactttgcttctttctgcgtttcgtgctcaagctcaatctcatgctccagctcccactttcaagtactgtgaaaagaatgcagactatgctgtgaaggtgagtggagtggaaatattgcctgaccccgtggagagaggagtgccattcacctttaagatcccagcttatactcctgaaccaattcaaagcggggacttgttatatgaaattcttatgctcggatagaagc

SEQ ID NO: 58912 - DNA, 258 bp, Glycine max
  Clone ID: 700675902H1
accgggacgctgtccctgttgtccctgctgaaccattggcacgaaaaaattcggcacaggagctgcttcctaggggacgtgtctatcgttatcctcctggtaggggtattcctgatgttcctatacctggggttgctggaggtatgttttctgttccatatgatgtgggtgggatgccgctgcgtgatgcatcaatctcccagcaaatacctgttggggctctggcaacggctctggctaatgcttctccagagcagc

SEQ ID NO: 58913 - DNA, 220 bp, Glycine max
  Clone ID: 700675903H1
gggttgcaaagatgcttggcgcggtcttctccataggggtcataagataaaagggacagtggtgttgatgcgcaataatgtgttggacgtgaatatcgtaaccagcgtttggggaattattggtcaaagtctcgacttagttggctcaacactcgatactcttactggcttcttgaggcgatccgtgtctctacagcgtattgatgctaccaaagctgat

SEQ ID NO: 58914 - DNA, 219 bp, Glycine max
  Clone ID: 700675904H1
aacactcataagacaaagcacaaagctaagctgcatccttgagttaaaaaatggcagcagcttcttccatggctctctcatccccatccttggctggcaaggccgtgaagctgggcccatcagccccagaagtgggaagggtgagcatgaggaagaccgtcaccaagcaggtctcctcaggaagctcatggtacggcccagaccgagtcaagtacttgg

SEQ ID NO: 58915 - DNA, 254 bp, Glycine max
  Clone ID: 700675905H1
gaaaaacaagtagttgagaactaagaaggaggccatggcttcctcaatgatctcctccccaactgttaccaccgtcaaccgtgccggtgccggcatggttgctccattcaccggggtcaaatccatggctggcttccccacgaggaagaccaacaatgacattacctccattgctagcaacggtcgaagagtacaatgcatgcaggtctgcccaccaattggcaagaagaagtgtcgagactctttcctactta

SEQ ID NO: 58916 - DNA, 256 bp, Glycine max
  Clone ID: 700675906H1
ggaggaaaaacgcggagaaaagggaagtgaagaggaagatgaggatgaggatgaggaacaagatgaacgtcaattcccattcccacgcccacctcatcagaaggaagagcgaaagcaagaggaagatgaagatgaggagcagcagcgagagagcgaagaaagtgaagattctgagttacgaagacataagaataagaacccttttctcatcggctctaacaggttcgagactcacttcaaaaaccaatatggtcgc

SEQ ID NO: 58917 - DNA, 269 bp, Glycine max
  Clone ID: 700675907H1
gtttaccgcagcaaacactcttctgagttctgagctagcgaggttgcaatggcgattatctccgatttcaacgaagaggagcagaaacccactcactcttcaccaccgcaaccccaatcctcttcctcttcctcttcctcttcgttcagtgctgcttttgaccggtcaaaccctatcgcttttctggagagagtcttccagttcgtctccgaacacagcgactttctggcgacggagagcgccgagaaggagatagcgttgctggtgcg

SEQ ID NO: 58918 - DNA, 265 bp, Glycine max
  Clone ID: 700675909H1
ttttgttcctcactgaccaagccatggcgatgagaaccaaactttctttagctatctttttcttatttcttttagccttattttcaaacctagcctttggcaaatgtaaagaaaccgaggtagaagaagaagaccctgagctcgtaacatgcaaacaccaatgccaacagccacagcaatacactgagggtgacaagcgggtatgcttgcaaagatgtgacaggtatcatcgtatgaagcaagagcgagagatacaaatccaaga

SEQ ID NO: 58919 - DNA, 270 bp, Glycine max
  Clone ID: 700675911H1
aatatttgcttgtattgatagcccctccgttcccaagagtataaaactgcatcgaataatacaagccactaggcatggtaaattaaattgtgcctgcacctcgggatatttcatgtggggttcatcatatttgttgaggaaaagaaactcccgaccttgaattatgcatttatatatcctttttcatttctagatttcctgaaggcttaggtgtaggcacctagctagtagctacaatatcagcacttctctctattgataaacaattgg

SEQ ID NO: 58920 - DNA, 268 bp, Glycine max
  Clone ID: 700675912H1
ccatcttctccgccgttatcggtaatcgccgccgccaagctcgccggaatctctcccacgattgatatcgctctctctcctgactcacctccctcattgatcgtctccgatgggctaaagtttcacggactatatgctcttctacgttatatcgggcgagttgccagccttcctaatttctatgggcaaaatccatttgaatctagccagattgatgaatggctggactatgctcctatcctctcattgggccctgcttttgagaatg

SEQ ID NO: 58921 - DNA, 271 bp, Glycine max
  Clone ID: 700675913H1
agaaaaaataccaaccatggcaaccatttctactgatcaaccaagaggatcctactcctatggaacctcctatggagcaccctatggaaccacctatgagaccaacagcagcattaacaaccctccttcacgccaaaccgtgaagttcataactgctgcaactattggcatcacactcttactcctgtctgggttgaccctcacaggcactgtcataggtttgatcattgcaacccctcttcttgttatcttcagccccatccttgtccct

SEQ ID NO: 58922 - DNA, 273 bp, Glycine max
  Clone ID: 700675914H1
tgggacactagtgtgacggtggaggtcaaaattggagatagagtagaaactgtccgtttctttcactgctacaagcgtggagtggatcgtgtttttgtggaccacccatgtttccttgagaaggtatgtggcaagactaggtcaaaactctatggccctagtgctggagtagattatgaagacgaccaacttacgttcagcttgttatgccaggcagcacttgatgcaccaagggttttgaatttaaacagcaacatgtatttctctggacca

SEQ ID NO: 58923 - DNA, 270 bp, Glycine max
  Clone ID: 700675915H1
ggactatagaaaataattaattggattttggggacggcatcccaggctagcggagcgtctgacccgaaggaagatatgatatgagatatgagatatgagatgggagtctccattctcacccgtttccatttctctctccctctcccacgcgccaccgccagaaagaggattttccatttctgccctccgattgcatgccgctcatccatggatcagtcttctggcctgaatctggaagatctgaaatgggaccattccttcgtcagagaa

SEQ ID NO: 58924 - DNA, 278 bp, Glycine max
  Clone ID: 700675916H1
ttcggaacactttatggaaaaagaagggatattttacaacattgaaagctttttcattagcgcaatctatttttacggggaattcaaaaagctttttttgtaacaaatacaaacgttagactaatttcaattaactaggttcaacgaatatttttaaatacaaaaagaaatacgaatataaatttcatatataatctaatatagtataatattcattttggatatttacattatatctatatatctatctatatatagatagatatatagatagaaaa

SEQ ID NO: 58925 - DNA, 281 bp, Glycine max
  Clone ID: 700675917H1
caaagccagaaaggaaagcaacaagaagaagaaaacgaaggaagcaacatattgagtggcttcgcccctgaattcttgaaagaagcgttcggcgtgaacatgcagatagtgagaaacctacaaggtgagaacgaagaggaggatagtggagccattgtgacagtgaaaggaggtctaagagtcacagctccagccatgaggaagccacagcaagaagaagatgatgatgatgaggaagagcagccacagtgcgtggagacagacaaaggttgccaacgccc

SEQ ID NO: 58926 - DNA, 256 bp, Glycine max
  Clone ID: 700675918H1
tgcagaccgagctagctagctagcaagcaagcacagagatggaggcaaagcgaggccatgccctcatgtgcttggcacgtgtttcactcttcctctgcgctctaaccctatccgctgctcacggaagcaccacggttcaagacatcgcgagaaagttgaaactcggggacaacgagcttctgcgcacggagaagaagttcaaggttttcatggagaattacgggaggagctactccacagaggaggagtatttgcg

SEQ ID NO: 58927 - DNA, 272 bp, Glycine max
  Clone ID: 700675919H1
gaaccccgtcgcccagagtttcaccgagttctacgataaatgggtttggaagctcgaggagatcctccaccagctccttgaggtgtccaagcagagaacccaggtggtgaaaactgaacaagagctgcaggttttgatttccaaggtcacatcccatttgaaggaatattacactgtcaagtgggcttcggctcatgaagacgttctcgtgttcttctcgccaacgtggctgagtcctttggagaatgcttatttgtggatgacggggtgga

SEQ ID NO: 58928 - DNA, 271 bp, Glycine max
  Clone ID: 700675920H1
tgcggaaggcccattcgggtggttacatttccaaataccatcgtgcagattgaaccagacatgaattcaaggtttcagcttttgagtaccactaccaatggtgattttgttcaaggaaaagatctcgcaatggttaaagttaatgtagcatgtgctgctgttggcttgacatcaagttacactccaactccattgttggaatctggtttgcaaaaagacagagggttaattgtggagtattttggaaggatgtcttacgttgctcataacg

SEQ ID NO: 58929 - DNA, 264 bp, Glycine max
  Clone ID: 700675921H1
acttattaacactttccttagttcaatatggggaagcccttcttcactctctctctttcttccctttgcttgctactcttgtcgagtgcatgctttgctattacctccagcaagttcaacgagtgccaactcaacaacctcaacgcgttggaacccgaccaccgcgttgagtccgaaggtggtcttattgaaacatggaactctcaacaccctgagctgcaatgcgccggtgtcactgtttccagacgcaccctcaaccgcaac

SEQ ID NO: 58930 - DNA, 268 bp, Glycine max
  Clone ID: 700675923H1
ggagcatagagcctattgtagacttgttcgccgacgaggtagataccgaaggcgacgacggcgatgccaaggccaggggtggcgtagcggagctgattggtgagcatcggatgcttcctccatgcatcccttctcctgaagaactctccagtgtgttttccacttccagatcccattctattcttccctcccttccttcctcctcacccactcgctttgctttgcttttctttctttccttcgcaccttactgggctcccgagacccg

SEQ ID NO: 58931 - DNA, 268 bp, Glycine max
  unsure (1)..(268): unsure at all n locations
  Clone ID: 700675924H1
ataaattagcagaacgaagaggaacaaaaacaagaagaagaattggattcgaaaatcgtagcgtacggntggtgcgattgaacgatacgatgggaagaggaaaattcaagagcaagcccactggtcgccgccagttctccaccccggaagatatgcttgctggaacctctaaccgtcctcgaacttttagacagaaagaagctgagcatgaagaggaagaacccgaggaagtatctggagatgaatctggagaagaatctgaagaaga

SEQ ID NO: 58932 - DNA, 265 bp, Glycine max
  Clone ID: 700675925H1
ctcgagccgcttacaaccttcaatctggcgatgccctaagagtccctgcaggaaccacagactatgtggttaaccctgacgacgacgagaatctcagaatgataacactcgccatacccgttaacaaacccggtagatttgagagtttcttcctatctagcactcaagctcaacagtcctacttgcaagggttcagcaagaatattctagaggcctcatacgacaccaaattcgaggagataaacaaggttctgtttggtagaga

SEQ ID NO: 58933 - DNA, 269 bp, Glycine max
  Clone ID: 700675926H1
ataacactggcccacagtatcattgtcgtcctcaagcgttcatacttcattctatacttctctctctctctctctctgcaactgcaagagatgatggagatggaggaagcagagacgatcgatctatacgagcttcaatattcagacttatcttcaccttcaacttcatccatggtcgattccatcatggaagccctagaacccactgtcccaggcctcctcgccgtccccatcgcttccaacctccgctcacaccttctctctctctc

SEQ ID NO: 58934 - DNA, 235 bp, Glycine max
  Clone ID: 700675928H1
ggggtcttatttccgtttccccttcatctctctgatctctcaaccaggttctcaattcaatcttcttcaaccttttgatctgctaattctcaaggtattcaaaattgggaggttttcgtttggattctgatgtccaaaccactgctaggcataggggatgaggaaggtcaaagcaatgtcactttgttgggttcttcctcagtcaacatgggaagtgtgtgccctaatagctcaa

SEQ ID NO: 58935 - DNA, 273 bp, Glycine max
  Clone ID: 700675929H1
cagtgtgtcaccctgacttttcaaaaacaattatttgttgcttcatatttcactgtgatttcataatagattttcactcatcttacttgactccaagcattctatatatctagtgcctccacgcatctctaccctcaaatcttcaccacacaacactacctcaattactcaactaaagcttcattcattcatcgtgtcgtgttgtgttctttgcaaccatgcttcttagaacagcgtcctctttctctctcttcaacgccaacggcgaccata

SEQ ID NO: 58936 - DNA, 275 bp, Glycine max
  Clone ID: 700675930H1
atcctcaagtttccacaacctcacgtcgttcaagtgagtcagtctgcatggatgactgatgaagacatttgctagagagatgattgctggtgtaaatccctgcgtaattcgtggtcttgaagagttccctccaaaaagtaatctggatcctgcaatctatggtgatcaaagcagtaagataacagcagattcccttgatctagatgggtacacaatggacgaggcacttggtagtcgaaggttatttatgttagattaccatgatatcttcatgc

SEQ ID NO: 58937 - DNA, 175 bp, Glycine max
  Clone ID: 700675931H1
attgcctttaccatctcagtctcaactctctccaacaaccacaatggctctcttgggcgccgcctcctcctccgctcgcatcattccctccgtctcactctcttcctcttctcgctccttcttctcactctcatcctcttcttccaaactcccatgcttgcgctcctctcctcgt

SEQ ID NO: 58938 - DNA, 278 bp, Glycine max
  Clone ID: 700675932H1
aaaattcttccaccaagttatgggtttccttgtgttgcttcttttctccctcttaggtctctcttctagttccagcatatcaactcatcgttccatattggaccttgacctaaccaagtttaccacacagaaacaggtgtcttcactgttccaactatggaagagtgagcatggacgtgtctaccataaccacgaagaagaggcaaagagacttgagattttcaagaataacttgaactatatcagggacatgaatgcaaacagaaaatcaccccatt

SEQ ID NO: 58939 - DNA, 273 bp, Glycine max
  Clone ID: 700675933H1
agcaggcacagcaaaatgagtgccagatccaaaagctgaatgccctcaaaccggataaccgtatagagtcggaaggtgggttcattgagacctggaaccctaacaacaagccattccagtgtgccggtgttgccctctctcgctgcacccttaaccgcaatgcccttcgtagaccttcctacaccaacggtccccaggaaatctacatacaacaaggtaatggtattattggcatgatattcccgggttgtcctagcacttatcaagagccgc

SEQ ID NO: 58940 - DNA, 257 bp, Glycine max
  Clone ID: 700675934H1
gttcctcactgaccaagccatggcgatgagaaccaaactttctttagctatctttttcttttttcttttagccttattttcaaacctagcctttggcaaatgtaaagaaaccgaggtagaagaagaagaccctgagctcgtaacatgcaaacaccaatgccaacagccacagcaatacactgagggtgacaagcgggtatgcttgcaaagatgtgacaggtatcatcgtatgaagcaagagcgagagaaacaaatcc

SEQ ID NO: 58941 - DNA, 263 bp, Glycine max
  Clone ID: 700675935H1
ctttggtcttcttcaccctgttagggtttgcatcagattcccccaattcttgtttgattttgcgctttcactagtttttcttcgacatgactcaagatctcgagatgagggatcgctcaacgccttccaactctgtttctttgcctgctccatctactttgcagcatttgaaggagatagcgtctcttatcgagaccggttcgtactcgaaggaagttcgtagaattgctcgcgctgttcgccgtacaattgcgttgaagcgg

SEQ ID NO: 58942 - DNA, 260 bp, Glycine max
  Clone ID: 700675936H1
gaagaggacaagatggaagtgattagaaatagaggcattcctgctgatgttcttgcaaagcgagctcatgaatttgaaaaacatgttgctcatgaaagcctcaaggatcaaattcctgctgttgacaagttgtattctactaatgttaataagtttgcaaaaattatgaaccttagacaaagtgttgttggtgctcttaaacttcttactgatgggaagttgtatgagggtaagcatattcctgtatctcatattagtgc

SEQ ID NO: 58943 - DNA, 269 bp, Glycine max
  Clone ID: 700675937H1
gccaccgcttcagtggcatttaagtccagggaggaccaccgcaagcagattgagttggaggatgcgcgtaaagcggggcttgcgccagctgaaatcgatgaagatggaaagggaatcaatcctcacattccccagtatatggcctctgctccttggtatcttaatgctgagagacctagtttgaaacatcaaaggaaatggaaatcagaccccaattacaccagatcatggtacgatagaggtgctagaatctttcaggcagacaagta

SEQ ID NO: 58944 - DNA, 267 bp, Glycine max
  Clone ID: 700675938H1
gatgacttctccctacattaaatgtacagtctctttcttcatagcatttggaaatttggctgatgacaccattaattttgaggcttttccccacaagctggtgcagtttggagagattcaggaaaaagttgtattgaaattttcacaagaggaatttcttacagcttggtcaactcaggtgcgtcctgcaacaactctgttggctgatgggtgtccatatctgtatgctatggtgcatgatagttcagtgtctacaataccacgtga

SEQ ID NO: 58945 - DNA, 266 bp, Glycine max
  Clone ID: 700675939H1
gttcaatatcctagtataccttaataaataatttaagatactatgatgagagcacggttcccattactgttgctgggacttgttttcctggcttcagtttctgtctcatttggcattgcttactgggaaaaagagaaccccaaacacaacaagtgtctccagagttgcaatagcgagagatactcgtacaggaaccaagcatgccacgctcgttgcaacctccttaaggtggagatagaagaatgtgaagaaggtgaaattccacg

SEQ ID NO: 58946 - DNA, 265 bp, Glycine max
  Clone ID: 700675940H1
tctcgagcgaatcggctcgaggcttggcaagttctttgagatcaccccagagaaaaacccaccagcttcgggacttggataccttcctcagtattgtggatatgaacgagggagctcttcttctaccacacttcaattcaaaggcgatagtgatactggtaattaatgaaggagatgcaaacattgaacttgttggactaaaagaacaaccacaggagcagctacaggcagagcaacctttggaagtgcggtaatctagagccga

SEQ ID NO: 58947 - DNA, 268 bp, Glycine max
  Clone ID: 700675941H1
agaggtttctgactactttcatataccaagactggacatgtttcagttaataatagttctgactgttgtgagaaagctgaagctgatgtgaagtctgaaattttcgaatgggataataaatttgggaattattctaatagattagtagaaacacgtgaaaaatttagggtgtccactcatggtaacataaagaatggatttaaatgggaacaggaggctggaagttcatgcattcggggatcaaatttagctgataagtgtagtttgg

SEQ ID NO: 58948 - DNA, 266 bp, Glycine max
  Clone ID: 700675942H1
gttctgagtctcaaagagaaccacgaagacataagaataagaacccttttcacttcaactctaaaaggttccaaactctcttcaaaaaccaatatggccacgttcgcgtcctccagaggttcaacaaacgctcccaacagcttcagaatctccgagactaccgcattttggagttcaactccaaacccaacacccttcttctcccccaccatgctgacgctgattacctcatcgttatccttaacgggactgccattcttaccttg

SEQ ID NO: 58949 - DNA, 269 bp, Glycine max
  Clone ID: 700675943H1
gccgaattgtctgaacaagatatatttgtaatcccagcaggttatccagttgtgatcaacgctacctcaaatctgaatttctttgctattggtattaatgccgagaacaaccagaggaacttcctcgcaggttcgcaagacaatgtgataagccagatacctagtcaagtgcaggagcttgcattccctgggtctgcacaagctgttgagaagctattaaagaaccaaagagaatcctactttgtggatgctcagcctaagaagaaaga

SEQ ID NO: 58950 - DNA, 270 bp, Glycine max
  Clone ID: 700675944H1
aaatgaccaagttcacaatcctcctcatctctcttctcttctgcatcgcccacacttgcagcgcctccaaatggcagcaccagcaagatagctgccgcaagcagctccagggggtgaacctcacgccctgcgagaagcacatcatggagaagatccaaggccgcggcgatgacgatgatgatgatgacgacgacaatcacattctcaggaccatgcggggaagaatcaactacataaggaggaacgaaggaaaagacgaagacgaagaag

SEQ ID NO: 58951 - DNA, 177 bp, Glycine max
  Clone ID: 700675945H1
aaatatttcaatattgatgaagacaatattcgtgagatctattcaaacctaaaaggtgctcatcttgtgcctaacgatgtggccgaagctgctctttacttggcaagtgatgagtccaagtatgttagtagtcacaatcttgtgatagatggagcgacctgattaatgcaggattac

SEQ ID NO: 58952 - DNA, 272 bp, Glycine max
  Clone ID: 700675946H1
gccaaaggcagaaagtacgaaagtggacttacaagggttgatgcatgacagtgtaaatgtaatagactttggtagagataagagcttgtcttctaaagttgaaaagcttcatgaggacgctgacattcaagaacttggtgacatatctgcagaagctctgcaatatatttttaatctgcaatctcgcttgtcttccatgaaaaaggagctgcatgaagtaaagaggaaaagtgctgctcttcaaatgcaacagtttgttggagaggaaaaga

SEQ ID NO: 58953 - DNA, 273 bp, Glycine max
  Clone ID: 700675947H1
aataatttaagatactatgatgagagcacggttcccattactgttgctgggacttgttttcctggcttcagtttctgtctcatttggcattgcttactgggaaaaagagaaccccaaacacaacaagtgtctccagagttgcaatagcgagagagactcgtacaggaaccaagcatgccacgctcgttgcaacctccttaaggtggagaaagaagaatgtgaagaaggtgaaattccacgaccacgaccacgaccacaacacccggagaggga

SEQ ID NO: 58954 - DNA, 271 bp, Glycine max
  Clone ID: 700675948H1
gtaggccaaccttttaccaaatctacaagaagaaatccactgaagggttccagtcacttccttatgttgttgcactgttcagtgcaatgctttggatttactatgctttcgtcaaaagggaagctgccctccttctcattaccattaacacatttggaattgttgtggagtcaatttaccttgcaatcttcctactttatgccccaaggaagcctaggcttacaaccatcaagcttcttctcttactgaatgtgtttgggtttggagccat

SEQ ID NO: 58955 - DNA, 173 bp, Glycine max
  Clone ID: 700675949H1
aggagttcttgctttctacatgtggtctctatcaaagaccatttctcaaaagattgaatcctgacatcaaggataatgcttttgggacattctcttcgcctgatatagtctacctgtttgagacccaagtctgtatgaacttcttgtgatctcaacaagatcaaatcagcatt

SEQ ID NO: 58956 - DNA, 238 bp, Glycine max
  Clone ID: 700675950H1
tgtgtgtgtgtgtgtgtgttgggcatgtgcactaatgactaacctttttggtttggatttgggttcggtttttattttgagcagccggaccgacccgacgagttgcttcggatccaagtagcgggacggcgcgtgatatattgggacggacctagagtgcttggggtgctggctatgtccagagccataggtgactaatcaataaatacacgcgcggcgcattatagcagattggagg

SEQ ID NO: 58957 - DNA, 262 bp, Glycine max
  Clone ID: 700675952H1
gacccatgcaggtgtcgcagtacgcggagaatggacgctatataaatatatttgtccccgatgctctgtatttcagccactcgtatattcttcctccggtcaacaactataagattatcttctgcttcgtcttctcttcagttcttctcgaatccgagccgcaccctcttccgtccctttcttcacacttccttcaaaccacgtccttcgtctttcgctttccgaacagatcagactatggccacgtcaaacgccatatcag

SEQ ID NO: 58958 - DNA, 269 bp, Glycine max
  Clone ID: 700675954H1
acttattaacactttccttagttcaatatggggaagcccttcttcactctctctctttcttccctttgcttgctactcttgtcgagtgcatgctttgctattacctccagcaagttcaacgagtgccaactcaacaacctcaacgcgttggaacccgaccaccgcgttgagtccgaaggtggtcttattgaaacatggaactctcaacaccctgagctgcaatgcgccggtgtcactgtttccaaacgcaccctcaaccgcaacggcct

SEQ ID NO: 58959 - DNA, 84 bp, Glycine max
  Clone ID: 700675955H1
catctacgcagcaacacgacccaccaccctgcttagaccaggtcctctctctctctagcgagaaagagaaccatgagcaaagaa

SEQ ID NO: 58960 - DNA, 267 bp, Glycine max
  Clone ID: 700675956H1
tcctaacctaaaccctactcattctccatacctcaacgaataggttatagagacggtaacaatttgctgtccgatttgaccgagcagagcttcgtcttggccctcgattttgccctaaaggactctcagtcacaaccgacaccgtcgtcgtcgtcgtcgtcatcaatggcaccgaagcagaccaaggctgagaagaagatcgcttacgatgcgaactgtgcgatctaatcgaggagtacggccagatcctcgttgtgaactccgata

SEQ ID NO: 58961 - DNA, 266 bp, Glycine max
  Clone ID: 700675957H1
gaaagaatcccaggcgaggagaaagatggaggggaaggagcaggatgtgtcgttgggagcgaacaagttccccgagagacagccgattgggacggcggcgcagagccaagacgacggcaaggactaccaggagccggcgccggcgccgctggttgacccgacggagtttacgtcatggtcgttttacagagcagggatagcagagtttgtggccacttttctgtttctctacatcaccgtcttaaccgttatgggagtcgccgggg

SEQ ID NO: 58962 - DNA, 265 bp, Glycine max
  Clone ID: 700675959H1
gcaagttatgagcaagatggcagaaatgataaacagtctttgtggtggtgatgaaaaattgatgcgtgaaaggacgcacctgctgttggattgttgttcaaggatggcaatttgtaaaaaagatgtttggagagttgaatgtggaatcccttctggatttccgctcacagttatttgcgatagcatttttaatgagatgctcattagatatagctatgaacaaattactgcgtcacgctaaagctccaagtatgtttttacaatc

SEQ ID NO: 58963 - DNA, 267 bp, Glycine max
  Clone ID: 700675960H1
ctcatcttatccccaaatgatcattgtcgttcaagggaagggagcaattggatttgcatttccgggatgtcctgagacgtttgagaagccacaacagcaatcaagcagaagaggctcaaggtcgcagcagcaactacgagacagtcaccagaagattcgtcacttcaatgaaggacacgtactagtgattcctcctggcgttccatactggacctataacactggcgatgaaccagttgctgccatcagtctatcttgacacctcca

SEQ ID NO: 58964 - DNA, 100 bp, Glycine max
  Clone ID: 700675961H1
cagctctagatcgcgagcggcctcccttgtgtaatcttttcatgtgattttttggggacttctgtatggttcgaaacttattttaaatgtacaagtgtct

SEQ ID NO: 58965 - DNA, 238 bp, Glycine max
  Clone ID: 700675962H1
cggtcacatgtcattagaaactcatatacactcacatgcagacactacagtgtccatctgcactgctataacacgcagaataccacgaaaacgactgactcatgaaggaaatggattctcgggctcattaatcatgacatccctcagcccgcgctagaaacgccacacgtatatcggactcacagtgaatcacccgtcgccagatctggtaacaccttggggagattatagtcgtgga

SEQ ID NO: 58966 - DNA, 268 bp, Glycine max
  Clone ID: 700675963H1
catccctgcattgtggtggatattacctgaccaaagctcacagtttgtttctcataaactctgtgacttaggtggcactttgaaattttattctttcgtacgtcttgcactcattcagctcttttatgtgctttggttttacccattatacgtgtttagcatagttcttagcacaatttggtacaacgacattgcgaagtatgggtatgctgcaatgggaagatctaagtttactgtagagaaaggctcaagccaaaacaactcacca

SEQ ID NO: 58967 - DNA, 230 bp, Glycine max
  Clone ID: 700675964H1
aattctttgtgatgtttcatcattcagtatctgtatgactgtattcccaagcagattagggtccttgtcaaccatgtgtgtaggttgtcaatgtgaggaagtcttgtattccaatgaagtgaaccatgatttgtttgcatcacagagattgatatgacattaatttagtcgctggtagatggggagacatcaattcacttgtctatggaaaatgcggttgtggcactatc

SEQ ID NO: 58968 - DNA, 99 bp, Glycine max
  Clone ID: 700675965H1
tctcgagccgaatcggctcgagggctcgagcggctcgagcttatgttcaaacctagccttaggcaaatgtaaagaaaccgaggtagaagatgaagaccc

SEQ ID NO: 58969 - DNA, 264 bp, Glycine max
  Clone ID: 700675966H1
cattggtccttaaacactcatcagtcatcaccatgggcaagctagttttttccctttgtcatctgcttttcagtggctgctggttcgctttcagttccagagagcagcctcagcaaaacgagtgccagatccaaaaactcaatgccctcaaaccggataagcgtatagagtcagaaggacggctcattgagacatgggaccctaacaacaagccattccagtgtggcggtgttgcactctctcgctgcacgctcaaacgcaacg

SEQ ID NO: 58970 - DNA, 268 bp, Glycine max
  Clone ID: 700675967H1
aacagaagagagagagagagagagagagagtcctgaaacttgggtgcgattccttcactcacaacaacaacacatcactatggctcttctgagtcgagcctcttcacgcttccctcagctggtttcccctcaaagggtagtttcactccacacaacgctcccatctctgaacgcatccccatccacagccacgcctacaccatatgccccgacagcgcctccgtccgcttcctctctcgccggcgtttcggaggcggcggagttcgtg

SEQ ID NO: 58971 - DNA, 263 bp, Glycine max
  Clone ID: 700675968H1
acaccgtattaaagaatttaagatatactatgatgagagcgcggttcccattactgttgctgggagttgttttcctggcatcagtttctgtctcatttggcattgcgtattgggaaaagcagaaccccagtcacaacaagtgcctccgaagttgcaatagcgagaaagactcctacaggaaccaagcatgccacgctcgttgcaacctccttaaggtggaggaagaagaagaatgcgaagaaggtcaaattccacggccacga

SEQ ID NO: 58972 - DNA, 271 bp, Glycine max
  Clone ID: 700675969H1
ggggtttcttcaatcggaatcgcgaacaacatggaagtgagaattgggcacagggtgtctcgcggaatgctccctctcctcgctctccacaccgtcagcgattattaccgctccgaccacaaacctccgttcaccgccgccctcatcgccgccaacaccctcatctacctccgcccctgccttcctcgatcccctcattccccccattgaacaagtctggttcaacccccacctcatcctcaagaacaaggacttgagacgcttcttgttg

SEQ ID NO: 58973 - DNA, 266 bp, Glycine max
  Clone ID: 700675970H1
gcccaacagatatgaagtttcccaatacagatatcgcaatgtgccaataaagcgcagagcatgggttgaaggccagatgtctttcgatcagtctgtagtagcaattatgtctaaatgcaaagccagcatgagaatgggaaacactgatgctcaaattttgatggttccagggcgcagattcatagctcatggacattttttcaaaaatctgactcagaaagtgcgagtccaaattgttacatctgacaagagttactggcatgtgt

SEQ ID NO: 58974 - DNA, 266 bp, Glycine max
  Clone ID: 700675972H1
ttgccgaaatatatcagtttcttcaagtgagtgtcagcaagatgttcccacccttgatgaccttttctgtcatcagaacacggaagtggattttggcatggaatggttatcagtgtttgtggaagactgtttctctagtaggccaagttgcctcttgccaccctctggtggtggtgttcaaaccacaagcactagcaccaagccttcttcaggcacaataatgccaagaccccaacaaagtcatcactgtcctttgcagaattttg

SEQ ID NO: 58975 - DNA, 264 bp, Glycine max
  Clone ID: 700675973H1
aaacaattcaattcaatctgcctcgatcatggagaggaaaacatttgggtttttgttcttgctcctccttgtcttagcttctgatgtgacggtgaagagagcagaggcgaaagattgcttgacaaggaggcacgggttccagggtagatgcttattcgacaggcaatgtgcacatgtgtgcaggagcgatggtttcatcggtggtcagtgccgaggccctcttcgcaaatgcttttgcagcaggccatgttgatcgaacatact

SEQ ID NO: 58976 - DNA, 262 bp, Glycine max
  Clone ID: 700675974H1
cacacaactactacaagtacttccttacaatcaaaaccaacaacaactatggcaagttatcaaaagcactacgatgatcagggtcgcaaggttgacgagtatggcaacgttgagaagcaaaccgacgaatacggcaaccctgttcatgctgctagtgtcacctatgtagccaccagaactgctgctggtggttacagtgatgacattaataagcaccatgataccaccaatgcctacggcgtagacactggtagacagcatt

SEQ ID NO: 58977 - DNA, 266 bp, Glycine max
  Clone ID: 700675975H1
caaaaagaaagaatcccaggcgaggagaaagatggaggggaaggagcaggatgtgtcgttgggagcgaacaagttccccgagagacagccgattgggacggcggcgcagagccaagacgacggcaaggactaccaggagccggcgccggcgccgctggttgacccgacggagtttacgtcatggtcgttttacagagcagggatagcagagtttgtggccacttttctgtttctctacatcaccgtcttaaccgttatgggagtcg

SEQ ID NO: 58978 - DNA, 266 bp, Glycine max
  Clone ID: 700675976H1
cacttttgtgttgtgttgggaaaccctaaaccccgttttcggtgagatcgagatcgatcgaacatggatgaggagtacgatgtgatcgtgttgggcacgggtctcaaggagtgcattctcagcggtcttctctccgtcgatggcctcaaggttctgcatatggataggaacgactattacggaggagaatccacttcgctcaatcttattcagctttggaagagattcaggggagatgacaagcctcctccacatttgggcgctag

SEQ ID NO: 58979 - DNA, 265 bp, Glycine max
  Clone ID: 700675977H1
gtactctgatccagagcagactccacgaattgtttccctcctatcagaatcttacaatccacatgttcgatatggagcagctcttgctgtgggtatttcctgtgcgggtacaggtctcagcgaggctatctctttattggagcctttgacatcggatgttgttgattttgttcgtcaaggtgcccttatagcaatggctatggtcatggttcagatcagtgaagctagtgactcacgcgttggaacatttaggcgacaattggag

SEQ ID NO: 58980 - DNA, 95 bp, Glycine max
  Clone ID: 700675978H1
gaagaaggcgctgccggcgaacgcgaagaccccgaaggacgcgaaggacaccgtgcaagagcacgtgtcagagttcatcagcttcatcaccggcg

SEQ ID NO: 58981 - DNA, 263 bp, Glycine max
  Clone ID: 700675979H1
cactgctctgtttcaccgagtttgggcgtttagatcagaaccaaatcgtgttctcttccattggcaaacatggcaactcaaatgagcaagaagagaaagtttgttgcggacggagtgttctttgccgaactgaacgaggttctgacacgtgaattggcggaggacggttactccggcgtcgaagttagggttacgccgatgcgcaccgagatcatcatcagagccaccagaacccaagccgttctaggtgagaagggaaggag

SEQ ID NO: 58982 - DNA, 270 bp, Glycine max
  Clone ID: 700675980H1
gcagagtatttccccccctattgttactgttggacctaattccttaactgttctttgctgtgctgatggccggatatatggcttttttgtctgaggaaattgttgtgttgggtaattttacactgatttctagcatctggtttaacgggttcattcaattgatgatttgcactttgtgatctgattgtgaaattagggatgcttgcaacacaatttctattggttaatgtttgttgaaattcacaggattactagtgaaagtcattacat

SEQ ID NO: 58983 - DNA, 271 bp, Glycine max
  Clone ID: 700675981H1
cgtgaatgagcttgggtttcctcgactgttgatgcaccttgcctcaagtgaagattcagatgtcagagaagctgcccttcggggccttcttgagcttgcttgcaatactcaagatggcaaggatggcaatgaggaagacagtgagaagatgaagcaacttcttcaagaacgaataaacaatatcagtttaatgtcagctgaggaccttggtgtagtcagggaggagaggcaacttgtggactccctgtggagcacttgcttcaacgagcca

SEQ ID NO: 58984 - DNA, 268 bp, Glycine max
  Clone ID: 700675982H1
gcaacgccttggtgttggagatcgtgatgaccttcggtctggtgtacacggtctacgcaactgccattgaccccaagaagggtaatttgggaattattgctcccatcgccattggtttcattgtcggcgctaacattttgttgggtggggccttctctggagcggccatgaaccccgctgtgacatttgggcctgctgtcgtgagctggacctggaccaaccactggatctactgggccgggcctctcatcggtggtggaatcgctgg

SEQ ID NO: 58985 - DNA, 255 bp, Glycine max
  Clone ID: 700675983H1
gtggtcaaccctgacaacaacgaaaatctcagattaataacactcgccatacccgttaacaagcctggtagatttgagagtttcttcctatctagcactgaagctcaacaatcctacttgcaaggattcagcaggaacattttagaggcctcctacgataccagattcgaggagataaacaaggttctgtctagtagagaggaagggcagcagcaaggggagcagaggctgcaagagagcgtgattgtggaaatc

SEQ ID NO: 58986 - DNA, 267 bp, Glycine max
  Clone ID: 700675984H1
gtgcaaaaggcttctcaattcttaggcttggcaacaaaccatactggatcatcaagaattcgtggggggagaaatggggagaagatggctattacaagctctgcagagggcatggcatgtgtggaataaacactatggtttctgctgcaatggtgcctcaaccacaaacaacacctacaaagaattatgcttcttattagctatgcacttaaggaaatctaaataaatatttttcattctaggtgatgtatcatggtatgtaccaaa

SEQ ID NO: 58987 - DNA, 268 bp, Glycine max
  Clone ID: 700675985H1
ttcaagtgtgacacttcgaagaacaaaaaaagatgccaagtcctcctccgttccagtggcaatggatgcaccgtatccttcttcttccggcgcttctccgttcctcgccaatcttccctctcgcggcctcttctcttccaccgtcgtttcttccaatccgggtggaatgcgggtctatgtatgcaatcatgatacctcaccaccagaaggtcaacatattaagacaaaccaacaaaacatactgattagatcactcaccctcaagaaa

SEQ ID NO: 58988 - DNA, 87 bp, Glycine max
  Clone ID: 700675987H1
ctactaagaattgcgtcacttgcagcagtgttgcatcagcagcgtcagtgccaaacgctagacttcatcttgaaccatgatcacacg

SEQ ID NO: 58989 - DNA, 265 bp, Glycine max
  Clone ID: 700675988H1
aattgtcagcgtcacgaattcaagacgaaaatgaatatttagtttttttttttttcaaaggtggtattgaaatgtgggtaaggtagctccatttttagtgcagggctttcattacatcgatgccatggataccctctcaaggattagattcccccccaattgttacagccttcagttaccaaaaatctctgcattatctcgtttcccaaatgctttttccaaaaccactcaccaggtttcagtgctaagagtaagagcttctcgt

SEQ ID NO: 58990 - DNA, 259 bp, Glycine max
  Clone ID: 700675989H1
attcgatgaactttttgttgacttccaggatttcaatgtggaagctctagagaaatttgttgaggaatctagtacccctgttgttactgtctttaacaatgatccgagcaatcaccctttcgttgccaaattcttcaacagtcgcaatgcaaaggcaatgttgttcatcaacttcactgccgaagtgctgaatctttcaaatcaaaataccgtgaagctgctgagcaacataaacaacagggtgtaagctttttcgtgg

SEQ ID NO: 58991 - DNA, 263 bp, Glycine max
  Clone ID: 700675990H1
gccgcttttgttattgcaggtacatagagaattccgcaagcctctcattgtaatgtcccctaagaacctgcttcgtagcaaggcttgcagatcaaatttatctgagtttgatgatgtccaaggccacccaggctttgacaaacagggaaccagattcaagcgcctcataaaagatcaaaatgagcacaaagatgttgaggagggtattagacgtttagtactttgctctggaaaggtttactatgaacttgatgaacatcgaa

SEQ ID NO: 58992 - DNA, 269 bp, Glycine max
  Clone ID: 700675992H1
ctctgttctttctctctcaaaggaaagaaaaggaaagaaaagaaaagaaaaagaagagagtgtaggtaaacagaagcacacactacacagttaccaaaatcaggttcaaacgcacagatctgggagaagagaagaagaagaagaagaagatgggacaggatcagaaccagagatcgctgatctacgcgttcgtgtctcgcggcacggtgattctcgccgagtacactgaattcagtggcaacttcaacacaatcgcgttccagtgcctc

SEQ ID NO: 58993 - DNA, 262 bp, Glycine max
  Clone ID: 700675993H1
gttcaatatcctagtataccttaattaataatttaagatactatgatgggagcacgggtcccattactgttgctaggacatgttttcctggcttcagtttctggctcatttggcattagcttactgggaaaaagatgaccccatacacgacaagtgtctccagagttgcaatagcgagagatatcgtacaggaaccacgcatgccacgctcgttgtcacctccttaaggtggcgaaagaagaatgtgaaaaaggtgaaattc

SEQ ID NO: 58994 - DNA, 273 bp, Glycine max
  Clone ID: 700675996H1
tctccattgtctttgaacactcatcaccatggccaagcttgttctttccctttgtttccttcttttcagtggctgcttcgctctgagagagcaggcacagcaaaatgagtgccagatccaaaagctgaatgccctcaaaccggataaccgtatagagtcggaaggtgggttcattgagacctggaaccctaacaacaagccattccagtgtgccggtgttgccctctctcgctgcacccttaaccgcaatgcccttcggtagacttcctacac

SEQ ID NO: 58995 - DNA, 268 bp, Glycine max
  Clone ID: 700676001H1
ctctccattggtccttaaacactcatcagtcatcaccatggccaagctagttttttccctttgtgtgctgcttttcagtggctgctgcttcgctttcagttccagagagcagcctcagcaaaacgagtgccagatccaagaactcaatgccctcaaaccggataaccgtatagagtcagaaggagggctcattgagacatggaaccctaacgacaagccattccagtgtgccggtgttgccctctctcgctgcaccctcaaccgcaac

SEQ ID NO: 58996 - DNA, 267 bp, Glycine max
  Clone ID: 700676002H1
cttggttcatcaatattcatgggatctggtaaaagcaaaacagtctcatctgacgtgggatacgttccacttgattctggtgatgcacgtcttcgacaactcggttacaaacaagaactcaatcgtcatctttcggtgatttcgaatttcgcgttttcgtattctattatatcagtgctcaccggagtgaccactctttacaacactgggttgaactatggtggccctgtttcgttcgtctatggttagttcatagcttctggtttc

SEQ ID NO: 58997 - DNA, 265 bp, Glycine max
  Clone ID: 700676003H1
tctcgagcgattcggctcagaaagaaaggaaataattgaatctttgaaaatgcagggaggaaagaaagctggaaagtccatcaaggaaacagctgcaaacattggtgcttctgccaaggctggcatggagaaaaccaaggccactgtccaggagaaggcagaaagaatgacggcacgtgatccgatgcaaaaggagttggcaacccagaagaaagaggcaaagatgagccaggcagagctggacaagcaggcggcgcgtcagcat

SEQ ID NO: 58998 - DNA, 254 bp, Glycine max
  Clone ID: 700676005H1
aactagttcaatatcctagtataccttaataaataatttaagataccatgctgagagctcggttcccattactgttgctgtggacttgttttcctggcttcatgtttctggctcatttggcattgtttactgggttaaatagtactccatacacgtcaagtgtctccagagtggcattagcgagagtgactcgtacaggtaccaagcatgccacgctcgttgcaatctccttaaggtgtagaaactaagaatgt

SEQ ID NO: 58999 - DNA, 258 bp, Glycine max
  Clone ID: 700676007H1
aaagtatctgaagctggtgtttctgaccaggaaaatcaagtagtgcaagaaaatgcattggaagatatggaacatgaggagaacttgtccgagacgggtttagttggcaacgccgtagcaaaacttagcaccaataaatctgaagctggtgttagtaaccaggaaaaacaagaaaatgcattgaaagacattgaaaagtcccctccttctgcagcagagggctgttcttagaagattttcagtgcctgctcagaaata

SEQ ID NO: 59000 - DNA, 259 bp, Glycine max
  Clone ID: 700676009H1
tccttgtgttgcttcttttctccctcttaggtctctcttctagttccagcatatcaactcatcgttccatattggaccttgacctaaccaagtttaccacacagaaacaggtgtcttcactgttccaactatggaagagtgagcatggacgtgtctaccataaccacgaagaagaggcaaagagacttgagattttcaagaataacttgaactatatcagggacatgaatgcaaacagaaaatcaccccattctcatcg

SEQ ID NO: 59001 - DNA, 257 bp, Glycine max
  Clone ID: 700676010H1
attgtctttgaacactcatcaccatggccaagcttgttctttccctttgtttccttcttttcagtggctgcttcgctctgagagagcaggcacagcaaaatgagtgccagatccaaaagctgaatgccctcaaaccggataaccgtatagagtcggaaggtgggttcattgagacctggaaccctaacaacaagccattccagtgtgccggtgatgccctctctcgctgcacccttaaccgcaatgcccttcgtaga

SEQ ID NO: 59002 - DNA, 258 bp, Glycine max
  Clone ID: 700676011H1
tggagcccttggggctttctattttattgtattgaaaggcccaatgaattgggatttccctattgggccaggtcatttcgggacaagcggatcatttatgatgaagaggatgagcttcaagagaatgattcagagttcttgcagggtggaaccatgcagtaccagacacgagatagatcttccaaagaacagggtcttttttcgaataagccaattcatttgggaccccgcggatccactctggtacctattcaaaga

SEQ ID NO: 59003 - DNA, 266 bp, Glycine max
  Clone ID: 700676013H1
agagagactcgtacaggaaccaagcatgccacgctcgttgcaacctccttaaggtggagaaagaagaatgtgaagaaggtgaaattccacgaccacgagcacgaccacaagcacccggagagggatcctcagcaacccggtgagaaggaggaagacgtagatgaggaaccacgtccaatcccattcccacgcgcacaagctcgtcaagacgaagagcacgaccagagataggctcaggaatggcctcgctagcgaggaaatacgcg

SEQ ID NO: 59004 - DNA, 259 bp, Glycine max
  Clone ID: 700676014H1
tcgagcgattcggctcacttatggtggatacctaggaccccagagacgaggacagggcgtagtaagcgacagaatgcttcggggagttgaaaataagcgtagatccggggattcccgatataggtcaacctttcgaactgctgctgaatccacgggcagagcgacaaggaaaagtatgagaaagctaggacgttaaaggattatatagggaatattaggtctgcatacacaaaagattttaccagtaaagatattacaa

SEQ ID NO: 59005 - DNA, 89 bp, Glycine max
  Clone ID: 700676015H1
ctccaattcctttcgctatcagtgtcttcaaatcaccgtcgtctcagagtgcgagaagctcaaatcgtttggaccgacgtcattcggcg

SEQ ID NO: 59006 - DNA, 266 bp, Glycine max
  Clone ID: 700676016H1
agcgaggaggatgaatttactgatagcgaagaggatgttccattgcttaaagcagagaatggaaaacctcgaaacaaaagctgaagagttgaaggtacctgaatctaaaaaagctgttgccaaggctagtgcatcagcaaaacaagtcaagattgttgaaccgaaaaaagacaatgaagaggactctgatgatgattctgacgaagatgatgattttggaagttctgatgaagagatggaggatgctgatagtgacagtgatgatg

SEQ ID NO: 59007 - DNA, 89 bp, Glycine max
  Clone ID: 700676017H1
caaagccagaaaggaaagcaactagaagcagtgaacgacggaagccacatattgagtggcttcgaccctgccttcttgaaagaagcgat

SEQ ID NO: 59008 - DNA, 266 bp, Glycine max
  Clone ID: 700676018H1
tagaaaatggcttcaaagagtgtttcagctgttgccctaattctggtctccctcaacctccttttcttctccatggttagctccaaccccctaatgacccctgcccttgtctcatcaataatatctaacaaaaagtgccccgaattacatgtttgcgccactattttgcctccccatcacaagccagacaagggttgctgccccctcatcgccggtcttattgatcttgaagccgccgtgtgcctctgcgccgtactcaagctcga

SEQ ID NO: 59009 - DNA, 264 bp, Glycine max
  Clone ID: 700676019H1
taaattgtgaccctcgtcacgccaacgctttcgttgttcccctttctctcgttttttctcagaaccttctgaggttaaagcaaaaaacatagagagtgagagagagacaatgatgaagccatcgatgctcagatctctccactccgccgccacccgcggcgcctctcatctcttccgccgtgggtacgcctccgagccggtgccggagcgcaaggtagccgttctcggcgccgccggcggagatcgggcagtctctctcccttc

SEQ ID NO: 59010 - DNA, 261 bp, Glycine max
  Clone ID: 700676020H1
ctttcctagttttgtctcaaatcaaacaactctgacggaggatactgctattgctccgcctgaatctccatggctgatccacagccgctgcttctcaacgattccgagccaactcaatttcaaaacacccgaatcgcctcccttgacgtctttcgcggcctctctgtttttcttatgatatttgtggattatgctgcttccatcttccccatcattgctcatgccccctggaatgggattcacttggctgatttcgtcatg

SEQ ID NO: 59011 - DNA, 259 bp, Glycine max
  Clone ID: 700676022H1
tcagaatctccgagactaccgcattttggagttcaactccaaacccaacaccctccttctccccaaccatgctgacgctgattacctcatcgttatccttaacgggactgccattctttccttggtgaacaacgacgacagagactcctacagacttcaatctggtgatgccctgagagtcccctcaggaaccacatactatgtggtcaaccctgacaacaacgaaaatctcagattaataacactcgccatacccgtt

SEQ ID NO: 59012 - DNA, 257 bp, Glycine max
  unsure (1)..(257): unsure at all n locations
  Clone ID: 700676024H1
ataaattagcagaacgaagaggaacaaaaacaagaagaagaattggattcgaaaatcgtagcgtacgantggtgcgattgaacgatacgatgggaagaggaaaattcaagagcaagcccactggtcgccgccagttctccaccccggaagatatgcttgctggaacctctaaccgtcctcgaacttttagacagaaagaagctgagcatgaagaggaagaacccgaggaagtatctggagatgaatctggagaagaa

SEQ ID NO: 59013 - DNA, 257 bp, Glycine max
  Clone ID: 700676025H1
gcatgacggacttcatcctcaggagcaccatgtgtcaagttattagggtgacctgggaaacatagttgctaatgcagagggggttgcagaggctacaattgtggataatcagataccactctctggccctaattcagtagttggaagagccttggtggtccatgagcttgaggatgaccttggaaagggtcggcatgaactcagtttgacaactggaaatgctggtggaagattagcgtgtggtgtggttggtttga

SEQ ID NO: 59014 - DNA, 258 bp, Glycine max
  Clone ID: 700676026H1
tgttgaaaccgcgaaaattccctcttttctctctttctctttcacacgtctttgttttacaaagcggcttcgatttatttttgtgtttgtttcttcccctttccctcttctctgttttcaccgacccttgttttctatctgggtcggcaaatggttttcaattagtgtttctgtgttgtttcttcattgttgctttctctcgaagctagctcaacccgagatggatctgagagaaagtttggtacttcttcttgtggg

SEQ ID NO: 59015 - DNA, 258 bp, Glycine max
  Clone ID: 700676027H1
gtgagtcacagttgttctcatcgaagcagaagaagaagaaatggcgacttctctgcaactgttccaatgcaaactagcgagaccctttcggccattccctttgcgaagttcaactccccctctgagtctgaggtgttgcgcttcgcccccttcttcctacagcatcactctcattcccggcgatggaatcggccccgaaatcatctccgtggccaaagacgttcttgtcctcgtgggttctctcgaagggatcaaatt

SEQ ID NO: 59016 - DNA, 258 bp, Glycine max
  Clone ID: 700676028H1
tttcacatcaaactgtttggactcaaatggcaatggtgttctcactgttgctctttgattccaaacagtttgcgtgaaatagtacagaggaatggtacccaaaagacgagaaccccattgaattatgatactagcaagcagagcttgtgtcaattgtctattgaccttctcggtggacgaatttcagtggacaaacactggatattcgatcacacttatacgatattctccaattagtaacttgttgagagctgctgc

SEQ ID NO: 59017 - DNA, 251 bp, Glycine max
  Clone ID: 700676029H1
tggccaacaagaaaatgaagaaggaacaatattcttgtgaccatccacctgcatcatgggattggaggaaaaaaggtgtcatcacccaagtaaagtaccaagggggctgtggaagcggttgggcgttttctgccacgggagccatagaagcagcacatgcaatagcaacaggagaccttgttagcctttctgaacaagaactcgtagactgtgtggaagaaagcgaaggttgttacaatggatggcactat

SEQ ID NO: 59018 - DNA, 257 bp, Glycine max
  Clone ID: 700676030H1
gagagaagccagtttttcaagccccgccgttaaagccaccatcgaacagtccctcaacgccgaccccgtcaccgttaattccggattgggattccggccaagcgcggtggctccggtgaattccgccccgaggcggagtttatatctgcacccgctgctacaacagcatagcagtgctgcacagcacaggggcgatgacgtgatacgacctctatatatattgcatacgacgaagatgaggcacccgatcttggtcg

SEQ ID NO: 59019 - DNA, 260 bp, Glycine max
  Clone ID: 700676031H1
gttcaatatcctagtataccttaataaataatttaagatactatgatgagagcacggttcagcatttgttgctgggacttgttttcctggcttcagtttctgtctcatttggcattgcttactgggaaaaagagaaccccaaacacaacaagtgtctccagagttgcaatagcgagagagactcgtacaggaaccaagcatgccacgctcgttgcaacctccttaaggtgtggaaagaagaatgtgaagaaggtgaaatt

SEQ ID NO: 59020 - DNA, 265 bp, Glycine max
  Clone ID: 700676032H1
cgctagctagctagcaagcaagcacagagatggaggcaaagcgaggccatgccctcatgtgcttggcacgtgtttcactcttcctctgcgctctaaccctatccgctgctcacggaagcaccacggttcaagacatcgcgagaaagttgaaactcggggacaacgagcttctgcgcacggagaagaagttcaaggttttcatggagaattacgggaggagctactccacagaggaggagtatttgcgccgtttggggattttcgc

SEQ ID NO: 59021 - DNA, 266 bp, Glycine max
  Clone ID: 700676033H1
gctgcttctgccaaaattagtggcgccaccgcctttgagatttcaggaactcctgtggattgtgtttcgctagcgttatctggagcgttgttttcgtggtctaagcctatgctggttattagtgggattaaccgcggatcaaactgtggtcatcacatgttctactcaggggttgttgccggagctagggaagcgttgttatgtggtgtaccggcattatcaatatcattaaattggaagaaggatgaaagtcaggaaaacgattt

SEQ ID NO: 59022 - DNA, 261 bp, Glycine max
  Clone ID: 700676034H1
caataatttaagatactatgatgagagcacggttcccattactgttgctgggacttgttttcctggcttcagtttctgtctcatttggcattgcttactgggaaaaagagaaccccaaacacaacaagtgtctccagagttgcaatagcgagagagactcgtacaggaaccaagcatgccacgctcgttgcaacctccttaaggtggagaaagaagaatgtgaagaaggtgaaattccacgaccacgaccacgaccacaac

SEQ ID NO: 59023 - DNA, 261 bp, Glycine max
  Clone ID: 700676035H1
ggcgaaaaccctaatcctgaggcactgaaagtgtgatatggcaagagtcatttcctcttcctgcgcacgcctcgcaatgcgcctcttctccaccaccaccacagccaccgcgttcgccgtcactttacccaaaccctcatcactctccctctcatcgcgtcgattcctcttccctctctcccatgccatcgtccctccctccacccgcgtcgccggaatccggtgccgcgttaaccgcgccggagactcggcgtactcacc

SEQ ID NO: 59024 - DNA, 257 bp, Glycine max
  Clone ID: 700676037H1
gtcaatagttctatgctgtctctgaaagacctacatttcctttctattctttagttgtaatagaaatgaaacatacataaccagacgagagtacataatatttcaggaatttccggaagccttattgtaatttaattctattctatttcgattttccttccctttagtgttgttggttaagttgatgcatttagttgatagagtttttattctttttacccttttgtgagttttcggatctgtttacaatcacggaa

SEQ ID NO: 59025 - DNA, 62 bp, Glycine max
  Clone ID: 700676038H1
gacgagatctctctcgagtaaaggccaggactcgtacctgacggcgtaaggtaagtttgcag

SEQ ID NO: 59026 - DNA, 256 bp, Glycine max
  Clone ID: 700676040H1
attaaagtgattgacaaagataaggttatgaaaactgggcaagctgaacaaatcaagcgtgaaatatctgttatgagactggccaggcaccccaatattatacagcttttcgaggttttggctaacaagaataagatttactttgttatagaatgtgctaaaggtggagagctcttcaacaaggtggctaaaggaaaactcaaggaagatgttgcacacaagtattttaagcagctaatcaatgctgtagactatt

SEQ ID NO: 59027 - DNA, 255 bp, Glycine max
  Clone ID: 700676043H1
tctctccattggtccttaaacactcatcagtcatcaccatggccaagctagttttttccctttgttttctgcttttcagtggctgctgcttcgctttcagttccagagagcagcctcagcaaaacgagtgccagatccaaaaactcaatgccctcaaaccggataaccgtatagagtcagaaggagggctcattgagacatggaaccctaacaacaagccattccagtgtgccggtgttgccctctctcgctgca

SEQ ID NO: 59028 - DNA, 259 bp, Glycine max
  Clone ID: 700676044H1
ccttgtgttgcttcttttctccctcttaggtctctcttctagttccagcatatcaactcatcgttccatattggaccttgacctaaccaagtttaccacacagaaacaggtgtcttcactgttccaactatggaagagtgagcatggacgtgtctaccataaccacgaagaagaggcaaagagacttgagattttcaagaataacttgaactatatcagggacatgaatgcaaacagaaaatcaccccattctcatcgt

SEQ ID NO: 59029 - DNA, 259 bp, Glycine max
  Clone ID: 700676045H1
attctctccattgtctttgaacactcatcaccatggccaagcttgttctttccctttgtttccttcttttcagtggctgcttcgctctgagagagcaggcacagcaaaatgagtgccagatccaaaagctgaatgccctcaaaccggataaccgtatagagtcggaaggtgggttcattgagacctggaaccctaacaacaagccattccagtgtgccggtgttgccctctctcgctgcacccttaaccgcaatgccct

SEQ ID NO: 59030 - DNA, 255 bp, Glycine max
  Clone ID: 700676046H1
tggtgttggggcgccactcgatgtcgaggcccacggtgaggacgcgctgctggtgctggtgctggtggtcgcggaggacggtggagatccaggagtcgacgagggaggggtcggaggtgaggagggtgtagatggtgtgggtgttgttgaaggagacgtcgtagaggttgtgggtgtcgtaggggaggccgtggtccaccacgctgatcggcgccaccacgggggtggtggtggtggtggaggagctgagcggcg

SEQ ID NO: 59031 - DNA, 259 bp, Glycine max
  Clone ID: 700676047H1
ctttactttttttttcagccatggagtttcattgccttccaatatttctttatctcaatttgatgttgatgacagccaatgctgcgttaactcctagacattactgggaaacgatgcttccaagaactcccttgccgaaagcaatcacagagctactaagccttgaaagtaggtccatatttgaatatgccgggaatgatgaccagtcagaaagtaggtccatattaggatacgctggctataatcaagacgaggatga

SEQ ID NO: 59032 - DNA, 263 bp, Glycine max
  Clone ID: 700676049H1
ctggtctgaggccagttgttgagggcatgaacatgggatttctacttctggcatttaaccagatctctaataattgtggcatgctgcattacacatctggaggccagttcaaaataccaattgtcattcgtggacctggtggagttgggcggcaacttggagcagagcactcacagcgattggagtcatattttcaatcaatccctggaatccagatggtggcttgctcaaccccttacaatgccaagggcttgatgaaagct

SEQ ID NO: 59033 - DNA, 259 bp, Glycine max
  Clone ID: 700676051H1
cactgaccaagccatggcgatgagaaccaaactttctttagctatctttttcttttttcttttagccttattttcaaacctagcctttggcaaatgtaaagaaaccgaggtagaagaagaagaccctgagctcgtaacatgcaaacaccaatgccaacagccacagcaatacactgagggtgacaagcgggtatgcttgcaaagatgtgacaggtatcatcgtatgaagcaagagcgagagaaacaaatccaagaggaa

SEQ ID NO: 59034 - DNA, 256 bp, Glycine max
  Clone ID: 700676053H1
ctcgagcgctcgagccgcttaattattaacacttccttagttcaatatggggaagcccttcactagctctctttcttccctttgcttgctactcttgtcgagtgcatgctttgctattagctccagcaagctcaacgagtgccaactcaacaacctcaacgcgttggaacccgaccaccgcgttgagtccgaaggtggtttgattcaaacatggaactctcaacaccctgagctgaaatgcgccggtgtcactgtt

SEQ ID NO: 59035 - DNA, 256 bp, Glycine max
  Clone ID: 700676054H1
cagaaaccgcgagaaaattccccagaaatctcaacacagttaaacatcatcaatcaaatatttttggaaaataccacaacagttttcagctctgtacaacgttggatttggatcagttttcgtgagagaatatttgagcatagaaacatggtagctgaagcagaggttgcgtgtcaacaaaacgtgggtgtgttggatgtgaagcattttccaaataagggaagcgatgttcaccagatcggagacgcagatgcta

SEQ ID NO: 59036 - DNA, 257 bp, Glycine max
  Clone ID: 700676055H1
aaaagagaaccccaaacacaacaagtgtctccagagttgcaatagcgagagagactcgtacaggaaccaagcatgccacgctcgttgcaacctccttaaggtggagaaagaagaatgtgaagaaggtgaaattccacgaccacgaccacgaccacaacacccggagagggaacctcagcaacccggtgagaaggaggaagacgaagatgagcaaccacgtccaatcccattcccacgcccacaacctcgtcaagaag

SEQ ID NO: 59037 - DNA, 72 bp, Glycine max
  Clone ID: 700676056H1
cctagacctagtgccgacggagaccctaaacttcttagtgatgggaagttgtacggagggtcagcatatgtc

SEQ ID NO: 59038 - DNA, 237 bp, Glycine max
  Clone ID: 700675478H1
agtgaatgcacctattgcaagtctgaagagagcaacctgtgtgagcttctcaggatcaacactgacagaggagtgatgctcagtgatggcaaaacaaggttctccaaaaatggacaacctatttaccacttcgttggaacctccactttcagtgaatacactgttctccatgaaggatgtgtcgccaagatcaaccctgctgcccctcttgacaaagttgctgttgtcatcgtggat

SEQ ID NO: 59039 - DNA, 130 bp, Glycine max
  Clone ID: 700675479H1
ctacgatagcgtagactcttcccagttctgttgtgtgagtctgtgagtctttcttagctgatatggcggttgatcgctcccttacgaggtgctgtagcctcgtactgtggtcgtggatgttgctgaggat

SEQ ID NO: 59040 - DNA, 125 bp, Glycine max
  Clone ID: 700675480H1
atcaaccttagtattttctttttgctggttattgtaaggaatgagattttattactacagtcagaacttgacgagtggaagaatcgagcgaatttcgcaagagaaaaattccaaagcctcaagag

SEQ ID NO: 59041 - DNA, 244 bp, Glycine max
  Clone ID: 700675481H1
tcgctcgagatttgcattcttggcattgcatgggcctttggtggcatgatcttcatccttgtctactgcactgctgggatctcagggggtcacattaacccagcggtgacatttgggctgtttttggctcgcaaggtgtctttgatccgagccatcatgtacatggtggctcagtgcttaggtgctatctgtggatttggtttggttaaggctttccagaagtcttacttcaacagtatggtgg

SEQ ID NO: 59042 - DNA, 236 bp, Glycine max
  Clone ID: 700675484H1
caccatcaattttgaggcttttccccacaagctggtgcagtttggagagattcaggaaaaagttgtattgaaattttcacaagaggaatttcttacagcttggtcaactcaggtgcgtcctgcaacaactctgttggctgatgggtgtccatatttgtatgctatggtgcatgatagttcagtgtctacaataccaggtgattttgtcattggtgttaagttgacaaccataaaca

SEQ ID NO: 59043 - DNA, 220 bp, Glycine max
  Clone ID: 700675485H1
tagttcaatatcctagtataccttaataaataatttaagatactatgatgagagcacggttcccattactgttgctgggacttgttttcctggcttcagtttctgtctcatttggcattgcttactgggaaaaagagaaccccaaacacaacaagtgtctccagagttgcaatagcgagagagactcgtacaggaaccaagcatgccacgctcgttgcaa

SEQ ID NO: 59044 - DNA, 93 bp, Glycine max
  Clone ID: 700675486H1
cggaatttttgaagcgtaccggatttcattgtgatatcatttgtgtcactgggtggactgccaccccaatgcaggatgtacacgttacaattg

SEQ ID NO: 59045 - DNA, 236 bp, Glycine max
  Clone ID: 700675487H1
gccacttcgaatccgtcgcctcagctgcagatcacatcgagtttcacccgaatgctctttctggactcgatttagatcgagttcttcataccctgatagtgtgggaggatatacatgaagaacgggataatggaatgcagtgtttgccattccaaattggtttccccctccgccaaaactatatcaagggcttatgatcgccacaaaagtagaatatcgtccaagcaacgtgcact

SEQ ID NO: 59046 - DNA, 233 bp, Glycine max
  Clone ID: 700675488H1
gtgactcgaggacaaggaaaggttagagttgtgaactgccaagggaatgcagtgttcgacggtgagcttaggaggggacaattgctggtggtaccacagaacttcgtggtggcggacaagccggagaacaaggattcgaatacatagtattcaagacacaccacaacgcagtcactagctacttgaaggatgtgtttagggcaattccctcagaggttcttgccattcttaca

SEQ ID NO: 59047 - DNA, 231 bp, Glycine max
  Clone ID: 700675489H1
aacctacctctttttcttctctctcaacaacttcaaattcttcctcctcgatcatgtcttacttcaagggcaagtaccatgatgagcttatcgccaatgctgcgtacattggcactcctggaaagggtattcttgctgctgatgagtcaacagggacaattggcaagcgtttggccagcatcagtgtagagaacattgaatccaacaggcgagctcttagggactgctttt

SEQ ID NO: 59048 - DNA, 233 bp, Glycine max
  Clone ID: 700675490H1
aagaatttaagatatactatgatgagagcgcggttcccattactgttgctgggagttgttttcctggcatcagtttctgtctcatttggcattgcgtattgggaaaagcagaaccccagtcacaacaagtgcctccgaagttgcaatagcgagaaagactcctacaggaaccaagcatgccacgctcgttgcaacctccttaaggtggaggaagaagaagaatgcgagaaggt

SEQ ID NO: 59049 - DNA, 237 bp, Glycine max
  Clone ID: 700675492H1
attgcaaaggaaaaccttgactgaggcatctaatttgcagcaaccatttgcggttactgggcatggtcctgaagggaacttttcatcaggtggtttaataggaaacaaagatacagtcactggaaaatacccacatgtcttcccatctggcaattctgtatcatcagataaatttgttggaagtcagtcttttgtgccatctaatttttccatgtcaaaagctcactcatcagggcc

SEQ ID NO: 59050 - DNA, 239 bp, Glycine max
  Clone ID: 700675494H1
acatcacttaaaccttcttatcccatccataagctttcaaaaaccacgatgatgacacccaactgcgttagattcagtttcaactacaactcatgcctcatattcgcaaatgggtacccttcttcttcacttccactttctcttcagaataagcccagaaaatcggcatcagtggttgtgagtgcccgaaggaaagacaagaaagaagatacccatagctctgttcccaacccgacgag

SEQ ID NO: 59051 - DNA, 239 bp, Glycine max
  Clone ID: 700675495H1
gcaaaatccttcgcatcctcaaagctcacggacttgcgcctgaaattccagaggatctgtaccatttgattaagaaggcagtttcaattaggaagcatcttgagaggaacaggaaggacaaggactccaagttcaggttgattcttgttgagagcagaatccaccgacttgctcgctattacaagaagactaagaagctcccaccagtctgaaagtacgaatcaacaactgctagcact

SEQ ID NO: 59052 - DNA, 262 bp, Glycine max
  Clone ID: 700675502H1
tgttggcctaaaagaacaacaacaggagcagcaacaggaagagcaacctttggaagtgcggaaatatagagccgaattgtctgaacaagatatatttgtaatcccagcaggttatccagttgtggtcaacgctacctcaaatctgaatttctttgctattggtattaatgccgagaacaaccagaggaacttcctcgcaggttcgcaagacaatgtgataagccagatacctagtcaagtgcaggagcttgcattccctggg

SEQ ID NO: 59053 - DNA, 245 bp, Glycine max
  Clone ID: 700675503H1
cggctcgaggttgtttttgcaggtgattagcacattttttgcaatcctatagggtgcactgctgagttcagagacagtagacagcagaaaagccaaagtcgtgaccacttccatggagtatagtgctataaactgcagagctcacagtgctgcattgacagattttggtggtattggggatggaaaaacgtcctgtccaaaggcattacggtctgcaataagtcacctgagtcagtatcgctctg

SEQ ID NO: 59054 - DNA, 222 bp, Glycine max
  Clone ID: 700675505H1
ttcggcacgaggacaaaactagcgcaactttgcaatttagaaagttagcagattgtgactttctcaaaggagactttaagcagatgtctaatgtcgtgtgggtggctcctgaggcaaaggcgagtttgtggtcacaaccttcattatgttccatgtaacaatctggaaatgcaagaagcttatcttgtcaatctcgtaaatgtgttacgagatttgtctgtg

SEQ ID NO: 59055 - DNA, 239 bp, Glycine max
  Clone ID: 700675506H1
cggaagaaaaagttgcgtttcaaatttcaatgacttctgctactagttatactccttcacctgagaacaaacctcagatccagcacataattaacattcctgaacaaatggagcctgaggagcatgatcaatgctgcatttacaaggctcctcatcatctcctgaaattggatgtgggagcttatacaccacagttcatctcactaggcactcttcacggtgaccctccagaactaacg

SEQ ID NO: 59056 - DNA, 208 bp, Glycine max
  Clone ID: 700675507H1
gggaacaagagaaccccaaacacaacaagtgtctccagagttgtaatagcgagagagactcgtacaggaaccaagcatgacacgctcgttgcaacctccttgatgtggcgaaagatgactgttacgaaagtgttattccacgatcacgaccacgaccacaacatccggagagggaacctcagcaacccggtgtcaaggtggcagacgc

SEQ ID NO: 59057 - DNA, 160 bp, Glycine max
  Clone ID: 700675509H1
ctctccgttgtctttgaacactcatcaccatggccaagcttgttctttccctttgtttccttcttttcagtggctgcttcgctctgagatagcaggcacgtcaggatgagtgccatatccaaaagctgaatgccctcaaaccggataaccgtatagagtc

SEQ ID NO: 59058 - DNA, 235 bp, Glycine max
  Clone ID: 700675510H1
caagagttgcagtataatactgacaaattgaaagatttaatgattaagaatgcagacagtaaagctgctgcattatataatgaggtttgtaatttaaaggcacagtgtgatttgtcattggattctcaatctcaagtagtatcagctaatactgaagtggaagatgatgttacaacttttgataatcagagacttaaggctccagaagtaattggtgcttatttgcccgagtcag

SEQ ID NO: 59059 - DNA, 226 bp, Glycine max
  Clone ID: 700675511H1
cttccatagccccccaaaaatgaagagcaccatcttctttgctctctttctcttttgtgccttcaccacctcatacctaccttcagccatcgctgatttcgtgctcgataatgaaggtaaccctcttgaaaatggtggcacatattatatcttgtcagacataacagcatttggtggaataagagcagccccaacgggaaatgaaagatgccctctcactgtggtg

SEQ ID NO: 59060 - DNA, 245 bp, Glycine max
  Clone ID: 700675512H1
agttgcatggttgtataatattcgtggaagtgatgtggcctactgtcctgttgttcatgcatttgctattgtgacatccaattctgctttcatttatgtggacaaacaaaaggtttctgttgaggtacaaactcatttagtggagaatggaattgaaattcaagagtatacagccgtaagctctgatgcgacattgcttgcaactgatgagctagatgctgtatctactgccaaggctgctttag

SEQ ID NO: 59061 - DNA, 251 bp, Glycine max
  Clone ID: 700675513H1
gaaaatgaagaaggaacaatattcttgtgaccatccacctgcatcatgggattggaggaaaaaaggtgtcatcacccaagtaaagtaccaagggggctgtggaaacggatgggcgttttctgccacgggagccatagaagcagcacatgcaatagcaacaggagaccttgttagcctttctgaacaagaactcgtagactgtgtggaagaaagcgaaggttgttacaatggatggcactatcaatcgttcg

SEQ ID NO: 59062 - DNA, 251 bp, Glycine max
  Clone ID: 700675514H1
aactcaacaacctcaacgcgttggaacccgaccaccgcgttgagtccgaaggtggtcttattgaaacatggaactctcaacaccctgagctgcaatgcgccggtgtcactgagtccaaacgcaccctcaaccgcaacggcctccacttgccatcttactcaccttatccccaaatgatcattgtcgttcaagggaagggagcaattggatttgcatttccgggatgtcctgagacgtttgagaagccacaa

SEQ ID NO: 59063 - DNA, 246 bp, Glycine max
  Clone ID: 700675516H1
ccttagttcaatatggggaagcccttcactctctctctttcttccctttgcttgctactcttgtcgagtgcatgctttgctattagctccagcaagctcaacgagtgccaactcaacaacctcaacgcgttggaacccgaccaccgcgttgagtccgaaggtggtttgattcaaacatggaactctcaacaccctgagctgaaatgcgccggtgtcactgtttcgaaatcaccctcaacgcaatgg

SEQ ID NO: 59064 - DNA, 255 bp, Glycine max
  Clone ID: 700675518H1
tctctccattggtccttaaacactcatcagtcatcaccatggccaagctagttttttccctttgtttactgcttttcagtggctgctgcttcgctttcagttccagagagcagcctcagcaaaacgagtgccagatccaaaaactcaatgccctcaaaccggataaccgtatagagtcagaaggagggctcattgagacatggaaccctaacaacaagccattccagtgtgccggtgttgccctctctcgctgca

SEQ ID NO: 59065 - DNA, 238 bp, Glycine max
  Clone ID: 700675519H1
ttctcttcacttttaagttaaatagtttttcattgtatcattcaatctactatggccgcttcatcaatggctctctcatcatcatacatttgaccggcaagctctcaggtttcgcgcctcgaaccttcagcttcgcgcttgaaagtttagcctcatgttaacagtctccaggactgataccacttggtgcccttggtacggcccaaacggtgtctggtacttgggctcacactctggt

SEQ ID NO: 59066 - DNA, 231 bp, Glycine max
  Clone ID: 700675522H1
cctgcatcatgggattggaggaataaaggtgtcatcacccaagtgaagtaccaagggggctgtggaaacggtagggcgttttctgccacgggagccatatacgcagcacatgcaatagcaacaggagaccttgttagcctttctgaacaagaactcgtagactgtgtctaagaaagcgaaggttgttaccatggatggcactagtcatcgttcgaatgggttttagaacat

SEQ ID NO: 59067 - DNA, 231 bp, Glycine max
  Clone ID: 700675525H1
aattgagcttgaagttgcagagagaaaatggattgagaattctctctcttttctcatactcttcccaactttccttccttgggatcattctgcttctttgctatggaagactcagattcagttgctacgctgatagattccacaacttctaagatagagcagctgcaaaaggcatttgctgaactttaatgttaccgagctgtaactctgaacttgaaatggagagcactc

SEQ ID NO: 59068 - DNA, 224 bp, Glycine max
  Clone ID: 700675526H1
ccagaaatagcttttgcgatcttcattgccatctttggattggtcttcttctcattacttattggaaacatgcagaaatatctgcaatctacaactgtaatagtggagtagatgagagtgaagagacaggacgcagaacagtggatgtcccaccgtatgctacctgagaacttgagggacataattagatagtacgaacagtaccaatggcaatcgtatagggg

SEQ ID NO: 59069 - DNA, 246 bp, Glycine max
  Clone ID: 700675527H1
gtcgttatttttatctctaactcttcttcttctgcatcattcctctgttgcagcaccggttaagaattttcgtggaacctattgtgttgagctgcgattgcatgtgggaatcgatttctgcagattaatcttggcagtttgatgtgattgcttggttttggtttgaagtggttttaatggggaatatactgaatctaaacaattcaaagactagacggaatgattcccatggggtcttgcaaggtg

SEQ ID NO: 59070 - DNA, 223 bp, Glycine max
  Clone ID: 700675528H1
ggacctgcagcgtgcagatgctcttatgcgtgcaactattgatagccacagcataagtcaaccgcttccaagggcaatcagacagcctcgtacacggtttccagaaaatccgtctagaaggagagctatggctcaagcttctttctctaatagaatgtcacagtggaagagtcgtgctacaagtcggactcgagcacctagcacatcatctggaggaagaggc

SEQ ID NO: 59071 - DNA, 245 bp, Glycine max
  Clone ID: 700675529H1
gtgttaaataggtggatggggaaactgactttcccccagggcacttcccgaagtgttaaaagaatgcctctttctatagggggaggagctggtgcaaagaatgctattctcatgaatatgccaaatgctgttctttcaatgtggagatattttgttggagatctcgtctttgaagtttctaagatgacttctccatacattagatgtacagtctctttcttcatagcatttggaaatttggctga

SEQ ID NO: 59072 - DNA, 248 bp, Glycine max
  Clone ID: 700675530H1
gattcatattcatagagagagaaagggaaagggcgacgagcttgaggacgtgatgggagatgttatggtcggtaaagaatatatctgagactcgactcgatctcgatctctctcagtgttgtgttgttttgtatatccttttgccgattccacccattcctatgatttccttcggttcctctctttcgcactctcgtctccgctctttcctcttgttatggtaagcacctttcttcttcagatctgct

SEQ ID NO: 59073 - DNA, 243 bp, Glycine max
  Clone ID: 700675531H1
tccagagagaacccctgctccttaacgacgccgtttcgcaagcatcaatggagaagggaaagggagtgatgggatcgggaggaagaagatggggcgttgacttctccgacaattccacttctcgcgacattcccgatcctcccggtttctctcgcgcttctctcgatcaggacgattcaacgctaagtcgccagaagaaggacgctgaatccaactggaaagcccagacagcttgggaggtag

SEQ ID NO: 59074 - DNA, 80 bp, Glycine max
  Clone ID: 700675532H1
cgcgagcggccgccctttgttatgttaccccttttttcccttactaacataaatttttaacggaaccgcctttggcaccc

SEQ ID NO: 59075 - DNA, 237 bp, Glycine max
  Clone ID: 700675533H1
ggcatatatactctgcatccaagcagattagtgctgcaatatctccagatcaaaataccactgcctttaaagatgtagcaattctccgtcacccgcgagtaggtgaatatacgtatgggcacttcactcaactgttactctacagcaagatcatggcgatgaagcgcttcgtggtgttctagtacctacgcaccatctctctattggtgatatatttatggttaattccagagatat

SEQ ID NO: 59076 - DNA, 245 bp, Glycine max
  Clone ID: 700675534H1
gcctaaaagaacaacaacaggagcagcaacaggaagagcaacctttggaagtgcggaaatatagatccgaattgtctgaacaagatatatttgtaatcccagcaggttatccagttgtggtcaacgctacctcaaatctgaatttcttggcaattggtattaatgccgagaacaaccggaggaacttcctcgaaggttcgcaagacaatgtgttaggccagatacctagtcaagtgccggagctt

SEQ ID NO: 59077 - DNA, 252 bp, Glycine max
  Clone ID: 700675535H1
ataaaattcttccaccaagttatgggtttccttgtgttgcttcttttctccctcttaggtctctcttctagttccagcatatcaactcatcgttccatattggaccttgacctaaccaagtttaccacacagaaacaggtgtcttcactgttccaactatggaagagtgagcatggacgtgtctaccataaccacgaagaacatgcaaagagacttgagattttcaagaataacttgaactatatcagggac

SEQ ID NO: 59078 - DNA, 250 bp, Glycine max
  Clone ID: 700675536H1
gtccttttgaagtcaaatgtccttaatgaagttcagagatccttgctagatggtggcatgcatgttgaggatctaccacccttacctcgttctggatcatctcctcatttgagtcagcataggcttccatcagattctcctgaaagggaacctacttgtcgcattggtggtgttgctgggttgtggcatttcatatatcgcagcatttatctggatcaatatatatcttcagagttctcatcaccaatta

SEQ ID NO: 59079 - DNA, 208 bp, Glycine max
  Clone ID: 700675537H1
tggtttgattgtgttgatgaggaggattcctttgaggaagtttctttaagtgcagcactcaatggtgttgagggtttagactatatggaaagaattcctcttgccacatctgagggttttcctcatgtgctttcacgcaaaaatggtgaaaaaggcaaaaggagatttgtttctggggatggtgaagagatgacattgattccgggaa

SEQ ID NO: 59080 - DNA, 247 bp, Glycine max
  Clone ID: 700675538H1
cattgtccccatgcattggccatttttctctgtgtgacgtgtgcgatgatgctacctgcaaacattcctctacggttgcggctctaaaagaaaacaagcatttgtcatgtctctttgtataacccgtgagactagaatctagaccttgtgttattggagttcatttttgcattctcaaaccaaggagaaatcctagagtttctcctttggttgagacatagggacctgtgagtgtcataaacatggg

SEQ ID NO: 59081 - DNA, 243 bp, Glycine max
  Clone ID: 700675539H1
gaaaatagctcgtcttcacgatccagcgattccgctctccaacgggactgcgcagggtgaagaatcgagaggccagccgccggtgaagaatcgcgcgattcgtctggaaatcgcgattccagcacgattcatgcccgatacagagatttaaccacgattcaggaacaaaaacgagacaacctccgattcgtattggtagcatctggaatcgtatcgaatcgtgcgatacgtatcctggatcgg

SEQ ID NO: 59082 - DNA, 244 bp, Glycine max
  Clone ID: 700675541H1
gcagactagtatccgatcctctgtcctctcgaagctttcatcgttcaacatattctcaccatctcagtcatgggcctgctatcttgttttaggtctaccgtcctgagaaaatgttccataggcagctctggcatgtcaagattcgtgtgtgcgaacaattttcagcgatacttgatttcgtctggaggcagtgaatcgtattatgggtattttaacaggagatcgtacacttcactttatatgg

SEQ ID NO: 59083 - DNA, 248 bp, Glycine max
  Clone ID: 700675542H1
ggctcgagccgaatcggctcgagcgtgcacgaggaacagactaattagtcttgaagattgggagaatgcagaacttcagaaaataatagaggcagatcaacttgctgagccaaatgaggaaccccaagtcgacttagaagtgccgactttagctgagactttggagaatcctcaagaggaactggattccaatgcatccgaaatatcagctgttgaagatacccaaattcatgcagaggagaaaccat

SEQ ID NO: 59084 - DNA, 203 bp, Glycine max
  Clone ID: 700675543H1
cggctctcgcaaaaacacagttggaggaaccatcctgcgtagtgacctattggccaattcttcgacagagggcaattttagagccagtgatcaattgctgcgcactcatcgtattacacgaatgattgaaatggcatccacagtcggtatacctgataatacaggtgtagcattagcctgcgctataaatagttcttataggg

SEQ ID NO: 59085 - DNA, 208 bp, Glycine max
  Clone ID: 700675544H1
ctctgcttccgctctttacttccttgtatgcctatcgcgcatcactttgctatctttctgcgtatcgtgctcaagctcaatctcatgctccagctcgcactttcaagtgctgtggaaagagtgcagactatgctgtgaaggtgagtggagtggaaatattgcctgaccccgtggagagaggagtgccattcgcctttaagatcccagc

SEQ ID NO: 59086 - DNA, 243 bp, Glycine max
  Clone ID: 700675545H1
cacaaacccactaagatggcttcctttgtatccttcctagtgctgcttcttgcagcccttatcctcatgcctcaagggcttgctacttactacaaaccaattaagaagccaccagtgtacaagcctccagtgtacaagccaccagtgtacaaaccaccggtttataagccataaccaccggtttacaagccgaaaccaccggtttacaagccaccatataagagagcaccgtacaagaaacca

SEQ ID NO: 59087 - DNA, 246 bp, Glycine max
  Clone ID: 700675547H1
gagagagcaaagacaaagtttgtagtttgtaagtacagagagagatcacatgattgcgaagacaaacacgattatgcctatcattggcaaactgtactgttcatcgtctgagacggtgcttgtggtgaggaggaggccacacgtggtgaatggtgggggttatgtagtcatggattgtagtgcccagagggttgtgttcagggtcgatggttgtggtgttcgtggcaaaaagggagacttgattct

SEQ ID NO: 59088 - DNA, 204 bp, Glycine max
  Clone ID: 700675548H1
tgggggtcttctccatagggggcctaatataagagggacagtggtgtcgatgcgccagaatgtgttcgacgtgaatagcgtaaccagcgttgggggaattattggtcaaggtctcgacttagttggctcaacactcgatactcttaatgccttcttgggccgatccgtgtctctcgagcttataagtgccaccaaggctgatgc

SEQ ID NO: 59089 - DNA, 253 bp, Glycine max
  Clone ID: 700675549H1
acaaaagcacaattggttagtggaaaaaccttcaaatatgatataattggtgctggttcacattcttcagaagattttcgtgaaaaggaagatcaagaaaaacccaaaaagattggtgccagattgagacaaagaatagatcctcaatacaatgaggttcaggctcagatggaaacaaacttgtttaaattgtctcttgatgatgttgaaactcctaaaggttccatgttagatcttaaaatttctcagtcta

SEQ ID NO: 59090 - DNA, 248 bp, Glycine max
  Clone ID: 700675551H1
agaaagtcttccatagccccccaaaaatgaagagcaccatcttctttgctctctatctctattgtgccttcatcacctcatacctaccttcagccatcgctgatttcgtgctcgataatgaaggtaaccctcttgaaaatggaggcacatattatatcttgtcagacataacagcatttggtggaataagagcagccccaacgggaaatgaaagatgccctctcactgtggtgcaatctcgcaatgag

SEQ ID NO: 59091 - DNA, 248 bp, Glycine max
  Clone ID: 700675552H1
ggatttccctccacgaagcaagctagatagccaagtctatggtgatcatactagtcaaataaccaaagaacacctagagcccaacttagaagggctcactgtagatgaggcaattcaaaacaagagattgttcctactagatcatcatgacccaatcatgccatatttgaggcgaataaatgcaacctccacaaaggcttatgctaccagaacgatcgttttcctgaaaaatgacggaactttaaggc

SEQ ID NO: 59092 - DNA, 246 bp, Glycine max
  Clone ID: 700675553H1
ctcgagccgctcgtcgaccgcaaaagagaaaaaaacaaaaatgctgagaatcgctgctagcgcgaagacaattgttcgaacggggtcgttggaggcgccaccattggggattagggttctgcctcggctctaccacgagagggtggtggaccactacgataacccccgcaacgttggatccttcgacaagaacgaccccaccgtcggaacgggtcttgtcggagcacccgcgtgtggtgacgtcat

SEQ ID NO: 59093 - DNA, 242 bp, Glycine max
  Clone ID: 700675554H1
cgagagataaactatatcaaatctttaggtttcttatagaatcaaagttttgtttatactttgtaaattgtaatgtaagtgggagaaaaactaatctacgtagtatttcacttgatcgagctggattccaccccttgatacagatataactgtgtcttggacttatctattctatgatgctatgttgttatttcaaaagaatatgagcatccatatgtgatactgtcgtttgaatttgatac

SEQ ID NO: 59094 - DNA, 244 bp, Glycine max
  Clone ID: 700675555H1
ggagcagttgatgtagacattggtgcaaacccttctgctgagggtggaggagaagatgagggagttgatgatgcagctgttaaggttgttgacgttgttgacacattcagacttcaggagcaacccgcattcgataagaagcagtttgttaccttcatgaagaggtttatcaaggatttgactcccaagctcgatgcagagcaacaggagttgtttaagaagcacatcgagggagcaactaaat

SEQ ID NO: 59095 - DNA, 239 bp, Glycine max
  Clone ID: 700675556H1
cagagttgtgatgcttcactgttgctggactccacaagaaggagcttgtctgagaaggaaacagatagaagctttgggttgagaaatttcaggtacattgagaccatcaaagaagctttggaaagagaatgccctggagttgtttcgtgtgctgatatcctcgttctctctgccagagatggcattgtttcgctaggaggtccccatatccctcttaagactgaaagaggggttggtaa

SEQ ID NO: 59096 - DNA, 230 bp, Glycine max
  Clone ID: 700675557H1
ggtttcattggatgtagagtaccagcacaatgtgttaatatcccactagcaagtgaatccaaaggatatcatagtaggatggtatacgaccggtcttggagtgactggtggtgttgcattgttccacgtgttatatactcgagacatggccaatcccgtacaggtgactgttgatacaggatttacaaatcgtgcgggtacgattaaagcatacgtgtctaacaatttgt

SEQ ID NO: 59097 - DNA, 240 bp, Glycine max
  Clone ID: 700675558H1
ctcgagccgcatcagcttcttgtgctgcaggttctagttcgaactaagcatatataaggaactgcttgaactctgagatttgtattgtccaaaaggaagaaatagaattgcccattggggatgtgaaattccatggatggcattgcctattggctggcgcagaccaggcaagtgataatccattggcctgcagatgaccaacaattgtgatattggggataccacacttaaaaaaggaag

SEQ ID NO: 59098 - DNA, 242 bp, Glycine max
  Clone ID: 700675561H1
cagcttgcaagctcatggaggtgttgtccgaagcaatggggttagagaaagagggtttaagcaaagcatgtgttgacatggaccagaaggtggtggttaattactaccccaaatgccctcaacctgacctcactcttggcctgaagcgccacacggatccgggcactatcaccttgctgcttcaggaccaagtgggtggacttcaagccaccagggacaatggcaaaacatggatcaccgtt

SEQ ID NO: 59099 - DNA, 70 bp, Glycine max
  Clone ID: 700675562H1
ctcttggatttgtgaaagacgaacaactgcgagagcatttgccaaggatgttttcattaatcacagtaaa

SEQ ID NO: 59100 - DNA, 254 bp, Glycine max
  Clone ID: 700675564H1
cgtaattcggatctgagctctagctcgagacggtcgtaaatgtgttacgagaattgtatttgcacagtccagaggaagctcgcagagtgagaaggaaagctctctctcgtattgaatggctgcaaaaagctgatgtgcctaccatagcacagattgaagagttccattcgatgcagaggatgatgaatgctcctgattcaaatgataatattgatctactgttgagcattgatttgttgggtttacaaggagca

SEQ ID NO: 59101 - DNA, 253 bp, Glycine max
  Clone ID: 700675565H1
tgacatgttaaacgaatgtccggaaacacatctacaaaacctgcgtactggactctataaagaaacaatccaattaatcaaaacgcacaacgaagatcgtatgaatacgatttcgcacttctcgacaaatataatttgtttctttattctaagcggttattctattcttggtaatcaagaacttgttcttattaactctttggttcgagaatttatatataatttaagtgacacaataaaagctttttctatt

SEQ ID NO: 59102 - DNA, 245 bp, Glycine max
  Clone ID: 700675566H1
caacaatcctacttgcaagggttcagcaggaacattttagaggcctcctacgataccaaattcgaggagataaacaaggttctgtttagtagagaggaagggcagcagcaaggggagcagaggctgcaagagagcgtgattgtggaaatctcgaatgaacagattcgggcactgagcaaacgtgccagatctagttcaaggaaaaccgtttcttctgaagataaaccttttaacttgagaagccg

SEQ ID NO: 59103 - DNA, 240 bp, Glycine max
  Clone ID: 700675567H1
gttatgagcaagatggcagagatgataaacagtctttgtggtggtgatgacaaattgatgcgtgaaatgacgcacatgctgttggcgtgttgttcaaggatggcaatttgtaagaaagatgtttggagagttgaatgtggaaacgcttctggaattccgctacacagttatttgcaatagcatttttgatgggatcctcattagatatagctatgagcaattactgcgcgaggctaaagc

SEQ ID NO: 59104 - DNA, 229 bp, Glycine max
  Clone ID: 700675569H1
cttttctttttcttgttcgttaattttctgattttagcctattagcgtagtagtcgtattggtaggttttggcaaagatgttttcagttccaggggtgtcgagatcgctgaacataggcatatggcttacgctaaaagggacagtggtgttgatgaggaagaatgtgttggacttcaacagcgtggctgatcttactagaggaaatgttgggggactcatatgcaccgg

SEQ ID NO: 59105 - DNA, 243 bp, Glycine max
  Clone ID: 700675570H1
gaagatgatgatgatgaggaagagcagccacagtgcgtggagacagacaaaggttgccaacgccaaagcaaaaggagcagaaatggcattgatgagaccatttgcacaatgagacttcgccaaaacattggtcagaattcatcacctgacatctacaaccctcaagctggtagcatcgaaaccgccaccagccttgacttcccagccctctggcttctcaaactcagtgcccagtatggatca

SEQ ID NO: 59106 - DNA, 173 bp, Glycine max
  Clone ID: 700675571H1
ccagcccacttcattccttgcttgctggagagaccattcagtttggggcagtagcatctccgactgttcttccgtctatcaaccgtgttgtgactcatcgcattggtcgacctcgatcatctatatcacacgttccaatgactcacaatcttactgcatctgataacgattgc

SEQ ID NO: 59107 - DNA, 226 bp, Glycine max
  Clone ID: 700675576H1
agaagaagaaaacgaaggaagcaacatattgagtggcttcgcccctgaattcttgaaagaagcgttcggcgtgaacatgcagatagtgagaaacctacaaggtgataacgaagaggaggatagtggagccattgtgacagtgaaaggaggtctaagagtcacagctccagccatgaggaagccacagcaagaagaatatgatgatgatgaggaagagcagccacag

SEQ ID NO: 59108 - DNA, 243 bp, Glycine max
  Clone ID: 700675577H1
tgcctgacgtcacttataatgacattggaggatgtgatatacagaaacaggaaatccgtgatgctgtggaactaccccttacacatcatgaactatactaacaaattggtattgatcctccccgtagtgtcttactgtatggaccccctggcactggtaaaacaatgcttgccaaagctgttgcgactcataccactgctgctatcatcagggttgtgggatctgagtatgtgcagaagtatc

SEQ ID NO: 59109 - DNA, 183 bp, Glycine max
  Clone ID: 700675580H1
agttcaatatcctagtataccttaataaataatttaagatactatgatgagagcacggttcccattactgttgctgggacttgttttcctggcgtcagtttctgtctcatttggcattgcgtactgggaaaaagagaaccccaaacacaacaagtgtctccagagttgcaatatcgagagaga

SEQ ID NO: 59110 - DNA, 245 bp, Glycine max
  Clone ID: 700675582H1
gattcatcaggcgcagggatgatgcaccacggcctggtcagcctggtcaagccccacgtcctgctggagtaggagctcctgcccgagcttaaaagaaaattccaagtttttggggcttgtttgttcagttttatgttgcaaacttaaattccatttgctgtttatttttgaaatttcagttttgtgtagggatattatattctcttctagttgtttgcttcagtggtcggagcaaattttctatt

SEQ ID NO: 59111 - DNA, 233 bp, Glycine max
  Clone ID: 700675583H1
tcgatgagtccgccaacccctaaaaagcacttcttagttctccctctcccactaaaaaccatagtgatctcgataataattaacatcagccctcactccttcgcgcaccaaacccttccttcctatctctcactaatctaatggaatgcgcagcactgtcgcgcataggcctggtgggcctggcggtgatgggccaaaacctaactctaaacatcgcggaaacggggttcccg

SEQ ID NO: 59112 - DNA, 200 bp, Glycine max
  Clone ID: 700675584H1
tgcctttaccatctcagtctcaactctctccaacaaccacaatggctctcttgggcgccgcctcctcctccgctcgcatcattccctccgtctcactctcttcctcttctcgctccttcttctcactctcatcctcttcttccaaactccaatgcttgagctcctctcctcgtatttcgcacctctttctcaatcagcga

SEQ ID NO: 59113 - DNA, 241 bp, Glycine max
  Clone ID: 700675585H1
cttttcttggtggaattcgaaaatatgctactcccatgatgcccctggatgaagaaattctttctaaggttgcacaagatatggttgaggaatggtttgattgtgttgatgaggaggattcctttgaggaagtttctttaagtgcagcactcaatggtgttgagggtttggactatatggaaagaattcctcttgccacatctgagggttttcctcatgtgctttcacgtaaaaatggtga

SEQ ID NO: 59114 - DNA, 67 bp, Glycine max
  Clone ID: 700675589H1
tagcaacactcaccatttgtacgatggaacccgctaacgagcgcacgtcagtgtcgctgtcacccta

SEQ ID NO: 59115 - DNA, 52 bp, Glycine max
  Clone ID: 700675590H1
caaacatctgttagagagttcgtcatttcccggttagtctttcgagcagttg

SEQ ID NO: 59116 - DNA, 235 bp, Glycine max
  Clone ID: 700675592H1
cttggagatctacaatgaggtggttaatgacttattaaatccagcaggacagaacctaagaatcagataggatgctcagggcacctatgttgagggaataaaggaagaggttgtactctcccctgctcatgcactatcccttattgcagctggagaagagcacaggcatgataggtccacaaacttcgacctactcagcagcaggagccatacaatatttatcctgactatagag

SEQ ID NO: 59117 - DNA, 267 bp, Glycine max
  unsure (1)..(267): unsure at all n locations
  Clone ID: 700675601H1
attggtccttaaacactcatcagtcatcaccatggccaagctagttttttccctttgttttctgcttttcagtggctgctgcttcgctttcagttccagagagcagcctcagcaaaacgagtgccagatccaaaaactcaatgccctcaaaccggataaccgtatagagtcagaaggagggctcattgagacatggaaccctaacaacaagccattccagtgtgccggtgttgccctctctcgctgcatctncaaccgcaacgccct

SEQ ID NO: 59118 - DNA, 262 bp, Glycine max
  Clone ID: 700675602H1
gtcagcattgaatatgatgcatgtacaattccaaatgattgtggttcattggttgtagccaaggttggaaatcacaaacaaattgttggtttccatgttgctggaagcaagggaagactgggatatgcttcactgataccatatgttgagccagttgtgcaagctcaaagtgctgaagtttactttgacttcttccctgtggaggttaatagtcaagagggagttgctcatattggtgaattgaaatctggtgtctatgttc

SEQ ID NO: 59119 - DNA, 264 bp, Glycine max
  Clone ID: 700675603H1
ttcttctcttcgtctcctgattgcttctgtctcctaagatactttcctcttggtacctttaatgtttcaaaatctgagttttttttttctttttgttttctgacagacaagaaagcagggaaaaaatcaaacaaactttcagcaattagttccagattcgcagaacaattatgacggcagcttcctcatccactccatttttgggaatcagagaagaaagccctcagattacaacacaccatcaaccctccacagtttctccaa

SEQ ID NO: 59120 - DNA, 268 bp, Glycine max
  Clone ID: 700675604H1
tacaggaggaaaaacacggaggaaagggaagtgaagaggaacaagatgaacgtgaacacccacgcccacaccaacctcatcaaaaggaagaggaaaagcacgaatggcaacacaagcaggaaaagcaccaaggaaaggaaagtgaagaagaagaagaagaccaagacgaggatgaggagcaagacaaagagagccaagaaagtgaaggttctgagtctcaaagagaaccacgaagacataagaataagaacccttttcacttcaactc

SEQ ID NO: 59121 - DNA, 241 bp, Glycine max
  Clone ID: 700675605H1
gtccacagcaagctgaggatgacaaatgtggggatctaccagaaggacctgctgttaaaattggtgagaactaagatgcaatggatggttggtttagacttgagagagattctgatgatgaattcaataactacaagcttgtgctctgaccacagcaagctgacgatgacaaatgtggggatattgggattagtattgatcatgatgatggaaacaggcgtttggttgtgtctaagaacaa

SEQ ID NO: 59122 - DNA, 261 bp, Glycine max
  Clone ID: 700675606H1
agttgctcatccaaaaccaggatgaaatgatcaagagtggtcggttgtctgaaccatacaaaggaattggcgattgtttcactcgaaccatgaaggatgaaggggtgattgctctttggagaggaaacactgctaatgttatcagatacttccctactcaggctctgaattttgcttttaaggattatttcaagaggcttttcaacttcaaaaaggataaagatggctactggaaatggtttgctgggaatttagcatctg

SEQ ID NO: 59123 - DNA, 255 bp, Glycine max
  Clone ID: 700675607H1
ggatagctggcttctgttatgttagagatttaatagtttaataattaaagaaaagaagaaaaggaacagcttagttctggattgtgcttgttttattgattctccattttagggttcgttgaaagatactgcagaaactgtcggttttattagtaattcagcacaaattcttcggtggagtttttcttgtgtcaactgttataggctgcgtttacgctgtgtttgttaagttgcctggaaattgttcaaattggt

SEQ ID NO: 59124 - DNA, 262 bp, Glycine max
  Clone ID: 700675608H1
tctgttctaaaatcacaaaccctaaccaagaaagttttcaccgcatctccacctattctcaatctccacaaatcgaagaaaagagaatgagtagacgctcgagcagaactgtctacgttgggaatctacctggtgatatccgtgaaagagaagttgaagatttgtttctgaagtatggacacataacacacattgacctaaaggttcccccaagaccacctggttatgcatttgtagagtttgaagatgctcaagatgctga

SEQ ID NO: 59125 - DNA, 259 bp, Glycine max
  Clone ID: 700675609H1
cgtttgagcaattgaacaagcaaagaaggctccttgaacaggacaaaacaaaacaaactggtcttgttgtgttgagcctaattgctatcaatattcaatattttatactattctttattcttattcttccagttatatggtttgtatttgctaatagctcccatcaaaggcccaaaaatgggtatcatcgttgaagcagataacacatataccaagatcctaggaagatggccagtcttttattatggcatgggacaca

SEQ ID NO: 59126 - DNA, 258 bp, Glycine max
  Clone ID: 700675610H1
ccaactaacaataattccttcacttgcagaacttagttctctgttgcatcatcatcatcttcattagtgttagccctaaacttcaccttcaaccatgaccacagtgccaccacacagtgtccaagtgcacacaacaacacaccgctacgaagccggcgtcgtcccgccggctcgttttgaggcgcgcgttacgaagccggcatcaaggcgccctcttccatttaccattccgagagaggtccgacgacctctcaggtt

SEQ ID NO: 59127 - DNA, 261 bp, Glycine max
  Clone ID: 700675611H1
caacaagccatacttacatttggctccctcacccaagcctcagctatccgagttgggtccttccagggagaggaaatctatgccccattcaagagcctgcttccaatggttaaccctgacgacattgtgtttgggggatgggatatcagcaacatgaacctggctgatgccatggccagggcaaaggtgtttgacatcgatttgcagaagcagttgaggccttacatggaatccatgcttccactccccggaatctatgac

SEQ ID NO: 59128 - DNA, 260 bp, Glycine max
  Clone ID: 700675612H1
ctccaatcttgcatatcctttgctttcacaatgctccatcagttcacactcttcgctccgattttttccggcggaaacaacgccggccgttgctcgtttgccggaaattcgtccgtccgtgacgtgaggtcgttgaggtttatgaagcaagcatcgggaagacaatcgaacaatgaacatggtgtttttagcgagccaatggatcgtgccaagcatagggcaactactgcttatggtggtcgtgctcaagaaggtgttct

SEQ ID NO: 59129 - DNA, 258 bp, Glycine max
  Clone ID: 700675613H1
ggctagccaatcaaacactaaatcagttcacgatttcacagttaaagatgccagtcgaaataatgttaatctcgccgattacaaaggaaaggtccttctcattgtcaatgttgcctcacaatgcggcttgactaattcaaactacacagagcttaaccaattgtatgagaaatacaaagggaaaggacttgaaattctggcattcccatgcaatcagtttggggctcaggagccaggaactaatgaagagattgtgga

SEQ ID NO: 59130 - DNA, 259 bp, Glycine max
  Clone ID: 700675614H1
gtttactttgacttcttccctgtggaggttgatagtcaagagggagttgctcacattggtgaattgaaatctggtgtctatgttccactgactacaaaaactaatttgatggaaactcccaaggaatggcaactggatctaccttgtgacaaaattcctagtgtcttgactacaactgatgagagattggtaggcacagaacatgagggatatgatccttttcttggtggaattcagaaatcatgccactcccatgatg

SEQ ID NO: 59131 - DNA, 253 bp, Glycine max
  Clone ID: 700675615H1
taacatgccgcaacttcctgttgccggttgattgtctcttttgaggggatggttctgttccggctagatctagtttccattactgttctataaaactggttctgtttgtttccgtttttatgtaacctgttgtttgtagggaagacaatatgaaactgctattattttaaagctctaaatgttcaatccaactaaatgcccaaaaaaaaaaaattgaacaaaaaaaatcaatgggtataacgtacagtgcaag

SEQ ID NO: 59132 - DNA, 260 bp, Glycine max
  Clone ID: 700675616H1
tggatgaccccaaggttcgttccaagatcttgtctgaagagttcggttgggacaaggatcttgccaagaaaatctggtgctttggccctgagacccttggacccaacatggtggttgatatgtgcaagggagtccagtatttgaatgaaatcaaggattctgtggttgctggattccagtgggcatcaaaagaaggtgctttggctgaagaaaacatgagagccatctgctttgaagtatgtgatgttgtgctgcacgct

SEQ ID NO: 59133 - DNA, 262 bp, Glycine max
  Clone ID: 700675617H1
aacagagaatcgatgacaagaacgcagatccgacggtagatccagccgattccgcttgttcgatcgctacagacccctgtatcggatcattaagcagcgtgtctcgcgcgttctacacgtgttgccgatctcggatgttgtaaaattagtttatgatgtgaagctatggagtggaaaatatgtggatgtaggagatttcgggatgaatggcctcaaaacgctttgtcgtttgtggttattgagtcctgagtgatcttgtcat

SEQ ID NO: 59134 - DNA, 258 bp, Glycine max
  Clone ID: 700675618H1
gttttagcgcaggtcttctagatttaaggaagatgggtaaggaaaaggttcacatcagtattatggtcattggccatgtcgactctgggaaatccactaccactggtcacctgatttacaagcttggaggcattgacaagcgtgttattgagaggtttgagaaggaagctgctgagatgaacaagagctctttcaagtatgcctgggtgctggacaaacttaaggctgagcgtgaaagaggaatcaccattgatattg

SEQ ID NO: 59135 - DNA, 261 bp, Glycine max
  Clone ID: 700675619H1
caattacaaattacactctttgcctcgcaccttcaacttaaccttttctactcataatcttaataacttgctagaagaagatacagaaagagaaaaagtgtgtgtgtgtgagacagagcaatggctggctcgtgggcacgccgttctctgattgttctggctatcatttccttcggatgtttatttgcaatttccattgctaaggaggaagccacaaaattggggacggtcatcgggattgatcttggaacgacctattca

SEQ ID NO: 59136 - DNA, 259 bp, Glycine max
  Clone ID: 700675620H1
ggggatcgaagccggggagcggaggtgcggcgtcggcgcagaacgaagccatagaccggcgagagcgtctccggcgactggctctggagaccatagacttggcgaaggatccctatttcatgcgcaaccacctcggaagctacgaatgcaaactctgtctcactctccacaacaacgagggtaactacttggcccacactcagggcaagcgccaccaaaccaacttggccaaacgtgccgctcgcgaggccaaggacgc

SEQ ID NO: 59137 - DNA, 256 bp, Glycine max
  Clone ID: 700675622H1
attgttttatcacatgctataggataaagaaagaaagatccagttggaagttaaatgttattggataaatttctctcaggtttagagagagttgaagacaacatttcattgataattgagcaaacacaatgaatgctccacctcatcatgacgatgaagacgacaacggtcaagttttccttgatgagtctgacatcatccatgaagttgccatggataatgaagatcttcctgacgctgatgatgattctgaact

SEQ ID NO: 59138 - DNA, 258 bp, Glycine max
  Clone ID: 700675623H1
ggaaatttttcctttgatattaaatctcgctctagattggaaaaagtttcctctacaaaagcacaatttgttagtggaaaaaccttcaaatatgatataattggtgctggttcacattcttcaggagattttcctgaaaaggaagatcaagaaaaacccaaaaagattgataccagattgagacaaagaatagatcctcaatacaatgaggttcaggctcagatggaaacaaatttgtttaaattgtctcttgatgat

SEQ ID NO: 59139 - DNA, 257 bp, Glycine max
  Clone ID: 700675624H1
cggctcgagaggaaaaccatttcttctgaagataaacctttcaacttgagaagccgcgaccccatctattccaacaagcttggcaagttgtttgagattaccccagagaaaaaccctcagcttcgggacttggatgtcttcctcagtgttgtggatatgaacgaggttgctcttcctgttgctgcctctgttgttgttctttaatgccaacaagttcaatgtttgcttctccttcattaatcactagtaccactatg

SEQ ID NO: 59140 - DNA, 251 bp, Glycine max
  Clone ID: 700675625H1
cgaagaatccccaatacccattccggtaaataatataatcgcaatccttcttcactcgcttcgatgccgacagggttactgaagatggcggcgcagaggctcccctcctcgccggggttcaagctggccctcctccgggcccacgcgtcggaggaccaggcccagcaggtggagcccaaggcccgcggcaccccgaccctcaaaaccttccaaatctaccgctggaaaccggagaacactcaaaggccgag

SEQ ID NO: 59141 - DNA, 254 bp, Glycine max
  Clone ID: 700675626H1
gtgaactgagtccagtagagtctgaccaaagtcattctggcgagcaatatgaacaatttgataaaccagtattagcagaagacaaagaaggaaagggtatttgggaaaacaagtttgcacatgatccaggaaaccccccacgaagtttatcaggaaattatttctctgctatccgttttttatgttgtggccctgagaatgaatatgagaaagaggttcaacaagaaatgagatggatcaaagcaaaacacgaa

SEQ ID NO: 59142 - DNA, 252 bp, Glycine max
  Clone ID: 700675627H1
atcggccagcaccaacagcatcggcggcgacagtcactctccgacaacaacacttccgcggcgaaaaatgtctctggtggcgaacgatgatttccagcacattctgcgtgtgctgaacaccaacgtggatgggaagcagaagataatgttcgctatgacctccatcaagggtattggaaggagattcgccaacatcgcttgcaagaaggccgatgttgacatgaacaatagggctggtgagttgagtgctgc

SEQ ID NO: 59143 - DNA, 257 bp, Glycine max
  Clone ID: 700675628H1
attggtccttaaacactcatcagtcatcaccatggccaagctagttttttccctttgttttctgcttttcagtggctgctgcttcgctttcagttccagagagcagcctcagcaaaacgagtgccagatccaaaaactcaatgccctcaaaccggataaccgtatagagtcagaaggagggctcattgagacatggaaccctaacaacaagccattccagtgtgccggtgttgccctctctcgctgcaccctcaacc

SEQ ID NO: 59144 - DNA, 224 bp, Glycine max
  Clone ID: 700675629H1
gggaaaggttccatgtgaacggcacttgcacatgggttagtcgatcgtaagggacggtggaagcccgtctgatagcgctctgtgcgcgtactccgaaagggaatcgggttaaagattgctgaaccgggacgtggcggctgacggcaacgttagggagtccggagacgtcggcggaggacccggtaagagttatctctgctgtttaacaggctgcccaccctgga

SEQ ID NO: 59145 - DNA, 82 bp, Glycine max
  Clone ID: 700675630H1
tgcaatttggaatctgacatactgtgtgaacataattgatctccatgttcctcacgtgaatgcctgtccaattgctccactt

SEQ ID NO: 59146 - DNA, 185 bp, Glycine max
  Clone ID: 700675631H1
atgaaattctgagttctaacgctactaatcctatgctgacgcgacttcttgaaaactgtgagagtctcaaatatctggttgatgagtgtccttttgcatttgtgaactagtatgtaatattttattcacttaaataaagcgcattactatgtgcaatgagtgtgtttaaatatatgcaatttaca

SEQ ID NO: 59147 - DNA, 258 bp, Glycine max
  Clone ID: 700675632H1
ctggtccttaaacactcatcagtcatcaccatggccaagctagttttttccctttgttttctgcttttcagtggctgctgcttcgctttcagttccagagagcagcctcagcaaaacgagtgccagatccaaaaactcaatgccctcaaaccggataaccgtatagagtcagaaggagggctcattgagacatggaaccctaacaacaagccattccagtgtgccggtgttgccctctctcgctgcaccctcaaccgc

SEQ ID NO: 59148 - DNA, 256 bp, Glycine max
  Clone ID: 700675634H1
gcctaaaagaacaacaacaggagcagcaacaggaagagcaacctttggaagtgcggaaatatagagccgaattgtctgaacaagatatatttgtaatcccagcaggttatccagttgtggtcaacgctacctcaaatctgaatttctttgctattggtattaatgccgagaacaaccagaggtacttcctcgcaggttcgcaagacaatgtgataagccagatacctagtcaagtgcaggagcttgcattccctgg

SEQ ID NO: 59149 - DNA, 256 bp, Glycine max
  Clone ID: 700675635H1
agcgacggcgccctttttttttttttttcacaaagtgaatttcataagcatcccttgaaagtggttccaaaacttgctagagttctacaatttagaatttaaaaacttttgtcgttttgaataaggccaaaaaaccaataaaaaaaaaaaaaaaaaaaaaaaaataaaacacataaacttcaaaaaaaaatagaagattggtgaacaaaaaaaaaaaaacctcgaagaggggggccccctcatacgggaaattcac

SEQ ID NO: 59150 - DNA, 259 bp, Glycine max
  Clone ID: 700675636H1
gtttgttgttcctcactgacctcaccatggcgaccagagccaagctttctttagctatcttccttttctttcttttagccttgatttcaaacctagccttgggcaaacttaaagaaaccgaggtcgaagaagatcccgagctcgtaacatgcaaacaccagtgccaacagcaacggcaatacactgagagtgacaagcgaacatgcttgcaacaatgtgacagtatgaagcaagagcgagagaaacaagtcgaagacga

SEQ ID NO: 59151 - DNA, 260 bp, Glycine max
  Clone ID: 700675637H1
cactcgagccgattcggctcgagtacaaggaggccaaggcgcttggagtggataccgttccgagtcctcgttggccctgttacatacctgttgctctccaagcctgccaatggagttgagaaatccttaactctcctctctctccttgccaaggttcttgctgtctacaaggaagttattgctgaccttaaggcagctggtgcttcatggattcacattcatgagtctacgcttgtcttggaccttgagtctgcacaagt

SEQ ID NO: 59152 - DNA, 260 bp, Glycine max
  Clone ID: 700675638H1
aaaaagataagcaacaatcagagcgtgtcgaatcgcaaaatatcatatcaccatcaacagtgactacgtatcgctcctctccttcgtttcgtcttcgatcttcggcatcattctgcgtgtgttcacatcatggccatcgcttcagtggcatttaagtccatggaggaccaccgcaagcagattgagttcgaggaggcgcgtaaagcagggcttgcgccggctgaactcgatgaacattgagatggaatcaatcctcacat

SEQ ID NO: 59153 - DNA, 256 bp, Glycine max
  Clone ID: 700675639H1
gcaaacattgaacttgttggcattaaagaacaacaacagaagcagaaacaggaagaggaacctttggaagtgcaaaggtacagagctgaattgtctgaagacgatgtatttgtaattccagcagcttatccatttgtcgtcaacgctacctcaaacctcaatttccttgcttttggtatcaatgctgagaacaaccagaggaacttccttgcaggcgagaaagacaatgtggtaaggcagatagaaagacaagtgc

SEQ ID NO: 59154 - DNA, 254 bp, Glycine max
  Clone ID: 700675640H1
atcagcatatgagaagaggtctgagtatggtgatcgtgatctcacgaaggcagatttggagatggtgactagattggatccacttcgggtgtatccttatagatatcgcgcagagttttgatggacaatcataaggaagaggaagccattgcggaactctctagagcaattgcatttaaagctgatttgcacctcctgcatctacgtgcagcattccatgaacacaatggagatgtcttaggtgcgctaagaga

SEQ ID NO: 59155 - DNA, 255 bp, Glycine max
  Clone ID: 700675641H1
gtgggagctatagaaattatcattgatagtttcgcaagtcctgactgcaacatagttggtgcaatgcttttggttgatacttatcataccaatcctgaaaatgcagttcgtagtatttttgttgcgcctttcagaggcggaaggcccattcgggtggttacatttccaaataccatcgtgctctttgaaccagacatgaattcaaggtttcagcttttgagtaccactaccaatggtgattttgttcaaggaaaa

SEQ ID NO: 59156 - DNA, 81 bp, Glycine max
  Clone ID: 700675642H1
caaagctgccgccgctgccgttatggccgccagctcttccctagccgccgaccatttcgccaacggagtcgcctatattca

SEQ ID NO: 59157 - DNA, 253 bp, Glycine max
  Clone ID: 700675643H1
ttgtctttgaacactcatcaccatggccaagcttgttctttccctttgttgccttcttttcagtagctgcttcgctctgcgagagcaggcacagcacaatgagtgccagatccataagctgaatgccctcaaaccggataaccgtatagagtcggtacgtgggttcattgagacctggaagcctatcaacaagccattccagtgtgccggtgttgccctctctcgctgcacccttaaccgcaatgcccttcgt

SEQ ID NO: 59158 - DNA, 256 bp, Glycine max
  Clone ID: 700675644H1
caacaacaataacaatggctgcctcactacaagctgcagctaccttcatgcaacccaccaaggttggcatagcctctcgcaacctcaaatctacacaatgcatttctaaggcttttggcttggaacctgctgcagctaaactcacttgctcccttcagcctgatctcaaagaatttgctcaaaaatgtgtcgacgctaccaaaattgcaggattcgcccttgccacctctgctctcgttgtttctggagcaagtgc

SEQ ID NO: 59159 - DNA, 253 bp, Glycine max
  Clone ID: 700675645H1
gaggattccgaacgagcgaccttcttcgtttctcgcaaagtttaagtcatcatgggtcaggaaaagactcacatcaacattgtcgtcattggacatgtcgactctgggaagtcaactaccactggtcatttgatctacaagcttggaggtattgacaagcgtgtgattgagaggttcgagaaggaggctgctgagatgaacaacaggtcattcaagtatgcctgggtgcttgacaagctcaaggctgagcgcg

SEQ ID NO: 59160 - DNA, 258 bp, Glycine max
  Clone ID: 700675646H1
atggagagctgcaagagggacgggtgctgatcgtgccacaaaactttgtggtggctgcaagatcacagagtgacaacttcgagtatgtgtcattcaagaccaatgatacacccatgatcggcactcttgcaggggcaaactcattgttgaacgcattaccagaggaagtgattcagcacactttcaacctagaaagccagcaggccaggcagataaagaacaacaaccctttcaagttcctggttccacctcaggagt

SEQ ID NO: 59161 - DNA, 256 bp, Glycine max
  Clone ID: 700675648H1
gaccgagtgcctcccacgcccggtcgtactcataaccgcatcaggtctccaaggtgaacagcctctggtcgatggaacaatgtaggcaagggaagtcggcaaaatggatccgtaacctcgggaaaaggattggctctgagggctgggcacgggggtcccagtcccgaacccgtcggctgtcggtggactgctcgagctgcttccgcggcgagagcgggtcgtcgcgtgccggtcgggggacggattgggaacgggc

SEQ ID NO: 59162 - DNA, 257 bp, Glycine max
  Clone ID: 700675649H1
cgcgctgcttcaccatacttcctatggaatttaatctagtggtgcgtcaaaaattcttgaattttgtgcgattcattatgaagaaaagggacaaattgagttgccaggttggaatcaatccatattctatggagtggactggtttggcaaatagactgttgagcaagggagatgacattttgtgttgtgactatgctagttttgatggtctgataactaagcaagtcatgagcaagatggcagaaatgataaacagt

SEQ ID NO: 59163 - DNA, 239 bp, Glycine max
  Clone ID: 700675650H1
atctgaagttaattgctttctctttggttcctagctcgcgctctctctacgcacgcctcatcatcccttctcttttcacttgctttgcaggctccattcatgaggtctccgtcgttggctcttcgccccattggtggcctcagttttgatctgtgccggagggacgctatgcttctgaacaagggccttttagcgccagcctctctcataactggcacctctagtgtcgcgttagtttt

SEQ ID NO: 59164 - DNA, 258 bp, Glycine max
  Clone ID: 700675651H1
gtggtgccttatcgctgtggttatcatcttcttcttcctctttcttagatctcttctttctctacgccgcacgccgaaaccatggccggaaaaggagagggtcctgctatcggaatcgatctcggaaccacctactcttgcgtcggtgtgtggcaacatgaccgcgttgaaatcatcgccaacgaccaagggaacagaaccacgccgtcttacgtcggattcactgacaccgagcgtctcatcggtgatgcggccaag

SEQ ID NO: 59165 - DNA, 257 bp, Glycine max
  Clone ID: 700675652H1
gaattgaatcaatggctctgttacaccgagtcatgcacactatcactataccatccatgtatcagcatcagcggtggcaacatgcttggatgctgcctcctctcaccatttggatttgtggcatataatttttcatcttctttaggttccctccttcccttgatctctctttctcatgcattgcccttttgtttctttctttctatctgttttacagtttcaatcacactccgttatggttattacggcgattcttg

SEQ ID NO: 59166 - DNA, 257 bp, Glycine max
  Clone ID: 700675653H1
ctcgagccgctcgtcgaccgcaaaagagaaaaaaacaaaaatgctgagaatcgctgctagcgcgaagacaattgttcgaacggggtcgttggaggcgccaccattggggattagggttctgcctcggctctaccacgagagggtggtggaccactacgataacccccgcaacgttggatccttcgacaagaacgaccccaccgtcggaacgggtcttgtcggagcacccgcgtgtggtgacgtcatgaaactccaga

SEQ ID NO: 59167 - DNA, 254 bp, Glycine max
  Clone ID: 700675654H1
gctccattggtccttaaacactcatcagtcatcaccatggccaagctagttttttccctttgtgttctgcttttcagtggctgctgcatcgcattcagttccagagagcagcctcagcaaaacgagtgcgagattcagaaactcaatgccctcaaaccggataaacgtatagagtcataaggagggctcattgtgacatggaaccctaacatcaagccattccagtgtgccggtgttgccctctctcgctgcac

SEQ ID NO: 59168 - DNA, 256 bp, Glycine max
  Clone ID: 700675655H1
actgctgaaatcaagaagttaggaggtttaaccctaaaggggtctgctgattccatgagcattaaaagtggttctggtgcttcctcatctgttctcgacaaagtagttcatgctgctaatgagaacataggctcacaggaaagctctattgatctagacaaaaagacgtcggaagatggaagtgtgaagaacagttctgtttctgccaaagttagtgatggggccagcagtcttgcaaagacaagtggaagtgcca

SEQ ID NO: 59169 - DNA, 252 bp, Glycine max
  Clone ID: 700675656H1
aatcactctagctgttgcaaatttctactatttttcaatggcttctgcagatgttgagttccgttgctttgttggtgggcttgcttgggtcaccggcaacgatgccctcgagaaagccttttcaatctacggcgacatcgttgaatcgaaggttatcaacgaccgtgagactggaaggtccagatgattcggatttgtgaccttcgcctcagagcagtcaatgaaagatgcgatcgcaggaatgaacggcca

SEQ ID NO: 59170 - DNA, 258 bp, Glycine max
  Clone ID: 700675657H1
cactcactcacaactcagtgaaagagaatccgaggcgaagagaagagaaaaattaagatggaggggaaggagcaggatgtgtcgctgggagcgaacaagttcccggagagacagccgattgggacggcggcgcagagccaagacgacggcaaggactaccaggagccggcgccggcgccactggttgacccgacggagtttacgtcatggtccttttacagagcagggatagcagagtttgtggccacttttctgttt

SEQ ID NO: 59171 - DNA, 80 bp, Glycine max
  Clone ID: 700675658H1
tgcttaaacactcatcagtcatgaccatggtcaagctggttttttcccttgtgtctctgcttttcagttggtggtgcttc

SEQ ID NO: 59172 - DNA, 255 bp, Glycine max
  Clone ID: 700675659H1
ggacaacgttcgtgttgcaaagctcttgaggagggggcttgcataacagtactgtagttcgaggattggttctgaaaagtgatgctgtcgggactataaagcaagcagaaaaggcgaaggttgctgtgtttgctagtggtgttgatacatctgcaactgagactaaaggaactgtcctcatacatacagctgatcagctagaaaattattcaaaaactgaagaggctaaagtagaggagctcatcaaggcagtag

SEQ ID NO: 59173 - DNA, 255 bp, Glycine max
  Clone ID: 700675660H1
actggatctaccttgtgactaaattcctagtgtcttgactacaactgatgtacagttggtaggcacagaacatgagggatatgatccttttcttggtggaattcaaaaatatgctactcccatgatgcccctagatgaagaaattctttctaaggttgcacaagatatggttgaggaatggtttgattgtgttgatgaggaggattcctttgaggaagtttctttaagtgcagcactcaatggtgttgagggttt

SEQ ID NO: 59174 - DNA, 255 bp, Glycine max
  Clone ID: 700675661H1
agagatttctcagttgtcaacacccttcggcacttcagcacagcatgtggcatcatatttctcagaagccatatcagcaaggttggtcagttcatgcttagggatatatgccactttgccacacactcaccaaatccacaaggtggcttcggcttttcaagtgttcaatggtattagtcctttcgtgaagttctcacacttcacagcaaaccaagctattcaagaagctttcgagagggaagagagggtgcacat

SEQ ID NO: 59175 - DNA, 257 bp, Glycine max
  Clone ID: 700675662H1
caaccgtttcgacggtcccattccctccctctccaacctcaccgctctcaagctcctcttcctctcccacaacaaattctccggcaagtttcccgccaccgtcacttccctcccccacctctaccgccttgacctctcctacaacaacctctccggtcagattccggcaactctcaacaacttaaccccacggcgaagaagataaagagaacaacttcgataccggagtttgcaagcgacaaggagatgggatttgc

SEQ ID NO: 59176 - DNA, 255 bp, Glycine max
  Clone ID: 700675663H1
taaaattcttccaccaagttatgggtttccttgtgttgcttcttttctccctcttaggtctctcttctagttccagcatatcaactcatcgttccatattggaccttgacctaaccaagtttaccacacagaaacaggtgtcttcactgttccaactatggaagagtgagcatggacgtgtctaccataaccacgaagaagaggcaaagagacttgagattttcaagaataacttgaactatatcagggacatga

SEQ ID NO: 59177 - DNA, 229 bp, Glycine max
  Clone ID: 700675665H1
caagaacaatcaaacagaagaggctcaacgtcgcagaagcagcagctacaggacagtcaccacaacattcgtcacttcaatgacggtgacgtactcgtgattcgtcctcgtgatgcctactggacctataacactggcgatgaaccagttgttgccatcagtcttcttggcacctctaacttcagtaaccagcttgatcagacccctagggtattctaccttgctggga

SEQ ID NO: 59178 - DNA, 258 bp, Glycine max
  Clone ID: 700675666H1
gagaggtttgatcctatagttgattcaacatctggccgtgatttcattccaaccatgttgtttggaaggaacattcgtggtcaggattttagtggaatatactgtgcagttcttactgtcaatggggatatcgtgtctgctggagtatttcgtgtctttgggtcagaaatagctgagcttccattggttgcgacaactgctgatcatcaaggacagggttattttcagtgcctgttttcttgtattgagacgctactt

SEQ ID NO: 59179 - DNA, 256 bp, Glycine max
  Clone ID: 700675667H1
gagctctcgggtgtttgtagggcttgcttttctgctgatgctgtaaataagcatgttgattttgtgagggagtacaaacaggattttgaacgtgatcttgatccagaaagcattactactttcccatctaccctgtctcaactgactgagcggttgaaacactggaaaaatgttcttcaaagcaatgttgaggataggtttccagcagtattaaagttggaagaagaaagcaaggtgttgcgggactttcacgtta

SEQ ID NO: 59180 - DNA, 253 bp, Glycine max
  Clone ID: 700675668H1
ctctccattgtctttgaacactcatcaccatggccaagcttgttccttccctttgtttccttcttttcagtggctgcttcgctctgagagagcaggcacagcaaaatgagtgccagatccaaaagctgaatgccctcaaaccggataaccgtatagagtcggaaggtgggttcattgagacctggaaccctaacaacaagccattccagtgtgccggtgctgcgctctctcgctggatccttaaccgcaatgc

SEQ ID NO: 59181 - DNA, 254 bp, Glycine max
  Clone ID: 700675669H1
acacaacaaaaaaagacaacccagagagcgcgtcttaataaacgctcttctctgaaaatccccatttcttatcttctttcttcttctctttcgcttcttcgatcttcgatcttcgtcgctgaaaatgagagagtgcatttcaatccacatcgtccaggccgggattcaggttggacacgcctgctgggagctttactgcctcgaatactgcattcagcctgttaggcagatgccaagtgacaagaccgttggtt

SEQ ID NO: 59182 - DNA, 251 bp, Glycine max
  Clone ID: 700675670H1
cagtgattgctgaattgcgggaaagacttcaatcacattcaatgaaatcatatcgatctcgatttcagcgcatctatgatttgtttatgagtgatgatttctcatcgttctcacggattgcgcaacagtttcctcatctgaagcaatggcttggctttaaagctgctgggcatgcggagcttggtcatatagttgagtcccctgttattcgaactgcaacttcaattgttcctttgggatggaatgatgga

SEQ ID NO: 59183 - DNA, 245 bp, Glycine max
  Clone ID: 700675671H1
attttagagcaagtgttgatttggatcgcacgcatcgtattaaaggaatgattaaaatggtggtcacagttggtattcctgacaatactggtataacatgggctctgttctaattctagttgcttttagggtgcgtgccagttctgatatttacccatctgctctcaagactgtgaattatgggatcctgtctgcactaaagtgatgaccatgctactatatccagacccgtgttctgatgcatg

SEQ ID NO: 59184 - DNA, 257 bp, Glycine max
  Clone ID: 700675672H1
tccacgacgaccaagccatggaaagcatgaacatgacgacgacgaggacgaagaagaagatcaacctcgtcctgatcaccctccagatcgaccatgcaggaccgaacaaccagaaccacgtggaagaggatgtcagactagaagtgggggtgatgaacatatttgcaccatgaagcttcacgagaacattgctcgcccatctcgtgctgacttctacaacccacaatctggtacgcattagcagcctcaacagtctc

SEQ ID NO: 59185 - DNA, 254 bp, Glycine max
  Clone ID: 700675673H1
ctctaatgacattgcaccccgtgtgttgccttacgttgttcacaccatcgctaaatacggttagagttcatttatgtggcttggtccaacaccaagggtattcatcttggatcctgacaaattcaaagaaatggctactaaggtctatgattttcaaaagcccgacactagtccacttttaaagcttctagcatcagggtttgcaaattatgatggcgacaagtgggctaaacacagaaagatcgtgagtccag

SEQ ID NO: 59186 - DNA, 257 bp, Glycine max
  Clone ID: 700675674H1
atcacacccaccataataatatctttattgttctcatctactctggtaccatatcaaacacacacacacacaacaacaacaacaatagaccatgtcggagtgcgagcaccacaacgggaataacaggaagatcttccggcaagtgatctggtgcatagtgcgtgttcctcttcctcgtgctgaccacaactcttttgatatgggcaatccttagacccaccacacccaccttcagcctccaagacgtcacggtctac

SEQ ID NO: 59187 - DNA, 254 bp, Glycine max
  Clone ID: 700675675H1
tatcattgatcgtagcattcaagatgcttatattaatgctattcgacgtgcaaagaacttcatctatattgaaaatcagtatttccttggaagctcttttgcctggagtgctgatgatattaagcctgaagacattggtgctttgcatctaatcccaaaggaactttcactcaagattgttagtaagattgaagctggggaaaggtttgctgtgtatgttgtagtcccaatgtggccagagggtgttccagaaa

SEQ ID NO: 59188 - DNA, 254 bp, Glycine max
  Clone ID: 700675676H1
tctcgagccgaatcggctcgagcggctcgaggaacagaataattgtatttgaagattgggaacatgcagaacttcagaaaagcatagaggaagatcaacttgctgagccaaatgaggaaccccaggtcgacttagaagtgccgactttagctgaaactttggagaatcctcaagaggaactggattccaatgcatccgaaatatcagctgttgaagatacccaaattcatgcagaggagaaaccacttgctgaa

SEQ ID NO: 59189 - DNA, 238 bp, Glycine max
  Clone ID: 700675678H1
attggtccttaaacactcatcagtcatcaccatggccaagctagcttcatccctttgtcttctgcattgcagttggtgctgcttcgctttcagttccagagagcagcctcagcaaaacgagtgtcagatcgcataactcaatgctctcaaaccggataaccgtatagagtcagtatgagggctcattgagacatggagccctaacagcaagccattccagtgtgccggtgtagcgctc

SEQ ID NO: 59190 - DNA, 254 bp, Glycine max
  Clone ID: 700675680H1
acctaggcacccagagacgaggaagggcgtagtaagcgacgaaatgcttcggggagttgaaaataagcgtagatccggggattcccgatataggtcaacctttcgaactgctgctgaatccacgggcaggcaagagacaacctggtgaactgaaacatcttagtagccagaggaaaagaaagcaaaagcgattcccgtagtagcggcgagcgaaatgggagcagcctaaaccgtgaaaacggggttgtgggaga

SEQ ID NO: 59191 - DNA, 254 bp, Glycine max
  Clone ID: 700675682H1
ctcgagccgctgtggcagatgtcacaggaagcaacgttgtgtcgggtgcggaggacgaactcatgagaatcctcattctaatgaggaatttcttgccagggtaccatcaggctggtaatggggaatggaatgttgctggcattgcacatagagcttatgatcttgaaggaaagacactaggaaccgttggcgcgggtcaaattgggaagcttgtgctccagaggttgaaacttttagctgtaatcttctttatt

SEQ ID NO: 59192 - DNA, 254 bp, Glycine max
  Clone ID: 700675683H1
taccgaatgagagcatcaaactcttcttcttcgatttccattgcgaacgttactttttcttcttctttctcttcattttcttcgctcttcgatcttcgtccggggactgctccgaataccaccaccaccactcgccgatggccacgatcggaggcttacacgactcccaacgctctcacaacagcgtcgaaaacgaagccctcgctcgaatcggcgtagacgaacacaacaagaagcagaattcgcttctggag

SEQ ID NO: 59193 - DNA, 254 bp, Glycine max
  Clone ID: 700675684H1
ggtggtggcttcttctttgaatccgctttctccaaacttttcaatgaccattttctcaagttggtccctcaagccaacattatagtggtttccgttgagtacagactcgctccagaacaccctctccctgcagcttacgatgattgttgggacgctctcaaatgggtcgcatcccattctactaaagacaccacccccaacaacactgaatcttggttgactgagcacggtgacttcaacagagtgttcatagg

SEQ ID NO: 59194 - DNA, 254 bp, Glycine max
  Clone ID: 700675685H1
ctctccattggtccttaaacactcatcagtcatcaccatggccaagctagttttttccctttgttttctgcttttcagtggctgctgcttcgctttcagttccagagagcaggctcagcaacacgagtgccagatccagaaactcaatgacctcagaccggataaccgcatagagtcagtaggagggctcattgagacatggaaccctggcaacaagccattccagtgtgccggtgttgccctctctcgctgca

SEQ ID NO: 59195 - DNA, 251 bp, Glycine max
  Clone ID: 700675686H1
atagagtcagaaggagggctcattgagacatggaaccctaacaacaagccattccagtgtgccggtgttgccctctctcgctgcaccctcaaccgcaacgcccttcgtagaccttcctacaccaacggtccctcggaaatctacatccaacaaggtaagggtatttttggcatgatatacccgggttgtcctagcacatttgaagagcctcaacaacctcaacaaagaggacaaagcagcagaccacaaga

SEQ ID NO: 59196 - DNA, 247 bp, Glycine max
  Clone ID: 700675688H1
cttaataaataatttaagatactatgatgagagcacggttcccattactgttgctgggacttgttttcctggcttcagtttctgtctcatttggcattgcttactgggaaaaagagaaccccatacacaacaagtgtctccagagttgcaatagcgagagagactcgtacaggaatcaagcatgccacgctcgttgcaacctccttaaggtggagaaagaagaatgtgaagaaggtgaaattccacg

SEQ ID NO: 59197 - DNA, 241 bp, Glycine max
  Clone ID: 700675689H1
cgctctcccaatcgccagtctctgaccagaagagcgaaccacaacggaagagtaaattaccgtcaagcgaatagccgattctccgtcaaagcctccgccacagagattgcctttgaccagcattcccgctctgctatgcaggccggcattgacaagctcgccgacgccgtcggctcactcttggcccaggggataatgcgtgtcgatgatatcgagtcctaagtggttacgcggtgtcaca

SEQ ID NO: 59198 - DNA, 253 bp, Glycine max
  Clone ID: 700675690H1
gctcaacaatcctacttgcaaggattcagcaggaacattttagaggcctcctacgataccaaattcgaggagataaacaaggttctgtttagtagagaggaacggcagcagcaaggggagcagaggctgcaagagagcgtgattgtggaaatctcgaaggaacagattcgggcactgagcaaacgtgccaaatctagttcaaggaaaaccatttcttctgaagataaaccttttaacttgagaagccgcgacc

SEQ ID NO: 59199 - DNA, 253 bp, Glycine max
  Clone ID: 700675692H1
caaaatgatcaaattatatctggtcttgtttccacttttccagtcattatagatacaattttaaaatattggatttatcgttatttaaatcgcgtatctccatcacttgtagtgatttatcattcaatgaatgattgactgacaaaatgattcacttatcaaattttaatttagagttttttagctataaagacaataactttgcatttgcccatctttctaacccccttaaatgaaaaaaggggttccccga

SEQ ID NO: 59200 - DNA, 201 bp, Glycine max
  Clone ID: 700675693H1
gatatttcccttctgagcattgattagtgtggactagttgttgtatactcgatgagtaaggcttctgccactatgcattgctgaacactgcgactaaggggatccttgatgctgcttgatagctacaggtatgcacctgctgcttcggccacactgacatatcagggattataggaacacagagggaaggagatgatgaag

SEQ ID NO: 59201 - DNA, 254 bp, Glycine max
  Clone ID: 700675694H1
ccccaccatgctgacgctgattacctcatcgttatccttaacgggactgccattcttaccttggtgaacaacgatgaccgagactcttacaaccttcaatctggcgatgccctaagagtccctgtaggaatcacatactaatgtggttaaccctgacaacgacgagaatctcagaatgataacactcgccatacccgttaacaaacccggtagatttgagagtttcttcctatctagcactcaagctcaacagt

SEQ ID NO: 59202 - DNA, 252 bp, Glycine max
  Clone ID: 700675696H1
gtcctaataatggttttgaaatgtggagttctgagtgggcaaatcaaacttcatggcatttgagtttccttattgacaatcccaaacagtctacagtttttgatattctcttgggaatttctcaagattttgaaattgctggtaatactcttatgccagctttttctgttccacaggctactgccagatcttctgaaaatgcggaatcctctgcatgatctggaatttgtgttttctttcgcttgttcgttt

SEQ ID NO: 59203 - DNA, 266 bp, Glycine max
  Clone ID: 700675701H1
aatcgttcgaatgggttttagaacatggtgggattgccactgatgatgattatccttacagagctaaagagggtagatgcaaagccaataagatacaagacaaggttacaattgacggatatgaaactctaataatgtcagatgagagtacagaatcagagacagagcaagcgttcttaagcgccatccttgagcaaccaattagtgtctccattgatgcaaaagattttcatttatacaccgggggaatttatgatggagaaaac

SEQ ID NO: 59204 - DNA, 264 bp, Glycine max
  Clone ID: 700675702H1
agagacttgagattttcaagaataacttgaactatatcagggacatgaatgcaaacagaaaatcaccccattctcatcgtttaggattgaacaagtttgctgacatcactcctcaagagttcagcaaaaagtacttgcaagctcccaaggatgtgtcgcagcaaatcaaaatggccaacaagaaaatgaagaaggaacaatattcttgtgaccatccacctgcatcatgggattggaggaaaaaaggtgtcatcacccaagtaa

SEQ ID NO: 59205 - DNA, 263 bp, Glycine max
  Clone ID: 700675703H1
cctaaaccctactcattctccatacctcaacgaagaggttaaagagacggcaacactttgctgtccgccttgaccgagcagagcttcgtcttggccctcgattttgccctaaagtactctcagtcacaacagacaccgtcgtcgtcgtcgtcgtcatcaatggcaccgaagcagaccaaggctgagaagaagatcgcttacgatgcgaactgtgcgacctaatggaggagtacggccagatcctcgttgtgaactccgataac

SEQ ID NO: 59206 - DNA, 263 bp, Glycine max
  Clone ID: 700675704H1
ctcgagcgctaacaataattccttcacttgcagaacttagttctctgttgcatcatcatcatcttcattagtgttagccctaaacttcaccttcaaccatgaccacagtgccaccacacagtgtccaagtgcacacaacaacacaccgctacgaagccggcgtcgtcccgccggctcgttttgaggcgccgcgttacgaagccggcatcaaggcgccctcttccatttaccattccgagagaggtccgacgacctctcaggtt

SEQ ID NO: 59207 - DNA, 218 bp, Glycine max
  Clone ID: 700675705H1
tgctgagaccggggaatctactgttttatatctctttggccagaacaatgacagaagttaaaaagtttcctttcttcttcgagacaagtgtaattagctgtcaaaaaatgcttgtaatttaaatgacatgaagaaagtttctgtagattgtgctttgagcttgatctcatagatcatagaagtatgcgaatatctttgtaaataacaaaaaaacaaaa

SEQ ID NO: 59208 - DNA, 263 bp, Glycine max
  Clone ID: 700675706H1
taccaagcaagttgcaagaaaggccctgttcaactaagaatggaaccggtcataaccatacaggtgcttccatcagtggcagcgcaccggcttctaaggcacaggttgttggttggcctcctataagatcttttaggaaaaactcgatggccacgacaactaacaagaacaatgatgaagtggatgggaaaccaggtgttggcgcactctttgtgaaggtcagcatggatggtgctccgtatcttaggaaggtagatctaaga

SEQ ID NO: 59209 - DNA, 254 bp, Glycine max
  Clone ID: 700675707H1
ttctggtggatttgatatcagtgttatgcagaaggttcaccggactggggattcctcgcatctccctgatgtctcagtggacctagtagttaattcaattgaagattcgaagatgcctattgttgcagcagtagcagggcttgctcttggaggtggcttagaactggctatgggatgccatacccgtgatacggctccaagagctcaattgggtctaccagagctgactcttggtattatgacctggatttaga

SEQ ID NO: 59210 - DNA, 262 bp, Glycine max
  Clone ID: 700675708H1
cttaaacactcatcagtcatcaccatggccaagctagtttttgcccttcggtttctgcttttcagtggctgctgcttcgctttcagttccagagagcagcctcagcaaaacgagtgccagatccaaaaactcaatgccctcaaaccggataaccgtatagagtcagaaggagggctcattgagacatggaaccctaacaacaagccattccagtgtgccggtgttgccctctctcgctgcaccctcaaccgcaacgcccttc

SEQ ID NO: 59211 - DNA, 263 bp, Glycine max
  Clone ID: 700675709H1
tactcactcactgcagatctcaattgcatcgctgtccatggctaccatcgttagcatcaaggcccgccagatcttcgacagtcgtggcaatccaactgtcgaggtggatttgacttgctccgatggtacttttgccagagctgctgttccaagtggtgcatccactgggatttatgaggcccttgaattgagagatggaggatctgactaccttggaaagggagtatcaaaggctgttgacaatgtgaacaccgtcattggcc

SEQ ID NO: 59212 - DNA, 263 bp, Glycine max
  Clone ID: 700675712H1
accactgcccgtcttggatcatttaaaatcttgacggccaaagctattgaggctaatgatgggaagcccctgccactgtatcagaaagctctgtgtgggctgactgctggtgctatcggagcaagtgttggtagtccagcagacttggcactcattcggatgcaggctgatgcaacattacctgctgctcagcgccgaaattacacaaatgccttccatgcactctatcgaattactgcagatgaaggggttttggcgctttg

SEQ ID NO: 59213 - DNA, 264 bp, Glycine max
  Clone ID: 700675713H1
ggaacaacaagatgaagatgaagatgaagacgaagatgatgaagatgaacaaattccctctcaccctcctcgccgaccaagccatggaaagcgtgaacaagacgaggacgaggacgaagatgaagataaacctcgtcctagtcgaccaagccaaggaaagcgtgaacaagaccaggaccaggacgaggacgaagatgaagatgaagatcaacctcgcaagagccgcgaatggagatcgaaaaagacacaacccagaagacctag

SEQ ID NO: 59214 - DNA, 265 bp, Glycine max
  Clone ID: 700675714H1
gtcaagcttctctacaagcgccacaagaacactgctttctcctggctcagaaacatcttccatgactgtgctgttcagagttgtgatgcttcactgttgctggactccacaagaaggagcttgtctgagaaggaaacagatagaagctttgggttgagaaatttcaggtacattgagaccatcaaagaagctttggaaagggaatgcccaggagttgtttcctgtgctgatatcctcgttctctctgccagagatggcattgttt

SEQ ID NO: 59215 - DNA, 259 bp, Glycine max
  Clone ID: 700675715H1
ctcgagcgctactgctgaggtatacatcataacagttttgaaaggtctcaagtatcgactagcagcaggtgcaagattacccaatataatcattttattgcctgtagaggaaacagaagttgtgtctcccaaggggaagaagattattaaccttggaggaagagctggccaagcagttggagcgttattgaggaggcttcagattcctcaccaaggtagtgaatcgaatggaaagcttagaattggtggtttggctctg

SEQ ID NO: 59216 - DNA, 261 bp, Glycine max
  Clone ID: 700675716H1
tctttgaacactcatcaccatggccaagcgtgttctttccctttgtttccttcttttcagtggctgcttcgctctgagagagcaggcacagcaaaatgagtgccagatccaaaagctgaatgccctcaaaccggataaccgtatagagtcggaaggtgggttcattgagacctggaaccctaacaacaagccattccagtgtgccggtgttgccctctctcgctgcacccttaaccgcaatgcccttcgtagaccttccta

SEQ ID NO: 59217 - DNA, 182 bp, Glycine max
  Clone ID: 700675717H1
ctcagtgagagaaactctctctctagaaaccctattgcacgttttgcaatcgaactcgacaatggccaccagcatcctccctcgaagactcatccaggaaacgcagcgtttgctcagtgagccagcaccaggacttagtgcgtcaccttctgcagagaacatgcgctatttcaatgtgatga

SEQ ID NO: 59218 - DNA, 256 bp, Glycine max; identical to SEQ ID NO: 58740
  Clone ID: 700675718H1

SEQ ID NO: 59219 - DNA, 260 bp, Glycine max
  Clone ID: 700675719H1
cggaattcaaaaatatgccactcccatgatgcccctagatgaagaaattctttccaaggttgcgcaagatatggttgaggaatggtttgattgtgttgatgaggaggattcctttgaggaagtttctttaagtgcagcactcaatggtgttgagggtttggactacatggaaagaattcctcttgccacatctgagggttttcctcacgtgctttcacgcaaaaatggtgaaaaaggtaagaggagattcgtatctgggg

SEQ ID NO: 59220 - DNA, 263 bp, Glycine max
  Clone ID: 700675720H1
tctcgagacgtttgaaatttacatacttatgtgattaattagaacaattgcacaaatgtagtaaaacaaagactcattattttcaatttgacccacactaacaagagggactacaaaacaaccttaaaaacctagagactaaaaaaataaatttaggtcatttttattgtctttcaaatttaaatttgacagacaaatcaaatgacctacatttgagaaattataaacatgtttaagcttacaaaacactttatttctatcta

SEQ ID NO: 59221 - DNA, 191 bp, Glycine max
  Clone ID: 700675721H1
ctatcttcgtttctttcacaaccacttcgtcttctccgattctcactagagtcacatcgcgcctccatttcgctgcattccctctgcgttctccaacgacgaaactcatatctcacactctcgcatctgacactctcggtctcacacataccttctaacatcgaaacacccaagatatctttaggttctaa

SEQ ID NO: 59222 - DNA, 190 bp, Glycine max
  Clone ID: 700675722H1
ctcgacacggcacccacacacacagttcgtcggaatgggcagggtgattagcgctcagcgtaacggcgctgggtcgatgttcaagtctcacactcacgaccgctagggtcaggagaggttccgcaacctcgacctcggcgagcgctacggctacctcaagggcgtcgtcaccgacatcatccacgacccc

SEQ ID NO: 59223 - DNA, 261 bp, Glycine max
  Clone ID: 700675723H1
tgggttgagtgtggtatcccttctggatttccactcactgttatctgcaatagcattttcaatgagatgcttatcagatatagttatgaaaagttgttgcgtcaagctaaggctcctagtatgtttctccagtcttttaaaaattttatttctttgtgtgtttatggagatgataatttaattagtgttcatgagtatgttaagccatattttagtggttctaaattgaaaagtttcctagctagtcataacatcaccatt

SEQ ID NO: 59224 - DNA, 141 bp, Glycine max
  Clone ID: 700675724H1
ggctggacctataacactggcgctgaaccagttgttgccatcagtcttcttgacacctctaacttcaataaccagcttgatcgaaccccgagggtattttaccatgctgggaacccagatatagagtacccagagaccatg

SEQ ID NO: 59225 - DNA, 261 bp, Glycine max
  Clone ID: 700675726H1
gttcaatatcctagtataccttaataaataatttaagatactatgatgagagcacggttcccattactgttgctgggacttgttttcctggcttcagtttctgtctcatttggcattgcttactgggaaaaagagaaccccaaacacaacaagtgtctccagagttgcaatagcgagagagactcgtacaggaaccaagcatgccacgctcgttgcaacctccttaaggtggagaaagaagaatgtgaagaaggtgaaatt

SEQ ID NO: 59226 - DNA, 261 bp, Glycine max
  Clone ID: 700675727H1
cctctaaactcatctccagacacattttctcacaactatcacgccccaccaccaccatgtccataaatctacgcacccacgccttcgcgggtaacccgctccgatcccccaaccgggtcgacccgttttcgcccgcctccgcgctcgagaccctcacgacccgaatcctcgacgccgcgcacgtgtcctcaccgtccgtggattttaaggtcttgccttttagaaatgggagggtgctggcttcttcggagagtggtgaca

SEQ ID NO: 59227 - DNA, 264 bp, Glycine max
  Clone ID: 700675728H1
caacaacaataacaatggctgcctcactacaagctgcagctaccttcatgcaacccaccaaggttggcatagcctctcgcaacctcaaatctacacaatgcatttctaaggcttttggcttggaacctgctgcagctaaactcacttgctcccttcagcctgatctcaaagaatttgctcaaaaatgtgtcgacgctgaccaaaattgcaggattcgcccttgccacctctgctctcgttgtttctggagcaagtgcagaaggt

SEQ ID NO: 59228 - DNA, 261 bp, Glycine max
  Clone ID: 700675729H1
aaacaattcaattcaatctgcctcgatcatggagaggaaaacatttgggtttttgttcttgctcctccttgtcttagcttctgatgtgacggtgaagagagcagaggcgaaagattgcttgacaaggaggcacgggttccagggtagatgcttattcgacaggcaatgtgcacatgtgtgcaggagcgatggtttcatcggtggtcagtgccgaggccctcttcgcaaatgcttttgcagcaggccatgttgatcgaaatt

SEQ ID NO: 59229 - DNA, 262 bp, Glycine max
  Clone ID: 700675730H1
gtaggagcttgcattccctgggtctgcacaagctgttgagaagctattaaagaaccaaagagaatcctactttgtggatgctcagcctaagaagaaagaggaggggaataagggaagaaagggtcctttgtcttcaattttgagggctttttactgaataagtatgtactaaaatgtatgctgtaatagctcatagtgagcgaggaaagtatcgggctatgtaactatgactagagcttcaactatgaataaataaatcgac

SEQ ID NO: 59230 - DNA, 263 bp, Glycine max
  Clone ID: 700675731H1
tgagcacatctcagctcatctcggctataggcctgatatgggattctgccagtcgcccgctttcggttttactttcgaaggaaactgtgaatcaggatgataaaggattccagaaagagaaaattctggatagcgttgatgagagacaaaatgatttggtatatgcttcaaccgacattaagtactatcctgttactgagggaggtgcacagattgtgcagggaaaattggatttccctaaggtaatgcagaagatatcagta

SEQ ID NO: 59231 - DNA, 263 bp, Glycine max
  Clone ID: 700675732H1
ctcgagccgctcgagccgattcggctcgagcgcaacacaacaaaaaaagacaacccagaactcgcgtcataataaacgctcttctctgaaaacccacatttcttttcttctttcttcttctctttcgcttcttcgatcttcgatcttcgtcgctgaaaatgagagagtgcatttcaatccacatcggccaggccgggattcaggttggaaacgcctgctgggagctttactgcctcgaacacggcattcagcctgatgggcag

SEQ ID NO: 59232 - DNA, 258 bp, Glycine max
  Clone ID: 700675734H1
tccgactcttagccgccgatctctcagggcttgcatcttctcaggtaagctgtgaagatgtacacatcaaggaagaaaatccacaaggataaggatgctgaaccaactgaatttgaagagtcagttggacaggcattgtttgatctgacaaataccaatcaggagcttaaaagtgatctgaaggatttatacataaactcagccgtgcaagttgatgtttctggaaaccgcaaggctgttgttattcatgtcccttac

SEQ ID NO: 59233 - DNA, 259 bp, Glycine max
  Clone ID: 700675737H1
cttaattattaacacttccttagttcaatatggggaagcccttcactctctctctttcttccctttgcttgctactcttgtcgagtgcatgctttgctattagctccagcaagctcaacgagtgccaactcaacaacctcaacgcgttggaacccgaccaccgcgttgagtccgaaggtggtttgattcaaacatggaactctcaacaccctgagctgaaatgcgccggtgtcactgtttccaaactcaccctcaaccg

SEQ ID NO: 59234 - DNA, 259 bp, Glycine max
  Clone ID: 700675738H1
gcagaaagagtcacaaatgctctacgcttgatctctccaaagagatctttacaccaaggctcgtcttccttatcaagatcaaaatcaacagggtcctctattgattctcatagaactgctgctgttgaggactgcattgagttcatccactcttccttttccagatcaaattcatcaaccgaagcaccccgccaagattctattcaagctccttgagttgagatgcttgcaatcatgtgcttgctactatgcttaggtt

SEQ ID NO: 59235 - DNA, 208 bp, Glycine max
  Clone ID: 700675740H1
taccttaatagataatttaagatactatgatgagcgcacggttccgattactgttgctgagacttggattcctggcttcagtttctgtctcaattcgcattgcttactgggacaaagagaaccccaaacacaacaagtgtctccagagttgcaatagcgcgcgagactcgtacaggatccaagcatgccacgctcgctgcaacctcct

SEQ ID NO: 59236 - DNA, 258 bp, Glycine max
  Clone ID: 700675741H1
gatgggcaggtcatcaccattggcgatgagcgtttcagatgtccagaggttctgttccaaccatccatgattggaatggaagcttcaggcattcacgagacaacatacaactccataatgaagtgcgatgttgatatcaggaaggacctctatggtaacattgttctttcaggaggaacaaccgtgttccctggtattgctgacagaatgagcaaggaaatttcggcattggcacccagcagcatgaagatcaaggtt

SEQ ID NO: 59237 - DNA, 259 bp, Glycine max
  Clone ID: 700675742H1
gaagccacaacagcaatcaagcagaagaggctcaaggtcgcagcagcaactacaagacagtcaccagaagattcgtcacttcaatgaaggagacgtactagtgattcctcctggtgttccttactggacctataacactggcgatgaaccagttgttgccatcagtcttcttgacacctccaacttcaacaatcagcttgatcaaaaccccagagtattttaccttgctgggaacccagatatagagcacccagagacc

SEQ ID NO: 59238 - DNA, 257 bp, Glycine max
  Clone ID: 700675743H1
ggggatcgaagccggggagcggaggtgcggcgtcggcgcagaacgaagccatagaccggcgagagcgtctccggcgactggctctggagaccatagacttggcgaaggatccctatttcatgcgcaaccacctcggaagctacgaatgcaaactctgtctcactctccacaacaacgagggtaactacttggcccacactcagggcaagcgccaccaaaccaacttggccaaacgtgccgctcgcgaggccaaggac

SEQ ID NO: 59239 - DNA, 257 bp, Glycine max
  Clone ID: 700675744H1
caagtaccctaaggcgccgcacaaacatattcacaagaagatgaggaaaacactcttcgtcgcaccaacgtcagtgcttgtgtcacgtttaagtgttttccatttgcgtccagccccacccatcttcgaatttaacacgatttttgggtcccgtgtgaagatgaagcgtgaccttaatgctattacccttttcaagcacatgcatgttaaggggattgttggaattgttgaaccaggtcttggtattttcaagatct

SEQ ID NO: 59240 - DNA, 261 bp, Glycine max
  Clone ID: 700675746H1
gtagaggaaccctagctagggtttggaagaagctgatccgagaagatggtgcagcgtctcacctaccgcaaacgccacagctatgctaccaaatccaaccagcacagagtcgtcaagactcccggtggcaagcttgtttatcagaccacgaagaagagggccagcggacccaagtgccctgtcactggaaagaggattcaagggattccacatttaaggccagcagagtataatagatcaaggttacacagaaaccgaagg

SEQ ID NO: 59241 - DNA, 258 bp, Glycine max
  Clone ID: 700675747H1
cttgggtttagcacagttaatgagatggttggccattccgatatgcttgaatttgataaggacgttgttaagagcaatgaaaaactagagaacattgacctctctctattgcttagacctgcagctgaactgtggccagtagctgctcaatactgtgtgcaaaaacaggatcatggtttggacatggccttggatactaagctcataagtctgtctaatgctgctttggaaaagggtcttccagtatacattgaaact

SEQ ID NO: 59242 - DNA, 230 bp, Glycine max
  Clone ID: 700675748H1
ctctccattggtccttaaacactcatcagtcatcaccatggccaagctagttttttccctttgttttctgcttttcagtggctgctgcttcgctttcagttccagagagcagcctcagcaaaacgagtgccagatccaaaaactcaatgccctcaaaccggataaccgtatagagtccgaaggagggctcattgagacatggaaccctaacaacaagccattccagtgtg

SEQ ID NO: 59243 - DNA, 256 bp, Glycine max
  Clone ID: 700675749H1
ctcagtgagagaaactctctctctagaaaccctattgcacgttttgcaatcgaactcgacaatggccaacagcaacctccctcgaagaatcatcaaggaaacgcagcgtttgctcagtgagccagcaccaggaattagtgcctccccttctgaagagaatatgcgatatttcaatgtgatgatcctcgggccaacccagtcgccttatgaaggaggagttttcaagttagaactatttttgccagaagaatatcca

SEQ ID NO: 59244 - DNA, 245 bp, Glycine max
  Clone ID: 700675750H1
ctcattcattcgttcatcatggttcggttcagcaacaacgtgatcggactcctgaacttcctgaccttcctcctctccatcccgatcctggtggccggagtgtggctgagcaagcagggcgccaccgagtgcgagcggtggctggagaagccggtgatcgcactcggcgtcttcctcatgctcgtctcactcgccggcctcgtcggcgcgtgctgtcgcgtgtcgtggctcctctggctctacct

SEQ ID NO: 59245 - DNA, 254 bp, Glycine max
  Clone ID: 700675751H1
aagtgattagaaatagaggcattcctgctgatgttcttgcaaagcgagctcatgaatttgaaaaacatgttgctcatgaaagcctcaaggatcaaattcctgctgttgacaagttgtattctactaaggttaataagtttgcaaaaattatgaaccttagacaaagtgttgttggtgatcttaaacttcttactgatgggaagttgtatgagggtaagcatattcctgtatctaatattagtgcaggggaaaat

SEQ ID NO: 59246 - DNA, 256 bp, Glycine max
  Clone ID: 700675752H1
actcgagccgattcggctcgaggtataccttaataaataatttaacttactatgatgagaacacggttcccattactgttgctgggacttgttttcctggcttcagtttctgtctcatttggcattgcttactgggaaaaagagaaccccaaacacaacaagtgtctccagagttgcaatagcgagagagactcgtacaggaaccaagcatgccacgctcgttgcaacctccttaaggtggagaaagaagaatgtg

SEQ ID NO: 59247 - DNA, 255 bp, Glycine max
  Clone ID: 700675753H1
ctcgagccgaatcggctcgaggcaagagaaaaaataccaaccatggcaaccatttctactgctcaaccaagaggatcctactcctatggaacctcctatggagcaccctatggaaccacctatgagaccaacagcagcattaacaaccctccttcacgccaaaccgtgaagttcataactgctgcaactattggcatcacactcttactcctgtctgggttgaccctcacaggcactgtcataggtttgatcatt

SEQ ID NO: 59248 - DNA, 255 bp, Glycine max
  Clone ID: 700675755H1
atcatattcgaaatttgatcttacaaaacagcaaagtgatactgcctataatcttccctgctatggagaaaaatatacgggaccattggaatcaagctgttcagagcttgaccatgaatgttagaaaaatattctctgatgctgaccaggcactttttgatgaatgcttgaagagattccaagaagaagaaatcaaggatagggagaagcaagaaaagcgagaatccatatggaaacaactggaagatgttgctg

SEQ ID NO: 59249 - DNA, 254 bp, Glycine max
  Clone ID: 700675756H1
tatcactctagctgttgcaaatttctactatttttcaatggcttctgcagatgttgagttccgttgctttgttggtgggcttgcttgggtcaccggcaacgatgccctcgagaaagccttttcaatctacggcgacatcgttgaatcgaaggttatcaacgaccgtgagactggaaggtccagaggattcggatttgtgaccttcgcctcagagcagtcaatgaaagatgcgatcgcaggaatgaacggccagg

SEQ ID NO: 59250 - DNA, 256 bp, Glycine max
  Clone ID: 700675757H1
cggctcgaggctttatcttctgtaccttctgtaacacttgcttctgaaattttgccagtatcagtaacaaataaggcacccattgtttcaacttcagcagccatgttagcttccaacttactatcactgaccatttctggtccagatataaatgctatagtgccacccatctccagaaaactgcatgcaatttcaggttcaagcttgccctatcaaactgtatcccagttgtcttccacagctttgggatcatcaa

SEQ ID NO: 59251 - DNA, 256 bp, Glycine max
  Clone ID: 700675758H1
gacacgtcaagaatttgctgagttctacaaaagtgcccttctctatttggcatacacatcagtggaatctctctctgattcattcaagctggatctggcatttgatttgtccctctctgcccttcttggggataacatctacaacttcggagagctacttgcccatcctataattaagagccttatggggacaaaggtggaatggctttactacattctgcaggcattcaatgctggtgatttattacaatatcaa

SEQ ID NO: 59252 - DNA, 257 bp, Glycine max
  Clone ID: 700675759H1
gtgagatgcctggcattatgagccaaatgccgccactgcaagttaccattaacgaggatcttgcaagtagtattctgcctaatagaacatagcgggcaaagtgctgactccatcaatatttccaacacaaatctaagtgcatcagtgtagagaggttcgcgttcttagctgcaactgttttggtgctagctacatgacattgaggagctagggagtatctcaggactttccagagtttctaatccatctttgatctt

SEQ ID NO: 59253 - DNA, 256 bp, Glycine max
  Clone ID: 700675760H1
cccaattacccttcccaattttcaccaaaacctaatactcccacaccaatcttcgatcatggacgccgattcacaacctcaacaactcgaagagagaacagaggagcaagaactgaagtacctggaattcgtgcaattcgcgaccatacaggctctgatgcgctgcgccatcctctactcatacgccaaggagcgcgcgggtcctctgaagcccggtgtcgacaccgtggaggaggccgtgaagaccgtcgtggct

SEQ ID NO: 59254 - DNA, 257 bp, Glycine max
  Clone ID: 700675761H1
ctagaaatccagcaatgtctggtggttattctcagcaaggttaccaagctcggccacccactagctggggtccccctgctgctcctatgcaacaatctggttatggctatgtgcagccaggagcatactctggtccaccccagtataacatgcctcagcaacaatatgcaggctatcctccccagtcatctggtggatattctgccaccaactgggatcagtccactgccccacagcagcagtcaacccatgcaggg

SEQ ID NO: 59255 - DNA, 259 bp, Glycine max
  Clone ID: 700675762H1
gaaatggcattgatgagaccatttgcacaatgagacttcgccaaaacattggtcagaattcatcacctgacatctacaaccctcaagctggtagcatcacaaccgccaccagccttgacttcccagccctctggcttctcaaactcagtgcccagtatggatcactccgcaagaatgctatgttcgtgccacactacaccctgaacgcgaacagcataatatacgcattgaatgggcgggcattggtacaagtggtgaa

SEQ ID NO: 59256 - DNA, 258 bp, Glycine max
  Clone ID: 700675763H1
attggtccttaaacactcatcagtcatcaccatggccaagctagttttttccctttgttttctgcttttcagtggctgctgcttcgctttcagttccagagagcagcctcagcaaaacgactgccagatccaaaaactcaatgccctcaaaccggataaccgtatagagtcagaaggagggctcattgagacatggaacccgaacaacaagccattccagtgtgccggtgttgccctctctcgctgcaccctcaaccg

SEQ ID NO: 59257 - DNA, 256 bp, Glycine max
  Clone ID: 700675764H1
tgtataacttgtatgtacgtttgttgcatgggttaagcaaaatcgatcactggacgaagctgatatagttctttggtacgtatttggagtgacacacattcctagattggaagactggcctgttatgcccgtggaacgcattggtttcatgcttatgccgcatgggtttttcaattgctcgcctgctgttgatgttccaccaaaccaaagtgatttggatgacaaagagaatggcctgccagccaagcctattcag

SEQ ID NO: 59258 - DNA, 256 bp, Glycine max
  Clone ID: 700675765H1
gcatcagcaaagaaagccaaagatttcttgcctttccttcaccgaagtagaaaaatccctgctgttgtggaatatgtccttggtggccatcgctttacattgttaattccaaaagagacttgcagtattgccttttcattttctggtgtcagatgtcctggtcgcgatgagccatattctgacgcagccatcgcactcatgaggcggaaaataatgcagagagatgttgagattgaggtagagactgttgaccgaa

SEQ ID NO: 59259 - DNA, 264 bp, Glycine max
  Clone ID: 700675161H1
gagattcccgggttgtcctagcacttatcaagagccgcaagaatctcagcaacgaggacgaagccagaggccccaagaccgtcaccaaaaggtacatcgcttcagagagggtgatttgatcgcagtgcctactggtgttgcatggtggatgtacaacaatgaagacactcctgttgttgccgtttctattattgacaccaacagcttggagaaccagctcgaccagatgcctaggagattctatcttgctgggaaccaagagca

SEQ ID NO: 59260 - DNA, 265 bp, Glycine max
  unsure (1)..(265): unsure at all n locations
  Clone ID: 700675163H1
cgagcttgttgctcgtcttagtttctgtgttgtgtcatttttattgccatatcctaattaaacttcaccctcaaaatgagtgatcccacactagcacaatcacacctagtcgaagtccacacaacactcgaaaaagttgttaccacacacaaccataaccatagaccctcaataaatgcctcaggtaataagaagaaaattgtgggggtgttctacaaagggaatgagtatgctanattgaaccccaatttcgtggggtgtgttg

SEQ ID NO: 59261 - DNA, 125 bp, Glycine max
  Clone ID: 700675164H1
ctctagcctatctcttggaggatatgcttgatatctatgcggccatgaataatgggtgtcgcgtgacttggttacctgttctggactatttctgataactcggactgcgctgatggatatcgtcg

SEQ ID NO: 59262 - DNA, 261 bp, Glycine max
  Clone ID: 700675166H1
attcggctcgagcggaaagagtggaggatgatcttggttacgatggtgatgacttctagagagtggtgtgatgtttcaggaggaggaggaggaaaaaaaaaacaaggaataataatattttaagttttttaattgatttttctttttgtcagtttctttggcgttcgagttatatcttttagtgttttcttaatgatatcgttaatgatcttatcgatgcttaaaaaaaaaaaaaaaacatataaaaaaaaaatggggggg

SEQ ID NO: 59263 - DNA, 252 bp, Glycine max
  Clone ID: 700675168H1
gttcaatatcctagtataccttaataaataatttaagatactatgatgagagcacggttcccattactgttgctgggacttgttttcctggcttcagtttctgtctcatttggcattgcttactgggaaaaagagaaccccaaacacaacaagtgtctccagagttgcaatagcgagagagactcgtacaggaaccaagcatgccacgctcgttgcaacctccttaaggtggagaaagaagaatgtgaagaa

SEQ ID NO: 59264 - DNA, 255 bp, Glycine max
  Clone ID: 700675169H1
aaaaattcttccaccaagttatgggttaccttgtgttgcttcttttctccctcttaggtctctcttctagttccagcatatcaactcatcgttccatattggaccttgacctaaccaagtttaccacacagaaacaggtgtcttcactgttccaactatggaagagtgagcatggacgtgtctaccataaccacgaagaagaggcaaagagacttgagattttcaagaataacttgaactatatcagggacatga

SEQ ID NO: 59265 - DNA, 257 bp, Glycine max
  Clone ID: 700675170H1
attgtctttgaacactcatcaccatggccaagcttgttctttcccattgtatccttcttttcagtggctgcttcgctctgagagagcaggcacagcaaaatgagtgccagatccaaaagctgaatgccctcaaaccggataaccgtatagagtcggaaggtgggttcattgagacctggaaccctaacaacaagccattccagtgtgccggtgttgccctctctcgctgcacccttaaccgcaatgcccttcgtaga

SEQ ID NO: 59266 - DNA, 253 bp, Glycine max
  Clone ID: 700675171H1
gtgtttttagctctctgattgcaaaagctgctcaaacaaagttatccaaagacaattttttacaatctgttgagagtagcaattctaccaggaattccagatcagaaattatatcttctagaaaaattgatgctggtggattatcccaagcaactgctagaagaattttggaagttatagatgactcactcccatctgcaatcccaccattatctccacccagccttgatcatgctgaccttattatatccta

SEQ ID NO: 59267 - DNA, 261 bp, Glycine max
  Clone ID: 700675172H1
attcggctcgaggtttgttgatcctcactgacctcaccaaggcgaccagagccaagctttctttagctatcttccttttctttcttttagccttgatttcaaacctagccttgggcaaacttaaagaaaccgaggtcgaagaagatcccgagctcgtaacatgcaaacaccagtgccaacagcaacggcactacactgagagtgacaagcgaacatgcttgcaacaatgtgacagtatgaagcaagagcgagagaaacaag

SEQ ID NO: 59268 - DNA, 87 bp, Glycine max
  Clone ID: 700675173H1
ctcgagtagttctagatcgcgagcggccgctcgcagtctaggaaccagccaagcgcgatgagcacttgtgcgagtcaacggttattc

SEQ ID NO: 59269 - DNA, 262 bp, Glycine max
  Clone ID: 700675174H1
aggtggactgaaatcggtggagaacgcgcacgatgattcggtgtgggcggtcacctgggtacccgcaaccgccaaccgaccaccgctcctcctaaccggttccctcgacgagaccgtcaggctctggcgctccgacgacctcgttttggaccgcaccaacaccggccactgcctcggcgtcgcatccgtcgccgcccaccccctcggctctgtcgccgcctcctcctccctcgacagcttcgtccgcgtcttcgatgtcgat

SEQ ID NO: 59270 - DNA, 269 bp, Glycine max
  Clone ID: 700675175H1
gctcgagcttcttcgtctcaaatctcttcgttccttcgattcgttccatttcttccaaaatggccaaagacccagttcgcgttctcgtcactggagctgcagggcaaattgggtatgctcttgtccctatgattgctaggggagtgatgttgggtcctgaccagcccgtgatcctccacatgcttgacattcctccggcagcagagtcattgaatggggttaaaatggaattggtggatgctgcattccctcttcttaaaggtgttgtt

SEQ ID NO: 59271 - DNA, 259 bp, Glycine max
  Clone ID: 700675177H1
gatagcactttccttatcttttccgaatccgaggagtggcagtagtgtgtggtttttcacaatcattacctcgtttcagctcaattttgttaattgggcttccattcattaaagtttacaagtttgcggctttcaaacgattatatggggagttgtgtgtctaagaatcatgctaaggataatgattctgatcatgatgtggattttgctgctgggaatgtgaaacttattaccaccaaagaagcgtgggaccaatctt

SEQ ID NO: 59272 - DNA, 137 bp, Glycine max
  Clone ID: 700675178H1
gctcgagatcagtggtcatgcgtatgtcaagccgtactttagtggttctcaagtgatacagcttctagctggtcataatatcaccattactgatggtattgacaggactagtgcaacgatgcaatttaggaagttag

SEQ ID NO: 59273 - DNA, 250 bp, Glycine max
  Clone ID: 700675179H1
agcgattcggctcagcgcacactctctgctcctagggtatctccttcgagtgagggtaatggctcccaaaccgcatagtacgggtctgtttgttggactgaacaagggtcacgtcgtcaccaagaaggaattgcccccacgcccctcagatcgtaaggggaaaacaagcaagagggtgcactttgtgaggaacctcataagagaggttgctggttttgcaccctatgaaaagcgtataactgagttgctg

SEQ ID NO: 59274 - DNA, 270 bp, Glycine max
  Clone ID: 700675180H1
ctcgagcataaaattcttccaccaagttatgggtttccttgtgttgcttcttttctccctcttaggtctctcttctagttccagcatatcaactcatcgttccatattggaccttgacctaaccaagtttaccacacagaaacaggtgtcttcactgttccaactatggaagagtgagcatggacgtgtctaccataaccacgaagaagaggcaaagagacttgagattttcaagaataacttgaactatatcagggacatgaatgcaaa

SEQ ID NO: 59275 - DNA, 246 bp, Glycine max
  Clone ID: 700675181H1
gggcaccattcctcagtccatttcacagcaaactgtttggaatcaaatggcaacagtgagaacaccattgaattttgattctagcaagcagagcttttgtcaattttctattgaccttctcggtggaggaattttagtggacaaaactggagattggatcacacttatacaaaattctccaattagtaacttgttgagagttgctgcttggaagaaaggttgtttaatggtcaagattgtgatgtc

SEQ ID NO: 59276 - DNA, 251 bp, Glycine max
  Clone ID: 700675182H1
cggctcgagctgtatttgacattgtgaatgctcgagaaaagcagaggaaggtcacgataagtgatttggctattgtatccaatgggggtaaggggacatttcatgtggaggacaaaccagtggatgctgtgtcctttgcagctaatggtaatgtggaagaggtggtactttctcctgaaaatggaaatgtggagttgtcttatccagacttggtaaaactttgtaaagagatggatgctgctgggcttcac

SEQ ID NO: 59277 - DNA, 254 bp, Glycine max
  Clone ID: 700675183H1
gaaaatttgtttttttttccgcccatttggtgtgaatgtcgtatttttcgcttttaatgttggagggtattgttaaaattgttaattgatgcagttctgttgcatgtgacataggtagtggagagaggccttggaagaattcagatgctagacttgtgcttgaagatggttcaatttggattgcataatcgtttggtgcttcagggacccaagttggcgaggttgttttcaatacatcattgacagggtatcaa

SEQ ID NO: 59278 - DNA, 247 bp, Glycine max
  Clone ID: 700675185H1
cattgtctttgaacactcatcaccatggccaagcttgttctttccctttgtctccatctcttcagtggctgcttcgctctgagagagcaggcacagcaaaatgagtgcgagatccaaaagctgaatgccctcaaaccggataaccgtatagagtcggaaggtgggttcattgagacctggatacctaacaacaagccattccagtgtgccggtgttgccctctctcgctgcacccttaaccgcaatg

SEQ ID NO: 59279 - DNA, 254 bp, Glycine max
  Clone ID: 700675186H1
gcaatagtgatggtggcagtgcagcttctggtggaggtgagtcccaaggcagaggctgtgacttgtacccctgtggagctgagtccttgtttgggggcaataacttcctctcaaccaccatcaacaatttgttgccagaaggtgagggaacaaaggcaatccctctgtggttacctcaaaaacccaagtctaaggccatatgccaattctcctggctccagaagggttgctagctcttgtggggttccctttcc

SEQ ID NO: 59280 - DNA, 71 bp, Glycine max
  Clone ID: 700675187H1
taaaagctgctaaaataaaatataaaaaaagaaagaaatttcaaaaataaaagctaagtgtgtgttatttt

SEQ ID NO: 59281 - DNA, 128 bp, Glycine max
  Clone ID: 700675189H1
ctatgatttttctggactcttgtattctgagctgaactaactctgttcttccctcgtatagtgaagtgcataataaggacatagaaccttgcgtggacatggcaacaacagcgttgtccacgaacagt

SEQ ID NO: 59282 - DNA, 138 bp, Glycine max
  Clone ID: 700675192H1
tcggctcgagacaacttctctctcacactcactttctctctctataactctttctcacccgctaggacttccttttcatcgcatcttgagtttgcaacctcgtcttgtgatttccatggagggtgctgggatggaaga

SEQ ID NO: 59283 - DNA, 138 bp, Glycine max
  Clone ID: 700675193H1
tcggctcgagctctatgtctcaaagatgattccagcatctgacaaggcgagatttatttgcttatggtcgtgtattctctggcagaatctcaactgagttgaaggtgaggattatgggaccaaattatgtccctgggg

SEQ ID NO: 59284 - DNA, 125 bp, Glycine max
  unsure (1)..(125): unsure at all n locations
  Clone ID: 700675195H1
ggctcgagaacgaggaaaatcattccaatacacatggcttcagnnaggcaagcgttaatgcttattctcttaacaacattcttctgcaccataaagccttaacaggccagtactactggtggcat

SEQ ID NO: 59285 - DNA, 267 bp, Glycine max
  Clone ID: 700675196H1
ggctcgaggagacataatacccagttttttgtggaatattttgcattggatcttgtaatgaatagtgatggcacttgccaaggagtgattgccttgaatatggaggatggaacactacatcgtttcaaagctgcttcaacaattttggccacatggggttatggtagagcatacttctctgcaacctcagcacatacttgcactggagatggcaatgccatggttgcacgtgctgggatccctcttgaggatttggagtttgtacaa

SEQ ID NO: 59286 - DNA, 274 bp, Glycine max
  Clone ID: 700675201H1
agaagtatgctttgattcgtgataacttctctacccttgaacaggtgactacagcactgaggatagaaggattagaatcatcaaatctcatccttggaattgattttacaaagagcgatgaatggactggcagaatctcattcaatacgagaagcctgcatgctattggaagtacacctaaccctcacgagaaggccatctctattaatggccagacattggctcactttgatgatgataacttgattccatgttttggatttggtgatgctac

SEQ ID NO: 59287 - DNA, 271 bp, Glycine max
  Clone ID: 700675202H1
cagaaaacctaatttctcaaatttgatttcgcaccaaattttcctcactaaaatgtctggtcgtggaaagggtggcaagggtttgggaaagggaggtgccaagaggcacagggaggtactgcgcgataacattcaaggaatcacgaaacctgcgattcgtaggttagcgagaagaggtggcgtgaaaaggatcagtggtttgatctacgaggaaaccagaggagttctgaagatattcttggagaacgtgattcgtgatgctgtgacctac

SEQ ID NO: 59288 - DNA, 271 bp, Glycine max
  Clone ID: 700675203H1
ctcacgcagtcgcagtgagtgaaaacgaaaaccctaattgcggtattcttagtgccttcgagagaaagaatcaatggcagataatcttgttctccgtggcaccatgcgcgcccacaccgacgttgtgacggcgattgccactcccatcgacaactccgacatgatcgtcaccgcctcacgcgacaaatccatcatcctctggcatcttaccaaggaggacaagacttacggtgtcccccgccgccgcctcaccggccattctcattttgtt

SEQ ID NO: 59289 - DNA, 266 bp, Glycine max
  Clone ID: 700675204H1
cctagacaaggtttctgtcccggcattgctggttctcgaggttgagcgtgtccttaagccaggtggcgttggtgtcttccttgtaggcaccacaagttctcaccccaatgacatgataagagcagccacacctgtgtcctcgttattaaggtcttccaatgttgtgcatgttggttctgtcaacgaccataaccttgttgttttcaagaaacgagttgaaaacgctactttgttttaccaacatggtttacccgctgattgtccca

SEQ ID NO: 59290 - DNA, 268 bp, Glycine max
  Clone ID: 700675206H1
caatttttctgggtgtgtcgagccagggttcatcttaaagtttgttccttcttttttttttcaatcgttttaccctcaggcaacattcttcttcttccgatgaaaaggaacatggatgctccggttaagaaaaaggtattgtctcgtcctagcttgagtcctcagaagaaagacaagtgcatagtttttccccttgtgaggtataatgaattccggcagcctgtttgccaggcttgtaatgtagttatgttggagtctatacgtgcac

SEQ ID NO: 59291 - DNA, 267 bp, Glycine max
  Clone ID: 700675207H1
tctatatcaattttggttaagagtcttgaaaaagcaagagaaaaaaaaataccaaccatggcaaccatttctgatcaacctagagggtcctactcctatggaacctcatatggagcaccctatggaaccacgtatgagaccaacaccagcattaacaacccaccttcacgccaaacagtgaagttcataactgctgccactattggcatcacactcttgctcctgtctgggttgaccctcacaggcactgtcataggtttgatcatt

SEQ ID NO: 59292 - DNA, 267 bp, Glycine max
  Clone ID: 700675208H1
gttcaatatgctagtataccttaataaataatttaagatactatgatgagagcacggttcccattactgttgctgggacttgttttcctggcttcagtttctgtctcatttggcattgcttactgggaaaaagagaaccccaaacacaacaagtgtctccagagttgcaatagcgagagagactcgtacaggaaccaagcatgccacgctcgttgcaacctccttaaggtgaagaaagaagaatgtgaagaaggtgaaattccacga

SEQ ID NO: 59293 - DNA, 269 bp, Glycine max
  Clone ID: 700675209H1
gttcaatatcctagtataccttaataaataatttaagatactatgatgagagcacggttcccattactgttgctgggacttgttttcctggcttcagtttctgtctcatttggcattgctttctgggaaaaagagaaccccaaacacaacaagtgtcttcagagttgcaatagcgagagagactcgtacaggaaccaagcatgccacgctcgttgcaacctccttaaggtggagaaagaagaatgtgaagaaggtgaaattccacacaa

SEQ ID NO: 59294 - DNA, 264 bp, Glycine max
  Clone ID: 700675213H1
aagctctcaagagttttaagggagagcgcaatgggaatgagtatcctatcaatctcattgactcccctgggcacgttgacttctcatctgaggttactgctgcactccgtattactgatggagctctagttgtggtcgattgtgtggaaggagtttgtgtccaaactgaaactgtgctaagacaagcccttggagaaaggattaggcctgttctgactgtcaataagatggacaggtgcttccttgaactccaggttgatggag

SEQ ID NO: 59295 - DNA, 269 bp, Glycine max
  Clone ID: 700675214H1
ataaaattcttccaccaagttatgggtttccttgtgttgcttcttttctccctcttaggtctctcttctagttccagcatatcaactcatcgttccatattggaccttgacctaaccaagtttaccacacagaaacaggtgtcttcactgttccaactatggaagagtgagcatggacgtgtctaccataaccacgaagaagaggcaaagagacttgagattttcaagaataacttgaactatatcagggacatgaatgcaaacagaaa

SEQ ID NO: 59296 - DNA, 267 bp, Glycine max
  Clone ID: 700675215H1
tggccaccgtcacttctgcagccgttgctattccgccattcactggcctcaaggcaagcgcaggcaaagtgagtgccgcagttaaagtctcagctccccaagccacaaggttgggcatcaaggcttcgctgaaagacgttggagtcgctgttgtggccactgccgcgagtgcagtgctggctagcaacgccatggccattgaagtgttgctgggtggtgatgacgggtctctggctttcgttcccaacaatttctccgtggcctctg

SEQ ID NO: 59297 - DNA, 267 bp, Glycine max
  Clone ID: 700675218H1
atctgctttgtgcagggacctgagattcggactggttttctgaaagatggaaaacctattcaacttaaagaagggcaagaagtcaccataactactgattatgacattaagggggatccggagatgatatccatgagttacaagaagctgcctgtccacttgaagcctggaaataccatactgtgctctgacgggacgattactctcactgtcttgtcttgtgaccctgatgctggtactgttagatgtcgttgtgaaaatctgcaa

SEQ ID NO: 59298 - DNA, 264 bp, Glycine max
  Clone ID: 700675219H1
agctcccactcactttctcgcataaacgtattgtttttctctctttccgcggcctagatctgatcagtctggaaaccctacctgctctcaccaacgacatcaccactctctccgatcaactacctctttcgtcgccctaagtcatggcaggaattgcacccgagggatcacagtttgatgctcgtcaatatgataccaagatgaatgagctgcttacgtccgatggtcaggatttcttcacatcctacgatgaggtttatgaca

SEQ ID NO: 59299 - DNA, 265 bp, Glycine max
  Clone ID: 700675220H1
atcgttttgcagccgcggttgtgcactctcagatcctacggttcggatcgagccggggtgcttatcaagactcgcaaggtgggtgaccatgatgacgtgtcacccttcttcgccgcgctttccgactatattgagagctctaagaaaagtcaagattttgagatcatctctggtcgtctagctatgatggtgtttgcagcgacggtgacaatggaagtggtgacagggaactctgtgttcagaaagatggatattgaaggaatca

SEQ ID NO: 59300 - DNA, 263 bp, Glycine max
  Clone ID: 700675222H1
ctcgagccgctgcgaggaagttcctctggttgttcgcaagacaatgtgataagccagataactagtcaagtgcaggagcttgcattccctgggtctgcacaagctgttgagaagctattaaagaaccaaagagaatcctactttgtggatgctcagcctaagaagaaagaggaggggaataagggaagaaagggtcctttgtcttcaattttgagggctttttactgaataagtatgtactaaaatgtatgctgtaatagctc

SEQ ID NO: 59301 - DNA, 262 bp, Glycine max
  Clone ID: 700675223H1
ggctcaccctgatttgatacatgcattccaagctgccgcagttgctgggggatctggaagttcaggtgcatctgctaacaaatctctcaatgctgcagtaatgggtgaggcactgcccagaggaaggggaattgatgaaagggctgcacgtgcagctgctgaagtcaggagaaaggctgcagcaaggggcctgatgatacgtccccatggtgtaccagtccaagccttgcctccccttacccaacttctgaatattataaat

SEQ ID NO: 59302 - DNA, 266 bp, Glycine max
  Clone ID: 700675224H1
agctcccactcactttctcgcagaaacgtattgtttttctctctttccgcggcctagatctgagcagtttggaaaccctaactgctctcaccaacgacatcaccactctctccgatcaactacctctttcgtcgccctaagtcatggcaggaattgcacccgagggatcacagtttgatgctcgtcaatatgataccaagatgaatgagctgcttacgtccgatggtcaggatttcttcacatcctacgatgaggtttatgacagt

SEQ ID NO: 59303 - DNA, 268 bp, Glycine max
  Clone ID: 700675225H1
aagccattccagtgtgccggtgttgccctctctcgctgcaccctcaaccgcaacgaccttcgtagaccttcctacaccaacggtccccaggaaatctacatccaacaaggtaagggtatttttggcatgatatacccgggttgtcctagcacatttgaagagcctcaacaacctcaacaaagaggacaaagcagcagaccacaagaccgtcaccagaagatctataacttcagagagggtgatttgatcgcagtgcctactggtgttg

SEQ ID NO: 59304 - DNA, 268 bp, Glycine max
  Clone ID: 700675226H1
gtgcattttgattcaatcaatgtggcatatttcaaagtttgggttgctgtgcagaaagagcagaaagaaatatcagagtagagagcaccatggtgaataaacttatcatgtgaaaaaataacataacaatggcatgctttaccgattagagagcattgcagggagctaagaaagttacatgatggctgccaaagacgtagacattcatgcgattcgtgtggagtctcatttcttatttacaacaaggtcattttattttattgtccgt

SEQ ID NO: 59305 - DNA, 260 bp, Glycine max
  Clone ID: 700675227H1
agggagctcttcttctaccacactttaattcaaaggcgatagtgatactggtaattaatgaaggagatgcaaacattgaacttgttggcctaaaagaacaacaacaggagcagcaacaggtagagcaacctttggaagtgcggaaatatagagccgaattgtctgaacaagatatatttgtaatcccagcaggttatccagttgtggtcaacgctacctcaaatctgaatttctttgctattggtattaatgccgagaac

SEQ ID NO: 59306 - DNA, 253 bp, Glycine max
  Clone ID: 700675228H1
tcctagtataccttaataaataatttaagatactatgatgagagcacggttcccattactgttgctgggacttgttttcctggcttcagtttctgtctcatttggcattgcttactgggaaaaagagaacgccaaacacaacaagtgtgctcagagttgcaatagtgtgagagagtcgtacaggaaccaagcatgcgacgctcgttgcaaccttcttaaggtggagaaagaagaatgtgaagatggtgaaatt

SEQ ID NO: 59307 - DNA, 266 bp, Glycine max
  Clone ID: 700675230H1
ctagtataccttaataaataatttaagatactatgatgagagcacggttcccattactgttgctgggacttgttttcctggcttcagtttctgtctcatttggcattgcttactgggaaaaagagaaccccaaacacaacaagtgtctccagagttgcaatagcgagagagactcgtacaggaatcaagcatgccacgctcgttgcaacctccttaaggtggagaaagaagaatgtgaagaaggtgaaattccacgaccacgacca

SEQ ID NO: 59308 - DNA, 261 bp, Glycine max
  Clone ID: 700675231H1
ctcgagcgctccattggtccttaaacactcatcagtcattaccatggccaagctagttatttccctttgttttctgcttttcagtggctgctgcttcgcttttagttccagagagcagcctcagtaaaacgagtgccagatccaaaaactcaatgccctcaaaccggataaccgtatagagtcagaaggagggctcattgagacatggaaccctaacaacaagccattccagtgtgccggtgttgccctctctcgctgcac

SEQ ID NO: 59309 - DNA, 268 bp, Glycine max
  Clone ID: 700675232H1
aacgaagaaaatcattccaatacacatggcttccgaaaggcaagcgttaatgcttattctcttaacaacattcttcttcaccataaagccttctcacgccagtactactggtggcataacaatctactggggccaaaacattgacgacggcaccttgacttccacatgcgacactggacacttcgcgattgtcaacctagctttcctcaatgcgtttggttgcggcataactccatcatggaacttcgctggccactgtggggactgg

SEQ ID NO: 59310 - DNA, 260 bp, Glycine max
  Clone ID: 700675233H1
atggaacctcagcaacccggtgagaaggaggaagacgaagatgagcaaccacgtccaatcccagtcccacgcccacaacctcgtcaagaagaagagcacgagcagagagaggaacaggaatggcctcgcaaggaggaaaaacgcggagaaaagggaagtgaagaggaagatgaggatgaggatgaggaacaagatgaacgtcaattcccattcccacgcccacctcatcagaaggaagagcgaaagcaagaggaagatga

SEQ ID NO: 59311 - DNA, 263 bp, Glycine max
  Clone ID: 700675236H1
gcaggtcattaagaatgaagatcttgaagagctgcgagaactaggttctggtacctttgggactgtgtatcatggaaagtggagatgaacagatgttgctattaaaagaataaagaagagctgcttcactggtcgatcatctgagcaagagagactgactgtagagttctgtctggaagctgacattctttccaagcttcatcatccatatgtggttgcattttatggtgtggtacagcatgggccaggaggaacaatggcca

SEQ ID NO: 59312 - DNA, 263 bp, Glycine max
  Clone ID: 700675237H1
atatcctagtacaccgtattaaagaatttaagatatactatgatgagagcgcggttcccattactgttgctgggagttgttttcctggcatcagtttctgtctcatttggcattgcgtattgggaaaagcagaaccccagtcacaacaagtccctccgaagttgcaatagcgagaaagactcctacaggaaccaagcatgccacgctcgttgcaacctccttaaggtggaggaagaagaagaatgcgaagaaggtcaaattcc

SEQ ID NO: 59313 - DNA, 262 bp, Glycine max
  Clone ID: 700675238H1
gtatgattgatatgtggaagagtgtattggtgttggtgttcttgtgtcttagtcttagtaatggtgatgatcaagagaagaagaaaccctgtttgtgggagtggaagagactgagtagcgcttactctgcctatcgggcactttttccttcaagtattggtcttgacatgcttaagaaccttgtcactcacacatatgcccgtttctttcctccaaatatagattttagaagagaggaggaagggcaagtcaaagagaatgg

SEQ ID NO: 59314 - DNA, 260 bp, Glycine max
  Clone ID: 700675239H1
gtcattttacacatcctactattttccatgatactacggatttattagcaaagaggcggagaaatagattaattattccatttcaattccaatcgattcaagaacgagacaaagagctaatgttagcttccagtatctcgattgaaataccaatcaatggtatttttcgtagaaatagcattcttgcttatttcgatgatcctcaataccgaacacagagctcgggaattactaaatataggactataggtataaattcc

SEQ ID NO: 59315 - DNA, 208 bp, Glycine max
  Clone ID: 700675240H1
ccctcgagccgaatcggctcgagctctcattcttctccctaaaatcacctcatggccaccgccacatcccaaacccttcgattccaatctccgtcactccctctctcctcgaagctccccctctcctccgcgttctccgtctcgctccgtcctcgctaacgcggctcccgccctctcgtgcctagtcgtctccgtcgggctcgacgcg

SEQ ID NO: 59316 - DNA, 265 bp, Glycine max
  Clone ID: 700675242H1
tggccaccgtcacttctgcagccgttgctattccctcattcactggcctcaaggcaagcgcaggcaaagtgagtgccgcagttaaagtctcagctccccaagccacaaggttgggcatcaaggcttcgctgaaagacgttggagtcgctgttgtggccactgccgcgagtgcagtgctggctagcaacgcctcggccattgaagtgttgctgggtggtgatgacgggtctctggctttcgttcccaacaatttctccgtggcctc

SEQ ID NO: 59317 - DNA, 262 bp, Glycine max
  Clone ID: 700675245H1
gaagaggggaaaggttccatgtgaacggcacttgcacatgggttagtcgatcctaagggacgggggaagcccgtctgatagcgctctgtgcgcgtactccgaaagggaatcgggttcaaattcctgaaccgggacgtggcggctgacggcaacgttagggagtccggagacgtcggcgggggccccggaaagagttatcttttctgtttaacagcctgcccaccctggaaacggctcagccggatgtagggtccagcggctg

SEQ ID NO: 59318 - DNA, 264 bp, Glycine max
  Clone ID: 700675246H1
ctagtatttttcaagtaacttaaggtttcaaacctaggaagttggaagtcatggcagcaacattgatggcagcaacaagttctggcactcttaaagcaactcctttcctaggccaaggcaagggtgccaatgccaatgctcttagggatgttgtttccatgggaactgggaagtacaccatgggcaatgatttgtggtatggaccagacagagtgaaatacttgggcaccttttcagctcagaccccttcatacttgaaaggag

SEQ ID NO: 59319 - DNA, 263 bp, Glycine max
  Clone ID: 700675247H1
atcacatattgacaaagtgactatagcttctgatcaggggagactgatgagtagtggttctcagttcacagaaggagatagaccctttcttcaatgttcagaggagaagccttctttgccgagttcgtttagaacttgtgatctgaatctcattgaagcgtctgaagtgcatgaaaatcatgttgatcatccagttctgctgtacccccctgcggtttctgaaacaaagaaagctgtgccaattgacatagatctgaccatga

SEQ ID NO: 59320 - DNA, 256 bp, Glycine max
  Clone ID: 700675248H1
gaagatagacctcgtcctagtcgaccaagccaaggaaagcgtgaacaagaccaggaccaggacgaggacgaagatgaagatgaagatcaacctcgcaagagacgcgaatggagatccgaaaaagacacaacccagaagacctagacaagaagaaccacgtgaaagaggatgcgagccaagaaacggggttaaggaaaaaactgcactttgaaccttacgagaacattgctcgcccttaaggggttgacttttaaaa

SEQ ID NO: 59321 - DNA, 262 bp, Glycine max
  Clone ID: 700675251H1
ctacaacaacagcagaaaagtcatggtggacgcaagcaggggcaacaccagcaggaggaagaggcagaaggtggcagcgtgcttagtggcttcagcaaacacttcttggcacaatccttcaacaccaacgaggacaccgctgagaaacttcagtctccagacgacgaaaggaagcagatcgtgacagtggaaggaggtctcagcgttatcagccccaagtggcaagaacaacaagatgaagatgaagatgaagacgaagatg

SEQ ID NO: 59322 - DNA, 261 bp, Glycine max
  Clone ID: 700675252H1
attttgataaaccgcgatcacaggttgccgcaccttaaaaccggaaacaaaagcaatcgttacttgatttcaagaatctctcaatttcttcctacttctttgtgtacgatttcttaagggagagaaaatcactctctgtgctggccacagacttcgtgaatgattttcttttccattcttagtttattttctgaacactctcctatttgatataggacttcgtgtcagatttaaacttcttcagtctcattctcagtactc

SEQ ID NO: 59323 - DNA, 260 bp, Glycine max
  Clone ID: 700675253H1
ttcttccttttcatcaggtttattccttttcttttggttcaattttgctgaatggagagtgcaagaatcagcaaatggttaaatcttctagtttgtgtactgctattgcttaaggcagaaggatctcttgttccattgactttggtgaagaatgcagaatcaaaaggagctgtttgtttggatggaagccccccagcataccactttgacaacggatttgaagaagggattaagaactggattgttcacattgagggagg

SEQ ID NO: 59324 - DNA, 259 bp, Glycine max
  Clone ID: 700675254H1
cgagagaggtccaacgacttcccaggtcctcgccgtcctcgccggcctcccggtcggtggcatcctgctcctcctggcgggattgaccctggcaggaaccctcaccggactggcagttgccacgccgctcttcgtcctcttcagcccggtgctggttccagccacggtcgccatcggcctggccgttgccgggttccagacgtcgggggccttcgggctcacggcgctgtcttccttctcctggatcctgaactacatc

SEQ ID NO: 59325 - DNA, 259 bp, Glycine max
  Clone ID: 700675256H1
gtcattcaagggactatctagtgttagttcattcgggaaattgggtagccgcagctctggaaggattgctgcagagtggcttgataaacagtgatggcaatttgcaattacttgtggtaatcaatgattccatattggcaaagatacggtaactacaaaggtgcttaaccggcaaggcaaaaatcaaagttaaaagggaaaggaatattatgtaattttgggaaataagcaaagtgagttgaagtgaagttcgcggtag

SEQ ID NO: 59326 - DNA, 187 bp, Glycine max
  Clone ID: 700675257H1
cgagagaggtccaacgacttcccaagtcctcggcggcctcgtcggcctcccggtcggtggcatcctggtcctcctggcgggattgaccctggcaggaaccctcaccggactggcagttgccacgccgctcttcgtcctcttcagcccggtgctggttccagccacggtcgccatcggcctggccgtg

SEQ ID NO: 59327 - DNA, 266 bp, Glycine max
  Clone ID: 700675259H1
tagtgaatgcacctattgcaagtctgaagagagcaacctgtgtgagcttctcaggatcaacactgacagaggagtgatgctcagtgatggcaaaacaaggttctccaaaaatggacaacctatttaccacttcgttggaacctccactttcagtgaatacactgttctccatgaaggatgtgtcgccaagatcaaccctgctgcccctcttgacaaagttgctgttgtcagttgtggattctgcacaggttttggggctactgtga

SEQ ID NO: 59328 - DNA, 263 bp, Glycine max
  Clone ID: 700675260H1
tgacaaagcaatggctacttcaaagttgaaaacccagaatgtggttgtatctctctccctaaccttaaccttggtactggtgctactgaccagcaaggcaaactcagcggaaactgtttctttcagctggaacaagttcgtgccgaagcaaccaaacatgatcctccaaggagacgctattgtgacctcctcgggaaagttacaactcaataaggttgacgaaaacggcaccccaaaaccctcgtctcttggtcgcgcctcta

SEQ ID NO: 59329 - DNA, 264 bp, Glycine max
  Clone ID: 700675265H1
caagtttgctgacatcactcctcaagagttcagcaaaaagtacttgcaagctcccaaggatgtgtcgcagcaaatcaaaatggccaacaagaaaatgaagaaggaacaatattcttgtgaccatccacctgcatcatgggattggaggaaaaaaggtgtcatcacccaagtaaagtaccaagggggctgtggaagcggttgggcgttttctgccacgggagccatagaagcagcacatgcaatagcaacaggagaccttgttag

SEQ ID NO: 59330 - DNA, 261 bp, Glycine max
  Clone ID: 700675266H1
gttatgaagagtactatcttctttgctctctttctagtttgtgccttcaacatctcatacctgcgctcagccaccgctcagttcgtgctcgacactgatgatgatcctcttcaaaacggtggcacatactatatgttgccagttatgagaggaaagggcggtggaatagaagtagattcaactggaaacgaaatatgccctctcactgttgtgcaatcacccaatgagctcgataaggggattggactagtctttacatct

SEQ ID NO: 59331 - DNA, 255 bp, Glycine max
  Clone ID: 700675268H1
attcgtggatttacaatgccaaactcttcaaaagtgaccgcattttctttgccaaccagacatatcttccaagtgagacaccagctccactagtcaaatatagagaagaagagttgcataatttaagaggagatggaactggagaacgcaaagagtgggaaaggatctatgattatgatgtctacaatgatttaggtgatccggataaaggtgaaaatcatgcccgtcctgttcttggaggaaatgacacctttc

SEQ ID NO: 59332 - DNA, 259 bp, Glycine max
  Clone ID: 700675269H1
gacaagacctactttccaccctgatgggctttttgaagagaacaagttatctgaaaagcctaaagcaaaagcacatacccccatcactcagctgtggcatacaaatggtagatgccctgaggacacaatacctgtcaggagaaccaaggaggaggatgttctgagagcaagttcagtgaaacgctatggtaggaagaagcacagagcaatccctaagcctaggtctgcagaacctgatctaattaaccaaagtggtcat

SEQ ID NO: 59333 - DNA, 256 bp, Glycine max
  Clone ID: 700675270H1
cagcaagggatggcatagtccttctaaagaacacaaactcactcctcccactcccaaaaacaaaccccactattgccttaataggccccaatgccaatgcctcatcaaaagttttcctaggaaactattatgggcgtccttgcaatttggtgacactcttgcaaggctttgagggctatgctaaggacacggtttaccacccggggtgtgatgatggcccacaatgtgcttatgctcaaatagaaggggcagtgga

SEQ ID NO: 59334 - DNA, 256 bp, Glycine max
  Clone ID: 700675271H1
gtcccttctttataaaccacaaaatagtctctattcaaaagccatcccaaccccccacaaaccgcatttcatttcaaggcttgaaattgcgtgcagcttaatttcaagaatggccaaagcagcagaacaaagtcctgattctgggaatgtgtacacgctagcttctgtgagagaggatttggttaggccagaggataccatcatttatggtctcattgagagagccaagttccctagcaattctcacacctatgat

SEQ ID NO: 59335 - DNA, 257 bp, Glycine max
  Clone ID: 700675272H1
atttgagcatcatcatgtccaccgcagcgcagcccaaggccaagaaaacggcgtcgtccaagaagcccctctcccatcctaccttcgccgcgatgatagcggaggcgatagcgagtctgaaggagagaaccggttcgagccaatacgcgataaccaaattcatcgaaggcaagcacaaggagttgcctccaacctacaagaagcttgttctcgttcatctcaagaagtctgttgctgctggcaagctcgttaaggtc

SEQ ID NO: 59336 - DNA, 259 bp, Glycine max
  Clone ID: 700675274H1
atcaaacacaagcaaagctctttcgtcttcttcggtgaatgattgatccctcatcatcatcatcatgggggtgttacaggagaagctctcgtcgttctacaagagccgctggctggttttcgtggccgcaatgtggctgcagtcgtgggcgggcatcgggtacttgttcgggagcatttcgcccgtcataaagagctctctgggctacaaccagaagcagctcgccatgctcggagtcgccaaggaccttggcgacgcc

SEQ ID NO: 59337 - DNA, 259 bp, Glycine max
  Clone ID: 700675276H1
ctttgctctctgtgaggcttcaatttctaattagggtttcgcttagagtaaccaataaccatgggagtcttcacctttgtcgtccgcaaatccggcagcgaatggagcgccaagcaacattccggcgacatcgaggcctccgccgattccaccttcgatctccaacggaagctcgtgcaagccgctctcgccgttgattcctccggtggagttcagtcctctttctctcccgtgtctcctacctccgctgtgttccagg

SEQ ID NO: 59338 - DNA, 258 bp, Glycine max
  Clone ID: 700675277H1
caaaattccttcacttgcagaacttagttctctgttgcatcatcatcatcttcattagtgttagccctaaacttcaccttcaaccatgaccacagtgccaccacacagtgtccaagtgcacacaacaacacaccgctacgaagccggcgtcgtcccgccggctcgttttgaggcgccgcgttacgaagccggcatcaaggcgccctcttccatttaccattccgagagaggtccgacgacctctcaggttctcgcagt

SEQ ID NO: 59339 - DNA, 259 bp, Glycine max
  Clone ID: 700675278H1
ggatgtcttcctcagtgttgtggatatgaacgagggagctctttttctgccacacttcaattcaaaggccatagtggtactagtgattaatgaaggagaagcaaacattgaacttgttggcattaaagaacaacaacagaggcagcaacaggaagagcaacctttggaagtgcggaaatatagagctgaattgtctgaacaagatatatttgtaatcccagcaggttatccagttgtggtcaacgctacctcagatctg

SEQ ID NO: 59340 - DNA, 259 bp, Glycine max
  Clone ID: 700675279H1
agatgaaagagggaatttgagaaagcatatagtgcttcatattatccatgcatggacattttgtatgagtgctatgaggatattgctgctggaagtgagattcgcagtgttgtcttggctgggcggcgcttttatgagaaagagggtctgcctgcatttcccatgggtaaaattgatcagacccggatgtggaaggttggtgagcgtgtccgttctacaaggccagctggtgatctaggtccattatacccatttactg

SEQ ID NO: 59341 - DNA, 259 bp, Glycine max
  Clone ID: 700675280H1
tggttgatttgtgatatcactccagcttatatttttagtttctatacttggattttaattgaattatactgacagtgtaaagttttttctaactgtcatccaatcatggactgtcatataattgaaaattattgacttttgtaataattattttaagagtcatatgtaggataatttcttattagtcaacaatgtaaaaatctttacattattaaacacttagcatgataggattattaaacacttaaagcatgatagg

SEQ ID NO: 59342 - DNA, 247 bp, Glycine max
  Clone ID: 700675281H1
tcactttccttagttcaatatggggaagcccttcttcactctctctctttcttccctttgcttgctactcttgtcgagtgcatgctttgctattacctccagcaagttcaacgagtgccaactcaacaacctcaacgcgttggaacccgaccaccgcgttgagtccgaaggtggtcttattgaaacattgaactctcaacaccctgagctgcaatgcgccggtgtcactgtttccaaacgcaccctc

SEQ ID NO: 59343 - DNA, 244 bp, Glycine max
  Clone ID: 700675285H1
tggggtatggagaagcttgtagagtacattaaaataagatatcgtaatatgcccatgtatattacagaaaatggtgggtgaacattgattacataactacaaaaaaatttctgttttcatttctgctacgcacaatttttttgaaaaatgtcattgtcattgtatttctgatttcttaatgaaataaaattaaacggaagccactctatcatttctactttatttctggttttctaatgtttgt

SEQ ID NO: 59344 - DNA, 255 bp, Glycine max
  Clone ID: 700675286H1
gatgagagcacggttcccattactgttgctgggacttgttttcctggcttcagtttctgtctcatttggcattgcttactgggaaaaagagaaccccaaacacaacaagtgtctccagagttgcaatagcgagagagactcgtacaggaaccaagcatgccacgctcgttgcaacctcctttaggtggagaaagaagaatgtgaagaaggtgaaattccacgaccacgaccactctcacaacacccggagaggga

SEQ ID NO: 59345 - DNA, 253 bp, Glycine max
  Clone ID: 700675287H1
ggaacaatggcgggtagggtttcgacgtgcttcttcttcgtgtttgctctttctctccttcttccttttcagatctccgctgaggaatcatcggagaaagagttcgtactcacattggatcactctaactttcacgacactgtcagcaagcacgatttcatcgtcgtcgagttctacgctccatggtgtggccactgtaagaagcttgctcccgagtatgagaaagctgcttctatcttgagtagtcatgatc

SEQ ID NO: 59346 - DNA, 255 bp, Glycine max
  Clone ID: 700675288H1
gcttactgggaaaaagagaaccccaaacacaacaagtgtctccagagttgcaatagcgagagagactcgtacaggaaccaagcatgccacgctcgttgcaacctccttaaggtggagaaagaagaatgtgaagaaggtgaaattccacgaccacgacgacacacacaacacccggagagggaacctcagcaacccggtgagaaggaggaagacgaagatgagcaaccacgtccaatcccattcccacgcccacaa

SEQ ID NO: 59347 - DNA, 256 bp, Glycine max
  Clone ID: 700675289H1
attcatttctttcgatcaaaaacaatcaatcttcattcaggatgcaacgttttgttgacaacgtcctcgctgttactaaagagtcggtgaagacgtttacttatgaatcgttgaacaatgttgccacagtgataaatggtgtgtcagctcttgtgttgacattgctgcctgggaaagtttctatacctgaaggtattcagggttgggagctcaggccaactcttcgtggaccacgctttccacgttggatggataa

SEQ ID NO: 59348 - DNA, 261 bp, Glycine max
  Clone ID: 700675291H1
ccgtcttctctgctaccgatcccaagagagtagcaagagactcccatgttcccgtgttggcaccacttccaattgggtttgcggtgttcatggttcacttggccaccatccctatcaccggcactggcatcaacccagctagaagccttgggcctgctgtcatattcaacaacgagaaggcttgggatgaccagtggatcttctgggttggacccttcatcggtgctgctcttgctgcattctaccaccagtccgtgttga

SEQ ID NO: 59349 - DNA, 255 bp, Glycine max
  Clone ID: 700675292H1
tcaataaccagcttgatcaaacccctagggtattttaccttgctgggaacccagatatagagtacccagagaccatgcaacaacaacaacagcagaaaagtcatggtggacgcaagcaggggcaacaccagcaggaggaagaggaagaaggtggcagcgtgctcagtggcttcagcaaacacttcttggcacaatccttcaacaccaacgaggacatagctgagaaacttcagtctccagacgacgaaaggaagc

SEQ ID NO: 59350 - DNA, 247 bp, Glycine max
  Clone ID: 700675294H1
ccttcctacaccaacggtcactctgaaatctacatccaacaaggtaagggtatttttggcatgaaactctcgggttgacctagcacatttgaagagcctcaacaacctcaacaaagaggacaaagcagcagaccacaagaccgtcaccagaagatctataacttcagagagggtgatttgatcgcagtgcctactggtgttgcatggtggatgtacaacaatgaagacactcctgttgttgccgttt

SEQ ID NO: 59351 - DNA, 251 bp, Glycine max
  Clone ID: 700675296H1
gttcctcactgaccaagccgtggcgatgagaaccaaactttctttagctatctttttcttttttcatttagccttattttcaaacctagcctttggcaaatgtaaagaaaccgaggtagaagaagaagaccctgagctcgtaacatgcaaacaccaatgccaacagccacagcaatacactgagggtgacaagcgggtatgcttgcaaagatgtgacaggtatcatcgtatgaagcaagagcgagagaaac

SEQ ID NO: 59352 - DNA, 249 bp, Glycine max
  Clone ID: 700675301H1
gcgaccagagccaagctttctttagctatcttccttttctttctattagccttgatttcaaacctagccttgggcaaacttaaagaaaccgaggtcgaagaagatcccgagctcgtaacatgcaaacaccagtgccaacagcaacggcaatacactgagagtgccaagcgaacatgcttgcaacaatgtgacagtatgaagcaagagcgagagaaacaagtcgaagaggaaactcgcgagaaggaagaa

SEQ ID NO: 59353 - DNA, 99 bp, Glycine max
  Clone ID: 700675302H1
ctagttcaatatcctagtataccttaataaataatttaagatactatgatgagagcacggttcccattactgttgctgttacttgttttcctggtttca

SEQ ID NO: 59354 - DNA, 262 bp, Glycine max
  Clone ID: 700675304H1
tactaatccggcacaacaaacaaggcattactgtatttcgtttggcaaatgggtatgctgtcttgaaagatgcactagcctctgaaaatgtgagatttcaaaggaaagctctcaacttgacccattacctgttgcatgaaataattcagactgcaacatcgtgaatgagcttgggtttcctcgactgttgatgcaccttgcctcaagtgaagattcagatgtcagagaagctgcccttcggggccttcttgagcttgcttgc

SEQ ID NO: 59355 - DNA, 260 bp, Glycine max
  Clone ID: 700675305H1
gaatgctattctcatgaatatgccaaatgctgttctttcaatgtggagatattttgttggagatctcgtctttgaagtttctaagatgacttctccctacattaaatgtacagtctctttcttcatagcatttggaatttggctgatgacaccatcaattttgaggcttttccccacaagctggtgcagtttggagagattcaggaaaaagttgtattgaaattttcacaagaggaatttcttacagcttggtcaactca

SEQ ID NO: 59356 - DNA, 262 bp, Glycine max
  Clone ID: 700675306H1
atccagttgtggtcaacgctacctcagatctgaatttctttgcttttggtatcaatgccgagaacaaccagaggaacttccttgcaggttcgaaagacaatgtgataagccagatacctagtcaagtgcaggagcttgcgttccctgggtctgcaaaagatattgagaacctaataaagagccaaagtgagtcctactttgtggatgctcagcctcagcagaaagaggaggggaacaagggaagaaagggtcctttgtcttc

SEQ ID NO: 59357 - DNA, 245 bp, Glycine max
  Clone ID: 700675307H1
atcatgcacaagagctcttcagattccacgctaggcccgacctccctggacctctcccaggccttcttcaggcccataaacaacgccgcccctcgctccccgaccaagcgccacaacaagatctccgtcatcggcgccggcaacgtgggactggccatcgcgcagaccatcctcactcaggacctcatcgacgagctcgtcctcgtcgacaccaactccgacatgctgcgcggcgagatgctcga

SEQ ID NO: 59358 - DNA, 258 bp, Glycine max
  Clone ID: 700675309H1
agaactagttcaatatcctagtataccttaataaataatttaagatactatgatgagagcacggttcccattactgttgctggtacttgttttcctggcttcagtttctgtctcatttggcattgtctactgggaaaaagagaaccccaaacacaacaagtgtcttcagagttgcaatagcctgagagactcgtacaggaaccaagcatgccacgctcgttgcaacctccttaaggtggtgtaagaagaatgtgaaga

SEQ ID NO: 59359 - DNA, 262 bp, Glycine max
  Clone ID: 700675311H1
gccgcgccttcaaacattgaaaaagacttccatttcttctcgaaggtctggtactgccactttccctagtcctggtacactcaattatcgcgttgcaatgcacaagggatggagctccgagcgagttcccttgcatgcagtgctacccggaagcacgttttgccgttcaacaatgggaaaacattgccgtcaaagtgggaagatgctgagaggtggattctcagccctgtttcggcagatggcactgggagggcctcgctta

SEQ ID NO: 59360 - DNA, 93 bp, Glycine max
  Clone ID: 700675312H1
tagttctagatcgcgagctgccgctcgcgatctagaaccaaccaagcgcgatgaccaattgtgcgaatcaacggtgtgtctcgtactaagttg

SEQ ID NO: 59361 - DNA, 98 bp, Glycine max
  Clone ID: 700675313H1
ctcgagccgtttagctttgagagtctttaaattctctgtatttgttgtaatgttagtagttccttaaattggccagatggagcttatgtgtctgtaaa

SEQ ID NO: 59362 - DNA, 161 bp, Glycine max
  Clone ID: 700675315H1
gcaatagtgatggtggcagtgcagcttctggtggaggtgagtcccaaggcagaggctgtgacttgtacgcctgtggagctgagtccttgtttgggggcaataacttcctctcaaccaccatcaacaatttgttgccagaagtgagggaacaaaggcaatgc

SEQ ID NO: 59363 - DNA, 276 bp, Glycine max
  Clone ID: 700675316H1
tcgaggtaactagtgaaggagatgcaaacattgaacttgttggcctaaaagaacaacaacaggagcagcaacaggaagagcaacctttggaagtgcggaaatatagagccgaattgtctgaacaagatatatttgtaatcccagcaggtatccagttgtggtcaacgctacctcaaatctgaatttctttgctattggtattaatgccgagaacaaccagaggaacttcctcgcaggttcgcaagacaatgtgataagccagatacctagtcaagt

SEQ ID NO: 59364 - DNA, 139 bp, Glycine max
  Clone ID: 700675317H1
tctggataacgttttcgggttcgagaaggcacttgtgttgtttttcgtacgaaatggagactatacagagttcggtgacggttacgctcagttacggcgcgttgacgtgcgccgcggaatttctcgcgactttgctagc

SEQ ID NO: 59365 - DNA, 262 bp, Glycine max
  Clone ID: 700675318H1
ctcatggccactgctcacaaggtcctcgttcccatcgccgacggcaccgagcccatggaggccgtcatcatcatcgacgtcctccgccgctccggcgccgatgtcaccgtcgcttcgtcctccgccaacctcgccgtcaagctctccacggcgtcaagatcatcgccgacgcctccgtctccgacgtcaccgcgaccgcctttgacctcgtcgctctgcccggaggtttacagggtgatgagaatctgagagactgtaaagt

SEQ ID NO: 59366 - DNA, 248 bp, Glycine max
  Clone ID: 700675321H1
tctcgagcgattcggctcgagcttgagaggaacaggaaggacatggactccaagttcaagttgattcttgttgagagatgtatccaccgacttgctcgctattacaagaagactaagaagctcccaccagtctggagtacgaatcaacaactgctagcactctggttgcttagagaatgtatcaactttcatgggttttgcttccttgcagtcaccgttgagccagcaatttgccatatcattttgat

SEQ ID NO: 59367 - DNA, 256 bp, Glycine max
  Clone ID: 700675322H1
ggaagaggaagaagaagaagaggatgagaagccacagtgcaagggtaaagacaaacactgccaacgcccccgaggaagccaaagcaaaagcagaagaaatggcattgacgagaccatatgcaccatgagacttcgcacaacattggccagacttcatcacctgacatctacaaccctcaagccggtagcgtcacaaccgccaccagccttgacttcccagccctctcgtggctcagactcagtgctgagtttggat

SEQ ID NO: 59368 - DNA, 262 bp, Glycine max
  Clone ID: 700675324H1
atctgagggttttcctcatgtgctttcacgcaaaaatggcgaaaaaggcaaaaggagattcatctctggggatggtgaagagatgacattgattccaggaaccagtgttgaagaggcttacaacaagctaatagttgacttgagataagtgtacctacattggttggcattgaatgtcccaaggatgagaaacttcctcgtcgcaaaatttttggcaaacctaagacgcgctgcttcactattctcgctatggagtttaatc

SEQ ID NO: 59369 - DNA, 209 bp, Glycine max
  Clone ID: 700675327H1
tgctgacgaagatgatgaagatgtacaaattccctctcaccctcctcgtcgaccaagccattgtcagcgcgatcgatacgacgacgaggatgaagatgcacataaacctcgtcgtagttgaccaagccttggtaagcgtgaacgagtccaggaccaggacgaggacgctgatgaagatgaagatcaacctcgcaagatccgcgaatgga

SEQ ID NO: 59370 - DNA, 259 bp, Glycine max
  Clone ID: 700675328H1
gaggagctgaggaagaatccccagaaggcttacttgaagactattacaccaaagtttcagacccttattgacctttctgctatagaaatcttgtcaaggcatgcatctgatgaggtgtaccttggggagagggacaaccaaattggacatctgatacaagagcattagaggcttttaaaaggtttggaaataaactggcacaaattgagaataaactctcagagagaaacaacgatgagaaactgagaaaccgttgtgg

SEQ ID NO: 59371 - DNA, 264 bp, Glycine max
  Clone ID: 700675329H1
actcaatgccctcaaaccggttaaccgtatagagtcagaaggagggctcattgagacatggaaccctaacaacaagccattccagtgtgccggtgttgccctctctcgctgcaccctcaaccgcaacgcccttacgtagccttcctacaccaacggtccccaggaaatctacatccaacaaggtaagggtatttttggcatgatatacccgggttgtcctagcacatttgaagagcctcaacaacctcaacaaagaggacaaag

SEQ ID NO: 59372 - DNA, 129 bp, Glycine max
  Clone ID: 700675330H1
tgcaggcacaatctatgggcgatgcatccagtttggaattcatgaggagcagaaggacgtgtgagcgcaaccccgaacaatctctcatcaggaacttggatgatgcatttagaacaagtcccgatgatg

SEQ ID NO: 59373 - DNA, 267 bp, Glycine max
  Clone ID: 700675332H1
ttaaaatggtgaaaaaggcaaaaggagatttgtttctggggatggtgaagagatgacattgattccgggaaccagtgttgaagaggcttacaacaagctaatagttgaacttgagaaaagtgttcctacattggttggatctaatgtcccaaggatgagaaacttcctcgtcgcaaaatttttgacaaacctaagacgcgctgcttcactattctccctatggagtttaatcttgtggttcgtcagaagtttttaaattttgtgagg

SEQ ID NO: 59374 - DNA, 263 bp, Glycine max
  Clone ID: 700675333H1
gttcaatatcctagtataccttaataaataatttaagatactatgatgagagcacggttcttgttactgttgctggaacttgttttcctggcttcagtttctgtctcatttggcattgcttactgggaaaaagagaacccaaacacaacaagtgtactcagagttgcaatagcgagagagactcgtacaggaaccaagcatgccacgctcgttgcaacctccttaaggtggagaaagaagaatgtgaagaaggtgaaattcca

SEQ ID NO: 59375 - DNA, 262 bp, Glycine max
  Clone ID: 700675334H1
actttagtggttctaaattgaaaagctttctagctggtcataatatcaccattactgatggtattgacaaaactagtgcaactttgcaatttagaaagttagcagattgtgattttctcaagagaaactttaagcagtgtctaatgttttgtgggtggctcctgaggacaaggcgagtttatggtcacaacttcattatgtttcgtgtaataatctggaaatgcaagaagcttatcttgtcaatctcgtaaatgtgttacga

SEQ ID NO: 59376 - DNA, 170 bp, Glycine max
  Clone ID: 700675336H1
ataagccggaacaactcaaagtcaacttcaaatcactttacacacaatatatattattacaatggttccatgaccctatgcgattgcgctactcttctgtgactgtctcttcttgtcttcttatctgatgaatgacatcacttagaaaaatgaagttcgaagattgacga

SEQ ID NO: 59377 - DNA, 257 bp, Glycine max
  Clone ID: 700675337H1
ggataagcacgaatggcaacacaagcaggaaaagcaccaaggaaaggtaagtgaagaagatgaagaagaccaagacgaggatgtggagcatgacaaagagagctaagcaagtgcaggttctgagtctcaaagagaacacgatgacgtaagcataagaacccttgtcacttcaaatctgctaggttccaaactctcttcacagaccaatatggccacgttcgcgtcctccagaggttcaacaaacgctcgcaacagct

SEQ ID NO: 59378 - DNA, 256 bp, Glycine max
  Clone ID: 700675338H1
cattattctatatcaattttggttaagagtcttgaaaaagcaagagatcaatgaataccaaccatggcaaccatttctgatcaacctagagggtcctactcctatggaacctcatatggagcatcctatggaacacgtatgagaccaagaccaagattaacaacccaccttcaagccaaacagtgaagttcacaactgctgcgactattggcatcagactcttgctcctgtctgggttgaccctcacaggcactgt

SEQ ID NO: 59379 - DNA, 257 bp, Glycine max
  Clone ID: 700675339H1
tttctttgcacgctcttactcgtttcctttgtctttgtctttctctttcggctttttcttctgctccactgtttctatcccttcctttctgtatgcaatattggcatgcttgtttggtatcagaatcgcattaactgtcatatatacttggacggagttgatcaggacttcaattagcttccatgtaaacataatattaagaatgatcacatggacatttgggcttatctccctgcctgcaagagttgtgaatgcct

SEQ ID NO: 59380 - DNA, 262 bp, Glycine max
  Clone ID: 700675342H1
gtggacactcaatcacatgctgaaggtgaattctctccggagaatggtgcatttgtctctaacaggcatgatactcaagctgaatttagtaaacctgctaagcaacatgctaatatcagatgcattcaaatacacaatagaggtgcaagtcctggaagaagtcctaccagggattctggggagctaaaccaaggacgtgctttgttgttggctagtcctggcaaaaaaagtcctggccaaaaagcatctgaacctcctgccc

SEQ ID NO: 59381 - DNA, 256 bp, Glycine max
  Clone ID: 700675343H1
cttggaggttttggtcttggctgctcaggaaggtgtgtttgtcaacattgatagtgagtttgacttggaaaacattgtagaggctgcaaaaagggctgagaagaaggtcaatgttttacttcggattaatcctgctgtggatccacaggttcatccttatgttgccactgggaataagaactctaaatttggcattagacatgagaagctgcagtgctttttagatgcagtgaaagaacatcctagtgagctcaaa

SEQ ID NO: 59382 - DNA, 257 bp, Glycine max
  Clone ID: 700675344H1
caccaacggtccccaggaaatctacatacaacaaggtaatggtatttttggcatgatattcccgggttgtgctagcacttatcaagagccgcaagaatctcagcaacgaggacgaagccagaggccccaagaccgcaccaaaaggtacatcgcttcagagagggtgatctgatcgcagtgcatactggtgttgcatggcggatgtacaacaatgaagacactcctgtcgttgccgattctataagcgacaccaacag

SEQ ID NO: 59383 - DNA, 260 bp, Glycine max
  Clone ID: 700675345H1
cttgtgttggctaacacacaagaattctttgatggaaattttccagtggattcttggttaccaatttttgtgaattgtactatatcctgtaagtcaattaccttcagaagctgtcgttgtaaatgttacatgtggtatggacgtggtggtttacccaccactgcttggattagttctgcagttaacaatcgctcctcagacatcaacaaaaagattcgcacagcacttgggaaaggtaagaaaattgtttttcttactag

SEQ ID NO: 59384 - DNA, 256 bp, Glycine max
  Clone ID: 700675346H1
tgcagatgaaggtgttgaaagttctatttggctgctagcaaaggcttatgtagttgtgaatgactcgtgctatcatcaacttgtcagccattggttaaacactcatgcagttgttgagccattcatcatagcaacaacaggcatctcagtgttgttcaccctatttataaactccttcaccctcactatcgtgacaccatgaacataaatggccttgctcggttatcactggtcaacgacggtggcgctatagaac

SEQ ID NO: 59385 - DNA, 98 bp, Glycine max
  Clone ID: 700675348H1
ttgcacaacactaaagttcagcaatcagtactctcaagatggatattccaagttcatcatcacgataacaatatgagttcaggaattggagcatggag

SEQ ID NO: 59386 - DNA, 211 bp, Glycine max
  Clone ID: 700675349H1
cactcatcagtcatcaccatggccaagctagttttttccctttgttttctgcttttcagaggctgctgcttcgctttcagttccagagagcagcctcagaaaaacgagtgccagatccaaaaactcaatgccctcaaccggataaccgtatagagtcagaaggagggctcattgagacatgagaaccctaacaacaagccattccagtgtg

SEQ ID NO: 59387 - DNA, 246 bp, Glycine max
  Clone ID: 700675350H1
tgatgagttttgagcatccaatgaacaagttgaaggcaatgccaagggtggacagtgaaggggccatgtgtggggccaacttcaaagttgataagttcgccagagtcaacagcattcctcgagtgggaagtcaaccaattggatggaatgggaccaacattagcttagaaataaaaccttaggataatgtaaaataaaaaagtgccatctatgtatgttcctttcctaacttaccattctgaattt

SEQ ID NO: 59388 - DNA, 215 bp, Glycine max
  Clone ID: 700675351H1
tctgactctgccgaaacctggaattctcctaacatgcaacaagatgcaagagcatcaaaagtgcactacaggttcaaagcaccctgttaccaaaatggcagtggctcctaccataatcataatggattgcaatctcagtgtaccattcatcctcaggtgaaagactggaggaaagggattgttcgggtcagcaactgaaccacaattgatggggg

SEQ ID NO: 59389 - DNA, 258 bp, Glycine max
  Clone ID: 700675352H1
tgcagatgaaggtgttgaaagttctatttggctgctagcaaaggcttatgtagttgtgaatgactcgtgctatcatcaacttgtcagccattggttaaacactcatgcagttgttgagccattcatcatagcacaaacaggcatctcagtgttgttcaccctatttataaactccttcactctcactatcgtgacaccatgaacatttatggccttgctcggttatcactggtcaacgacggtggcgttatagaacaa

SEQ ID NO: 59390 - DNA, 255 bp, Glycine max
  Clone ID: 700675353H1
ctagtataccttaataaataatttaagatactatgatgagagcacggttcccattactgttgctgctacttgtattcctggcttcagtttctgtctcatttggccttgcttactgggaaaaagagaaccccaacacaacaagtgtctccagagttgcaatagcgagagagactcgtacaggaaccaagcatgccacgctcgttgcaacctccttaaggtggagatagaagaatgtgaagaaggtgaaattccacg

SEQ ID NO: 59391 - DNA, 257 bp, Glycine max
  Clone ID: 700675354H1
ttgagaagctattaaagaaccaaagagaatcctactttgtggatgctcagcctaagaagaaagaggaggggaataagggaagaaagggtcctttgtcttcaattttgagggctttttactgaataagtatgtactaaaatgtatgctgtaatagctcatagtgagcgaggaaagtatcgggctatgtaactatgactagagcttcaactatgaataaataaatcgacagcatatgatgcttttgttttgtgtccttc

SEQ ID NO: 59392 - DNA, 257 bp, Glycine max
  Clone ID: 700675355H1
agaaaatgaagaaggaacaatattcttgtgaccatccacctgcatcatgggattggaggaaaaaaggtgtcatcacccaagtaaagtaccaagggggctgtggaagcggttgggcgttttctgccacgggagcatagaagcagcacatgcaatagcaacaggagaccttgttagcctttctgaacaagaactcgtagactgtgtggaagaaagcgaaggttgttacaatggatggcactatcaatcgttcgaatggg

SEQ ID NO: 59393 - DNA, 259 bp, Glycine max
  Clone ID: 700675356H1
gcaagagtttctaaaatatcagcagcagcagcaaggaggttcccaaagccagaaaggaaagcaacaagaagaagaaaacgaaggaagcaacatattgagtggcttcgcccctgaattcttgaaagaagcgttcggcgtgaacatgcagatagtgagaaacctacaaggtgagaacgaagaggaggatagtggagccattgtgacagtgaaaggaggtctaagagtcacagctccagccatgaggaagccacagcaagaa

SEQ ID NO: 59394 - DNA, 122 bp, Glycine max
  Clone ID: 700675357H1
tcaaaacagctggtgccggagcaagccaaaagccatccctctaaattaggttttcgctttcttcttcttcttcttcttattaccctaaccctaaccttagctattcgaattccacacaacat

SEQ ID NO: 59395 - DNA, 256 bp, Glycine max
  Clone ID: 700675359H1
gtcatcacccaagtaaagtaccaagggggctgtggaagcggttgggcgttttctgccacgggagccatagaagcagcacatgcaatagcaacaggagaccttgttagcctttctgaacaagaactcgtagactgtgtggaagaaagcgaaggttgttacaatggatggcactatcaatcgttcgaatgggttttagaacatggtgggattgccactgatgatgattatccttacagagctaaagagggtagatgca

SEQ ID NO: 59396 - DNA, 254 bp, Glycine max
  Clone ID: 700675360H1
ctcagcaaaacgagtgccagatccaaaaactcaatgccctcaaaccggataaccgtatagagtcagaaggagggctcattgagacatggaaccctaacaacaagccatttcagtgtgccggtgttgccctctctcgctgcaccctcaaccgcaacgcccttcgtagaccttcctacacgaacggtacctaggaaatctagatccaacaaggtaagggtatttttggcacgatatacccgggctgtcctagcaca

SEQ ID NO: 59397 - DNA, 253 bp, Glycine max
  Clone ID: 700675361H1
aagttattcccaactcatatacaagacatatcatttgaaagtcccttgatcttatcaggaagatacagtggaacttttcctgaattagttaaagtcactggtactttggcagatatgactaacttcgtagtagagcttaaagtgaaaagagaaaaggatatgcagctcagtaatgtaatatctcactcctaagacttaccacgtattcatcatacctggttgtgatttatcccatcttagcaaatgggatctg

SEQ ID NO: 59398 - DNA, 253 bp, Glycine max
  Clone ID: 700675362H1
tgcagatgaaggtgttgaaagttctatttggctgctagcaaaggcttatgtagttgtgaatgactcgtgctatcatcaacttgtcagccattggttaaacactcatgcagttgttgagccattcatcatagcacaaacaggcatctcagtgttgttcaccctatttataaactccttcaccctcactatcgtgacaccatgaacataaatggccttgctcggttatcactggtcaacgacggtggcgttatag

SEQ ID NO: 59399 - DNA, 258 bp, Glycine max
  Clone ID: 700675363H1
ttaaataagaaatgaagagtactatcttctttgctctctttctagtttgtgccttcaccatctcatacctgccttcagccaccgctcagttcgtgctcgacactgatgatgatcctcttcaaaacggtggcacatatatatgttgccagttatgagaggaaagggcggtggaatagaagtagattcaactggaaaagaaatatgccctctcactgttgtgcaatcacccaatgagctcgataaggggattggactagt

SEQ ID NO: 59400 - DNA, 259 bp, Glycine max
  Clone ID: 700675367H1
tctcaatcagagagcatgctctatctctgatagttgaaatgcttaaaaatcagaaagatgccatggaaaattcagttgagattgttgttgaaaagatgcttaatgttacaaaggatattgttcccaaggtctcaaatgaagcagagcactgcctcaccattgttttatctcagaatgatccattcagatgtttaagtgttattgtccctctactggttaccgaggatgtaataactcttgttacttgcataaattgctt

SEQ ID NO: 59401 - DNA, 255 bp, Glycine max
  Clone ID: 700675369H1
aagcacaacactaaagttcagcaatcagtactctcaagaagaaaattacaagatcatcatcacaataacaatatgagttcaggaattagagcatggagcgtggcaactagcgttggagttgtggaggccttaaagaccaaggtatatgtaggtggaatcatgcttcaagatcagctcaacaccatctcaaaaaccatgttggttcattctctcaggctaacaagctttcttcttctgctatgagctccacaacac

SEQ ID NO: 59402 - DNA, 99 bp, Glycine max
  Clone ID: 700675370H1
ggactaaacacgagaaaaatcttgctttgacagaagaggaaaagatggaagtgcttagaagtagaggcattcctgctgatgctcttgcgaagcgagctc

SEQ ID NO: 59403 - DNA, 251 bp, Glycine max
  Clone ID: 700675373H1
tagcataatccgcttttgctgtcatttcatgcccttcgatttcaattcagcaaaacacactcacaacggtctctcacaaccccaacaagtgttcatccgcagagattaacactgtgacccaaaaactgtggagagagagagagagtggaatgaagaaacgcaagtgcattccgttggtggtgctgagaaagttgctcattgcggccatatgttccatagcgtttgttgctctcttctctgcgcgcgtacac

SEQ ID NO: 59404 - DNA, 251 bp, Glycine max
  Clone ID: 700675374H1
gaaatttttccttcgatattaaatctcgctctagattggaaaaagtttcctctacaaaagcaccctctgttagtggaaaaaccttcaaatatgatataattggtgctggttcacattcttcagaagatttcctgaaaaggaagatcaagaaaaacccaaaaagattgatgccagattgagacaaagaatagatcctcaatacaatgaggttcatgctcagatggaaacaaatttgtttaaattgtctcttg

SEQ ID NO: 59405 - DNA, 254 bp, Glycine max
  Clone ID: 700675375H1
cattgtctttgaacactcatcaccatggccaagcttgttctttccctttgtttccttcttttcagtggctgcttcgctctgagagagcaggcacagcaaaatgagtgccagatccaaaagctgaatgccccaaaccggataaccgtatagagtcggaaggtgggttcattgagacctggaaccctaacaacaagccattccagtgtgccggtgttgccctctctcgctgcacccttaaccgcaatgcccttcgt

SEQ ID NO: 59406 - DNA, 252 bp, Glycine max
  Clone ID: 700675376H1
gcgaagagaatggctcccaagggtttaatctttttggctgtgttatgcttctcagcactgtcactgagtcgttgtcttgcggaggataatggacttgttatgaacttctacaaggaatcatgccctcaggtgaagacatcatcaaagaacaagtcaagcttctctacaagcgccacaagaacactgctttctcctggctcagaaacatcttccatgactgtgctgttcagagttgtgatgcttcactgttgc

SEQ ID NO: 59407 - DNA, 255 bp, Glycine max
  Clone ID: 700675377H1
tgttgctcgtcttagtttctgtgttgtgtcatttttattgctatatcctaattaaacttcaccctcaaaatgagtgatcccacactagcacaaccacacctagtcgaagtccacacaacactcgaaaccgttttaccacacacaaccataaccatagaccctcaataaatgcctcaggtgaaaagaagaaaattatgggggtgttctacaaagggaatgagtatgctaaattgaaccccaatttcgtggggtgtg

SEQ ID NO: 59408 - DNA, 255 bp, Glycine max
  Clone ID: 700675378H1
agcattttcagaggaacaatggcgggtagggtttcgacgtgcttcttcttcgtgtttgctctttctctccttcttccttttcagatctccgctgaggaatcatcggagaaagagttcgtactcacattggacactctaactttcacgacactgtcagcaagcacgatttcatcgtcgtcgagttctacgctccatggtgtggccactgtaagaagcttgctcccgagtatgagaaagctgcttctatcttgagta

SEQ ID NO: 59409 - DNA, 259 bp, Glycine max
  Clone ID: 700675379H1
aggaactgccagatgacgcaggcaagtacaatgatgtcccagaatctactggattcttcaaatcaaatggcacgtatgtcactgagaaagggaagttcttcttgacctggtattctaacaaattgctgaatcatggtgatcaaatactagatgaagccaacaaagctttcctgggctgtaaagtcaaattagcaatcaaagtatctggaattcactggtggtacaaagttgaaaatcatgctgcagagcttactgctgg

SEQ ID NO: 59410 - DNA, 129 bp, Glycine max
  Clone ID: 700675380H1
cttggaggatttggtcttggctgctcaggaaggtgtgtttgtcaacattgatagtgagtttgacttggtgaacattgtagatgctgcaaacagggctgggaagaaggtcaatgttgtacttcggattaa

SEQ ID NO: 59411 - DNA, 163 bp, Glycine max
  Clone ID: 700675381H1
atggagacatggaccagaataccagggacattattatgcgtgaattccgttctgggtcatcccgtgttttgataactactgatcttttggcccgtggtattgatgtccagcaagtgtctttagttataaatatgatctcccaacgcagcctgagaactatctc

SEQ ID NO: 59412 - DNA, 223 bp, Glycine max
  Clone ID: 700675382H1
gcacagagaaagaggaagagatggaggcagaggcagaaggtgaagaaggtgcgaagtagagcatttacaaggcggcgagaagcataaagcgaagagagacctgtttgtacaacgcactgagatccatctacaagactccatcttcgtctccgagatctctcttctatggcctcagctcagtctactcgccaacctccgctttggcctctggtactcccgcccc

SEQ ID NO: 59413 - DNA, 256 bp, Glycine max
  Clone ID: 700675383H1
agaagacgcactccttaacctcctcaccaataaacccgtaccaatgtgctacgatagcttcgaaccctccggacgaactcacattgctcagggtgttatgcagacaatcaatgtgaacaagctaacttctgccggttgcatcgtcaaaatatggattgctgcttgggttgccaagctcaacaacaagatgggaggagatttgaagaaaattgagaccgtgggccgttacttgatcgagatttggaaggctgttggg

SEQ ID NO: 59414 - DNA, 254 bp, Glycine max
  Clone ID: 700675384H1
tttctttctctctcaaatttctttcccttctgttcactcaaaagagcagaaagtgacaagatcccggaaaggcgtgccggcgtcagagactcatcagttctcactcgtacggcgctgtgctttgctttctagcttcttcttcactaccttcatcatcatcatcatcaccatactgagttcgctccttgctcagctttcacccatacccagatgggtaacagcaccatctcggatctgtgtcgcgccactaagtg

SEQ ID NO: 59415 - DNA, 246 bp, Glycine max
  Clone ID: 700675386H1
taaaattcttccaccaagttatgggtctccctctgttgcttctcttctccctcttaggtctgtcttctagttccagcgtatcaactcatcgttccatattggaccttgacctaaccaagtttgccagacagaaacaggagtctgcaatggtccaactatggcagagtgagcatggacgtgtctaccataacctcgaagtagaggctatgagacttgagattttcaagaataacttgaactatatca

SEQ ID NO: 59416 - DNA, 247 bp, Glycine max
  unsure (1)..(247): unsure at all n locations
  Clone ID: 700675389H1
gtcacagaccatacatagtagtgctggtgggttgcaaagatgctatctggncntctccataggggtcataagataaaagggacagtggtgttgatgcgcaagaatgtgttggacgtatttcgcgaaccagcgttgggggaattattggtcaaggtctcgacttagttggctcaacactcgatactcttactgccttcttgggccgatccgtgtctctccagcttattagtgctaccaaagctgatgc

SEQ ID NO: 59417 - DNA, 249 bp, Glycine max
  Clone ID: 700675391H1
atggagacatggaccagaataccagggacattattatgcgtgaattccgttctgggtcatcccgtgttttgataactactgatcttttggcccgtggtattgatgtccagcaagtgtctttagttataattatgatctcccaacgcagcctgagaactatctccatcgtattggacgtagtggaaggtttggtaggaaaggtgttgccattaacttcgtcacaaaggatgatgaaaaaatgctgtttga

SEQ ID NO: 59418 - DNA, 255 bp, Glycine max
  Clone ID: 700675392H1
cgtttgtaacgcctttgtttgcgttttttgcacagaagaattaacatgtatatagcaagcatggcagtcacactctacgaccttagctctgcctctgggttgaagaagcttgatgagtaccttctcccacgcagctacatcactgggtaccaagctacaaaggatgatcttactgtttatgcagctttgccaactgctccatcagatgaatatggaaatgtttccaggtggtacaagcacattgatgctttgttg

SEQ ID NO: 59419 - DNA, 255 bp, Glycine max
  Clone ID: 700675393H1
ggcgcagagtagagcagcacagaagagggaaaacggcaccgccgccgtagaagaaaacaaccatggtgcacgtctccttttacaggaactatgggaagacattcaagaagccgcgtcgtccgtacgagaaggagcgtctcgacgcggagttgaagctggttggtgagtacgggcttcggtgcaagagagagctgtggagggtgcagtacgcgctcagccgcatccgcaacaacgcgcggaacctcctcaccctcg

SEQ ID NO: 59420 - DNA, 255 bp, Glycine max
  Clone ID: 700675394H1
aagaaagaaggtttttttagtatagttaacagcatggagagggaggaagatgttaaggttggagcacagaaattctcggagaggcaagcactgggtacaggagctaagagtgacaaggactacaaggaggcaccaccagcacccttgtttgagccaggggagttaaagtcatggtctttttacagagctgggatcgcagagtttgtggccacattcttgttcctctacatcactgtcttgactgtcatgggtgtc

SEQ ID NO: 59421 - DNA, 258 bp, Glycine max
  Clone ID: 700675396H1
attctgagttacgaagacataagaataagaacccttttctcttcggctctaacaggttcgaaactctcttcaaaaaccaatatggtcgcattcgcgtcctccagagcaaccaacgctccccacaacttcctcattccgagactaccgcattttggagttcaactccaaacccaacaccctccttctccccaaccatgctgacgctgattacctcatcgttatccttaacgggactgccattctttccttggtgaacaa

SEQ ID NO: 59422 - DNA, 139 bp, Glycine max
  Clone ID: 700675401H1
ccatggccaagctagttttttccctttgttttctgcttttcagtggctgctgcttcgctttcagttccagagagcagcctcagcaaaacgagtgccagatccaaaaactcaatgccctcaaaccggataaccgtataga

SEQ ID NO: 59423 - DNA, 246 bp, Glycine max
  Clone ID: 700675402H1
aacgctccccacaacttcagaatctccgagactaccgcattttggagttcaactccaaacccaacaccctccttctccccaaccatgctgacgctgattacctcatcgttatccttaacgggactgccattctttccttggtgaacaacgacgacagagactcctacagacttcaatctggtgatgccctgagagtcccctcaggaaccacatactatgtggtcaacctgacaacaacgaaatctc

SEQ ID NO: 59424 - DNA, 247 bp, Glycine max
  Clone ID: 700675403H1
aggtaagaaaattgtctttttgactagagttgatccttttcctgtggccttgttagctgttctttttggtgttaagaacgaaattctgagttctaatgccacaaatccaatgttgacaaggcttcttgagaactgcaagagtcttaaatatttggttgatgagtgtcctttcgcatttgttaactagtttgtaatattttgttcacttaaataaagcgcattactatgtgcaataagtgtgtttaaa

SEQ ID NO: 59425 - DNA, 245 bp, Glycine max
  Clone ID: 700675404H1
ctgggaatgcagcagtcaaaaggagtgattgggcctcattggtacaagtgtttttaacaaacagcaacagtacagagcattttgatgcatgcaagtggacaaaatcggaaccacattcctgggaattgatcttcccaatagaggtatgtggtcctaacaatggttttgaaatgtggagttctgagtgggcaaatcaaacttcatggcatttgagtttccttattgacaatcccaaacatctacag

SEQ ID NO: 59426 - DNA, 246 bp, Glycine max
  Clone ID: 700675405H1
tgcctcttgatgaggagattctttccaaagttgcacaagacatggttgaagaatggtttgattgtgttgatgaggaggatacatttgaagaagtttctttgagtgctgcactcaatggtgttgaaggtttagactacatggaacgcattcctcttgccacttcagagggttttccccatgttctgtccaggaaaaatggtgaaaaaggcaagagaagatttgttactggagatggtaagaaatgtc

SEQ ID NO: 59427 - DNA, 246 bp, Glycine max
  Clone ID: 700675406H1
caatctccgagactaccgcattttggagttcaactccaaacccaacacccttcttctcccccaccatgctgacgctgattacctcatcgttatccttaacgggactgccattcttacattggtgaacaacgacgaccgagactcttacaaccttcaatctggcgatgccctaagagtccctgcaggaaccacatactatgtggttaaccctgacaacgacgagaatctcagaatgatacactcgcc

SEQ ID NO: 59428 - DNA, 135 bp, Glycine max
  Clone ID: 700675407H1
tgttgcgtcaagctaaggctcctagtatgtttctccagtcttttaaaaattttatttctttgtgtgtctatggagatgataatttaattagtgttcatgagtatgttaagccatattttagtggttctaaattga

SEQ ID NO: 59429 - DNA, 246 bp, Glycine max
  Clone ID: 700675409H1
tgtctctctttttcactcactctgcacccaccattactcagcactgccattcttcaatcacactaatggctgtcaccttctcagatcttcacaccgaagagggcatcaaatccctcgatcaattcctttctgggaaaacctatatctctggggatcaattgacaaaggatgatatcaaagtgtatgcagctgttgtggaaaagccaggagactcttttcctaatgctgctaagtggtacgatgccg

SEQ ID NO: 59430 - DNA, 247 bp, Glycine max
  Clone ID: 700675410H1
ggatccttttccgatgtacggaaccgagaatgaccgagatgattcggaacgaacggcgttcataagagcagagaagaagtacaagctctactacgacaacaatgcttcttccaagaacaaaaggaaaaagctacctaaacccgtggatttaacggaggtccttgacttcagatctattctagaatgctatctccaaaacgatgtgcttcctccgggtgttatcgttcttcacgacaattcacttctc

SEQ ID NO: 59431 - DNA, 247 bp, Glycine max
  Clone ID: 700675411H1
gtaggcttcgggcaattgtggatattatgccagtaatacccttactcttttttcttttagcttttgtttggcaagctgctgtaagttttcgatgatatctgtaatttgagtaatgtcttaaaaaaaaattaagaatttatcagaaaactaaaattcgaacattttaacaatttaaaagatcaaataagtcttacagtgtgaattatcgattccaatattgaaatttttggatatatacgaaaaaata

SEQ ID NO: 59432 - DNA, 245 bp, Glycine max
  Clone ID: 700675412H1
gaattaattagttgggcacagaggtctagtgtgtttttctgccttttgggttgggtttgaagttgctttttaattggtgtactggaagttgattcttaattttatacctgtgttgattttcagcaggagtcttctgtgtttagagagattccggtggtgatcatgtcatcggagaatgttttgacccgaattgataggtatgctcttgattagtttacacttattgaatctaatggattttacga

SEQ ID NO: 59433 - DNA, 244 bp, Glycine max
  Clone ID: 700675413H1
caatggagaagcctgtctggagagagataccagtggcatggaccccaccatctcgtctgggccacacattgtctgtttatggtggtaggaaaatactgatgtttgggggtctggccaagagtggccctttgcgttttcgttccagtgatgtattcacaatggatttaagtgaggaagaaccttgttggagatgtgtaacggggagcggcatgcttggtgctggaaatcctgggggcaagctcct

SEQ ID NO: 59434 - DNA, 244 bp, Glycine max
  Clone ID: 700675414H1
taaaactgaggtgtatgccatttatactgacgtttctgatgatgagttgtctgattcagaagtaaatggtactaatgagaaggatgaaagagattctgcgtatgaaacagataaagagtcatttatggatgttttggcagcattaattgttagcgaagaatttcaggggatagtagcatctgaaacagggtttagcaaagttttggatagtggctcaaatgctggacctagagtgtcaaatctc

SEQ ID NO: 59435 - DNA, 137 bp, Glycine max
  Clone ID: 700675415H1
ggaagaatgattacttggtgtggttattcaaaccaaaattaaccaaaataatatgatgactaaaaccactttggtgttttctctccctcttcgtattaaatatttttaacactagttccttacttgaaatcatacct

SEQ ID NO: 59436 - DNA, 252 bp, Glycine max
  Clone ID: 700675416H1
aaacgaaggagcgttgcgttgcgtacatagcttctcgcagtttctggcgataccatgagtgaagagagcgagagagagacaaatccgccgccgccgccgccgtgtccgacggtgagtcaacgtgagcaatggatggtagagtcgcaggtgtttcagatttaccaactcttcgccaccattcctcgcaacgcccaaaccctcatgttggagcttcaacgcgataatcacatgcagtatgtctccaaaggcctt

SEQ ID NO: 59437 - DNA, 151 bp, Glycine max
  Clone ID: 700675417H1
aattctgctcgagcttctcttctcttctcttctgtctccattggacagatagcattttccccttcccagacagatccaagaaccacagtgctcttttttgagccaacggtgctgattctttcccgcggaatcttgctcggcgttggggtgt

SEQ ID NO: 59438 - DNA, 148 bp, Glycine max
  Clone ID: 700675418H1
caaaagcacaatttgttagtggaaaaaccttcaaatatgatataattggtgctggttcacattcttcaggagattttcctgaaaaggaagatcaagaaaaacccaaaaagattgataccagattgagacaaagaatagatcctcaata

SEQ ID NO: 59439 - DNA, 189 bp, Glycine max
  Clone ID: 700675419H1
gtagttttttaatctggcttcatggtaatgaactaacaatattcatctttggggatgaatccttaattctacatgcagattttgataccaagttgctgtttagagatctgtttccttctagacaacggtctgtggtatctgttattttagttgaatcgaagctgcaacaaaatcttcctgatctttgct

SEQ ID NO: 59440 - DNA, 243 bp, Glycine max
  Clone ID: 700675420H1
caggattgttgcttcaccttatgcgaagaagctcgccaaggagttgaaggtggagttggggaggattgtggggactggaccgatgggaaggattgtggctaaagatgttgaggcatttgcagctgcagggaatgttgcagcagcggtagcaccagcactggggaagagtgcagcacctgccggggtagagttgggatccgtggtgcctttcaccacaatgcagagtgctgtgagtaggaacat

SEQ ID NO: 59441 - DNA, 166 bp, Glycine max
  Clone ID: 700675421H1
cgtttaccatttcagttatcttcgtcctcggagtggcatggcttcgctttgtgccctaaactatcctcctgctcgcagagacgattcagtcgtcgaagattaccatggtgtcaaaattgccgatccttatcgatggctcgaagatcctgatgcggaagaagtgaaa

SEQ ID NO: 59442 - DNA, 243 bp, Glycine max
  Clone ID: 700675422H1
aatgaatgctgctgagattaccgacaagttgggtctacactctctcagacagcgccactggtacattcagagcacctgtgcaacctctggggagggcctttacgaaggtctggactggctttccaacaacattgccaataaggcttaatgcctttgggagtcttgcggattggtaattctggatgcaggggtgaacattatctagcttttatttcttggtcctcttccaagacactcgaattt

SEQ ID NO: 59443 - DNA, 245 bp, Glycine max
  Clone ID: 700675423H1
cacttattaacactttccttagttcaatatggggaagcccttcttcactctctctctttcttccctttgcttgctactcttgtcgagtgcatgctttgctattacctccagcaagttcaacgagtgccaactcaacaacctcaacgcgttggaacccgaccaccgcgttgagtccgaaggtggtcttattgaaacatggaactctcaacaccctgagctgcaatgcgccggtgtcactgtttcca

SEQ ID NO: 59444 - DNA, 135 bp, Glycine max
  Clone ID: 700675425H1
gttcaaggaaagggagcaattggatttgcatttccgggatgtcctgagacgtttgagaagccacaacagcaatcaagcagaagaggctcaaggtcgcagcagcaactacaagacagtcaccagaagattcgtcac

SEQ ID NO: 59445 - DNA, 245 bp, Glycine max
  Clone ID: 700675426H1
gaaagctctctctcgtattgaatggctgcaaaaagctgatgtgcctactatagcacagattgaagagttccattcgatgcagaggatgatgaatgctcctgattcaaatgataacatcgatctactgttgagcattgatctgttgggtttacaaggagcaggtaaagcttttccaaacaagattgtttttgatgataagcttgtgttggctaacacacaagaattctttgatggaattttccagt

SEQ ID NO: 59446 - DNA, 248 bp, Glycine max
  Clone ID: 700675429H1
agcgagcgcaacattattcgagtacgtagcttaacaatattttaagcaattgctgctacaatgatagcgcggtttcctttgttgccgttgctgttgctgggaattgtttttctagcatcagtttctgtctcattacaggtgaagccgccgagtcaccacgagtgcctccagagttgcgagagtgaaacgcatccatacaagcggaaagcatgcaagcttagttgcaagttcgttcctgagcacgggga

SEQ ID NO: 59447 - DNA, 247 bp, Glycine max
  Clone ID: 700675430H1
atgtcttctagtgcaagtgatttcagaactgcaatggtgagtaaaaatagcaagcctcaagctactgcaatgcatgtgggagctatagaaattatcattgatagtttcgcaagtcctgactgcaacatagttggtgcaatgcttttggttgatacttatcataccaatcctgaaaatgcagttcttagtatttttgttgcgcctttcagaggcggaagggccattcgggtggttacattccaaatac

SEQ ID NO: 59448 - DNA, 248 bp, Glycine max
  Clone ID: 700675431H1
tgaaaatttgtttttttttccgcccatttggtgtgaatgtcgtatttttcgcttttaatgttggagggtattgttaaaattgttaattgatgcagttctgttgcatgtgacataggtagtggagagaggccttggaagaattcagatgctagacttgtgcttgaagatggttcaatttggagagcaaaatcgtttggtgcttcagggacccaagttggcgaagttgttttcaatacatcatggacagg

SEQ ID NO: 59449 - DNA, 144 bp, Glycine max
  Clone ID: 700675436H1
caattgtaaagtattcattttaaagaggggcagggatatttttaggattagtgagcttgcgttgtatgtccatttttgttgtcctggtcaatctggtaacaaaaccgttagaaagtgaagctgagctgcttataattttgattg

SEQ ID NO: 59450 - DNA, 131 bp, Glycine max
  Clone ID: 700675438H1
gccagagggttgaatctccagattacacaagcttatcctcaccaacttatatacggagctcctcatacagtgaaactggcacaagtgaccagacatctgagacagtagaggacgaagttcacagtacaagt

SEQ ID NO: 59451 - DNA, 133 bp, Glycine max
  Clone ID: 700675439H1
agtacaccgtattaaagaatttaagatatactatgatgagagcgcggttcccattactgttgctgggagttgttttcctggcatcagcttctgtctcatttggcattgcgtattgggagaagcagaaccccag

SEQ ID NO: 59452 - DNA, 240 bp, Glycine max
  Clone ID: 700675440H1
ccgtcttctctgctaccgatcccaagagagtagcaagagactcccatgttcccgtgttggcaccacttccaattgggtttgcggtgttcatggttcacttggccaacatccctatcaccggcactggcatcaacccagctagaagccttgggcctgctgtcatattcaacaacgagaaggcttgggatgaccagtggatcttctgggttggacccttcatcggtgctgctcttgctgcat

SEQ ID NO: 59453 - DNA, 244 bp, Glycine max
  Clone ID: 700675442H1
cagaaatgcttgctggtgtaaatccaaacttgattcgttgtcttaaggatttccctccacgaagcaagctagatagccaagtctatggtgatcatactagtcaaataaccaaagaacacctagagcccaacttagaagggctcactgtagatgaggcaattcaaaacaagagattgttcctactagatcatcatgacccaatcatgccatatttgaggcgaataaatgcaacctccacaaaggc

SEQ ID NO: 59454 - DNA, 242 bp, Glycine max
  Clone ID: 700675443H1
cccagagaaaaacccccagcttcgggacttggatatcttcctcagtattgtggatatgaacgagggagctcttcttctaccacactacaattcaaaagcgatagtgatactggtaattaatgaaggagatgcaaacattgaacttgttggcctaaaagaacaacaacaggagcagcaacaggaagagcaacctttggaagtgcggaaatatagagccgaattgtctgaacagatatatttgt

SEQ ID NO: 59455 - DNA, 134 bp, Glycine max
  Clone ID: 700675445H1
gttcaatatcctagtacaccgtattaaagaatttaagatatactatgatgagagcgcggttcccattactgttgctgggagttgttttcctggcatcagtttctgtctcatttggcattgcgtattgggaaaag

SEQ ID NO: 59456 - DNA, 245 bp, Glycine max
  Clone ID: 700675446H1
cagaaaggaaaggttaactaagaagcaatacttcaatggccacccttgttgttcataaccaaacttcttctgctcaagatgctgaggctctccaacaggctttcaaaggatggggggctgatgacaaggccattatagcaatactgggtcacagaaatgttcatcagaggcaagaaatcagaaaagcttatgaggagatttaccaagaggatctcatcaaacgccttgagtccgagtctctggtg

SEQ ID NO: 59457 - DNA, 246 bp, Glycine max
  Clone ID: 700675447H1
catcaatctcgtttgttctcactaactattacttcatcatgtcgtcgagcatagttggtcaagtcatcaaatgcaaagctgcggtttcatgggaggcagggaagccacttgtgattgaagaagtagaggtggcaccaccacaagctggtgaagtgcgtttgaagatcctctacacctctctttgccacactgatgtttacttctgggaagccaagggccaaactccattgtttcccgtatatttgg

SEQ ID NO: 59458 - DNA, 248 bp, Glycine max
  Clone ID: 700675448H1
ggggtatggagaagcttgtagagtacattaaaataagatatcgtaatatgcccatgtatattacagaaaatggtgggtgaacattgattacataactacaaaaaaatttctgttttcatttctgctacgcacaatttttttgaaaaatgtcattgtcattgtatttctattttcttaatgaaataaaattaaacggaagccactctatcatttctactttatttctggttttctaatgttgtatcgga

SEQ ID NO: 59459 - DNA, 130 bp, Glycine max
  Clone ID: 700675450H1
aagaatttgcaagagagatggttgcgggtgtaaatccatgcgtaattcgtggtactcaagagtttcctccaaaaagcaatctggatcctacaatctatggtgagcaaaccagtaagataacagcagatgc

SEQ ID NO: 59460 - DNA, 153 bp, Glycine max
  Clone ID: 700675451H1
aaacgaagcagcgttgcgttgcgtacatagcttctcgcagtttctggcgataccatgagtgaagagagcgagagagagacaaatccgccgccgccgccgccatgtccgacggtaagtcaacgtgagcaatggatggtagagtcgcaggtgttt

SEQ ID NO: 59461 - DNA, 107 bp, Glycine max
  Clone ID: 700675453H1
gcaccaacaaaaaaagtacaaagaaaacacacacacgacccctgtaccacatcgttattattagtatttttttattaaccttatcactagtcactataccctcttcc

SEQ ID NO: 59462 - DNA, 141 bp, Glycine max
  Clone ID: 700675454H1
agcaaaatgaccaagttcacaatcctcctcatctctcttctcttctgcatcgcccacacttgcagcgcctccaaatggcagcaccagcaagatagctgccgcaagcagctccagggggtgaacctcacgccctgcgagaag

SEQ ID NO: 59463 - DNA, 241 bp, Glycine max
  Clone ID: 700675456H1
ctcgagccgctgtatcccaagttatgggcccattgcaatcttcatcttctttcattgaacctgcatacatttatatcccggattcttcatctgcgcttggaactccagttactaacatgccttcgtcatcttggaactataataatacaccacaatctgtcaatgtgccacaagtgaccagagatgacatgggattcactgtagctggacaaacagctcctcttaattgttgctgcagcag

SEQ ID NO: 59464 - DNA, 239 bp, Glycine max
  Clone ID: 700675457H1
caataattccttcacttgcagaacttagttctctgttgcatcatcatcatcttcattagtgttagccctaaacttcaccttcaaccatgaccacagtgccaccacacagtgtccaagtgcacacaacaacacaccgctacgaagccggcgtcgtcccgccggctcgttttgaggcgccgcgttacgaagccggcatcaaggcgccctcttccatttaccattccgagagaggtccgacg

SEQ ID NO: 59465 - DNA, 97 bp, Glycine max
  Clone ID: 700675458H1
gtcttgtcaagcttgttgattcaagagacattgtggagttgaagctgaagcagcatgacgttgaagtaacaatcaggaaaaaggaggctatgcctca

SEQ ID NO: 59466 - DNA, 87 bp, Glycine max
  Clone ID: 700675459H1
ctcgagccgtttagctttgagagtctttaaattttctgtatttgttgtaatgttagtagtaccttaaattggccagatggagtttat

SEQ ID NO: 59467 - DNA, 237 bp, Glycine max
  Clone ID: 700675460H1
gggttgcaaagatgcttgggggtcttctccataggggtcataagataaaagggacagtggtgttgatgcgcaagaatgtgttggacgtgaatagcgtaaccagcgttgggggaattattggtcaaggtctcgacttagttggctcaacactcgatactcttactgccttcttgggccgatccgtatctctccagcttattagtgctaccaaagctgatgccaacggaaaaggaaact

SEQ ID NO: 59468 - DNA, 242 bp, Glycine max
  Clone ID: 700675461H1
agcgaaagactaatcgaaccgtctagtagctggttccctccgaagtttccctcaggatagctggagcccgcgggcgagttctatcgggtaaagccaatgattagaggcatcgggggcgcaacgccctcgacctattctcaaactttaaataggtaggacggtgcggctgctctgttgagccgcgccatggaatcgagagctccaagtgggccatttttggtaagcagaactggcgatgcggg

SEQ ID NO: 59469 - DNA, 177 bp, Glycine max
  Clone ID: 700675462H1
attcaatatcctagtataccttaataaataatttaagatactatgatgagagcacggttcccattactgttgctgggacttgttttcctggcttcagtttctgtctcatttggcattgcttactgggaaaaagagaaccccaaacacaacaagtgtctccagagttgcaatagcgag

SEQ ID NO: 59470 - DNA, 156 bp, Glycine max
  Clone ID: 700675463H1
gtttatttacctgaagaaatacactcgaacgagtataaaacttaggagaaggaggatcgaaacggcattgtggttgatgttccttcattcatcttcatttctcttgcaagtaactcttcagattttggttttttgttccctatccgctctctctta

SEQ ID NO: 59471 - DNA, 182 bp, Glycine max
  Clone ID: 700675465H1
atatgatgatgaactagcggaaaggagattgaagacaggggacttgtacatgattcgatctggttcagcattctatttggtgaacataggagaaggtcagagacttcacgttatctgcagcattgacccctctacaagcttgggattagagaccttccagtccttctatattgggggaggag

SEQ ID NO: 59472 - DNA, 172 bp, Glycine max
  Clone ID: 700675467H1
aaggaataataatgaaggtggatgggatgattggggtaacgaggcgagtccccggagcaagagcaagtcgaccggggattttaggaatttgaacggcggcggcggacgccggcgaggtcgaggtcgacggaggatatctacacgcggacgcagctggaggcgtcggctgcga

SEQ ID NO: 59473 - DNA, 239 bp, Glycine max
  Clone ID: 700675468H1
tggcagcaccagcaagatagctgccgcaagcagctccagggggtgaacctcacgccctgcgagaagcacatcatggagaagatccaaagccgcggcgatgacgatgatgatgatgacgacgacaatcacattctcaggaccatgcggggaagaatcaactacataaggaggaacgaaggaaaagacgaagacgaagaagaagaaggacacatgcagaagtgctgcacagaaatgagcga

SEQ ID NO: 59474 - DNA, 127 bp, Glycine max
  Clone ID: 700675471H1
cttaattattaacacttccttagttcaatatggggaagcccttcactctctctctttcttccctttgcttgctactcttgtcgagtgcatgctttgctattagctccagcaagctcaacgagtgcca

SEQ ID NO: 59475 - DNA, 236 bp, Glycine max
  Clone ID: 700675472H1
tttctctctctctctctctcacccagatcttgtagcaatggcgagcgctcccactccacgcgaagagttcgtgtacatggcgaactggcggagcaggccgagcgctacgaggagatggtggagttcatggagaaggtctccgcctccgccgagagcgaggagctgaccgtggaggagcgtaacctcctctccgtcgcctacaagaacgtgatcggcgctcgccgcgctcctggcgc

SEQ ID NO: 59476 - DNA, 82 bp, Glycine max
  Clone ID: 700675474H1
atggatttgtcaacgttgtccctctcgccttgccaggacagcacaacaccaacactacgattcccagaacgtgggaacaaaa

SEQ ID NO: 59477 - DNA, 226 bp, Glycine max
  Clone ID: 700675475H1
aggctcgaggctaaagctcataggggctgatcttatgtctattccgggagtctacaggattgttcaggagcttatcaaagatcaggttgcaaacatgtatctatggcccaaaaccttggaagttcaagtgttagatatgtcaaaagccttgaagaggcctgttggaattttacatgtaaaggttctgcaagcaatgaagttaaagaagaaagatcttcttggtgca

SEQ ID NO: 59478 - DNA, 129 bp, Glycine max
  Clone ID: 700675476H1
aagagactcgtacaggaaccaagtatgccacgctcgttgcaacctccttaaggtggagaaagaagaatgtgaagaaggtgaaattccacgaccacgaccacgaccacaacacccggagagggaacctca

SEQ ID NO: 59479 - DNA, 79 bp, Glycine max
  Clone ID: 700675477H1
gcaaaatccttcgcatcctcagagctcacggacttgcgcctgaaattccagaggatctggaccatgtgactaagaaggc

SEQ ID NO: 59480 - DNA, 236 bp, Glycine max
  Clone ID: 700674879H1
cttccatagccccccaaaaatgaagagcaccatcttctttgctctactttctcttttgtgccttcaccacctcatacctaccttcagccatcgctgatttcgtgctcgataatgaaggtaaccctcttgaaaatggtggcacatattatatcttgtcagacataacagcatttggtggaataagagcagccccaacgggaaatgaaagatgccctctcactgggtgcaatctcgca

SEQ ID NO: 59481 - DNA, 235 bp, Glycine max
  Clone ID: 700674880H1
tctctcttataatcacacacacctaccttatagctatggaaactggaggctttcatggctaccgcaagctccccaacacaacctctgggttgaagctgtcagtgtcagacatgaacatgaacatgaggcagcacaggtagcatcatcagatcagaactgcagcaaccacagtgcagcaggagaggagaacgaatgcacggtgagggagcaagacaggttcatgccatcgctaacg

SEQ ID NO: 59482 - DNA, 229 bp, Glycine max
  Clone ID: 700674881H1
acgagaacaaaaaaaaaaacgtgattcgctcttctcttcgaataaaccacaaaaccaacaaacgagaagaggagtgagagaagatggggttgtcgttcacgaagctgttcagcaggttgtttgcgaagaggaaatgaggattctgatggtaggtctcgatgctgctggtaagacaaccatcttgtacaagctcaagcttggagaaatcgtcaccacctccccaccatcg

SEQ ID NO: 59483 - DNA, 231 bp, Glycine max
  Clone ID: 700674882H1
ccattgtctttgaacactcatcaccatggccaagcttgttctttccctttgtttcacttcttttcagtggctgcttcgctctgagagagcaggcacagcaaaatgagtgccagatccaaaagctgaatgccctcaaaccggataaccgtatagagtcggaaggtgggttcattgagacctggaaccctaacaacaagccattccagtgtgccggtgttgcctctctcgctg

SEQ ID NO: 59484 - DNA, 230 bp, Glycine max
  Clone ID: 700674883H1
ataaattcgaggagataaacaaggttctgtttagtagagaggaagggcagcagcaaggggagcagaggctgcaagagagcgtgattgtggaaatctcgaaggaacagattcgggcactgagcaaacgtgccaaatctagttcaaggaaaaccatttcttctgaagataaaccttttaacttgagaagccgcgaccccatctactccaacaagcttggcaattctttgaga

SEQ ID NO: 59485 - DNA, 143 bp, Glycine max
  Clone ID: 700674884H1
gagtgacgaagccattttcgccattatcactcctctcgcaccaaaagcgatgaagctctagttgctgcttttctcgttttgatccgtacattttccctctgccgttgcgatccccgaagctgcgagatcttctgcctcgattg

SEQ ID NO: 59486 - DNA, 229 bp, Glycine max
  Clone ID: 700674885H1
gttcacacttatacaaaattctccaattagtaacttgttgagagttgctgcttggaagaaaggctgtttaatggttaagattgtgatgtctgggaatgcagcagtcaaaaggagtgattgggcctcattggtacaagtgtttttaacaaacagcaacagtacagagcattttgatgcatgtaagtggacaaaatcggaaccacattcctgggaattgacttcccaataa

SEQ ID NO: 59487 - DNA, 91 bp, Glycine max
  Clone ID: 700674886H1
catccttcgatcatacacttagttgcttccaattaagatggttctgctagagaagctctgggatgatgttgtggctggccctcaacctgag

SEQ ID NO: 59488 - DNA, 229 bp, Glycine max
  Clone ID: 700674887H1
gtgcacatggggaaaagcaaagaaggttgttcaggcacagaatctctctggtttgaaattttgaagtcccagatagaaactggaactccttacatattttttaaggacacttgcaataggaaaagcaacaacagaatttgggcacaatcaagtcatgaaacttgtgcactgagataattgagtatacaagtccaacagaaacggctgtgtgcaacttgatcaattgctc

SEQ ID NO: 59489 - DNA, 134 bp, Glycine max
  Clone ID: 700674888H1
cagagttcattctgtcattgataagtttgcagagcgaggattacggtctcttgcagtagcttaccaggaagttcctgatggaaagaaagaaagccaaggtgggccttggcaatttattggactcttgcctctat

SEQ ID NO: 59490 - DNA, 233 bp, Glycine max
  Clone ID: 700674889H1
ccgagaacaaaaaaaaaaacgtgattcgctcttctcttcgaataaaccacaaaaccaacaaacgagaagaggagtgagagaagatggggttgtcgttcacgaagctgttcagcaggttgtttgcgaagaaggaaatgaggattctgatggtaggtctcgatgctgctggtaagacaaccatcttgtacaagctcaagcttggagaaatcgtcaccaccatccccaccatcgga

SEQ ID NO: 59491 - DNA, 230 bp, Glycine max
  Clone ID: 700674890H1
gtttgttgtgagctatatgctagtttatcgtgaggagaatatgaagttgtttgttttctttgttgctgcagtagatttggtagcatggccatgccatggcgcaggctaccaaaggttccctctccgaatgttaatggctatggtgagcgttcttcggaggtaaaatgcgcaagttttaggcttgctgtggaagcacacaacatccgagcctttaaaaaattcctgaagag

SEQ ID NO: 59492 - DNA, 231 bp, Glycine max
  Clone ID: 700674891H1
ctcgtcttttgggtaccattcctcagtctatttcacagcaaactgtttggaatcaaatggcaacagtgagaacaccattgaattttgattctagcaagcagagcttttgtcaattttctattgaccttctcggtggaggaattttagtggacaaaactggagattggatcacacttatacaaaattctccaattagtaacttgttgagagttgctgcttgaagaaaggctg

SEQ ID NO: 59493 - DNA, 216 bp, Glycine max
  Clone ID: 700674892H1
atatcctagtacaccgtattaaagaatttaagatatactatgatgagagcgcggttcccattactgttgctgggagttgttttcctggcatcagtttctgtctcatttggcattgcgtattgggaaaagagaaccccagtcacaacaagtgcctccgaagttgcaatagcgagaaagactcctacaggaaccaagcatgccacgctcgttgcaact

SEQ ID NO: 59494 - DNA, 229 bp, Glycine max
  Clone ID: 700674893H1
caggatattcccttcttagaaagaagagatgagtcgccagggtttcagaagccacctgaacaagatcaattctatgcatctcttgttactgccaaagccataattacttgccagattcaagaatctggtcggaatctgctaagctctcctaaagtgtttgagcaaaataatgcaaagacaagactttcactggcttctgtgcacgaggaaccaattccaacgttgatgg

SEQ ID NO: 59495 - DNA, 230 bp, Glycine max
  Clone ID: 700674894H1
agttgcagaccgagctagctagctagcaagcaagcacagagatggaggcaaagcgaggccatgccctcatgtgcttggcacgtgtttcactcttcctctgcgctctaaccctatccgctgctcacggaagcaccacggttcaagacatcgcgagaaagttgaaactcggggacaacgagcttctgcgcacggagaagaagttcaaggttttcatggagaatacgggagga

SEQ ID NO: 59496 - DNA, 232 bp, Glycine max
  Clone ID: 700674895H1
tcctagtataccttaataaataatttaagatactatgatgagagcacggttcccattactgttgctgggacttgttttcctggcttcagtttctgtctcatttggcattgcttactgggaaaaagagaacccaaacacaacaagtgtctccagagttgcaatagcgagagagactcgtacaggaaccaagcatgccacgctcgttgcaacctccttaaggtggagaaagaag

SEQ ID NO: 59497 - DNA, 232 bp, Glycine max
  Clone ID: 700674896H1
atggattcttcaaatcaaatggcacgtatgtcactgagaaagggaagttcttcttgacctggtattctaacaaattgctgaatcatggtgatcaaatactagatgaagccaacaaagctttcctgggctgtaagtcaaattagcaatcaaagtatctggaattcactggtggtacaaagttgaaaatcatgctgcagagcttactgctggatattacaacctaatgatagag

SEQ ID NO: 59498 - DNA, 108 bp, Glycine max
  Clone ID: 700674901H1
cagcgagtgagcgagcgagcgaggtaggagtcacggtgatcccccgtctttgaattcagttcgcgacgatggggtccatccccgatccaggcgacttgagcgagttga

SEQ ID NO: 59499 - DNA, 254 bp, Glycine max
  Clone ID: 700674903H1
cttaattattaacacttccttagttcaatatggggaagcccttcactctctctctttcttccctttgcttgctactcttgtcgagtgcatgctttgctattagctccagcaagctcaacgagtgccaactcaacaacctcaacgcgttggaacccgaccaccgcgttgagtccgaaggtggtttgattcaaacatggaactctcaacaccctgagctgaaatgcgccggtgtcactgtttccaaactcaccctc

SEQ ID NO: 59500 - DNA, 257 bp, Glycine max
  Clone ID: 700674906H1
cgatgccggcgcaccttatgtacgatggggatgaccccaggctattcgagcactactccgctgtggcgcacgcataggcgtgtacaccgccaacgactacgcagacatcttggagtttctcgttgaacggtggagattggagaagcttgaaggattgatggctgaggggaagcgggcgcaggatttcgtgtgtgggttggcgccgaggattaggaggttgcaagagcgcgctgatgagcgagcgcgtaagatgaaga

SEQ ID NO: 59501 - DNA, 259 bp, Glycine max
  Clone ID: 700674909H1
aaaacaatcacgtttgacaacagctgtgattacttttcgactggtaaagtgaaagctatgacactgtctctttctgtgttggtagccattgaaatgttcaactctctcaatgccctgtctgaggatggaagccttttgacaatgcccccttgggtcaacccttggcttcttttggcaatgtcagtgtcatttggtctgcactttttgatcttgtacgtgccattcttagcacaagtatttggtattgtgcccctgagct

SEQ ID NO: 59502 - DNA, 258 bp, Glycine max
  Clone ID: 700674912H1
aattgtgatgtctgggaatgcagcagtcaaaaggagtgattgggcctcattggtacaagtgtttttaacaaacagcaacagtacagagcattttgatgcatgtaagtggacaaaatcagaaccacattcctgggaattaatcttcccaatagaggtatgtggtcctaataatggttttgaaatgtggagttctgagtgggcaaatcaaacttcatggcatttgagtttccttattgacaatcccaaacagtctacagt

SEQ ID NO: 59503 - DNA, 259 bp, Glycine max
  Clone ID: 700674913H1
agagggtcttctcagaagaaaatgggaagagggaagattgaaatcaaacggatcgagaacaccaccaataggcaagtcaccttctgcaagcgccgcaacggtttgctgaagaaagcttatgaattatcagttctgtgtgatgcggaagttgcccttgttgtcttctcaacccgtggccgtttgtatgagtatgccaacaacagtgttagggccaccattgaaaggtacaagaaggcaaatgctgctgcttcaaacgcag

SEQ ID NO: 59504 - DNA, 257 bp, Glycine max
  Clone ID: 700674914H1
ggtttagcgcacttcttctagatttaaggaagatgggtaaggaaaaggttcacatcagtattgtggtcattggccatgtcgactctgggaaatccactaccactggtcacctgatttacaagcttggaggcattgacaagcgtgttattgagaggtttgagaaggaagctgctgagatgaacaagaggtctttcaagtatgcctgggtgctggacaaacttaaggctgagcgtgaaagaggaatcaccattgatatt

SEQ ID NO: 59505 - DNA, 262 bp, Glycine max
  Clone ID: 700674915H1
aaagtttgaaacgtgtcaaaattaaaaagcgagagagattaaagaatagagttgttggtgtaacaggcgagggcagagggaagggttagggaacaattggagtgcacgaaagcgatgccaaaaaaaccaaacaatcattaacaacagccctaacccccccgacgtctttcaaaactgattcggagcaattaatgtaaaatctatggacatcaacgaggaatcttcattctctctccgtttttgtttgcatcattaatagacc

SEQ ID NO: 59506 - DNA, 257 bp, Glycine max
  Clone ID: 700674916H1
aacttattaacactttccttagttcaatatggggaagcccttcttcactctctctctttcttccctttgcttgctgctcttgtcgagtgcatgctttgctattacctccagcaagttcaacgagtgccaactcaacaacctcaacgcgttggaacccgaccaccgcgttgagtccgaaggtggtcttattgaaacatggaactctcaacaccctgagctgcaatgcgccggtgtcactgtttccaaacgcaccctca

SEQ ID NO: 59507 - DNA, 263 bp, Glycine max
  Clone ID: 700674917H1
caagaaggatattagtggaaatgccagagcattgaggaggttgagaacagcatgtgagaaggccaagaggactctctcttccactgctcaaaccacctttgagattgattccttgtatgagggtattgacttctacacaaccatcacctctgcccgtttcgaagagcttaacatggacctattcaggaagtgcatggagcccgtggagaagtgtttgcgggatgctaagatggacaagagcaccgtccatgatgttgttcttg

SEQ ID NO: 59508 - DNA, 258 bp, Glycine max
  Clone ID: 700674918H1
gtggtcttgttcaacacaaagaaccacgcttctaggcttcttgtgagggcttcagacgagcctgcagcggcggcacccgcaaccaccacccctccagctgaagctgaagcaaagccaaaaccaccacctattggccccaagagaggtgctaaggtgaagattcttaggaaggaatcctactggtacaaaggcactggttcagtggttgctgttgatcaggaccccaacactcgctaccctgttgtggttcgattcaac

SEQ ID NO: 59509 - DNA, 243 bp, Glycine max
  Clone ID: 700674919H1
ggctcgagacaaattctggactacacacgatataaattttgctttaccagaagaggaaaagatggaactgattagaagtataggcattcctgctgatgttcttgcgaagcgagctcatgaatttgaaaaacatgttgctcatgaaagcctcaaggatcaaattcctgctgttgacaagttgtattctactaaggttaataagtttgcaaaaattatgaaccttagacaaagtgttgttggtga

SEQ ID NO: 59510 - DNA, 255 bp, Glycine max
  Clone ID: 700674920H1
gtggtatttattaccaagggcctgactcgcggaaggaacttaatgagaagaaaggtgatggtttttttgtgccggatgtctcgaaaagggaagacagtactgcaacctcaacctcagagaagagtgaggtggttgtgagggagcgagaacatccggagaatatgttagaggcagaagcagagtataatgccctccttgatggtttaggtcctcggttttttggatggtggggtacagggattcttcctgttgatg

SEQ ID NO: 59511 - DNA, 256 bp, Glycine max
  Clone ID: 700674923H1
gtaatcgaaggaggatttgaaggaagtgacccacaaggtttactttgatgttgagattaatggaaaagaagcaggtcgtattgtgatgggtctttttggaaaggctgttccaaaaactgcagaaaactttcgagctctttgcactggggaaaagggaactggtaaaagtggcaagcctctccattacaaaggtagctcattccatagaattattcctagctttatgctccaaggaggtgattttacacatggcaat

SEQ ID NO: 59512 - DNA, 258 bp, Glycine max
  Clone ID: 700674924H1
gcgaagacaatgaggaaccctcgtagtgctctctgcaaaactgctattatggctgctgctgatattttcaacgcctttggtgacaagttgcatgacccagaaatctccgatgcatttgatggcttgctgctacagctgctgctgaaggcatcccaagacaaaaggtttgtgtgtgaagaagctgacagggcacttggcttaatggttggttccatgacccctcttccactgcttcagaaaatgagggtatatgggagt

SEQ ID NO: 59513 - DNA, 254 bp, Glycine max
  Clone ID: 700674925H1
ataacactcacaaagacacacagagtgttcgacgacgacacacacacacaacaaaagctccacggaaaatcttgctacggagattccgacgaacgtggtcgcggcggtgctcctccttcgtcccgaaactgagggcctcaaagtataaactttggtagtgggtaggatctggcggtgtatgatgggatcttgcatatgcccgttggagactccggcgaggttgctttggaccacaagcttcttccgtcataagc

SEQ ID NO: 59514 - DNA, 256 bp, Glycine max
  Clone ID: 700674926H1
gttcaatatcctagtataccttaataaataatttaagatactatgatgagagcacggttcccattactgttgctgggacttgttttcctggcttcagtttctgtctcatttggcattgcttactgggaaaaagagaaccccaaacacaacaagtgtcttcagagttgcaatagcgagagagactcgtacaggaaccaagcatgccacgctcgttgcaacctccttaaggtggagaaagaagaatgtgaagaaggtg

SEQ ID NO: 59515 - DNA, 257 bp, Glycine max
  Clone ID: 700674927H1
gcagcgaaccatataatttaatttaatttgtgtccacatgagaacgtcgtgacctgcattttctatctcgcaacaccgcgataatggtataaaatagtttcagttacgttgcgttgattgattggtatgaagtgattgactttttttcttcttctattctcacacatacccatctactccttccctcatggctgaacaatcttccaactccatttacgatttcactgtcaaggacatcagtggaaatgatgtgagtc

SEQ ID NO: 59516 - DNA, 259 bp, Glycine max
  Clone ID: 700674928H1
gcaggaatacctctatttcttgcaaatcgagctcatgaatttgaaaaacatgttgctcatgaaagcctcaaggatcaaattcctgctgttgacaagttgtattctactaaggttaataagtttgcaaaaattatgaaccttagacaaagtgttgttggtgatcttaaacttcttactgatgagtagttgtatgagggtaagcatattcctgtatctaatattagtgcaggggaaaatcatgtagttcaaatacccctaa

SEQ ID NO: 59517 - DNA, 260 bp, Glycine max
  Clone ID: 700674931H1
gtggtgcaagatgctattcatgtgcccaattgtgagagttacactttccacagtgtttctgcctcgactatgttcctgtacttttgggatgcaatggggagacccccagtagaaaaagtgtcccacgtcatccctgaagttccttcccttgaagggtgcttcacaacccaattcatagatttcatcacttcacagtatgagttccacaagttcagcaagtcgactatatacaacaccacaagggtaattgagagtcttac

SEQ ID NO: 59518 - DNA, 264 bp, Glycine max
  Clone ID: 700674932H1
ggatccttttccgatgtacggaaccgagaatgaccgagatgattcggaacgaacggcgttcagaagagcagagaagaagtacaagctctactacgacaacaatgcttcttccaagaacaaaaggaaaaagctacctaaacccgtggatttaacggaggtccttgacttcagatctattctagaatcctatctccaaaacgatgtgcttcctccgggtgttatcgttcttcacgacaacttcacttctccagttttttctttgca

SEQ ID NO: 59519 - DNA, 259 bp, Glycine max
  Clone ID: 700674933H1
gaacagtacaagagtctgagcatcggttaacccaactgcacaggtagtctccaaataatggagcctcatgatgagactggatgccaggctcctgaacgccccattctttgcattaataattgtggcttctttggaagagcagctaccatgaacatgtgttccaagtgttacaaggacatgctgttgaagcaggagcaggacaaatttgcagcatcatccgttgaaaacattgtgaatggcagttccaatggcaatggaa

SEQ ID NO: 59520 - DNA, 257 bp, Glycine max
  Clone ID: 700674934H1
gcaagagatattaagcaaaggcttgcagacacagattcaagagctgagcctcagactatcaagattaaccaacctgaccaggcaaccagtggtggtcaacctgcgcaaaagtcggcttgctgtggttcatgaaaagaatcagtatctgtagaaagaggtgcacaggtttctgcaatagcactcatctgggtgctaatgttattctgatgacattataagtgggagcatgtatttgtccctctgtatctcccaactgc

SEQ ID NO: 59521 - DNA, 244 bp, Glycine max
  unsure (1)..(244): unsure at all n locations
  Clone ID: 700674935H1
tcgagngataagaagaagaagaagatgtcgtacctgttgcctcacttgcactctggatgggccgtcgatcaagcaatcctcgccgaagaggagcgtctcgtcgtcatccgtttcggccacgactgggacgaaacctgcatgcagatggacgaggtgttggcgtcagtggcggagacgataaagaactttgcggtgatatacctggtggacataacggaggtgccggatttcaacaccatgtacg

SEQ ID NO: 59522 - DNA, 251 bp, Glycine max
  Clone ID: 700674936H1
ctagtataccttaataaataatttaagatactatgatgagagcacggttcccattactgttgctgggacttgttttcctggcttcagtttctgtctcatttggcattgcttactgggaaaaagagaaccccaaacacaacaagtgtctccagagttgcaatagcgagagagactcgtacaggaaccaagcatgccacgctcgttgcaacctccttaaggtggagaaagaagaatgtgaagaaggtgaaatt

SEQ ID NO: 59523 - DNA, 254 bp, Glycine max
  Clone ID: 700674937H1
tacgacactaaattcgaggagataaacaaggttctgtttggtagagaggaggggcagcaacaaggggaggagaggctgcaagagagtgtgattgtggaaatctcaaagaaacaaattcgggaactgagcaaacatgccaaatctagttcaagcaaaaccatttcttctgaagataaacctttcaacttgagaagccgcgaccccatctattccaacaagcttggcaagttgtttgagattaccccagagaaaaa

SEQ ID NO: 59524 - DNA, 256 bp, Glycine max
  Clone ID: 700674938H1
gaaagatttgttggagggaaatttttccttcgatattaaatctcgctctagattggaaaaagtttcctctacaaaagcacaatttgttagtggaaaaaccttcaaatatgatataattggtgctggttcacattcttcagaagattttcctgaaaaggaagatcaagaaaaacccaaaaagattgatgccagattgagacaaagaatagatcctcaatacaatgaggttcaggctcagatggaaacaaatttgttt

SEQ ID NO: 59525 - DNA, 255 bp, Glycine max
  Clone ID: 700674939H1
ctcgagccgattgtctttgaacactcatcaccatggccaagcttgttctttccctttgttaccttcttttcagtggctgcttcgctctgagagagcaggcacagcaaaatgagtgccagatccaaaagctgaatgccctcaaaccggataaccgtatagagtcggaaggtgggttcattgagacctggaaccctaacaacaagccattccagtgtgccggtgttgacctctctcgctgcacccttaaccgcaatg

SEQ ID NO: 59526 - DNA, 259 bp, Glycine max
  Clone ID: 700674940H1
taaatattggaggcaagcttcagacggacgcgagcaatgggaatactagagtctacatgaatggccgagaaataacaaagattgagcttagaatgttaaagctagcaaatgttcaatgtccacgagatacccatttctgggtttatgaagatggatcttatgaggaagaagggcaaaataatattaagggaaacatatggggaaaggcaggcatccactcgtttcatttgttcattattgtcattgcctgtacctccta

SEQ ID NO: 59527 - DNA, 254 bp, Glycine max
  Clone ID: 700674941H1
cttacatgatggatgaccctctaactgaaggaccaagtccaacttcaaagcttgtgggaagatctcagggaatatacgctttggcttcacaacatgagcctgggttgctcatggtgacaaattttctcttcactttgggcatttacaatggcagcaccctcagcattcttggcagaaaccctacatttataaaagttagtgaaatgccaattgttgggggtactgggatcttcaaatatgcaaggggttctgct

SEQ ID NO: 59528 - DNA, 110 bp, Glycine max
  Clone ID: 700674943H1
cacaggttgccgcaccttaaaaccggaaacaaaagcaatcgttacttgatttcaagaatttctcaatttcttcctacttctttgtgtacgatttcttaagggaaagaaaa

SEQ ID NO: 59529 - DNA, 254 bp, Glycine max
  Clone ID: 700674944H1
ctcgagccgagttgcaattccaggatgtcctgagacgtttgaggagccacaagaacaatcacacagaagaggctcaaggtcgcagaagcagcagctacaggacagtcaccagaagattcgtcacttcaatgaaggagacgtactcgtgattcctcctggtgttccttactggacctataacactggcgatgaaccagttgttgccatcagtcttcttgacacctctaacttcaataaccagcgtgatcaaaccc

SEQ ID NO: 59530 - DNA, 255 bp, Glycine max
  Clone ID: 700674945H1
ctgatgtgcctaccatagcgcaaattgaagagttccattcgatgcagagaatgatgaatgctcctgattcaaatgataatattgatctactgttgagcattgatttgttgggtttacaaggagcaggtaaagcttttccaaacaagattgtttttgatgataagcttgtgttggctaacacacaagaattctttgatggaaattttccagtggattcttggttaccaatttttgtgaattgtctttatcctgtaa

SEQ ID NO: 59531 - DNA, 263 bp, Glycine max
  Clone ID: 700674948H1
tctatggcctttgaattgaagtgtggcagaaaaagagctgaattgtctgaacaagatatatttgtaatcccagcaggttatccagttgtggtcaacgctacctcagatctgaatttctttgcttttggtatcaatgccgagaacaaccagaggaacttccttgcaggttcgaaagacaatgtgataagccagatacctagtcaagtgcaggagcttgcgttccctgggtctgcaaaagatattgagaacctaataaagagcca

SEQ ID NO: 59532 - DNA, 257 bp, Glycine max
  Clone ID: 700674949H1
catctttctccgccaccctagtccaagactcgttaagattagccactgatgttatccccaactactccttcggctgcgtcaacgccatcaccggcgcctctgtcccggcccaagggcttttgggcctgggccgtggcccgctgtccttgctctcccaatccgggtcaaattactcgggcatcttctcttactgtctccccagcttcaagtcctactacttctctgggtcgctcaagctcgggcccgtgggccagccc

SEQ ID NO: 59533 - DNA, 254 bp, Glycine max
  Clone ID: 700674950H1
tcgaggaggaagaagaagaagaagatgtcgtacctgttgcctcacttgcactctggatgggccgtcgatcaagcaatcctcgccgaagaggagcgtctcgtcgtcatccgtttcggccacgactgggacgaaacctgcatgcagatggacgaggtgttggcgtcagtggcggagacgataaagaactttgcggtgatatacctggtggacataacggaggtgccggatttcaacaccatgtacgagctctacga

SEQ ID NO: 59534 - DNA, 253 bp, Glycine max
  Clone ID: 700674952H1
tgtctttgaacactcatcaccatggccaagcttgttctttccctttgtttccttcttttcagtggctgcttcgctctgagagagcaggcacagcaaaatgagtgccagatccaaaagctgaatgccctcaaaccggataaccgtatagagtcggaaggtgggttcattgagacctggaaccctaacaacaagccattccagtgtgccggtgttgccctctctcgctgcacccttaaccgcaatgcccttcgta

SEQ ID NO: 59535 - DNA, 253 bp, Glycine max
  Clone ID: 700674953H1
ctcgagccgtgtccctttccatttcccattagcgtcttctcctcacgcccgctcatgagccaccatcgcaacaaccacgctgcgcacactgtttcaaccggcgacgcgaatcccgatgactgtcaccaaccggtcgatgctcccctttccgcagcagaacagattagggctacggtttcatcggaggacaacgcggcacccgcatcctccaccgccgatcgcttcgaccgcatcaacaaccacgccgcgtcga

SEQ ID NO: 59536 - DNA, 83 bp, Glycine max
  Clone ID: 700674954H1
ctgtcgtctctgctaccgatcccaagagagtagcaagagactcccatgttcccgtgatggcaccacttccaattgggtatgcg

SEQ ID NO: 59537 - DNA, 253 bp, Glycine max
  Clone ID: 700674955H1
tcagattgttggcctaattggtagtcatttatgcatatggaggcggaatgggaaaagaagcatatttccttcactggaaggcaaatttgtaaaaggttcatgcatgcgttactttgatccagaagctgtggttggatgtgatgatggagctgttcgtgtttttgacatgtacagtaggaaatgttctcaaataataagaatgcactatgcaccaataacatgcttatgtttgagtgaagatcaattgatcatg

SEQ ID NO: 59538 - DNA, 254 bp, Glycine max
  Clone ID: 700674956H1
caatatcctagtacaccgtattaaagaatttaagatatactatgatgagagcgcggttcccattactgttgctgggagttgttttcctggcatcagtttctgtctcatttggcattgcgtattgggaaaagcagaaccccagtcacaacaagtgcctccgaagttgcaatagcgagaaagactcctacaggaaccaagcatgccacgctcgttgcaacctccttaaggtggaggaataagaagaatgcgaagaa

SEQ ID NO: 59539 - DNA, 241 bp, Glycine max
  unsure (1)..(241): unsure at all n locations
  Clone ID: 700674957H1
ctcangtgcgtccgcaacgactctgttggctgatgggtgccatatttgtatgctatggtgcatgatagttcagtgtctacaataccaggtgattttgtcattggtgttaagttgacaaccataaacaatatgtgtgcatatgggctcaatcctggtatttcaggttctcgtcttttgggcaccattcctcagtccatttcacagcaaactgtttggaatcaaatggcaacagtgagaacac

SEQ ID NO: 59540 - DNA, 255 bp, Glycine max
  Clone ID: 700674958H1
gcaatgcgtcggtgtcactgtttccaaacgcaccctcaatcatcacggcctccacttgccatcttactcaccttatccccaaatgatcattgtcgttcaagggaagggagcaattggatttgcatttccgggatgtcctgagacgtttgagaagccacaacagcaatcaagcagaagaggctcaaggtcgcaggagcaactacaagacagtcaccagaagattcgtcacttcaatgaaggagacgtactagtgat

SEQ ID NO: 59541 - DNA, 80 bp, Glycine max
  Clone ID: 700674959H1
cagcctctcttggttgatgacaccaagagacagcacaaagacccttcgtttcaatcccacaacacactcattcctcattc

SEQ ID NO: 59542 - DNA, 253 bp, Glycine max
  Clone ID: 700674960H1
attacatgagacagagaaagggttgacggacagagaacccaccttttgttgtattgcagatccatccgctctgccaccaggtgaatggaaggaagtggcggtggcggtgcttcaccgtctgcaccggtgaagcagtatttgcacgatttctcgaagctgtttcagtactatctggataaatccactccacattccacgtacagatggattgggactttcgtgatagcatccatctacgttttgcgcgttgttt

SEQ ID NO: 59543 - DNA, 254 bp, Glycine max
  Clone ID: 700674961H1
ctccaccaccacctcctccgttcggatctccggcggacctactatccctactactactctactctatttacacggaagaacaaaaaactatccccctcccctaaaaaaaaccccaaagcggctcggttagggtttagttttgtaccatttcgtgtaatctaatttttcatccgtaaaaatctaattttgaggcggcgagatggcggagattcaggtgcagcatcagagtccggtgtcggcggctcctcctccaa

SEQ ID NO: 59544 - DNA, 258 bp, Glycine max
  Clone ID: 700674962H1
atcgagccgctcgagccgcattggtccttaaacactcatcagtcatcaccatggccaagctacgttttttcagctttgttttctgcttttcagtggctgctgcttcgctttcagttccagagagcagcctcagcaaaacgagtgccagatccaaaaactcaatgccctcaaaccggataaccgtatagagtcagaaggagggctcattgagacatggaaccctaacaacaagccattccagtgtgccggtgttgccct

SEQ ID NO: 59545 - DNA, 255 bp, Glycine max
  Clone ID: 700674963H1
ttctctccattggtccttaaacactcatcagtcatcaccatggccaagctagttttttccctttgtttcctgcttttcagtggctgctgcttcgctttcagttccagagagcagcctcagcaaaacgagtgccagatccaaaaactcaatgccctcaaaccggataaccgtatagagtcagaaggagggctcattgagacatggaaccctaacaaccagccattccagtgtgccggtgttgccctctctcgctgc

SEQ ID NO: 59546 - DNA, 262 bp, Glycine max
  Clone ID: 700674964H1
aggagctcttcttctaccacactttaattcaaaggcgatagtgatactggtaattaatgaaggagatgcaaacattgaacttgttggcctaaaagaacaacaacaggagcagcaacaggaagagcaacctttggaagtgcggaaatatagagccgaattgtctgaacaagatatatttgtaatcccagcaggttatccagttgtggtcaacgctacctcaaatctgaatttctttgctattggtattaatgccgagaacaac

SEQ ID NO: 59547 - DNA, 257 bp, Glycine max
  Clone ID: 700674965H1
attctctccattggtccttaaacactcatcagtcatcaccatggccaagctagttttttccctttgttttctgcttttcagtggctgctgcttcgctttcagttccagagagcagcctcagcaaaacgagtgccagatccaataactcaatgccctcaaaccggataaccgtatagagtcagaaggagggctcattgagacatggaaccctaacaacaagccattccagtgtgccggtgttgccctctctcgctgca

SEQ ID NO: 59548 - DNA, 251 bp, Glycine max
  Clone ID: 700674967H1
cgcaacacactttcactgagaaaggatctctatctaccaaggagcagaataaaacccttctctctggtaagtgaataagagaatggcttcagatcggaaacttcacactttcgaggaggtggcaaagcacgaccagaccaaggattgctggctcatcatttctggcaaggtgtatgatgtcacccctttcatggaggatcatcccggaggtgatgaggttttgttatctgcaacagggaaagatgcaacca

SEQ ID NO: 59549 - DNA, 250 bp, Glycine max
  Clone ID: 700674968H1
ctccattactgatggtattgacaaaactagtgcaactttgcaatttagaaagttagcagattgtgattttctcaagagatactttaagcagatgtctaatgttttatgggtggctcctgaggacaaggcgagtttatggtcacaacttcattatgtttcgtgcaataatctggaaatgcaagaagcttatcttgtcaatctcgtaaatgtgttacgagaattgtatttgcacagtccagaggaagctcgc

SEQ ID NO: 59550 - DNA, 250 bp, Glycine max
  Clone ID: 700674969H1
atccctagtagttgaggcacttcatgcattcatacaagatgaatcagagcacaagtgattgctattggtgtctttagtaatatggtgctatccaattggcaaacctcatgagtagtagaagcagcagtcaagagggaaagaaccatggcatatgccttctctcatcagtggagggcctgctctagccaaggcctaggtaattatgaacttggcaaagctagttggagttggagctagaaggatcgttgga

SEQ ID NO: 59551 - DNA, 252 bp, Glycine max
  Clone ID: 700674970H1
atcctagtacaccgtattaaagaatttaagatatactatgatgagagcgcggttcccattactgttgctgggagttgttttcctggcatcagtttctgtctcatttggcattgcgtattgggaaaagcagaaccccagtcacaacaagtgcctccgaagttgcaatagcgagaaagactcctacaggaaccaagcatgccacgctcgttgcaacctccttaaggtggaggaagaagaagaatgcgaagaagg

SEQ ID NO: 59552 - DNA, 253 bp, Glycine max
  Clone ID: 700674972H1
ctgatgtgcctaccatagcgcaaattgaagagttccattcgatgcagagaatgatgaatgctcctgattcaaatgataatattgatctactgttgagcattgatttgttgggtttacaaggagcaggtaaagcttttccaaacaagattgtttttgatgataagcttgtgttggctaacacacaagaattctttgatggaaattttccagtggattcttggttaccaatttttgtgaattgtctttatcctgt

SEQ ID NO: 59553 - DNA, 253 bp, Glycine max
  Clone ID: 700674974H1
gtgaaccccaaacacaacaagtgtctccagagttgcaatagcgagagctcctcgtacaggaaccaagcatgccacgctcgttgcaacctccttaaggtggagaaagaagaatgtgaagaaggtgaaattccacgaccacgaccacgcccacaacacccggagagggaacctcagcaacccggtgagaaggaggaagacgaagatgagcaaccacgtccaatcccattcccacgcccacaacctcgtcaagaag

SEQ ID NO: 59554 - DNA, 252 bp, Glycine max
  Clone ID: 700674975H1
cgctatctgtcgtagccgccagttaaagttttgtttcggaattctgactttgcttactctctctattcaaaaagaaccgttctttgctttgggtacgcagatttcatacgcagaacattcttcactgcaaatcatcaatggattcctctgccaacaacaaagagattcagatagtgcaagtgcaacccacacccgaagaagaccccgagaagaaaaggataaaggaagaaaaggctagagagaagcaattga

SEQ ID NO: 59555 - DNA, 251 bp, Glycine max
  Clone ID: 700674976H1
ggcggtggtcgtcctcccaaggaggatggtgaaaagcaacagcaacaacaacaacaacctgtgtctcttaggcttgacgacgtgaaccctgtgggactgggtcgaaggtcgcggcagttatttgatgaggtttggagaaagttctcgggattgggtcagatttctggcactatccggtcggatgatcaggaggctttggatgcccttctggtccgcgaaggtccgatgtgcgagttcgcaatccctggcgc

SEQ ID NO: 59556 - DNA, 251 bp, Glycine max
  Clone ID: 700674977H1
aatggcttcaaccgacaagtcaccggacccaacgccggcgaagggtccggatccaactccggggaagccgatgagtgttggtcagcacgtgatcgacaagagtgcaatgatggtgcagtcgctggaccccattaagcagatgagtcagcacgtgtgctccttcgctatctacagccatgacatgtctcgccagatagagacacatcactactgctccagactccaccagaacttcatacaatgtgctgtct

SEQ ID NO: 59557 - DNA, 253 bp, Glycine max
  Clone ID: 700674978H1
tcgaggaggaagaaagaagagaagatgtcgtacctgttgcctcacttgcactctggatgggccgtcgatcaagcaatcctcgccgaagaggagcgtctcgtcgtcatccgtttcggccacgactgggacgaaacctgcatgcagatggacgaggtgttggcgtcagtggcggagacgataaagaactttgcggtgatatacctggtggacataacggaggtgccggaattcaacaccatgtacgagctctacg

SEQ ID NO: 59558 - DNA, 255 bp, Glycine max
  Clone ID: 700674979H1
tgtttgttgttctcactgacttcaccatggcgaccagagccaagctttctttagctatcttccttttctttcttttagccttgatttcaaacctagccttgggcaaacttaaagaaaccgaggtcgaagaagatcccgagctcgtaacatgcaaacaccagtgccaacagcaacggcaatacactgagagtgacaagcgaacatgcttgcaacaatgtgacagtatgaagcaagagcgagagaaacaagtcgaag

SEQ ID NO: 59559 - DNA, 255 bp, Glycine max
  Clone ID: 700674980H1
gcattatttggggtgacactgagcaatactggaactggacaaccgataccaattccaggttcccggaagttgctgaacttagagatgtgtgttggcttgaaattcgtggggtgctaaacacccttgtcttgtccccaaatactcagtatgctgcttatcttgttttcaagatgattgatgcccgtggatttcataaccgtcctgtggagttatcggtcaatgtctttggtggccatggtagtaccaaaattgtct

SEQ ID NO: 59560 - DNA, 253 bp, Glycine max
  Clone ID: 700674981H1
tcctagtataccttaataaataatttaagatactatgatgagagcacggttcccattactgttgctgggacttgttttcctggcttcagtttctgtctcatttggcattgcttactgggaaaaagagaaccccaaacacaacaagtgtctccagagttgcaatagcgagagagactcgtacaggaactaagcatgccacgctcgttgcaacctccttaaggtggagaaagaagaatgtgaagaaggtgaaatt

SEQ ID NO: 59561 - DNA, 248 bp, Glycine max
  Clone ID: 700674982H1
gttctgttctacttgctctcaagtttcatcttgggctgtaggctgtagcataccatgaccaccaaggatccaaaatccgtgtacgactttgttgtcaaggatgctaagggagatgatgtagatctctccttttacaagggaaaagtccttctgattgtcaatgttgcttctcaatgcggcttgaccaactccaattatacggagctgaatcaattgtatgacaagtataaagaccaaggcctggagat

SEQ ID NO: 59562 - DNA, 247 bp, Glycine max
  Clone ID: 700674983H1
ctcgagccgattgtctttgaacactcatcaccatggccaagcttgttctttccctttgtttcacttcttttcagtggctgcttcgctctgagagagcaggcacagcaaaatgagtgccagatccaaaagctgaatgccctcaaaccggataaccgtatagagtcggaaggtgggttcattgagacctggaaccctaacaacaagccattccagtgtgccggtgttgccctctctcgctgcaccctta

SEQ ID NO: 59563 - DNA, 249 bp, Glycine max
  Clone ID: 700674984H1
gatcttaatgctaaaagaaaagcagttataaaaaaaattgaaaaaattaaaaaggggcttgtaatttcagagacaaatattcattcaaacaaaacaacttatgatagtaaaagggtagaattcgaaaaaaaaaaattgcagatattacaaagaagaagaaatgctcgattaactcgtaaatcacattcttttttaaaatttttcatgaaaaggatatacagagatatatttctatatatcagttgtatt

SEQ ID NO: 59564 - DNA, 251 bp, Glycine max
  Clone ID: 700674988H1
atagcaaacgctgccgaattcgttatcgctttgcactagcagctttgaaacccggttcatccgaagccctacaccgaaccatgtcgaggagaaaggttagagagccaaaggaggaaaatgtgactctgggtccagctgttagagatggtgaacacgtttttggcgttgctcgcatctttgcctccttcaacgacaccttcatccatgtcactgatttgtctggcagggaaacccttgtccgaatcactggt

SEQ ID NO: 59565 - DNA, 252 bp, Glycine max
  Clone ID: 700674989H1
ggagaaagaagaatgtgaagaaggtgaaattccacgaccacgacgagacacacaacacccggagagggaacctcagcaacccggtgagaaggaggtagacgaagatgagcaaccacgtccaatcccattcccacgcccacaacctcgtcaagaagaagagcacgagcagagagaggaacaggaatggcctcgcaaggaggaaaaacgcggagaaaagggaagtgaagaggaagatgaggatgaggatgagga

SEQ ID NO: 59566 - DNA, 248 bp, Glycine max
  Clone ID: 700674990H1
caagtgttaaacgccctgctttgatcttgctcaagaaagaggaggagaaattgaaccattttgatggccaatttgtaaaagctgaaatagctgattttgtaacctccaacaagcttcctttggttacaacttttactagagaaagtgccccggtaatctttgaaactcaaatcaagaaacaattgttgctgtttgtgacttcaaatgatacagagaagtttgttccagtatttaaagaagcagcaaaa

SEQ ID NO: 59567 - DNA, 247 bp, Glycine max
  Clone ID: 700674991H1
ctcgagccgctgtatcccaagttatgggcccattgcaatcttcatcttctttcattgaacctgcatacatttatatcccggattcttcatctgctcttggaactccagttactaacatgccttcgtcatcttggaactataataatacaccacaatctgtcaatgtgccacaagtgaccagagatgacatgggattcactgtagctggacaaacagctcctcttaattgttgctgcagcagtagtaa

SEQ ID NO: 59568 - DNA, 250 bp, Glycine max
  Clone ID: 700674992H1
atatagcaagcctcaagctactgcaatgcatgtgggagctatagaaattatcattgatagtttcgcaagtcctgactgcaacatagttggtgcaatgcttttggttgatacctatcataccaatcctgaaaatgcagttcgtagtatttttgttgcgcctttcagaggcggaaggcccattcgggtggttacatttccgaataccatcgtgctcgttgaaccagacatgaattcaaggtttcagcttttg

SEQ ID NO: 59569 - DNA, 250 bp, Glycine max
  unsure (1)..(250): unsure at all n locations
  Clone ID: 700674993H1
atctaacaacaagccattccagtgtgccggtgttganctctctcgctgcacccttaaccgcaatgcccttcgtagaccttcctacaccaacggtccctaggaaatctacatacaacaaggtaatggtatttttggcatgatattcccgggttgtcctagcacttatcaagagccgcaagaatctcagcaacgaggacgaagccagaggccccaagaccgtcaccaaaaggtacatcgcttcagagagggt

SEQ ID NO: 59570 - DNA, 251 bp, Glycine max
  Clone ID: 700674994H1
atgctgtgaaggaattggcatacagaaaatactaggctcttgtctagggcgcttttccacaaaaaaattgtggcggtaatttcaactttcttcagtctgtcaatgttaccgtctgttgctaagcatggaccttgcgagttacctgacatcggaataaaaataggcttaatatgccattacgtcggtataagtatgtcaattttttgtgtgccctttttaaatttttggtttttcttgttatttaaaagtga

SEQ ID NO: 59571 - DNA, 88 bp, Glycine max
  Clone ID: 700674995H1
gtggtgcaagatgctattcatgtgcccaattgtgagagttacactttccacagtgtatatgacatgactatgttcctgtacttttggg

SEQ ID NO: 59572 - DNA, 257 bp, Glycine max; identical to SEQ ID NO: 59520
  Clone ID: 700674996H1

SEQ ID NO: 59573 - DNA, 85 bp, Glycine max
  Clone ID: 700675001H1
gttgtctattatacaatagcaactcaatttagaaaatttctaccggattacattaggtggcatctgtataccttgttgatctaca

SEQ ID NO: 59574 - DNA, 87 bp, Glycine max
  Clone ID: 700675002H1
agcaccaacagcatcggcggcgacagtcactctccgacaacaacacttccgcggcgaaaaatgtctctggtggcgaacgaggatttc

SEQ ID NO: 59575 - DNA, 85 bp, Glycine max
  Clone ID: 700675003H1
tacatttcttccaccaactcatagaagtgtcatatctgttcccaaaagcttgtttgtgagaatggcttcaggtgaaaagatattc

SEQ ID NO: 59576 - DNA, 156 bp, Glycine max
  Clone ID: 700675004H1
ctttttcttgttctttaattttctgattttagcaaattaaaaaagtagtgttattggtaggttttggcaaagatgttttcagttccaggggtgtcgggaatactgaacagaggaggagggcataagataaaagggacagtggtgtgatgaggaaga

SEQ ID NO: 59577 - DNA, 154 bp, Glycine max
  Clone ID: 700675006H1
tgccaacgccaaagcaaaaggagcagaaatggcattgatgagaccatttgcacaatgagacttcgccaaaacattggtcagaattcatcacctgacatctacaaccctcaagctggtagcatcacaaccgccaccagccttgattcccagccct

SEQ ID NO: 59578 - DNA, 191 bp, Glycine max
  Clone ID: 700675007H1
ttataatccaaagatgcacttacaaccggcgttttccgtggaaacaaaaaaagggtctctcgtctaaacccaaaccgccccatcccacaaaagaaaaattccctttgtattcttagaatttgaacctttgattctttatctatctgctcagggcaacgtgggaacataggatttgtcaaacccatccgaca

SEQ ID NO: 59579 - DNA, 250 bp, Glycine max
  Clone ID: 700675008H1
tggtgaacaggcccttaagtttcctcctcctaaagtaattcaagtgagtaagtctgcatggatgactgatgaagaatttgcaagagaaatgcttgctggtgtaaatccaaacttgatccgttgtcttaaggatttccctcaacgagcaagctagatagccaagtcctatggtgatcatactagtcaaataacccaaagaacacttagagcccaacttaagaggggctcactgtagatgaggcatttcaaa

SEQ ID NO: 59580 - DNA, 217 bp, Glycine max
  Clone ID: 700675010H1
accagaccagcagaggctgatcttcgccgggaagcagctcgaggacggacgcacccttgctgactacaacatccagaaggagtcaactctccacttggtgttgcgtcttcgtggtggtatgcagattttcgtgaagactctaaggtaaactctataaccctcgaggtggagactctgacaccattgacaatgtgaaggccaagtttcaggacaagga

SEQ ID NO: 59581 - DNA, 165 bp, Glycine max
  Clone ID: 700675013H1
gtaaattgcatcatccctgaagctgaacctcaaaaccctagctgtccgcctgtctgcaacggcgtcgttatgatcagttgagaatccaaaggaatcgagtcgaatcatctgaccggcgacagttatgtacagagagcgaggagggtcggatccaaatcggaggta

SEQ ID NO: 59582 - DNA, 255 bp, Glycine max
  Clone ID: 700675014H1
gtctttgaacactcatcaccatggccaagcttgttctttccctttgtttccttcttttcagtggctgcttcgctctgagagagcaggcacagcaaaatgagtgccagatccaaaagctgaatgccctcaaacgggataaccgtataagtcggaaggtgggttcattgagacctggaaccctaacaacaagccattccagtgtgccggtgttgccctctctcgctgcacccttaaccgcaatgcccttcgtagacc

SEQ ID NO: 59583 - DNA, 261 bp, Glycine max
  Clone ID: 700675015H1
agtgagtctgccaaggcaaaaagagccaacttaggtacagcaagaaaatgccacccaaattcattagatagaaataaagtcaaagggaagattgtgatttgcgatggcaaaaaggatccgaaatatataactatggaaaaaattaacatagtgaaagcggcaggaggaattggtctggctcatattactgatcaagatggatcagtagcatttaattatgtggacttcccggcaacagagataagttcaaaagatggcgtc

SEQ ID NO: 59584 - DNA, 253 bp, Glycine max
  Clone ID: 700675016H1
gtcacagcgatcgacggcgcacatcagccgcagcaactttaaagcggcggctccagcaaccgccacttgcgtaccggaaccttacatttgggcctacgtctgagcgcacgagttcgtaagggctttggactcagtctctgcggcggtcaggccggcgtgaacgatcaacttcctacagtcctacgatcctttcggtgcagcctccgctgaggactcgggcgccgggtcagatgtgtacgtgcacagtcgcgtt

SEQ ID NO: 59585 - DNA, 85 bp, Glycine max
  Clone ID: 700675017H1
gatcgcagtgcctactggtgttgcatggtggatgtacaacaatgaagacactcctgttgttgccgtttctattattgacaccaac

SEQ ID NO: 59586 - DNA, 132 bp, Glycine max
  Clone ID: 700675018H1
ggtaaacggcgggagtaactatgactctcttaaggtagccaaatgcctcgtcatctaattagtgacgcgcatgaatggattaacgagattcccactgtccctgtctactatccagcgaaaccacagcgaagg

SEQ ID NO: 59587 - DNA, 116 bp, Glycine max
  Clone ID: 700675019H1
aggaaacaaaactacccttttgcttttgctctttgttctttgccatggagtggccacaacaacaatggccttccatgatgatgagggtggtgataaaaagtcaccaaaaagtttgt

SEQ ID NO: 59588 - DNA, 95 bp, Glycine max
  Clone ID: 700675020H1
tctcgagccgattcggctcgagtttgtttctggggatggtgaaatcttgacattgattccaggaaccagtgttgaagagacttacaacaagctaa

SEQ ID NO: 59589 - DNA, 175 bp, Glycine max
  Clone ID: 700675021H1
tttcaaagttgaaaacccagaatgtggttgtatctctctccctaaccttaaccttggtactggtgctactgaccagcaaggcaaactcagcggaaactgtttctttcagctggaacaagttcgtgccgaagcaaccaaacatatcctccaaggagacgctattgtgacctcctcg

SEQ ID NO: 59590 - DNA, 217 bp, Glycine max
  Clone ID: 700675022H1
aaaacttctctctcacactcactttctctctctataactctttctcacccgctagggcttccttttcatcgcatcttgagtttgcaacctcgtcttgtgatttccatggagggtgctgggatggaagagaataatattattatgatgatgatattaataacaagtctgaggcgcatttgacttctgccgctgcttttgtggagggtggaattcagga

SEQ ID NO: 59591 - DNA, 251 bp, Glycine max
  Clone ID: 700675023H1
acgtttcaggctccccgtgtcggaggccccgccggagataaggacccttttcgaccgttactccgatcagaatggcgtcatgacagccactcacctccgaagtttcctggctgaggcgaagagggaagacaatgccactgagaggaagcacaaaccatcatcgatggccacaagcatctcagtatcttcaacgaagaagtctcaatctcgagagtttcttcaactatcttttagtcaccataataacccac

SEQ ID NO: 59592 - DNA, 143 bp, Glycine max
  Clone ID: 700675024H1
gttccagttatgtaaaagatatccttccttgagcggcttaagaagaaaaattttgaggttattttcttcacggatccagttgatgagtacttgatgcaatacctgatggattatgaagacaagaagttccaaaatgtgtccag

SEQ ID NO: 59593 - DNA, 253 bp, Glycine max
  Clone ID: 700675025H1
atcagaccagcagaggctgatcttcgccgggaagcagctcgaggacggacgcacccttgctgactacaacatccagaaggagtcaactctccacttagtgttgcgtcttcgtggtggtatgcagattttcgtgaagactctacgggtaagactattaccctcgaggtggagagctctgacaccattgacaatgtgaaggccaagattcaggacaaggaaggcatcccacgggaccagcagaggctgatttttg

SEQ ID NO: 59594 - DNA, 152 bp, Glycine max
  Clone ID: 700675026H1
attttgataaaccgcgatcacaggttgccgcaccttaaaaccggaaacaaaagcaatcgttacttgatttcaagaatctctcaatttcttcctacttctttgtgtactatttcttaagggaaagaaaatcactcttctgtgctgccacagac

SEQ ID NO: 59595 - DNA, 116 bp, Glycine max
  Clone ID: 700675027H1
taatggaagggcagcagcaaggggagcagaggctgcaagagagcgtgattgtggaaatctcgaaggaacagattcgggcactgagcaaacgtgccaaatctagttcaaggaaaacc

SEQ ID NO: 59596 - DNA, 77 bp, Glycine max
  Clone ID: 700675028H1
tcttggtgagggctatccaaagaaatgcatggtgcctgcttctcaaacgtgttttttaaattgaattgttagactgt

SEQ ID NO: 59597 - DNA, 260 bp, Glycine max
  Clone ID: 700675031H1
atcaaagtttcttcctttctctgctctttgccttctctgacacatttggtgccttgtagagcgtgttttggcaggaaggtggtatggcgaaggacgttgaggttgctaaacgtggctccttctctgggatagactaccaggacctccaccagcaccactcattgatgctgaggagctcacaaagtggtccttttacagggctctcagtgctgaattcattgcgactttgctcttcctctaacatactgtgctcacagtca

SEQ ID NO: 59598 - DNA, 264 bp, Glycine max
  Clone ID: 700675032H1
aacacaacaaaaaaagacaacccagagagcgcgtcttaataaacgctcttctctgaaaacccccatttcttttcttctttcttcttctctttcgcttcttcgatcttcgatcttcgtcgctgaaaatgagagagtgcatttcaatccaatcggccaggccgggattcaggttggaaacgcctgctgggagctttactgcctcgaacacggcattcagcctgatgggcagatgccaagtgacaagaccgttggtggaggtgatga

SEQ ID NO: 59599 - DNA, 96 bp, Glycine max
  Clone ID: 700675033H1
acttgagctatcactctgttccttcgcttctatcgttcatggagcttcagaggcgccaagatcagagcctctcccagcggaagggccagaagcgga

SEQ ID NO: 59600 - DNA, 72 bp, Glycine max
  Clone ID: 700675034H1
cttaaaccctaattttgcaatcagagagtgaagagaagagaagatgttgatgggtcggcgaaagaacaacag

SEQ ID NO: 59601 - DNA, 100 bp, Glycine max
  Clone ID: 700675036H1
gtggactgaaatcggtggagaacgcgcacgatgattcggtgtgggcggtcacctgggtacccgcaaccgccaaccgaccaccgctcctcctaaccggttc

SEQ ID NO: 59602 - DNA, 105 bp, Glycine max
  Clone ID: 700675037H1
gtttttgagaatgccctttctgcctctgatggaattccaaactatcatgtccctctcagtcatatctgttttatttcttgagcttggagaattctcatttgtgtt

SEQ ID NO: 59603 - DNA, 151 bp, Glycine max
  Clone ID: 700675038H1
tactaatccggcacaacaaacaactcattactgtatttcgtttggcaaatgggtatgctgctttgaaagatgcactagcctctgaaaatgtgagatttcaaaggaaagctctcaacttgacccattacctgttgcatggaataattcagac

SEQ ID NO: 59604 - DNA, 144 bp, Glycine max
  Clone ID: 700675039H1
tgaacatcaacgcacttgccaggcaatctctaattaatgctaatggcataatagagacaacctttttgccctcaaagtattctgtggagatgtcttcggcggtttataagaattgggttttcactgatcaagcactacctgcag

SEQ ID NO: 59605 - DNA, 136 bp, Glycine max
  Clone ID: 700675040H1
agaagataaggattttgagaccagagtcgaaactgaaggtggcagaattcgggctctcaagaagtgcactgaaaaatccaagcttcttcagggcattgagaacttccgtttggcgatttcgaaagctatagccccc

SEQ ID NO: 59606 - DNA, 131 bp, Glycine max
  Clone ID: 700675041H1
attgtatttgtcgatgaagttgacagtctgcttggagctcgaggtggtgcttttgagcatgaggccactagaagaatgaggaacgagttcatggcagcttgggatggattgaggtcaaaagaaaaccaaag

SEQ ID NO: 59607 - DNA, 221 bp, Glycine max
  Clone ID: 700675043H1
atgtggtcgatttgaagacttctcttcccgagtgggtgaggatagggttctctgctgccacgggactcgacatacctggggaatcgcatgacgtgctttcttggtcttttgcttccaatttgccacacgctagcagtaaattgatcctttggccctacaaactttgtgtagcatgaggccatcaaaatgtgacagatccgagggaagaaagtgtaataaga

SEQ ID NO: 59608 - DNA, 183 bp, Glycine max
  Clone ID: 700675044H1
cagcaagaagatctggtcttacaatgatgtttatgtcgatggaaaacccacacagggtggctttgctgaaaccatgatcgttgagcaaaagtttgtggtgaagattccagagggtttggcgccagagcaagtggcaccatactgtgtgcgggtgtgacagtgtacagtccactggtacacttt

SEQ ID NO: 59609 - DNA, 131 bp, Glycine max
  Clone ID: 700675045H1
atatgattgatatgtggaagagtgtattggtgttggtgttcttgtgtcttagtcttagtaatggtgatgatcaagagaagaagaaaccctgtttgtgggactggaagagactgagtagcgcttaactctgc

SEQ ID NO: 59610 - DNA, 182 bp, Glycine max
  Clone ID: 700675046H1
gcaaaggattctacccgccgctcgatgggaattgcgcttcaaggcgtctcgtagggctaatccgcctcacgagggtcaccaacggcacgtgcctttggtgggccgaggccccctactgctggtcggcaactcaaataatgtaaggtagaaaatggaaccatgcctcctctcttgcatgtgat

SEQ ID NO: 59611 - DNA, 256 bp, Glycine max
  Clone ID: 700675047H1
ataatgaagagtactatcttctttgctctccttctagtttgtgccttcaccatctcatacctgctttcagccaccgctcagttcgtgctcgacactgatgatgatcctcttcaaaacggtggcacatactatatgttgccagtatgagaggaaagggcggtggaatagaagtagattcaactggaaaagaaatatgccctctcactgttgtgcaatcacccaatgagctcgataaggggattggactagtctttac

SEQ ID NO: 59612 - DNA, 260 bp, Glycine max
  Clone ID: 700675048H1
aacatgattactggtacctcccaggctgattgtgctgtccttatcattgactccaccactggtggttttgaagctggtatttctaaggatggacagactcgtgagcatgctcttcttgctttcacccttggtgtgaagcagatgtctgctgctgtaacaagatggatgccactaccccgaagtactctaaggctaggtatgatgaaattgtgaaggaagtctcttcctacttgaagaaggttggttacaacccagacaag

SEQ ID NO: 59613 - DNA, 111 bp, Glycine max
  Clone ID: 700675049H1
gaaaagtgttcctacattggttggcattgaatgtcccaaggatgagaaacttcctcgtcgcaaaatttttgacaaacctaagacgcgctgcttcactattctccctatgga

SEQ ID NO: 59614 - DNA, 80 bp, Glycine max
  Clone ID: 700675050H1
accgcactcgggaaagacacttgccctatcactgtagtgcaatctcccaatccaaactctaaggggttagaaattaagtt

SEQ ID NO: 59615 - DNA, 175 bp, Glycine max
  Clone ID: 700675051H1
cggctcgatgataaatagaaaagaaaagagaaactgaatattactttaaataatgttcaaaataaacaaattcaatttttacattaatacattaagtcttatataactaaacttgtaactaattaaattaataattaattgtaactaactaaactaatctatatctctaatgttt

SEQ ID NO: 59616 - DNA, 186 bp, Glycine max
  unsure (1)..(186): unsure at all n locations
  Clone ID: 700675053H1
cgaaaacggcacgccaaaacccacgtctcttggtcgcgcgctctactccacccccatccacatttgggacaaagaaaccggtagcgttgccagcttcgccgcttccttcaacttcaccttctatgcgcctgacacaanaggcttgcagatgggcttgccttctttctcgcacgaattgacactaag

SEQ ID NO: 59617 - DNA, 110 bp, Glycine max
  Clone ID: 700675054H1
gttcctcactgacctcaccatggcgaccagagccaagctttctttagctatcttccttttctttcttttagccttgatttcaaacctagccttgggcaaacttaaagaaa

SEQ ID NO: 59618 - DNA, 88 bp, Glycine max
  Clone ID: 700675055H1
cctttctctctctacgatggagccttcctcgatctctccaccgccagctccgcctgccaccgcagtccccttccccgccgaacccaac

SEQ ID NO: 59619 - DNA, 130 bp, Glycine max
  Clone ID: 700675056H1
tcaatatcctagtacaccgtattaaagaatttaagatatactatgatgagagcgcggttcccattactgttgctgggagttgttttcctggcatcagtttctgtctcatttggcattgcgtattgggaaa

SEQ ID NO: 59620 - DNA, 246 bp, Glycine max
  Clone ID: 700675057H1
aaatattctagaggcctcatacgacaccaaattcgaggagataaacaaggttctgtttggtagagaggaggggcagcaacaaggggaggagaggctgcaagagagtgtgattgtggaaatctcaaagaaacaaattcggaactgagcaaacatgccaaatctagttcaaggaaaaccatttcttctgaagataaacctttcaacttgagaagccgcgaccccatctattccaacaagcttggcaag

SEQ ID NO: 59621 - DNA, 135 bp, Glycine max
  Clone ID: 700675058H1
gtccagaagcagacccgggccgggcagaggacccggttcaaggccttcgtcgtcgtcggagacaacaacggccacgtcgggctgggcgtgaagtgcagcaaggaagtggcgacagctattcgtggcgcgattatt

SEQ ID NO: 59622 - DNA, 148 bp, Glycine max
  Clone ID: 700675059H1
aggctcgaggaaaatgtgagttcaaagagtagtcttgtttcatacttgacagctgctttaattgggattgttttggggaacatggcatgtgtgaccactaagagcactagtccacccagaaagtgcttgttcccttgctacctggggg

SEQ ID NO: 59623 - DNA, 222 bp, Glycine max
  Clone ID: 700675060H1
accctactcattctccatacctcaacgaagaggttaaagagacggcaacactttgctgtccgccttgaccgagcagagcttcgtcttggccctcgattttgccctaaagtactctcagtcacaacagacaccgtcgtctcgtcgtcgtcatcaatggcaccgaagcagaccaaggctgagaagaagatcgcttacgatgcgaagtgtgcgacctaatggagg

SEQ ID NO: 59624 - DNA, 254 bp, Glycine max
  Clone ID: 700675063H1
atttttcttttttcttcttttcctttgggttttctattctcagtttgcggtgtttgatagaaataatggatcggaacgggccaaagatcaaaagtacaattcttcaccatctctatgagaagcagagacagagcccttacatgacaatctctgtcgccctgtttcagatttgcttccatttattgccaatgggatcagaggtgtcactaccaacccagcgatttttgaaagagctatttcatcctcaaatgcct

SEQ ID NO: 59625 - DNA, 260 bp, Glycine max
  Clone ID: 700675064H1
aaatgttctgccctcatcaacaaacccaacacgccctttaacactcaatactatagatgagcatcttgacatgttgatggtctgccatcatctgaatagggaaattccagaagacttagcttttgcatgttcaaggataagagaggaacgattgctgccgaagatattttgcatgatattggggcaattagcatcatatcttctgattctcaggctatgggtcgagttggagaggtgataagcagaacttggcaaactgc

SEQ ID NO: 59626 - DNA, 102 bp, Glycine max
  Clone ID: 700675065H1
gttcgtatgctcggtattctgctcgttgatctcgagggcagcagtaccagcagcttccttcgctattggaaccaccggttccctcggccaaagaggaagctc

SEQ ID NO: 59627 - DNA, 66 bp, Glycine max
  Clone ID: 700675066H1
tcctagtacaccgtattaaagaatttaagatatactatgatgagagcgcggttcccattactgttg

SEQ ID NO: 59628 - DNA, 121 bp, Glycine max
  Clone ID: 700675067H1
agttgcacaagatatggttgaggaatggtttgattgtgttgatgaggaggattcctttgaggaagtttctttaagtgcagcactcaatggtgttgagggtttggactatatggaaagaatt

SEQ ID NO: 59629 - DNA, 127 bp, Glycine max
  Clone ID: 700675069H1
attgctgatgcgcaccactctctctttgttctttctcggttcagagtctctctttgacggtggtgctgtcagcattgacctcagcttgagcagtaaaacatcatcagcactactacggtaccatggc

SEQ ID NO: 59630 - DNA, 242 bp, Glycine max
  Clone ID: 700675070H1
atgctcgagcatatctcttggagcatttgcttgctatttatgctgccatgatcatgggtgtgcgtgtacttggttacctgttctggactatttctgataactgggagtgggctgatggatatggtcccaagtttgacttgttgcggttgaccgggcaaataatcttgcacggacccctcgcccctcttaccatctattttctaagattgtgaatacaggcaaagttacacatgaagatcgtg

SEQ ID NO: 59631 - DNA, 137 bp, Glycine max
  Clone ID: 700675071H1
agttcagcaagaatattctagaggcctcatacgacaccaaattcgaggagataaacaaggttctgtttggtagagaggaggggcagcaacaaggggaggagaggctgcaagagagtgtgattgtggaaatctcaaga

SEQ ID NO: 59632 - DNA, 130 bp, Glycine max
  Clone ID: 700675072H1
actcaatgccctcaaaccggataaccgtatagagtcagaaggagggctcattgagacatggaaccctaacaacaagccattccagtgtgccggtgttgtcctctctcgctgcaccctaaaccgcaaggcc

SEQ ID NO: 59633 - DNA, 144 bp, Glycine max
  Clone ID: 700675073H1
agaagatgatgatgatgaggaagagcagccacagtgcgtggagacagacaaaggttgccaacgccaaagcaaaaggagcagaaatggcattgatgagaccatttgcacaatgagacttggccaaaacattggtcaaattcatca

SEQ ID NO: 59634 - DNA, 140 bp, Glycine max
  Clone ID: 700675074H1
tgaacgagggagctcttcttctaccacacttcaattcaaaggcgatagtgatactggtaattaatgaaggagatgcaaacattgaacttgttggcctaaaagaacaacaacaggagcagcaccaggaagagcaactttgg

SEQ ID NO: 59635 - DNA, 133 bp, Glycine max
  Clone ID: 700675075H1
tacaaattacactctttgcctcgcaccttcaacttaaccttttctactcataatcttaacaacttgctagaataagataaagaaagagaaaaagtgtgtgtgtgtgagagagagcaatggctggctcgtgggc

SEQ ID NO: 59636 - DNA, 167 bp, Glycine max
  Clone ID: 700675076H1
agttaatcagccccaagagaaagatttgttggagggaaatttttcctttgatattaaatctcgctctagattggaaaaagtttcctctacaaaagcacaatttgttagtggaaaaaccttcaaatatgatataatggtgctggttcacattcttcagaagattttcc

SEQ ID NO: 59637 - DNA, 211 bp, Glycine max
  Clone ID: 700675077H1
agctacttcaaagttgaaaacccagaatgtggttgtatctctctccctaaccttaaccttggtactggtgctactgaccagcaaggcaaactcagcggaaactgtttctttcagctggaacaagttcgtgccgaagaaccaaacatgatcctccaaggagacgctattgtgccctcctgggaaattttacacctcaataaggttgacgaaa

SEQ ID NO: 59638 - DNA, 250 bp, Glycine max
  Clone ID: 700675078H1
aacctttcatcaaacgacacaaacatcaacatattgtttctttccattgctagtggtatgtcccctaacgacccaccagtgttcttcttttacaactacggagaaactcgaatctatttgcatcccggaaagccttcactaaactcgccaattttgatcacaaagtcattctaatgtattgggatgtattgtgtgtgattttctatgcatatgatcctaccatggaaggaggtcatcaaaagatctattg

SEQ ID NO: 59639 - DNA, 251 bp, Glycine max
  Clone ID: 700675079H1
attcgaagaagcagtgagatctgttcagatggaagggttgctttggggtgcatccaaacttgtacctgttgggtacggtatcaagaaactgcaaattatgcttactattgtggatgacctagtttctgttgatactctattgaggaacatctcacagttgagcccatcaatgaatatgtccagagttgtgacattgtggccttcaataaaatataaactacaattgtgggacttggagatcatggcaacgg

SEQ ID NO: 59640 - DNA, 65 bp, Glycine max
  Clone ID: 700675081H1
aatggcttcaaccgacaagtcaccggacccaacgccggcgaagggtccggatccaactccgggga

SEQ ID NO: 59641 - DNA, 105 bp, Glycine max
  Clone ID: 700675083H1
gtagttcttcatcatagtcttaaacattaaaccttagcaaaactcaacaatgctagacatcaaaggctacctcgtactcttcttcctatggttcatatcaaccat

SEQ ID NO: 59642 - DNA, 103 bp, Glycine max
  Clone ID: 700675084H1
ttgggaatgcagcagtcaaaaggagtgattgggcctcattggtacaagtgtttttaacaaacagcaacagtacagagcattttgatgcatgcaagtggacaaa

SEQ ID NO: 59643 - DNA, 165 bp, Glycine max
  Clone ID: 700675085H1
aacggcgctgccacccctgccggcctcatctccgcctccatcgcccatgcattcgccctcttcgtcgccgtctccgtcggcgccaacatctccggcggctacgtcaaccccgccgtcaccttcggcgccttcgcggcggcaacatcaccttcctccgcggcatcg

SEQ ID NO: 59644 - DNA, 179 bp, Glycine max
  Clone ID: 700675086H1
tcttcccttccaataaaaagaaattcaactttatccgatactctaccgctttcattttaatctcatccttctccgtttccttcaaaacccaaacttgaacttcttgtttcttgctcgtggaagcaaatgacaacacgccctgtgtaactggtgccttgtcaaacgcggtcggattccgt

SEQ ID NO: 59645 - DNA, 140 bp, Glycine max
  Clone ID: 700675087H1
accccaagagaaagatttgttagagggaaatttttcctttgatattaaatctcgctctagattggaaaaagtttcctctacaaaagcacaatttgttagtggaaaaactctcaaatatgatataattggtgctgttcaca

SEQ ID NO: 59646 - DNA, 242 bp, Glycine max
  Clone ID: 700675089H1
acaattagtgtctccattgatgcaatggatggcactatcaatcgttcgaatgggttttagaacatggtgggattgccactgatgatgattatccttacagagctaaagagggtagatgcaaagccaataagaacaagacaaggttacaattgacggatatgaaactctaataatgtcagatgagagtacagaatcagagacagagcaagcgttcttaagcgccatccttgagcaaccaatta

SEQ ID NO: 59647 - DNA, 141 bp, Glycine max
  Clone ID: 700675090H1
aaattctgcttcaccaacaagtctccttatcatgaaactgttgattttgatgtacatgttggtcacttctcttactttgagcaacatgcaaaagatgagcatttcacccctttgctggagcagattgggaagtggaggaag

SEQ ID NO: 59648 - DNA, 145 bp, Glycine max
  Clone ID: 700675091H1
ttgtctttgaacactcatcaccatggccaagcttgttctttccctttgtttccttcttttcagtggctgcttcgctctgagagagcaggcacagcaaaatgagtgccagatccaaaagctgaatgccctcaaccggataaccgta

SEQ ID NO: 59649 - DNA, 135 bp, Glycine max
  Clone ID: 700675092H1
gtttggagagttgaatgtggaatcccttctggatttccgctcacagttatttgcaatagcatttttaatgagatgctcattagatatagctatgaaaaattactgcgtcaggctaaagctccaagtatgttttac

SEQ ID NO: 59650 - DNA, 87 bp, Glycine max
  Clone ID: 700675093H1
acttcgttgcttgactcgtcgcgaagatgtaatggtccgacaatgtcttgatacatgaggtagctgaaacagatgagcacacctttg

SEQ ID NO: 59651 - DNA, 249 bp, Glycine max
  Clone ID: 700675094H1
tgggcgttttaaattttccattaccaattccataatgtggcagacagctgatcgaccactgatgtggaaacagtcaccagaacaaccaatcgttttccctcattgcccctacaaagcaaaggatatcactaccccgttgttcagtatcaccctttctgcttctgtggggtgaaaagcagcaggggcatggtgaggaagccgggtcccaagcaagggagcctcttctttggatgtggaaattggactgcg

SEQ ID NO: 59652 - DNA, 251 bp, Glycine max
  Clone ID: 700675095H1
atacaattagccatcacaacagagaaaaaaaaagagagagagaaatggagcttcaagaccatgatttcttggaggaattaatgtctctaagaagagaaacatgggataccaatccatgttcacaagaaaaccagctttctctaatggctggagttttgattgttttgaggatcaaaactatcatcaagcttttcctccaaactctttctcttgccaagaagttcctcaaagttacaataagaaaggctaca

SEQ ID NO: 59653 - DNA, 254 bp, Glycine max
  Clone ID: 700675096H1
aagaaagaaggtttttttagtatagttaacagcatggagagggaggaagatgttaaggttggagcacagaaattctcggagaggcaagcactgggtacaggagctaagagtgacaaggactacaaggaggcaccaccagacccttgtttgagccaggggagttaaagtcatggtctttttacagagctgggatcgcagagtttgtggccacattcttgttcctctacatcactgtcttgactgtcatgggtgtc

SEQ ID NO: 59654 - DNA, 264 bp, Glycine max
  Clone ID: 700675101H1
atcggctcgagggtttctcaaacaatcacttcctcaatcttcacccttgctttcactctcacattcctcgtcattgcaaaagcatccataattcaagctctaagtcaccacaaaccaactttgccaacttccttcacttccatcttgtaccattacaagcctcttctcctcacctaaatctacaactctttcttcattctctcagcaaatgcatcttgcttttgcctcctctttttggccttcacatttgctgaagggctggga

SEQ ID NO: 59655 - DNA, 262 bp, Glycine max
  Clone ID: 700675102H1
agtataccttaataaataatttaagatactatgatgagagcacggttcccattactgttgctgggacttgttttcctggcttcagtttctgtctcatttggcattgcttactgggaaaaagagaaccccaaacacaacaagtgtctccagagttgcaatagcgagagagactcgtacaggaaccaagcatgccacgctcgttgcaacctccttaaggtggagaaagaagaatgtgaagaaggtgaaattccacgaccacgac

SEQ ID NO: 59656 - DNA, 266 bp, Glycine max
  Clone ID: 700675104H1
agaagcaggtgagtgagtgagtgagcaagagtgaagagcgaagagaatggctcccaagggtttaatctttttggctgtgttatgcttctcagcactgtcactgagtcgttgtcttgcggaggataatggacttgttatgaacttctacaaggaatcatgccctcaggctgaagacatcatcaaagaacaagtcaagcttctctacaagcgccacaagaacactgctttctcctggctcagaaacatcttccatgactgtgctgttc

SEQ ID NO: 59657 - DNA, 267 bp, Glycine max
  Clone ID: 700675105H1
agtgctaacatccacagtgtgaaggaaccctttgaggtttctgtcacacccatcgttttcatgtgcgtcttccacaccgtacaccagcatgccacgtaagccgacctcgttgagcgcgctgatgctccgtccggcggtggcggcgtcctcgccggcgcagaattgcgcgtagaacgtctctttcgtggcagccatgaggagattcctcagcaccccgctctggaacacccgagacttcatcaccctcattcccaggtccaccacggg

SEQ ID NO: 59658 - DNA, 265 bp, Glycine max
  Clone ID: 700675106H1
gatggcattgaagatgtttccgctgctctgcgttctgtctctttttgctacctcgtctattatcaccatcactcattccaagactgttccacccattcttgatcttactaatttcaaccgaaccagtttcccgcaaggctttgttttcgggacagcgtcagctgcataccagtatgaaggtgctgcaatggaaggtggacaaggaccgagtatatgggatactttcactcataaatacccagaaacaataaaagaccacagtaat

SEQ ID NO: 59659 - DNA, 256 bp, Glycine max
  Clone ID: 700675107H1
gcacaggttgccgcaccttaaaaccggaaacaaaagcaatcgttacttgatttcaagaatttctcaatttcttcctacttctttgtgtacgatttcttaagggtaagaaaatcactctctgtgctggtcacagacttcgtgaatcattttcttgtccactcctagtttatctcctgaacactctcctatttgatataggacttcgtgtcagatttaaactttttctgtttctttctcagttctctgtttaatttca

SEQ ID NO: 59660 - DNA, 255 bp, Glycine max
  Clone ID: 700675108H1
caaaccgtgaagttcataactgctgcaactattggcatcacactcttactcctgtctggcttgaccctcacaggcactgtcataggtttgatcattgcaacccctcttcttgttatcttcagctccatccttgtccctgctgcgtttgtgctgttcctggttgcttctggctttttgttctctgcggggctgtggtgtggctgccattgctgctttatcttggatttacaactacgtttctgggaaccagcctgc

SEQ ID NO: 59661 - DNA, 267 bp, Glycine max
  Clone ID: 700675109H1
ttagttcaatatggggaagcccttcactctctctctttcttcactttgcttgctactcttgtcgagtgcatgctttgctattagctccagcaagctcaacgagtgccaactcaacaacctcaacgcgttggaacccgaccaccgcgttgagtccgaaggtggtttgattcaaacatggaactctcaacaccctgagctgaaatgcgccggtgtcactgtttccaaactcaccctcaagacgaatggcctccacttgccatcttactc

SEQ ID NO: 59662 - DNA, 253 bp, Glycine max
  Clone ID: 700675110H1
ctcgagctcgagccgcgcattttctgcattcccctagctgttaccgttgttctctcttccgctgttccgtttccttcctccgccgccgccaccgcagcattctctcgccaccggcgtctcgtcgcctccgcatcgccgatgaatccgtcgtcgcagtctcagtccccgcctcctccggatggcaagaaggtggagcatgcgatggaaatgttacgcgacgtgagaatcgacaactactattggctccgtgacg

SEQ ID NO: 59663 - DNA, 256 bp, Glycine max
  Clone ID: 700675111H1
tcttgggagaagaggtcgagtttcacagcagcaatggtgtacgtcgaggctcagaaatcaaaagcctacttcaagagatatcaagtcaagttcaagagaagaagagagggaaaaaccgattaccgtgccaggattcggttgattaatcaggacaagaacaaatataacactccgaaataccgatttgttgttcgctttagcaacaaggacattgttgcacaaataatatctgctagcattgctggcgatattgttc

SEQ ID NO: 59664 - DNA, 251 bp, Glycine max
  Clone ID: 700675112H1
gacacaacctggtaaaaatcccgaccccagtgccgcacaattttccttcactcgcagcggatgcatacttttgatctagtacctgctatccctatgtataagcatggacttctagcatactattgtttgattaaccaagttcttccatattggttgaagaagcctcgagtcaatatttagtttttgatgccatctgtgggtttctgatggatgatgccgggcatcgtgaaaatggaaggcacaaagcagca

SEQ ID NO: 59665 - DNA, 249 bp, Glycine max
  Clone ID: 700675114H1
atttgatatttgcatgaagctacctcaatgggctttgcagattttgagacagctagcacctgaggtttcttatcgaagtttagttgcacttggcattgctagtattcaggggttgcctatagcttcttttgagaaagatgatgctgaacgcttactgttactctatcaaaactgtgatatagatagctgtacaaacaagaataatataattgttagcagtcccctggttggttgaagacaaccctccta

SEQ ID NO: 59666 - DNA, 235 bp, Glycine max
  Clone ID: 700675115H1
ctagtataccttaataaataatttaagatactatgatgaaagcacggttccattactgttgctgggacttgtttacctagcttcagtttctgtctcatttggcattgcttactgggaaaaagagtaccccatacacaacaagtgtctccagagttgcaatagcgagagagaaccgtacaggtaccaagcatgccacgctcgttgcaacctccttaaggtggagatagaagaatgt

SEQ ID NO: 59667 - DNA, 253 bp, Glycine max
  Clone ID: 700675116H1
atttgattggtggagatgacttcaagagtggtcagaccaaaatgaaatctgtgctggttgatttccttgtgggggctggtatcaagctcaacatctatagtcagttacaaccatctgggaaacaatgatggtatgaatctttcggctccacaaactttccgttccaaggaaatatccaagagcaacgttgttgatgatatggtcaacagcaatgccatcctctatgagcctggtgaacatccagaccatgttg

SEQ ID NO: 59668 - DNA, 264 bp, Glycine max
  Clone ID: 700675117H1
ggattgttgcttcaccttatgcgaagaagctcgccaaggagttgaaggtggagttggggaggattgtggggactggaccgatgggaaggattgtggctaaagatgttgaggcatttgcagctgcagggaatgttgcagcagcggtagcaccagcactggggaagagtgcagcacctgccggggtagagttgggatccgtggtgcctttcaccacaatgcagagttctgtgagtaggaacatggcggagagtttggcggttccca

SEQ ID NO: 59669 - DNA, 258 bp, Glycine max
  Clone ID: 700675118H1
gaggaagataaacctcgtcctagtcgaccaagccaaggaaagcgtgaacgagaccaggaccaggacgaggacgaagatgaagatgaagatcaacctcgcaagagccgcgaatggagatcgaaaaagacacaacccagaagacctagacaagaagaaccacgtgaaagaggatgcgagacaagaaacggggttgaggaaaatatctgcaccttgaagcttcacgagaacattgctcgcccttcacgcgctgacttctac

SEQ ID NO: 59670 - DNA, 127 bp, Glycine max
  Clone ID: 700675119H1
taaacactcatcagtcatcaccatggccaagctagttttttccctttgttttctgcttttcagtggctgctgcttcgctttcagttccagagagcagcctcagcaaaacgagtgccagatccaaaaa

SEQ ID NO: 59671 - DNA, 237 bp, Glycine max
  Clone ID: 700675120H1
cgagatatcaacagcttccttagttcaatatggggaagcccttcttcactctctctcttacttccctttgcttgctactcttgtcgaatgcatgctttgctattacctaccagcaagttcaacgagtgccaactcatcaacctcaatgcgtcggaacccgatcaccgcgtcgagtccgaaggtggtcttattggtacatggaactctcagcacgctgagctgcaatgcgcctgtgtc

SEQ ID NO: 59672 - DNA, 267 bp, Glycine max
  Clone ID: 700675121H1
ctcgaggaaatcgctcgcgcgctgcagtggtcagagccaaagcagggaccgattactattccaccttgaacgttggccccaatgccacgctgcaagaaatcaaggcctcctatcgtaaactggcgcgaaagtaccatccagatatgaacaaaagccctggggctgaggataagttcaaggaaataagtgctgcatatgaggtctacaaggagataatggagggtcgactggtgctccaggggttgatccttttgatttattcgatac

SEQ ID NO: 59673 - DNA, 265 bp, Glycine max
  Clone ID: 700675122H1
cgagctcaggtgcgtcccgcaacgactctgttggctgatgggtgcccatatttgtatgctatggtgcatgatagttcagtgtctacaataccaggtgattttgtcattggtgttaagttgacaaccataaacaatatgtgtgcatatgggctcaatcctggtatttcaggttctcgtcttttgggcaccattcctcagtccatttcacagcaaactgtttggaatcaaatggcaacagtgagaacaccattgaattttgattcta

SEQ ID NO: 59674 - DNA, 268 bp, Glycine max
  Clone ID: 700675123H1
cgagctcgagccgtgtccctttccatttcccattagcttcttctcctcacgcctgctcatgagcacccatcgcaacaaccacgctgcgctcactgtttcaaccggcgatgcgaatcccgatgactgtcaccaaccggtcgatgctcccctttccgcagcagaacagattagggttagggtttcatcggaggacaacgcggcacccgcatcatccaccgctgatcgcttcgaccgcatcaacaaccacgccgcgtcgagcagaacgtct

SEQ ID NO: 59675 - DNA, 271 bp, Glycine max
  Clone ID: 700675124H1
tcgaggcagttacagcactcaaaaacctagagcgaagagcgtgaaggcaccggccgccggccatgacattcaagcgcaggaacggaggtcgcaacaaacacggccgtggccatgtcaaattcatccgatgctccaactgcggcaaatgctgccccaaggacaaggccatcaagaggtttcttgtgaggaacattgttgaacaggctgcagtcagagatgtgcaggaagcccgtgtctatgaacaatacacgcttccgaaactatatgtgaa

SEQ ID NO: 59676 - DNA, 125 bp, Glycine max
  Clone ID: 700675125H1
ccaccgaactaccgggcacccagagatagcaacaaaacagcctgataggactctctgctagatgcaacagatcgtgtcatcgaacactgttacacctagacctaaccaagtttaccacacagaaa

SEQ ID NO: 59677 - DNA, 253 bp, Glycine max
  Clone ID: 700675127H1
tcggctcgagattcaattggctctggttatatttaatagagccataaacatctgttagataatcaatattcaataaatgcatgacagctccataagtaccatatccatcaggtaccatgggcaacttccaagagggaaatgaataatttaaagcactcaaagtttactggagataatcagaaatagaggggtcaaagaatagttattgtgaatcacaagtatcttgtgcaaataatcttcataaaatcttgtc

SEQ ID NO: 59678 - DNA, 262 bp, Glycine max
  Clone ID: 700675129H1
tcggctcgagctctccattgtctttgaacactcatcaccatggccaagcttgttctttccctttgttaccttcttttcagtgtgtgcttcgctctgagagagcaggcacagcaaaatgagtgccagatccaaaagctgaatgccctcaaaccggataaccgtatagagtcggaaggtgggttcattgagacctggaaccctaacaacaagccattccagtgtgccggtggtgccctctctcgctgcacccttaaccgcaatg

SEQ ID NO: 59679 - DNA, 267 bp, Glycine max
  Clone ID: 700675130H1
ttcggctcgagctttctctctcacgttttccgcttcagttttctcgggaaaatcatagtgaaaggtccaggcctctactctgacattggcaagagagcttgcgatcttctgttcaaggattatcagaatgaccacaagttcaccatcaccacttacacttccaccggagtggaaatcacttcaactggagtcaggaaaggtgagatatatttggccgatgtcagcactaaggtgaagaacaagaacatcacaactgatgtcaaagtg

SEQ ID NO: 59680 - DNA, 270 bp, Glycine max
  Clone ID: 700675131H1
ttcggctcgagtgtcctagcacttatcaagagccgcaagaatctcagcaatgtggacgaagccagaggccccaagaccgtcaccataaggtacatcgcttcagagagggtgatttgatcgcagtgcctactggtgttgcatggtggatgtacaacaatgaagacactcctgctgttgccgtttctattattgacaccaacagcttggagaaccagctcgaccagatgcctaggagattctatcttgctgggaaccaagagcaagagtttc

SEQ ID NO: 59681 - DNA, 263 bp, Glycine max
  Clone ID: 700675132H1
ctcgataggctcgagcatatctcttggagcatttgcttgctatttatgctgccatgatcatgggtgtgcgtgtacttggttacctgttctggactatttctgataactgggagtgggctgatggatatggtcccaagtttggacttgttgcggttgaccgggcaaataatcttgcacggacccctcgcctctcttaccatctattttctaagattgtgaatacaggcaaagttacacatgaagatcgtgaaagagcatgggat

SEQ ID NO: 59682 - DNA, 267 bp, Glycine max
  Clone ID: 700675134H1
gctcgagcttttcattgatgctgaacttgggattaatttgcaagagttaaatgcccttgtttgccggaaatgttttatagaatctattggtggtagctacactgatacctttgctaatttgcattttcgtggggccccaatagaatatctctgcttggacttcacacttcctggttatccagagtacatcttgaaacctggagatgaaattgttgacatcaataatctagaggagtacatatcctaggtggttgaggcaacggttaa

SEQ ID NO: 59683 - DNA, 265 bp, Glycine max
  Clone ID: 700675135H1
gctcgagcagaaaccctaatttcctcgttatttcgatactctctccctttggaaaaaatcaaaggtgctcgcagtcgcagcgattagttcaaagattgtaagcgatcgtgaatcgtcgacaaaggttcgtgtctgaattgaagtagtgtcatcaccatgagattgagaaagggaaataaggtggagatccgtggcaatgctgatggacttagtgtggaatggtgttgtgctcgtataatttctggtgatggacgacctacagtgt

SEQ ID NO: 59684 - DNA, 269 bp, Glycine max
  Clone ID: 700675137H1
ggctcgagattctctccattggtccttaaacactcatcagtcatcaccatggccaagctagttttttccctttgttttctgcttttcagtggctgctgcttcgctttcagttccagagagcagcctcagcaaaacgagtgccagatccaaaaactcaatgccctcaaaccggataaccgtatagagtcagaatgagggctcattgagacatggaaccctaacaacaagccattccagtgtgccggtgttgccctctctcgctgcaccct

SEQ ID NO: 59685 - DNA, 270 bp, Glycine max
  Clone ID: 700675138H1
ggctcgagccctaacaacaagccattccagtgtgccggtgttgccctctctcgctgcacccttaaccgcaatgcccttcgtagaccttcctacaccaacggtcctctggaaatctacatacaacaaggtaatggtatttttggcatgatattcccgggttgtcctagcacttatcaagagccgcaagaatctcagcaacggaggacgaagccagaggccccaagaccgtcaccaaaaggtacatcgcttcagagagggtgatttgatcgc

SEQ ID NO: 59686 - DNA, 222 bp, Glycine max
  Clone ID: 700675142H1
gcgccggtgtcactgtatccaaactcaccctcaacagcaatggcctccacttgccatcttactcaccttatccccggatgatcatcatcgcccaagggaaaggagcacttggagttgcaattccaggatgtcctgagacattagaggagccacaagaacaatcaaacagaagagcctcaaggtcgcagaagcagcagctacaggacagtcaccagaagattc

SEQ ID NO: 59687 - DNA, 265 bp, Glycine max
  Clone ID: 700675144H1
tcaaacacaagcaaagctctttcgtcttcttcggtgaatgattgatccctcatcatcatcatcatgggggtgttacaggagaagctctcgtcgttctacaagagccgctggctggttttcgtggccgcaatgtggctgcagtcgtgggcgggcatcgggtacttgttcgggagcatttcgcccgtcataaagagctctctgggctacaaccagaagcagctcgccatgctcggcgtcgccaaggaccttggcgacgcgtcggctt

SEQ ID NO: 59688 - DNA, 264 bp, Glycine max
  Clone ID: 700675145H1
gacctagggatttcggccgtttgctccccaaaaaggaaagaagcagattctgtcctttgaaatcaacaagaaaagatgtcaggtgaagaggtagctgttgcagttgaggtacctgctacttcaattccaggtgagccaatggacatcatgactgctctacagcttgtgctgagaaaatctctggcctatggtggtcttgcacgaggtcttcatgaaggtgccaaggtgatcgagaagcatgctgcacagctctgtgttctagca

SEQ ID NO: 59689 - DNA, 258 bp, Glycine max
  Clone ID: 700675147H1
gatggaaattttccaacagattcttggttaccaatatttgttaattgtctttaccctgtgagtcaattgcccgcagaagctgtcattgttaatgttgtttgtgggagtgggcgtggtggtttgcctactactgcttggattagttctgcagttaacaatcgctcctcagatatcaataagaaaattcggacagcgcttgggaaaggtaagaaaattgtctttttgactagagttgatccttttcctgtggccttgtta

SEQ ID NO: 59690 - DNA, 261 bp, Glycine max
  Clone ID: 700675150H1
cggctcgaggcctctacaatgagcaacgacaaggacacattcaacgtcgcctgtctcacttctgctctcaacgaggactatagagcagactttgtcaatgctcttaagagcaagatacatagtttggctggacaacactcggatattctagagtctctgtcgcccaatgtccgaaagcgtgttgacgttctaagagagatatatggccaacatgatgcattagaggctaaattttttgaagagagagcatctctcgagcaa

SEQ ID NO: 59691 - DNA, 244 bp, Glycine max
  Clone ID: 700675151H1
aaattttcacaagaggaatttcttacagcttggtcaactcaggtgcgtcctacaacaactctgttggctgatgggtgtccatatttgtatgctatggtgcatgatagttcagtgtctacaataccaggtgattttgtcattggtgttaagttgacaaccataaacaatatgtgtgcatatgggctcaatcctggtatttcaggttctcgtcttttgggtaccattcctcagtctatttcacagc

SEQ ID NO: 59692 - DNA, 258 bp, Glycine max
  Clone ID: 700675152H1
tcggctcgagagggaacctcagcaacccggtgagaaggaggaagacgaagatgagcaaccacgtccaatcccattcccacgcccacaacctcgtcaagaagaagagcacgagcagagagaggaacaggaatggcctcgcaaggaggaaaaacgcggagaaaagggaagtgaagaggaagatgaggatgaggatgaggaacaagatgaacgtcaattcccattcccacgcccacctcatcagaaggaagagcgacagca

SEQ ID NO: 59693 - DNA, 268 bp, Glycine max
  Clone ID: 700675153H1
tcggctcgagagccccccaaaaatgaagagcaccatcttctttgctctctttctcttttgtgccttcaccacctcatacctaccttcagccatcgctgatttcgtgctcgataatgaaggtaaccctcttgaaaatggtggcacatattatatcttgtcagacataacagcatttggtggaataagagcagccctacagggaaatgaaagatgccctctcactgtggtgcaatctcgcaatgagctcgacaaagggattggaacaatc

SEQ ID NO: 59694 - DNA, 267 bp, Glycine max
  Clone ID: 700675154H1
tcggctcgagtagatcttaaaatttctcaatctaaaattgcacttcccaaaaacacagttggaggaaccattctgcgtagtgatctattggcaaattttttgacagagggcaattttagagcaagtgttgatttgcagcgcacgcatcgtattaaaggaatgattaaaatggtggccacagttggtattcctgagaatacaggtatagcattggcctgtgctatgaatagttcttttagggggcgtgccagttctgatatttacacc

SEQ ID NO: 59695 - DNA, 267 bp, Glycine max
  Clone ID: 700675155H1
tcggctcgaggttcaatatcctagtacaccgtattatagaatttaagatatactatgatgagtgcgcggttcccattagtgatgctgggagttgttttcctggcatcagtttctgtctcatttggcattgcgtattgggaaaagcagaaccccagtcacaacaagtgcctccgaagttgcaatagcgagaaagactcctacaggaaccaagcatgccacgctcgttgcaacctccttaaggtggaggaagaagaagaatgcgaagaa

SEQ ID NO: 59696 - DNA, 269 bp, Glycine max
  Clone ID: 700675156H1
cggctcgaggttttttctcagaaccttctgaggttaaagcaaaaaacaaagagagagagagagagaaaatgatgaagccatcgatgctcagatctctccactccgccgccacccgcggcgcctctcatctcttccgccgtgggtacgcctccgagccggtgccggagcgcaaggtagccgttctcggcgccgccggcgggatcgggcagcctctctcccttctcatgaagctcaatcccctcgtttcgagcctctccctttacgatatc

SEQ ID NO: 59697 - DNA, 271 bp, Glycine max
  Clone ID: 700675157H1
tcgagaaaattcttccaccaagttatgggtttccttgtgttgcttcttttctccctcttaggtctctcttctagttccagcatatcaactcatcgttccatattggaccttgacctaaccaagtttaccacacagaaacaggtgtcttcactgttccaactatggaagagtgagcatggacgtgtctaccataaccacgaagaagaggcaaagagacttgagattttcaagaataacttgaactatatcagggacatgaatgcaaacagaa

SEQ ID NO: 59698 - DNA, 97 bp, Glycine max
  Clone ID: 700675158H1
cgagcttctcttttactaaaagaaccaacaatctctagaaccctctcagccaaaaaaaacaatgcagacccaccagaacccttccacacaacatacg

SEQ ID NO: 59699 - DNA, 267 bp, Glycine max
  Clone ID: 700675159H1
agcagaaaccctaatttcctcgttatttcgatactctctccctttggaaaaaatcaaaggtgctcgcagtcgcagcgattagttcaaagattgtaagcgatcgtgaatcgtcgacaaaggttcgtgtctgaattgaagtagtgtcatcaccatgagattgagaaagggaaataaggtggagatccgtggcaatgctgatggacttagtgtggaatggtgttgtgctcgtataatttctggtgatggacacacctacagtgtccagta

SEQ ID NO: 59700 - DNA, 266 bp, Glycine max
  Clone ID: 700675160H1
agtcgaggaggaagaagaagaagaagatgtcgtacctgttgcctcacttgcactctggatgggccgtcgatcaagcaatcctcgccgaagaggagcgtctcgtcgtcatccgtttcggccacgactgggacgaaacctgcatgcagatggacgaggtgttggcgtcagtggcggagacgataaagaactttgcggtgatatacctggtggacataacggaggtgccggatttcaacaccatgtacgagctctacgacccttccacg

SEQ ID NO: 59701 - DNA, 250 bp, Glycine max
  Clone ID: 700674593H1
aggttctcgtcttttgggcaccattcctcagtccatttcacagcaaactgtttggaatcaaatggcaacagtgagaacaccattgaattttgattctagcaagcagagcttttgtcaattttctattgaccttctcggtggaggaattttagtggacaaaactggagattggatcacacttatacaaaattctccaattagtaacttgttgagatttgctgcttggaagaaaggttgtttaatggtcaag

SEQ ID NO: 59702 - DNA, 248 bp, Glycine max
  Clone ID: 700674594H1
cgcgggtaaacggcaggagtaactatgactctcttaaggtagccaaatgcctcgtcatctaattagtgacgcgcatgaatggattaacgagattcccactgtccctgtctactatccagcgaaaccacagccaagggaacgggctttgcggaatcagcggggaaagaagaccctgttgagcttgactctagtcccactttgtgaaatgacttgagaggtgtaggataagtgggaactagaaacagcga

SEQ ID NO: 59703 - DNA, 255 bp, Glycine max
  Clone ID: 700674595H1
caacaatgaagacactcctgttgttgccgtttctattattgacaccaacagcttggagaaccagctctgccagatgcctaggagattctatcttgctgggaaccaagagcaagagtttctaaaatatcagcagcagcagcaaggaggttcccaaagccagaaaggaaagcaacaagaagaagaaaacgaagggggcaacatattaagtggcttcgcccctgaattcttgaaagaagcgttcggcgtgaacatgca

SEQ ID NO: 59704 - DNA, 267 bp, Glycine max
  Clone ID: 700674601H1
cagagttgcaatagcgagagagactcgtacaggaaccaagcatgccacgctcgttgcaacctccttaaggtggagaaagaagaatgtgaagaaggtgaaattccacgaccacgaccacgacacacaacacccggagagggaacctcagcaacccggtgagaaggaggaagacgaagatgagcaaccacgtccaatcccattcccacgcccacaacctcgtcaagaagaagaccacgagcagagagaggaacaggaatggcctcgcaa

SEQ ID NO: 59705 - DNA, 271 bp, Glycine max
  Clone ID: 700674602H1
cagctcgaggagacataatacccagttttttgtggaatattttgcattggatcttgtaatgaatagtgatggcacttgccaaggagtgattgccttgaatatggacgatggaacactacatcgtttcaaagctgcttcaacaattttggccacagggggttatggtagagcatacttctctgcaacctcagcacatacttgcactggagatggcaatgccatggttgcacgtgctgggatccctcttgaggatttggagtttgtacaattt

SEQ ID NO: 59706 - DNA, 256 bp, Glycine max
  Clone ID: 700674604H1
aggtaaggtaggttaacactcttcttcatcgtcgtcgcaacgggacgtgtgatccgtgcgcacgtaagggagcaggctcggtcttcaagtcccacacgcaccaccgcaacggccctgcacgcttccggagcctggacttcggggagcgcaacggctacctcaagggcgtggtcaccgacgtcatccatgaccctggccgcggcgcgccgctcgccaaggtcgccttccgccaccctttcagatacaagaagcagaa

SEQ ID NO: 59707 - DNA, 257 bp, Glycine max
  Clone ID: 700674605H1
ctcgagcgtcctagtataccttaataaataatttaagatactatgatgagagcacggttcccattactgttgctgggacttgttttcctggcttcagtttctgtctcatttggcattgcttactgggaaaaagagaaccccaaacacaacaagtgtctccagagttgcaatagcgagagagactcgtacaggaaccaagcatgccacgctcgttgcaacctccttaaggtggagaaagaagaatgtgaagaaggtga

SEQ ID NO: 59708 - DNA, 258 bp, Glycine max
  Clone ID: 700674606H1
gaagaagatgagaggggtgaagagagcagtatttgtaggcagagccctaagaagcaattccaacaccgccgtgtacggtgttggtgccacccttcatcgagatcgaatggctccccatggctgcttaaccccatcaaatccaaatccttctgtttctgttactgggtttagatacctttctgcttctgctgctgccacgtctcttgcccaagacgctcagaccaaggccttcaaacccaaggaacttgtcctctttca

SEQ ID NO: 59709 - DNA, 238 bp, Glycine max
  Clone ID: 700674607H1
gtgaacaatattttccctcctctaaggtcccaatttttcttaaaccctaaaacactctcacttaagcagctgctgcagaagagaatcccgatttttccaaaatgtcgatgacctagagttccaagatgcttcagtacttcaactaccgtatgcgtgtcaccattcagagacggtcgtcaactcgtcggaaaattcatggccttcgaccgccacatgaacctcgtcctcggcgattgcg

SEQ ID NO: 59710 - DNA, 248 bp, Glycine max
  Clone ID: 700674609H1
aacagtacttgcaaggaacagaatgtcaagtattaatggtgctgcagttgtcatacaatcatttatacgtggttggttagtcagatgatgctcaggagatataggactatcataacctcggggcattaagactaatgagtcagatgaggttctggtgaagtcatctttcctggctgaattacagcgccgggtacttaaggcagaagcttccctgagagagatagatgaggtatatgacattcttcacc

SEQ ID NO: 59711 - DNA, 258 bp, Glycine max
  Clone ID: 700674610H1
aactcaaccaaacaacatccacaaacctaagcagacaaaccaaaccaactcaacccaacaacacacataaacctaaacagaaaccctcggttcatctttggctcgctcagttgcttcaaaattttcattgggtttcatctgatggtgtttctgtggagttggatgagtttcttaagctttctatggagatgaagaagccactgtcttgcaaggctgtgcctagggtttctgtttaggtttatgtgtgttgttgggttg

SEQ ID NO: 59712 - DNA, 255 bp, Glycine max
  Clone ID: 700674611H1
gtcaacccttctcaagagagacagggtagatagaaaatcagaagaagtgacatttgtaagcactgacagcataaggatgagtggtagtgtcaagttcgaggtgtttgataaagatgttctgctgctttccggtgctttagaattgtgtaataccaatggtgttgttggggaatcaagttataatggacaaaggtggagtatgaactgcgagtcatatataattccaggcaccagcttctttaaggggaaacaatt

SEQ ID NO: 59713 - DNA, 258 bp, Glycine max
  Clone ID: 700674612H1
tagatcttaaaatttctcaatctaaaattgcacttcccaaaaacacagttggaggaaccattctgcgtagtgatctattggcaaattttttgacagagggcaattttagagcaagtgttgatttgcagcgcacgcatcgtattaaaggaatgattaaaatggtggccacagttggtattcctgagaatacaggtatagcattggcctgtgctatgaatagttcttttagggggcgtgccagttctgatatttacacca

SEQ ID NO: 59714 - DNA, 257 bp, Glycine max
  Clone ID: 700674613H1
gacggaagcatgggaatccccggtgcgttttacataaagaactacatgcaagttgagttcttcctcaagagtttgactcttgaagccatttcaaaccaaggaaccatccgctttgtttgcaactcatgggtttataacactaaactttacaaaagcgtgcgcattttctttgccaaccatatatatgtacctagtgagacaccagcaccacttgtggagtacagagaagaagaattgaagagtttaagaggaaatgg

SEQ ID NO: 59715 - DNA, 258 bp, Glycine max
  Clone ID: 700674615H1
aagaaagaaggtttttttagtatagttaacagcatggagagggaggaagatgttaaggttggagcacagaaattctcggagaggcaagcactgggtacaggagctaagagtgacaaggactacaaggaggcaccaccagcacccttgtttgagccaggggagttaaagtcatggtctttttacagagctgggatcgcagagtttgtggccacattcttgttcctctacatcactgtcttgactgtcatgggtgtcaac

SEQ ID NO: 59716 - DNA, 259 bp, Glycine max
  Clone ID: 700674616H1
ttcgtcacttcaatgaaggagacgtactagtgattcctcctggtgttccttactggacctataacactggcgatgaaccagttgttaccatcagtcttcttgacacctccaacttcaacaatcagcttgatcaaaaccccagagtattttaccttgctgggaacccagatatagagcacccagagaccatgcaacaacagcagcagcagaagagtcatggtggacgcaagcaggggcaacaccagcagcaggaggaaga

SEQ ID NO: 59717 - DNA, 262 bp, Glycine max
  Clone ID: 700674617H1
ggagagggaacctcagcaacccggtgagaaggaggaagacgaagatgagcaaccacgtccaatcccattcccacgcccacaacctcgtcaagaagaagagcacgagcagagagaggaacaggaatggcctcgcaaggaggaaaaacgcggagaaaagggaagtgaagaggaagatgaggatgaggatgaggaacaagatgaacgtcaattcccattcccacgcccacctcatcagaaggaagagcgaaagcaagaggaagat

SEQ ID NO: 59718 - DNA, 260 bp, Glycine max
  unsure (1)..(260): unsure at all n locations
  Clone ID: 700674618H1
tgaacgtcaattcccattcccacgcccacctcatcagaaggaagagcgaaagcaagaggaagatgaggatgaggagcagcagcgagagagcgaagaaagtgaagattctgagttacgaagacataagaataagaacccttttctcttcggctctaacaggttcgaaactctctgaaaaaaccaatatggtcgcattcgcgtcctccagaggttcaaccaacgctccccacaacttcagaatttncgagactaccgcattt

SEQ ID NO: 59719 - DNA, 257 bp, Glycine max
  Clone ID: 700674619H1
aaaccctaggtagagagctcttcctcactctcattcgcacaagccgcagcagcacgtcctctcgtcaccgtgcaggccctcgacagtgacatggccaccgacgcctccgccaccgtccctatccctgacgtcatgaagtcctccatccgcccggacatcgtcaacttcgtacactccaacatctccaagaacagccgacaaccctatgcagtcagccgccgcgctggccaccagacttccgccgagtcctggggaac

SEQ ID NO: 59720 - DNA, 254 bp, Glycine max
  Clone ID: 700674620H1
tcggctcgaggctaaagctcataggggctgatcttatgtctattccgggagtctacaggattgttcaggagcttatcaaagatcaggttgcaaacatgtatctatggcccaaaaccttggaagttcaagtgttagatatgtcaaaagccttgaagaggcctgttggaattttacatgtaaaggttctgcaagcaatgaagttaaagaagaaagatcttcttggtgcatctgacccttatgtgaagctaaagctt

SEQ ID NO: 59721 - DNA, 253 bp, Glycine max
  Clone ID: 700674621H1
tggaccttgacctaaccaagtttaccacacagaaacaggtgtcttcactgttccaactatggaagagtgagcatggacgtgtctaccataaccacgaagaagaggcaaagagacttgagattttcaagaataacttgaactatatcagggacatgaatgcaaacagaaaatcaccccattctcatcgtttaggattgaacaagtttgctgacatcactcctcaagagttcagcaaaaagtacttgcaagctcc

SEQ ID NO: 59722 - DNA, 253 bp, Glycine max
  Clone ID: 700674622H1
acccaccaccaatctcaccaccgtacccgccgccgcacggtggcagtccttttcctcaaaggacttgcccaattgatgccctaaaattggggctttgcttggatgtgcttggagagttggtgcatgtgggaatagggaacccagttgagaacgtgtgcagtcccgttatacaggggttgcttgatcttgaagctgcaatttgtctttgcactgttattagggctaagcttcttaacctcaatatctttcttcc

SEQ ID NO: 59723 - DNA, 257 bp, Glycine max
  Clone ID: 700674623H1
ttatcgagccgattcggctcgagcttttctatttctctcctttctatcactctcttctgttcactgatctgcattgccgatcaaagtggtcttatttgaaaaacacttgggcgttggctcaaatgtttgcttcgttaattttctttggagacaacaggctcactgagaaaacaatttttacttgcagagatttggacatcttggttgtttattatacaatagcaactcaatttagaaaatttctaccgcattacatt

SEQ ID NO: 59724 - DNA, 254 bp, Glycine max
  Clone ID: 700674624H1
atcctagtacaccgtattaaagaatttaagatatactatgatgagagcgcggttcccattactgttgctgggagttgttttcctggcatcagtttctgtctcatttggcattgcgtattgggaaaagcagaaccccagtcacaacaagtgcctccgaagttgcaatagcgagaaagactcctacaggaaccaagcatgccacgctcgttgcaacctccttaaggtggaggaagaagaagaatgcgaagaaggtc

SEQ ID NO: 59725 - DNA, 254 bp, Glycine max
  Clone ID: 700674625H1
gagttcatgctgaagaaaaagacgtgggatcttggacgtgaggttgatcatattatgagacaaaaggaggctgcaatgcatgtaagaatgcttactcaggagatacgtaagtcactcgatagacatacgattctgtataccactttggtggagctgtctaaaacacttggcttgcaaaattgtgctgtgtggatgcctaatgttgataagactgagatgaacctcactcatgaattgaatgggaggaattttaa

SEQ ID NO: 59726 - DNA, 255 bp, Glycine max
  Clone ID: 700674627H1
gtcagttttcactaattggtgtcattaatatagtaatatttttttttctgcgtcattaatataatattaaatatcgttaaaaattgacagcacaataatgtgttaatttcattgtgaatataattttacaaatattataataagtttattttaacattaaaattgctctaataacaaatgaaggcgtattttcaatattctcttaccacccaaatagcagtcacatttgtgacacttttcatttctctaaaactt

SEQ ID NO: 59727 - DNA, 254 bp, Glycine max
  Clone ID: 700674628H1
cacaactccttttcccaatttctctctcctctctctctctctctgagttctcctttctctctcttgagttaccatttctcattcattcataatgcactaatcataacaacaccgtttagctcaacaacaaaaaataaaataaatcataacaccgttcgttcatcaatggcggttccgctgcattcctagattgctctctttttcaccaattttcattcgttgcgtgtgtttgttcgctgagtgcgttagttatt

SEQ ID NO: 59728 - DNA, 250 bp, Glycine max
  Clone ID: 700674629H1
tattaacacttccttagttcaatatggggaagcccttcactctctctctttcttccctttgcttgctactcttgtcgagtgcatgctttgctattagctccagcaagctcaacgagtgccaactcaacaacctcaacgcgttggaacccgaccaccgcgttgagtccgaaggtggtttgattcaaacatggaactctcaacaccctgagctgaaatgcgccggtgtcactgtttccaaactcaccctcaa

SEQ ID NO: 59729 - DNA, 255 bp, Glycine max
  Clone ID: 700674630H1
tgcatggtggatgtacaacaatgaagacactcctgttgttgccgtttctattattgacaccaacagcttggagaaccagctcgaccagatgcctaggagattctatcttgctgggaaccaagagcaagagtttctaaaatatcagcagcagcagcaaggaggttcccaaagccagaaaggaaagcaacaagaagaagaaaacgaaggaagcaacatattgagtggcttcgcccctgaattcttgaaagaagcgtt

SEQ ID NO: 59730 - DNA, 256 bp, Glycine max
  Clone ID: 700674631H1
tggctcctctgcgtgctcgttgaatccatcctaagtgacttgcttgctgaaggcgacacgaggtcggtagaaactaagaatgggggaagagaatgaagaaacaaaaacatttaaggatttgggcttatccgagtcattggtggaagcttgcgaaaaattgggttggaaaaattgaattaaagatacagacagaagcaattcctcttgcattggaaggaaaagatgtgataggacttgcccaaactggttccggtaa

SEQ ID NO: 59731 - DNA, 74 bp, Glycine max
  Clone ID: 700674633H1
agctgaagatggttctgttgagaatgcagacaatgttgaatctagctctatatctgctaaaagtacgtcagagg

SEQ ID NO: 59732 - DNA, 260 bp, Glycine max
  Clone ID: 700674634H1
cacataaaaaaccactctacaaaactctccagtacattctgaaaattttattttcttttggtgaaattaacagctctgtgattgatcaatggcgacaaaggaaggcaaagccataggcatcgatctcggcacgacctacagctgcgtgggcgtgtggcaaaacgaccgcgtcgagatcatccccaacgaccaaggcaaccgaaccactccctcttatgtagccttcaccgacaccgagaggctcatcggagacgcggcga

SEQ ID NO: 59733 - DNA, 230 bp, Glycine max
  Clone ID: 700674637H1
ctcgagccgtttgtggatgctcagcctcagcagaaagaggaggggaacaagggaagaaagggtcctttgtcttcaattttgagggctttttactgaataagtatgtagtactaaaatgtatgctgtaatagctcatagtgagcgaggaaagtatcgggctatttaactatgacttgagctccatctatgaataaataaatcagcatatgatgcttttgttttgtgtaact

SEQ ID NO: 59734 - DNA, 120 bp, Glycine max
  Clone ID: 700674638H1
agataacaaaggctttagcttgccttttgttcactgtaaaataataatgtaagtactctctataatgagtcacgaaacttttgcgggaataaaaggagaaattccaatgagttttctgtc

SEQ ID NO: 59735 - DNA, 253 bp, Glycine max
  Clone ID: 700674640H1
ctttgagatcaccccagagaaaaaccatttcttctgaagataaaccttttaacttgagaagccgcgaccccatctactccaacaagcttggcaagttctttgagatcaccccagagaaaaacccccagcttcgggacttggatatcttcctcagtattgtggatatgaacgagggagctcttcttctaccacacttcaattcaaaggcgatagtgatactggtaattaatgaaggagatgcaaacattgaact

SEQ ID NO: 59736 - DNA, 253 bp, Glycine max
  Clone ID: 700674645H1
ccactaacaattccttcacttgcagcactgttgcatcatcatcttcattgcaaaaccctaaacttcaccttcaaccatgaccacacaagtaccaccacacagtgtccaagtccacacaacaacacacctctacgaagctggcgtcgtcccccccggagcccgtttcgaaccgccgcgttatgaagccggcgtcaaagcgccctccatttaccattccgagagaggtccaacgacttcccaggtcctcgccgtc

SEQ ID NO: 59737 - DNA, 251 bp, Glycine max
  Clone ID: 700674646H1
gtccgtcaccgtctccgtaacttccctaatcctattcctttccttctctccgtttccgtcgctgcatctctccctccgttacggaaccgaagcccgtcacagatggcggctcgcgaatcgatgatggcggattacgcgaaatcggggaagtcgtcgtgcagggcgtgttcccaaaagatcgaagcgaaggcattgaggctggcttcggtctccaaaggaaatggtccgtacgacatcgtcaagtggcacca

SEQ ID NO: 59738 - DNA, 251 bp, Glycine max
  Clone ID: 700674647H1
ggaataccaagattaccaccacaaagcaatgggcggtatactttctgcgcttcttggcggcgacgcggtcgcggcggcgtcttcgccggatagttctacttctagagtctcctccttccactcgtcgccgcgctagcagctctacttcaacgagatcaaagataccgataagctcgttgtgataggtttctcggcgtcgtggtgcggtacctgcaaattcatagagccagcgattcatgccatggccgaca

SEQ ID NO: 59739 - DNA, 250 bp, Glycine max
  Clone ID: 700674648H1
ctcgagccgctcgagccggttttacttgtcaaactctcagcgggatccatgttggcaccacatgtgaccccaatatcagatgagtataccatagtgctgagtggttatggtgaactgcatatagggtatccaaacggaagcaaagcaatgaaaactaaaatcaaacaaggggacgtgtttgttgtgccaagatacttccccttctgtcaagtagcatcaagggatggacccttagagttctttggcttct

SEQ ID NO: 59740 - DNA, 256 bp, Glycine max
  Clone ID: 700674649H1
aaagaaccaaagggctgctgctaagaaggctgctggtggagatggagatgaggaggacgaagattaaattattaatggctactgatatttaggccttgcggttgttattttttttatattatctgtgttggtagacattttagatttttgaaatggtctgacttgttataattttgccatccttgtttcttgttttgaggtaaagctgtgcctgagatatcatggttttgaactgttctttctaaactattcaagt

SEQ ID NO: 59741 - DNA, 127 bp, Glycine max
  Clone ID: 700674650H1
caggttgccgcaccttaaaaccggaaacaaaagcaatcgttacttgatttcaagaatctctcaatttcttcctacttctttgtgtacgatttcttaagggaaagaaaatcactctctgtgctggtca

SEQ ID NO: 59742 - DNA, 248 bp, Glycine max
  Clone ID: 700674651H1
aaaagctgatgtgcctaccatagcacagattgaagcgttccattcgatgcagaggatgatgaatgctcctgattcaaatgataatattgatctactgttgagcattgatttgttgggtttacaaggagcaggcaaagcttttccaaacaagattgtttttgatgataagcttgtgttggctaacacacaagaattctttgatggaaattttccagtggattcttggttaccaatttttgtgaattgtc

SEQ ID NO: 59743 - DNA, 249 bp, Glycine max
  Clone ID: 700674653H1
ctcgagcgcttaattattaacacttccttagttcaatatggggacgcccttcactctctctctttcttccctttgcttgctactcttgtcgagtgcatgctttgctattagctccagcaagctcaacgagtgccaactcaacaacctcaacgcgctggaacccgaccaccgcgttgagtccgaaggtggtttgattcacacatggaactctcaacaccctgagctgaaatgcgccggtgtcactgtttc

SEQ ID NO: 59744 - DNA, 175 bp, Glycine max
  Clone ID: 700674654H1
ccttaatgtataatttaagatactatgatgagagcacggttcccattactgttgctgggacttgttttcctggcttcagtttctgtctcatttggcattgcttactgggaaaaagagaaccccaaacacaacaagtgtactcagagttgcaatagcgagagagactcgtacagga

SEQ ID NO: 59745 - DNA, 247 bp, Glycine max
  Clone ID: 700674657H1
cggctcgagtctccattgtctttgaacactcatcaccatggccaagcttgttctttccctttgcttccttcttttcagtggctgcttcgctctgagagagcaggcacagcaaaatgagtgccagatccaaaagctgaatgccctcaaaccggataaccgtatagagtcggaaggtgggttcagtgagacctggaaccctaacaacaagccattccagtgtgccggtgttgccctctctcgctgcacc

SEQ ID NO: 59746 - DNA, 250 bp, Glycine max
  unsure (1)..(250): unsure at all n locations
  Clone ID: 700674658H1
ctcggcctaactcgtgtcgtgcattttctttttccgcgtttgctccattctttcatttgtcttctgtctcttaattattttctatctctaagtacttccacaaaggggtaaatatattactccgttgaacacggtggagaaggtttctccactgccttttcacacctcaacttccctagntcttcacttgcttctcgaacttcttcctttttgaagttattaattaatactagtttcttattcggtttct

SEQ ID NO: 59747 - DNA, 245 bp, Glycine max
  Clone ID: 700674659H1
ttgagctctgcgagatcttgagtcgccgatttgaaaagatgagtaagcttcagagtgatgctttgcgtgaagccatctcaggaatcatggccgattccaaggagaagaatcgcaaatttgtggagaccatcgaactccaaatcggtttgaagaactacgatccacagaaggacaagcgtttcagtggctccgtcaagttgccccacatccctcgccccaagatgaaaatttgcatgcttggtgat

SEQ ID NO: 59748 - DNA, 252 bp, Glycine max
  Clone ID: 700674660H1
atcatgcacaagagctcttcagattccacgttgggcccgggtggcctggacctctcccaggccttcttcaggcccataaacaacgccgcccctccctccccgaccaagcgccacaacaagatctccgtcatcggcgccggcaacgtgggaatggccatcgacgcagaccatcctcactcaggacctcaccgacgagctcgtcctcgtcgacaccaactccgacaagctccgcggcgagatgctcgacctcca

SEQ ID NO: 59749 - DNA, 226 bp, Glycine max
  Clone ID: 700674661H1
ctcgagccgtttgtggatgctcagcctcagcagaaagaggaggggaacaagggaagaaaaggtcctttgtcttcaattttgagggctttttactgaataagtatgtagtactaaaatgtatgctgtaatagctcatagtgagcgaggaaagtatcgggctatttaactatgacttgagctccatctatgaataaataaatcagcatatgatgcttttgttttgtgt

SEQ ID NO: 59750 - DNA, 251 bp, Glycine max
  Clone ID: 700674662H1
gaacgattaaaaataaataaaagttaagtctgctgttttattttacacagattcaagaaaggaaaaaaacaaacaagaggtttggtttggttttcgaggcaaatatggaaatgtcatcgtcctctctgggcatattgccggttcggtattgtttttttagttgctagatcttcttcacgttgccaatgcggtgggtagttaattagtagatatgggtttgagatttgagaacaattatgtgttactagagc

SEQ ID NO: 59751 - DNA, 147 bp, Glycine max
  Clone ID: 700674663H1
caggttgccgcaccttaaaaccggaaacaaaagcaatcgttacttgatttcaagaatctctcaatttcttcctacttctttgtgtacgatttcttaagggaaagaaaatcactctctgtgctggccacagacttcgtgaatcatttt

SEQ ID NO: 59752 - DNA, 255 bp, Glycine max
  Clone ID: 700674664H1
atatcctagtacaccgtattaaagaatttaagatatactatgatgagagcgcggttcccattactattgctgggagttgttttcctggcatcagtttctgtctcatttggcattgcgtattgggaaaagcagaaccccagtcacaacaagtgcctccgaagttgcaatagcgagaaagactcctacaggaaccaagcatgccacgctcgttgcaacctccttaaggtggaggaagaagaagaatgcgaagaaggt

SEQ ID NO: 59753 - DNA, 252 bp, Glycine max
  Clone ID: 700674666H1
tggattttgattctctttatctgtgattgttgactcgacagatgcagatcttcgtcaagaccctcaccggcaagaccatcacccttgaggtggaaagctctgacaccatcgacaacgtcaaggccaagatccaggacaaggaaggaatccccccggaccagcaacgtctcattttcgccggaaagcaacttgaggacggccgtacccttgctgactacaacattcagaaggagagtactcttcacctcgtcc

SEQ ID NO: 59754 - DNA, 250 bp, Glycine max
  Clone ID: 700674667H1
gagaacaccattgaattttgattctagcaagcagagtttttgtcaattttctattgaccttctcggtggaggaattttagtggacaaaactggagattggatcacacttatacaaaattctccaattagtaacttgttgagagttgctgcttggaagaaaggctgtttaatggttaagattgtgatgtctgggaatgcagcagtcaaaaggagtgattgggcctcattggtacaagtgtttttaacaaac

SEQ ID NO: 59755 - DNA, 249 bp, Glycine max
  Clone ID: 700674668H1
atgctcctgattcaaatgataatattgatctactgttgagcattgatttgttgggtttacaaggagcaggtaaagcttttccaaacaagattgtttttgatgataagcttgtgttggctaacacacaagaattctttgatggaaattttccagtggattcttggttaccaatttttgtgaattgtctctatcctgtaagtcaattaccttcagaagctgtcgttgtaaatgttacatgtggtagtggac

SEQ ID NO: 59756 - DNA, 249 bp, Glycine max
  Clone ID: 700674670H1
gtgaattatggaatcctgcttgcacaaaagcaatgactttgttatttaatccaaacccgtgttctgatgcatggagtttggaatttctgaagcgtaccggatttcattgtgatatcatttgtgtcactggatggactgccaccccaatgcaggatgttcaggttacaattgattggtttatttcctctcaggaatgtgttttcaggacctattgtgttttaaatccacaaaatccttttgtgttaaata

SEQ ID NO: 59757 - DNA, 247 bp, Glycine max
  Clone ID: 700674671H1
aaacaattcaattcaatctgcctcgatcatggagaggaaaacatttgggctttagttcttgctcctccttgtcttagcttctgatgtgacggtgaagagagcagaggcgaaagattgcttgacaaggaggcacgggttccagggtagatgcttattcgacaggcaatgtgcacatgtgtgcaggagcgatggtttcatcggtggtcagtgccgaggccctcttcgcaaatgcttttgcagcaggcca

SEQ ID NO: 59758 - DNA, 250 bp, Glycine max
  Clone ID: 700674672H1
atatcctagtacaccgtattaaagaatttaagatatactatgatgagagcgcggttcccattactgttgctgggagttgttttcctggcatcagtttctgtctcatttggcattgcgtattgggaaaagcagaaccccagtcacaacaagtgcctccgaagttgcaatagcgagaaagactcctacaggaaccaagcatgccacgctcgttgcaacctccttaaggtggaggaagaagaagaatgcgaag

SEQ ID NO: 59759 - DNA, 248 bp, Glycine max
  Clone ID: 700674673H1
cgaaggaacagattcgggcactgagcaaacgtgccaaatctagttcaaggaaaaccatttcttctgaagataaaccttttaacttgagaagccgcgaccccatctactccaacaagcttggcaagttctttgagatcaccccagagaaaaacccccagcttcgggacttggatatcttcctcagtattgtggatatgaacgagggagctcttcttctaccacacttcaattcaaaggcgatagtgata

SEQ ID NO: 59760 - DNA, 247 bp, Glycine max
  Clone ID: 700674674H1
aactcaaccaaacaacatccacaaacctaagcagacaaaccaaaccaactcaacccttcaacacacataaacctaaacagaaaccctcggttcatctttggctcgctcagttgcttcaaaattttcattgggtttcatctgatggtgtttctgtggagttggatgagtttcttaagctttctatggagatgaagaagccactgtcttgcaaggctgtgcctagggtttctgtttaggtttatgtgtg

SEQ ID NO: 59761 - DNA, 257 bp, Glycine max
  unsure (1)..(257): unsure at all n locations
  Clone ID: 700674675H1
gagaccataaatacagcaaaaagagtgatgatataatccaaagtggacatgttagtgatcctgggattggcaaggctgacttttgcgcttctcctaagctcaagcgttcctgctctgacctggaaagaagggatgtactaaggaagacttctcatctctttccgtcttcaaagtcacagtcttttgagaatttgcaggggttatcagcatatcagatggttaatctagaaagccccnagtcagtgatgactcacggc

SEQ ID NO: 59762 - DNA, 249 bp, Glycine max
  Clone ID: 700674676H1
ctttgagatcaccccagagaaaaaccatttcttctgaagataaaccttttaacttgagaagccgcgaccccatctactccaacaagcttggcaagttctttgagatcaccccagagaaaaacccccagcttcgggacttggatatcttcctcagtattgtggatatgaacgagggagctcttcttctaccacacttcaattcaaaggcgatagtgatactggtaattaatgaaggagatgcaaacattg

SEQ ID NO: 59763 - DNA, 248 bp, Glycine max
  Clone ID: 700674677H1
gaccgtaccatctgtaagtgtttgcaatacctgcattagaagattctcgcttccatttggggaagttccaagcagcacttgggcgcatattacagggatcatcacaatctggtccagtgcttactccggctgaagttttaattgcaattcatggaattgatcctgaaaaggatggaattcccttgaaaaaggtcacagacgcatgcaatgcttgctttgagcagtggcaaacttttactcaagaagtt

SEQ ID NO: 59764 - DNA, 251 bp, Glycine max
  Clone ID: 700674678H1
ctcgagccgcgcggccaaacagagcaaaaacccaacacaccacactcttgcaatcaatcaatggcggaaccttcctcctcgaagcccgccgtccctctcctgaaggacgagctggacatcgtgatcccgacgatccgcaacctcgacttcctcgagatgtggcggcccttcttcgagccctatcacctcatcatcgtgcaggacggagaccccaacaggaccatcaaagttcccgatgggttcgattacga

SEQ ID NO: 59765 - DNA, 249 bp, Glycine max
  Clone ID: 700674679H1
gctcaatcctggtatttcaggttctcgtcttttgggcaccattcctcagtctatttcacagcaaactgtttggaatcaaatggcaacagtgagaacaccattgaattttgattctagcaagcagagcttttgtcaattttctattgaccttctcggtggaggaattttagtggacaaaactggagattggatcacacttatacaaaattctccaattagtaacttgttgagagttgctgcttggaagaa

SEQ ID NO: 59766 - DNA, 250 bp, Glycine max
  Clone ID: 700674681H1
gtttccaaggctgaactgaaggagaagctgggaagaatgtatgacgtgaaagacaccaacactgtatttgtcttcaagttccgaactcattttggtggtggcaagtccactgggtttggtttgatctatgattcagttgagaatgctaagaagtatgagcctaaatacaggcttatcaggaatggacttgataccaaagtagagaaatcaaggaagcaaatgaaggagagaagaatagagctaagaagat

SEQ ID NO: 59767 - DNA, 126 bp, Glycine max
  Clone ID: 700674682H1
caccccactaacaattccttcacttgcagcactgttgcatcatcatcttcattgcaaaaccctaaacttcaccgtcaaccatgaccacacaagtaccaccacacagtgtccaagtccacacaacaa

SEQ ID NO: 59768 - DNA, 245 bp, Glycine max
  Clone ID: 700674684H1
acgatgatgaggtcaaagatagtgttgtttggagactccatcacggagcaatcgatccgagagaatggatggggtgttcctcttgccaatgcctattctcgcagggctgatgtacttgttcgtggttatggtggatacaacactaggtgggctatgttcttactgggccatctcttccctctggactcaactaaaccacctactgctaccacaattttctttggcgctaatgatgcagctttgtt

SEQ ID NO: 59769 - DNA, 247 bp, Glycine max
  Clone ID: 700674686H1
cggctcgagcagcaagggagaatcaattcctcatcgttgcaatttttctttcactctctagattctcatctttcctctcttctaccccttcagaaaaaaccatgtcttcatattatatgtatatctagctcttcattttttcttgctcaagattatgctgtaaaattctgaaactcacagtttcagccacattttagacttaaagatctgcgcgttgacccttggcaggttcagcttttggagttgt

SEQ ID NO: 59770 - DNA, 249 bp, Glycine max
  Clone ID: 700674687H1
ctgggaaccaagagcaagagtttctaaaatatcagcagcagcagcaaggtggttcccaaagccagaaaggaaagcatcaagaagaagaaaacgaaggaagcaacatatttagtggcttcgcccctgaattcttgaaagaagcgttcggcgtgaacatgcagatagtgagaaacctacaaggtgagaacgatgaggaggatagtggagccattgtgacagtgaaaggaggtctaagagtcacagctccag

SEQ ID NO: 59771 - DNA, 243 bp, Glycine max
  Clone ID: 700674690H1
ttctctccattggtccttaaacactcatcagtcatcaccatggccaagctagttttttccctttgttttctgcttttcagtggctgctgcttcgctttcagttccagagatcagcctcagcaaaacgagtgccagatccaaaaactcaatgccctcaaaccggataaccgtatagagtcagaaggagggctcattgagacatggaaccctaacaacaagccattccagtgtgccggtgttgcc

SEQ ID NO: 59772 - DNA, 247 bp, Glycine max
  Clone ID: 700674691H1
ctcctcctccttcatgtaattctcctcgccacggcggaacccctcgccgccggcggccactggaaggtcctccagcaaagcatcggcattgtggccatgcacatgcagctcctccacaccgacacggtgacaatcttcgaccgcaccgacttcggcctctccaacctctccctccctgacggcctctgccgccacgacgccgccgagatggccgtgaaaaccgactgcaccgcccactccctcgaat

SEQ ID NO: 59773 - DNA, 245 bp, Glycine max
  Clone ID: 700674692H1
ggaagatttacttgaaagctgccaagaattacttggaaaaaggttctgattatgctaagaacgaaatccagcgcctacagcgcatacttgacaagtccattagtcctgccaaggccgacgagttaactctaaagaaaaatatcttgtcgacatatgcggcttgactttttggtgcatcattaaccatctctcatggaagctcgtgatcaatcgcagctcctgatgattgtttgactttgatatcg

SEQ ID NO: 59774 - DNA, 247 bp, Glycine max
  Clone ID: 700674693H1
ccctcttcttgttatcttcagccccatccttgtccctgctgcgtttgtgctgttcctggttgcttctggctttttgttctctgggggctgtggtgtggctgccattgctgctttatcttggatttacaactacgtttctgggaaccagcctgcgggttctgacacccttgactatgcaaaagggtaccttactgataaggcaagggatgtgaaggagagggcaaaggattatggaagttatgctcag

SEQ ID NO: 59775 - DNA, 250 bp, Glycine max
  Clone ID: 700674695H1
gttcaatatcctagtataccttaataaataatttaagatactatgatgagagcacggttcccattactgttgctgggacttgttttcctggcttcagtttctgtctcatttggcattgcttactgggaaaaagagaaccccaaacacaacaagtgtctccagagagacaatagcgagagagactcgtacaggaaccaagcatgccacgctcgttgcaacctccttaaggtggagaaagaagaatgtgaag

SEQ ID NO: 59776 - DNA, 128 bp, Glycine max
  Clone ID: 700674701H1
gttcaatatcctagtacaccgtattaaagaatttaagatatactatgatgagagcgcggttcccattactgttgctgggagttgttttcctggcatcagtttctgtctcatttggcattgcgtattgg

SEQ ID NO: 59777 - DNA, 127 bp, Glycine max
  Clone ID: 700674703H1
ctagtatttttcaagtaacttaaggtttcaaacctaggaagttaggaagtcatggcagcaacattgatggcagcaacaagttctggcactcttaaagcaactcctttcctaggcaaaggcaggggtg

SEQ ID NO: 59778 - DNA, 234 bp, Glycine max
  Clone ID: 700674705H1
caaatgtcctgtactttggatattaatgtattcatagttaaaaaatgaaagaaattagaaatgaaagagataggcttcaaagtagagttgcaaacattgagaggcttgccgagcataacaatgcattgattcgagaattgatggaaagtatgaacaagccatctacaatagatgaaagtcaagatgaggatgggagtaactgagtgaaccataatgactcattgatgctgattt

SEQ ID NO: 59779 - DNA, 285 bp, Glycine max
  Clone ID: 700674707H1
gcaggtcattaagaatgaagatcttgaagagctgcgagaactaggttctggtacctttgggactgtgtatcatggaaagtggagaggaacagatgttgctattaaaagaataaagaagagctgcttcactggtcgatcatctgagcaagagagactgactgtagagttctggcgggaagctgacattctttccaagcttcatcatccaaatgtggttgcattttatggtgtggtacagcatgggccaggaggaacaatggccactgtggcagaatatatggtgga

SEQ ID NO: 59780 - DNA, 287 bp, Glycine max
  Clone ID: 700674708H1
gtcagaagttgctcgtggacgtgctatcatcccttcgaacaagaaacacttggagttagagcccatgatagttggaagaaactttttggtaaaagtaaatgccaacattgggaattctgccgttgctagctctatagaagaggaagtttacaaggttcaatgggcaactatgtggggagcagatactgccatggatctctcgactggtcgccacatccatgaaactcgagagtggatcctacgcaactctgctgtaccaattgggactgtgcctatttatcaagcac

SEQ ID NO: 59781 - DNA, 288 bp, Glycine max
  Clone ID: 700674709H1
atctcacttaaaccttcttatcccatccataagctttcaaaaaccacgatgatgacacccaactgcgttagattcagtttcaactacaactcatgcctcatattcgcaaatgggtacccttcttcttcacttccactttctcttcagaacaagcccagaaaatcggcatcagtggttgtgatcgcccgaaggaaagacaagaaagaagatacccatagctctgttcccaaacccgacgaggtcactggtttcttccccgaagctgtgctccttaaaaagagaacagtt

SEQ ID NO: 59782 - DNA, 284 bp, Glycine max
  Clone ID: 700674710H1
gctgctgttcttgcgcgtgaacaagcctcaggtaagccaaaaccatggttaagcataacaatgttatcccaaacggacacttccgtaagcactggcagaactatgtgaagacttggttcaatcagccagcacggaagacaaggagacgattggctcgtcagaagaaagctgtgaagatattccccagacctacggctggacctctcaggcccattgtacatggtcaaactttgaaatacaacatgaaagtgagaggtggaagggagttttctcttgaagaactc

SEQ ID NO: 59783 - DNA, 284 bp, Glycine max
  Clone ID: 700674712H1
agcaaattgcaatggctaagcatgatgttgagggtggttccttctctgcaaaggactaccatgatcctcctccagcaccgttgattgatgctgaggaactcacacagtggtccttctacagggctttgattgctgagttcattgccacaatgctcttcctttacatcacagtgctcactgtgattggttacaagagccagagtgatgtaaaggctgggggtgatgtgtgtggtggagttggcattcttggcattgcttgggcctttggtggcatgatcttcatt

SEQ ID NO: 59784 - DNA, 271 bp, Glycine max
  Clone ID: 700674713H1
atttagtacgtgtgcaacatatggggaacctgaaaagatgcctatactagaaacaacagaacagaaaccaattaatccatacggaaaagccaagaagatggcagaagatatcatccttgatttttccaaaaattctaagatggcagtaatgattctgagatacttcaatgtgattggatcagacccagagggcagattgggtgaggctccaagacctgaacttcgtgaacatggccgaatttctggtgcctgctttgatgcagctcgtggt

SEQ ID NO: 59785 - DNA, 286 bp, Glycine max
  Clone ID: 700674715H1
gtttctttctttggtttgtttctgctggtctcctgacagttttatgggctcttgctattggtcttcttgctaccatcctgcatgcaagctttagaacacctaacttgaaagctcgtctaaacacattccgtgaagaatttcgtgcagtatggcgcaattatagtgaactgtagcttacataaaatttgttggacttggatgtgttgctgctttattgttgaagtattttctgttaattggaatggaacattccatggcaagctgccgaccattggagactataagc

SEQ ID NO: 59786 - DNA, 280 bp, Glycine max
  Clone ID: 700674716H1
gttcctcactgaccaagccatggcgatgagaaccaaactttctttagctatctttttcttttttcttttagccttattttcaaacctagcctttggcaaatgtaaagaaaccgaggtagaagaagaagaccctgagctcgtaacatgcaaacaccaatgccaacagccacagcaatacactgagggtgacaagcgggtatgcttgcaaagatgtgacaggtatcatcgtatgaagcaagagcgagagaaacaaatccaagaggaaactcgtgagaagaaa

SEQ ID NO: 59787 - DNA, 76 bp, Glycine max
  Clone ID: 700674717H1
aacccaagctgttctcggtgagaagggaaggagaataagggaacttacctctgtggttcagaagaggttcaagttt

SEQ ID NO: 59788 - DNA, 98 bp, Glycine max
  Clone ID: 700674718H1
ttcaatatggggaagcccttcactctctctctttcttccctttgcttgctactcttgtcgagtgcatgctttgctattagctccagcaagctcaacga

SEQ ID NO: 59789 - DNA, 142 bp, Glycine max
  Clone ID: 700674720H1
cgccccccaaaaatgaagagcaccatcttctttgctctctttctcttttgtgccttcaccacctcatacctaccttcagccatcgctgatttcgtgctcgataatgaaggtaaccctcttgaaaatggtggcatattatatc

SEQ ID NO: 59790 - DNA, 283 bp, Glycine max
  Clone ID: 700674721H1
cttgaattctgcgcttaacgcttcgaatctttgaattcattcaaagatctccctctacgcatatcagggcactatggctgccacggtgaaacaaatgtctttgatcgtgtcactgttgggtgtggtgtgattcattttgggagttgttgctgaaaacaagaagcctgtggctggaacacccgtgcctggttcggatggtatctctgtcacctgcaagtacccagccgatccaactgttgcattggggtatctttctacagcatttcttgttgcatccactgtg

SEQ ID NO: 59791 - DNA, 286 bp, Glycine max
  Clone ID: 700674723H1
cgtaatcaaaaccatgcagatacgaacctgccactccatcaccacccaaacccttccacaacttccgtgttcttctagaaaagcccaccaccgccaccttcttccgccgttaaacgctgcggtttccgcggcgccgttcaaagcccggaaggcccactcaatgcctccagaaaagaaagaaattttcaagtccttggagggatgggcctcggagtgggtcctaccgctgctgaagcccgtggagcaatgctggcagccacaaaacttcctccctgacccctccctt

SEQ ID NO: 59792 - DNA, 281 bp, Glycine max
  Clone ID: 700674725H1
aggctcgagttttgttcaaggaaaagatctcgcaatggttaaagttaatgtagcatgtgctgctgttggcttgacatcaagttacactccaactcatatgttggaatctggtttgcaaaaagacagagggttaattgtggaatattttggaaggatgtcttacgttgctcataacgttaatcagccccaagagaaagatttgttggagggaaatttttccttcgatattaaatctcgctctagattggaaaaagtttcctctacaaaagcacaatttgtta

SEQ ID NO: 59793 - DNA, 73 bp, Glycine max
  Clone ID: 700674727H1
accaaaagctgctaaaataaaatataaaacaagacagacatttcaaaaataaaagctaagtgtgtgttatttt

SEQ ID NO: 59794 - DNA, 282 bp, Glycine max
  Clone ID: 700674728H1
gtgaaagtgaaacagaaaaaatcacccttgaacctggggacatgatacacataccagctggcaccccactgtacatcgttaacagagatgagaatgataagctcttccttgccatgctccatatacctgtctctgtctctactcctggaaaatttgaggaatttttcgggcctggaggacgagacccttaatcggtcctctcagcattcagctggaatgtgctgcaagctgcgctccaaaccccaaaaggaaagttagaaaagctttttgatcaacagaacg

SEQ ID NO: 59795 - DNA, 280 bp, Glycine max
  Clone ID: 700674729H1
acttcttctcttgcggctagggttttagcgcacttcttctagatttaaggaagatgggtaaggaaaaggttcacatcagtattgtggtcattggccatgtcgactctgggaaatccactaccactggtcacctgatttacaagcttggaggcattgacaagcgtgttattgagaggtttgagaaggaagctgctgagatgaacaagaggtctttcaagtatgcctgggtgctggacaaacttaaggctgagcgtgaaagaggaatcaccattgatattgc

SEQ ID NO: 59796 - DNA, 284 bp, Glycine max
  Clone ID: 700674730H1
cttcttcgtctcaaatctcttcgttccttcgattcgttccatttcttccaaaatggccaaagacccagttcgcgttctcgtcactggagctgcagggcaaattgggtatgctcttgtccctatgattgctaggggagtgatgttgggtcctgaccagcccgtgatcctccacatgcttgacatttctccggcagcagagtcattgaatggggttaaaatggaattggtggatgctgcattccctcttcttaaaggtgttgttgccacaactgatgtggttgagg

SEQ ID NO: 59797 - DNA, 87 bp, Glycine max
  Clone ID: 700674731H1
gcaaagcaatggctacttcaaagttgaaaacccagaatgtggttgtatctctctccctaaccttaaccttggtactggtgctactga

SEQ ID NO: 59798 - DNA, 289 bp, Glycine max
  Clone ID: 700674732H1
acaataccaggtgattttgtcattggtgttaagttgacaaccataaacaatatgtgtgcatatgggcttaatcctggtatttcaggttctcgtcttttgggcaccattcctcagtccatttcacagcaaactgtttggaatcaaatggcaacagtgagaacaccattgaattttgattctagcacgcagagcttttgtcaattttctatcgaccttctcggtggaggaattttagtggacaaaactggagattggatcacacttatacaaaattctccaattagtaact

SEQ ID NO: 59799 - DNA, 131 bp, Glycine max
  Clone ID: 700674733H1
ctctgctcgtgcctctagggttatcatatctccatttccatttactctctctcagtttccaagaatcttaagctatgggaaagtcttacccaaccgtgagcgctgattaccagaaggctgtagagaaggcg

SEQ ID NO: 59800 - DNA, 133 bp, Glycine max
  Clone ID: 700674734H1
cgcaaattatttggtttctgctctgtaaatgacctctgctgcttaacaacatccatcttctccaaaacaaaagcaaagaaatatctaaaatctggaacttacgctgatccataatttgttgcttttcttcctt

SEQ ID NO: 59801 - DNA, 130 bp, Glycine max
  Clone ID: 700674735H1
gaagagtactatcttctttgctctctttctagtttgtgccttcaccatctcatacctgccttcagccaccgctcagttcgtgctcgacactgatgatgatcctcttcaaaacggtggcacatactatatg

SEQ ID NO: 59802 - DNA, 117 bp, Glycine max
  Clone ID: 700674736H1
attgattccaggaaccagtgttgaagaggcttacaacaagctaatagttgaacttgagaaaagtgttcctacattggttggcattgaatgtcccaaggatgagaaacttcctcgccg

SEQ ID NO: 59803 - DNA, 278 bp, Glycine max
  Clone ID: 700674737H1
gtcacttggaaacctttccctacctgcgggagtgcaagtttccttaccaatactattgattcaccaggatcgtgatatttggggtgatgatgctacagagttcaacccagaaagatttgctgaaggagtagcaaaggcaacaaaaggccaagctgtgtttttcccatttggatagggtcctagagtgtgcttaggccaaaattttgctttattagacgcgaagatggtttagtcattactcttacaacgcttctcatttgagcgttctcctacctatg

SEQ ID NO: 59804 - DNA, 272 bp, Glycine max
  Clone ID: 700674738H1
atcgttatccttaacgggactgccattctttccttggtgaacaacgacgacagagactcctacagacttcaatctggtgatgccctgagagtcccctcaggaaccacatactatgtggtcaaccctgacaacaacgaaaatctcagattaataacactcgccatacccgttaacaagcctggtagatttgagagtttcttcctatctagcactgaagctcaacaatcctacttagctagattcagcaggaacattttagaggctccacgata

SEQ ID NO: 59805 - DNA, 267 bp, Glycine max
  Clone ID: 700674739H1
agtctgcaaaagatattgagaacctaataaagagccaaagtgagtcctactttgtggatgctcagcctcagcagaaagaggaggggaacaagggaagaaagggtcctttgtcttcaattttgagggctttttactgaataagtatgtagtactaaaatgtatgctgtaatagctcatagtgagcgaggaaagtatcgggctatttaactatgacttgagctccatctatgaataaataaatcagcatatgatgcttttgttttgtgt

SEQ ID NO: 59806 - DNA, 271 bp, Glycine max
  Clone ID: 700674740H1
gaccattcttctgcagtctttctgcaattgagtggctctgcctgcggatggagttactgtcaacctttgtatttgctttctgtatggtattacttgtgagttttcctcgtggaagtatcgaccccagcatggctggacttgctgtgacatatggcctgaatttaaatgcacgcctatcacggtggatactcagcttttgcaagcttgaaaataaaattatatctattgagagaatttatcagtacagccaaattcctagtgaagcacccac

SEQ ID NO: 59807 - DNA, 279 bp, Glycine max
  Clone ID: 700674741H1
attaagaaaagccatttccatagcagcctaagaaaatgaagagcactagcttgttcgctatctttctactttgcgccttcacctcatacctaatatccgccaccgcccaggacgtgctcgacgtggatggcgatccgattcggaacggtttcatatactacgttttgccggcaataagaggaaacggtggcggaatagaacgagccgcactcgggaaagacacttgccctatcactgtagtgcaatctcccaatccaaactctaaggggttagaaatta

SEQ ID NO: 59808 - DNA, 279 bp, Glycine max
  Clone ID: 700674742H1
cgtaatcaaaaccatgcagatacgaacctgccactccatcaccacccaaacccttccacaacttccgtgatacactagaaaagcccaccaccgccaccttcttccgccgttaaacgctgcggtttccgcggcgccgttcaaagcccggaaggcccactcaatgcctccagaaaagaaagaaattttcaagtccttggagggatgggcctcggagtgggtcctaccgctgctgaagcccgtggagcaatgctggcagccacaaaacttcctccctgaccc

SEQ ID NO: 59809 - DNA, 229 bp, Glycine max
  Clone ID: 700674743H1
taccttaataaataatttaagatactatgatgagagcacggttcccattactgttgctgggacttgttttcctggcttcagtttctgtctcatttggcattgcttactgggaaaaagagaaccccaaacacaacaagtgtctccagagttgcaatagcgagagagactcgtacaatagccaagcatgccacgctcgttgcaacctccttaaggtggagaaagaagaatg

SEQ ID NO: 59810 - DNA, 281 bp, Glycine max
  Clone ID: 700674745H1
tcttgggagaagaggtcgagtttcacagcagcaatggtgtacgtcaaggctcagaaatcaaaagcctacttcaagagatatcaagtcaagttcaagagaagaagagagggaaaaaccgattaccgtgccaggattcggttgattaatcaggacaagaacaaatataacactccgaaataccgatttgttgttcgctttagcaacaaggacattgttgcacaaataatatctgctagcattgctggcgatattgttcttgctgcagcatatgcacatgagct

SEQ ID NO: 59811 - DNA, 279 bp, Glycine max
  Clone ID: 700674746H1
atcataaaattcttccaccaagttatgggtttacttgtgttgcttcttttctccctcttaggtctctcttctagttccagcatatcaactcatcgttccatattggaccttgacctaaccaagtttaccacacagaaacaggtctattcactgttccaactatggaagagtgagcatggacgtgtctaccataaccacgaagaagaggcaaagagacttgagattttcaagaataacttgaactatatcagggacatgaatgcaaacagaaaatcaccc

SEQ ID NO: 59812 - DNA, 259 bp, Glycine max
  Clone ID: 700674747H1
ggagcagaaatggcattgatgagaccatttgcacaatgagacttcgccaaaacattggtcagaattcatcacctgacatctacaaccctcaagctggtagcatcacaaccgccaccagccttgacttcccagccctctggcttctcaaactcagtgcccagtatggatcactccgcaagaatgctatgttcgtgccacactacaccctgaacgcgaacagcataatatacgcattgaatgggcgggcattggtacaagt

SEQ ID NO: 59813 - DNA, 136 bp, Glycine max
  Clone ID: 700674749H1
ctttctctctcacgttttccgcttcagttttctcgggaaaatcatggtgaaaggtccaggcctctactctgacattggcaagagagctcgcgatcttctgttcaaggattatcagaatgaccacaagttcaccatc

SEQ ID NO: 59814 - DNA, 117 bp, Glycine max
  Clone ID: 700674750H1
gcaaagcaatggctacttcaaagttgaaaacccagaatgtggttgtatctctctccctaaccttaaccttggtactggtgctactgaccagcaaggcaaactcagcggaaactgttt

SEQ ID NO: 59815 - DNA, 117 bp, Glycine max
  Clone ID: 700674751H1
ccgtgataaagggtttggttttgtgaggtacagtactcatgctgaagcagctctggctattcagatggggaacgcccagtctcttctatgtggaaaaccaattaagtgctcttgggg

SEQ ID NO: 59816 - DNA, 116 bp, Glycine max
  Clone ID: 700674752H1
atcacaggttgccgcaccttaaaaccggaaacaaaagcaatcgttacttgatttcaagaatctctcaatttcttcctacttctttgtgtacgatttcttaagggaaagaaaatcac

SEQ ID NO: 59817 - DNA, 276 bp, Glycine max
  Clone ID: 700674754H1
atctagtacgtgtgcaacatatggggaacctgaaaagatgcctattatagaaacaacagaacagaaaccaattaatccatacggaaaagccaagaagatggcagaagatatcatccttgatttttccaaaaattctaagatggcagtaatgattctgagatacttcaatgtgattggatcagacccagagggcagattgggtgaggctccaagacctgaacttcgtgaacatggccgaatttctggtgcctgctttgatgcagctcgtggtattac

SEQ ID NO: 59818 - DNA, 278 bp, Glycine max
  Clone ID: 700674755H1
cttggataacgttttcgggttcgagaaggcacttgtgttgtttttcgtacgaaatggagactaaacagagttcggtgacggttacgctcagttacggcgcgttgacgtgcgccgcggaatttctcgcgactttgctagcttctgctgtcgtcaaagcctcgcttttggccccggatctctaccggctgctattgatcaacacgcctactgccaaaggagagagcaaaattcagagtgaagacaagcaacgtgatgcagatggagaagatggtaacgat

SEQ ID NO: 59819 - DNA, 276 bp, Glycine max
  Clone ID: 700674756H1
cttcaaagttgaaaacccagaatgtggttgtatctctctccctaaccttaaccttggtactggtgctactgaccagcaaggcaaactcagcggaaactgtttctttcagctggaacaagttcgtgccgaagcaaccaaacatgatcctccaaggagacgctattgtgacctcctcgggaaagttacaactcaataaggttgacgaaaacggcaccccaaaaccctcgtctcttggtcgcgccctctactccacccccatccacatttgggacaaag

SEQ ID NO: 59820 - DNA, 275 bp, Glycine max
  Clone ID: 700674757H1
ggagactataggatacggctttttatccgaactgaactcttggggaagggaattccacccactcatcaatggcatctactctcttcgcttgcccgtcgttgtgttcctcctcttcttctatattttctacttccgtcaaattctccttaaacccgaataaaatttctcttccgttcgccggaaacaaaaaacctctttcggctccaattcgaaggcggttcaatgtcattgctatggctccccctaaacccggtgggaaggccaagaaagtggtt

SEQ ID NO: 59821 - DNA, 105 bp, Glycine max
  Clone ID: 700674758H1
gaagcagcagctacaggacagtcaccagaagattcgtcacttcaatgaaggagacgtactcgtgattcctcctggtgttccttactggacctataacactggcga

SEQ ID NO: 59822 - DNA, 275 bp, Glycine max
  Clone ID: 700674759H1
ccgtcttctctgctaccgatcccaagagagtagcaagagactcccatgttcccgtgttggcaccacttccaattgggtttgcggtgttcatggttcacttggccaacatccctatcaccggcactggcatcaacccagctagaagccttgggcctgctgtcatattcaacaacgagaaggcttgggatgaccagtggatcttctgggttggacccttcatcggtgctgctcttgctgcattctaccaccagtccgtgttgagggcccaagcagca

SEQ ID NO: 59823 - DNA, 280 bp, Glycine max
  Clone ID: 700674760H1
gtacaagacgaggacgaggacgaagatgaagataaacctcgtcctagtcgaccaagccaaggaaagcgtgaacaagaccaggaccaggacgaggacgaagatgaagatgaagatgctcctcgcaagagccgcgaatggagatcgaaaaagacacaacccagaagacctagacaagaagaaccacgtgaaagaggatgcgagacaagaaacggggttgaggaaaatatctgcaccttgaagcttcacgagaacattgctcgcccttcacgcgctgacttct

SEQ ID NO: 59824 - DNA, 275 bp, Glycine max
  Clone ID: 700674762H1
accctactcattctccatacctcaacgaagatgttaaagagacggcaacactttgctgtccgccttgaccgagcagagcttcgtcttggccctcgattttgccctaaagtactctcagtcacaacagacaccgtcgtcgtcgtcgtcgtcatcaatggcaccgaagcagaccaaggctgagaagaagatcgcttacgatgcgaactgtgcgacctaatggaggagtacggccagatcctcgttgtgaactccgataacgtgggatcgaaccagct

SEQ ID NO: 59825 - DNA, 129 bp, Glycine max
  Clone ID: 700674764H1
cgcaggtacatgatcgacatggtcacccacgccgacaccgacgtcgtcatcgttggcgcgggctccgcgggtctctcgtgcgcctacgagctctccaaaaacccctccatcaacatcgccattgttgag

SEQ ID NO: 59826 - DNA, 83 bp, Glycine max
  Clone ID: 700674765H1
ggcaaggctggtctgatccctcaggagacagcactcccatggttcagaacgggtgtgttcccacctgcaggaacctacaacta

SEQ ID NO: 59827 - DNA, 113 bp, Glycine max
  Clone ID: 700674766H1
cttcttctctggttgattcggatctagagtcttcagtttctcctcgttgttcttcgctttcctgttttcaatttcgattctttcgttaatttaataagatgtttgggagggca

SEQ ID NO: 59828 - DNA, 147 bp, Glycine max
  Clone ID: 700674767H1
catcaatttcgcgtctttctttctcaattctcttagattctcaattgggtcttcaaaaatgcggatgagttgcaatggatgtcgagttctgagaaaaggttgcagtgaaaattgcagcatcagaccctgtttacaatggatcaaaag

SEQ ID NO: 59829 - DNA, 135 bp, Glycine max
  Clone ID: 700674768H1
tgaagagcgaagagaatggctcccaagggtttaatctttttggctgtgttatgcttctcagcactgtcactgagtcgttgtcttgcggaggataatggacttgttatgaacttctacaaggaatcatgccctcag

SEQ ID NO: 59830 - DNA, 80 bp, Glycine max
  Clone ID: 700674769H1
ctgagttcattctgtcattgataagtttgcagagcgaggattacggtctcttgcagtatcttaccaggaagttcctgatg

SEQ ID NO: 59831 - DNA, 234 bp, Glycine max
  Clone ID: 700674770H1
atcctagtacaccgtattaaagaatttaagatatactatgatgagagcgcggttcccattactgttgctgggagttgttttcctggcatcagtttctgtctcatttggcattgcgtattgggaaaagcagaaccccagtcacaacaagtgcctccgaagttgcaatagcgagaaagactcctacaggaaccaagcatgctacgctcgttgcaacctccttaaggtggaggaaga

SEQ ID NO: 59832 - DNA, 278 bp, Glycine max
  Clone ID: 700674771H1
atccattggtccttaaacactcatcagtcatcaccatggccaagctagttttttccctttgttttctgcttttcagtggctgctgcttcgctttcagttccagagagcagcctcagcaaaacgagtgccagatccaaaaactcaatgccctcaaaccggataaccgtatagagtcagaaggagggctcattgagacatggaaccctaacaacaagccattccagtgtgccggtgttgccctctctcgctgcaccctcaaccgcaacgcccttcgtaga

SEQ ID NO: 59833 - DNA, 273 bp, Glycine max
  Clone ID: 700674772H1
atcgagccgaatcggctcgagccttagccgaggtcacgaggagcactagctagtttcacaagttccaaatggctaggggaatgaagaagcatctcaagaggctcaatgctcctaagcattggatgcttgacaaactgggtggtgcatttgcgcccaaaccctcatctggaccacacaaatctagggagtgccttcccctcatactcatcctacgaaaccggctaaagtatgctctgacttaccgtgaagtcatcgctattctgatgcagagac

SEQ ID NO: 59834 - DNA, 273 bp, Glycine max
  Clone ID: 700674774H1
aaaggatccttttctgatgtctggatgtaaagttgctgatggcagtggctctatgctggtcactggtgttggtgtcaatactgaatgggggcttctaatggctagcatctcagaagatactggtgaagaaacaccattgcaggttcgcttaaattgtgtagctactttcattggtattgtaggacttactgttgctgttattgtcctaattgtgctactggctagatatttctctgggcatactaaaaacccagatgggtcagttcaattcac

SEQ ID NO: 59835 - DNA, 156 bp, Glycine max
  Clone ID: 700674775H1
cacaggttgccgcaccttaaaaccggaaacaaaagcaatcgttacttgatttcaagaatttctcaatttcttcctacttctttgtgtacgatttcttaagggaaagaaaatcactctctgtgctggtcacagacttcgtgaatcattttcttatcc

SEQ ID NO: 59836 - DNA, 80 bp, Glycine max
  Clone ID: 700674776H1
ggaagtgacaagtgctgttcaccttcactcagttgggtttctgcatttacagacacacgttgaaaggctcaacggtagag

SEQ ID NO: 59837 - DNA, 275 bp, Glycine max
  Clone ID: 700674777H1
accaaattcgaggagataaacaaggttctgtttggtagagaggaggggcagcaacaaggggaggagaggctgcaagagagtgtgattgtggaaatctcaaagaaacaaattcgggaactgagcaaacatgccaaatctagttcaaggaaaaccatttcttctgaagataaacctttcaacttgagaagccgcgaccccatctattccaacaagcttggcaagttgtttgagattaccccagagaaaaaccctcagcttcgggacttggatgtctt

SEQ ID NO: 59838 - DNA, 98 bp, Glycine max
  Clone ID: 700674778H1
gaacaaaccgatccacgccgcccattcgcatttgcacggtagcacgagactcaaggtctatgagtgtgcctgtgcgaccacacacagacgattattta

SEQ ID NO: 59839 - DNA, 215 bp, Glycine max
  Clone ID: 700674779H1
accgattgctagaatggaatttcgatgctcagtcatctcttttaccattctcttctctcttgctcttgcaggagagagccatgtccatgcatcgctacctgaggaagattattgggaagctgtttggccaaacactcccattcccactgcactgcgagagcttctaaagcctctccctgcaggtgtagctatcgatgaactccctaagcaaattg

SEQ ID NO: 59840 - DNA, 279 bp, Glycine max
  Clone ID: 700674780H1
actcaatgccctcaaaccggataaccgtatagagtcagaaggagggctcattgagacatggaaccctaacaacaagccattccagtgtgccggtgttgccctctctcgctgcaccctcaaccgcaacgcccttcgtagaccttcctacaccaacggtccccaggaaatctacatccaacaaggtaagggtatttttggcatgatatacccgggttgtcctagcacatttgaagagcctcaacaacctcaacaaagaggacaaagcagcagaccacaaga

SEQ ID NO: 59841 - DNA, 102 bp, Glycine max
  Clone ID: 700674781H1
cttttaaaaggtttggaaatatgctggcacaaattgagaataaactctcagagagaaacaacgatgagaaactgagaaaccgttgtggaccagttcaaatgc

SEQ ID NO: 59842 - DNA, 124 bp, Glycine max
  Clone ID: 700674782H1
gctcaatcctggtatttcaggttctcgtcttttgggcaccattcctcagtctatttcacagcaaactgtttggaatcaaatggcaacagtgagaacaccattgaattttgattctagcaagcag

SEQ ID NO: 59843 - DNA, 155 bp, Glycine max
  Clone ID: 700674783H1
cgatgccggcgcaccttatgtacgatggggatgaccccaggctattcgagcactactccgctgtggcgcacgcataggcgtgtacaccgccaacgactacgcagacatcttggagtttctcgttgaacggtggattttggaaaactttaaggatt

SEQ ID NO: 59844 - DNA, 78 bp, Glycine max
  Clone ID: 700674784H1
gtctgatatacacgctgaattgaataatacaagttattgtcaggcatggataaatgcagcctcctagaatggggtgat

SEQ ID NO: 59845 - DNA, 245 bp, Glycine max
  Clone ID: 700674785H1
ctcatcaccatggccaagcttgttctttccctttgtttccttcttttcagtggctgcttcgctctgagagagcaggcacagcaaaatgagtgccagatccaaaagctgaatgccctcaaaccggataaccgtatagagtcggaaggtgggttcattgagacctggaaccctaacaacaagccattccagtgtgccggtgttgccctctctcgctgcacccttaaccgcaatgcccttcgtagacc

SEQ ID NO: 59846 - DNA, 274 bp, Glycine max
  Clone ID: 700674786H1
tttcactagctactactcttcttagtttctctgttgtatcatttttattgctatatcctaatcaaacttcactctcaaaatgagtgatcccacactagcacaacagcatctagtcaaagtccacacaacaacacacgtgacagttgttaccacacacaatcataaccaaacaccctcaataaatgcctcaggtgaaaagaagaagattgtgggggtgttctacaaagggaatgaatatgctaaattgaatccaaattttgttggatgtgttgaa

SEQ ID NO: 59847 - DNA, 275 bp, Glycine max
  Clone ID: 700674787H1
cttaattattaacacttccttagttcaatatggggaagcccttcagtctctctctttcttccctttgcttgctactcttgtcgagtgcatgctttgctattagctccagcaagctcaacgagtgccaactcaacaacctcaacgcgttggaacccgaccaccgcgttgagtccgcaagtggtttgattcaaacatggaactctcaacaccctgagctgaaatgcgccggtgtcactgtttccaaactcatcctcaaccgcaatggcctccacttg

SEQ ID NO: 59848 - DNA, 243 bp, Glycine max
  Clone ID: 700674788H1
cacccagagatctatgagtactattcactacaactcacatgcaacgaagatagcactggtgatcgatggcagagggcatcttcaaatatcatgtccacacatgtcatcaaggtcgtcacactcgaagcatgataagagtagcccttcataccatagaatcagttccgatttgaagcctggaatggtgtttgttgtccctcccggtcatcccttcgtcaccatagcctccaataaagagaatct

SEQ ID NO: 59849 - DNA, 271 bp, Glycine max
  Clone ID: 700674789H1
aaatttagtcagcaatgcggtaaagtttacacatgaaggcaaagttggaataaacctttatgtcgttccagaaccaccttttgccaaagcagaaggccatcaaaagatgatcacagaacagtcaacaaattcagcaaatggggtgaaggaagagaaacgtgcatcaacgccgcgaagagcagcgatcaaaattgtcttgatggtcagaaacacaatgaccatcctagccaaaatcatgcattcaatgatgaatgtagatcttcagttaaaa

SEQ ID NO: 59850 - DNA, 270 bp, Glycine max
  Clone ID: 700674790H1
tgagaatctgcagaagtccgtccataagtatttatcaatcagaggaatcaagcctagcacaaccaatttcttgcatgagtacatgatcaacaaggacagtaaagagtacttggtatggttgaacaagctcaagagcttcgtgcaagcatgagccttcacgtctcttttatgtgcttactgtcggcatttgaagataagcatgaatgttgctgagtttgtgtttaatcacatgctgtacattcgaaggtaaagataccaaggagattttac

SEQ ID NO: 59851 - DNA, 273 bp, Glycine max
  Clone ID: 700674791H1
aagacactcctgttgttgccgtttctattattgacaccaacagcttggagaaccagctcgaccagatgcctaggagattctatcttgctgggaaccaagagcaagagtttctaaaatatcagcaagagcaaggaggtcatcaaagccagaaaggaaagcatcagcaagaagaagaaaacgaaggaggcaacatattgagtggcttcaccctggaattcttggaacatgcattcagcgtggacaagcagatagcgaaaaacctacaaggagaga

SEQ ID NO: 59852 - DNA, 133 bp, Glycine max
  Clone ID: 700674792H1
ctctcagcagcaacagcgaaccctagacctgaacggctgaacctcgccgtctacggcggcggagcagtttgtccgacgtccttaggagacaagccgtcgtcgggtcggaacttgcgctgtggtcgaagtgttc

SEQ ID NO: 59853 - DNA, 258 bp, Glycine max
  Clone ID: 700674793H1
ttttgatgagtaagagtgaccagtaaaagaagcggcttggagcattttggttttaccatttctttctccaatttgtttgatctaggaatgataaagttaattggcttacatatggagttatgtacatttaaatatttattttttctctttccaattttattttatgtacacaaatggacaactaaatggacctatttttgtaaatcacatgtcaaactcgaaccttatacgagcaggtaataacataatacctagaat

SEQ ID NO: 59854 - DNA, 227 bp, Glycine max
  Clone ID: 700674795H1
caaagcctgtgaggtctggtggtaagaaagtccaaaagcacagaaattcagatgatgatgagaggaggaagctgttgcagaatttgagaggtagggttgagaagcttagtaaattgtgtaaggtttctgctaatgatgaagaagattctgagtctgaggagggcattcatgataatggggtaaccaatcatttgattggtggaaggaatgaggtgccccaaaacaaa

SEQ ID NO: 59855 - DNA, 276 bp, Glycine max
  Clone ID: 700674796H1
aatgaatgctgctgagattaccgacaagttgggtctacactctctcagacagcgccactggtacattcagagcacctgtgcaacctctggggagggcctttacgaaggtctggactggctttccaacaacattgccaataaggcttaatgcctttgggagtcttgcggattggtaattctggatgcaggggtgaacattatctagcttttatttcttggtcctcttccaagacaactcgaatttgtgctcatgtaatgcggtttaggacatctcga

SEQ ID NO: 59856 - DNA, 243 bp, Glycine max
  Clone ID: 700674802H1
ctcgagccgttgtttttctatttcctttttaaaattatggtccggggtcgatgatttcactacactttttcgaagtatgaggaggaagagtgcctcggtattggcgatgaaaaattaagactcaatcatggcgttcatgatgaataagcggggcactacttttttgaccaaagaaaggcaacaaaaataaaagaagcaaagggtggaaataaaagttgtccctttgacaacacttcttagctc

SEQ ID NO: 59857 - DNA, 242 bp, Glycine max
  Clone ID: 700674803H1
cttaattattaacacttccttagttcaatatggggaagcccttcactctctctctttcttccctttgcttgctactcttgtcgagtgcatgctttgctattagctccagcaagctcaacgagtgccaactcaacaacctcaacgcgttggaacccgaccaccgcgttgagtccgaaggtggtttgattcaaacatggaactctcaacaccctgagctgaaatgcgttgtgtcactgtttcca

SEQ ID NO: 59858 - DNA, 239 bp, Glycine max
  Clone ID: 700674804H1
gtttgttgttcctcactgacctcaccatggcgaccagagccaagctttctttagctatcttccttttctttcttttagccttgatttcaaacctagccttgggcaaacttaaagaaaccgaggtcgaagaagatcccgactcgtaacatgcaaacaccagtgccaacagcaacggcaatacactgagagtgacaagcgaacatgcttgcaacaatgtgacagtatgaacaagagcgaga

SEQ ID NO: 59859 - DNA, 121 bp, Glycine max
  Clone ID: 700674805H1
tgaggccaggcaagcgccactcaaccaccacacctctcctcgttcacgctacccctttctgctcttcttctacctttcaagttttaaaagtataaagatggcagagacattcctatttacc

SEQ ID NO: 59860 - DNA, 92 bp, Glycine max
  Clone ID: 700674807H1
aaacactcatcagtcatcaccatggccaagctagttttttccctttgttttctgcttttcagtggctgctgcttcgctttcagttccagaga

SEQ ID NO: 59861 - DNA, 147 bp, Glycine max
  Clone ID: 700674808H1
atcgagccgattcggctcgagagcgaaagcaagaggaagatgaagttgaggagcagcagagagagagcgaagaaagtgacgattctgagttacgaagacataagaataagaacccttttctcttcggctctaacaggttcgaactct

SEQ ID NO: 59862 - DNA, 246 bp, Glycine max
  Clone ID: 700674809H1
caagtttgctgacatcactcctcaagagttcagcaaaaagtacttgcaagctcccaaggatgtgtcgcagcaaatcaaaatggccaacaagaaaatgaagaaggaacaatattcttgtgaccatccacctgcatcatgggattcgaggaaaaaaggtgtcatcacccaagtaaagtaccaagggggctgtggaagcggttgggcgttttctgccacgggagccatagaagcagcacatgcaatagc

SEQ ID NO: 59863 - DNA, 242 bp, Glycine max
  Clone ID: 700674810H1
ggaagagtttcgcgaagtcatgggtgcacgacttgtttaacctttacagttcttgctttggctgtgggtgctgctgtttccttgtcccccaatttggaatctttggattttaagaagctctcggaacttttcatcgttcggcactgagtagtctggagaatattccgcattaccggcagttggttggttcaaaacggcgattttcttttcagcccatctcattcacaaatccaatgggtaca

SEQ ID NO: 59864 - DNA, 246 bp, Glycine max
  Clone ID: 700674811H1
gcgaagacaatgaggaaccctcgtagtgctctctgcaaaactgctattatggctgctgctgatattttcaacgcctttggtgacaagttgcatgacccagtaatctccgatgcatttgatggcttgctgctacagctgctgctgtaaggcatcccaagacaaaaggtttgtgtgtgaagaagctgacagggcacttggcttaatggttggttccatgacccctcttccactgcttcagaaaatgag

SEQ ID NO: 59865 - DNA, 243 bp, Glycine max
  Clone ID: 700674812H1
agaagatgatgatgatgaggaagagcagccacagtgcgtggagacagacaaaggttgccaacgccaaagcaaaaggagcagaaatggcattgatgagaccatttgcacaatgagacttcgccaaaacattggtcagaattctcacctgacatctacaaccctcaagctggtagcatcacaaccgccaccagccttgacttcccagccctctggcttctcaaactcagtgccagtatggatcac

SEQ ID NO: 59866 - DNA, 240 bp, Glycine max
  Clone ID: 700674813H1
ataattcttccaccaagttatgggtttccttgtgttgcttcttttctccctcttaggtctctcttctagttccagcatatcaactcatcgttccatattggaccttgacctaaccaagtttaccacacagaaacaggtgtcttcactgttccaactatggaagagtgagcatggacgtgtctaccataaccacgaagaagaggcaaagagacttgagattttcaagaatacttgaactat

SEQ ID NO: 59867 - DNA, 239 bp, Glycine max
  Clone ID: 700674818H1
ggtccttaaacactcatcagtcatcaccatggccaagctagttttttccctttgttttctgcttttcagtggctgctgcttcgctttcagttccagagagcagcctcagcaaaacgagtgccaggtccaaaaactcaatgccctcaaaccggataaccgtatagagtcagaaggagggctcattgagacatggaaccctaacaacaagccattccagtgtgccggtgttgccctctctc

SEQ ID NO: 59868 - DNA, 237 bp, Glycine max
  Clone ID: 700674819H1
cacttcccgaagtgttaagagaatgcctctttctatagggggaggagctggtgcaaagaatgctattctcatgaatatgccaaatgctgttctttcaatgtggagatattttgttggagatctcgtctttgaagtttctaagatgacttctccctacattaaatgtacagtctctttcttcatagcatttggaaatttggctgatgacaccatcaattttgaggctttccccacaag

SEQ ID NO: 59869 - DNA, 234 bp, Glycine max
  Clone ID: 700674821H1
cgcccctgaattcttgaaagaagcgttcggcgtgaacatgcagatagtgagaaacctacaaggtgagaacgaagaggaggatagtggagccattgtgacagtgaaaggaggtctaagagtcacagctccagccatgaggaagccacagcaagaagaagatgatgatgatgaggaagagcagccacagtgcgtggagacagacaaaggttgccaacgccaaagcaaaagagcaga

SEQ ID NO: 59870 - DNA, 132 bp, Glycine max
  Clone ID: 700674822H1
tatcgagccgaatcggctcgagcggctcgagagcatcagcccatagtctagcaaaaaggagtttgtgtaagggaagaagatggtgtcaggttctggaatctgcgcaaagcgagtggtggtggacgctcgcca

SEQ ID NO: 59871 - DNA, 238 bp, Glycine max
  Clone ID: 700674823H1
ggcagagacaccggagtcgcttgaggctgctgcgggtatggtggagaagctcttgcagcctgtggatgaggtattgaatgcgcataagaggcaacagcttagggagcttgctgcgttgaatgggacgatcagggatgaggagtattgcaggttgtgtggtgagcctggtcatcgccaatatgcgtgtcctactaggacatcaacgtttaagagtgaagttgtgtgtaagcattgtggg

SEQ ID NO: 59872 - DNA, 240 bp, Glycine max
  Clone ID: 700674824H1
tctccattgtctttgaacactcatcaccatggccaagcttgttctttccctttgtttccttcttttcagtggctgcttcgctctgagagagcaggcacagcaaaatgagtgccagatccaaaagctgaatgccctcaaacggataaccgtatagagtcggaaggtgggttcattgagacctggaaccctaacaacaagccattccagtgtgccggagttgccctctctcgctgcaccctt

SEQ ID NO: 59873 - DNA, 243 bp, Glycine max
  Clone ID: 700674825H1
ctgaaaaggaagatcaagaaaaacccaaaaagattgataccagattgagacaaagaatagatcctcaatacaatgaggttcaggctcagatggaaacaaatttgtttaaattgtctcttgatgatgttgaaactcccaaaggttccatgttggatcttaaaatttctcaatctaaaattgcacttcccaaaaacacagttggaggaaccattctgcgtagtgatctattggcaattttttgac

SEQ ID NO: 59874 - DNA, 200 bp, Glycine max
  Clone ID: 700674826H1
agaaattgcagactttattcatcgaatgagtataccataacaaattttgcaaggtaaataagggtgaatgaatacacagaagtaacgaaaagcttgcatagttaaaggctcttttcttctttttggctaataaaaagttcaaattgaggattttgaaggaaatcactagcttgagagacaatgaagatatgaatcatcca

SEQ ID NO: 59875 - DNA, 241 bp, Glycine max
  Clone ID: 700674827H1
ataccttaataaataatttaagatactatgatgagagcacggttcccattactgttgctgagacttgttttcctggcttcagtttctgtctcatttggcattgcttactgggaaaagagaaccccaaacacaacaagtgccgcaagagttgcaatagcgagagagactcgtacaggaaccaagcatgccacgctcgttgcaacctccttaaggtggagaaagaagaatgtgaaaagggtga

SEQ ID NO: 59876 - DNA, 238 bp, Glycine max
  Clone ID: 700674828H1
atgtgatcaagcctgtgatcccagagaagtaccttgatgagaagaccattttccacttgaacccttcaggccgttttgtcattggtggccctcatggcgatgctggtctcaccggccgcaagatcattatcgatacttatggaggatggggtgctcatggtggtggtgctttctccgggaaagaccctaccaaggttgataggagtggtgcttacattgtgagacaggctgctaagag

SEQ ID NO: 59877 - DNA, 240 bp, Glycine max
  Clone ID: 700674830H1
catccttcgatcatacacttagttgcttccaattaagatggttctgctagagaagctctgggatgatgttgtggctggccctcaacctgagcgtggccttggcaagctcagaaaactcaccaccctcaaaactattgatgaaggagaaagtagcaagctgcagaagacgttgtcgatgccgtcgacaccaacaaccccgatgactccgacgactccaacgacaccgggatcggcccgtaa

SEQ ID NO: 59878 - DNA, 239 bp, Glycine max
  Clone ID: 700674831H1
gttcaatatcctagtataccttaataaataatttaagatactatgatgagagcacggttcccattactgttgctgggacttgttttcctggcttcagtttctgtctcatttggcattgcttactgggaaaaagagaacccaaacacaacaagtgtctccagagttgcaatagcgagagagactcgtacaggaaccaagcatgccacgctcgttgcaacctccttaaggggagaaagaag

SEQ ID NO: 59879 - DNA, 245 bp, Glycine max
  Clone ID: 700674832H1
tacgacaccaaattcgaggagataaacaaggttctgtttggtagagaggaggggcagcaacaaggggaggagaggctgcaagagagtgtgattgtggaaatctcaaagaaacaaattcgggaactgagcaaacatgccaaactagttcaaggaaaaccatttcttctgaagataaacctttcaacttgagaagccgcgaccccatctattccaacaagcttggcaagttgttgagattaccccag

SEQ ID NO: 59880 - DNA, 237 bp, Glycine max
  Clone ID: 700674833H1
ctttctctctctttccatcgctttctggttccgatttagggctacttcactcacatcacaaccttattgctcatctttttttcctcttcttctttttcaggtctctccctccttgatccccaacttcgatccatttcattccgatcctcccccttcaccgtcactgcataacgttctcatcactcatacaattttattgctctcgccgttaggttgttgattggtttgaggacaaga

SEQ ID NO: 59881 - DNA, 236 bp, Glycine max
  Clone ID: 700674834H1
ctctgtttatctccgcactccgtcttcaatcatcagcatcaccaccgctccaacacaggggaaaaacagggagatccttcacgttcaaggagggcaatgcgggaaccagatcggttcgaagatctgggaagtggttgcgacgagcacggcatagatccgacggggaagtacgtcggaaactcagatctacaactcgagcgcgtgaacgtgtactacaacgaagcttcctgcgggcg

SEQ ID NO: 59882 - DNA, 207 bp, Glycine max
  Clone ID: 700674835H1
aaatagcaagcctcaagctactgcaatgcatgtgggagctatagaaattatcattgatagtttcgcaagtcctgactgcaacatagttggtgcaatgcttttggttgatacctatcataccaatcctgaaaatgcagttcgtagtatttttgttgcgcctttcagaggcggaaggcccattcgggtggatacatttccgaataccat

SEQ ID NO: 59883 - DNA, 235 bp, Glycine max
  Clone ID: 700674836H1
tgaggccaggcaagccccactcaaccaccacaacactcctcgttcacgctacccctttcttatcttcttctacctttcaagttttaaaagtataaagatggcagagacattcctatttacctcagagtcggtgaagatggacaccctgacaagctctgcgaccaaatctccgatgctgtcctcgacgcttgcctcgagcaggacccagacagcaaagttgcttggaaacatgcac

SEQ ID NO: 59884 - DNA, 107 bp, Glycine max
  Clone ID: 700674837H1
ggagactataggatacggctttttatccgaactgaactcttggggaagggaattccacccactcatcaatggcatctactctcttcgcttgcccgtcgttgtgttcc

SEQ ID NO: 59885 - DNA, 97 bp, Glycine max
  Clone ID: 700674838H1
tatgctatggtgcatgatagttcagtgtctacaataccaggtgattttgtcattggtgttaagttgacaaccataaacaatatgtgtgcatatgggc

SEQ ID NO: 59886 - DNA, 141 bp, Glycine max
  Clone ID: 700674839H1
cttagttcaatatggggaagcccttcactctctctctttcttcactttgcttgctactcttgtcgagtgcatgctttgctattagctccagcaagctcaacgagtgccaactcaacaacctcaacgcgttggaaccgacca

SEQ ID NO: 59887 - DNA, 236 bp, Glycine max
  Clone ID: 700674840H1
gcaaaagggtgtttgagcaagttcgtcgataatggcagcgtggagagtcacagatactacttgtctcgcagaaccactctcgaaatgctcaaagacagaggctactccattccctctcacgaaatcgacctttctctctccgatttccgcgacatgcacggccaattccctgaccctgatcgtcttcgtctctccctcactcatgccaccaactcctccaaaaggttttagtcata

SEQ ID NO: 59888 - DNA, 226 bp, Glycine max
  Clone ID: 700674842H1
atgaacatgtctgctacagttggaaaaaagagagatggagagaaaataaaaacgggaggacccatgaagcttattaagaggaatggctaatgagaacaaagtggctatgcttttatcccgagcaatgcttcttcttgcttggagaccccacatttggaacaggagaaactcatcatgaagattgaggaagatggaaatttatgaatgattgcagttgcacccacat

SEQ ID NO: 59889 - DNA, 76 bp, Glycine max
  Clone ID: 700674843H1
ctcgagccgaatcggctcgagcacgctcgttgcaacctccttaaggtggagaaagaagaaacgtgaagaaggtgaa

SEQ ID NO: 59890 - DNA, 131 bp, Glycine max
  Clone ID: 700674844H1
cattttcagaggaacaatggcgggtagggtttcgacgtgcttcttcttcgtgtttgctctttctctccttcttccttttcagatctccgctgaggaatcatcggagaaagagttcgtactcacattggata

SEQ ID NO: 59891 - DNA, 236 bp, Glycine max
  Clone ID: 700674845H1
cttctcttctcttctcttctgtctccattggacagatagcattttccccttcccagacagatccaagaaccacagtgctcttttttgagccaacggtgctgattctttcccgcggaatcttgctcggcgttggggtgtaagtcatttgtcaattcccttggacaagatggctttggggaaatatgctagggtagatggtagaagatcgtcgagctggtgttcgaggtgactgttgt

SEQ ID NO: 59892 - DNA, 237 bp, Glycine max
  Clone ID: 700674846H1
atgatgttgcagttccccactcataaagatagctaggtaatagggtgtaagggaagttaaagagatcatagtagagatatagtttaattttgctttgctttaatttgtgaggatttgatttgatggaagaacatctcactccattggctgtgactcatctccttcaacacactctcagtagtttgtgcagctatgaaaattctcaatgggtctatgcagtcttctggaggatcttgc

SEQ ID NO: 59893 - DNA, 99 bp, Glycine max
  Clone ID: 700674847H1
atttggcacaatgtttgctctgatctttttatggtttgggatctcggttccacttgattttgtgggtagctatgttggattcaagaagcctgcaattga

SEQ ID NO: 59894 - DNA, 233 bp, Glycine max
  Clone ID: 700674849H1
tcaatatcctagtacaccgtattaaagaatttaagatatactatgatgagagctcggttcccattactgttgctgggagttgttttcctggcatcagtttctgtctcatttggcattgcgtattgggaaaagcgaaccccagtcacaacaagtgcctccgaagttgcaatagcgagaaagactcctacaggaaccaagcatgccacgctcgttgcaactcctaaggtggagga

SEQ ID NO: 59895 - DNA, 236 bp, Glycine max
  Clone ID: 700674851H1
ggcacccagagaccatgcaacaacagcagcagcagaagagtcatggtggacgcaagcaggggcaacaccagcagcaggaggaagaaggtggcagtgtgctcagtggcttcagcaaacatttcttagcacaatcctcaacaccaacgaggacacagctgagaaacttcggtctccagatgacgaaaggaagcagatcgtgacagtggagggaggcctcagcgtatcagccccaagtg

SEQ ID NO: 59896 - DNA, 233 bp, Glycine max
  Clone ID: 700674852H1
agcgagcgcaacattattcgagtacgtagcttaacaatattttaagcaattgctgctacaatgatagcgcggtttcctttgttgccgttgctgttgctgggaattgtttttctagcatcagtttctgtctcattacaggtgaagccgccgagtcaccacgagtgcctccagatctgcgagattgaaacgaatccatacaagcggaaagcttgcaagcttattgcaagttcgtt

SEQ ID NO: 59897 - DNA, 235 bp, Glycine max
  Clone ID: 700674853H1
tacgacaccaaattcgaggagataaacaaggttctgtttggtagagaggaggggcagcaacaaggggaggagaggctgcaagagagtgtgattgtggaaatctcaaagaaacaaattcgggaactgagcaaacatgccaaatctagttcaaggaaaaccatttcttctgaagataaacctttcaacttgagaagccgcgaccccatctattccaacaagcttggcaagttgtttg

SEQ ID NO: 59898 - DNA, 151 bp, Glycine max
  Clone ID: 700674854H1
gtaatcacgcgtgaaacgaacgattcgggtgccggcgataagctcaaagatcgcagatatcccaccggacgagtattcgtggagaaaatacggtcaaaaaccgatcaagggctcaccttaccctcggtattattctattccttcttctatc

SEQ ID NO: 59899 - DNA, 236 bp, Glycine max
  Clone ID: 700674855H1
ttaacactcatcagtcatcaccatggccaagctagttttttccctttgttttctgcttttcagtggctgctgcttcgctttcagttccagagagcagcctcagcaaaacgagtgccagatccaaaaactcaatgccctcaaaccggataaccgtatagagtcagaaggagggctcattgagacatggaaccctaacaacaagccattccagtgtgccggtgttgcctctctcgctg

SEQ ID NO: 59900 - DNA, 95 bp, Glycine max
  Clone ID: 700674856H1
ctccattgtctttgaacactcatcaccatggccaagcttgttctgtccctttgtttccttcttttcagtggctgcttcgctctgagagagcaggc

SEQ ID NO: 59901 - DNA, 238 bp, Glycine max
  Clone ID: 700674857H1
attatggcaaaaagcagttttgtgcggaatgggacattgtctgtcgcggaaaagcaaagagacatggtattctgggatgaaggaaaaatttgtacaaatgatgaagaacatttatgaaacagaagttacagattggccagtaccactgaaaatcatttctggaaccattcttgcaacaattttgggaacaaccttctggaaacttttttcctttcttagagatgcggtaatgggggag

SEQ ID NO: 59902 - DNA, 119 bp, Glycine max
  Clone ID: 700674858H1
gtaaattgcatcatccctgaagctgaacctcaaaaccctagctgtccgcctgtctgcaacggcgtcgttatgatcagttgagaatccaaaggaatcgagtcgaatcatctgaccggcga

SEQ ID NO: 59903 - DNA, 233 bp, Glycine max
  Clone ID: 700674859H1
ccgagcccatcagggtcttgctcgtgtgtgctatatcaaggcccttaaaatccaacacacccgagcccatcagggtcttgctcgtgttcattttctaaaaaatgataaggctgccgcttacaaggaaatgaccaccttattgggaaggcaagaaacaatgcatcagcatatgagaagaggtctgagtatggtgatcgtgaaatcacaaaggcagatctggagtggtgactaga

SEQ ID NO: 59904 - DNA, 234 bp, Glycine max
  Clone ID: 700674860H1
cttcttcttttgcggctagggttttagcgcacttcttctagatttaaggaagatgggtaaggaaaaggttcacatcagtattgtggttattggccatgttgactctgggaagtccactaccactggccacctgtctacaagtctggaggcattgacaagcgtgttattgagagatttgagtaagaagctgctgagatgaacaagaggtctttctaatatgctgggtgcttgata

SEQ ID NO: 59905 - DNA, 231 bp, Glycine max
  Clone ID: 700674861H1
gtggaattttagtggacaatcctggagattggatcacacttatacaaaattctccaattagtaacttgttgagagttgctgcttggaagaaaggctgtttaatggttaagattgtgatgtctgggaatgcagcgtcaaaaggagtgattgggcctcattggtacaagtgtttttaacaaacagcaacagtacagagcattttgatgcatgtaagtggacaatcggaaccac

SEQ ID NO: 59906 - DNA, 231 bp, Glycine max
  Clone ID: 700674862H1
gctgttgttgttgctgcaccaccgaacaacttcccctgtaaatcgcgtttcgtttgtgcaaggttttaaaagatggctgatgctgaggacattcaacctcttgttgttgataatggaactggaatggtcaaggtggttttgcaggtgatgatgctcctagggccgtgttccccagcattattgggagaccacgccatactggtgtaatggttgggatgggtcaaaggatgc

SEQ ID NO: 59907 - DNA, 236 bp, Glycine max
  Clone ID: 700674863H1
ataaaattcttccaccaagttatgggtatacttgtgttgcttcttttctccctcttaggtctctcttctagttccagcatatcaactcatcgttccatattggaccttgacctaaccaagtttaccacacagaaacaggtgtcttcactgttccaactatggaagagtgagcatggacgtgtctaccataaccacgaagaagaggcaaagagacttgagattttcagaataacttg

SEQ ID NO: 59908 - DNA, 240 bp, Glycine max
  Clone ID: 700674864H1
gtttggagagttgaatgtggaatcccttctggatttccgctcacagttatttgcaatagcatttttaatgagatgctcattagatatagctatgaaaaattactgcgccaggctagagctccaagcatgtttttacatccttcaaaaattttgtttctttgtgtgtgtatggtgatgataacttaattagtgttcatgaatatgtcaagccttactttagtggttctaaattgaaaagct

SEQ ID NO: 59909 - DNA, 68 bp, Glycine max
  Clone ID: 700674866H1
ttattttttagcacactcgattatagtttgtcattttcatgacgggcatgtggggtgctatcaccttc

SEQ ID NO: 59910 - DNA, 229 bp, Glycine max
  Clone ID: 700674867H1
atcaatatggggaagcccttcactctctctctttcttccctttgcttgctactcttgtcgagtgcatgctttgctattagctccagcaagctcaacgagtgccaactcaacaacctcaacgcgttggaaccgaccaccgcgttgagtccgaaggtggtttgattcaaacatggaactctcaacaacctgagctgaaatgcgccggtgtcactgtttccaactcaccctc

SEQ ID NO: 59911 - DNA, 234 bp, Glycine max
  Clone ID: 700674868H1
aacttattaacactttccttagttcaatatggggaagcccttcttcactctctctctttcttccctttgcttgctactcttgtcgagtgcatgctttgctattacctccagcaagttcaacgagtgccaactcaacaacctcaacgcgttggaacccgaccaccgcgttgagtccgaaggtggtcttattgaaacatggaactctcaacaccctgagctgcaatgcgccggtgt

SEQ ID NO: 59912 - DNA, 228 bp, Glycine max
  Clone ID: 700674869H1
tgtcgagccgattcggctcgagtttgtttctggggatggtgaagagttgacattgattccgggaaccagtgttgaagaggcgtacaacaagctaatagttgaacttgagaaaagtgttcctacattggttggcattgaatgtcccaaggatgagaaacttcctcgtcgcaaaatttttgacaaacctaagacgcgctgcttcactattctccctatggagttaatctt

SEQ ID NO: 59913 - DNA, 231 bp, Glycine max
  Clone ID: 700674870H1
ctgatttcaacgaagaggagccgaaacccgctcactcttcaccaccgcaaccccaatcctcttcttcttcgtcttcgttcagtgctacttttgaccggtcaaatcccatcgctttcctggagagagtcttcgaattcgtctccgaacagagcgactttctggcgacgcagagcgccgagaaggagatagtgtcgctggtgcacgccgccgggaagaagaaagagagcttct

SEQ ID NO: 59914 - DNA, 157 bp, Glycine max
  Clone ID: 700674871H1
agccgcagcacgaggagcagcctcaggaggagaaggatgtctcacaggaagttcgagcacccaaggcacggttcactgggatttcttcccaggaagcgtgctgctcgtcacaggggaaaagtgaaggcattcccaaggatgacccatccaaggcacc

SEQ ID NO: 59915 - DNA, 156 bp, Glycine max
  Clone ID: 700674872H1
attgtctttgaacactcatcaccatggccaagcttgttctttccctttgtttccttcttttcagtggctgcttcgctctgagagagcaggcacagcaaaatgagtgccagatccagaagctgaatgccctcaaccggataaccgtatagagtcgga

SEQ ID NO: 59916 - DNA, 235 bp, Glycine max
  Clone ID: 700674873H1
aacctacctctttttcttctctctcaacaacttcagcttcttcctcctcgatcatgtctcacttcaagggcaagtaccatgatgagcttatcgccaatgctgcgtacattggcactcctggaaagggtattcttgctgctgatgagtcaacagggacaattggcaagcgtttggccagcatcagtgtagagaacattgaatccaacaggcgagctcttagggactgcttttcact

SEQ ID NO: 59917 - DNA, 233 bp, Glycine max
  Clone ID: 700674874H1
atggtatttcaggttctcgtcttttgggcaccattcctcagtccatttcacagcaaactgtttggaatcaaatggcaacagtgagaacaccattgaattttgattctagcaagcagagcttttgtcaattttctattgaccttctcggtggaggaattttagtggacaaaactggagattggatcacacttatacaaaattctccaattagtaacttgttgaagttgctgctt

SEQ ID NO: 59918 - DNA, 231 bp, Glycine max
  Clone ID: 700674875H1
attaagaaaagccatttccatagcagcctaagaaaatgaagagcactagcttgttcgctatctttctactttgcgccttcacctcatacctaccttccgccaccgcccaggacgtgctcgacgtggatggcgtccgattcggaacggtttcatatactacgttttgccggcaataagaggaaacggtggcggaatagaacgagccgcactcgggaaaaacattgccctatc

SEQ ID NO: 59919 - DNA, 232 bp, Glycine max
  Clone ID: 700674876H1
ataaaattcttccaccaagttatgggtacacttgtgttgcttcttttctccctcttaggtctctcttctagttccagcatatcaactcatcgttccatattggaccttgacctaaccaagtttaccacacaaaacaggtgtccttcactgttccaactatggaagagtgagcatggacgtgtctaccataaccacgaagaagaggcaaagagacttgagatttcaagaataa

SEQ ID NO: 59920 - DNA, 92 bp, Glycine max
  Clone ID: 700674877H1
ctcgagccgctcgagctcggaaagtatcgggctatttaactatgacttgagctccatctatagcataaatgcgtcagcatatgatgcttttg

SEQ ID NO: 59921 - DNA, 231 bp, Glycine max
  Clone ID: 700674878H1
attaagaaaagccatttccatagcagcctaagaaaatgaagagcactagcttgttcgctatctttctactttgcgccttcacctcatacctaccttccgccaccgcccaggacgtgctcgacgtggatggcgtccgattcggaacggtttcatatactacgttttgccggcaataagaggaaacggtggcggaatagaacgagccgcactcgggaaagaccttgccctatc

SEQ ID NO: 59922 - DNA, 254 bp, Glycine max
  Clone ID: 700674317H1
ccaaattaaagacgtttccggatgaaattctcgagttagacagatatgttcgcactcttgacttgacgcataatcgaatagttgacattcctgtggaaattagcaagttaattaatgtacagcgcctgatattagcggagaacctcattgagagactgccagtaaatttggggaaactccaatctctgaaactgatgaacctggatggaaatcgaattacttccttgcctgatgaattgggccagttagtaagg

SEQ ID NO: 59923 - DNA, 250 bp, Glycine max
  Clone ID: 700674318H1
ctttgtggaagtttgaaaccaccaagtacttctgcacagtcatcgatgcccccggacatcgtgactttatcaagaacatgattactggtacctcccaggctgattgtgctgtccttatcattgactccaccactggtggttttcaagctggtatttctaaggatggacagactcgtgagcatgctcctcttgctttcacccttggtgtgaagcagatgatctgctgctgtaacaagatggatgccactac

SEQ ID NO: 59924 - DNA, 254 bp, Glycine max
  Clone ID: 700674319H1
aacacaacaaaaaaagacaacccagagagcgcgtcttaataaacgctcttctctgaaaacccccatttcttttcttctttcttcttctctttcgcttcttcgatcttcgatcttcgtcgctgaaaatgagagagtgcatttcaatccacatcggccaggccgggattcaggttggaaacgcctgctgggagctttactgcctcgaacacggcattcagcctgatgggcagatgccaagtgacaagaccgttggt

SEQ ID NO: 59925 - DNA, 255 bp, Glycine max
  Clone ID: 700674320H1
ggaaaaacgcaagacaaatagaggaagatcgatcgagatctccctcgcgtttgtctcagttgaagaaattaaaaagcagaactagagtaactcaacggtctcagaattttcagggttttcagtacttccatattttttcttccggatttgagttggaagaagatcgaagaggtttctagttgcttcaattgttcctctgggtggtggagacttgttatatttttaaaatattgacaattcgaaatgccaaaggag

SEQ ID NO: 59926 - DNA, 251 bp, Glycine max
  Clone ID: 700674322H1
gtacaattgtaaggatgaacatttggcatctatcagccttagtggagacctaatgcttcataaccttgcttctgggcaaaaggctgcggagtcaaagatcccaatcaacagatgttgagagttcttgattattctcgagttagtcgtcaccttcttgtgactgctggtgatgatgggactgtacatttgtgggatacaactggtcgcagccctaaggtttcatggataaagccgcattccgcaccaactgc

SEQ ID NO: 59927 - DNA, 255 bp, Glycine max
  Clone ID: 700674323H1
cacgttctcattctcacttgaagcgggtcacctcaatttgttgccagcatgctaatccatctcctttcactccctttctcgcttcttccaaccaccccaatacttttccatctatttcctctccttcagttcgctccacacccgaatcccattctctcaatcaaatcaaaactggggctttccaaaaaccaaaggcaataacagctcggacgcttgtaatactttctgctcttgctatgatcttaatccaaccag

SEQ ID NO: 59928 - DNA, 255 bp, Glycine max
  Clone ID: 700674324H1
gattaacaagggtactgttgaaatcattacccctgtggagctcattaagaagggagacaaggttggatcttctgaagctgcattgcttgccaagctagggataaggcccttctcgtatgggcttgtggttctttctgtttatgataatggttcagtgttcagtcctgaggttcttgatcttactgaggatgaccttattgagaagtttgctgctggtgtctcaatggttacttcactttcattagctatctcata

SEQ ID NO: 59929 - DNA, 257 bp, Glycine max
  Clone ID: 700674326H1
aaaaaaaagccacaatcaagtgtcatttttctcccttctcattctatttattcaagggtgggagtagtggttttttgtgtgttttctttcctttgtgcaacaacaacaactgaagatgaataagcatcaagcgtcagagaagaagaacgataacatggagaagccactaactccattgatgcctcctcctcctcccacacttgaaaggacaacttccattgatgatgagcctaaaactttgcttgaggaggagatga

SEQ ID NO: 59930 - DNA, 252 bp, Glycine max
  Clone ID: 700674327H1
taaaattccaatcaagtggtattagatccaccaatattgttagattattaggaattaaagttatttggtttgtgttatacctgtattattttgttacatgaagcctaattttattttgggattttatctttgcaattataattatgattgtaagttttgaattttttttcttttcaatcacgatataataatcatcatatgtgcgttcatgttttgcgttcggattccatgagaaaaactatttttttctcg

SEQ ID NO: 59931 - DNA, 254 bp, Glycine max
  Clone ID: 700674328H1
cgctgggaaacctgctgtgcttacacgtgttgtggatagcatgactgacaacttgagaccaactcgtgctgaagccacagatgttgccaatgctgttttagatggaagtgatgccatacttctgggtgctgagactttacgtgggttgtaccctattgagactatttctactgttggcagaatttgttctgaggctgagaaagttttcaatcaagacctttattttaagaggacagtcaagtatgttggagaac

SEQ ID NO: 59932 - DNA, 257 bp, Glycine max
  Clone ID: 700674329H1
ctcgagccgaaaattttggaattttaaaacagaattttaaacaactaaaaatctgcaattttaatttccttctgaaagatgagaaattagaattctctactaattatacctagaggaacatgtataactagtacaccaattatatcttttcttttttttttcattcattttttttcaccctcataatttgagctttttttttatccaaacacaaaattttgaaaataaaagaatttcaattgaagtatttgaaattc

SEQ ID NO: 59933 - DNA, 257 bp, Glycine max
  Clone ID: 700674330H1
tatatatatatatatataaggatcaaattatactcacttattcctaagatttcctgagattgcacaaaatattccaccttttataacgattacagtaaccccttacagattacatggtgtgatatatttcttgagtaacatggagttcagtataatctactcataaattaaaccaatattcttgaagtgatgtgatccagcaatgtgtcaactcctatctttctatatatgtgcagcaattcaaattaacaacttga

SEQ ID NO: 59934 - DNA, 258 bp, Glycine max
  Clone ID: 700674332H1
catttggagaaggaaggaccatgagtcagcaaggtccacgcaaggcacatcccatcgaaaagacattgccttgcacccttgaggaactctataagggcactacgaaaaaaatgaagatctctagggaaattgctgatgcaagcgggaaaactttgccggtggaagaaatcttgaccattgacattaaacccgggtggaaaaaggggacaaagatcacattccctgaaaaaggaaatgagcagccaaatgttattgctt

SEQ ID NO: 59935 - DNA, 251 bp, Glycine max
  Clone ID: 700674333H1
ctcgaggagctcgagccgattcggctcgagctctctcctattcgtgaatttcggattaaccactataccaatgtttccaactcctcactctctgactttttcaacatagagagcattattcgatttcgtattgcactctctcatctcatctcccattctcattctagctaacatccccttttcttcttctcacttctctccaagttttttcttcacatttctctgcctttgatctgcacacacaacaacat

SEQ ID NO: 59936 - DNA, 254 bp, Glycine max
  Clone ID: 700674334H1
cagaaagacggtttttttagtatagttaacagcatggagagggaggaagatgttaaggttggagcacagaaattctcggagaggcaagcactgggtacaggagctaagagtgacaaggactacaaggaggcaccaccagcacccttgtttgagccaggggagttaaagtcatggtctttttacagagctgggatcgcagagtttgtggccacattcttgttcctctacatcactgtctcgactgtcatgggtgt

SEQ ID NO: 59937 - DNA, 255 bp, Glycine max
  Clone ID: 700674336H1
cgccggaaggccagcagcaaggggagcagaggctgcaagagagcgtgattgtggaaatctcgaaggaacagattcgggcactgagcaaacgtgccaaatctagttcaaggaaaaccatttcttctgaagataaaccttttaacttgagaagccgcgaccccatctactccaacaagcttggcaagttctttgagatcaccccagagaaaaacccccagcttcgggacttggatatcttcctcagtattgtggata

SEQ ID NO: 59938 - DNA, 254 bp, Glycine max
  Clone ID: 700674337H1
cagtctctccattgtctttgaacactcatcaccatggccaagcttgttctttccctttgtatccttcttttcagtggctgcttcgctctgagagagcaggcacagcaaaatgagtgccagatccaaaagctgaatgccctcaaaccggataaccgtatagaggcggaaggtgggttcattgagacctggaaccctaacaacaagccattccagtgtgccggtgtagacctctctcgctgcacccttaaccgcaa

SEQ ID NO: 59939 - DNA, 252 bp, Glycine max
  Clone ID: 700674338H1
gtccccaggaaatctacatcgaacaaggtaagggtatttttggcatgatatacccgggttgtcctagcacatgtgaagagcctcaacaacctcaacaaagaggacgaagcagcagaccacaagaccgtcaccagaagatctgtaacttcagagagggtgatttgatcgcagtgcctactggtgttgcatggtggatgtacaacaatgaagacactcctgttgttgccgtttctattgattgacaccaacagc

SEQ ID NO: 59940 - DNA, 254 bp, Glycine max
  Clone ID: 700674339H1
tgcatggttgatgtacaacaatgaagacactcctgttgttgccgtttctattattgacaccaacagcttggtgaaccagctcgaccagatgcctaggagattctatcttgttgggatccaagagcaagagtttctaaaatatcagcagcagcagcaaggaggttcccaaagccagaaaggatagcaacaagaagaagaaaacggaggaagcaacatattgagtggcttcgcccctgaattcttgaaagaagcgt

SEQ ID NO: 59941 - DNA, 251 bp, Glycine max
  Clone ID: 700674340H1
gttcaatatcctagtataccttaataaataatttaagatactatgatgagagcacggttcccattactgttgctgggacttgttttcctggcttcagtttctgtctcatttggcattgcttactgggaaaaagagaaccccaaacacaacaagtgtcttcagagttgcaatagcgagagagactcgtacaggaaccaagcatgccacgctcgttgcaacctccttaaggtggagaaagaagaatgtgaaga

SEQ ID NO: 59942 - DNA, 252 bp, Glycine max
  Clone ID: 700674343H1
taataaccaatatgccagagtacaatttttaatcatatggttgaggaaatttcataaaataaaaataaaaatcctagagttagacttgttagaggcaaatactgaatgatggattaaagatgctagtttttctaaaactccctgctgcgatgttatgtttgtttctccataggaaagttttgctgcacctatgattttttcttaccagatctgtttatattgatgattgactaggttttggaagccaatgca

SEQ ID NO: 59943 - DNA, 251 bp, Glycine max
  Clone ID: 700674344H1
aacagtacttgcaaggaacagaatgaaaagtattaatggtgctgcagttgtcatacaatcatttattcgtggttggttagtcagaagatgctcaggagatataggactatcaaaacctcggggcattaagactaatgagtcagatgaggttctggtgaagtcatctttcctggctgaattacagcgccgggtacttaaggcagaagcttccctgagagagaaagaagaggaaaatgacattcttcaccaac

SEQ ID NO: 59944 - DNA, 255 bp, Glycine max
  Clone ID: 700674345H1
ctctcacgcaaaccatttttcttttctttctctccctctgagcctttcatcgctgcctcggagagatggcagtgtcggaaggatcaccaacccctcagacggttggcaatgcttttgttgagcagtattactccatactgcatcaaaagccagaccaagttcacagattttaccacgagtctagcatcctaagccgacctgaagaagatggtaccatgactatggtgactactactttggaaattaataaaaaga

SEQ ID NO: 59945 - DNA, 253 bp, Glycine max
  Clone ID: 700674346H1
gttctacaaggctggattgtcagcacattacttgctggtgccactgttggttcatttactggtggatcattggctgaccaatttggaagaactaggacttttcaattagcctcaatccctctagcaattggagcatttcttggtgctacagcacagagtgttcagccaatgatcattggtcgcttacttgctggtataggcattggtgttacatctgctatagtaccactatacatatctgagatttcaccaa

SEQ ID NO: 59946 - DNA, 256 bp, Glycine max
  Clone ID: 700674348H1
gctgtctgctgttagatctgtacccgcctagccattgatttggaaaagtccaacttcaaggatgacgtaagcttcagagtgatgctctaagagaagctatctcaggaatcatggctgattccaaggaaaagaacaggaaatttgtggagaccattgaactccaaattgggttgaaaaattatgatccccagaaggacaagcgtttcagtggctctgttaagttgcctcatattcctcgccccaagatgaagatttg

SEQ ID NO: 59947 - DNA, 254 bp, Glycine max
  Clone ID: 700674349H1
tctcgagccgattcggctcgaggaacttttcttcatgtggcaaatgtatcagagatcaaaccatcagccagaaaagaagacagacatcctcaaacagatagcggagacagtgaagcataggaaacacatagatggtagcgtggaattgattggagttttattgtatggaccaggaaaaggttcttctgttctacaatccatgagggctcctggtcttgcccttgttgatgactggacatgcctaaaatcaatgg

SEQ ID NO: 59948 - DNA, 251 bp, Glycine max
  Clone ID: 700674351H1
caaacagacaatcaccccattctcatcgtttaggattgaacaagtttgctgacatcactcctcaagagttcagcaaaaagtacttgcaagctcccaaggatgtgtcgcagcaaatcaaaatggccaacaagaaaatgaagaaggaacaatattcttgtgaccatccacctgcatcatgggattggaggaaaaaaggtgtcatcacccaagtaaagtaccaagggggctgtggaagcggttgggcgttttct

SEQ ID NO: 59949 - DNA, 250 bp, Glycine max
  Clone ID: 700674352H1
cgaggcttagttgagcctataaataaccccacacacttgtccggcctcctaagactcgctacatcttctttccaaatcccaactactactcacactcactgcagatctcaatccatggctaccattgttagcatcaaggcccgccagatctttgacagtcgtggcaatccaaccgtcgaggtggatttgacatgctccgatggtacttttgctagagctgctgttccaagtggtgcatccactgggattt

SEQ ID NO: 59950 - DNA, 249 bp, Glycine max
  Clone ID: 700674353H1
ccaaattccaatcaagtggtattagatccaccaatattgttagattattaggaattaaagttatttggtttgtgttatacctgtattattttgttacatgaagcctaattttattttgggattttatctttgcaattataattatgattgtaagtttggaattttttttcttttcaatcacgatataataatcatcatatgtgcgttcatgttttgcgttcggattccatgagaaaaactatttttttc

SEQ ID NO: 59951 - DNA, 250 bp, Glycine max
  Clone ID: 700674354H1
gctccatagctgcagcattagggtttttcatctgcttcaatggggaagggaacagggagttttggtaagagaaggaacaagactcacactctctgtgtgaggtgtggccgccgcagcttccatctccagaagagtcgttgcgccgcttgtgctttccccgccgcacgcactaggaaatataactggagcgtcaaggcaatccgcagaaagaccaccggaactggcaggatgaggtacttgcgtaacgtgc

SEQ ID NO: 59952 - DNA, 264 bp, Glycine max
  unsure (1)..(264): unsure at all n locations
  Clone ID: 700674355H1
cttccgctcgccacncaccaccactctcaccaccgtccccgccgccgcacggcggcagtccttttcctcacaggacttgcccaattcacgccctaccattcgcgctttgcttggctgtgcttggcgggttggtgcatgtcggaatagggaacccagttgacaacgtgtgctgtcccgttatacaggggttgcttgatcttgaagctgcaatttgtctactgcactgttattagggctaagcttcttaacctcaatatctttctt

SEQ ID NO: 59953 - DNA, 248 bp, Glycine max
  Clone ID: 700674357H1
gtacaattgtaaggatgaacatttggcatctatcagccttagtggagacctaatgcttcataaccttgcttctgggcaaaaggctgcggagtcaaagatcccaatcaacagatgttgagagttcttgattattctcgagttagtcgtcaccttcttgtgactgctggtgatgatgggactgtacatttgtgggatacaactggtcgcagccctaaggtttcatggataaagccgcattccgcaccaac

SEQ ID NO: 59954 - DNA, 252 bp, Glycine max
  Clone ID: 700674358H1
cgggaggagctggtgcaaagaatgctattctcatgaatatgccaaatgctgttctttcaatgtggagatattttgttggagatctcgtctttgaagtttctaagatgacttctccctacattaaatgtacagtctctttcttcatagcatttggaaatttggctgatgacaccatcaattttgaggcttttccccacaagctggtgcaatttggagagattcaggaaaaagttgtattgaaattttcacaag

SEQ ID NO: 59955 - DNA, 252 bp, Glycine max
  Clone ID: 700674359H1
cggcagcaccagcaagatagctgccgcaagcagctccagggggtgaacctcacgccctgcgagaagcacatcatggagaagatccaaggccgcggcgatgacgatgatgatgatgacgacgacaatcacattctcaggaccatgcggggaagaatcaactacataaggaggaacgaaggaaaagacgaagacgaagaagaagaaggacacatgcagaagtgctgcacagaaatgagcgagctgagaagcccc

SEQ ID NO: 59956 - DNA, 252 bp, Glycine max
  Clone ID: 700674360H1
ctcaatttttgacaaacctaagacgcgctgcttcactattctccctatggagtttaatcttgtggttcgtcagaagtttttaaattatgtgaggttcattatgaagagaagggacaagcttagttgtcaagttggaatcaacccatactccatggaatggactggtttggccaatagattactgagtaagggcaacgatattctgtgttgcgattatgctagttgtgatggtttgattaccaagcaagttat

SEQ ID NO: 59957 - DNA, 253 bp, Glycine max
  Clone ID: 700674361H1
aaaattcttccaccaagttatgggttcccttgtgttgcttcttttctccctcttaggtctctcttctagttccagcatatcaactcatcgttccatattggaccttgacctaaccaagtttaccacacagaaacaggtgtcttcactgttccaactatggaagagtgagcatggacgtgtctaccataaccacgaagaagaggcaaagagacttgagattttcaagaataacttgaactatatcagggacatg

SEQ ID NO: 59958 - DNA, 134 bp, Glycine max
  unsure (1)..(134): unsure at all n locations
  Clone ID: 700674362H1
ctttgttcactctagggctcttgcggctagggttttagcgcacntctgctagatttaaggaagatgggtaaggaaaaggttcacatcagtattgtggtcattggccatgtcgactctgggaaatccactaccac

SEQ ID NO: 59959 - DNA, 250 bp, Glycine max
  Clone ID: 700674363H1
gcaacgattaacaatggcttcaaccgacaagtcaccggacccaacgccggcgaagggtccggatccaactccggggaagccgatgagtgttggtcagcacgtgatcgacaagagtgcaatgatggtgcagtcgctggaccccattaagcagatgagtcagcacgtgtgctccttcgctatctacagccatgacatgtctcgccagatagagacacatcactactgctccagactccaccagaacttcata

SEQ ID NO: 59960 - DNA, 255 bp, Glycine max
  Clone ID: 700674364H1
attctctccattggtccttaaacactcatcagtcatcaccatggccaagctagttttttccctttgttttctgcttttcagtggctgctgcttcgctttcagttccagagagcagcctcagtgaaacgagtgccagatccaaaaactcaatgccctcaaaccggataaccgtatagagtcagaaggagggctcattgagacatggaaccctaacaacaagtcattccagtgtgccggtgttgccctctctcgctg

SEQ ID NO: 59961 - DNA, 171 bp, Glycine max
  Clone ID: 700674366H1
aaaccgcgatcacaggttgccgcatcttaaaaccggaaacaaaagcaatcgttacttgatttcaagaatctctcaatttcttcctacttctttgtgtacgatttcttaagggaaagaatatcactctctgtgctggccacagacttcgtgaatcattttcttttccacaca

SEQ ID NO: 59962 - DNA, 249 bp, Glycine max
  Clone ID: 700674367H1
atcaattttggttaagagtcttgaaaaagcaagagaaaaaaaaataccaaccatggcaaccatttctgatcaacctagagggtcctactcctatggaacctcatatggagcaccctatggaaccacgtatgagacctccaccagcattaacaacccaccttcacgccaaacagtgaagttcataactgctgccactattggcatcacactcttgctcctgtctgggttgaccctcacaggcactgtcat

SEQ ID NO: 59963 - DNA, 248 bp, Glycine max
  Clone ID: 700674368H1
gttcaatatcctagtataccttaataaataatttaagatactatgatgagagcacggttcccattactgttgctgggacttgttttcctggcttcagtttctgtctcatttggcattgcttactgggaaaaagagaaccccaaacacaacaagtgtctccagagttgcaatagcgagagagactcgtacaggaaccaagcatgccacgctcgttgcaacctccttaaggtggagaaagaagaatgtga

SEQ ID NO: 59964 - DNA, 247 bp, Glycine max
  Clone ID: 700674369H1
caaacagaaaatcaccccattctcatcgtttaggattgaacaagtttgctgacatcactcctcaagagttcagcaaaaagtacttgcaagctcccaaggatgtgtcgcagcaaatcaaaatggccaacaagaaaatgaagaaggaacaatattcttgtgaccatccacctgcatcatgggattggaggaaaaaaggtgtcatcacccaagtaaagtaccaagggggctgtggaagcggttgggcgtt

SEQ ID NO: 59965 - DNA, 249 bp, Glycine max
  Clone ID: 700674370H1
ctcgagccgtttgtccttgaatataatactcagcatggctaagcttgttctttccctttgttttctgcttttcagtggctgctgcttcgctttcagtttcagagagcagccacagcaaaacgagtgccagatccaacgcctcaatgccctcaaaccggataaccgtatagagtcagaaggtggcttcattgagacatggaaccctaacaacaagccattccagtgtgccggtgttgacctctctcgctg

SEQ ID NO: 59966 - DNA, 132 bp, Glycine max
  Clone ID: 700674373H1
cttctccaagcccaatttatggtggccaaatggaatgggaaaacaatctttgtacaatgttgttattgtcattgatgttaaaggatttggtgaatctgattcatggagccatcactttggattccacacaac

SEQ ID NO: 59967 - DNA, 251 bp, Glycine max
  Clone ID: 700674374H1
caattccttcacttgcagcactgttgcatcatcatcttcattgcaaaaccctaaacttcaccttcaaccatgaccacacaagtaccaccacacagtgtccaagtccacacaacaacacacccctacgaagctggcgtcgtcccccccggagcccgtttcgaaccgccgcgttatgaagccggcgtcaaagcgccctccatttaccattccgagagaggtccaacgacttcccaggtcctcgccgtcctcgc

SEQ ID NO: 59968 - DNA, 249 bp, Glycine max
  Clone ID: 700674376H1
ctcgagccgctcgagccgcccttcttcactctctctctttcttccctttgcttgctactcttgtcgagacgcatgctttgctattacctccagcaagttcaacgagtgccaactcaacaacctcaacgcgttggaacccgaccaccgcgttgagtccgaaggtggtcttattgaaacatggaactctcaacaccctgagctgcaatgcgccggtgtcactgtttccaaacgcaccctcaaccgcaacgg

SEQ ID NO: 59969 - DNA, 249 bp, Glycine max
  Clone ID: 700674377H1
ccaatttgctgcagaagaaatctcttctatggtgctcatcaagatgcgtgagattgctgaggcttaccttggctccacggtgaagaatgctgttgtcactgtccctgcttacttcaatgattctcagcgtcaagctaccaaggatgctggagtcattgctggtcttaatgtgatgcgaattatcaatgagcctactgcagctgccattgcttatggtcttgataagaaggccacaagtgttggtgagaa

SEQ ID NO: 59970 - DNA, 253 bp, Glycine max
  Clone ID: 700674378H1
cagaaggaggaacacgaatggcatcgcaaggaggaaaaacacggaggaaagggaagtgaagaggaacaagatgaacgtgaacacccacgcccacaccaacctcatcaaaaggaagaggaaaagcacgaatggcaacacaagcaggaaaagcaccaaggaaaggaaagtgaagaagaagaagaagaccaagacgaggatgaggagcaagacaaagagagccaagaaagtgaaggttctgagtctcaaagagaac

SEQ ID NO: 59971 - DNA, 248 bp, Glycine max
  Clone ID: 700674381H1
tatgagactgcgcaaagagttaaacaaactttacaacgttacaaagaacttcaagacattatagctatccttggcttggacgaattatccgaagaagatcgcttaaccgtagcaagagcacgaaaaattgagcgtttcttatcacaaccttttttcgtagcagaagtttttaccggttcgccggggaaatatgttagtctagcagaaacaattagagggtttaaattgattctttctggagaattaga

SEQ ID NO: 59972 - DNA, 246 bp, Glycine max
  Clone ID: 700674382H1
gcagattgtgattttctcaagagaaactttaggcagatgtctaatgttttgtgggtggctcctgaggacaaggcgagtttatggtcacaacttcattatgtttcgtgtaataatctggaaatgcaagaagcttaccttgtcaatctcgtaaatgtgttacgagaattgtatttgcacagtccagaggaagctcgccaattgagaaggaaagctctctctcgtattgaatggctgcaaaaagctgat

SEQ ID NO: 59973 - DNA, 243 bp, Glycine max
  Clone ID: 700674383H1
cgctgatttcgtgctcgataatgaaggtaaccctcttgaaaatggtggcacatattatatcttgtcagacataacagcatttggtggaataagagcagccccaacgggaaatgaaagatgccctctcactgtggtgcaatctcgcaatgagctcgacaaagggattggaacaatcatctcgtccccatatcgaatccgttttatcgccgaagccatcctttgagccttaagttcgattcattt

SEQ ID NO: 59974 - DNA, 246 bp, Glycine max
  Clone ID: 700674384H1
gaaaaaggtaagaggagattcgtatctggggatggtgaagagatgacattaattccgggaaccagtgttgaggaggcttacaataagctaatagttgaactcgagaaaagtgttcctacattggttggcattgaatgtcccaaggatgagaaacttcctcgtcgcaaaatttttgacaaacctaagacgcgctgcttcactattctccctatggagtttaatcttgtggtccgtcagaagttttta

SEQ ID NO: 59975 - DNA, 234 bp, Glycine max
  Clone ID: 700674385H1
ggctcgaggcaaacattgaacttgttggcaccaaagaacaacaacacgagcagcaacaggaagagcacacctttggaagtgcggaaatatagagccgaattgtctgaacaagatatatttgtaatcccagcaggttatccagttgtggtcaacgctacctcaaatctgaatttctttgctattggtattaatgccgagaacaaccagaggaacttcctcgcaggttcgcaagac

SEQ ID NO: 59976 - DNA, 245 bp, Glycine max
  Clone ID: 700674386H1
caaagatcatacatagtagtgttggtgggttgcaaagatgcttgggggtcttctccataggggtcataagataaaagggacagtggtgttgatgcgcaagaatgtgttggacgtgaatagcgtaaccagcgttgggggaattattggtcaaggtctcgacttagttggctcaacactcgatactcttactgccttcttgggccgatccgtgtctctccagcttattagtgctaccaaagctgatg

SEQ ID NO: 59977 - DNA, 247 bp, Glycine max
  Clone ID: 700674387H1
gccactcgaacaagtgcggccattcccaacgcttctcttcctttctaaggggagtctgaatcccgtgagttttcaatatgacgtcgttcttgaagcctgagaatgctctgaaaagggcggaagaattaatcaatgttgggcagaagcaggatgctttgcagactctccatgatctcatcacctcaaagcgatacagagcgtggcagaagacacttgaaaggattatgttcaagtatgtggagctttg

SEQ ID NO: 59978 - DNA, 76 bp, Glycine max
  Clone ID: 700674388H1
ctggtcaccaggctctaacataaaacagaagcctttctgaaaaaaaagagaagagaatgctccctccacacaacat

SEQ ID NO: 59979 - DNA, 248 bp, Glycine max
  Clone ID: 700674389H1
ctgggaaccaagagcaagagtttctaaaatatcagcagcagcagcaaggaggttcccaaagccagaaaggaaagcaacaagaagaagaaaacgaaggaagcaacatattgagtggcttcgcccctgaattcttgaaagaagcgttcggcgtgaacatgcagatagtgagaaacctacaaggtgagaacgaagaggaggatagtggagccattgtgacagtgaaaggaggtctaagagtcacagctcca

SEQ ID NO: 59980 - DNA, 106 bp, Glycine max
  Clone ID: 700674390H1
ctcgagccgattcggctcgagtgaagatgaagatgaagacgaagctgatgaagatgaacacattccctctcaccctcctagccgaccaagccatggaaagcgtgaa

SEQ ID NO: 59981 - DNA, 247 bp, Glycine max
  Clone ID: 700674391H1
aaaagtcttccatagccccccaaaaatgaagagcaccatcttctttgctctctttctcttttgtgccttcaccacctcatacctaccttcagccatcgctgatttcgtgctcgataatgaaggtaaccctcttgaaaatggtggcacatattatatcttgtcagacataacagcatttggtggaataagagcagccccaacgggaaatgaaagatgccctctcactgtggtgcaatctcgcaatgag

SEQ ID NO: 59982 - DNA, 249 bp, Glycine max
  Clone ID: 700674392H1
ggcctccacttgccatcttactcaccttatccccaaatgatcattgtcgttcaagggaagggagcaattggatttgcatttccgggatgtcctgagacgtttgagaagccacaacagcaatcaagcagaagaggctcaaggtcgcagcagcaactacaagacagtcaccagaagattcgtcacttcaatgaaggagacgtactagtgattcctcctggtgttccttactggacctataacactggcgat

SEQ ID NO: 59983 - DNA, 247 bp, Glycine max
  Clone ID: 700674393H1
attggtccttaaacactcatcagtcatcaccatggccaagctagttttttccctttgttttctgcttttcagtggctgctgcttcgctttcagttccagagagcagcctcagtaaaacgagtgccagatccaaaaactcaatgccctcaaaccggataaccgtatagagtcagaaggagggctcattgagacatggaaccctaacaacaagccattccagtgtgccggtgttgccctctctcgctgc

SEQ ID NO: 59984 - DNA, 246 bp, Glycine max
  Clone ID: 700674394H1
ggtccttaaacactcatcagtcatcaccatggccaagctagttttttccctttgttttctgcttttcagtggctgctgcttcgctttcagttccagagagcagcctcagcaaaacgagtgccagatccaaaaactcaatgccctcaaaccggataaccgtatagagtcagaaggagggctcattgagacatggaaccctaacaacaagccattccagtgtgccggtgttgccctctctcgttgcac

SEQ ID NO: 59985 - DNA, 248 bp, Glycine max
  Clone ID: 700674395H1
agcacccagagaccatgcaacaacagcagcagcagaagagtcatggtggacgcaagcaggggcaacaccagcagcaggaggaagaaggtggcagtgtgctcagtggcttcagcaaacatttcttagcacaatccttcaacaccaacgaggacaacgctgagaaacttcggtctccagatgacgaaaggaagcagatcgtgacagtggagggaggcctcagcgttatcagccccaagtggcaagaacaa

SEQ ID NO: 59986 - DNA, 252 bp, Glycine max
  Clone ID: 700674396H1
tttctcaagagaaactttaagcagatgtctaatgttttatgggtggctcctgaggacaaggcgagtttatggtcacaacttcattatgtttcgtgcaataatctggaaatgcaagaagcttatcttgtcaatctcgtaaatgtgttacgagaattgtatttgcacagtccagaggaagctcgccaattgagaaggaaagctctctctcgtattgaatggctgcaaaaagctgatgtgcctaccatagcacag

SEQ ID NO: 59987 - DNA, 281 bp, Glycine max
  Clone ID: 700674401H1
ggctcgaggttcaatatcctagtataccttaataaataatttaagatactatgatgagagcacggttcccattactgttgctgggacttgttttcctggcttcagtttctgtctcatttggcattgcttactgggaaaaagagaaccccaaacacaacaagtgtctccagagttgcaatagcgagagagactcgtacaggaaccaagcatgccacgctcgttgcaacctccttaaggtggagaaagaagaatgtgaagaaggtgaaattccacgaccacga

SEQ ID NO: 59988 - DNA, 159 bp, Glycine max
  Clone ID: 700674402H1
ctcgagaaattttaataaaccgcgatcacaggttgccgcaccttaaaaccggaaacaaaagcaatcgttacttgatttcaagaatttctcaatttcttcctacttctttgtgtacgatttcttaagggaaagaaaatcaatctctgtgctggtcacaga

SEQ ID NO: 59989 - DNA, 279 bp, Glycine max
  Clone ID: 700674403H1
ctcgaggtataccttaataaataatttaagatactatgatgagagcacggttcccattactgttgctgggacttgttttcctggcttcagtttctgtctcatttggcattgcttactgggaaaaagagaaccccaaacacaacaagtgtctccagagttgcaatagcgagagagactcgtacaggaaccaagcatgccacgctcgttgcaacctccttaaggtggagaaagaagaatgtgaagaaggtgaaattccacgaccacgaccacgcccacaac

SEQ ID NO: 59990 - DNA, 280 bp, Glycine max
  Clone ID: 700674404H1
cggctcgagcgctgaagatggttctgttgagaatgcagacaatgttgaatctgcttctatatctgctaaaagtacgtcagaggataacacaggagctgaagatgatgtttcgtcagtcgctgcaaacatagagcagctaaatatacagagagatgatcaggggacagaacaagaacatgacaatccttctgtagtaattccaaatcacctactactccatactccagaatgcatgaatctgagctttggaagttttggatctggaaacccctttctggat

SEQ ID NO: 59991 - DNA, 279 bp, Glycine max
  Clone ID: 700674405H1
ggctcgaggttattatcaaataattaattaaattcctcgtggaatcttgttgaagccatgtctacagctggtcaggtcatcaagtgcagagctgcggtggcatgggaagcagggaagccactatcgatagaaaccatagaagtggcaccaccccagaaaggtgaagtgcgtttgaagatcctcttcaactccctttgccgtacagatgtttactggtgggatgctaagggccagactccgctgtttcctcgtatcttaggccacgaagcttcggggatt

SEQ ID NO: 59992 - DNA, 279 bp, Glycine max
  Clone ID: 700674406H1
tcggctcgagcgaaagtgttgaactatctctagctagcttttcacaaatttcgttgcacttgcaactgaggcaggaaagaggggcacgagaggaggaagaggaaagagaagaaaaaccaagaaaagtggagaaagggataggtgttgtacagaaatagaaattaaaattgagtgaaaattaaagagaagaaggagtgatagggagatatgggtaggggaagagtggagttgaagaggatagagaacaagataaacaggcaagttacgtttgcaaagagg

SEQ ID NO: 59993 - DNA, 264 bp, Glycine max
  Clone ID: 700674407H1
cttctctgcatcctttgggatctcttgcatagaccaaccccagaagaagaaggaaaaaaataaaaaaaaataaaaatcaaccctttttattttggggcttgttggtgattctgttgtacagaagtgttcgttagttatacatttgttcaagattgttgtatagattgattcattattttaacgtactttggagcattgcatgagtgattgccctctgattcttttgtgaagtcaactaaagtccctataattacaaactgagat

SEQ ID NO: 59994 - DNA, 277 bp, Glycine max
  Clone ID: 700674409H1
ggctcgagcagagctcctgttcaccttgtgtggtcactggtgagaagatttgatcaacctcagaaatataaaccatttgttagcaggtgtatcatgcaaggggatcttggcatcggaagtgttcgagaagtgaatgttaaatctggccttcctgccacaacaagtactgagaggttggaaccactggatgatgaggaacacattctcggcatcaggattgttggaggtgaccataggctgaggaactattcttccataatcaccgtccatccagagg

SEQ ID NO: 59995 - DNA, 250 bp, Glycine max
  Clone ID: 700674410H1
tcaattccaagctttattcctcatgtctttcagaggcctcagccggccaaatgcctcatcaggcatgggtgttgctgatcacagcaagaacaccttcatggaattgaagcagaagaaggttcaccgttatctgatctttaaggttgatgagaagaaaagggaagttgtggttgagaagactggtgacccggctgagagctatgaggatttcgctgcatctttgcctgagaatgattgcagatatgctgtc

SEQ ID NO: 59996 - DNA, 253 bp, Glycine max
  Clone ID: 700674411H1
ccaacagcatgaaaaatttgggttaaggatgttcgtttctctcgccacaaccttttccccgccgcatactccgtcatcctcctccattccagattcgttcctccgtgccaccttcgccagtgctgttggcagcaataacatttgggaatacagatctgcccggcagcgatggaggaagcgccagatctgaaatatgctcccagtattgaacgacactggtgccgaaaagcttattacgattgtactatattgt

SEQ ID NO: 59997 - DNA, 265 bp, Glycine max
  Clone ID: 700674413H1
gaatcggaggggccgttttttgaaggtgtctgaagcttctgtcagcagaaaccgtagcactataattgttcctgctggaagctccagggatgaaggatgggcagcattcaggaacgttttggcagagatcaatgaagcctcaaggcttttcattctgcccaatcagcaaaattctgaatcctcagagcgtcttgttggactttcggatgatgttggtgctggcttcatatctggtcatagtactcaacctgccacttcttctgag

SEQ ID NO: 59998 - DNA, 280 bp, Glycine max
  Clone ID: 700674415H1
cggctcgagtcaatatcctagtataccttaataaataatttaagatactatgatgagagcacggttcccattactgttgctgggacttgttttcctggcttcagtttctgtctcatttggcattgcttactgggaaaaagagaaccccaaacacaacaagtgtctccagagttgcaatagcgagagagactcgtacaggaaccaagcatgccacgctcgttgcaacctccttaaggtggagacagaagaatgtgaagaaggtgaaattccacgaccacga

SEQ ID NO: 59999 - DNA, 259 bp, Glycine max
  Clone ID: 700674416H1
cggctcgaaccttaataaataatttaagatgatatgatgagagcacggttcccattactgttgctggagactgagtttcctggcttcagtttctgtctcatttggcattgcttactgggaaaaagagaatcccaaacacaacaagtgtctccagagttgcaatagcgagagagactcgtacaggaaccaagcatgccacgctcgttgcaacctccttaaggtggagaaagaagaatgtgaagaaggtgaaattccagga

SEQ ID NO: 60000 - DNA, 232 bp, Glycine max
  Clone ID: 700674417H1
gaaaattacaagatcatcatcacaataacaatatgagttcaggaattagagcatggagtgtggcaactagcgttggagttgtggaggccttaaaagaccaaggtatatgtaggtggaatcatgctttaagatcagctcaacaccatctcaaaaaccatgttggttcattctctcaggctaacaagctttcttcttctgctatgagctccacaacactaaaacatgggaagac

SEQ ID NO: 60001 - DNA, 272 bp, Glycine max
  Clone ID: 700674419H1
tcggctcgagtgcgtttttctcttcttcttcttcttcgcataatagcagagacagatggtgaagcactacagacccccggggaagaaaaaggagggaaatgctgccaaatttgtcattaggtcacaagcaatcaagcagcttcaaatcagtctaccccttttcaggaaactatgtattttgaaaggtgtaactccaagggagcctaagaaaaagttcaagggaactcatcagacttattaccatgtcaaggatgtttccttccttcatcacg

SEQ ID NO: 60002 - DNA, 278 bp, Glycine max
  Clone ID: 700674420H1
tcggctcgagcgtattaaagaatttaagatatactatgatgagagcgcggttcccattactgttgctgggagttgttttcctggcatcagtttctgtctcatttggcattgcgtattgggaaaagcagaaccccagtcacaacaagtgcctccgaagttgcaatagcgagaaagactcctacaggaaccaagcatgccacgctcgttgcaacctccttaaggtggaggaagaagaagaatgcgaagaaggtcaaattccacgaccacgaccacaacac

SEQ ID NO: 60003 - DNA, 280 bp, Glycine max
  Clone ID: 700674421H1
atcggctcgaggcagagtgacagcagcagcagcagcagcttggtctgaggttagagatggttagccaaaggcagcgacttgctcgaaagcgatacaaagcggaacaccctgagctctttccgaagcccgagcccacaccccccaaagaccccgagaagaagaaaaagaagaagaaaaacagcgctttcaagcgcaaaaggcccgagcccaagcccggctccagaaaaagacaccctctcagagtccccggcatgaagcccggcgagagctgcttcatctg

SEQ ID NO: 60004 - DNA, 160 bp, Glycine max
  Clone ID: 700674422H1
attcggctcgagtgaaattttgataaaccgcgatcacaggttgccgcaccttaaaaccggaaacaaaagcaatcgttacttgatttcaagaatctctcaatttcttcctacttctttgtgtacgatttcttaagggaaagaaaatcactctctgtgctgg

SEQ ID NO: 60005 - DNA, 281 bp, Glycine max
  Clone ID: 700674423H1
attcggctcgagcttccatagccccccaaaaatgaagagcaccatcttctttgctctctttctcttttgtgccttcaccacctcatacctaccttcagccatcgctgatttcgtgctcgataatgaaggtaaccctcttgaaaatggtggcacatattatatcttgtcagacataacagcatttggtggaataagagcagccccaacgggaaatgaaagatgccctctcactgtggtgcaatctcgcaatgagctcgacaaagggattggaacaatcatct

SEQ ID NO: 60006 - DNA, 278 bp, Glycine max
  Clone ID: 700674424H1
attcggctcgagaagagctcctgttcaccttgtgtggtcactggtgagaagatttgatcaacctcagaaatataaaccatttgttagcaggtgtatcatgcaaggggatcttggcaacggaagtgttcgagaagtgaatgttaaatctggccttcctgccacaacaagtactgagaggttggaacaactggatgatgaggaacacataccaagcatcaggattgttggaggtgaccataggctgaggaactattcttccataatcaccgtccatccag

SEQ ID NO: 60007 - DNA, 254 bp, Glycine max
  Clone ID: 700674425H1
tgttgcttcttttctccctcttaggtctctcttctagttccagcatatcaactcatcgttccatattggaccttgacctaaccaagtttaccacacagaaacaggtgtcttcactgttccaactatggaagagtgagcatggacgtgtctaccataaccacgaagaagaggcaaagagacttgagattttcaagaataacttgaactatatcagggacatgaatgcaaacagaaaatcaccccattctcatcgt

SEQ ID NO: 60008 - DNA, 279 bp, Glycine max
  Clone ID: 700674426H1
attcggctcgagcaaaattttagattagtagctctttgtccttttaaatttgcgtttttttcttctaagtggaccactcaaattgtacttttgcgcctaactggttcatgcatggttatatttgtgtctcatagagaaaccttcaagggagttgttgtgttgaaggattccttctttgatccttggtttcaatggagaggtgttacaatgagaaagagtacaagtccaagaaaatagacctttgtctaaagctttcaacttgtggtgagaatgcagaag

SEQ ID NO: 60009 - DNA, 282 bp, Glycine max
  Clone ID: 700674428H1
attcggctcgagcagatgtcacgggggagatctgattacggaaggtggtttaaagcgctgtctggtgggttttcgcaatggtctcagcgttaggcgtgtgtggccctgctctttactggcgattcaagaacgccatcactctccgcaacaacaacaacacactctcttgcccttcctgcctctgtgactgccctccccctctctcgctcttccaacttgctcctgggctggcgaatctctctgtctcagattgtggaagtaatgacccggatctaaaggagg

SEQ ID NO: 60010 - DNA, 131 bp, Glycine max
  Clone ID: 700674429H1
ggctcgagcacttggccgaggatcgtctcagccaatccgcagttccagccgaggtgggtcacttaatcggaaagttcagctccgctttgggccgggccttcctcttcgatctcattcccactgcacacaac

SEQ ID NO: 60011 - DNA, 257 bp, Glycine max
  Clone ID: 700674430H1
attctcaatctaaaatttcacttcccaagaacacagtacgtagaaccatgtctgcgtagtgtatctacttggcacatttattgacagatggcaattttagagcaaatgttgacttgcagcgcactcatcgtattataggaatgattaatatggtggccacagttggtattcctgtgaatacaggtatagcattggcctgtgctatgaatagttcttttagggggcgcgccagatctgatatatacaccatctgctct

SEQ ID NO: 60012 - DNA, 280 bp, Glycine max
  Clone ID: 700674431H1
cggctcgagcttcgcagaagtccaaaacaacccctacagatgagtttgctataagcactgtagctgctgtccttaaggagataccacctgcatggttcacctatgggcattactctactgtcatggctatcatgtatcatttaccgatctctgttagagattttgttttgaagaaagcaatgaaaggctgagctatagttaggtggtgcatctatctttccacatggacaccttataaagcatttactttacctttagcaacagaagagatattttctat

SEQ ID NO: 60013 - DNA, 199 bp, Glycine max
  Clone ID: 700674432H1
aaatccatggcctaatgttgatgctcacagtggagtgctactgagatattatgggctaactgaggaaactattatactgttctctttagtgtatcaaggagctttggagttggccctcagttgatatgggacagggctcttggaatgccactcgaaaggccgaaaagtgtaacactggagaagctcgagcaattggtcg

SEQ ID NO: 60014 - DNA, 284 bp, Glycine max
  Clone ID: 700674433H1
ttcggctcgagcctcctcgaaaatgctggcacgcctcgccgcgactcgcttcaacgagatccgtcagattttccgtcagccttctagggctttctcgaccgctctgaactaccaccttgacacaccggacaacaaccctaaacttccatgggaattcaccgaggccaatcaagcaaaggttaaggagattttgtctcactatccatccaactataagcaatctgctacaattcctcttttggatcttgcccagcagcagcatggtggctggctccctgtttctg

SEQ ID NO: 60015 - DNA, 268 bp, Glycine max
  Clone ID: 700674435H1
ctatcctagtataccttaataaataatttaagatactatgatgagagcacggttcccattactgttgctgggacttgttttcctggcttcagtttctgtctcatttggcattgcttactgggaaaaagagaaccccaaactcaacaagtgtctccagagttgcaatagcgagagagactcgtacaggaaccaagcatgccacgctcgttgcaacctccttaaggtggagaaagaagaatgtgaagaaggtgaaattccacgaccacga

SEQ ID NO: 60016 - DNA, 280 bp, Glycine max
  Clone ID: 700674436H1
aattcggctcgtgactcgagccgattcggctcgagctctgctttgatacccttttgttacttttggtgctttaaactgcactagcaagggggttagttttatttctgtttgcttgcaacaatggctgtggctaataagttactttctgttttgatcattgccctcattgccatttccatgcttcaaacagtatttatggcatctcatggacatggaggccaccactacaatgacaagaaaaaatatggatctggcagtctcaaaagcttccaatgcccat

SEQ ID NO: 60017 - DNA, 267 bp, Glycine max
  Clone ID: 700674437H1
gcagcatctcatccccttctcagagaggatgattaccctcaaagacgtggtgctttcaccaattacaatgtttgggttacaccttacaataagactgagaagtgggctggtggactttttgttgatcaaagtcatggagatgatactttggctgtttggactaagcagtaagcatgcatatcttaaccttggaaccaaatatgtttcactttaattctgtgtatccaattgataactaacccattgtttttttttttgccaaataaa

SEQ ID NO: 60018 - DNA, 264 bp, Glycine max
  Clone ID: 700674438H1
cggtgatgcagcagttggttagtagacttgatgtggcaatgttcaatgctattcttcgtgaatccgctgaagagatgcccatggatcctatatctgaccccattagtgattctaaggttcttcctattccagctggaaaatcaggctttggggctggtgcacaactgaagaatgctattggtgactggtcaagatggctttcagatttatttagcattgatgatagtgactcacgtgaagttatcaatgaaaacaatgaaccca

SEQ ID NO: 60019 - DNA, 263 bp, Glycine max
  Clone ID: 700674439H1
acagcatcctgattgataatgtggagaagcaaactggtagtctctactctgattgggatcttctccctccaaagacaatcaaagatcccgaggctaaaaaaccagaagattgggatgacaaagaatttattcctgatcccgaggataagaaaccagaggggtatgatgacatcccaaaagagctcccagatcctgaagccaagaagcctgaagattgggatgatgaggaagatggtgagtggacaccccctaccattgccaac

SEQ ID NO: 60020 - DNA, 263 bp, Glycine max
  Clone ID: 700674440H1
gcgcccaatgaagggaatgcttaccggtcctgttaccattctcaactggtcctttgttagaaatgaccaacctagatctgagaccacctaccagattgctttgtctatcaaggacgaagtggaagaccttgaaaaggctggcatcactgttatccaaattgatgaagctgctttgagagagggtcttccactgaggaaatcagagcaagctcactacttggactgggctgtccatgccttcagaatcaccaatgttggtgtcc

SEQ ID NO: 60021 - DNA, 266 bp, Glycine max
  Clone ID: 700674441H1
cgcagatgaaggtgttgaaagttctatttggctgctagcaaaggcttatgtagttgtgaatgactcgtgctatcatcaacttgtcagccattggttaaacactcatgcagttgttgagccattcatcatagcaacaaacaggcatctcagtgttgttcaccctatttataaactccttcaccctcactatcgtgacaccatgaacataaatggccttgctcggttatcactggtcaacgacggtggcgttatagaacaaacatttt

SEQ ID NO: 60022 - DNA, 255 bp, Glycine max
  Clone ID: 700674444H1
tcggctcgagttccatagtcccccaaaaatgaccagcaccatcttctttcgctctctttctctttagtagcctcaccacctcatacctacgttcagccatcgctgatttcgtgctcgataatgaaggtaaccctcttgaaaatggtggcacatattatatcttgtcagacataacagcatttggtggaataagagcagccccaacgggaaatgaaagatgccctctcactgtggtgcaatctcgcaatgagctcg

SEQ ID NO: 60023 - DNA, 266 bp, Glycine max
  Clone ID: 700674445H1
cacgttcgcgtcctccagaggttcaacaaacgctcccaacagcctcagaatctccgagactaccgcattttggagttcaactccaaacccaacacccttcttctcccccaccatgctgacgctgattacctcatcgttatccttaacgggactgccattcttaccttggtgaacaacgacgaccgagactcttacaaccttcaatctggcgatgccctaagagtccctgcaggaaccacatactatgtggttaaccctgacaacga

SEQ ID NO: 60024 - DNA, 265 bp, Glycine max
  Clone ID: 700674446H1
acgtatgtcatcattgagtctggcatcagattctagcacagcaaaaccttcccttatgttcttcaaaatgtttgggccttcttttgaagctgattttgttgagtcagttgtgaaaatgggccaaattggtgtcaagacaggtttccttggagagattaggcgcgtgtgttcagcttttaattgaagtaaatatgcaattaatgatcaattggtcataataaaaatgtatggcttctagaaaaaaaaaaaaaaaaaaggggggcgg

SEQ ID NO: 60025 - DNA, 267 bp, Glycine max
  Clone ID: 700674447H1
ctcgctgctgttatctacagagatgagaaggaggtacagaaatctgcattcaaacagtaccgtgtattgcgaacagctactgatttcagatacggctacaaacttgttgagaatggcaatataagagctgcactttctaccactgatgttattgagcttccaacacaagataaactaaaaaccgtgcttgacaaagtgaaagacttttttggagatgcaaaggaatcttttggaaagataacatcattgggcactactgaaacagag

SEQ ID NO: 60026 - DNA, 256 bp, Glycine max
  Clone ID: 700674448H1
caatggccacagtgggcacaccattgaattttgattctagtaaacagagtttttgtcaattttctattgaccttctcggtggaggaattttagtggacaaaactggagattggatcacacttatacaaaattctccaattagtaacttgttgagagttgctgcttggaagaaaggctgtttaatggttacgattgtgatgtctgggaatgcagcagtcaaaaggagtgattgggcctcattggtacaagtgttttt

SEQ ID NO: 60027 - DNA, 272 bp, Glycine max
  Clone ID: 700674449H1
cacgaggtgctcttcgcttctctctctatagagcgtgcgtgttatcctgcgagagcgacagagctcgctttcgctattgtgacatctatagcgcatgcgtaacttcagcaatcactgaactcgtcctagatctctctcgcactcctctagcaaatggtgtcccatattctatcgagtccgcactcagctcgatattcgtcattctcgatctcatcgatagggcagatgtctctgatctatgcagtgcggtcgctgctggcagtgagtctcgc

SEQ ID NO: 60028 - DNA, 269 bp, Glycine max
  Clone ID: 700674450H1
ctacccccaactaacaataattccttcacttgcagaacttagttctctgttgcatcatcatcatcttcattagtgttagccctaaacttcaccttcaaccctgaccacagtgccaccacacagtgtccaagtgcacacaacaacacaccgctacgacgccggcgtcgtcccgccggctcgttttgaggcgccgcgttacgaagccggcatcaaggcgccctcttccatttaccattccgagagaggtccgacgacctctcaggttctcg

SEQ ID NO: 60029 - DNA, 263 bp, Glycine max
  Clone ID: 700674451H1
ctcatcaccatggccaagcttgttctttccctttgtttccttcttttcagtggctgcttcgctctgagagagcaggcacagcaaaatgagtgccagatccaaaagctgaatgccctcaaaccggataaccgtatagagtcggaaggtgggttcattgagacctggaaccctaacaacaagccattccagtgtgccggtgttgccctctctcgctgcacccttaaccgcaatgcccttcgtagaccttcctacaccaacggtcc

SEQ ID NO: 60030 - DNA, 264 bp, Glycine max
  Clone ID: 700674452H1
aggcaatactccaagttatttagatacgagttctcagatgacaatgattctcagggttctgcaccttgttctcccgttcaaggatctatcgaggatagtgttcctggtagtcattgtcaagcctttgacagacaactttcaaaattcagttgctttaatttcaaaccaaatattagtaggacatctgggcagatgcctcttccacctgaagagttaaggtgtccaatatctctgcaactcatgtatgatcctgttatcattgct

SEQ ID NO: 60031 - DNA, 265 bp, Glycine max
  Clone ID: 700674453H1
aattctggtgaatgcgtagagaaggagaataaagagattagcgtgaaaaatgatgggtatgttcagcagctaccatagtgtcgccgccggaggagatcgttgccgccggcagccgtacgaccgatcaccgaagatgacggcggcggcgctacggaaatggatcgaggcgtaggacccctccgccgtgtcgctgcaggtcgaagaggatctccagctcgcttataaacaccagaaggcgtcgccggttcagcacagatcctttgct

SEQ ID NO: 60032 - DNA, 263 bp, Glycine max
  Clone ID: 700674454H1
cgagtcactcactcagatctgactcttgcagagtcttggtttgcatctgacacatctactgggtaccttgaagatgctattgcaggttggggtatttggtgcaagcaacacaacataccatcctattctcaagatcaaaagaaaagccaatatttggttgatcaggaggacttattgccaacattttcttcaacttcccaaatccttcatgaccataaaaacttcagcactgccactagggacctatcatcatcacaaaatga

SEQ ID NO: 60033 - DNA, 264 bp, Glycine max
  Clone ID: 700674455H1
caaaattcttccaccaagttatgggtacacttgtgttgcttcttttctccctcttaggtctctcttctagttccagcatatcaactcatcgttccatattggaccttgacctaaccaagtttaccacacagaaacaggtggcttcactgttccaactatggaagagtgagcatggacgtgtctaccataaccacgaagaagaggcaaagagacttgagattttcaagaataacttgaactatatcagggacatgaatgcaaaca

SEQ ID NO: 60034 - DNA, 187 bp, Glycine max
  Clone ID: 700674456H1
tgaaattttgataaaccgcgatcacaggttgccgcaccttaaaaccggaaacaaaagcaatcgttacttgatttcaagaatctctcaatttcttcctacttctttgtgtacgatttcttaagggaaagaaaatcactctctgtgctggccacagacttcgtgaatcattttcttttccacacaacat

SEQ ID NO: 60035 - DNA, 251 bp, Glycine max
  Clone ID: 700674457H1
ccgatgtcacgggggagatctgattcgggagagttgttgaggggctgtctggtggttttcgcagtggtctcagcgttgggcgtgtgtggccctgctctttactggcgattcaagaacgccatcactctccgcaacaacaacaacaaactctcttgccctacctgcctctgtgactgccctccccctctctcgctcttccaacttgctcctgggctggcgaatctctctgtctcagattgtggaagtaatga

SEQ ID NO: 60036 - DNA, 260 bp, Glycine max
  unsure (1)..(260): unsure at all n locations
  Clone ID: 700674458H1
canctgacagcctccaaatccaatggcttcagagaagaaactttcgaacccaatgagggagataaaagtgcagaagctcgtcctcaatatctctgttggcgagagtggagatcgtctcaccagagccgccaaggtgttggaacaacttagtggccaaaccccagtgttttccaaagcacggtacactgttcgttcctttgggattagaagctatgagaagattgcatgctatgtcactgtcagaggtgacaaggcaatgc

SEQ ID NO: 60037 - DNA, 266 bp, Glycine max
  Clone ID: 700674459H1
acagattgataccagattaataccaaaagaatagatcctcaatacaatgaggttcaggctcagatggaaacaaaattgtttaaattgtctcttgatgatgttgaaactcctaaaggttctatgttggatcttaaaatttctcaatctaaaattgcacttcccaagaacacagttggaggaaccattctgcgtagtgatctattggcaaattttttgacagagggcaattttagagcaagtgttgatttgcagcgcactcatcgtat

SEQ ID NO: 60038 - DNA, 269 bp, Glycine max
  Clone ID: 700674461H1
ctcgagctcgagcgtttgtccttgaatataatactcagcatggctaagcgtggtctttccctttgatttctgcttttcagtggctgctgcttcgctttcagtttcagagagcagccacagcaaaacgagtgagagatccaacgcctcaatgccctcaaaccggataaccgtatagagtcagaaggtggcttcattgagacatggaaccctaacaacaagccattccagtgtgccggtgttgccctctctcgctgctacctcaaccgcaa

SEQ ID NO: 60039 - DNA, 279 bp, Glycine max
  Clone ID: 700674462H1
attcggctcgagaccattcttccaccaagttatcggtccccttgtgctgcttcttttctccctcttaggtctctcttctagttccagcatatcaactcatcgttccatattggaccttgacctaaccaagtttaccacacagaaacaggtgtcttcactgttccaactatggaagagtgagcatggacgtgtctaccataaccacgaagaagaggcacagagacttgagattttcaagaataacttgaactatatcagggacatgaatgccaacagaaa

SEQ ID NO: 60040 - DNA, 270 bp, Glycine max
  Clone ID: 700674463H1
cactaattccttcacttgcagaacttagttctctgttgcatcatcatcatcttcattacaatgttagccctaaacttcaccttcaaccatgaccacagtgccactacacagtgtccacgtgcacacaacaacacaccgctacgatgccggcgtcgtcccgccggctcgttttgaggcgccgcgttacgaagccggcatctaggcgccctcttccatttaccattccgagagaggtccgacgacctctcaggttctcgcagttgtcgccgg

SEQ ID NO: 60041 - DNA, 175 bp, Glycine max
  Clone ID: 700674464H1
gggaatggggttgacaacactgttttgcacgatgtgacagatacaggcgatgacggcccacctgaggaaaactattatactgttctctttggtgtatcaaggagctttggagttgggcctcagttgatatgggacagggctcttggaatgccacttgaaccggtcgaaagtgtaa

SEQ ID NO: 60042 - DNA, 283 bp, Glycine max
  Clone ID: 700674465H1
cggtcttcggctcgagctaaaattcttccaccaagttatcgatacacagtgttgcttcttttctccctcttaggtctctcttctagttccagcatatcaactcatcgttccatattggaccttgacctaaccaagtttaccacacagaaacaggtgccttcactgttccaactatggaagagtgagcatggacgtgtctaccataaccacgaagaagaggcaaagagacttgagattttcaagaataacttgaactatatcagggacatgaatgcaaacagaa

SEQ ID NO: 60043 - DNA, 265 bp, Glycine max
  Clone ID: 700674466H1
gcgcccaatgaagggaatgcttaccggtcctgttaccattctcaactggtcctttgttagaaatgaccaacctagatctgagaccacctaccagattggtttgtctatcaaggacgaagtggaagaccttgaaaaggctggcatcactgttatccaaattgatgaagctgctttgagagagggtcttccactgaggaaatcagagcaagctcactacttggactgggctgtccatgccttcagaatcaccaatgttggtgtccag

SEQ ID NO: 60044 - DNA, 265 bp, Glycine max
  Clone ID: 700674467H1
ccataggacaaaatgaaggagtatatggttgtgcttcggcgtcgtcactacatttctaattcataataaacggtggttggagtttgtttaattgtttctccctctttctttctcttttgacggctcctactaatcccacttctccatcgccgcctcagagtctttcgtcgaatacgatgctgttttctcggatatcgagaaacctcagacgcagcttcaactcatgtcggtggtttctgtccatcggagaccacaaccaccgctt

SEQ ID NO: 60045 - DNA, 266 bp, Glycine max
  Clone ID: 700674468H1
caaaagggaagtgaagaggaagatgaggatgaggatgaggaacaagatgaacgtcaattcccattcccacgcccacctcatcagaaggaagagcgaaagcaagaggaagatgaggatgaggagcagcagcgagagagcgaagaaagtgaagattctgagttacgaagacataagaataagaacccttttctcttcggctctaacaggttcgaaactctcttcaaaaaccaatatggtcgcattcgcgtcctccagaggttcaacca

SEQ ID NO: 60046 - DNA, 263 bp, Glycine max
  Clone ID: 700674469H1
cgaagctcaaggtctgctccggccccctcctagccacattccaagcattgtggtgattgaaggttttgaatttgaggaatatgaggaagctccagtgcttgggaagccaacaatttttaccagtgatagtgtgggtgaaaagatccagtgggctcaatgtgaagattgtttcaagtggcgcaaattgccagcaagtgcgcttcttccatcaaaatggacgtgttctgataattcgtgggatccagaaagatcttcttgttcag

SEQ ID NO: 60047 - DNA, 260 bp, Glycine max
  Clone ID: 700674471H1
ctgaagcaaagcaatggctacttcaaagttgaaaacccagaatgtggttgtatctctctccctaaccttaaccttggtactggtgctactgaccagcaaggcaaactcagcggaaactgtttctttcagctggaacaagttcgtgccgaagcaaccaaacatgatcctccaaggagacgctattgtgacctcctcgggaaagttacaactcaataaggttgacgaaaacggcaccccaaaaccctcgtctcttggtcgcg

SEQ ID NO: 60048 - DNA, 263 bp, Glycine max
  Clone ID: 700674472H1
caagttcacaatcctcctcatctctcttctcttctgcatcgcccacacttgcagcgcctccaaatggcagcaccagcaagatagctgccgcaagcagctccagggggtgaacctcacgccctgcgagaagcacatcatggagaagatccaaggccgcggcgatgacgatgatgatgatgacgacgacaatcacattctcaggaccatgcggggaagaatcaactacataaggaggaacgaaggaaaagacgaagacgaagaag

SEQ ID NO: 60049 - DNA, 262 bp, Glycine max
  Clone ID: 700674473H1
ctccagaaaaaatggcggtgcctcttctctcgaagaagatcgtgaagaagaggctgaagaagttcaagaggcctcaaagtgacaggaagatttctgtgaagacaaactggcgcagaccaaagggtatcgattaccgtgttaggagaaagttcaagggatgcactttgatgccgaacattggttatgcttcagacaagaagacccgccactatctcccgaatggtttcaagaaatttgttgttcacaatgtgaaggatttgga

SEQ ID NO: 60050 - DNA, 258 bp, Glycine max
  Clone ID: 700674474H1
gagccgggacagtatccctatggaggtttaatcttaaaccgtccaactcttagtaggacattcatgcctgagaaaggttctgctgagtatgaggagctgaggaagaatccccagaaggcttacttgaagactattacaccaaagtttcagacccttattgacctttctgttatagaaatcttgtcaaggcatgcatctgatgaggtgtaccttggggagagggacaatccaaattggacatctgatacaagagcatta

SEQ ID NO: 60051 - DNA, 260 bp, Glycine max
  Clone ID: 700674475H1
cacataaaaaaccatcacacaaaactctccagtaattctgaaaattttattttcttttggtgcaattaacacctctgtgattgatcaatggcgacaaaggaaggcaaagccataggcatcgatctcggcacgacctacagctgcgtgggcgtctggcaaaacgaccgcgtcgagatcatccccaacgaccaaggcaaccgaaccactccctcttatgtagccttcaccgacaccgagaggctcatcggagacgcggcgaa

SEQ ID NO: 60052 - DNA, 264 bp, Glycine max
  Clone ID: 700674476H1
cacaacaacaacacctttgcacacatcaatgtgcaccaccctcttcctcctcattcctctccagccaataccatcaataggatgtttatgagtaataataaagagaacaacaacacgagtgagaggatgaaggatggccttgcccttcccatgctacctcctactcttgagctgaaaccaaaggacaacaacaactctttcatggttcataaacaccaagaaccatatgatgaatcctcaaggaacaagaatgagtttggactc

SEQ ID NO: 60053 - DNA, 266 bp, Glycine max
  Clone ID: 700674478H1
ctcgagccgcggctcgagggaacattttagaggcctcctacgatagcccattcgaggagatacaacaaggttctgtttactagagaggaagggcagcagcaaggggagcagaggctgcaagagagcgtgattgtggaaatctcgaaggaacagattcgggcactgagcaaacgtgccaaatctagttcaaggaaaaccatttcttctgaagataaaccttttaacttgagaagccgcgaccccatctactccaacaagcttggcaa

SEQ ID NO: 60054 - DNA, 264 bp, Glycine max
  Clone ID: 700674479H1
gcaccatagcatacaaatatgggcacccatcagccaacagagtctacaataccaggtgattttgtcattggtgttaagttgacaaccataaacaatatgtgtgcatatgggctcaatcctggtatttcaggttctcgtcttttgggcaccattcctcagtccatttcacagcaaactgtttggaatcaaatggcaacagtgagaacaccattgaattttgattctagcaagcagagcttttgtcaattttctattgaccttctc

SEQ ID NO: 60055 - DNA, 252 bp, Glycine max
  Clone ID: 700674480H1
gtgcctcccattcttaccaagttaggcaaggttataaatccatggcctaatgttgatgctcacagtggagtgctactgaactattatgggctaactgaggtgaactattatactgacctctttggtatatcccagagctttggagtttgccctcagttgctatgggacaaggctctttgaatgccactcgaaaggccggaaagtgtaacactggagaagctcgagcaattggtcgcctaatcatcctgaaat

SEQ ID NO: 60056 - DNA, 266 bp, Glycine max
  Clone ID: 700674481H1
gttcaatatcctagtataccttaataaataatttaagatactatgatgagagcacggttcccattactgttgctgggacttgttttcctggcttcagtttctgtctcatttggcattgcttactgggaaaaagagaaccccaaacacaacaagtgtctccagagttgcaatagcgagagatactcgtacaggaaccaagcatgccacgctcgttgcaacctccttaaggtggagaaagaagaatgtgaagaaggtgaaattccacg

SEQ ID NO: 60057 - DNA, 201 bp, Glycine max
  Clone ID: 700674482H1
ccaatacagatgagggctcaacttcatgtagctggcagccagggattgttttgccatcttctaagatgtcatcaaatccaggtactaattttcttttaagtcagtcatcgaagcagtttgatcatagtcccattgttgtggacctctcgtcaaccggaccaaaaagttcagtcacctgcacttctgggcttacacagcagc

SEQ ID NO: 60058 - DNA, 262 bp, Glycine max
  Clone ID: 700674483H1
caagaaccaaagggctgctgctaagaaggctgctggtggagatggagatgaggaggacgaagattaaattattaatggctactgatatttaggccttgcggttgttattttttttatattatctgtgttggtagacattttagatttttgaaatggtctgacttgttataattttgccatccttgtttcttgttttgaggtaaagctgtgcctgagatatcatggttttgaactgttctttctaaactattcaagttttgtt

SEQ ID NO: 60059 - DNA, 260 bp, Glycine max
  Clone ID: 700674484H1
atgtttgcttcgttaattttctctggagacaacaggctcactgagaaaacaatttttacttgcagagatttggacatcttggttgtctattatacaatagcaactcaatttagaaaatttctaccgcattacattaggtggcatctgtataccttgttgatctacattctcccatcttttctcactgctgaaattacatattagcggaatttgagtaatattcatatttccggcttattttacgacggcagatacaaatt

SEQ ID NO: 60060 - DNA, 246 bp, Glycine max
  Clone ID: 700674485H1
aattctggtgaatgcgtagagaaggtgaatatagagattaacgtgaaaaatgatgggtatgttcaggagctaccatagtgtcgccgccggaggagatcgttgccaccggcggcgtacaccgtcgccgaagatgacggcggcggcgctacggaaatggatcgaggcgtagaacccctccgccgtgtcgctgcaggtcggagaggatctccagctcgcttatacacaccagaacgagtcgccggttca

SEQ ID NO: 60061 - DNA, 259 bp, Glycine max
  Clone ID: 700674486H1
caataatgagatcactgatcatgatgtaaaaccagaaagacaggcaaatataggttatgttgctgtagataatccagatgaaaccaacccaacagtaaaacaggccactaacaaaaagttagcagcatcagcagagtggaatcaacgaaagcaagaagagttcaaccaaattcttaaaaaaatggtcgaaagcaagcctgttttatttaggaagtcccagcccagcagaaaccagaatatttcatttgagcagagagga

SEQ ID NO: 60062 - DNA, 257 bp, Glycine max
  Clone ID: 700674488H1
gttcaatatcctagtataccttaataaataatttaagatactatgatgagagcacggttcccattactgttgctgggacttgttttcctggcttcagtttctgtctcatttggcattgcttactgggaaaaagagaaccccaaacacaacaagtgtctccagagttgcaatagcgagagagactcaaccaagaaccaagcatgccacgctcgttgcaacctccttaaggtggagaaagaagaatgtgaagaaggtga

SEQ ID NO: 60063 - DNA, 255 bp, Glycine max
  Clone ID: 700674490H1
agccgattcggctcgaggtgaagagcgaagagaatggctcccacgggtttaatctttacggctgtgttatgcttctcagcactgtcactgagtcgttgtcttgcggaggataatggacttgttatgaacttctacaaggaatcatgccctcaggctgaagacatcatcaaagaacaagtcaagcttctctacaagcgccaacaaaacactgcttactcctggctcagaaacatcttccatgactgtgctgttcag

SEQ ID NO: 60064 - DNA, 241 bp, Glycine max
  Clone ID: 700674493H1
atatcccacattcagcttggaagcttaattgctgggacagtgagaaaactttgccaaataattgttctgcagaattgctctcttgcaaattggatactgttactggccaatattatcctgagtgggctccaattaattgtcgagtacatcgacaaacaattcacatcactgaaggaaattatgtcagagagcaagatgtcagcattgaatatgatgcatgtacaattccaaatgattgtgg

SEQ ID NO: 60065 - DNA, 262 bp, Glycine max
  Clone ID: 700674494H1
acaaaattgctgaatcatggtgatcaaatactagatgaagccaacaaagctttcctgggctgtaaagtcaaattagcaatcaaagtatctggaattcactggtggtacaaagttgaaaatcatgctgcagagcttactgctggatattacaaccttaatgatagagacggataccgccccattgcaaggatgctgtctcgccatcatgccattttgaactttacatgtcttgagatgagggactcagagcaaccctcagatg

SEQ ID NO: 60066 - DNA, 272 bp, Glycine max
  Clone ID: 700674501H1
tcaatatcctagtacaccgtattaaagaatttaagatatactatgatgagagcgcggttcccattactgttgctgggagttgttttcctggcatcagtttctgtctcatttggcattgcgtattgggaaaagcagaaccccagtcacaacaagtgcctccgaagttgcaatagcgagtaagactcctacaggaaccaagcatgccacgctcgttgcaacctccttaaggtggaggaagaagaagaatgcgaagaaggtcaaatttcacgacc

SEQ ID NO: 60067 - DNA, 191 bp, Glycine max
  Clone ID: 700674502H1
ctcggtatgcggctcgatgttcaatatcctagtacaccgtattaaagaattttcgatatactatgatgagagcgcggttcccattactgttgctgggagttgttttcctggcatcagtttctgtctcatttggcattgcgtattgggaaaagcagaaccccagtcacaacaagtgcctccgaagttgcaat

SEQ ID NO: 60068 - DNA, 88 bp, Glycine max
  Clone ID: 700674503H1
cccaaatttgctgctctcaacagcatgaaaaatttcggttaaggatgttcgtttctctcgcgacaaccttttccccggcgtctactcc

SEQ ID NO: 60069 - DNA, 255 bp, Glycine max
  Clone ID: 700674504H1
acagaaggaggaacacgaatggcatcgcaaggaggaaaaacacggaggaaagggaagtgaagaggaacaagatgaacgtgaacacccacgcccacaccaacctcatcaaaaggaagaggaaaagcacgaatggcaacacaagcaggaaaagcaccaaggaaaggaccagtgaagaagaagaagacagaccaagacgaggatgaggagcacgacaaagagagccaagaaagtgaaggttctgagtcctcaagagaa

SEQ ID NO: 60070 - DNA, 260 bp, Glycine max
  Clone ID: 700674505H1
ccacgacgaacctgcgcatctctctctctctcgcgcgcgccgcttttctctcagccagccctgcaggtactcctccgtctgctctcagccccaaacggctcttcttgttttctctgctcccaagggttttgcataatttagctctttttctccgcccacaatgggtaaagctaaaaagggaccaaagtttgctgttatgaagaagattgtcacttccaaagcaatcaaaagctacaaagaagaggttttgaacccagaaa

SEQ ID NO: 60071 - DNA, 257 bp, Glycine max
  Clone ID: 700674506H1
caagaaagccatttaatgttccagatagcatacttagagtgtgttgattttgatgctttagaaggtgctttaaatatgaagtttaaagacaggggactgctggtagaatccataactcatgcctccaggccatcttcaggagtatcctgttatcagcggttggcgtttgttggtgatgctgtcttggatcatcttattaccaggcacttgtttttcacttacacaaatctgccaccgggacgtctgactgaccttcg

SEQ ID NO: 60072 - DNA, 188 bp, Glycine max
  Clone ID: 700674507H1
gcgaaattgcgatttcatgtcatagagaggaaaagaggagaggcggggcggagagagacgaatggcagatcagagcgagcattcgaaaacggcgttgcctccggagggccaggaccgtcccgttcgggtatacgcggatggcatctacgatctcttccactttggccacgcccgctcccttgagcaag

SEQ ID NO: 60073 - DNA, 257 bp, Glycine max
  Clone ID: 700674508H1
cattgataaggttccagaatgcagcacgcttcgagttcctaagatttatacgattttcggtgttgttgggatgttgaagctcttggctggatcatatctgctggttataactgagcgtgaatctgttggatcttactcggggcatccaattttcaaaatttctaaattgaaggtttttccatgcgacaattctcttaaaaatacccctcctgaaaagaagaaaatagagatggaattttcaggtctgcttaatgttg

SEQ ID NO: 60074 - DNA, 258 bp, Glycine max
  Clone ID: 700674509H1
ctcctccttacgtttaccactctcctcctccaccccctaagaagccctacaagtacccttcacccccaccaccagttcaccctccctacattccacacccagtttaccactctcctccaccaccaccttacaagaagccttacatctatgcatcacctccccctccttaccactattagcatacctcttatcgatatgaagaatatgtgcaacgaataaaagaaagcgatggcaagcgcttcgcgatgcacgatagag

SEQ ID NO: 60075 - DNA, 256 bp, Glycine max
  Clone ID: 700674510H1
ctagagctaatacgtgcaacaaaccccgacttctggaagggatgcatttattagataaaaggtcaacacaggctctgcctgttgctttgatgattcatgataactcgtcggatcgcacggcctttgtgccggcgacgcatcattcaaatttctgccctatcaactttcgatggtaggatagtggcctgccatggtggtgacgggtgacggcgaattagggttcgattccggagagggagcctgagaaacggctacc

SEQ ID NO: 60076 - DNA, 252 bp, Glycine max
  Clone ID: 700674511H1
agtgtcccttcagaagatatttcaacagcatcttttgctttgaatggtcccaattactgggaagccagtgcctccaacaacagcaatggaagcaacaacacaagtgatggcagcagagagttgacaactacaagtagcaagaacagtgtactctcttcttgaggattgacagatgaaacaaagtggtctgagtacctccaaaacccactgctaatgctggcagcgcctgaatcactgtgcaaccaacttagg

SEQ ID NO: 60077 - DNA, 255 bp, Glycine max
  Clone ID: 700674512H1
gccctctgactgtggtgcaatctggcaacgagctctctgaggggttaccgataaagattgcatctcgatcagcaggagtcgctttcatcacccaaggccagcttttccagagcattcagttcgacgtcgttccatccacactcagaccagggtgtcccccaagtccaattccttctaagtgggacccaccttccaagtgcactatcgttgagggtctaccagaaagaggactcgctgttaagcttgttggttacc

SEQ ID NO: 60078 - DNA, 256 bp, Glycine max
  Clone ID: 700674513H1
ctgtctctctgtgacaaacacaaacacaatcaatggcgaacgtcacagcggcacccccgcggtcgcaccgaagcccgcgtgggtcctcccgtaccgaaccgagaatctgcgcgaggtctacactctgtcccgaaaactacgtcagggtcaattcggaaccacgttcctctgcacgcacaagggcccggggcgcacctacgcctgcaagtcaatcccgaagcggaagctgctctgcaatgaggactacgacgacgtg

SEQ ID NO: 60079 - DNA, 260 bp, Glycine max
  Clone ID: 700674514H1
atccactctctcacacactctcttattgtctctccatcatggctcacattctcccttgcctcctcctcaccctcctcgccgccaccgcctccgcccacaatttcaccgacattctcgccgccaaccccgactacagcgacttcaacggcttcctctcccaaaccggcctcgccggcgaaatcaacacccgccagaccatcaccgtcctcgtcctcaacaacgccgccctctccgccgtggccgcaaaacaccccctctcc

SEQ ID NO: 60080 - DNA, 252 bp, Glycine max
  Clone ID: 700674516H1
agcgttcaccaagagttgattattatttgaacatcctctctctctctctctcaacaccgattccagactattccgaacggcatggaccatcgccgttcagatccagagaattgacttgatggggggtaacaattctaaggaggataataacacttggaggcagaattcatctgtgcgttcaagttcctctgtgtcttcgtagggttcatatcctgacccccaatcaagttatgatcacgggggttacgcgta

SEQ ID NO: 60081 - DNA, 269 bp, Glycine max
  Clone ID: 700674517H1
gaaaagctttctagctggtcataatatcaccattactgatggtattgacaaaactagtgcaactttgcaatttagaaagttagcagattgtgattttctcaagagaaactttaagcagatgtctaatgttttatgggtggctcctgaggacaaggcgagtttatggtcacaactcgttatgtttcgtgcaataatctggaaatgcaagaagcttatcttgtcaatctcgtaaatgtgttacgagaattgtatttgcacagtccagagaa

SEQ ID NO: 60082 - DNA, 204 bp, Glycine max
  Clone ID: 700674518H1
aaaagaggttgtgcctcccattcttacgcaattaggcaaggttaaaaatccatggcctaatgttgatgctcacagtggagtgctactgaactattatggtctaactgaggaaaactattatactgttctcttcggtgtatcaaggagctttggagttggccctcagttgatatgggacagggctcttggaatgccactcgaaag

SEQ ID NO: 60083 - DNA, 258 bp, Glycine max
  Clone ID: 700674519H1
gccgacaagtggttagaatgcctatcaaaaatttgtgcctttcataatttgccacttcccactgacgatgaaaggcttccagtcggtacgggtagcaatcctgtttatttagtgggaaactctgttgttaagatttttgttgaaggaggactggaagcttcactttatggttttgggacagagctagagtttcatagtctgttgcatgaagtcaactcccctctcagtaaacacattcctgaggttttggccagtgga

SEQ ID NO: 60084 - DNA, 238 bp, Glycine max
  Clone ID: 700674520H1
tggaagacgaactccttaacctcctcaccaaaaaacccgtgccagtttgctacgatggcttcgaaccctccggacgaatgcacattgctcagggtgttatgaagacaatcaatgtgaacaagctaacttctgccggttgcatcgtcaaaatatggattgctgattggtttgccaagctcaacaacaagatgggcggagatttgcagcaaattgagaccgtgggccgttacttgatcga

SEQ ID NO: 60085 - DNA, 146 bp, Glycine max
  Clone ID: 700674521H1
gtataccttaataaataatttaagatactatgatgagagcacggttcccattactgttgctgggacttgttttcctggcttcagtttctgtctcatttggcattgcttactgggaaaaagagaaccccaaacacaacaagtgtctc

SEQ ID NO: 60086 - DNA, 256 bp, Glycine max
  Clone ID: 700674522H1
cagcgatcgaagtttcacatcagccttatccagtttagggtttcggttccttaccctacctttgacgtatcgaaaccttaaatttgggattaggtctgagcaatctggttggtagaacctttggtcttagagcgtcatgttgtatgtctggattagacgatcaaattcctactgccttcgatccttttgctgttgcaaatgctgatgactcgggtgctgggtcaaaggagtatgtgcatattcgcgttcagcagcg

SEQ ID NO: 60087 - DNA, 255 bp, Glycine max
  Clone ID: 700674523H1
attctactcactcacacacagacacactctctgtccgtgggtccgtttcgtgaacccttccttgcatttctctcgggtgttctatttctgggtctctatgaggcagcagcagaacagactcagactcacaagagtacttacattgtacacgtggcgaaatctgagatgcccgagagcttcgagcaccacgctgtatggtatgagtcgtccctgaagaccgtgtctgactcggcggagatgatttacacctacgac

SEQ ID NO: 60088 - DNA, 250 bp, Glycine max
  Clone ID: 700674524H1
tccattcccaattcccaatcgtgttgggtggccatggattctctactggcgaactatgcctcttcagatgaagaagaagatcaacagccatccccaccaaaaacgacgacgttttcctcccttcctcaacccaaactttctctgtttcaatcccttcctcaacccaaatcttctctgtgtcaatcccttcctccacccgaacaaccttccaccgaaagctcttccctccctaaccctaaccctaaccctg

SEQ ID NO: 60089 - DNA, 252 bp, Glycine max
  Clone ID: 700674526H1
aaactttaagcagatgtctaatgttttatgggtggctcctgaggacaaggcgagtttatggtcacaacttcattatgtttcgtgcaataatctggaaatgcaagaagcttatcttgtcaatctcgtaaatgtgttacgagaattgtatttgcacagtccagaggaagctcgccaattgagaaggaaagctctctctcgtagtgaatggctgcaacagatgatagtgcctcaccatagcacagatggaagagt

SEQ ID NO: 60090 - DNA, 136 bp, Glycine max
  Clone ID: 700674527H1
ggtgtcccgtcagaagatatttcatcagcatcttttgctttgaatggtcccaattactgggaagccagtgcctccaacaacagcaatggacgctacaacacaagtgatggcagcagagcgttgacaactacaagta

SEQ ID NO: 60091 - DNA, 99 bp, Glycine max
  Clone ID: 700674529H1
taaaattcttccaccaagttatgggttgccttgtgttgcttcttttctccctcttaggtctctcttctagttccagcatatcaactcatcgttccatat

SEQ ID NO: 60092 - DNA, 133 bp, Glycine max
  Clone ID: 700674530H1
gtagcattcttgcgcactcagttattctctctctctctctagagcgtcgtcgtttagttagggcagaaaaccccttttcggatcggtggagcgaacctcgccggcgagacccccgaggctgttcaatcggcga

SEQ ID NO: 60093 - DNA, 104 bp, Glycine max
  Clone ID: 700674533H1
gatctatgggcaaattttttgacagagggcaattttagagcaagtgttgatttgcagcgcacgcatcgcatttaaggtatgattacaatggtggccacagttgg

SEQ ID NO: 60094 - DNA, 255 bp, Glycine max
  Clone ID: 700674536H1
caaaaccctgaagaaagacacagccattgtttacttttcattgattgagccaaagctttgtattttctgcgataattttccattgggtggaagtaagtctcaacctttattcgaaagagcaaggatctgagttgagttgagtgatcatgtgtggtggtgcgattatctccgacttcataccggcaggtcccgtcagcggggcgcggcgcgtgaccgccgacatcctgtggccgagtttgaggcagcgcttctcga

SEQ ID NO: 60095 - DNA, 272 bp, Glycine max
  Clone ID: 700674537H1
gtacgtcagctcggatctcgctcagtcgaccgaatcggctcgagatttcccttgaaaaggaagcgttaagcgttttccctctgcattaatttgtatctgcagtctgcaacaacttcttcttcagtgcttcacaccaatcatgtaccgctttgcaacctccctcgcctccaaagctagaattgctaggagcagcactcaacagattggaagtagggtcagttggaacaggcattatgctgccaaagacagtaagtttagtgtggcggcccggg

SEQ ID NO: 60096 - DNA, 218 bp, Glycine max
  Clone ID: 700674538H1
agaggtgggagatggagaagccacaaaacggagcagaaaaggaagaaaccacggcctctttctgcggttacgattctcttcaccgtcttctcaaggataatcttaacccccatcacttccaggaagtcagccgtttgcttactgggcttaattgtggaacagcacttgaagcagtttctctcccagaatctgcaacttccctctctgcggaccctggt

SEQ ID NO: 60097 - DNA, 172 bp, Glycine max
  Clone ID: 700674539H1
cggctcgagaagatttgaaattttgataaaccgcgatcacaggttgccgcaccttagaaccggaaatcaaagcaatcgttacttgatttcaagaatttctcaattgcttcctacttctttgtgtacgatttcttaagggatagaaaatcactctctgtgctggccacagatt

SEQ ID NO: 60098 - DNA, 250 bp, Glycine max
  Clone ID: 700674541H1
ctctttcgttctctctctttcactcgcgtcttcgagtttcacagcgaagtcgtaggagggtttcataagatggagaacatgcagagcttctggcaattgggcgctgaactccgtggacactcaaaagcatcggaggatcacaaatggttaatggttgcttcgaaattggcggaacagacaagattgaagggggagcgtgtgaacaaccttgatctttcaaagggccccattgaaacaaggtcaagggata

SEQ ID NO: 60099 - DNA, 252 bp, Glycine max
  Clone ID: 700674542H1
cgaacaacaagaaccacgtggaagaggatgtcagactagaaatggggttgaggaaaatatttgcaccatgaagcttcacgcgaacattgctcgcccttcacgtgctgacttctacaacccaaaagctggtcgcattagcaccctcaacagtctcaccctcccagccctccgccaattcggactcagtgcccaatatgttgtcctctacaggaatggaatttactctccacattggaacttgaacgcgaacag

SEQ ID NO: 60100 - DNA, 113 bp, Glycine max
  Clone ID: 700674544H1
tcgagcgaatcggctcgagatttcccttgaaaaggaagcgtgaagcgttttccctctgcattaatttgtatctgcagtctgcaacaacttcttcttcagtggttcacaccaat

SEQ ID NO: 60101 - DNA, 256 bp, Glycine max
  Clone ID: 700674545H1
aaagcgcaaaaattggagctgcttttgactgctggcattggttctgatcacgttgatctcaaagctgcagctgctgctggtttaactgtggcagaggtcacgggaagcaatgtcgtgtcggttgcggaggatgaactcctgagaatcctcattctaatgaggaatttcttgcctgggtaccatcaggctgttaagggtgaatggcatgttgctggcattgcacatagagcttatgatcttgaaggcaagacagtag

SEQ ID NO: 60102 - DNA, 94 bp, Glycine max
  Clone ID: 700674547H1
gttcaatatcctagtacaccgtatgcaagcatttaagagatactatgatgagagcgcggttcccattactgttgctcggagttgttttcctggc

SEQ ID NO: 60103 - DNA, 59 bp, Glycine max
  Clone ID: 700674548H1
ctacttcaatatcctagtataccttaataaatcacttaagatactatgatgcgaacacg

SEQ ID NO: 60104 - DNA, 148 bp, Glycine max
  Clone ID: 700674549H1
cacaggttgccgcaccttagaaccggtgacaaaagcaatcgttacttgatttcaagaatctctcaatttctacctacttctttgtgtacgatttcttaagggcaagaaaatcactctctgtgctggccacagacttcgtgaatcattt

SEQ ID NO: 60105 - DNA, 255 bp, Glycine max
  Clone ID: 700674550H1
tgcaccatttgttaagtctgaacccattcccgagactaacgatgaacctgttaaagtggtagttggggccagtcttgaggacattgttttcaaatctgggaagaatgttctgctggagttttatgctccctggtatggtcattgcaaacagttggctccaatattagatgaagttgctatctcatatcaacatgaagctgatgttgttattgcaaaactggatgcaactgccaacgatatcccaagtgaaacctt

SEQ ID NO: 60106 - DNA, 258 bp, Glycine max
  Clone ID: 700674551H1
gtctaagaatgttgaaagaggatgaggatgaggatattgaggacgatgattcggatgagttttctgatgaggatgaagatgaatcaggagaaggaggatcaaggggtatggaggaggatgaaaatgatcatgtgatgaggaagagagcaaggaataagggaggtttcggtgtttcatcgatatcatcacagatgatgcagcagttgaatggtgaagtgagtggtgtgttgcaagatggagggaagagtgcttgggaaa

SEQ ID NO: 60107 - DNA, 100 bp, Glycine max
  Clone ID: 700674552H1
cttaattattaacacttccttagttcaatatggggaagccctacactctctctcgttcttccctttgcttgctactcgtgtcgagtgcatgctttgctat

SEQ ID NO: 60108 - DNA, 136 bp, Glycine max
  Clone ID: 700674553H1
tcgttctgttttggcttcttcgctgcaactctctaccttccctctttttccgaatctgaatagaaatggcttcggagactgagacgttcgcttttcaggccgagatcaaccagctcctcagtctaataatcaacac

SEQ ID NO: 60109 - DNA, 252 bp, Glycine max
  Clone ID: 700674554H1
gagcgaagagaatggctcccaagggtttaatcttgttggctgtgttatgcttctcagcactgtcactgagtcgttgtcttgcggaggataatggacttgttatgaacttctacaaggaatcatgccctcaggctgaagacatcatcaaagaacaagtcaagcttctctacaagcgccacaagaacactgctttctcctggctcagaaacatcttccatgactgtgctgttcagagttgtgatgcttcactgt

SEQ ID NO: 60110 - DNA, 245 bp, Glycine max
  Clone ID: 700674556H1
acctgccttcagccaccgctcagttcgtgctcgacactgatgatgatcctcttcaaaacggtggcacatactatatgttgccagttatgagaggaaagggcggtagaatagacgtagattcaactggaaaagaaatatgccctctcactgttgtgcaatcacccaatgagctcgataaggggattggactagtctttacatctccattacatgccctttttatcgccgaagctatcctttgagca

SEQ ID NO: 60111 - DNA, 224 bp, Glycine max
  Clone ID: 700674558H1
gtaagactggatagaataaatcttataattggttctggtgggaaaaaagtgaagagcattattgaggaatctggagtagacactattgatacagcagatgatggcactgtgaaaatatttgcaaaagagttacctagtttcgagaagtctaaagctattattaatagtttgacgatggttccaactatcggtgatatctataggcactgtgaaatcaatcaata

SEQ ID NO: 60112 - DNA, 155 bp, Glycine max
  Clone ID: 700674559H1
cataaataaagcttaaaaatgatctctcttataagggtagtgctacacattaaaaccttagaagagagatcatttttaaggttttaatgtgtagcactacccttataaattttttagttcccctgctcttgttcttatgaattcagatgcaataa

SEQ ID NO: 60113 - DNA, 234 bp, Glycine max
  Clone ID: 700674560H1
aagagctcctgttcaccttgtgtggtcactggtgagaagatttgatcaacctcagaaatataaaccatttgttagcaggtgtatcatgcaaggggatcttggcatcggaagtgttcgagaagtgaatgttaaatataggcttcctgccacaacaagtactgagaggttggaacaactggatgatgaggaacacattctcggcatcaggattgttggaggtgaccatagctgagg

SEQ ID NO: 60114 - DNA, 137 bp, Glycine max
  Clone ID: 700674561H1
gtcagaggtatagtgttctacgagtgcggaacttgtgagacatggcttccaaggctgcacttctcttgtgtgtaaatgttctctttggcactgtggtgagttccacagatgtgccatgtactccaccccccaaaact

SEQ ID NO: 60115 - DNA, 157 bp, Glycine max
  Clone ID: 700674562H1
acgatttgacattttaatacaccgcgatcacaggttgccgcaccttaaaaccggaaacaaaagcaatcgttacttgatttcaagaatttctcaatttcttcctacttctctgtgtactatttcttaaagcacagacaatcactctctgtgctggtca

SEQ ID NO: 60116 - DNA, 65 bp, Glycine max
  Clone ID: 700674563H1
gccagtgttgccctctctcgcggcaccctcaaccgcaacgcccttcgcagacctgcctaaacgaa

SEQ ID NO: 60117 - DNA, 163 bp, Glycine max
  Clone ID: 700674565H1
acctgccttcagccaccgctcagttcgtgctcgacactgatgatgatcctcttcaaaacggtggcacatactatatgttgccagttatgagaggaaagggcggtggaatagaagtcgattcaactggaaaagaaatatgccctctcactgttgtgcaatcacc

SEQ ID NO: 60118 - DNA, 235 bp, Glycine max
  Clone ID: 700674567H1
gagattattgacaagtctgtggttaaagaagcaccagtaatttcatctgcagaacaatcatcatctggttcaaccaatagatttttggatgaaacctatgacgatgatgctgatgattggttgaaagaagaggatacttctgaaatggttggtcccagtggaacttcagttcacaccgggaatgacgaggatgtgtcattcagtgatcttgaggaggatgatggtgatgtacatg

SEQ ID NO: 60119 - DNA, 253 bp, Glycine max
  Clone ID: 700674568H1
ttcttcagttcggtggagggagggagccgtagcagcggaagctctagcttgggtagcgaatcacaatggcgagaggattaaagaagcatctgaagaggcttaatgccccaaagcattggatgcttgacaaactgggtggtgcatatgctcctaagccctcatctggaccacacaaatcgagggaatgcctgccactcatactcattttgcgaaaccggctgaagtatgctctaacataccgtgcagtcattgc

SEQ ID NO: 60120 - DNA, 250 bp, Glycine max
  Clone ID: 700674569H1
agctgccttcagccaccgctcagttcgtgctcgacactgatgatgatcctcttcaaaacggtggcacatactatatgttgccagttatgagaggaaagggcggtggaatagaagtagattcaactggaaaagaaatatgccctctcactattgtagaatcacccaatgagctcgataaggggattggactagtctttacatctccatgtaataccctttttatcgccgaagctatccgttgagcataagt

SEQ ID NO: 60121 - DNA, 240 bp, Glycine max
  Clone ID: 700674570H1
caaacacatacattgtagtatcacttttgtctcggaatttgttcttttgagttatggcaagcttaaaggttgcatgtgtggttttgatgtgcatggctgtgatgagtgcaccaatgatggtgcaagccgtgtcatgcaatgatgtttctgtgaacctagcaccgtgcctatcttacctgatgcagggtggagatgttccagaatcgtgctgtagcggcatgaggaacattctgggttctg

SEQ ID NO: 60122 - DNA, 69 bp, Glycine max
  Clone ID: 700674571H1
aacgtttcgaaatgcattttttttttctaacatacttaaagagcgcgacccagccagagagcgcgcggg

SEQ ID NO: 60123 - DNA, 247 bp, Glycine max
  Clone ID: 700674572H1
ggaagggagcaattggatttgcatttccgggatgtcctgagacgtttgagaagccacaacagcaatcaagcagaagaggctcaaggtcgcagcagcaactacaagacagtcaccagaagattcgtcacttcaatgaaggacgacgtactagatgattcctgcctcgtgattccttactgagacctataagtcactggcgcatgaaccagtgtattgccatccagtacttctatgacaccttccaact

SEQ ID NO: 60124 - DNA, 147 bp, Glycine max
  Clone ID: 700674573H1
ctagttctagatcgcgagcggccgctcggatctagaacctcgacccgctttataatgttgtcggtgaaactttctggtcatctacttggtgcaacaaccctgcatttgaagggaaacaacttgaggggacaaggataacccttgtaa

SEQ ID NO: 60125 - DNA, 249 bp, Glycine max
  Clone ID: 700674574H1
aacctgacagcctccaaatccaatggcttcagagaagaaactttcgaacccaatgagggagataaaagtgcagaagctcgtcctcaatatctctgttggcgagagtggagatcgtctcaccagagccgccaaggtgttggaacaacgtagtggccaaaccccagtgttttccaaagcacggtacactgttcgttcctttgggattagaagaaatgagaagattgcatgctatgtcactgtcagaggtga

SEQ ID NO: 60126 - DNA, 247 bp, Glycine max
  Clone ID: 700674575H1
agcaagttcaacgagtgccaactcaacaacctcaacgcgttggaacccgaccaccgcgttgagtccgaaggtggtcttattgaaacatggaactctcaacaccctgagctgcaatgcgccggtgtcactgtttccaaacgcaccctcaaccgcaacggcctccacttgccatcttactcaccttatccccaaatgatcattgtcgttcaagggacaggagcaattggatttgcatttccgggatgtc

SEQ ID NO: 60127 - DNA, 251 bp, Glycine max
  Clone ID: 700674576H1
gagaaccccaaacacaacaagtgtctccagagttgcaatagcgagagagactcgtacaggaaccaagcatgccacgctcgttgcaacctccttaaggtggagaaagaagaatgtgaaccaggtgaaattccacgaccacgaccacgaccacaacacccggagagggaacctcagcaacccggtgagaaggaggaagacgaagatgagcaaccacgtccaatcccattcccacgcccacaacctcgtcaaga

SEQ ID NO: 60128 - DNA, 254 bp, Glycine max
  Clone ID: 700674577H1
cggctcgagttcttccaccaagttatgggtttccttgtgttgcttcttttctccctcttagggctctcttctagttccagcatatcaactcatcgttccatattggaccttgacctaaccaagtttaccacacagaaacaggtgtcttcactgttccaactatggaagagtgagcatggacgtgtctaccataaccacgaagaagaggcaaagagacttgagattttcaagaataacttgaactatatcaggga

SEQ ID NO: 60129 - DNA, 246 bp, Glycine max
  Clone ID: 700674578H1
ggagcaccgccatatccggtcgcgtgtttcctcgttcggggacattgatgattctagttgttccgccactggctgctgttgtcgtgttccgcttctgggatcaccgcccagtgcctaaaggaacaatcttttggcgctaaattgtggtggggttcctctatttttctctttttttctccaatatgtatagatctgggccaggcatggcttggaacgtgtttaggttctgcactgccctgagaggat

SEQ ID NO: 60130 - DNA, 183 bp, Glycine max
  Clone ID: 700674579H1
aaactcgagtggacaccatggtatgcaaagatcagctaggttatatgattcattgatagtagatttaccaaaaggacaataagaaccgtttaattacgatggtgaattcaaccttcttcttagtgatttgtggcacaccagttcacatgaacaggaagttggcctctcttccaaacaatataa

SEQ ID NO: 60131 - DNA, 132 bp, Glycine max
  Clone ID: 700674581H1
ctcgagcgattcggctcagggcgaactggctcacagcgctaagaacggtcttgacatacgctgttaggcttttggagagcatcaaggcggagttccctattttgagctacgccgatttctaccagttggctg

SEQ ID NO: 60132 - DNA, 251 bp, Glycine max
  Clone ID: 700674582H1
ggtcatcaaagccagaaaggaaagcatcagcaagaagaagaaaacgaaggaggcagcatattgagtggcttcaccctggaattcttggaacatgcattcagcgtggacaagcagatagcgaaaaacctacaaggagagaacgaaggggaagacaagggagccattgtgacagtgacaggaggtctgagcgtgataaaaccacccacggacgagcagcaacaaagaccccaggaagaggaagaagaagaaga

SEQ ID NO: 60133 - DNA, 252 bp, Glycine max
  Clone ID: 700674583H1
agaaggacgatgaccgcgacgacgaagctgagtattctccctttttgggaattgaaaagggagctgttcttcaggaggccagggtttttaatgacccacaactagatgctaggagatgttcacaggttatcacaaaacttttatatctactgaatcagggagagacatttacaaagaccgaagccacagaagttttcttttctgtaactaagcttttccagtctcgggatcttgggttaaggagaatggtct

SEQ ID NO: 60134 - DNA, 251 bp, Glycine max
  Clone ID: 700674584H1
gtgaaacactagctagggtattgggagctctcgttgtttcggagttagggaccttacgcagccatggccactgctacgaatgccgccgccgccccaccacgccagctctcccagaaggaagctgacatccagatgatgttggccgccgacgtccacctcggcaccaagaactgcgacttccaaatggaacgttacatcttcaagcgccgcaacgacgggatttacattattaaccttgggaagacgtggga

SEQ ID NO: 60135 - DNA, 247 bp, Glycine max
  Clone ID: 700674585H1
cttaaaatttctcaatctaaaattgcacttcccaagaacacagatggaggaaccattctgcgtagtgatctattggcaaattttttgacagagggcaattttagagcaagtgttgatttgcagcgcactcatcgtattaaaggaatgattacaatggtggccacagttggtattcctgagaatacaggtatagcattggcctgtgctatgaatagttcttttagggggcgcgccagttctgatattt

SEQ ID NO: 60136 - DNA, 237 bp, Glycine max
  Clone ID: 700674586H1
gttccctagatctgaatcacaccagtgaggagagattttgttggttaaattggctagttggcattttggctttaaccgataaggctaattcacttgtttgttacaatataggtgtgagctggatcccccttctatcctctggcattggcatgtaccaaatttgggaagcctataagggtttgctggggaagtagaggatctccactaatttgaatggggcattctgcagctgtgtgg

SEQ ID NO: 60137 - DNA, 249 bp, Glycine max
  Clone ID: 700674587H1
ttctagttccagcatatcaactcatcgttccatattggaccttgacctaaccaagtttaccacacagaaacaggtgtcttcactgttccaactatggaagagtgagcatggacgtgtctaccataaccacgaagaagaggcaaagagacttgagattttcaagaataacttgaactatatcagggacatgaatgcaaacagaaaatcaccccattctcatcgtttaggattgaacaagtttgctgacat

SEQ ID NO: 60138 - DNA, 248 bp, Glycine max
  Clone ID: 700674588H1
gtgcatgatagttcagtgtctacaataccaggtgattttgtcattggtgttaagttgacaaccataaacaatatgtgtgcatatgggctcaatcctggtatttcaggttctcgtcttttgggtaccattcctcagtctatttcacagcaaactgtttggcctcaaatggcaacagtgagaacaccattgaattttgattctagcaagcagagcttttgtcaatttgctattgaccttctcggtggagg

SEQ ID NO: 60139 - DNA, 248 bp, Glycine max
  Clone ID: 700674589H1
gtttcgggggaagagatccagcagcaatggtgtacgtcaaggctcagaaatcaaaagcctacttcaagagatatcaagtcaagttcaagagaagaagagagggaaaaaccgattaccgtgccaggattcggttgattaatcaggacaagaacaaatataacactccgaaataccgacgcgtggttcgctttagcaacaaggacattgttgcacaaataatatctgctagcattgccggcgatttagtt

SEQ ID NO: 60140 - DNA, 155 bp, Glycine max
  Clone ID: 700674590H1
cgatggaggaagcggtggacccggcgcggctggtggtagaggcagtggaggagtttctgaagagcaaggtggcgaagtccggggtgacggataagaggtgggcgtgcgggcttgtgatacaggcgctgatggtttcgtcagagtcaagggaacat

SEQ ID NO: 60141 - DNA, 248 bp, Glycine max
  unsure (1)..(248): unsure at all n locations
  Clone ID: 700674591H1
agctgctttgaacattcaataagaaaaggacgcagcaacccccttttggttttgccgaaccacttcttccttgacttcttgcatggttcgggaaatcgcaaaaccctcacagattcanattcatagcctttgtacaatcttaacacccacacaccttttctccctcaatgcttcaattcaagctgcaagccacttccgtgtttcgttcttttcccatacatggacatctcagattcttctcactcatt

SEQ ID NO: 60142 - DNA, 126 bp, Glycine max
  Clone ID: 700674592H1
taaattcaagcccaagcccaagcccaagcccaagcccaacctgggtttaagctcgtcagtttcaaaaacttcgtccgaaccaatcctaagtcggaccgctttcaagtcaaccgcttccacacaaca

SEQ ID NO: 60143 - DNA, 233 bp, Glycine max
  Clone ID: 700674019H1
attctgattcttaaactaacagctctagcactcaacctagttcagctcattcgtgttcctccttgctccacttcagatcagtcccaaaatagctatgagaaatcacattttcttcttattcgttctcattgcacttgcccccactttctctctccacttgcaatctcacgccgctcctgcagggccgttgattaagcatatttcttcactcatcaaatggacaaggtctacct

SEQ ID NO: 60144 - DNA, 96 bp, Glycine max
  Clone ID: 700674020H1
atttaccaccctccgacccagcctatgttaatatctgagtggcgttgtacctttgaatcgccttaataaaatgtcagtcttcaagttttgtcttaa

SEQ ID NO: 60145 - DNA, 215 bp, Glycine max
  Clone ID: 700674021H1
cggctcgagcggctcgaaaggaattacattttgcaaagcattaagctattcagtaagtaacaacgctgaaaactatgtcagtagcaaaattgactttgatatcaattaatttggttgctttagagtggtgatagttatcagttatcacgggctcaaggatctcagaggaaactgatgaaaataaatttattttaattttgagttatacaacaaca

SEQ ID NO: 60146 - DNA, 228 bp, Glycine max
  Clone ID: 700674022H1
ggttgtggaggaggttgaaaaggtgaagaaggaatgggatgaaacatacaagaaaacgcaagagcacattgaggcaatcgcagactacggcaaatcagcaagagcaaaagaggagaataattctcttgccagattgaatggaatcgctcaggatggcttggctctcctttcttccttcctcttcaccctcgatcttctcgctcctcagttgccctctgagccagaggt

SEQ ID NO: 60147 - DNA, 232 bp, Glycine max
  Clone ID: 700674023H1
ctgaaaaggaagatcaagaaaaacccaaaaagattgataccagattgagacaaagaatagatcctcaatacaatgaggttcaggctcagatggaaacaaatttgtttaaattgtctcttgatgatgttgaaactcccaaaggttccatgttggatcttaaaatttctcaatctaaaattgcacttcccaaaaacacagttggaggaaccattctgcgtagtgatctattggc

SEQ ID NO: 60148 - DNA, 112 bp, Glycine max
  Clone ID: 700674024H1
attctagacaacaactactacagaaacatattagacagcaagggtctcttgatagtggatcaccaactagccaatgacaagaggaccaagcgttatgtgaagaaaatggcca

SEQ ID NO: 60149 - DNA, 232 bp, Glycine max
  Clone ID: 700674025H1
ctagttcaatatcctagtataccttaataaataatttaagatactatgatgagagcacggttcccattactgttgctgggacttgttttcctggcttcagtttctgtctcatttggcattgcttactgggaaaaagagaaccccaaacacaacaagtgtctccagagttgcaatagcgagagagactcgtacaggaaccaagcatgccacgctcgttgcaacctccttaagg

SEQ ID NO: 60150 - DNA, 141 bp, Glycine max
  Clone ID: 700674026H1
gtggactgaaatcggtggagaacgcgcacgatgattcggtgtgggcggtcacctgggtacccgcaaccgccaaccgaccaccgctcctcctaaccggttccctcgacgagaccgtcaggctctggcgctccgacgacctcg

SEQ ID NO: 60151 - DNA, 230 bp, Glycine max
  Clone ID: 700674027H1
gattgaacaagtttgctgacatcactcctcaagagttcagcaaaaagtacttgcaagctcccaaggtatagtcgcagcaaatcaaaatggccaacaagaaaatgaagaaggaacaatattcttgtgaccatccacctgcatcatgggattggaggaaaaaaggtgtcatcacccaagtaaagtaccaagggggctgtggaagcggttgggcgttttctgccacgggagcc

SEQ ID NO: 60152 - DNA, 222 bp, Glycine max
  Clone ID: 700674028H1
atagtttattacgatataaagaaagaaatttagcaacgtaatgggttctcttatggcaggatgggactctctgaccttggatcctgaatcagctacaattgagaggaatcgatctctcaccaaagaggaaattaatgctttctggaaaacaaagaaggaggccgagttagaacacctcaaagctctttccaaattatctgagactattcgggtttgactttg

SEQ ID NO: 60153 - DNA, 233 bp, Glycine max
  Clone ID: 700674029H1
gatcatacatagtagtgttggtgggttgcaaagatgcttgggggtcttctccataggggtcataagataaaagggacagtggtgttgatgcgcaagaatgtgttggacgtgaatagcgtaaccagcgttgggggaattattggtcaaggtctcgacttagttggctcaacactcgatactcttactgccttcttgggccgatccgtgtctctccagcttattagtgctaccaa

SEQ ID NO: 60154 - DNA, 233 bp, Glycine max
  Clone ID: 700674030H1
gttcaatatcctagtataccttaataaataatttaagatactatgatgagagcacggttcccattactgttgctgggacttgttttcctggcttcagtttctgtctcatttggcattgcttactgggaaaaagagaaccccaaacacaacaagtgtctccagagttgcaatagcgagagagactcgtacaggaaccaagcatgccacgctcgttgcaacctccttaaggtgga

SEQ ID NO: 60155 - DNA, 238 bp, Glycine max
  Clone ID: 700674031H1
gcgagcgaagacagaggataacttccttcttgggaagtttgagctttctggtttcactccatcgccaaggggagttccacagatcaatgttgggtttgatgttgatgttgatggcaatgtggaagtcactgctagagataggagcacggggctgaagaagaagatcacgatcagcaacaagcatgggaggttgagtcctgaagagatgaggagaatggtgagagatgcagtgaggtat

SEQ ID NO: 60156 - DNA, 149 bp, Glycine max
  Clone ID: 700674032H1
acgcaactgaaaatgaaaaccctaagagatgaagagaactcctatcttgttccctctcttctttcttctttgtgccttcacctcatatctaccttcagccaccgctgatgatgatcatgtgtacgacactgacggcgataagcttgcaa

SEQ ID NO: 60157 - DNA, 240 bp, Glycine max
  Clone ID: 700674033H1
agttacaattcctgattataagcctgctccccgggtgggttatttttcatcaagagggccttcattgattacaagcaatgttctcaagcctgatattgcagccccgggagttaacattctcgctgcatggtttggaaatgacacatcagaggttccaaaaggaagaaagccctcactatatcgcatactctcaggaacttccatggctactccacatgtttcagggcttgcatgcagtga

SEQ ID NO: 60158 - DNA, 81 bp, Glycine max
  Clone ID: 700674034H1
tgcaaataactgtatctaatgagcatctcattaaaaatgctattgcaatagctatatctaatgagcatctcattagatatg

SEQ ID NO: 60159 - DNA, 222 bp, Glycine max
  Clone ID: 700674035H1
ggaatttctgaagcgtaccggatttcattgtgatatcatttgtgtcactggatggactgccaccccaatgcaggatgttcaggttacaattgattggtttatttcctctcaggaatgtgttcccaggacctattgtgttttaaatccacaaaatccttttgtgttaaataggtggatggggaaattgactttcccccagggcatttcccgatatgtaaaaag

SEQ ID NO: 60160 - DNA, 79 bp, Glycine max
  Clone ID: 700674036H1
caacggtccccaggaaatctacatccaacaaggtaagggtatttttggcatgatatacccgggttgtcctagcacattt

SEQ ID NO: 60161 - DNA, 231 bp, Glycine max
  Clone ID: 700674037H1
cttagttccagcacaacaagctcttcatttctcccacactttcatttcttccaccaaaaatgtcaccagatttcacacttttgttcttcccggaactcatgcagtcccctatgatcactttccaagccaccctctgcgtccttctcttcaccctcatgttcacgctgctcttcactcctggtgggcttccttgggcctgggccgggcccagacccatcatccttggccaag

SEQ ID NO: 60162 - DNA, 231 bp, Glycine max
  Clone ID: 700674038H1
gtttcccgggaaaacaccaattggctcttcgattacggcttgatcgacgatattcccgttccggacgccaccttcggcgtcaattcctccgccttcacatggccccctaacgccttgaacgcttcctccaatgtcggcgttgaaattgatggctcgttgggggattctgacagtctcaaagagtctggctcaaagaaaagggttaggtctgagtcatgtgctgcttctggc

SEQ ID NO: 60163 - DNA, 98 bp, Glycine max
  Clone ID: 700674040H1
attgtggttaagagtcccgaaagagcaagagaactaaaaataccaaccatggcaaccatttctgatcaacctagaggggcctactcctatggaacctc

SEQ ID NO: 60164 - DNA, 232 bp, Glycine max
  Clone ID: 700674042H1
ctagaggcctcatacgacaccaaattcgaggagataaacaaggatctgtttggtagagaggaggggcagcaacaaggggaggagaggctgcaagagagtgtgattgtggaaatctcaaagaaacaaattcgggaactgagcaaacatgccaaatctagttcaaggaaaaccatttcttctgaagataaacctttcaacttgagaagccgcgaccccatctattccaacaagc

SEQ ID NO: 60165 - DNA, 225 bp, Glycine max
  Clone ID: 700674043H1
actctccattgtctttgaacactcatcaccatggccaagcttgttctttccctttgtttccttcttttcagttgctgcttcgctctgagagagcaggcacagcaaaatgagtgccagatccaaaagctgaatgccctcaacccggataaccgtatagagtcggaaggtgggttcattgagacctggaaccctaacaacaagccattccagtgtgccggtgttgcc

SEQ ID NO: 60166 - DNA, 233 bp, Glycine max
  Clone ID: 700674044H1
ctcgagccgctccatggtgtatgctcttctggctgacaagaacagaaaatttatctatgttgagatggcctttttcaagcgatggtggagagatcaaagtgaagctgttcaggatgtagttaagaaactcgttagttcgggtcaactagagttcataaatggtgccatggctatgcatgatgaggcagtaacacattacatagacatgattgatcagactgcacttggacatc

SEQ ID NO: 60167 - DNA, 238 bp, Glycine max
  Clone ID: 700674045H1
taaaattcttccaccaagttatgggtttccttgtgttgcttcttttctccctcttaggtctctcttctagttccagcatatcaactcatcgttccatattggaccttgacctaaccaagtttaccacacagaaacaggtgtcttcactgttccaactatggaagagtgagcatggacgtgtctaccataaccacgaagaagaggcaaagagacttgagattttcaagaataacttgaa

SEQ ID NO: 60168 - DNA, 242 bp, Glycine max
  Clone ID: 700674047H1
atacccccaactaacaataattccttcacttgcagaacttagttctctgttgcatcatcatcatcttcattagtgttagccctaaacttcaccttcaaccatgaccacagtgccaccacacagtgtccaagtgcacacaacaacacaccgctacgaagccggcgtcgtcccgccggctcgttttgaggcgccgcgttacgaagccggcatcaaggcgccctcttccatttaccattccgaga

SEQ ID NO: 60169 - DNA, 235 bp, Glycine max
  Clone ID: 700674049H1
ctagtataccttaataaataatttaagatactatgatgagagcacggttcccattactgttgctgggacttgttttcctggcttcagtttctgtctcatttggcattgcttacttggaaaaagagaaccccaaacacaacaagtgtctccagagttgcaatagcgagagagactcgtacaggaaccaagcatgccacgctcgttgcaacctccttaaggtggagaaagaagaatg

SEQ ID NO: 60170 - DNA, 141 bp, Glycine max
  Clone ID: 700674050H1
gttcaatatcctagtacaccgtattaaagaatttaagatatactatgatgagagcgcggttcccattactgtagctgggagttgtcttcctggcatcagtttctgtctcatttggcattgcgtattgggaaaagcagaccc

SEQ ID NO: 60171 - DNA, 232 bp, Glycine max
  Clone ID: 700674051H1
gttgtggtcaacgctacctcaaatctgaatttctttgctattggtattaatgccgagaacaaccagaggaacttcctcgcaggttcgcaagacaatgtgataagccagatacctagtcaagtgcaggagcttgcattccctgggtctgcacaagctgttgagaagctattaaagaaccaaagagaatcctactttgtggatcctcagcctaagaagagggggggggggaata

SEQ ID NO: 60172 - DNA, 229 bp, Glycine max
  Clone ID: 700674052H1
gggagaagtaatcgagcttcagcaatggtgtacgtcaaggctcagaaatcaaaagcctacttcaagagatatcaagtcaagttcaagagaagaagagagggaaaaaccgattaccgtgccaggattcggttgattaatcaggacaagaacaaatataacactccgaaataccgatttgtggttcgctttagcaacaaggacattgttgcacaaataatatctgctagca

SEQ ID NO: 60173 - DNA, 176 bp, Glycine max
  Clone ID: 700674053H1
caagattagtccactacccgtgcttaaggaaatcttccgaactgatggtgaacaggcccttaagtttcctcctcctaaagtaattcaagtgagtaagtctgcatggatgactgatgaagaatttgcaagagaaatgcttgctggtgtaaatccaaacttgattcgttgtcttaagg

SEQ ID NO: 60174 - DNA, 227 bp, Glycine max
  Clone ID: 700674054H1
gttgaaataaatttctgcttgttgacatatatttttcggttttatattctatcctatgatttatggatgttcacctgcagactgagaaaaatgtttttgtggtcttctatgctggtgaaaaagcaaaagccaagattctgaaaatatgtgaagcctttggtgctaatcgttacccttttgctgaggaacttggaaagcaagctcaaatgattacagaggtttctgga

SEQ ID NO: 60175 - DNA, 174 bp, Glycine max
  Clone ID: 700674058H1
gttgtgtgaagagatggagtatgatttgtcaaacagaaatgtcacctggttgtggctttttcaagaggaaacatgttgctgtgcccgaattaccttgtcctgaaattgaggtttatgttgctggttgcttctcaggaacacctattatcttaactaagacactgcaactcaatt

SEQ ID NO: 60176 - DNA, 105 bp, Glycine max
  Clone ID: 700674059H1
caagatctctctccatcttccccgtcctcttctacctacttctcctttggtgcaacttgccttgtacaacaggacttccatatcctttgtgttgtgttgcccact

SEQ ID NO: 60177 - DNA, 226 bp, Glycine max
  Clone ID: 700674060H1
ttgagaagctattaaagaaccaaagagaatcctactttgtggatgctcagcctaagaagaaagaggaggggaataagggaagaaagggtcctttgtcttcaattttgagggctttttactgaataagtatgtactaaaatgtatgctgtaatagctcatagtgagcgaggaaagtatcgggctatgtaactatgactagagcttcaactatgaataaataagtcga

SEQ ID NO: 60178 - DNA, 238 bp, Glycine max
  Clone ID: 700674061H1
aattcaatatcctagtataccttaataaataatttaagatactatgatgagagcacggttcccattactgttgctgggacttgttttcctggcttcagtttctgtctcatttggcattgcttactgggaaaaagagaaccccaaacacaacaagtgtctccagagttgcaatagcgagagagactcgtataggaaccaagtatgccacgctcgttgcaacctccttaaggtgaagaaa

SEQ ID NO: 60179 - DNA, 237 bp, Glycine max
  Clone ID: 700674062H1
aagaaatgaagagtactatcttctttgctctctttctagtttgtgccttcaccatctcatacctgccttcagccaccgctcagttcgtgctcgacactgatgatgatcctcttcaaaacggtggcacatactatatgttgccagttatgagaggaaagggcggtggaatagaagtagattcaactggaaaagaaatatgccctctcactgttgtgcaatcacccaatgagctcgata

SEQ ID NO: 60180 - DNA, 239 bp, Glycine max
  Clone ID: 700674063H1
gttgagccagttgtgcaagctcaaagtgctgaagtttactttgacttcttccctgtggaggttgatagtcaagagggagttgctcacattggtgaattgaaatctggtgtctatgttccactgcctacaaaaactaatttggtggaaactcccaaggaatggcaactggatctaccttgtgataaaattcctagtgtcttgactacaactgatgagagattggtaggcacagaacatga

SEQ ID NO: 60181 - DNA, 233 bp, Glycine max
  Clone ID: 700674065H1
atgaagacaagggacaagcttagttgtcaagttggaatcaacccatactccatggaatggactggtttggccaatagattactgagtaagggcaacgatattctgtgttgcgattatgctagttttgatggtttgattaccaagcaagttatgagcaaaatggcagaaatgataaacagtctttgtggtggtgatgcaaaattgatgcgtgaaaggacacacctgctgttggc

SEQ ID NO: 60182 - DNA, 178 bp, Glycine max
  Clone ID: 700674066H1
gcgtgaacaagaccaggaccaggacgaggacgaagatgaagatgaagatcaacctcgcaagagccgcgaatggagatcgaaaaagacacaacccagaagatctagacaagaagaaccacgtgaaagaggatgcgagacaagaaacggggttgaggaaaatatctgcaccttgaagctt

SEQ ID NO: 60183 - DNA, 224 bp, Glycine max
  Clone ID: 700674068H1
ccaaacccaacacccttcttctcccccaccatgctgacgctgattacctcatcgttatccttaacgggactgccattcttaccttggtgaacaacgacgaccgagactcttacaaccttcaatctggcgatgccctaagagtccctgcaggaaccacatactatgtggttaaccctgacaacgacgagaatctcagaatgataacactcgccatacccgttaac

SEQ ID NO: 60184 - DNA, 227 bp, Glycine max
  Clone ID: 700674069H1
caacggtccccaggaaatctacatccaacaaggtaagggtatttttggcatgatatacccgggttgtcctagcacatttgaagagcctcaacaacctcaacaaagaggacaaagcagcagaccacaagaccgtcaccagaagatctataacttcagagagggtgatttgatcgcagtgcctactggtgttgcatggtggatgtacaacattgaagaccctcctgttg

SEQ ID NO: 60185 - DNA, 223 bp, Glycine max
  Clone ID: 700674070H1
gaaggccaagaaggaaagaggttgcacggcgaaagagcgcatcagcaaaatgcctccgtgcgccgccggcaaacgcagctccatatatcgcggcgtcacgaggcataggtggactggtcgttatgaagcgcatctttgggataagagtacgtggaaccaaaatcagaataagaagggaaagcaagtttatttgggggcgtatgatgacgaggaagcggcggcc

SEQ ID NO: 60186 - DNA, 225 bp, Glycine max
  Clone ID: 700674071H1
caaaagaacaacatggacattgatctttctcctcagttgcccaagaaagtttacggtgccaatggtggctcctactacgcatggtccccctccgaccttcccatgctccaccaaggcaacattggtgccgataagcttgctctaaacaaaaacgcctttgctcttcctcgttactctgactcttccaaagtcgcttatgttcttcaaggtagtggagtggctgaa

SEQ ID NO: 60187 - DNA, 226 bp, Glycine max
  Clone ID: 700674072H1
ggtttgattaccaagcaagttatgagcaagatggcagaaatgataaacagtctttgtggtggtgatgaaaaattgatgcgtgaaaggaagcacctgctgttggcttgttgttcaaggatggcaatttgtaagaaagatgtttggagagttgaatgtggaatccccttctggatttccgctcacagttatttacaatagcatttttaatgagatgctcattagatat

SEQ ID NO: 60188 - DNA, 227 bp, Glycine max
  Clone ID: 700674074H1
gtttcactgtttcttgctgcttgtgctctatgtgggtcgcgtgaagggaacttcatcagcacaggatggatttccagggattcctaaacgacttgcaggattgggaactttctagaaaggataaaacacgagcacaaaaggaaaatcttactggatccgtgggtgtggagaaggcatcaaaaggagataccatttcttttgatcgtgcaacaaattctccaggacag

SEQ ID NO: 60189 - DNA, 66 bp, Glycine max
  Clone ID: 700674075H1
cctcaagacctcttctctgtcctgcaacaactcaaaaagactatggttctgttccacacaacatac

SEQ ID NO: 60190 - DNA, 232 bp, Glycine max
  Clone ID: 700674076H1
cgaacaacaagaaccacgtggaagaggatgtcagactagaaatggggttgaggaaaatatttgcaccatgaagcttcacgagaacattgctcgcccttcacgtgctgacttctacaacccaaaagctggtcgcattagcaccctcaacagtctcaccctcccagccctccgccaattcggactcagtgcccaatatgttgtcctctacaggaatggaatttactctccacat

SEQ ID NO: 60191 - DNA, 141 bp, Glycine max
  Clone ID: 700674077H1
aaccttcaaatatgatataattggtgctggttcacattcttcaggagattttcctgaaaaggaagatcaagaaaaacccaaaaagattgataccagattgagacaaagaatagatcctcaatacaatgaggttcaggctca

SEQ ID NO: 60192 - DNA, 241 bp, Glycine max
  Clone ID: 700674079H1
gcaatgcccactggcttcactctcatctccgcggcttcacttttccttttgcttcttgattgttgctctgggagttttgttggggtctgctatggaagaagtgctgatgacctccctacaccggacaaggtggcacagttggttcaacttcataaaatcaaatatgtcaggatttatgattctaatttacaggttctgaaggcctttgcaaacactggaattgagcttatgattggggttc

SEQ ID NO: 60193 - DNA, 84 bp, Glycine max
  Clone ID: 700674080H1
atctccaaaaaccttcatctcagaaccctagccgtgtaacccccttcatccctagccgcgtaacccccttcatctcaggaaaag

SEQ ID NO: 60194 - DNA, 234 bp, Glycine max
  Clone ID: 700674081H1
ctctcttctctgcaaatgcttcattccaagatggttaggactctgtaggctgataaagacaacactcataccgttggaaagaaggatgctgctggccatgttgcttaatttagttcttgcttcctttgtcttcttgagttttatcagagacgggagtgcagggatcactagctctttcattcggtcagagtggccggcagttgacatcccccttgatcatgaagcatttgcagt

SEQ ID NO: 60195 - DNA, 232 bp, Glycine max
  Clone ID: 700674082H1
ggtccttaaacactcatcagtcatcaccatggccaagctagttttttccctttgttttctgcttttcagtggctgctgcttcgctttcagttccagagagcagcctcagtaaaacgagtgccagatccaaaaactcaatgccctcaaaccggataaccgtatagagtcagaaggagggctcattgagacatggaaccctaacaacaagccattccagtgtgccggtgttgcc

SEQ ID NO: 60196 - DNA, 134 bp, Glycine max
  Clone ID: 700674083H1
cgctgcttcactattctccctatggagtttaatcttgtggtccgtcaaaagtttttaaattttgtgaggttcattatgaagaaaagggacaagcttagttgtcaagttggaatcaacccatactccatggaatg

SEQ ID NO: 60197 - DNA, 228 bp, Glycine max
  Clone ID: 700674084H1
gatccatcattgactatcaagttttatgagagaactcctgagcagcaatcatcattgggataccttgttggttccactcacattgaaggaactcatgatcaagcaccagaaaggggagaagtgactgctgatcaagtgaggagagaacctcatgggtcaataggggcaacagctggtcatcgagccattgcacagagtaacagttcagaaattgctgaagccttattt

SEQ ID NO: 60198 - DNA, 227 bp, Glycine max
  Clone ID: 700674085H1
catctttctccgccaccctagtccaagactcgttaagattagccactgatgttatccccaactactccttcggctgcgtcaacgccatcaccggcgcctctgtcccggcccaagggcttttgggcctgggccgtggcccgctgtccttgctctcccaatccgggtcaaattactcgggcatcttctcttactgtctccccagcttcaagtcctactacttctctggg

SEQ ID NO: 60199 - DNA, 228 bp, Glycine max
  Clone ID: 700674087H1
gctgttcttgtgatgccagaaacatttgacaatcgtgaaataaaagaaattctatctttagtactacgagaactctgctttggctcagcagtggtacaccaggaaggtcttgcagcagtttttggaaatggattatcaacagcatgtgttgtgaatattggtgctcaggtgacatcacttatatgcattgaggatggaggtgctctaccttcaactggaaagactttg

SEQ ID NO: 60200 - DNA, 108 bp, Glycine max
  Clone ID: 700674088H1
aagctctcagaaaggcttttgaaggatggggaactgatgagaacactgtcatagtaattttgggtcagagaactgtgtatcagaggcagcaaatcagaagagtttatg

SEQ ID NO: 60201 - DNA, 226 bp, Glycine max
  Clone ID: 700674089H1
taagaaaactacaaagctatgggcaccatcatcgactcccatttcttggccttcactgcccttgtcactattgcctatcagtttttgtttttcgtcgtcactgcgctcctcaaattcgacaaagtcactgattttgctggaagtacgaatttcattataattgctgcattgaccctggtcatcaaaggctcctggtattttcgacagataatcctcactttgtttg

SEQ ID NO: 60202 - DNA, 207 bp, Glycine max
  Clone ID: 700674090H1
ctggggatggtgaagagatgacattgattccgggaaccagtgttgaagaggcttacaataagctaatagttgaacttgagaaaagtgttcctacattggttggcattgaatgtcccaaggatgagaaacttcctcgtcgcaaaatttttgacaaacctaagacgcgctgcttcactattctccctatggagtttaatctggtggttc

SEQ ID NO: 60203 - DNA, 230 bp, Glycine max
  Clone ID: 700674091H1
attccaacgttggctttctctcgcgttttccaattccccccaaatctcacgcctagggtttctatcgcaaaccctccctacctccaaccaggtcgcgtgcaaagggatttcgaagcttcggaagaaaaaaatgaaacctgttttctgtggaaacctggatttcgacgcgcgtcaatctgacgtggagaggctcttcagaagatacggcaaagttgatagagttgacatga

SEQ ID NO: 60204 - DNA, 228 bp, Glycine max
  Clone ID: 700674092H1
attcattccttctttcatttcattagcaaaagtgatcaattaagtgttaattaaccatcgatcatgatgaggagcaagaagcagagccagaacaagtttgttcgaatcatggcatcaccaatcagagcactgggaaaagcacgtgacatgtacgtgcggagataacgaactgcggccagcacgtgagctactacggcggcgaccccacagaaggcgcgggtcggttct

SEQ ID NO: 60205 - DNA, 235 bp, Glycine max
  Clone ID: 700674093H1
gccaaggaaagcgtgaacaagaccaggaccaggacgaggacgaagatgaagatgaagatcaacctcgcaagagccgcgaatggagatcgaaaaagacacaacccagaagacctagacaagaagaaccacgtgaaagaggatgcgagacaagaaacggggttgaggaaaatatctgcaccttgaagcttcacgagaacattgctcgcccttcacgcgctgacttctacaaccctaa

SEQ ID NO: 60206 - DNA, 237 bp, Glycine max
  Clone ID: 700674094H1
atttgaaattttaataaaccgcgatcacaggttgccgcaccttaaaaccggaaacaaaagcaatcgttacttgatttcaagaatttctcaatttcttcctacttctttgtgtacgatttcttaagggaaagaaaatcactctctgtgctggtcacagacttcgtgaatcattttcttttccactcctagtttatgttctgaacactctcctatttgatataggacttcgtgtcagat

SEQ ID NO: 60207 - DNA, 262 bp, Glycine max
  Clone ID: 700674095H1
tacgaactcggaatcggctcgactgagcgttttgttggagatctcgtctttgaagtttctaagatgacttctccctacattaaatgtacagtctctttcttcatagcatttggaaatttggctgatgacaccatcaattttgaggcttttccccacaagctggtgcagtttggagagattcaggaaaaagttgtgttgaaattttcacaagaggaatttcttacagcttggtcaactcaggtgcgtcccgcaacgactctgt

SEQ ID NO: 60208 - DNA, 246 bp, Glycine max
  Clone ID: 700674096H1
aacctacctctttttcttctctctcaacaacttcaccttcttcctcctcgatcatgtctcacttcaagggcaagtaccatgatgagcttatcgccaatgctgcgtacattggcactcctggaaagggtattcttgctgctgatgagtcaacagggacaattggcaagcgtttggccagcatcagtgtagagaacattgaatccaacaggcgaactcttagggagctgcttttcaatgctcctggtg

SEQ ID NO: 60209 - DNA, 269 bp, Glycine max
  Clone ID: 700674101H1
gttcaatatcctagtataccttaataaatatttaagatactatgatgagagcacggttcccattactgttgctggtacttgttttcctggcttcagtttctgtctcatttggcattgcttactgggaaaaagagaaccccaaacacaacaagtgtctccagagttgcaatagcgagagagactcgtacaggaaccaagcatgccacgctcgttgcaacctccttaaggtggagaaagaagaatgtgaagaaggtgaaattccacgaccc

SEQ ID NO: 60210 - DNA, 270 bp, Glycine max
  Clone ID: 700674102H1
aatcgaattagagctgtagctatgagtggacagaaggtctaatgagaggaatggaagtgattgacacaggagctgccctaagtgttccagtaggtggagcaactctaggacgaattttcaacgtgcttggagagcccattgataatttaggtcctgtagatactcgcacaacatctcccattcatagatctgcgcctgcctttatacaattagatacaaaattagccatttttgaaacaggaataaaagtagtagatcttttagtcctta

SEQ ID NO: 60211 - DNA, 271 bp, Glycine max
  Clone ID: 700674103H1
tgactctcgaaggacatcatgctgatattggtgtcttgcagtcagtaatcgtggtgattttatcgtcactggatctcatgatcgttctattcgccgctgggatcgcactgaagagcagttcttcattgaggaagaaaaggagaaaaggttggaggaaatgtttgaggctgatattgacaatgcatttgaaaacaaatatgcattgaaggaagaaataccagaggagggagctgtggctttagctgggaaaacaaacccagagaacctttct

SEQ ID NO: 60212 - DNA, 270 bp, Glycine max
  Clone ID: 700674105H1
ctctcgtattgaatggctgcaaaaagctgatgtgcctaccatagcacagattgaagagtttattcgatgcagaggatgatgaatgctcctgattcaaatgataatattgatctactgttgagcattgatttgttgggtttacaaggagcaggcaaagcttttccaaacaagattgtttttgatgataagcttgtgttggctaacacacaagaattctttgatggaaattttccagtggattcttggttaccaatttttgtgaatgtcttt

SEQ ID NO: 60213 - DNA, 267 bp, Glycine max
  Clone ID: 700674106H1
cgttcttcttcgtcgttatcttcttctttgttgtttgtgtgtttgttttttctctcacctgaaaatgtcttgctgcggtggtaactgtggttgcggaagcgcctgcaagtgcggcaacggctgcggaggctgcaagatgtacccagacttgagctacaccgagtcaaccaccaccgagaccttggtcatgggagtggcacctgttaaggctcaattcgagagtgctgaaatgggtgttcccgctgagaacgatggctgcaaagtgga

SEQ ID NO: 60214 - DNA, 270 bp, Glycine max
  Clone ID: 700674107H1
gcttaatctgcctccagggcttcctgaagcttgatcaatagaaatgaaactcaacaccgttgtgacttgcttaatgcatctcttgctagtcaagtgcctatacagtgtcatcaagaagcttccaataatttaagatccaataccctgacattggtttcccctggcaacttggttagcagtcgcatttcttctgttcaggatgtggtcagagatggaaatggtactagagaagtgccggatatgaacttgttttctccaagaatcatactg

SEQ ID NO: 60215 - DNA, 269 bp, Glycine max
  Clone ID: 700674108H1
ccatgatactacaagccactaggcatgagtctagcaaaggaaacaataatgggaggtggaggccgtgtggccaaagttgaaattcagcagaagaagcctctctcaagggttccaaacacaaagccaccattcactgttggccaactcaagaaagccattccaccgcactgctttcagcgttccctcctcacttcattgtcctatgttgtttatgacctttcattggctttcattttctacattgccaccacctacttacacctctccct

SEQ ID NO: 60216 - DNA, 267 bp, Glycine max
  Clone ID: 700674109H1
cattctctccattgtctttgaacactctcaccatggccaagcttgttctttccctttgtttccttcttttcagtggctgcttcgctctgagagagcaggcacagcaaaatgagtgccagatctaaaagctgaatgccctcaaaccggataaccgtatagagtcggaaggtgggttcattgagacctggaaccctaacaacaagccattccagtgtgccggtgttgccctctctcgctgcacccttaaccgcaatgcccttcgagacc

SEQ ID NO: 60217 - DNA, 133 bp, Glycine max
  Clone ID: 700674110H1
cgaaaatctcagattaataacactcgcatatccgttaacaagcctggtagatttgagagtttcttcctatctaggattgttgatcttcagtgctagataggaagaaactctcaaatctaccaggcttgttaac

SEQ ID NO: 60218 - DNA, 256 bp, Glycine max
  Clone ID: 700674112H1
ctcgaattcccattcttccttccttcttctgcttatatcgatctccactgaaaccaaaccatgtatctcaggccaaatgccagaaccgagattcgccgcaaccgttacaaggtcgccgtcgacgccgacgagggccgccggagaagagaggacaacatggtcgagatccgcaagagcaagcgcgaagagagtttgctcaagaagcgtcgtgaaggcctccaagctcagcaacagtttcccgctcctcttcagaact

SEQ ID NO: 60219 - DNA, 264 bp, Glycine max
  Clone ID: 700674113H1
aatcgaattagagctgtagctatgagtgcgacagaaggtctaatgagaggaatggaagtgattgacacaggtgctgccctaagtgttccagtaggtggagcaactctaggacgaattttcaacgtgcttggagagcccattgataatttaggtcctgtagatactcgcacaacatctcccattcatagatctgcgcctgcctttatacaattagatacaaaattagccatttttgaaacaggaataaaagtagtagatctttag

SEQ ID NO: 60220 - DNA, 261 bp, Glycine max
  Clone ID: 700674114H1
cgatgccctaagagtccctgcaggaacacatactatgtggttaaccctgacaacgacgagaatctcagaatgataacactcgccatacccgttaacaaacccggtagatttgagagttacttcctatctagcactcaagctcaacagtcctacttgcaagggttcagcaagaatattctagaggcctcatacgacaccaaattcgaggagataaacaaggttctgtttggtagagaggaggggcagcaacaaggggaggga

SEQ ID NO: 60221 - DNA, 115 bp, Glycine max
  Clone ID: 700674116H1
cggctcgagtggggaagcccttcactcgctctctttcttccctttgcttgctactcttgtcgagtgcatgctttgcctattagccccagcaagttcaacgagtgccaactcaaca

SEQ ID NO: 60222 - DNA, 270 bp, Glycine max
  Clone ID: 700674117H1
aaggatagcaagtgtagctgctggtggtcgccataccttagcattgtcagatataggacaggtgtggggttggggctatggtggtgaagggcagcttggtttgggttctagaatacgtaatggtgtcctctcctcatctagttccttgtattaattcctcttcttatggtaaagatatggctcgagtaagcataagttcagatgggcaaaatttcagagttcctggaagttatattaagggaattgcctgcggaggtcgacacaggcagt

SEQ ID NO: 60223 - DNA, 268 bp, Glycine max
  Clone ID: 700674120H1
gtagtagcaagtacgtcgtatatgtggttgatcttttgctggttgtttgttttgttccttccaattgtcagatctgaatcaccggactcactcttcacactcactcacactgaatggcttctgaaggcgaccatcaccaccaccaccaccaccatcaagatcacgatcatcatcatcatgatcatgatcaccatcatcatcacgatggagagggagagaccaactcatgggtaggtaaggatgggaaggtgtaccatagccagatggt

SEQ ID NO: 60224 - DNA, 267 bp, Glycine max
  Clone ID: 700674121H1
cggctcgagctctccattggtccttaacactcatcagtcatcaccatggccaagctagttctttccctttgttttctgcttttcagtggctgctgcttcgctttcagttccagagagcagcctcagcaaaacgagtgccagatccaaaaactcaatgccctcaaaccggataaccgtatagagtcagaaggagggctcattgagacatggaaccctaacaacaagccattccagtgtgccggtgttgccctctctcgctgcccctca

SEQ ID NO: 60225 - DNA, 267 bp, Glycine max
  Clone ID: 700674123H1
gaagatgcgtgaggattttcataaaacaattccttttcaattcttccgagagacataagccagcaaatcttcaatgaattggttgattctcactgcctgaccgaagtgtctcttgaagccttcagagattgtgctcttcaggatattgacctgggtgaatatgttggagttaacgatgattggatggatgtcatctcttcccaagggttgtccttactttcagttgatgttgctggttctcaggtgacagatgatggattcgactcc

SEQ ID NO: 60226 - DNA, 155 bp, Glycine max
  Clone ID: 700674125H1
cccagatatagagtacccagagacatgcaacaacaacactagcagaaaagtcatggtggacgcaagcaggggcaacaccagcaggaggaagaggaagaaggtggcagcgtgctcagtggctccagcaaacacttcttggcacaatccttccacac

SEQ ID NO: 60227 - DNA, 178 bp, Glycine max
  Clone ID: 700674126H1
gggttttgctatggagaagctagaagcagagaacgttctggtccttccctctgagcaacccaacaacaataggccaaagccaaaaccaaagcgtttcgtgaaaaaccaaatcccagactcaatccttaacaaccctcttctgagcgccgcaatctctgtgctcccttccaactacaac

SEQ ID NO: 60228 - DNA, 257 bp, Glycine max
  Clone ID: 700674127H1
gacgaatccactggacacaaggtgtgaaaaaagaagccaaagtggaaatccacgacaatatttccgaaacgaaaaacgtaactgttgcggatgcttcggaagttgaagattctcctaagttcggcgtgacgtcagtttgcggcaggagaagagacatggaagattccgtttcggtgcggccttccttcacccaaggcttccactactttggcgttttcgacggtcacggttgctctcatgtcgcgactatgtgcaag

SEQ ID NO: 60229 - DNA, 265 bp, Glycine max
  Clone ID: 700674129H1
ctttcccaagtgctgtgcgaaaggcaagaaaattgtttttcttaccagagttgatccttttccagtagctttactggctgttctttttggcgttaagaatgaaattctgagttctaacgccaactaaccctatgctgacgcgacttcttgagaactgtaagagtctcaaatatctggttgatgagtgtccttttgcatttgtgaactagtatgtaatattttattcacttaaataaagcgcattactatgtgcaatgatgtgttt

SEQ ID NO: 60230 - DNA, 262 bp, Glycine max
  Clone ID: 700674130H1
tttctttgcacgctcttactcgttcctttgtctttgtctttctctttcggctttttcttctgctccactgtttctatcccttcctttctgtatgcaatattggcatgcttgtttggtatcagaatcgcattaactgtcatatatacttggacggagttgatcaggacttcaattagcttccatgtaaacataatattaagaatgatcacatggacatttgggcttatctccctgcctgcaagagttgtgaatgccttcaaag

SEQ ID NO: 60231 - DNA, 197 bp, Glycine max
  Clone ID: 700674131H1
acgaacagagagaggaacaggaatggcctcgcaaggaggaaaaacgcggagaaaagggaagtgaagaggaagatgaggatgaggatgaggaacaagatgaacgtcaattcccattcccacgcccacctcatcagaaggaagagcgaaagcaagaggaagatgaggatgaggagcagcagcgagagagcgaagaaagt

SEQ ID NO: 60232 - DNA, 270 bp, Glycine max
  Clone ID: 700674133H1
gcagattttcgtgaagactcttacaggtaagactattaccctcgaggtggagagctctgacaccattgacaatgtgaaggccaagattcaggacaaggaaggcatcccaccggaccagcagaggctgatttttgctggcaagcagctcgaggatggaaggaccctcgctgactacaacatccagaaggaatcaacccttcaccttgtcctccgtctccgtggggggttttaagctcgttgtgtaatgttggatgtgttcccaaaaatttg

SEQ ID NO: 60233 - DNA, 263 bp, Glycine max
  Clone ID: 700674134H1
cgcgtatctttctctgttctattctacgatggagttttggggtgccgaggttaaggttggtgagtctgttaaggtagatccagccgaattcgaggcatgcatacacctttctcaggctgctcttggtgaggcaaagatagacaaatcaaatgaaccagttgttctctacttgaaagttggtcaacagaaatttgtcttgggaaccctttccagggagaaaattcctcaaatacctctggaattggttttggacaaggagttga

SEQ ID NO: 60234 - DNA, 265 bp, Glycine max
  Clone ID: 700674136H1
ccctgctgcataggaagaaacccagcctctcaccctccctgcgacacgatgcagatcttcgtgaaaaccctaacgggtaagacgatcacccttgaggtggagtcttctgacaccatcgacaacgtgaaggccaagatccaggacaaggaaggcatccctccggaccagcagcgcctcatcttcgccggaaagcagctggaggacggccgcaccctcgccgactacaacatccagaaggagtccaccctccacctcgtcctcgtct

SEQ ID NO: 60235 - DNA, 88 bp, Glycine max
  Clone ID: 700674137H1
cttctatctatttagataaaacaaaaatcccaatcttaatcacaagcaattccggttactgatagaaactctcgaaattcgtctgata

SEQ ID NO: 60236 - DNA, 264 bp, Glycine max
  Clone ID: 700674138H1
attctatctatttagataaaacagaaatcccaatcttaatcgcaagcaattcctctctctgagagaagctctcgaaattcttctgatactcgtagaattttaatggcttgttcatcatccgattcaaaaaaaccagtgacgtcgctgttgttcttttccttcctaattccgataccttccgattctctttccgccctctgcatactcgatacttgttcatctctctctttctcaaattccgattcctttttgtagcataacacc

SEQ ID NO: 60237 - DNA, 176 bp, Glycine max
  Clone ID: 700674139H1
caacaacttcaacgcgttggaaccgaccaccgcgttgagtccgaaggtggtttgattcaaacatggaactctcaacaccctgagctgaaatgcgccggtgtcactgtttccaaactcaccctcaaccgcaatggcctccacttgccatcgtactcacctgatccccggatgatcat

SEQ ID NO: 60238 - DNA, 76 bp, Glycine max
  Clone ID: 700674141H1
aaatcacaattattctgacaaggattcgaaagtttattgttactttcttttctttagattccttatattagactag

SEQ ID NO: 60239 - DNA, 264 bp, Glycine max
  Clone ID: 700674142H1
acgtgaacaagaccaggaccagacgaggacgaagatgaagatgaagatcaacctcgcaagagccgcgaatggagatcgaaaaagacacaacccagaagacctagacacgaagaaccacgtgaaagaggatgcgagacaagaaacggggttgaggaaaatatctgcaccttgaagcttcacgagaacattgctcgcccttcacgcgctgactactacaaccctaaagctggtcgcattagtaccctcaacagcctcacctcccag

SEQ ID NO: 60240 - DNA, 229 bp, Glycine max
  Clone ID: 700674143H1
cttaataaataatttaagatatatgttgagagcacggttcccattactgttgctggtagctgttttccttggttcagtttctgtctcatttggcattgcttactgggaaaaagagaaccccaaacacaacaagtgtctccagagttgcaatagcgagagagactcgtacaggaaccaagcatgccacgctcgttgcaagctccttaaggtggagaaagaagaatgtgaa

SEQ ID NO: 60241 - DNA, 258 bp, Glycine max
  Clone ID: 700674146H1
ggcaaggccttcccaaataagttgtgtttaatgataaattggtattggcaaatacacaagaattttttgatggaaattttccaacagattcttggttaccaatatttgttaattgtctttaccctgtgagtcaattgcccgcagaagctgtcattgttaatgttgtttgtgggagtgggcgtggtggtttgcctactactgcttggattagttctgcagttaacaatcgctcctcagatatcaataagaaaatcggac

SEQ ID NO: 60242 - DNA, 195 bp, Glycine max
  Clone ID: 700674147H1
caaaaaagaatgtcaacctctgagcattcttgaccgcggtgaaatatattttctccgatcacctccaaattatacacattcactatcatcgtgattatttttttgagcagaaaatttgttcagttttcacgtttaagggtcgcttagctgctttatgatggttgacttcgtcattctgccactggatcattgtaa

SEQ ID NO: 60243 - DNA, 190 bp, Glycine max
  Clone ID: 700674148H1
gaattcgactcgagcttccattgatatcaaatcgcgtctagattggaaaaagtttcctctacaaaagcacaatttgttagtggacaaaccttcaaatatgatataattggtgctggttcacattcttcaggagattttcctgaaaaggaagatcaagaaaaacccaaaaagattgataccagattgagac

SEQ ID NO: 60244 - DNA, 266 bp, Glycine max
  Clone ID: 700674149H1
ctcctcaaaacttcgtaaccagaaagcaggtgggagaaaggaagctgagaaagaaatgcaggttattgtggacatgcgggagttcatgagcagccttccaaatgttcttcatcaaaagggaatgaacatcattccagtgaccctagaagttggtgactatattctatcaccattaatttgtgtggaaagaaaaagtattcaagatctctttatgagcttcacatcaggtcgtctataccaccaggtggagacaatggtacatatta

SEQ ID NO: 60245 - DNA, 261 bp, Glycine max
  Clone ID: 700674151H1
cttcagaatctccgagactacgcattttggagttcaactccaaacccaacacccttcttctcccccaccatgctgacgctgattacctcatcgttatccttaacgggactgccattcttaccttggcgaacaacgacgaccgagactcttacaaccttcaatctggcgatgccctaagagtccctgcaggaaccacatactatgtggttaaccctgacaacgacgagaatctcagaatgataacactcgccataccgttaa

SEQ ID NO: 60246 - DNA, 262 bp, Glycine max
  Clone ID: 700674152H1
aagaaatgaagagtactatctctttgctctctttctagtttgtgccttcaccatctcatacctgccttcatccaccgctcagttcgtgctcgacactgatgatgatcctcttcaaaacggtggcacatactatatgttgccagttatgagaggaaagggcggtggaatagaagtagattcaactggaaaagaaatatgccctctcactgttgtgcaatcacccaatgagctcgataaggggattggactagtctttcatctc

SEQ ID NO: 60247 - DNA, 182 bp, Glycine max
  Clone ID: 700674153H1
cttgaaattttcacaagaggatttcttacagcttggtgaactcaggtgcgtcgcgcaacgactctgttggctgatgggtacccatatttgtatgctatggtgcatgatagttcagtgtctacaatacgaggtgattttgtcattggtgttaagttgtcaaccataaacaatatgtgtgcata

SEQ ID NO: 60248 - DNA, 263 bp, Glycine max
  Clone ID: 700674154H1
agttcaatatggggaagccctcactctctctctttcttccctttgcttgctactcttgtcgagtgcatgctttgctattagctccagcaagctcaacgagtgccaactcaacaacctcaacgcgttggaacccgaccaccgcgttgagtccgaaggtggtttgattcaaacatggaactctcaacaccctgagctgaaatgcgccggtgtcactgttgccaaactcaccctcaaccgcaatggcctccacttgccacttactc

SEQ ID NO: 60249 - DNA, 259 bp, Glycine max
  Clone ID: 700674155H1
ctcgagccgttcaggaaaaattgtattgaaatcttcactagaggaatttcttacagctacgtcaactcaggtgcgtcctacaacaactctgttggctgatgggtgtccatatgtgtatgctatggtgcatgatagttcagtgtctacaataccaggtgattgcgtcattggtgttaagttgacaaccataaacaatatgtgtgcatatgggctttatcctggtatttcaggttctcgtcttttgggcaccattcccagt

SEQ ID NO: 60250 - DNA, 97 bp, Glycine max
  Clone ID: 700674156H1
tctcgagccgaatcggctcgggagaactgtatttgcacagtcctctggaagctcgccaaatgagaaggaaagctctctctcgtattgaatggctgca

SEQ ID NO: 60251 - DNA, 262 bp, Glycine max
  Clone ID: 700674157H1
aaataattaattaaattcccgtggaatcttgttgaagccatgtctacagctggtcaggtcatcaagtgcagagctgcggtggcatgggaagcagggaagccactatcgatagaaaccatagaagtggcaccaccccagaaaggtgaagtgcgtttgaagactctcttcaactccctttgccgtacagatgtttactggtgggatgctaagggccagactccgctgtttcctcgtatcttaggccacgaagcttcgggattgt

SEQ ID NO: 60252 - DNA, 261 bp, Glycine max
  Clone ID: 700674158H1
ctttgcagacatatcttggatcccatttccatcaggtcagtgcctatgtacttttttcagaaaggttggtggtgactggtgattgttgaagagaataatggcaacttcaactatggatattcttcatttccaccacactcctttttattgtgaggagaatgtatacttgctttgcaaaaagttgtgcaatgatggaatagcaaatgctgatggatctgatctttttgttgctttcatttccaacgataagaaacaatccca

SEQ ID NO: 60253 - DNA, 258 bp, Glycine max
  Clone ID: 700674159H1
caaggtaatggtatttttggcatgatattcccgggttgtcctagcacttatcaagagctacaagaatctcagcaacgaggacgaagccagaggccccaagaccgtcaccaaaaggtacatcgcttcagagagggtgatttgatcgcagtgcctactggtgttgcatggtggatgtacaacaatgaagacactcctgttgttgccgtttctattattgacaccaacagcttggagaaccagctcgaccagatgccagga

SEQ ID NO: 60254 - DNA, 260 bp, Glycine max
  Clone ID: 700674160H1
gtcccttcctaaataaccccaaacaaaagccaccttaacatctcttctctgaaaattctctttatagagatagagagatagagagagagagaaagaaattaagaaaaaatggcagcctgcactgtctactcaacacaatctctgagcacaaattgctccatctcaaccccatcaaagacacagctgagtttcttccaccaaaagcaggtagttttctggaggaacagcaacaggggcaacagcagcagcagaaaagctat

SEQ ID NO: 60255 - DNA, 256 bp, Glycine max
  Clone ID: 700674161H1
ttccatagccccccaaaaatgaagagcaccatcttctttgctctctttctcttttgtgccttcaccacctcatacctaccttcagccatcgctgatttcgtgctcgataatgaaggtaaccctcttgaaaatggtggcacatattatatcttgtcagacataacagcatttggtggaataagagcagccccaacgggaaatgaaagatgccctctcactgtggtgcaatctcgcaatgagctcgacaaagggatgg

SEQ ID NO: 60256 - DNA, 259 bp, Glycine max
  Clone ID: 700674162H1
tatcaacagcagtacggttacacacttgtggagcttctctggaggtgtgacatcctctcctgagctgaatgataaactaatctcactgctatttaggccaggatcacatcagcaggaagcttgttatgctcagtgttgctcagtagtttggtaggtccttaactggtcttcatcgtccagtgactcggttcctttttaccggagtgtgcagtcttttagccctcatttgtgcaggttccttcaatgggaagctgttctt

SEQ ID NO: 60257 - DNA, 263 bp, Glycine max
  Clone ID: 700674164H1
gttttagttactgatcctaggaactagagaaaattcgtcaaagagaggccgatatgactaaggaacgcattgaaaaactgctgaaggctggagctaatgttattctgacaactaaaggaattgatgacatggctcttaagtactttgttgaggctggggcaattgctgtaagacgtgtgcggaaagaggacatgcgccatgttgccaaggctactggtgcaacattggtctcaacatttgctgatatggaaggggagaaacat

SEQ ID NO: 60258 - DNA, 266 bp, Glycine max
  Clone ID: 700674165H1
acaccaacgaggacatagctgagaaacttcagtctccagacgacgaaaggaagcagatcgtgacagtggaaggaggtctcagcgttatcagccccaagtggcaagaacaacaagatgaagatgaagatgaagacgaagatgatgaagatgaacaaattccctctcaccctcctcgccgaccaagccatggaaagcgtgaacaagacgaggacgaggacgaagatgaagataaacctcgtcctagtcgaccaagccaaggaagcgtg

SEQ ID NO: 60259 - DNA, 260 bp, Glycine max
  Clone ID: 700674166H1
ctgtggaggttgatagtcagagggagttgctcacattggtgaattgaaatctggtgtctatgttccactgcctacaaaaactaatttgatggaaactcccaaggaatggcaactggatctaccttgtgacaaaattcctagtgtcttgactacaactgatgagagattggtaggcacagaacatgagggatatgatccttttcttggtggaattcaaaaatatgccactcccatgatgcccctagatgaagaaatctttc

SEQ ID NO: 60260 - DNA, 259 bp, Glycine max
  Clone ID: 700674167H1
tctcgagccgattcggctcagaaaacaaacatggagaaaggacactaggagctgtattcatgaagtagactaaattgatactttaatagttctatatatataagcgtaattaagcatatgaaatcttttactctttcctctaactttctcttgaagtttaacagctgagcttttgggattcaacggttacattcgtccatatgcaagggctagaggccgagatatacttagtggagtcaattatgcttctgcagtgccg

SEQ ID NO: 60261 - DNA, 169 bp, Glycine max
  Clone ID: 700674168H1
ttctcgagccgattcggctcagctgagttctttgaactcaaaccatcaaaaaaacgatgtctcgttttttgtcttccattatccatggctgtggatcttccctcacatcacttctcgcaccgaaacccacccttccattcgacgccgccctacgatctcgccgtttacc

SEQ ID NO: 60262 - DNA, 263 bp, Glycine max
  Clone ID: 700674169H1
aacaaattgctgaatcatcgtgatcaaatactagatgaagccaacaaagctttcctgggctgtaaagtcaaattagcaatcaaagtatctggaattcactggtggtacaaagttgaaaatcatgctgcagagcttactgctggatattacaaccttaatgatagagacggataccgccccattgcaaggatgctgtctcgccatcatgccattttgaactttacatgtcttgagatgagggactcagagcaaccctagatgcc

SEQ ID NO: 60263 - DNA, 262 bp, Glycine max
  Clone ID: 700674170H1
ctttgcagacatatcttggatcccatttccatcaggtcagtgcctatgtacttttttcagaaaggttggtggtgactggtgattgttgaagagaataatggcaacttcaactatggatattcttcatttccaccacactcctttttattgtgaggagaatgtatacttgctttgcaaaaagttgtgcaatgatggcatagcaaatgctgatggatctgatctttttgttgctttcatttccaacgaaaagaaacaatcccac

SEQ ID NO: 60264 - DNA, 259 bp, Glycine max
  Clone ID: 700674171H1
aagcaattggatttgcattccgggatgtcctgagacgtttgagaagccacaacagcaatcaagcagaagaggctcaaggtcgcagcagcaactacaagacagtcaccagaagattcgtcacttcaatgaaggagacgtactagtgattcctcctggtgttccttactggacctataacactggcgatgaaccagttgttgccatcagtcttcttgacacctccaacttcaacaatcagcttgatcaaaaccccaagtat

SEQ ID NO: 60265 - DNA, 260 bp, Glycine max
  Clone ID: 700674173H1
cattggtccttaaacaccatcagtcatcaccttggccatgctagttttttccctttgttttctgcttttcagtggctgctgcttcgctttcagttccagagagcagcctcactccaacgagtgccagatccaaaaactcaatgccctcaaaccggataatcgtatagagtcagaaggagggctcattgagacatggaaccctaacaacaagccattccagtgtgccggtgttgccctctctcgctgcaccctcaccgcaa

SEQ ID NO: 60266 - DNA, 127 bp, Glycine max
  Clone ID: 700674174H1
tgactagttctagatcgcggcggccgctcggatcttagaactagtctagctgcttcttcagctagctccgttcgtcctcgatctcattctgattctcccaaatcttcattcacaagacaagatgggt

SEQ ID NO: 60267 - DNA, 247 bp, Glycine max
  Clone ID: 700674175H1
acaaattcgagattagactaggttgtttgttctctttgcgctgtcccacaagcaattaagcacagagcacaaagctgtgtggtggtaaagtccaacttggcctagcgaagtttcaagttgctgttgtttgcaggagaaaaatgtggttcgtgtacgtgtgcgacgaggaagagaaggaacttggaaggcaacaagcccctgggtcgtgtccctactgtggagccaaagttgaagccatggatgttga

SEQ ID NO: 60268 - DNA, 257 bp, Glycine max
  Clone ID: 700674176H1
tgttggaatctggtttcaaaaagacagagggttaattcagcgagtattttggaaggatgtcttacgttgctcataacgttaatcagccccaagagaaagatttgttagagggaaatttttcctttgatattaaatctcgctctagattggaaaaagtttcctctacaaaagcacaatttgttagtggaaaaaccttcaaatatgatataattggtgctggttcacattcttcaggagattttcctgaaaaggagatc

SEQ ID NO: 60269 - DNA, 258 bp, Glycine max
  Clone ID: 700674177H1
agagaaccagctcgacagatgcctaggagattctatcttgctgggaaccaagagcaagagtttctaaaatatcagcaagagcaaggaggtcatcaaagccagaaaggaaagcatcagcaagaagaagaaaacgaaggaggcagcatattgagtggcttcaccctggaattcttggaacatgcattcagcgtggacaagcagatagcgaaaaacctacaaggagagaacgaaggggaagacaagggagccatgtgacag

SEQ ID NO: 60270 - DNA, 253 bp, Glycine max
  Clone ID: 700674178H1
ggagattcaggtaaaattgtattgaaattttcacaagaggaatttcttacagcttggtcaactcaggtgcgtcctacaacaactctgttggctgatgggtgtccatatttgtatgctatggtgcatgatagttcagtgtctacaataccaggtgattttgtcattggtgttaagttgacaaccataaacaatatgtgtgcatatgggctcaatcctggtatttcaggttctcgtcttttgggtaccatcctca

SEQ ID NO: 60271 - DNA, 252 bp, Glycine max
  Clone ID: 700674183H1
ctgttttggagagatatgccgcaccgtgatgagcaaatcacccaacaagcacaaccgtctgtacatggaagcaagaccattggaggaaggtcttgctgaggccattgatgatggcaagattggaccaagggatgaccccaaggttcgttccaagatcttgtctgaagagtctcggttgggacaaggatcttgccaagaaaatctggtgctttggccctgaagaccttcgacccaacatggtggttgatatgt

SEQ ID NO: 60272 - DNA, 260 bp, Glycine max
  Clone ID: 700674184H1
ataaaattcttccaccaagttatgggcttccttgtgttgcttctattctccctcttaggtctctcttctagttccagcatatcaactcatcgttccatattggaccttgacctaaccaagtttaccacacagaaacaggtgtcttcactgttccaactatggaagagtgagcatggacgtgtctaccataaccacgaagaagaggcaaagagacttgagattttcaagaataacttgaactatatcagggacagaatgca

SEQ ID NO: 60273 - DNA, 223 bp, Glycine max
  Clone ID: 700674186H1
ctaatccagtttcgtcttcgcccgacacattttttttctccgaactcctattcctcctcctattgctgctactcgaagcgagattgatagatagatcgatcctctctatgggttaaagttaaatctgaatccgaatatgatctaatcattttcattttaggtctttctgattaggtcttcggtgttgaattgagcgcggtggttgtgtttaggtttcgttttg

SEQ ID NO: 60274 - DNA, 259 bp, Glycine max
  Clone ID: 700674187H1
accccccaaaaatgcagagcaccatcttctttgctctctttctcttttgtgccttcaccacctcatacctaccttcagccatcgctgatttcgtgctcgataatgaaggtaaccctcttgaaaatggtggcacatattatatcttgtcagacataacagcatttggtggaataagagcagccccaacgggaaatgaaagatgccctctcactgtggtgcaatctcgcaatgagctcgacaaagggattggaaaatcatc

SEQ ID NO: 60275 - DNA, 255 bp, Glycine max
  Clone ID: 700674190H1
ctcgagccgtttcgccagaacatggtcagagcggcggacatcaggcgctggaccccacctccgtccacggcgtcacgcagttctccgatctcaccgaggacgagtttgagaagctctacactggcgtcaatggcggcttcccgtcatcgaataatgccgccggcggtattgcgccgccgttggaggtggacgggctgccggagaattttgattggagagagaaaggagctgtcaccgaagttaagttacaggtag

SEQ ID NO: 60276 - DNA, 255 bp, Glycine max
  Clone ID: 700674191H1
aaatttggctgatgcaccatcaattttgaggcttttcctcacaagctggtgcattttggagagattcaggaaaaagttgtattgaaattttcacaagaggaatttcttacagcttggtcaactcaggtgcgtcctacaacaactctgttggctgatgggtgtccatatttgtatgctatggtgcatgatagttcagtgtctacaataccaggtgattttgtcattggtgttaagttgacaaccataaaaatatgt

SEQ ID NO: 60277 - DNA, 233 bp, Glycine max
  Clone ID: 700674192H1
ctttaatgacagtgcgaggaggatacaacctctgcatccatttcacataatcagcgatagtagcaacaacaacctgtgctatccaatggagttgctgcaagctattcaaagttaagttcaaggcctggtggactggctgactatgatgatgatgaggatgaagattacaggccacccccaaagaggccagaagcttctgaagaggatgaagggataatggagtctctcaggca

SEQ ID NO: 60278 - DNA, 221 bp, Glycine max
  Clone ID: 700674193H1
tttgtttcccgctagtgcagcaaattttagtacaatatattagactatcttctgttactgtatctgatattatgaattatttttattattatcatcattctttagcatcttttaatataactactgtgtatttgttaggtagtacttatctatttgtccttagttctctttgtagtttagtaatgatgtatgtggaggagtttgcataggaataatgtctt

SEQ ID NO: 60279 - DNA, 221 bp, Glycine max
  Clone ID: 700674194H1
actaaactcatattccaaaacgcagaaccaacaatgtcgttccccttcaaccatgactccttcactcacggaggcggcagcaccgtgcaccacacccctcacaacaacgcgccacccaccacctctgttcatcacttgagccacctggttaacaccggtgttctctcgagcaaacccactgtgagagttttcaccaaagccaatcccaatttctctctcac

SEQ ID NO: 60280 - DNA, 260 bp, Glycine max
  Clone ID: 700674195H1
ctcttgttctcaagggattcgattttctctgcactcacttctaggatttcctccgcgctatcagcaatcatggccgacgaaacaccaaatgagatgaaggaggaggttccagaaattgttccttttgatcctaccaagaagaagaagaagaagaagattacaattgtagatcctgctgatgaccctgtggagaaattggctgagaagacagaaaacctctcagtttctgagggggttgagactgcatttgctgtttgaaa

SEQ ID NO: 60281 - DNA, 259 bp, Glycine max
  Clone ID: 700674196H1
attcaatatcctagtaaccttaataaataatttaagatactatgatgagagcacggttcccattactgttgctgggacttgttttcctggcttcagtttctgtctcatttggcattgcttactgggaaaaagagaaccccaaacacaacaagtgtctccagagttgcaatagcgagagagactcgtacaggaaccaagcatgccacgctcgttgcaacctccttaaggtggagaaagaagaatgtgaagaagggaaatt

SEQ ID NO: 60282 - DNA, 143 bp, Glycine max
  Clone ID: 700674201H1
cttttacagggctgctgttcagggggcattggctgatatatttacacgaggcagtaatcttataacagatgttcagggaatggcatcattgaccggtgtgctgcctccatttgttccatttgctcaggcatttgcagctgtac

SEQ ID NO: 60283 - DNA, 292 bp, Glycine max
  Clone ID: 700674202H1
gtcagcatgcacgcttcggctcgagctctagtatttttcaagtaacttaaggtttcaaacctaggaagttggaagtcatggcagcaacattgatggcagcaacaagttctggcactcttaaagcaactcctttcctaggccaaggcaagggtgccaatgccaatgctcttagggatgttgtttccatgggaactgggaagtacaccatgggcaatgatttgtggtatggaccagacagagtgaaatacttgggacccttttcagctcagacccgtcatacttgaaaggagaa

SEQ ID NO: 60284 - DNA, 288 bp, Glycine max
  Clone ID: 700674203H1
agaggatctcaagtgcatgagagatttgaagaacgcaactatgcaaatgttttgcagtcatcatctactttttgtttgcactcgggtgaaagagtggaggaaggggactgttcaggtcaacaacggggaagcatcttgtcagagcacacctcacagaggcgtcttgctattcagtaaaccactgcatgtgttgatgctgaggttggtatatataattgagtgaactagtaggttgagtaccttggctatctatctgtaaacattggcaatttgcatgcatgtcaagcg

SEQ ID NO: 60285 - DNA, 284 bp, Glycine max
  Clone ID: 700674204H1
cattggtccttaaacactcatcagtcatcaccatggccaagctagttttttccctttgttttctgcttttcagtggctgctgcttcgctttcagttccagagagcagcctcaggcaaacgagtgccagatccagaaactcaatgccctcaaaccggataaccgtatagagtcagaaggagggctcattgagacatggaaccctaacaacaagccattccagtgtgccggtgttgccctctctcgctgcaccctcaaccgcaacgcccttcgtagaccttcctac

SEQ ID NO: 60286 - DNA, 284 bp, Glycine max
  Clone ID: 700674205H1
gtttccttgtgttgcttcttttctccctcttaggtctctcttctagttccagcatatcaactcatcgttccatattggaccttgacctaaccaagtttaccacacagaaacaggtgtcttcactgttccaactatggaagagtgagcatggacgtgtctaccataaccacgaagaagaggcaaagagacttgctcttttcaagaataacttgaactatatcagggacatgaatgcaaacagaaaatcaccccattctcatcgtttaggattgaacaagtttgct

SEQ ID NO: 60287 - DNA, 286 bp, Glycine max
  Clone ID: 700674206H1
caaccttgtcatcacatataacatgcacagatgttgctggaacctttggttacttggctcctgaatacttcatgtacggcaaagtaaatgataagattgatgtctatgcattcggtgtcgtgctccttgagcttctttcagggagaaagcccataagccgtgattatccaaaaggccaagagagtcttgttatgtgggcaagtccgattctaaatagtggaaaggtgttgcaattgttagatcctagtttaggtgataattatgatcatgaggagatggaaaagat

SEQ ID NO: 60288 - DNA, 137 bp, Glycine max
  Clone ID: 700674207H1
tctctccattggtccttaaacactcatcagtcatcaccatggccaagctagttttttccctttgtgttctgcttttcagtggctgctgcttcgctttcagttccagagagcagcctcagcaaaacgagtgccagatc

SEQ ID NO: 60289 - DNA, 206 bp, Glycine max
  Clone ID: 700674208H1
tcaatatcctagtacaccgtattaaagaatttaagatatactatgatgagagcgcggttcccattactgttgctgggagttgttttcctggcatcagtttctgtctcatttggcattgcgtattgggaaaagcagaaccccagtcacaacaagtgcctccgaagttgcaatagcgagaaagactcctacaggaaccaagcatgcca

SEQ ID NO: 60290 - DNA, 84 bp, Glycine max
  Clone ID: 700674209H1
taatagctcatagtgagcgaggaaagtatcgggctatttaactatgacttgagctccatctatgaataaataaatcagcatatg

SEQ ID NO: 60291 - DNA, 280 bp, Glycine max
  Clone ID: 700674210H1
tctctccattgtctttgaacactcatcaccatggccaagcttgttctttccctttgtttccttcttttcagtggctgcttcgctctgagagagcaggcacagcaaaatgagtgccagatccaaaagctgaatgccctcaaaccggataaccgtatagagtcggaaggtgggttcattgagacctggaaccctaacaacaagccattccagtgtgccggtgttgccctctctcgctgcacccttaaccgcaatgcccttcgtagaccttcctacaccaacg

SEQ ID NO: 60292 - DNA, 138 bp, Glycine max
  Clone ID: 700674212H1
atgcttttggttgatacttatcataccaatcctcaaaatgcagttcgtagtatttttgttgcgcctttcagaggcggaaggcccattcgggtggttacatttccaaataccatcgtaccccttgaaccagacatgaat

SEQ ID NO: 60293 - DNA, 284 bp, Glycine max
  Clone ID: 700674213H1
taataaccaatatgccagagtacaatttttaatcatatggttgaggaaatttcataaaataaaaataaaaatcctagagttagacttgttagaggcaaatactgaatgatggattaaagatgctagtttttctaaaactccctgctgcgatgtttcatttgtttctccataggaaagttttgctgcacctatgattttttcttaccagatctgtttatattgatgattgactaggttttggaagccaatgcaacattgcttatttctttgttgattatgtgcag

SEQ ID NO: 60294 - DNA, 273 bp, Glycine max
  Clone ID: 700674214H1
gttcctcactgaccaagccatggcgatgagaaccaaactttctttagctatctttttcttttttcttttagccttattttcaaacctagcctttggcaaatgtaaagaaaccgaggtagaagaagaagaccctgagctcgtaacatgcaaacaccaatgccaacagccacagcaatacactgagggtgacaagcgggtatgcttgcaaagatgtgacaggtatcatcgtatgaagcaagagcgagagaaacaaatccaagaggaaactcgtga

SEQ ID NO: 60295 - DNA, 265 bp, Glycine max
  Clone ID: 700674215H1
gtttttgtggcacaaactaaacagaaatgaggctggtttaatggttcctgcagttgcttctggtttgatttgtggagatggattatggattctcccttcatctattcttgctttgttcaaaattcgtcccccaatctgcatgagcttcctgtcagccagtgccagttagaagttcacaataacattcaaatatatgcagtcaacaacttagtacctacggtccattatgggcataatgtcgtaggatgcttgcttattagcaatt

SEQ ID NO: 60296 - DNA, 281 bp, Glycine max
  Clone ID: 700674216H1
gagatggaaggcatagtacacaggacagttgaagtgaatggcataaaaatgcatgttgctgagaaaggtgaaggtcccgtggtcttgttcctccacggcttcccggagctctggtactcctggcgccaccagattctggctctcagcaacctcggctaccgcgccgtggctccagatctccgcggctacggagacaccgaggcaccagcttcaatcagcagctacaccatcctccacttagtttctgacatcgtcgcgctcattcatcacttgctgtggat

SEQ ID NO: 60297 - DNA, 285 bp, Glycine max
  Clone ID: 700674220H1
ctctctgtgtgtgtgcgcatcaaacgcaaccagaagcagccatggccactgcaagaactgtgaaggacgtttctcctcatgagttcgtcaaagcttactcttctcacctcaagcgatctggcaagatggagctgccagagtggactgatattgtgaaaactgcaagatttaaggagttggctccttatgatcctgactggtactatgtcagagctgcttccatggcaagaaagatctacttgagaggaggacttggtgttggtgcctttcagaggatttatggtg

SEQ ID NO: 60298 - DNA, 283 bp, Glycine max
  Clone ID: 700674221H1
ctctccattgtctttgaacactcatcaccatggccaagcttgttctttccctttgtttccttcttttcagtggctgcttcgctctgagagagcaggcacagcaaaatgagtgccagatccaaaagctgaatgccctcaaaccggataaccgtatagagtcggaaggtgggttcattgagacctggaaccctaacaacaagccattccagtgtgccggtgttgccctctctcgctgcacccttaaccgcaatgcccttcgtagaccttcctacaccaacggtcc

SEQ ID NO: 60299 - DNA, 284 bp, Glycine max
  Clone ID: 700674222H1
cgcaagagcaagagcaagagcgaaagcggcagagaagatggaaggagaagagggttctcagcagccacagttggtgctcgcggacaagctattccttctccggcaacccgatgtgcaagacattgacaaggttcgctacaaagaggatgtcttcactcatgtcaaggaaaacgatatggtccctctgtacgaaaccctagtcgctgattccgtgttggacttggatcgtgcccttttggactctatgcgcgctaaaattgacgacgagctcaccaagctcgacg

SEQ ID NO: 60300 - DNA, 279 bp, Glycine max
  Clone ID: 700674223H1
cttaattattaacacttccttagttcaatatggggaagcccttcactctctctctttcttccctttgcttgctactcttgtcgagtgcatgctttgctattagctccagcaagctcaacgagtgccaactcaacaacctcaacgcgttggaacccgaccaccgcgttgagtccgaaggtggtttgattcaaacatggaactctcaacaccctgagctgaaatgcgccggtgtcactgtttccaaactcaccctcaaccgcaatggcctccacttgccat

SEQ ID NO: 60301 - DNA, 284 bp, Glycine max; identical to SEQ ID NO: 39259
  Clone ID: 700674224H1

SEQ ID NO: 60302 - DNA, 280 bp, Glycine max
  Clone ID: 700674225H1
gatctccatatctgttcccaaaagcttgtttgtaagaatggcttccggtgaacagaaattccctcctcaacaacaacaaacgcagcctgggaaggagcatgctatgactccagtaccccaattcactagccctgactacaagccttcaaataaacttcaagggaagattgcattagtcactgggggtgattctgggattggacgagcggtgtgtaacttgtttgccttagaaggtgctaccgtggccttcacgtatgtgaaggggcatgaggacaaggac

SEQ ID NO: 60303 - DNA, 112 bp, Glycine max
  Clone ID: 700674226H1
taatagctcatagtgagcgaggaacgtatcgggctatttaactatgacttgagctccatctatgaataaatagatcagcatatgacagacaaagagaaaacacacaaaaacg

SEQ ID NO: 60304 - DNA, 247 bp, Glycine max
  Clone ID: 700674227H1
tttcaacttcgcggtgtgagtgagacggagagtgctaagcaatcgtcttctcttctcggagcttggctttgcttatcgattctctctcctctcgtttctctaattccaaggtttgtaaaagatggcagatgccgaggatattcaaccccttgtttgcgacaatggaactggaatggtcaaggcaggatttgctggtgacgatgctcctagggctgtctttcccagtattgttgggcgacctcgacat

SEQ ID NO: 60305 - DNA, 280 bp, Glycine max
  Clone ID: 700674228H1
gcaattttcaaggctccaaaagccatacgaggaggaattcctatatgttttccacagttcggaaactgtggatcgctggagctgcatggttttgcgagaaatagaatgtgggcaattgatgataatcctcctcctctgcctgcaaatgattctagtgggaaatccttcattgacctggtactaaaatcatctgaagaagatatgaagggctggccacatagttttgaattccgtcttcgggtgtctcttacaacagatggagacctgactttgatatcta

SEQ ID NO: 60306 - DNA, 279 bp, Glycine max
  Clone ID: 700674229H1
ggcacccaagctcactgcattcttgggttacaaggctggtatgactcacattgttagagaggtcgagaagccaggatcaaagcttcacaagaaggaaacatgtgagcctgttacaattattgagacccctccaatggttattgttggtgttgtgggttatgtgaaaactccccgtggtctccgaacattgaacactgtatgggctcagcacttgagtgaggaactgaaacgtaggttttataagaactggtgcaagtccaagaagaaggccttcaccaa

SEQ ID NO: 60307 - DNA, 90 bp, Glycine max
  Clone ID: 700674230H1
caacacgaatttcattgcagagtgttattttgagtatcagcatcaatggctccaattgcagtgggaaacgtgattccagacggcattttg

SEQ ID NO: 60308 - DNA, 235 bp, Glycine max
  Clone ID: 700674231H1
attttggttaagagtcttgaaaaagcaagagaaaaaaaaataccaaccatggcaaccatttctgatcaacctagagggtcctactcctatggaacctcatatggagcaccctatggaaccacgtatgagaccaacaccagcattaacaacccaccggtgcgccaaacagtgaagttcataactgctgccactattggcatcacactcttgctcctgtctgggttgaccctcacag

SEQ ID NO: 60309 - DNA, 278 bp, Glycine max
  Clone ID: 700674232H1
atggcaaccatttctgatcaacctagagggtcctactcctatggaacctcatatggagcaccctatggaaccacgtatgagaccaacaccagcattaacaacccaccttcacgccaaacagtgaagttcataactgctgccactattggcatcacactcttgctcctgtctgggttgaccctcacaggcactgtcataggtttgatcattgcaacccctcttcttgttatcttcagccccatccttgtccctgctgcggttgtgctgttcctagttgc

SEQ ID NO: 60310 - DNA, 92 bp, Glycine max
  Clone ID: 700674233H1
attccttttgtaatttcattgattcttaatctttgtgaaaaataatgttcatcgagaattttgaggttgagtgtcctaatgtgaagtacacc

SEQ ID NO: 60311 - DNA, 259 bp, Glycine max
  Clone ID: 700674234H1
ctttttctctctctcacttgcatacgttcctttcactgtactttttgacacacacgtaacacattcatcagaggaagagagaatgagttcatcctcaggtcagagcagtggctatgatctctctttcaagatcttgttgatcggagattccggtgtgggaaatagtagcctactagtcagctttatttcaagttctgttgaagatctttcccccaccattggtgttgattttaagatcaaaacgctcacagtgggtggc

SEQ ID NO: 60312 - DNA, 279 bp, Glycine max
  Clone ID: 700674238H1
cattatgtttcgtgtaataatctggaaatgcaagaagcttatcttgtcaatctcgtaaatgtgttacgagaattgtatttgcacagtccagaggaagctcgccaattgagaaggaaagctctctctcgtattgaatggctgcaaaaagctgatgtgcctaccatagcacagattgaagagttccattcgatgcagaggatgatgaatgctcctgattcaaatgataatattgatctactgttgagcattgatttgttgggtttacaaggagcaggtaaa

SEQ ID NO: 60313 - DNA, 280 bp, Glycine max
  Clone ID: 700674239H1
gcagcagcagcaaggaggttcccaaagccagaaaggaaagcaacaagaagaagaaaacgaaggaagcaacatattgagtggcttcgcccctgaattcttgaaagaagcgttcggcgtgaacatgcagatagtgagaaacctacaaggtgagaacgaagaggaggatagtggagccattgtgacagtgaaaggaggtctaagagtcacagctccagccatgaggaagccacagcaagaagaagatgatgatgatgaggaagagcagccacagtgcgtggag

SEQ ID NO: 60314 - DNA, 277 bp, Glycine max
  Clone ID: 700674240H1
gagaaccccaaacacaacaagtgtctccagagctgcaatagcgagagagactcgtacaggaaccaagcatgccacgctcgttgcaacctccttaaggtggagaaagaagaatgtgaagaaggtgaaattccacgaccacgaccactcgcacaacacccggagagggaacctcagcaacccggtgagaaggaggaagacgaagatgagcaaccacgtccaatcccattcccacgcccacaactacgtcaagaagaagagcacgagcagagagacgaac

SEQ ID NO: 60315 - DNA, 278 bp, Glycine max
  Clone ID: 700674243H1
ctcgagccgatttttcaatccggctaaagtctaattatccaacctaatgtttcatcaggcacctatatatggtatagaccccaattggggacgcattgctgctgcagcttgttactcgggggtttcattccatcaagatttacttagggtagagctgggggatattttactaatgtatggtggggaaccacaattatttgaccgtgctggactacaccatacaacttgtagaaataggagtagagcacgatgctcccctggcattgatcattttctct

SEQ ID NO: 60316 - DNA, 279 bp, Glycine max
  Clone ID: 700674244H1
attccaatatattccattctctctgtgtatttccctacctctcccttcaagatgcagatcttcgtcaagaccctcaccggcaagaccatcacccttgaggtggaaagctctgactccatcgacaacgtcaaggccaagatccaggacaaggaaggaatccccccggaccagcaacgtctcattttcgccggaaagcaacttgaggacggccgtacccttgctgactacaacattcagaaggagagtactcttcacctcgtcctccgtctccgtggtggc

SEQ ID NO: 60317 - DNA, 279 bp, Glycine max
  Clone ID: 700674245H1
ccctcgagccgaatcggctcgagcggctcgagtgttgctggtagtgactagaaggggttggagctgatgatggggcaaagatactcagggaaagaaggggaaaaaggtacaagtacacaagagtcagaagacccaaaagaagaatgtgaagcaaaagatgcgaaggatctttgccctgaagatgaggagaaaatggaagactctccagtcttaggtcttcttaaagaacaaaaaagggctaaacttgaaaccaaggatgataaaggcaatggaaccaaa

SEQ ID NO: 60318 - DNA, 281 bp, Glycine max
  Clone ID: 700674247H1
cctattgctaattcctagtgtatactactccacagtacacagcacccttttagtactagccaccattcaactttctctcttcccacactcccttcactttttacaccttcctttcttactctgctcatcttcttggccatcctaggtagttagtctcttttggaggatgaggttgttgtgtttgtgtttaacgttgttgctgtttctggctagtgtggcaatggcagaagaagattcagatcatataagcactccctaaaagccacgtcacacgcgcagat

SEQ ID NO: 60319 - DNA, 285 bp, Glycine max
  Clone ID: 700674248H1
gtcatggcagcttgcagcacattccagctgaatgctgcgctccaaaccccaaaaggaaagttagaaaagctttttgatcaacagaacgagggaagtattttcgcaataagcagagaacaggtgcgtccgttggccctaaccaggaaaagctcttggtggccattcggtggcgaatccaagcctcaattcaatattttcagcaagcgtcccactatctccaacggatatggtcgtttaactgaagttggtcctgacgatgatgaaaagagttggcttcaaagactc

SEQ ID NO: 60320 - DNA, 279 bp, Glycine max
  Clone ID: 700674250H1
gatgtgtttagggcaattccctcagaggttcttgcccattcttacaaccttcgacagagtcaagtgtctgagcttaagtatgaaggaaattggggtcctttggtcaaccctgagtctcaacaaggctcaccccgtgttaaagtcgcataaatgacaagcatgatggtgtgaggatgaggccatcttatgaaataataacaaataaataaattttgtatgataataaaaagtatggcccatgtaccatcccagcgagcctatgtttatatctgagtggcg

SEQ ID NO: 60321 - DNA, 110 bp, Glycine max
  Clone ID: 700674251H1
ctagatctataacgcgagcggccgtgctgagagcacggttcccatcactgttgctgggacttgtgttcctggcttcagtttctgtctcatttggcattgcttactgggaa

SEQ ID NO: 60322 - DNA, 86 bp, Glycine max
  Clone ID: 700674252H1
caagatctgtctccatcttccgcgtcctcttctacctacttctccattggtgcaacttgccatgtacaacagcacttccatatcct

SEQ ID NO: 60323 - DNA, 267 bp, Glycine max
  Clone ID: 700674255H1
atcctagtacaccgtattaaagaatttaagatatactatgatgagagcgcggttcccattactgttgctgggagttgttttcctggcatcagtttctgtctcatttggcattgcgtattgggataagcagaaccccagtcacaacaagtgcctccgaagttgcaatagcgagaaagactcctacaggaaccaagcatgccacgctcgatgcaacctccttaaggtggaggaagaagaagaatgcgaagaaggtcaaattccacgacc

SEQ ID NO: 60324 - DNA, 276 bp, Glycine max
  Clone ID: 700674256H1
ctagttcaatatcctagtataccttaataaataatttaagatactatgatgagagcacggttcccattactgttgctgggacttgttttcctggcttcagtttctgtctcatttggcattgcttactgggaaaaagagaaccccaaacacaacaagtgtctccagagttgcaatagcgagagagactcgtacaggaaccaagcatgccacgctcgttgcaacctccttaaggtggagaaagaagaatgtgaagaaggtgaaattccacgaccacga

SEQ ID NO: 60325 - DNA, 108 bp, Glycine max
  Clone ID: 700674257H1
aaataattaattaaattcctcgtggaatcttgttgaagccatgtctacagctggtcaggtcatcaagtgcagagctgcggtggcatgggaaccagggaagccactatc

SEQ ID NO: 60326 - DNA, 165 bp, Glycine max
  Clone ID: 700674258H1
gtttttgatgataagcttgtgttggctaacacacaagaattctttgatggaaattttccagtggattcttggttaccaatttttgtgaattgtctttatcctgtaagtcaatataccttcagaagctgtcgttgtaaatgttacatgtggtagtggacgtggtgg

SEQ ID NO: 60327 - DNA, 131 bp, Glycine max
  Clone ID: 700674259H1
ggtccttaaacactcatcagtcatcaccatggccaagctagttttttccctttgttttctgcttttcagtggctgctgcttcgctttcagttccagagagcagcctcaggtaaacgagtgccagatccaaa

SEQ ID NO: 60328 - DNA, 277 bp, Glycine max
  Clone ID: 700674261H1
ccgggcctgccagctcccctgagtgatgagcacttccaagcacccctctgccctttctctgtccttatgctgtcccggcctcgccagccctctggggcattgtgggcgctgcctgccaggaatgagcaagctctgttgctcgggagcctcttgtcaccttcttggacttattccccacctgataccttatagagaaaagtgtgaattcaggtggagagtaggcccaggccccatgaggcaccagtggaagcacagctccaagttcagacaggtgccc

SEQ ID NO: 60329 - DNA, 278 bp, Glycine max
  Clone ID: 700674262H1
aaaatttctaccgcattacattaggtggcatctgtataccttgttgatctacattctcccatcttttctcactgctgaaattaaatataagcggaatttgagtaatattcacatttccggcttattttacgacggcagatacaaattctggactaaacacgagataaatcttgctttgacagaagaggaaaagatggaagtgattagaagtagaggcattcctgctgatgttcttgcaaagcgagctcatgaatttgacaaacatgttgctcatgaaa

SEQ ID NO: 60330 - DNA, 274 bp, Glycine max
  Clone ID: 700674263H1
cgaggaagccaaagcaaaagcagaagaaatggcattgacgagaccttatgcaccatgagacttcgccacaacattggccagacttcatcacctgacatctacaaccctcaagccggtagcgtcacaaccgccaccagccttgacttcccagccctctcgtggctcagactcagtgctgagtttggatctctccgcaagaatgcaatgttcgtgccacactacaacctgaacgcgaacagcataatatacgcattgaatggacgggcattgatac

SEQ ID NO: 60331 - DNA, 283 bp, Glycine max
  unsure (1)..(283): unsure at all n locations
  Clone ID: 700674265H1
cacttcccgaagtgttaagagaatgcctctttctatagggggaggagctggtgcaaagaatgctattctcatgaatatgccaaatgctgttctttcaatgtggagatattttgttggagatctcgtctttgaagtttctaagatgacttctccctacattaaatgtacagtctctttcttcatagcatttggaaatttggctgatgacaccatcaattttgaggcttttccccacaagctggtgcagtnttggagagattcaggaaaaagttgtgttgaaatt

SEQ ID NO: 60332 - DNA, 141 bp, Glycine max
  Clone ID: 700674267H1
gtgcaccgtattaaagaatttaagatatactatgatgagagcgcggttcccattactgttgctgggagttgttttcctggcatcagcttctgtctcatttggccttgcgtattgggaaaagcagaaccccagtcacaacaa

SEQ ID NO: 60333 - DNA, 264 bp, Glycine max
  Clone ID: 700674269H1
aacagcttatcgccattgcaattggcgagacctgttgcaatttgctctgacaagccgctgctcccgctgctgctatgctgttctactgctctgctacgctgctgctctgcaaggctgaccctggcctggccaactcgtgaccagctggcacgaaatcgccattggtgctggcctctccactgccacgtggaccatccatggaggactcgccattgctgctggcgggttgccttcatcctggaaatacttttagaacagacccat

SEQ ID NO: 60334 - DNA, 275 bp, Glycine max
  Clone ID: 700674270H1
cttcgtctcaaatctcttcgttccttcgattcgttccatttcttccaaaatggccaaagacccagttcgcgttctcgtcactggagctgcagggcaaattgggtatgctcttgtccctatgattgctaggggagtgatgttgggtcctgaccagcccgtgatcctccacatgcttgacattcctccggcagcagagtcattgaatggggttaaaatggaattggtggatgctgcattccctcttcttaaaggtgttgttgccacaactgatgtgg

SEQ ID NO: 60335 - DNA, 275 bp, Glycine max
  Clone ID: 700674272H1
gaaacggcgcactccgtctgttcctcaccgtcaccggcgcgcgcaccctctgttccagcgactcctaattaagttgggaaataaaaaagacttcaaatttcccagatggctgcagcctttgcttccagatgctctcgtgtgggccgttctctgtctggtggattaagcaacagttcccctggtttatttacctcatcacatggcatgacatgcaacaatttgttttctcagcaacaacgtaccttcatacagatgaggactgttctcaaggttgt

SEQ ID NO: 60336 - DNA, 139 bp, Glycine max
  Clone ID: 700674273H1
attagatggcttccacatcacaagatcagctaactttcccacctccaccgaaccaacatattgtgatgtggaagccatctttttttggggcaaaaccagaaatggtgatcaaaggtggggtggttgcatgggctgatat

SEQ ID NO: 60337 - DNA, 271 bp, Glycine max
  Clone ID: 700674274H1
cactcatcagtcatcaccatggccaagctagttttttccctttgttttctgcttttcagtggctgctgcttcgctttcagttccagagagcagcctcagcaaaacgagtgccagatccaaaaactcaatgccctcaaaccggataaccgtatagagtcagaaggagggctcattgagacatggaaccctaacaacaagccattccagtgtgccggtgttgccctctctcgctgcaccctcaaccgcagagcctttcgtagaccttcctaca

SEQ ID NO: 60338 - DNA, 272 bp, Glycine max
  Clone ID: 700674276H1
gttcaatatcctagtataccttaataaataatttaagatactatgatgagagcacggttcccattactgttgctgggacttgttttcctggcttcagtttctgtctcatttggcattgcttactgggaaaaagagaaccccaaacacaacaagtgtctccagagttgcaatagcgagagagactcgtacaggaaccaagcatgccacgctcgttgcaacctccttaaggtggagaaagaagaatgtgaagaaggtgaaattccacgaccacg

SEQ ID NO: 60339 - DNA, 272 bp, Glycine max
  Clone ID: 700674277H1
gttgtattgaaattttcacaagaggaatttcttacagcttggtcaactcaggtgcgtcctgcaacaaccctgttggctgatgggtgtccatatttgtatgctatggtgcatgacagttcagtgtctacaataccaggtgattttgttattggtgttaagttgacaaccataaacaatatgtgtgcatatgggctcaatcctggtatttcaggttctcgtcttttgggcaccattcctcagtctatttcacagcaaactgtttggaatcaaat

SEQ ID NO: 60340 - DNA, 267 bp, Glycine max
  Clone ID: 700674281H1
gcttttccccacaagctggtgcactttggagagattcaggaaaaagttgtattgaaattttcacaagaggaatttcttacagcttggtcaactcaggtgcgtcctacaacaactctgttggctgatgggtgtccatatttgtatgctatggtgcatgatagttcagtgtctacaataccaggtgattttgtcatatggtgttaagttgacaaccataaacaatatgtgtgcatatgggctcaatcctggtatttcaggttctcgtct

SEQ ID NO: 60341 - DNA, 237 bp, Glycine max
  Clone ID: 700674282H1
ctgtttttagtagtttcttccctatttttggttcataactcagtttgtaactatgactgctgaggttatggctcaagaggagacacaagcagctgaggttgttgttgttgctgttgctgagccccagaaagagaaggatgctgaagaaaatgtggaaccaagagagccatcatcagtggatgaaaccaaacccaaaacggtggagaaaagctcttcttacaaggaagaaagcaacta

SEQ ID NO: 60342 - DNA, 270 bp, Glycine max
  Clone ID: 700674283H1
tgaccaagttcacaatcctcctcatctctcttctcttctgcatcgcccacacttgcagcgcctccaaatggcagcaccagcaagatagctgccgcaagcagctccagggggtgaacctcacgccctgcgagaagcacatcatggagaagatccaaggccgcggcgatgacgatgatgatgatgacgacgacaatcacattctcaggaccatgcggggaagaatcaactacataaggaggaacgaaagaaaagacgaagacgaagaagaag

SEQ ID NO: 60343 - DNA, 273 bp, Glycine max
  Clone ID: 700674284H1
tatgagactgcgcaaagagttaaacaaactttacaacgttacaaagaacttcaagacattatagctatccttggcttggacgaattatccgaagaagatcgcttaaccgtagcaagagcacgaaaaattgagcgtttcttatcacaaccttttttcgtagcagaagtttttaccggttcgccggggaaatatgttagtctagcagaaacaattagagggtttaaattgattctttctggagaattagatggtcttcctgaacaagcttttatt

SEQ ID NO: 60344 - DNA, 267 bp, Glycine max
  Clone ID: 700674285H1
ctagtacaccgtattaaagaatttaagatatactatgatgagagcgcggttcccattactgttgctgggagttgttttcctggcatcagtttctgtctcatttggcattgcgtattgggaaaagcagaaccccagtcacaacaagtgcctccgaagttgcaatagcgagaaagactcctacaggaaccaagcatgccacgctcgttgcaacctccttaaggtggaggaagaagaagaatgcgaagaaggtcaaattccacgaccacg

SEQ ID NO: 60345 - DNA, 273 bp, Glycine max
  Clone ID: 700674286H1
gcagcagcagcaaggaggttcccaaagccagaaaggaaagcaacaagaagaagaaaacgaaggaagcaacatattgagtggcttcgcccctgaattcttgaaagaagcgttcggcgtgaacatgcagatagtgagaaacctacaaggtgagaacgaagaggaggatagtggagccattgtgacagtgaaaggaggtctaagagtcacagctccagccatgaggaagccacagcaagaagaagatgatgatgatgaggaagagcagccacagtg

SEQ ID NO: 60346 - DNA, 268 bp, Glycine max
  Clone ID: 700674287H1
cccaaacagtctacagtttttgatattctcttgggaatctctcaagattttgaaattgctggtaatactcttatgccagctttttctgttccacaggctactgccagatcttctgaaaatgcggaatcctctgcatgatctggaattcgtgttttctttcgcttgttcgtttgtttaattcaataaaggaaattaggcatgaccctcttgttgagtatgctctgcctatctgaaaatttccacacctcttttaattgtcgtaatgatg

SEQ ID NO: 60347 - DNA, 270 bp, Glycine max
  Clone ID: 700674288H1
ggcggtggtcgtcctcccaaggaggatggtgaaaagcaacagcaacaacaacaacaacctgtgtctcttaggcttgacgacgtgaaccctgtgggactgggtcgaaggtcgcggcagttatttgatgaggtttggagaaagttctcgggattgggtcagatttctggcactatccggtcggatgatcaggaggctttggatgcccttctggtccgcgaaggtccgatgtgcgagttcgcaatccctggcgctcagaacactactgtactc

SEQ ID NO: 60348 - DNA, 126 bp, Glycine max
  Clone ID: 700674289H1
tgatgatattaggaaaaagcactatagaggagttaggcagagaccatggggcaaatgggcagcagaaataagagaccctaagaaagcagctagagtgtggcttggcacctttgacacggcagaggc

SEQ ID NO: 60349 - DNA, 273 bp, Glycine max
  Clone ID: 700674290H1
ttctcgagccgaatcggctcgagcttccatagccccccaaaaatgaagcgcaccatcttctttgatctctttctcttttgtgccaccaccacctcatacctaccttcagccatcgctgatttcgtgctcgataatgaaggtaaccctcttgaaaatggtggcacatattatatcttgtcagacataacagcatttggtggaataagagcagccccaacgggaaatgaaagatgccctctcactgtggtgcaatctcgcaatgagctcgacaaa

SEQ ID NO: 60350 - DNA, 272 bp, Glycine max
  Clone ID: 700674292H1
gacgaatccactggacacaaggtggtgaaaaaagaagccaaagtggaaatccacgacaatatttccgaaacgaaaaacgtaactgttgcggatgcttcggaagttgaagattctcctaagttcggcgtgacgtcagtttgcggcaggagaagagacatggaagattccgtttcggtgcggccttccttcacccaaggcttccactactttggcgttttcgacggtcacggttgctctcatgtcgcgactatgtgcaaggagcggttacacga

SEQ ID NO: 60351 - DNA, 274 bp, Glycine max
  Clone ID: 700674294H1
ctcgagccgcaaagttgaacaaaactcattttccaactacatttcttccaccaactcataaaattctcatatctgttcccaaaagcttgtttgtgagaatggcttcgggtgaaaagaaattcccacctcaacaacaacaaacacagcctgggaaggagcatgctatgaatccagtaccccaattcactagccctgactacaagccttcaaataaacttcaaggaaagatagcattagtgactgggggtgactctgggattggacgagcggtgtg

SEQ ID NO: 60352 - DNA, 273 bp, Glycine max
  Clone ID: 700674295H1
caatggtgaaggctgtggccgttcttggcagcagtgagggtgtcactggaactattcacttcgttcaggagggaagtggtctaaccagcgtaactggatctcttgctggtcttaagcctggtctccatggtttccatgtccatgccttgggggacactaccaatggttgcctctcaactggatcacatttcacatcctaataacaatgagcatggtgcccctgaggatgagaatcgtcatgctggtgatcttgggaatgttaatgtcggtgat

SEQ ID NO: 60353 - DNA, 93 bp, Glycine max
  Clone ID: 700674296H1
cttgacatcaagttacactccaactccatagctggaatctggtctgcaaaaagacagagggcgaattgtggagtattttggcaggctgtctta

SEQ ID NO: 60354 - DNA, 255 bp, Glycine max
  Clone ID: 700674302H1
caattttctattgaccttctcggtggaggaattttagtggacaaaactggagattggatcacacttatacaaaattctccaattagtaacttgttgagagttgctgcttggaagaaaggctgtttaatggttaagattgtgatgtctgggaatgcagcagtcaaaaggagtgattgggcctcattggtccaagtgtttttaacaaacagcaacagtacagagcattttgatgcatgtaagtggacaaaatcggaa

SEQ ID NO: 60355 - DNA, 197 bp, Glycine max
  Clone ID: 700674303H1
atcaagttatgatgatgatgagtattcaaaaccatgctgtgatctctgcatgtgcacacgctcaatgcctcctcaatgcagctgtgaagatattaggctgaattcatgccactcagattgtaagagctgtatgtgcacacgctaccagccaggacagtgtcgttgtcttgacaccaacgacttctgctacaaacctt

SEQ ID NO: 60356 - DNA, 255 bp, Glycine max
  Clone ID: 700674305H1
cttaaacttcttactgatgggaagttgtatgagggtaagcatattcctgtatctaatattagtgcaggggaaaatcatgtagttcaaatacccttaatggcacaggaggaaattctgtcttctagtgcaagtgatttcagaactgcaatggtgagtaaaaatagcaaacctcaagctactgcaatgcatgtgggagctatagaaattatcattgatagtttcgcaagtcctgattgcaacatagctggtgctatt

SEQ ID NO: 60357 - DNA, 255 bp, Glycine max
  Clone ID: 700674306H1
atatcctagtataccttaataaataatttaagatactatgatgagagcacggttcccattactgttgctgggacttgttttcctggcttcagtttctgtctcatttggcattgcttactgggaaaaagagaaccccaaacacaacaagtgtctccagagttgcaatagcgagagagactcgtacaggaaccaagcatgccacgctcgttgcaacctccttaaggtggagaaagaagaatgtgaagaaggtgaaat

SEQ ID NO: 60358 - DNA, 255 bp, Glycine max
  Clone ID: 700674308H1
acccaccaccaatctcaccaccgtacccgccgccgcacggtggcagtccttttcctcaaaggacttgcccaattgatgccctaaaattggggctttgcttggatgtgcttggagggttggtgcatgtgggaatagggaacccagttgagaacgtgtgctgtcccgttatacaggggttgcttgatcttgaagctgcaatttgtctttgcactgttattagggctaagcttcttaacctcaatatctttcttcctc

SEQ ID NO: 60359 - DNA, 257 bp, Glycine max
  Clone ID: 700674311H1
aacacaacaaaaaaagacaacccagagagcgcgtcttaataaacgctcttctctgaaaacccccatttcttttcttctttcttcttctctttcgcttcttcgatcttcgatcttcgtcgctgaaaatgagagagtgcatttcaatccacatcggccaggccgggattcaggttggaaacgcctgctgggagctttactgcctcgaacacggcattcagcctgatgggcagatgccaagtgacaagaccgttggtgga

SEQ ID NO: 60360 - DNA, 258 bp, Glycine max
  Clone ID: 700674312H1
tggaaaaacgcaagacaaatagaggaagatcgatcgagatctccctcgcgtttgtctcagttgaagaaattaaaaagcagaactagagtaactcaacggtctcagaattttcagggttttcagtacttccatattttttcttccggatttgagttggaagaagatcgaagaggtttctagttgcttcaattgttcctctgggtggtggagacttgttatatttttaaaatattgacaattcgaaatgccaaaggagag

SEQ ID NO: 60361 - DNA, 254 bp, Glycine max
  Clone ID: 700674314H1
gtacaattgtaaggatgaacatttggcatctatcagccttagtggagacctaatgcttcataaccttgcttctgggcaaaaggctgcggagctcaaagatcccaatcaacagatgttgagagttcttgattattctcgagttagtcgtcaccttcttgtgactgctggtgatgatgggactgtacatttgtgggatacaactggtcgcagccctaaggtttcatggataaagccgcattccgcaccaactgctg

SEQ ID NO: 60362 - DNA, 260 bp, Glycine max
  Clone ID: 700674315H1
cacgttctcattctcacttgaagcgggtcacctcaatttgttgccagcatgctaatccatctcctttcactccctttctcgcttcttccaaccaccccaatacttttccatccatttcctctccttcagttcgctccacacccgaatcccattctctcaatcaaatcaaaactggggctttccaaaaaccaaaggcaataacagctcggacgcttgtaatactttctgctcttgctatgatcttaatccaaccagctatt

SEQ ID NO: 60363 - DNA, 256 bp, Glycine max
  Clone ID: 700674316H1
gattaacaagggtactgttgaaatcattacccctgtggagctcattaagaagggagacaaggttggatcttctgaagctgcattgcttgccaagctagggataaggcccttctcgtatgggcttgtggttctttctgtttatgataatggttcagtgttcagtcctgaggttcttgatcttactgaggatgaccttattgagaagtttgctgctggtgtctcaatggttacttcactttcattagctatctcatac

SEQ ID NO: 60364 - DNA, 61 bp, Glycine max
  Clone ID: 700673722H1
ttgctttcgcagaagagagagagacccatttctagagagagagactcgcagtggcagacat

SEQ ID NO: 60365 - DNA, 131 bp, Glycine max
  Clone ID: 700673723H1
aattgattggtttatttcctctcaggaatgtgttcccaggacctattgtgttttaaatccacaaaatccttttgtgttaaataggtggatgggaaaactgactttccctcagggcacttcccgaagtgtta

SEQ ID NO: 60366 - DNA, 238 bp, Glycine max
  Clone ID: 700673728H1
agaagatgggtttgaagaacaacatggtggtgctaaaggtgtgtttggtgctacttttccttgtggggggtactactagtgccaacttgaggctgagtaagcttggcctgctcatgaaaagtgatcatcatcaacactcaaatgatgatgagtcttcaaaaccatgctgtgatcaatgcgcatgcacaaagtcaaaccctcctcaatgccgctgttcagatatgaggctaaattcgtg

SEQ ID NO: 60367 - DNA, 246 bp, Glycine max
  Clone ID: 700673729H1
caaaaactatacaacgttgcttttgttttgttttgttttgtctctctctaatcattccaatggccaaagaaggacccaactgggacgggttgctcaaatggagcattgctcattccgatgggactcgccccactcgcaatttaagtgaggaggatcggagatggtttatggaagcgatgcagttcacagaccattgatgttgtaaaacgtatgaaagagatcacacttgtgatgcaaactccagaa

SEQ ID NO: 60368 - DNA, 89 bp, Glycine max
  Clone ID: 700673730H1
caaagcaatggctacttcaaagttgaaaacccagaatgtggttgtatctctctgcctaaccttaaccttggtatgggtgctactgacca

SEQ ID NO: 60369 - DNA, 115 bp, Glycine max
  Clone ID: 700673731H1
tcctagtacaccgtattaaagaatttatgatatactatgatgagatcgcggttcctattactgttgctgggcacttgttttcctggcatcagtttctgtctcatttggcattgcg

SEQ ID NO: 60370 - DNA, 254 bp, Glycine max
  Clone ID: 700673732H1
ttcaatatcctagtataccttaataaataacttaagatactatgatgagatcacggttcccattactgttgctgggaattgttttcctggcttcattttctgtctcatttggcattgcttactgggaaatagagaactccaaacacaacaagtgtctctagagttgcaatatcgagagatactcgtacaggaaccatgcatgccatgctcgttgcaacctccttaaggtggctgaagaagtatgtgcagaaggt

SEQ ID NO: 60371 - DNA, 120 bp, Glycine max
  Clone ID: 700673733H1
attctctccattggtcctgaaacactcatcagtcatcaccatggccaagctagttttttccctttgttttctgcttttcagtggctgctgcttcgctttcagttccagagagcagcctca

SEQ ID NO: 60372 - DNA, 264 bp, Glycine max
  Clone ID: 700673734H1
ccctgctgcataggaagaaaccctagcctctcaccctccctgcgacacgatgcagatcttcgtgaaaaccctaacgggtaagacgatcacccttgaggtggagtcttctgacaccatcgacaacgtgaaggccacgatccaggacaaggaaggcatccctccggaccagcagcgcctcatcttcgccggaaagcagctggaggacggccgcaccctcgccgactacaacatccagaaggagtccacctccaactcgtcctccgt

SEQ ID NO: 60373 - DNA, 260 bp, Glycine max
  Clone ID: 700673735H1
ctgacaaggaaaaccctaagagatgaagagaactcctatcttgttccctctcttctttcttctttgtgccttcacctcatatctaccttcagccaccgctgatgatgatcatgtgtacgacactgacggcgataagcttcaatacggtgtcaattatttcgtgttgccagtgataagaggccatggcggtggactacaagtagcatcagccggaaacgatacttgtcctctgactgtggtgcaatctggcaacgagctct

SEQ ID NO: 60374 - DNA, 256 bp, Glycine max
  Clone ID: 700673736H1
agcacgagcagaaggaggaacacgaatggcatcgcaaggaggaaaaacacggaggaaagggaagtgaagaggaacaagatgaacgtgaacacccacgcccacaccaacctcatcaaaaggaagaggaaaagcacgaatggcaacacaagcaggaaaagcaccaaggaaaggaaagtgcagaagaagaagaagaccaagacgaggatgaggagcaagacaaagagagccaagaaagtgaaggttctgagtctcaaag

SEQ ID NO: 60375 - DNA, 252 bp, Glycine max
  Clone ID: 700673737H1
tgagattactgacatttctctggctgattatatcggagtggcgacatccaagcacgccacgtatgtgcctcacaccgccggcaggtactcggtgaagcggttcaggaaggcgcaatgccccattgttgagaggctgaccaactctctcatgatgcacggtagaaacaatggcaagaaactcttggctgtcaggatcatcaaacatgctatggagattattcattggttgactgaccagaaccccattcaggt

SEQ ID NO: 60376 - DNA, 244 bp, Glycine max
  Clone ID: 700673738H1
ctttctctctcctctctcatcacacactcaaactctctctctacactacattggttcaaaggcaaaaatcctgacttgggtctcaatcgaaagtgataggccacaaaagagagcctttagtttcaacaccacacttcactctcagcttccatggcgatctcggggaacgtgccaccgttgctgcacgttaacttcaattgggtttgctttctgctttgaatttgccaaaaaaagagccaaaaat

SEQ ID NO: 60377 - DNA, 247 bp, Glycine max
  Clone ID: 700673739H1
aagaaacagtgactcagattctaacatcaactttaaaccttgtcctttcatcatacacacatttcactaacatcaatcccctcaatctgaaatgacaacctttgcattcacttccttgctcccacttacagtctcatcaccatcttcatcttccaaattctcagcttttcatgctatcagagcctcattagattctgagtatgttgcctcccgacacacccttagaagggcattctggaagggtgtt

SEQ ID NO: 60378 - DNA, 98 bp, Glycine max
  Clone ID: 700673740H1
acaggttgccgcaccttaaaaccggaaacaaacgcaatcgttacttgatttcaagaatttctcaattgcttcctactgcgttgtgtacgatttcttaa

SEQ ID NO: 60379 - DNA, 108 bp, Glycine max
  Clone ID: 700673741H1
cactaaaggaaattaggcatgaccctcttgttgagtatgctctgcctatttgaaaatttccacacctcttttaattatcgtaatgatgtgtgaagtgtgtgttatttt

SEQ ID NO: 60380 - DNA, 127 bp, Glycine max
  Clone ID: 700673742H1
gatagattggtaggcacagaacatgagggatatgatccttttcttggtgtaattcaaaaatatgccactcccatgttgcccctagatgacgaaattctttctaaggttgcacaagatatggttgtgg

SEQ ID NO: 60381 - DNA, 243 bp, Glycine max
  Clone ID: 700673745H1
cttaaacactcatcagtcatcatcatggccaagctagttttttccctttgttttctgcttttcagtggctgctgcttcgctttcagttccagagagcagcctcagcaaaacgagtgccagatccagaaactcagtgccctcaaaccggataaccgtatagagtcataaggagggctcattgagacatgcacccctaagaacaagccattccagtgtgcaggtgttgcccactctcgcgacacc

SEQ ID NO: 60382 - DNA, 103 bp, Glycine max
  Clone ID: 700673747H1
ggagtagcaaacattaatcactagtaccactatggccttggaattgaagtgttgcagaaaaagagctcccacgttcatatccacactgcaattcaatggccat

SEQ ID NO: 60383 - DNA, 131 bp, Glycine max
  Clone ID: 700673748H1
tgttgatcagattttcgggtaccatagttggagtggaagatatttctcctcattgggtaaattcaaaatggcgatcactcatggttcaatgggatgaacctgcagctgttcccagacctgatagggtctca

SEQ ID NO: 60384 - DNA, 251 bp, Glycine max
  Clone ID: 700673749H1
gcgcctttcagaggcggaaggcccattcgggtggttacatttccgaataccattgtgcagattgaaccatacatgaattcaaggtttcagcttttgagtaccactaccaatggtgattttgttcaaggaaaagatctcgcaatggttaaagttaatgtagcatgtgctgctgttggcttgacatcaagttacactccaactccattgtggacatctggtttgcaaccagacagagggttaattgtagagta

SEQ ID NO: 60385 - DNA, 253 bp, Glycine max
  Clone ID: 700673752H1
acacgcttcagaagacatggcctcattgggtgggttacaaaatgtgagcggcatcaattttcttatcaaagagggtccaaaagtcaatgcaaagttcgagctgaagccgccaccatatccactgaatggtttggagccggtgatgagccagcagacacttgagtttcactgggggcagcaccacaagacttatgtggaaaatctgaaaaaacaagttgttgggacagagcttgatgggaagtcactagaagag

SEQ ID NO: 60386 - DNA, 249 bp, Glycine max
  Clone ID: 700673753H1
ctcgagccgctcgagccggtctttgaacactcatcaccatggccaagcttgttctttccctttgttcccttcttttcagtggctgcttcgctctgagagcgcaggcacagcaaaatgagtgccagatccaaaagctgaatgccctcaaaccggataaccgtatagagtcggaaggtgggttcattgagacctggaaccctaacaacaagccattccagtgtgccggtgttgccctctctcgctgcaccc

SEQ ID NO: 60387 - DNA, 248 bp, Glycine max
  Clone ID: 700673754H1
cccatatgtgcatgttgtggactcttttacagatgatgagcctcaagatccatacgagtctcgctccacattgcttttcttccgagggagaacttacaggaaggatgaagggattgtccgtgttaaactagcaaagatattggctggttatgatgatgttcactatgagagaagtgttgctccagaagaaaacataaaagcgtgctctaaagggatgcgttcatcaaagttctgtttgcatccagcag

SEQ ID NO: 60388 - DNA, 230 bp, Glycine max
  Clone ID: 700673755H1
gaccctcaataaatgcctcaggtgaaaagaagaaaattgtgggggtgttctacaaagggaatgagtatgctaaattgaaccccaatttcgtggggtgtgttgacggagcattgggtatacgtgagtggctggaatcacagggtcatcagtacattgtcactgatgacaaagaaggaccagattctgaacttgagacacacattccagatgcccatgtcatcatatctact

SEQ ID NO: 60389 - DNA, 104 bp, Glycine max
  Clone ID: 700673756H1
ggctcgagccgaatcggctcgagcgtgtccctcctcacttcattgagctatgttgtttaggacctttcattggctttcatagtctacattgccaccacctactt

SEQ ID NO: 60390 - DNA, 223 bp, Glycine max
  Clone ID: 700673757H1
ctcgagcgctccattggtccttaaacactcatcagtcatcaccatggccaagctagtattttccctttgttttctgcttttcagtggctgctgctttgctttcagttccagagagcagcctcagcaaaacgagtgccagatccaaaaactcaatgccctcaaaccggataaccgtatagagtcagaaggagggctcattgagacatggacccctatcaacaag

SEQ ID NO: 60391 - DNA, 81 bp, Glycine max
  Clone ID: 700673759H1
tcttctgcatcagatagtttggcgatacttggctactacgaaattagtcatggatgttattcataagttcctgagcatagt

SEQ ID NO: 60392 - DNA, 243 bp, Glycine max
  Clone ID: 700673760H1
attttgttggagatctcgtctttgaagtttctaagatgacttctccctacattaaatgtacagtctctttcttcatagcatttggaaatttggctgatgagaccatcaattttcaggcttttccccacaagctggtgcagtttggagagattcaggaaaaagttgtattgaaattttcacaagaggaatttcttacagcttggtcaactcaggtgcgtcctgcaagaaccctgttggctgatg

SEQ ID NO: 60393 - DNA, 244 bp, Glycine max
  Clone ID: 700673761H1
aagaaaacgggtccggtggcagagagatttgggtttctctcttccaatttatggcttctttgagacctaccctctctcaactttccctttcccaatccaattttctcagaaaatctacatggaacaatcatctaccttgctatttacacaaaaggatcgcaaagttgcaaacttttaccacttctaagtcttccactttcagggtttgctgtagttctcaagagaccaataacaaaaacaatgg

SEQ ID NO: 60394 - DNA, 241 bp, Glycine max
  Clone ID: 700673763H1
gaggcctcctacgataccaaattcgaggagataaacaaggttctgtttagtagagaggaagggcagcagcaaggggagctgaggctgcaagagagcgtgattgtggaaatctcgaaggaacagattcgggcactgagcaaacgtgccaaatctagttcaaggaaaaccatttcttctgaagataaaccttttaacttgagaagccgcgaccccatctactccaacaagcttggcaagttct

SEQ ID NO: 60395 - DNA, 132 bp, Glycine max
  Clone ID: 700673765H1
gttcaatatcctagtacaccgtattaaagaatttaagatctactatgatgagcgcgcggttcccattactgttgctgggagttgttttcctggcatcagtttctgtctcatttggcattgcgtattgggaaa

SEQ ID NO: 60396 - DNA, 259 bp, Glycine max
  Clone ID: 700673766H1
ctcacatgtcccagtctctttccaactctaccagtctaagtttgtaactcttgttgattccaaagttgcacaccacactcaacttaccgttccttttcctctcccataaaaccagcaagcgactcactcccacactcagcccagtcaagagagagaatgtcgaaggcagtgagccaagaaggcctgcagaggcaggactacgtagaccctcctccagcctctcttttcgaccttgccgagatcaagctctggtccttct

SEQ ID NO: 60397 - DNA, 116 bp, Glycine max
  Clone ID: 700673767H1
gctcggacttctcctcgaggccaaggaaagcgtgaacaagaccaggaccaggacgcggacgaagatgaagatgtcgatcaacctcgcaagctccgcgaatggagatcgaaaaagac

SEQ ID NO: 60398 - DNA, 249 bp, Glycine max
  Clone ID: 700673768H1
gtctttgaacactcatcaccatggccaagcttgtactttccctttgtttccttcttttcagtggctgcttcgctctgagagagcaggcacagcaacatgagtgtcagatccaaaagctgaatgccctcaaaccggataaccgtatagagtcggaaggtgggttcattgagacctggaaccctaacaacaagccattccagtgtgccggtgttaccctctctcgctgcacccttaaccgcaatgcccttc

SEQ ID NO: 60399 - DNA, 246 bp, Glycine max
  Clone ID: 700673769H1
ctgaaaaggaagatcaagaaaaacccaaaaagattgatgccagattgagacaaagaatagatcctcaatacaatgaggttcaggctcagatggaaacaaatttgtgtaaattgtctcttgatgatgttgaaactcctaaaggttccatgttggatctgaaaatttctcaatctaaaattgcacttcccaaaaacacagttggaggaaccattctgcgtagtgaactattggcaaattttatgacag

SEQ ID NO: 60400 - DNA, 135 bp, Glycine max
  Clone ID: 700673770H1
cgcatggtcacccctgcccctcgtttccttgaaagaagtttggagacatcatataatcccaacatgtggatttgtgtgagggttcctccaatctgacacgcgaatgattcatcttctgattcgcagtcctaagtt

SEQ ID NO: 60401 - DNA, 121 bp, Glycine max
  Clone ID: 700673771H1
ggctcgagattctctccattgtctttgaccactcatcaccatggacaagcttgttctttccctttgtttccttcttttcagtggctgcttcgctgctgagagcgcaggcacagcaaaatga

SEQ ID NO: 60402 - DNA, 133 bp, Glycine max
  Clone ID: 700673772H1
ataccgtgaagctgctgagcaatataaacaacagggtgtcagctttgtggtgggagatgttgagtctagtcaaggtgctttccagtattttggactggaagaagagcaagtacctctaattatcattcaacat

SEQ ID NO: 60403 - DNA, 128 bp, Glycine max
  Clone ID: 700673773H1
cttgacatcaagttacactccaactccattgttggaatctggattgcaaaaagacagagggttcattgtggagtattttggaaggatgtcttacgtggctcataacgttaatcagccccaagagaaag

SEQ ID NO: 60404 - DNA, 124 bp, Glycine max
  Clone ID: 700673775H1
gtgcagtgaaagcagtagtagaagaagaaaacacgagttacgcacagtcccggtgccgccaccaccaccatcggtttcagtcaactaatggcaaccactctcactccaatccaaaccctcaaat

SEQ ID NO: 60405 - DNA, 240 bp, Glycine max
  Clone ID: 700673776H1
gtggaatagtgttgccacctccctcgccttctcagggttccattggttcttccggaatctctgaagctgagtctcaacagggtcaaggaacaacacctatggatgttagaagccctactagtgctaacttgttgccagacagtgaactgaaatcaccagcaggtgttgctgagaacaacacaggcaagaatgctgctgctgctgtagtgacaatgtgaagtcactctaacaaacattcac

SEQ ID NO: 60406 - DNA, 233 bp, Glycine max
  Clone ID: 700673777H1
aacccaacaccatcatcatcgttcacgccaagtaaacgatcctctcttctccacctcaccctttctctctcttctctctctttttctctctgttacttcacaataccaacagcacaacctggttccgggtcgcactacttgccccggatcaggtcccttctcatgcaaccaccgattcaagtgtttttcgcctttcctaaacaacaactataggcaactcaaagtctaccctt

SEQ ID NO: 60407 - DNA, 123 bp, Glycine max
  Clone ID: 700673778H1
ccaaagaataaaaaagtaccagctccttcaggctgcttgaaatgcgtcgcatgtggacaatctgattggagtattgaggatccagcattcaatgattttggtgttctattctatttattgatg

SEQ ID NO: 60408 - DNA, 130 bp, Glycine max
  Clone ID: 700673779H1
tgaagaagatgagaggggtgacgagagcagtatttgtaggcagagccctaagaagcaattccaacaccgccgtgtacggtgttggtgccacccttcatcgagatcgaatggctccccatggctgcttaac

SEQ ID NO: 60409 - DNA, 115 bp, Glycine max
  Clone ID: 700673780H1
agcaatacaaggaaagttaggcatgaccctctgtgttgagtatgctctgcctattttgaaaatttccacacctcttttgaattatcgtaatgatgtgtgaagtgtgtgttatttt

SEQ ID NO: 60410 - DNA, 257 bp, Glycine max
  Clone ID: 700673781H1
ctaccaatggtgattatgttcaagggaaagatctcacaatggttaaagttaatgtagcatgtgctactgttggcttgacatcaagttacactccaactccattgttggaatctggtttgcaaaaagacagagggttaattgtggagtattttggaaggatgtcttacgttgctcataacgttaatcagccccaagaacagatttgttagagggaaattttcctttgatatgaaatctcgctctagattggaaaaagt

SEQ ID NO: 60411 - DNA, 112 bp, Glycine max
  Clone ID: 700673782H1
cattggaacaccggttcatcacacgaggatccagcactcttctcaaatcccgaaacttttgatgcttcaaggtttgacggggcagggcctacaccattttcatatgttccat

SEQ ID NO: 60412 - DNA, 246 bp, Glycine max
  Clone ID: 700673784H1
agagattgttcctactagatcatcatgacccaatcatgccatatttgaggcgaataaatgcaacctccacaaaggcttatgctaccagaaccatccttttcctgaaaaatgacggaactttaaggccacttgccatagagttgagtttgccacatcctcagggagatcaatctggtgcttttagtcaagtttttctgcctgcagatgcaggtgttgaaagttctatttggctgctagcaaaggctt

SEQ ID NO: 60413 - DNA, 122 bp, Glycine max
  Clone ID: 700673785H1
caggatcaaggctgagagaagtgacatggtttatgggttttccgcagggaggaaggatcaaattttgcattgttttttaaacaaggaaggcgagtgcacggttcgtcctgattcaatagatg

SEQ ID NO: 60414 - DNA, 133 bp, Glycine max
  Clone ID: 700673786H1
aagatttgaaattttaataaaccgcgatcacaggttgccgcaccttaaaaccggctacaaaagcaatcgttacttgatttcaagaatttctcaatgtcttcctactgctttgtgtacgatgtcttaagggaaa

SEQ ID NO: 60415 - DNA, 138 bp, Glycine max
  Clone ID: 700673787H1
gaagatggaactttaaagccagtggccatcgaattaagtttgccacattctgctggggatctgtcagctgccgtcagtcaagtcgtcttacctgctaaggaaggtgttgagagcacaatttggctactagccaaagct

SEQ ID NO: 60416 - DNA, 220 bp, Glycine max
  Clone ID: 700673789H1
ggaaaggaaagtgaagaagaagaagaagaccaagacgaggatgaggagcaagacaaagagagccaagaaagtgaaggttctgagtctcaaagagtaccacgaagacataagaataagaacccttttcacttcaactctaaaaggttccaaactctcttcaaaaaccaatatggccacgttcgcgtcctcaagaggttcaacaaacgctcccaatagcttc

SEQ ID NO: 60417 - DNA, 216 bp, Glycine max
  Clone ID: 700673792H1
gacggcgaacgtaaacgctgtcgttgcgccaatcgcggcgttgttgttggtagtgctactcgcggcgagcgtagtagtagaagctcaggagaactcggacgtgaagacgctggtgaagcccatgcacgggaagatgtactgcgacaaaggttgggaatgtaagggctggtcaatttactggtgtaacctcactattactgattatgtccagaccta

SEQ ID NO: 60418 - DNA, 97 bp, Glycine max
  Clone ID: 700673794H1
gcaaatcaagcacagaacagttgaagtgaatggcataaaaatgtctgttgcagagaaaggagagggtccagtggtgttgttcctccacggcttccct

SEQ ID NO: 60419 - DNA, 271 bp, Glycine max
  Clone ID: 700673801H1
gttcaatatcctagtataccttaataaataatttaagatactatgatgagagcacggttcccattactgttgctgggacttgttttcctggcttcagtttctgtctcatttggcattgcttactgggaaaaagagaaccccaaacacaacaagtgtctccagagttgcaatagcgagagagactcgtacaggaaccaagcatgccacgctcgttgcaacctccttaaggtggagaaagaagaatgtgaagaaggtgaaattccacgaccac

SEQ ID NO: 60420 - DNA, 284 bp, Glycine max
  Clone ID: 700673802H1
cggctcgagaattctgttgtgccacactgaccaagccccaacgaagagaaccaaactttctttagctatctttctcgataatctgatagcctgatcttcaaacctagcctctggcaaatgtaaagaaaccgaggtagaagaagaagaccctgagctcgtaacatgcaaacaccaatgccaacagccacagcaatacactgagggtgacaagcgggtatgcttgcaaagatgtgacaggtatcatcgtatgaagcaagagcgagagtaacacatccaagaggaaa

SEQ ID NO: 60421 - DNA, 277 bp, Glycine max
  Clone ID: 700673803H1
agccaggcaagccccactcaaccaccacacctctcctcgttcacgctacccctttctgctcttcttctacctttcaagttttaaaagtataaagatggcagagacattcctatttacctcagagtcggtgaacgagggacaccctgacaagctctgcgaccaaatctccgatgctgtcctcgacgcttgcctcgagcaggacccagacagcaaagttgcctgcgaaacatgcaccaaaaccaacttggtcatggtcttcggagaaatcacgaccaag

SEQ ID NO: 60422 - DNA, 275 bp, Glycine max
  Clone ID: 700673804H1
agttgtgttgtgtgagaatatgaataacaacaaccatggaatggttcctctgtgatctgaaattctgaatattgtgattttgtgttccttgttctcttcctctgttccagtttttgttactgtttgggtttactttcctatatgatgtaaaatttacacatggaataacgtggaaaaagtaggtggtgcaaaatacaaaaagaaaaaaaataatggacaaaagtggtctattaaaggatgatactgatttgtcaacagtaggggtgaaagaggga

SEQ ID NO: 60423 - DNA, 274 bp, Glycine max
  Clone ID: 700673805H1
ggaaaaggttcacatcaacattgtcgtcattggacatgtcgactctgggaagtcaactaccactggtcacttgatctacaagcttggaggtattgacaagcgtgtgattgagaggttcgagaaggaggctgccgagatgaacaagaggtcattcaagtatgcctgggtgctcgacaagctcaaagctgagcgtgaaagaggaattaccattgatattgctttgtggaagtttgaaaccaccaagtactactgcacggtcattgatgctcctgga

SEQ ID NO: 60424 - DNA, 274 bp, Glycine max
  Clone ID: 700673806H1
tatcgagccgagattactgagtaagggcaacgatattctgtgtagcgattatgctagttacgatggtttgattaccaagcaagttatgagcaagatggcagaaatgataaacagtctttgtggtggtgatgaaaaattgatgcgcgaaaggacacacctgctgttggcttgttgttcaaggatggcaatttgtaagaaagatgtttggagagttgaatgtggaatcccttctggatttccgctcacagttatttgcaatagcatttttaatgag

SEQ ID NO: 60425 - DNA, 276 bp, Glycine max
  Clone ID: 700673807H1
ccttagttcaatatggggaagcccttcttcactctctctctttcttccctttgcttgctactcttgtcgagtgcatgctttgctattacctccagcaagttcaacgagtgccaactcaacaacctcaacgcgttggaacccgaccaccgcgttgagtccgaaggtggtcttattgaaacatggaactctcaacaccctgagctgcaatgcgccggtgtcactgtttccaaacgcaccctcaaccgcaacggcctccacttgccatcttactcacct

SEQ ID NO: 60426 - DNA, 273 bp, Glycine max
  Clone ID: 700673808H1
accattcaaattggctgttatacgcgatagttgctctatgatctagactagaggcttagttagggttttctgttaccgccatggatttcgagagtaggaggcttcatttgctcatcttcgtggttgccatcattgctcttagcttcacagctgaaaaatgcagggaacttgttggggaggaggggtcatcccagagtggaaagtttacaatcttaaattgctttgatatgggttctggaactgtagcatgtgctgtcaaggaaggtgtgaagc

SEQ ID NO: 60427 - DNA, 265 bp, Glycine max
  Clone ID: 700673810H1
caacttttcacacatgaccatgctccctcattcattaactatgattgcaacactaataatcatttttcttgcacaaacacttgtgggggtgagttcacttcctgaagctgataaaataaccaatttgccggggcagccacgggtcgaatttcagcaatattctggttatgtcaccgtggatgatcaaaatcaaagagctttgttttactactttgttgaggctgaagaaaacccttcttccaagccattagtcctatggttgaat

SEQ ID NO: 60428 - DNA, 176 bp, Glycine max
  Clone ID: 700673811H1
gataaacctcgatcacaggttgccgcaccttaaaaccggacacaatatcaatcgttacttgatgtcaagaatctctcaatttctgcctacttctttgtgtacgatttcttaagggaaagaaaatcactctctgtgctggtcacagacttcgtgaatcatttccttttcgacacatt

SEQ ID NO: 60429 - DNA, 279 bp, Glycine max
  Clone ID: 700673812H1
attatcaatgaaggtaataactaaaaatattgctcgtatactatttattcaatttcccgaatggtcggaagattttagggattggaagagagaaatgtatattaaatgcacatataatggtgttcaattatccgaaagagaatttccagaataatggctaacagatggtattcagataaagatcttatttccttttcgtctcaaaccttggcacaaatctaagctacgatccaatgaaaagaaaaaggatctaatgaataaaaagaacttttgtctgct

SEQ ID NO: 60430 - DNA, 288 bp, Glycine max
  Clone ID: 700673814H1
caatcctcctcatctctcttctcttctgcatcgcccacacttgcagcgcctccaaatggcagcaccagcaagatagctgccgcaagcagctccagggggtgaactctcacgccctgcgagaagcacatcatggagtacgatccaaggccgcggcgatgacgatgatgatgatgacgtcgacaatcacatgtctcaggaccatatcggggaagaatcaactacataaggaggaacgaaggctcagacgaagacgtagaagatgtaggacacatgcagaagtgctgcaca

SEQ ID NO: 60431 - DNA, 277 bp, Glycine max
  Clone ID: 700673815H1
tttggaagtatagcatgatttgtcgtggatgggtaaaatgccaagagatgaaccagcctcagtgttagtttggatctaatagtcttggatcgattgctattgttgctgggggaagtgatcagtatggaaatgttctaaaatcagctgagttgtatgactcttcaacaggtatgtgggaacttttaccaaacatgcacacatcgcgtagatagtgttctggtttttatatggatggcaaattctacgtgattggtagaatgtctagtacaactgtttc

SEQ ID NO: 60432 - DNA, 285 bp, Glycine max
  Clone ID: 700673816H1
cttagttgccaagttggaatcaatccatactccatggaatggaccggtttggccaacagactactgagtaagggcaacgatattctgtgttgcgattatgctagttttgatggtttgattaccaagcaagttatgagcaagatggcagaaatgataaacagtctttgtggtggtgatgaaaaattgatgcgtgaaaggatacacctgctgttggcttgttgttcaaggatggcaatttgtaaaaaagatgtttggagagttgaatgtggaatcccttctggattt

SEQ ID NO: 60433 - DNA, 272 bp, Glycine max
  Clone ID: 700673817H1
actccagctgaataattagaggtctcttcccaactcggaactcagtccattccgcatttcaattttctcttcacttggcaaagcccaaaccaaaccctggctgaagaagagaattgactgagaagaagaacacagaaatgggctccgaactgattttcagagggcacgagacccagcccgtggacgacgcgtactcaccaaagccccacaaaccctggctcaccgtgactcgcccgattcactacatgctccgtgagcagcgactcctcttc

SEQ ID NO: 60434 - DNA, 274 bp, Glycine max
  Clone ID: 700673818H1
cgcgctcgcgcgagatcgacttcgagaacccgccgccgtgggacgagcagcagaaccaaaactacaaggccaagttcatgtgcagctacggcggcgacaccaagatcctcgccgtcgaccgctccgttaagttctccgccttcctctccaagctctccgccctctgcgactccccgccacaggacctcaccttcaagtaccagctccccggcgaagacctcgacgccctcatctccgtcaccaacgacgacgacctcgaacacatgatgcacga

SEQ ID NO: 60435 - DNA, 272 bp, Glycine max
  Clone ID: 700673819H1
ccaactaacaataattccttcacttgcagaacttagttctctgttgcatcatcatcatcttcattagtgttagccctaaacttcaccttcaaccatgaccacagtgccaccacacagtgtccaagtgcacacaacaacacaccgctacgaagccggcgtcgtcccgccggctcgttttgaggcgccgcgttacgaagccggcatcaaggcgccctcttccatttaccattccgagagaggtccgacgacctctcaggttctcgcagttgtcg

SEQ ID NO: 60436 - DNA, 271 bp, Glycine max
  Clone ID: 700673820H1
agaagatgatgatgatgaggaagagcagccacagtgcgtggagacagacaaaggttgccaacgccaaagcaaaaggagcagaaatggcattgatgagaccatttgcacaatgagacttcgccaaaacattggtcagaattcatcacctgacatctacaaccctcaagctggtagcatcacaaccgccaccagccttgacttcccagccctctggcttctcaaactcagtgcccagtatggatcactccgcaagaatgctatgttcgtgcca

SEQ ID NO: 60437 - DNA, 268 bp, Glycine max
  Clone ID: 700673821H1
cttgggtatcaagccttgtgttggctgtaatagaataagcttcaattggaaacgccagagctccatcaccggaacaagacccaggcaggtgtcgcagtacgcggagaaaggacgctatataaatatatttgtccccgatgctctctatttcagccactcgtatattcttcctccgctcaacaactataaggttatcttcttcttcttcttctcttcaattcttctccaatcccaaccgcaccctcttccgtccctttcttcacacttc

SEQ ID NO: 60438 - DNA, 273 bp, Glycine max
  Clone ID: 700673823H1
caaagaaattcagaggaacttcctcgcaggttcgcaagacaatgtgataagccagatacctagtcaagtgcaggagcttgcattccctgggtctgcacaagctgttgagaagctattaaagaaccaaagagaatcctactttgtggatgctcagcctaagaagaaagaggaggggaataagggaagaaagggtcctttgtcttcaattttgagggctttttactgaataagtatgtactaaaatgtatgctgtaatagctcatagtgagcgag

SEQ ID NO: 60439 - DNA, 274 bp, Glycine max
  Clone ID: 700673824H1
tgggaaaactgactttcccccagggcacttcccgaagtgttaagagaatgcctctttctatagggggaggagctggtgcaaagaatgctattctcatgaatatgccaaatgctgttctttcaatgtggagatattttgttggagatctcgtctttgaagtttctaagatgacttctccctacattaaatgtacagtctctttcttcatagcatttggaaatttggctgatgacaccatcaattttgaggcttttccccacaagctggtgcagtt

SEQ ID NO: 60440 - DNA, 276 bp, Glycine max
  Clone ID: 700673825H1
gaaaatcgcaaaggcagagcaagaacacaacacaagacatcgaagcagaagaagacatggggttgcagtggctgattctcacctacgtggtcgcagccgaagctgcggtggcaattctgctaacccttcccacgcccaaactcctgaggaaccgtttcgcctctctcgtttccctcattcttcaacccgcgcttttcattgtaccctttgcagggttccacctcttagatctatactggaaaaatgagcatcgcttgatgtgtacctctgaagttt

SEQ ID NO: 60441 - DNA, 110 bp, Glycine max
  Clone ID: 700673826H1
agaacatattagacctcatattgaacgccggtggtggtggtggtgccgccgctggaggtgatgctaccgctgcagacgaattcgctgacgatgaaaactacgaagaagtc

SEQ ID NO: 60442 - DNA, 278 bp, Glycine max
  Clone ID: 700673827H1
gaccaaattgtcctttataataacttgggtgatccttcatcttgaactagttttgtaggttgagttaggtttagtccattttcatctaatacaaacttttgaaagacgtttcatcttcctttgttgttatcaatgttgttaaaatagccactatagtggcgctattgcattgcagaatttcttggatccacaattgctactctgtccactattgtgaacgagtggttgcgacagtcatccttcatctttttatcatctttgacgagtctccatccaat

SEQ ID NO: 60443 - DNA, 279 bp, Glycine max
  Clone ID: 700673828H1
atcgacgatgaccttgctcaagatattgaggatgagaatgtgcaatctgatgatgaaagtgaggatgatgattacaccgggacaaagaggaatgaaaatgctccaagtgacgattctggagaggaagacgatgataggcatgcaaggatgctacaagcaattactggcatgccgagtgaggcttttgaagagaataagaagaaaaagaaggtgatgaaggacactgttataccagagctatatccagagtctgaatataatcctagtcgtgatgttgtg

SEQ ID NO: 60444 - DNA, 279 bp, Glycine max
  Clone ID: 700673829H1
aagcggcaaaaccatacttatcgtcctaatagaccattgagtcacattgaggaagcacaatctgttggacaattgagagaagtgtccaacaaggttcacaatgcagaactgaaattgtttttggaagtggaaccggggatggattcatgtcccatcgcaccacctgacaagaccaaggatgatatattacttttcttcaagctatatgatcctgaaaaagaggagctgcgttatgttggaaggctctttgtgaagtgtactggtaagccattggaaatc

SEQ ID NO: 60445 - DNA, 280 bp, Glycine max
  Clone ID: 700673830H1
cggctcgagcccgatctagttagggttccttacacgatggagcggttgaagtgggcgcaactaggtgagaggctgaagaccggtggggcccagatggggcgaatggtgagcggaaaagtgaaggagatgcttcaggcgccgacgccggagtccaagatggtggacgaggccacgctggagaccatggaagaacccaattggggcatgaatctcagaatctgtggcatgatcaacagcgaccagttcaacggctctgaggtcgttaaggccatcaagagaa

SEQ ID NO: 60446 - DNA, 174 bp, Glycine max
  Clone ID: 700673831H1
gtttctgtctcatttggcattgcttactgggaaaaagagaaccccaaacacaacaagtgtctccagagttgcaatagcgagagagactcgtacaggaaccaagcatgccacgctcgttgcaacctccttaaggtggagaaagaagaatgtgaagaaggtgaaattccacgacca

SEQ ID NO: 60447 - DNA, 278 bp, Glycine max
  Clone ID: 700673832H1
caactaacaataattccttcacttgcagaacttagttctctgttgcatcatcatcatcttcattagtgttagccctaaacttcaccttcaaccatgaccacagtgccaccacacagtgtccaagtgcacacaacaacacaccgctacgaagccggcgtcgtcccgccggctcgttttgaggcgccgcgttacgaaccggcatcaaggcgccctcttccatttaccattccgagagaggtccgacgacctctcaggttctcgcagttgtcgccggcctt

SEQ ID NO: 60448 - DNA, 270 bp, Glycine max
  Clone ID: 700673834H1
ctctctgcaaagaccgttgttgtgagctttgcttgtcagcttattatcttcctttatctgcttgacaatgacacctcttggatgaatcttgcaagctctggaattggttgtgttattgagttctggaaaattggaaaagccatgcgcatagagattgataggacaggaaggatacctatgttgaagctccgcgatcgagagtcatatgtacggaataagacaaaggaatatgatgatattgctatgaagtatttgttctatgttctattt

SEQ ID NO: 60449 - DNA, 271 bp, Glycine max
  Clone ID: 700673835H1
aaattagttcattctctttgcgcagttccctacctctcctttcaaggttcgtagatttcttctgtatttttatcttcttctttattgtttgttctacatcagcatgatgataatttgattgtgttttctatcgtttcatcgattataaattttcataatcagaagattcagcttttattaatgcaagaacgtccttaattgatgattttataaccgtaaattaggtctaattagagtttttgtcataaagattttcagatccgtttacaac

SEQ ID NO: 60450 - DNA, 271 bp, Glycine max
  unsure (1)..(271): unsure at all n locations
  Clone ID: 700673836H1
ctcgagccgttttgccctttcttcaagccaacctcttcacaactcttctttgttcctttcactnctctcactaccaccatgatcacagtaagcgtaagatggcaaaaggagattttcaaagatgtagaacttgacactacccagtctgcttatgtttttaaatgccaattgtatgatttgactggtgtgcctcctgaaagacaaaaaattatggtcaagggtggtcttttgaaggatgatgctgattggtcaacagtaggggtgaaagagg

SEQ ID NO: 60451 - DNA, 263 bp, Glycine max
  Clone ID: 700673837H1
cttctaaaaaaataaaattaagaaattttcatggtaaccattcgtgcagatgaacttagtaaaattatccgtgaacgcattgagcaatataatacgatagtaaaaattgtaaatacgggtaccgtacttcaagtaggcgacggtattgctcgtatttatggtcttgatgaagtaatggcgggtgaattagtggaatttgaagagggtactataggcattgctttgaatttggaatccaaaaatgttggtgttgtattaatggg

SEQ ID NO: 60452 - DNA, 267 bp, Glycine max
  Clone ID: 700673838H1
gcaagagatcatttgaattcaagtaaaccttgttggcagagatagttgtgaggctgaatgtacttaattacttcaacctctttttcctagtatcattcattttcacctgcatgtgcgttttatcacctgttcaaatatgagattcagcgtcacatactgatggtcattatcattaaatggagcacctgagataagggaggttcaatcagggtttatccattttcagcggttctgatcttgaatagtctctaactttgtcggatgtca

SEQ ID NO: 60453 - DNA, 269 bp, Glycine max
  Clone ID: 700673839H1
gttcaatatcctagtataccttaataaataatttaagatactatgatgagagcacggttcccattactgttgctgggacttgttttcctggcttcagtttctgtctcatttggcattgcttactgggaaaaagagaaccccaaacacaacaagtgtctccagagttgcaatagcgagagagactcgtacaggaaccaagcatgccacgctcgttgcaacctccttaaggtggagaaagaagaatgtgaagaaggtgaaattccacgacc

SEQ ID NO: 60454 - DNA, 272 bp, Glycine max
  Clone ID: 700673840H1
acaagattctgtagagaagaagagcaatggcgtccaacgattccgattcgcagatgaagatcgtacatggcgatgctggttacatacttgaagacgttcctcacttcgccgactactattccaaatcttcctacatatccgaatccacttctatccaatcctgcttactcggttgttaagcagtatttcgtgcacatggacgacacgttccctcagaaggttctatgtgtttctacttacgctagtgacctgtttgtgtatttagttctcca

SEQ ID NO: 60455 - DNA, 276 bp, Glycine max
  Clone ID: 700673841H1
aaaaaccttcccttctcttctcacccccacactcccatctcacacacccctcgcatccaacaatgtctctcaccattccctccaacctctccaagcccgccgccctccgccccaaactaagcccaaagctaaggtccgccgccacaaccaccatcgtctgcagcaccaccaacaacaacaacaacaacaacgtgtcctccgacctgaaggcgttctccgccgcgctggccctctcctccatcctcctctccgcgcctctccccgccggcgccgaca

SEQ ID NO: 60456 - DNA, 274 bp, Glycine max
  Clone ID: 700673842H1
tgcggtttcctttgttggtgttgctgggaactgttttcctggcatcagtttgtgtctcattaaaggtgagagaggatgagaataaccctttctacttgagaagctctaacagcttccaaactctctttgagaaccaaaacggtcgcattcgtctcctccagagattcaacaaacgctccccacaacttgagaaccttcgagactaccggattgtccagtttcagtcaaaacccaacacaatccttctcccccaccatgctgacgccgatttcct

SEQ ID NO: 60457 - DNA, 276 bp, Glycine max
  Clone ID: 700673843H1
agttcagcaagaatattctagaggcctcatacgacaccaaattcgaggagataaacaaggttctgtttggtagagaggaggggcagcaacaaggggaggagaggctgcaagagagtgtgattgtggaaatctcaaagaaacaaattcgggaactgagcaaacatgccaaatctagttcagagaaaaccatttcttctgaagataaacctttcaacttgagaagccgcgaccccatctattccaacaagcttggcaagttgtttgagattaccccag

SEQ ID NO: 60458 - DNA, 275 bp, Glycine max
  Clone ID: 700673844H1
caacacaggcgcagagcgtgatccattgacgaagatggtgcagcgtctcacctaccgcaagaggcacagctatgccaccaaatccaaccaacacagggtcgtcaaaacccctggtgggaagctcgtttatcagaccaccaagaagagggccagctggcccaagtgccccgtcactggcaagaggattcaggggattccacacttgaggcctgcagagtacaagagatcaaggttacccagaaaccgtatgactgtcaaccgtgcatatggcggag

SEQ ID NO: 60459 - DNA, 278 bp, Glycine max
  Clone ID: 700673845H1
gaagtttttaaattttgtgaggttcattatgaagaaaagggacaagcttagttgtcaagttggaatcaacccatactccatggaatggaccggtttggccaatagattactgagtaagggcaacgatattctgtgttgcgattatgctagttttgatggtttgattaccaagcaagttatgagcaagatggcagaaatgataaacagtctttgtggtggtgatgaaaaattgatgcgtgaaaggacacacctgctgttggcttgttgttcaaggatgg

SEQ ID NO: 60460 - DNA, 276 bp, Glycine max
  Clone ID: 700673846H1
gcgaacacagcacagcactgcactcttcgcaacacaacataaaaagacaacccagagagcgcgtcttaatatacgctcttctctgaaaacccccatttcttttcttctttcttcttctctttcgcttcttcgatcttcgatcttcgtcgctgaaaatgagagagtgcatttcaatccacatcggccaggccgggattcaggttggaaacgcctgctgggagctttactgcctcgaacacggcattcagcctgatgggcagatgccaagtgacaaga

SEQ ID NO: 60461 - DNA, 281 bp, Glycine max
  Clone ID: 700673847H1
cttcactcaaaactcttctctttcattttcataattcccacacattatggctgaccttcactaccatccacaacaccaataccccctccgctaccctaacgatccacaccaacaaacccgttcctccacccaccaggtcgtcaaggccgccaccgccgtcacagcgggcggctccctctttatcctcgcctcgttgatcctcgccgccaccgtcattgccctcaccatcgtcaccccgctgttcgtcattctcagtccggctctcgtccccgccgtaatca

SEQ ID NO: 60462 - DNA, 172 bp, Glycine max
  Clone ID: 700673848H1
agtaattcaacctagtacgagaggaaccgttgattcgcacaattggtcatcgcgcttggttgaaaagccagtggcgcgaactaccgtgcgttggattatgactgaacgcctctaagtcagaatccgggctagaagcgacgcgtgcgctcgccgtccgtttgccgaccagcag

SEQ ID NO: 60463 - DNA, 272 bp, Glycine max
  Clone ID: 700673849H1
cttcttaagggcaacattacgctccatttgctatggtacggtacattcacccccacgcaacgctctatagtcatcgacttcctcgaatccctaacctccacgtcatcacctgaatccccttcagtttccacgtggtggaaaaccaccgagagctacaggggaggcccctgcaccctcgtcgtagggaaccaaatcctcgacgagaattactccctcggaaaatcactcaaaaacgacaacctcgtagctctcgcgtcgaatccgaaactaaa

SEQ ID NO: 60464 - DNA, 269 bp, Glycine max
  Clone ID: 700673850H1
gttcaatatcctagtacaccgtattaaagaatttaagatatactatgatgagagcgcggttcccattactgttgctgggagttgttttcctggcatcagtttctgtctcattaggcattgcgtattgggtaaagcagaaccccagtcacaacaagtgcgtccgaagttgcaatagcgagaaagactcctacaggaaccaagcatgccacgctcgttgcaacctccttaaggtggaggaagaagaagaatgcgaagaaggtcaaattcca

SEQ ID NO: 60465 - DNA, 267 bp, Glycine max
  Clone ID: 700673851H1
ctataatggaaattaataaattagttatgccttgatcatggagaggaaaacatttgggtttttgttcttgctcctccttgtcttagcttctgatgtgacggtgaagagagcagaggcgaaagattgcttgacaaggaggcacgggttccagggtagatgcttattcgacaggcaatgtgcacatgtgtgcaggagcgatggtttcatcggtggtcagtgccgtcgccctcttcgcaaatgcttttgcagcaggccatgttgatcgaa

SEQ ID NO: 60466 - DNA, 267 bp, Glycine max
  Clone ID: 700673852H1
cgctacgcgatcagagtagggctcaaccgtgaaatcgacccattgagctcactcagccgcagtcagtgtttcgttctgtgttatgatgagccaatccctaatctaatacccactatctatcttttcttcagaattagaatccaatttcggtttggttcggttttggaaaatgttgggtggtctatacggagaccttcctccaccttcctccgccgaggaagacaacaagcccacccccaacgtctggtcctccagcaccaagatggc

SEQ ID NO: 60467 - DNA, 266 bp, Glycine max
  Clone ID: 700673853H1
ccattttctctcttcttcttctctagtgagaaatttctctttcattgtgtgtggtcagtgagatgtatgtagcttccatgcgcaagtctttcaaggactccttgaaagtaccttgaagctgatatccaacacgccaataccctggcctcagattttccaagggagtatgatggtgcatgccttcagatcagaatgtcatacagtccagctgcacacctgttccttttcttggtacagtggacagattgccatcttgctggagccct

SEQ ID NO: 60468 - DNA, 267 bp, Glycine max
  Clone ID: 700673854H1
actctccattgtctttgaacactcatcaccatggccaagcttgttctttccctttgtttccttcttttcagtggctgcttcgctctgagagagcaggcacagcataatgagtgccagatccaaaagctgaatgccctcaaaccggataaccgtatagagtcggaaggtgggttcattgagacctggaaccctaacaacaagccattccagtgtgccggtgttgccctctctcgctgcacccttaaccgcaatgcccttcgtagacct

SEQ ID NO: 60469 - DNA, 266 bp, Glycine max
  Clone ID: 700673855H1
acccaacaagattgacatgattgctctttcatttgttcgtaaaggctcggatcttgttaatgtccgcaaggttctggggccacatgcaaagaatattcagttgatgtcaaaggttgagaatcaggagggagtcctgaattttgacgaaatcctgcgggagactgatgcattcatggtggcacgtggtgatcttggaatggagatcccagtagaaaagattttcctggcacagaagatgatgatatacaagtgtaatcttgttggga

SEQ ID NO: 60470 - DNA, 271 bp, Glycine max
  Clone ID: 700673856H1
gagaaaagagaattagggtcacgagggtttcatcctgcggcatcagacatgggaggaggcaatgggcaaaaggcaaagatggctcgcgagaagaacatcgagaagcagaaggccgcctcaaagggaagccagctggattcaaacaaggaagcaatgtcgatccagtgcaaggtgtgcatgcaaacatttatgtgcaccacatcggaagtgaagtgtagggagcatgctgaagccaaacaccctaaatctgatgtatatgcttgttttcctc

SEQ ID NO: 60471 - DNA, 278 bp, Glycine max
  Clone ID: 700673857H1
aaaaaccttcccttctcttctcacccccacactcccatctcacacacccctcgcatccaacaatgtctctcaccattccctccaacctctccaagcccgccgccctccgccccaaactaagcccaaagctaaggtccgccgccacaaccaccatcgtctgcagcaccaccaacaacaacaacaacaacaacgtgtcctccgacctgaaggcgttctccgccgcgctggccctctcctccatcctcctctccgcccctctgcccgccggcgacgacatc

SEQ ID NO: 60472 - DNA, 277 bp, Glycine max
  Clone ID: 700673858H1
agcggtttcctttgttggtgttgctgggaactgttttcctggcatcagtttgtgtctcattaaaggtgagagaggatgagaataaccctttctacttgagaagctctaacagcttccaaactctctttgagaaccaaaacggtcgcattcgtctcctccagagattcaacaaacgctcctcacaacttgagaaccttcgagactaccggattgtccagtttcagtcaaaacccaacacaatccttctcccccaccatgctgacgccgatttcctcct

SEQ ID NO: 60473 - DNA, 277 bp, Glycine max
  Clone ID: 700673859H1
cgttcagcaagaatattctagaggcctcatacgacaccaaattcgaggagataaacaaggttctgtttggtagagaggaggggcagcaacaaggggaggagaggctgcaagagagtgtgattgtggaaatctcaaagaaacaaattcgggaactgagcaaacatgccaaatctagttcaaggaaaaccatttcttctgaagataaacctttcaacttgagaagccgcgaccccatctattccaacaagcttggcgagttgtatgagattacgccaga

SEQ ID NO: 60474 - DNA, 274 bp, Glycine max
  Clone ID: 700673860H1
caacacaggcgcagagcgtgatccattgacgaagatggtgcagcgtctcacctaccgcaagaggcacagctatgccaccaaatccaaccaacacagggtcgtcaaaacccctggtgggaagctcgtttatcagaccaccaagaagagggccagcgggcccaagtgccccgtcactggcaagaggattcaggggattccacacttgaggcctgcagagtacaagagatcaaggttacccagaaaccgtaggactgtcaaccgtgcatatggcgga

SEQ ID NO: 60475 - DNA, 277 bp, Glycine max
  Clone ID: 700673861H1
gaagtttttaaattttgtgaggttcattatgaagaaaagggacaagcttagttgtcaagttggaatcaacccatactccatggaatggaccggtttggccaatagattactgagtaagggcaacgatattctgtgttgcgattatgctagttttgatggtttgattaccaagcaagttatgagcaagatggcagacatgataaacagtctttgtggtggtgatgaaaaattgatgcgtgaaaggacacacctgctgttggcttgttgttcaaggatg

SEQ ID NO: 60476 - DNA, 275 bp, Glycine max
  Clone ID: 700673862H1
gcgaacacagcacagcactgcactcttcgcaacacaacataaaaagacaacccagagagcgcgtcttaatatacgctcttctctgaaaacccccatttcttttcttctttcttcttctctttcgcttcttcgatcttcgatcttcgtcgctgaaaatgagagagtgcatttcaatccacatcggccaggccgggattcaggttagaaacgcctgctgggagctttactgcctcgaacacggcattcagcctgatgggcagatgcaagtgacaaga

SEQ ID NO: 60477 - DNA, 280 bp, Glycine max
  Clone ID: 700673863H1
cttcactcaaaactcttctctttcattttcataattcccacacattatggctgaccttcactaccaaccacaacaccaataccccctccgctaccctaacgatccacaccaacaaacccgttcctccacccaccaggtcgtcaaggccgccaccgccgtcacagcgggcggctccctctttctcctcgcctcgttgatcctcgccgccaccgtcattgccctcaccatcgtcaccccgctgttcgtcattttcagtccggttctcgtccccgccgtaatc

SEQ ID NO: 60478 - DNA, 190 bp, Glycine max
  Clone ID: 700673864H1
tcagtattcggctcgagagtaattcaacctagtacgagaggacccgttgattcgcacaattggtcatcgcgcttggttgaaaagccagtggcgcgaagctaccgtgcgttggattatgactgaacgcctctaagtcagaatccgggctagaagcgacgcgtgcgcccgccgtccgtttgccgaccagcag

SEQ ID NO: 60479 - DNA, 287 bp, Glycine max
  Clone ID: 700673865H1
tcttcggctcgagactgaagctcaacaatcctacttgcaaggattcagcaggaacattttagaggcctcctacgataccaaattcgaggagataaacaaggttctgtttagtagagaggaagggcagcagcaaggggagcagaggctgcaagagagcgtgattgtggaaatctcgaaggaacagattcgggcactgagcaaacgtgccaaatctagttcaaggaaaaccatttcttctgaagataaaccttttaacttgagaagccgcgaccccatctactccaaca

SEQ ID NO: 60480 - DNA, 269 bp, Glycine max
  Clone ID: 700673866H1
ctagttcaatatcctagtataccttaataaataatttaagatactatgatgagagcacggttcccattactgttgctgggacttgtgttcctggcttcagtttctgtctcatttggcattgcttactgggaaaaagagaaccccaaacacaacaagtgtctccagagttgcaatagcgagagagactcgtataggaatcaagcatgccacgctcgttgcaacctccttaatgtggagacagtagaatgtgaagaaggtgatattccacg

SEQ ID NO: 60481 - DNA, 268 bp, Glycine max
  Clone ID: 700673867H1
ctgaccaagccatggcgatgagaaccaaactttctttagctatctctttcttttttcttttagccttattttcaaacctagcctttggcaaatgtaaagaaaccgacgtagaagaagaagaccctgagctcgtaacatgcaaacaccaatgccaacagccacagcaatacactgagggtgacaagcgggtatgcttgcaaagatgtgacaggtatcatcgtatgaagcaagagcgagagaaacaaatccaagaggaaactcgtgagaa

SEQ ID NO: 60482 - DNA, 266 bp, Glycine max
  Clone ID: 700673868H1
cagcacctttaaacgccgaaggttcatccaatctccgaaggccttcagcggattgcaaccatgtcgaagagacaggttagagatccaaaggaggaaaacgtgactctaggcccagctgttagagatggtgaacatgttttcggagtagctcgcatctttgcctccttcaatgacaccttcattcatgtcactgatctgtctgggaaggaaacacttgtccgcatcactggcgggatgaaggttaaagcttacagagatggatcatc

SEQ ID NO: 60483 - DNA, 264 bp, Glycine max
  Clone ID: 700673869H1
cttggaggcattgacaagcgtgttattgagaggtttgagaaggacactgctgagatgaacaagaggtctttcaagtatgcctgggtgctggacaaacttaaggctgagcgtgaaagaggaatcaccattgatattgctttgtggaagtttgaaacaacaaagtattattgcacagttatagatagtaatggacatagggatttcattaagaatatgattactgggacatcccaagctgactgtgctgttcttatcattgattcg

SEQ ID NO: 60484 - DNA, 265 bp, Glycine max
  Clone ID: 700673871H1
cttggaggcattgacaagcgtgttattgagaggtttgagaaggaagctgctgagatgaacaagaggtctttcaagtatgcctgggtgctggacaaacttaaggctgagcgtgaaagaggaatcaccattgatattgctttgtggaagtttgaaacaacaaagtattattgcacagttattgatgcgcctggacatagggatttcattaagaatatgattactgggacatcccaagctgactgtgctgatcttatcattgattcga

SEQ ID NO: 60485 - DNA, 272 bp, Glycine max
  Clone ID: 700673873H1
ctcgagccgttttgccctttcttcaagccaacctcttcacaactcttctttgttcctttctacctctcactaccaccatgatcacagtaagcgtaagatggcaaaaggagattttcaaagatgtagaacttgacactacccagtctgcttatgtttttaaatgccaattgtatgatttgactggtgtgcctcctgaaagacaaaaaattatggtcaagggtggtcttttgaaggatgatgctgattggtcaacagtaggggtgaaagagggt

SEQ ID NO: 60486 - DNA, 269 bp, Glycine max
  Clone ID: 700673874H1
cacaaacacaacacagcacccttcacacactgcacagtgcctcctttctagtttctactatctgcttcttcttcttcaattagggttttccccttctccgagatcagcgccaacatcatgaacatgaatatcttcaagaagaaaacctcacccaaagaggctctgcggtcaagtaagagggaaatggctgttgcaaccagaggaattgaaagagagatagcatcacttcagatggaggaaaaaaaattggtggcagagattaaaagaga

SEQ ID NO: 60487 - DNA, 270 bp, Glycine max
  Clone ID: 700673875H1
attctctccatttgtccttgaatataatactcagcatggctaagcttgttctttccctttgttttctgcttttcagtggctgctgcttcgctttcagtttcagagagcagccacagcaaaacgagtgccagatccaacgcctcaatgccctcaaaccggataaccgtatagagtcagaaggtggcttcattgagacatggaaccctaacaacaagccattccagtgtgccggtgttgccctctctcgctgcaccctcaaccgcaacgccc

SEQ ID NO: 60488 - DNA, 273 bp, Glycine max
  Clone ID: 700673876H1
cccgggttgtcctagcacatttgaagagcctcaacaacctcaacaaagaggacaaagcagcagaccacaagaccgtcaccagaagatctataacttcagagagggtgatttgatcgcagtgcctactggtgttgcatggtggatgtacaacaatgaagacactcctgttgttgccgtttctattattgacaccaacagcttggagaaccagctcgaccagatgcctaggagattctatcttgctgggaaccaagagcaagagtttctaaaata

SEQ ID NO: 60489 - DNA, 273 bp, Glycine max
  Clone ID: 700673877H1
ctcgcaccgaattcggctcgaggggaaaaagggtggcaagaagaaggcagctgatccctttagcaagaaggattggtatgacattaaggccccttctctttttcaagtgaaaaatgttggcaaaaccctcgtctctcgtacgcagggtaccaagattgcttctgaaggacttaaacatagagtgtttgaggtctccttggctgatcttcaaggggatgaggatcatgcattcaagaagattaggttgagagctgaagatgtgcaagggaagaa

SEQ ID NO: 60490 - DNA, 272 bp, Glycine max
  Clone ID: 700673878H1
ctcgttgcaacctccttaaggtggagaaagaagaatgtgaagaaggtgaaattccacgaccacgaccacgaccacaacacccggagagggaacctcagcaacccggtgagaaggaggaagacgaagatgagcaaccacgtccaatcccattcccacgcccacaacctcgtcaagaagaagagcacgagcagagagaggaacaggaatggcctcgcaaggaggaataacgcggagacacaggcagtgaacaggaagatgaggatgatgatgag

SEQ ID NO: 60491 - DNA, 275 bp, Glycine max
  Clone ID: 700673879H1
aggacctattgtgttttaaatccacaaaatccttttgtgttaaataggtggatggggaaactgacttttccccagggcacttcccgaagtgttaaaagaatgcctctttctatagggggaggagctggtgcaaagaatgctattctcatgaatatgccaaatgctgttctttcagtgtggagatattttgttggagatctcgtctttgaagtttctaagatgacttctccctacattaaatgtacagtctctttcttcatagcatttggaaattt

SEQ ID NO: 60492 - DNA, 82 bp, Glycine max
  Clone ID: 700673881H1
cgaacggacgctttcggggacaaatcgaaaatgttgtttcaacctcaatccaatatgacaaaaaatgatcgagaaaatacca

SEQ ID NO: 60493 - DNA, 263 bp, Glycine max
  Clone ID: 700673882H1
gttcgtagtatttttgttgcgcctttcagaggcggaaggcccattcgggtggttacatttccgaataccattgtgcagattgaaccagacatgaattcaaggttctcagcttttgagtaccactaccaatggtgattttgttcaagggaaagatctcgcaatggttaaagttaatgtagcatgtgctgctgttggcttgacatcaagttacactccaactccattgttggaatctggtttgcaaaaagacagagggttaattg

SEQ ID NO: 60494 - DNA, 229 bp, Glycine max
  Clone ID: 700673883H1
tatccttggtagtcaaaggatattgataatcaaggatattgataatcaacttcagctggttgagacactctgaaccagctgaagttgattatcaatatccaaggtagtcaaagggaggaggatattgaattcattgataacccaaaggcaaagaagtatatcaaatcacttccttattctcctggaacccccctttcgcaactttatcctaatgcgcatacattggcaa

SEQ ID NO: 60495 - DNA, 257 bp, Glycine max
  Clone ID: 700673884H1
cgctatgagatcgtgggtgagtcgaggatccgtgactcgtttgatggactcaggaaatcgaggggctttcaggcgctacttcagcgacaagggtcgcgttctcagcgctgaggatcaggtcataggaaacgtctacatccagaaatctgatccggagatgttggatatcccgaagcttcaggctgagaagacccacgcagatcaagggcacagatgctcctgctgataagaaacctgaatgttctcaaccaggctga

SEQ ID NO: 60496 - DNA, 263 bp, Glycine max
  Clone ID: 700673885H1
ccaagttcctatagtcaggtttcagtcggttctccaggacactacggacccacatctcctgcaagaggaacttctcatggatcacctttaggcaagacagctgcagctagccagtttaatagaagaaaaaattggggacattccggaagtcctcaaactctagaagcattttcttcacattggcaaggtcaatatcttgacagcacaagccatactgagggaacatcacaagctcttggcagttcaccatcatatctacagtc

SEQ ID NO: 60497 - DNA, 261 bp, Glycine max
  Clone ID: 700673886H1
cgcatctgatggtttatgggagcacttgagtaatgagaaagccgtggatattgtaaacagcaatccacatgcgggtagtgccaagagacttatcaaggctgctctacacgaagcagcaagagaacgagaaatgcgatattcagacctccgtaagattgacaagaaggttcgacgccattttcatgatgatatatccgttattgttttattcttaaatcacgaccttatttccagaggcacagtgctagacccggcactttc

SEQ ID NO: 60498 - DNA, 264 bp, Glycine max
  Clone ID: 700673887H1
ctcgttgcaacctccttaaggtggagaaagaagaatgtgaagaaggtgaaattccacgaccacgaccacgtacacaacacccggagagggaacctcagcaacccggtgagaaggaggaagacgaagatgagcaaccacgtccaatcccattcccacgcccacaacctcgtcaagaagaagagcacgagcagagagaggaacaggaatggcctcgcaaggaggaaaaacgcggagaaaagggtagtgaagaggaagatgaggatg

SEQ ID NO: 60499 - DNA, 267 bp, Glycine max
  Clone ID: 700673889H1
ctctcttctctgcaaatgcttcattccaagatggttaggactctgtaggctgataaagacaacactcataccgttggaaagaaggatgctgctggccatgttgcttaatttagttcttgcttcctttgtcttcttgagttttatcagagacgggagtgcagggatcactagctctttcattcggtcagagtggccggcagttgacatcccccttgatcatgaagcatttgcagttccaaagggttataatgcacctcaacaagtgca

SEQ ID NO: 60500 - DNA, 263 bp, Glycine max
  Clone ID: 700673890H1
cgacggcagatacaaattctggactaaacacgagataaatcttgctttgacagaagaggaaaagatggaagtgattagaagtagaggcattcctgctgatgttcttgcaaagcgagctcatgaatttgaaaaacatgttgctcatgaaagcctcaaggatcaaattcctgctgatgacaagttgtattctactaaggttaataagtttgcaaaaattatgaaccttagacaaagtgttgttggtgatcttaaacttcttactg

SEQ ID NO: 60501 - DNA, 269 bp, Glycine max
  Clone ID: 700673891H1
taaaattcttccaccaagttatgggtttccttgtgttgcttcttttctccctcttaggtctctcttctagttccagcatatcaactcatcgttccatattggaccttgacctaaccaagtttaccacacagaaacaggtgtcttcactgttccaactatggaagagtgagcatggacgtgtctaccataaccacgaagaagaggcaaagagacttgagattttcaagaataacttgaactatatcagggacatgaatgcaaacagaaaa

SEQ ID NO: 60502 - DNA, 272 bp, Glycine max
  Clone ID: 700673892H1
attaagaaaagccatttccatagcagcctaagaaaatgaagagcactagcttgttcgctatctttctactttgcgccttcacctcatacctaccttccgccaccgcccaggacgtgctcgacgtggatggcgatccgattcggaacggtttcatatactacgttttgccggcaataagaggaaacggtggcggaatagaacgagccgcactcgggaaagacacttgccctatcactgtagtgcaatctcccaatccaaactctaaggggtta

SEQ ID NO: 60503 - DNA, 273 bp, Glycine max
  Clone ID: 700673894H1
ccaccatgctgacgctgattacctcatcgttatccttaacgggactgccattcttaccttggtgaacaacgacgaccgagactcttacaaccttcaatctggcgatgccctaagagtccctgcaggaaccacatactatgtggttaaccctgacaacgacgagaatctcagaatgataacactcgccatacccgttaacaaacccggtagatttgagagtttcttcctatctagcactcaagctcaacagtcctacttgcaagggttcagcaa

SEQ ID NO: 60504 - DNA, 260 bp, Glycine max
  Clone ID: 700673895H1
gaagagatatgcatcaagaaagaagcgtttgagggagaagagaagttttgtgcaaaatccttgggaacagtaattggttttgccatttcaaagctgggaaagaacattcaagtactttcaagttcctttgtcaataagcaagagcaatacactgtggaaggagtgcagaatcttggagacaaagcagtgatgtgtcatgggctaaatttcagaactgcagtattttactgccataaagtccgtgaaacaacagctttcat

SEQ ID NO: 60505 - DNA, 159 bp, Glycine max
  Clone ID: 700673896H1
atcgaccagatgcctaggagattctatcttgctgggaaccaagagcaagagtttctaaaatatcagcaagagcaaggaggtcatcaaagccagaaaggaaagcatcagcaagaagaagaaaacgaaggaggcagcatattgagtggcttcaccctggaa

SEQ ID NO: 60506 - DNA, 230 bp, Glycine max
  Clone ID: 700673901H1
aggacctattgtgttttaaatccacaaaatccttttgtgttaaataggtggatggggaaactgacttttccccagggcacttcccgaagtgttaaaagaatgcctctttctatagggggaggagctggtgcaaagaatgctattctcatgaatatgccaaatgctgttctttcaatgtggagatattttgttggagatctcgtctttgaagtttctaagatgacttctcc

SEQ ID NO: 60507 - DNA, 245 bp, Glycine max
  Clone ID: 700673902H1
acgcgttcggctcgagttcgtaactttcggttcctcccattttccggttcaataaattaaattaaaaaaaccgaaccggcggatctcggtggtttcatggaggctcatggcggagggctccgtcgcatccttgtgctcgccttctgcgtcgccggaatctggtccgcgtacatctaccaaggcgttcttcaggaaaatgtgtcgacgaagcgattcaacggtgaaaggttcgagcaccttgcgtt

SEQ ID NO: 60508 - DNA, 214 bp, Glycine max
  Clone ID: 700673904H1
tgcagaccgagctagctagctagcaagcaagcacagagatggaggcaaagcgaggccatgccctcatgtgcttggcacgtgtttcactcttcctctgcgctctaaccctatccgctgctcacggaagcaccacggttcaagacatcgcgagaaagttgaaactcggggacaacgagcttctgcgcacggagaagaagttcaaggttttcatgga

SEQ ID NO: 60509 - DNA, 225 bp, Glycine max
  Clone ID: 700673905H1
gactactctcttattccgcaatttttcattggctgcgttcgttcgttcgttgcgtgctttagttgttacttttccgttacggcgatggacttggagcacccgaccgcgacgccgctcaactccgccatgacctacgacgaagcctccatggagcgcacaagagcttcgtcaacgccttgcaggaacttaagaacctaaggcctcaactttattctgctgcagaat

SEQ ID NO: 60510 - DNA, 218 bp, Glycine max
  Clone ID: 700673906H1
acaataattccttcacttgcagaacttagttctctgttgcatcatcatcatcttcattagtgttagccctaaacttcaccttcaaccatgaccacagtgccaccacacagtgtccaagtgcacacaacaacacaccgctacgaagccggcgtcgtcccgccggctcgttttgaggcgccgcgttacgaagccggcatcaaggcgccctcttccattta

SEQ ID NO: 60511 - DNA, 227 bp, Glycine max
  Clone ID: 700673907H1
tctcgaccgaattcggctcgaggtcttccatagccccccaaaaatgaagagcaccatctactttgctctctttctcttttagtgccttcaccacctcatacctaccttcagccatcgctgatttcgtgctcgataatgaaggtaaccctcttgaaaatggtggcacatattatatcttgtcagacataacagcatttggtggaataagagcagccccaacgggaaat

SEQ ID NO: 60512 - DNA, 225 bp, Glycine max
  Clone ID: 700673908H1
aaacaattcaattcaatctgcctcgatcatggagaggaaaacatttgggtttttgttcttgctcctccttgtcttagcttctgatgtgacggtgaagagagcagaggcgaaagattgcttgacaaggaggcacgggttccagggtagatgcttattcgacaggcaatgtgcacatgtgtgcaggagcgatggtttcatcggtggtcagtgccgaggccctcttcg

SEQ ID NO: 60513 - DNA, 226 bp, Glycine max
  Clone ID: 700673909H1
tctcgagccgattcggctcgagttttatgactctgttaataaccaattaaaaccaaagttttctattctctgtagctcacatggtgggctaagaatatctgactttggggtggaaagtatggttggcaaggagagtttgagaactgaggtcttgaacttgagctttgagaagcttatgatggttgaatgtggtggaaatagtgggaaaggagtgaacattaaagct

SEQ ID NO: 60514 - DNA, 225 bp, Glycine max
  Clone ID: 700673910H1
atcgagccgcaattcccattcccacgcccacctcatcagaaggaagagcgaaagcaagaggaagatgaggatgaggagcagcagcgagagagcgaagaaagtgaagattctgagttacgaagacataagaataagaacccttttctcttcggctctaacaggttcgaaactctcttcaaaaaccaatatggtcgcattcgcgtcctccagaggttcaaccaacgc

SEQ ID NO: 60515 - DNA, 221 bp, Glycine max
  Clone ID: 700673913H1
gtccaattttgtctgggcttagagtactataccctgtaaaacggacatactggtttgatatttataagaatatcgacaaagttggtgcggtcaaatgtcctgttttggttatacatgggactgcagatgaagttgtggatgtgtcccatgggaagcagctctgggagctttgcaaggtaaagtacgaacccttgtgggtaagttgtggtggacattgtaat

SEQ ID NO: 60516 - DNA, 223 bp, Glycine max
  Clone ID: 700673915H1
gttcgtgccgaagcaaccaaacatgatcctccaaggagacgctattgtgacctcctcgggaaagttacaactcaataaggttgacgaaaacggcaccccaaaaccctcgtctcttggtcgcgccctctactccacccccatccacatttgggacaaagaaaccggtagcgttgccagcttcgccgcttccttcaacttcaccttctatgcccctgacacaaaa

SEQ ID NO: 60517 - DNA, 137 bp, Glycine max
  Clone ID: 700673920H1
gtttctgtctcatttggcattgcttactgggaaaaagagaaccccaaacacaacaagtgtctccagagttgcaatagcgagagagactcgtacaggaaccaagcatgccacgctcgttgcaacctccttaaggtgga

SEQ ID NO: 60518 - DNA, 224 bp, Glycine max
  Clone ID: 700673921H1
ctcgagccgctaactattacttcatcatgtcgtcgagcacagttggtcaagtcatcagatgcaaagctgcggtttcatgggaggtagggaagccacttgtgattgaagatgtagaggtggcaccaccacaagctggtgaagtgcgtttgaagatcctctacacctctctttgccacactgatgtttacttctgggaagccaagggccagactccattgtttcct

SEQ ID NO: 60519 - DNA, 221 bp, Glycine max
  Clone ID: 700673922H1
gacggcgaacgaaacgctgtcgttgcgccaatcgcggcgttgttgttggtggtgctactcgcggcgagtgtggtggtggaggctcaggagaactcggacgtgaagacgctggtgaagcacatgcacgggaagaagtactgcgacaaaggatgggaatgtaagggctggtcaatttactgttgtaacctcactattactgattatttccagacctaccagtt

SEQ ID NO: 60520 - DNA, 224 bp, Glycine max
  Clone ID: 700673923H1
tcttgaaccggaagctgggcactgccccacctgacaaactcttccggtcggatcgaccggccgaagccgaccttgggtccaaaaagaggggcagtgccccgcttccgattcacggaataagtaaaataacgttaaaagtagtggtatttcactttcgctgtttccagctcccacttatcctacacctctcaagtcatttcacaaagtcggactagagtcaagct

SEQ ID NO: 60521 - DNA, 220 bp, Glycine max
  Clone ID: 700673926H1
ggtggcagcattcagcaaatttagcatgttatgagcaccaggatgctcacgagtttttcatttcgatgttagatgctatccatgagaaagagagcaaaacaaggaatggaagcaaaggtaatggagactgtcaatgcattgctcataaggtgttctatgggttattgagatcagatgttacctgcatggcctgtggattcacctcaacaacctatgaccc

SEQ ID NO: 60522 - DNA, 220 bp, Glycine max
  Clone ID: 700673927H1
gaggggaaaggttccatgtgaacggcacttgcacatgggttagtcgatcctaagggacgggggaagcccgtctgatagcgctctgtgcgcgtactccgaaagggaatcgggttaaaattcctgaaccgggacgtggcggctgacggcaacgttagggagtccggagacgtcggcgggggccccggaaagagttatcttttctgtttaacagcctgcccac

SEQ ID NO: 60523 - DNA, 221 bp, Glycine max
  Clone ID: 700673928H1
gatataagctccaaacccttctccaccttcttcttcccaactcacccttatgcgttgaaactttgagtctttctttgaaacttttcagaccaaacacgaaaccatgtcatcaacaacacggagagatctagaaagtggaggggcgaacaagaactacaacaacataagctacagtgctgctcccacttcctatgtttacgatcccgaagttcattggacgt

SEQ ID NO: 60524 - DNA, 213 bp, Glycine max
  Clone ID: 700673929H1
agatactctctttttccgcaatttttcattggctgcgttcgttcgttcgttgcgtgctttagttgttacttttccgttacggcgatggagttggagcacccgaccgcgacgccgctcaactccgccatgacctacgacgaagcctccatggagcgcacaagagcttcgtcaacgccttgcaggaacttaagaacctaaggcctcaactttatt

SEQ ID NO: 60525 - DNA, 220 bp, Glycine max
  Clone ID: 700673930H1
gaaattatggcaagagatcttgaaagtggcggtggaggaaccaagaataacagaactgcagaggaaaactactctgcacctgaatcttcccatgtttatgattctgagacccattggacatcatggctcgtgcctatgtttgtggttgctaatattgctgtctttgttattaccatgtacatcaacaattgtcccaggaacaaccttcgtttccaaggtc

SEQ ID NO: 60526 - DNA, 223 bp, Glycine max
  Clone ID: 700673931H1
ctcgagccgtggaatttctgaagcgtaccggatttcattgtgatatcatttgtgtcactggatggactgccaccccaatgcaggatgttcaggttacaattgattggtttatttcctctcaggaatgtgttcccaggacctattgtgttttaaatccacaaaatccttttgtgttaaataggtggatgggaaaactgactttccctcagggcacttcccgaag

SEQ ID NO: 60527 - DNA, 222 bp, Glycine max
  Clone ID: 700673932H1
cccaaaaatgaagagcaccatcttctttgctctctttctcttttgtgccttcaccacctcatacctaccttcagccatcgctgatttcgtgctcgataatgaaggtaaccctcttgaaaatggtggcacatattatatcttgtcagacataacagcatttggtggaataagagcagccccaacgggaaatgaaagatgccctctcactgtggtgcaatctcg

SEQ ID NO: 60528 - DNA, 179 bp, Glycine max
  Clone ID: 700673933H1
ttctttccctttgtttccttcttttcagtggctggttcgctctgagagagcaggcacagcaaaatgagtgccagatccaaaagctgaatgccctcaaaccggataaccgtatagactcggaaggtgggttcattgagacctggaaccctaacaacaagccatttcagtgtgccggtgtt

SEQ ID NO: 60529 - DNA, 222 bp, Glycine max
  Clone ID: 700673935H1
cgcgctcgccgagatcgacttcgagaacccgccgccgtgggacgagcagcagaaccagaactacaaggccaagttcatgtgcagctacggcggcgacaccaagatcctcgccgtcgaccgctccgttaagttctccgccttcctctccaagctctccgacctctgcgactccccgccacaggacctcaccttcaagtaccagctccccggcgaagacctcga

SEQ ID NO: 60530 - DNA, 216 bp, Glycine max
  Clone ID: 700673937H1
ctttgaacttagtcgaatttattttctcttgtgaacaatgctactttagatttaatttctgttagttttgtttgtggttttgcccgtgaatgttgtaatgctgttatctggtccttgcatcgatgtatttttgctctaataggattttgcatcggtgttggttcaaattattattttgcgaattttgcttgaaaaaaataattaaaagggcggccg

SEQ ID NO: 60531 - DNA, 208 bp, Glycine max
  Clone ID: 700673938H1
agcacccacaggcacaagtctctccaactcaacttcttccactctcactaatggctctcaccaatgctttcctcgctccttccttcgccgtccacggtgttggtagggtttccgatccgcgctccattcctctcttctctcttccctccgacgccttcttccgctccccaacctccctctccagggacaagaactttctacaagcttc

SEQ ID NO: 60532 - DNA, 218 bp, Glycine max
  Clone ID: 700673940H1
taaacactcatcagtcatcaccatggccaagctagttttttccctttgttttctgcttttcagtggctgctagttcgctttcagttccagagagcagcctcagcctaacgagtgccagatccaaaaactcaatgccctcaaaccggataaccgtatagagtcagaaggagggctcattgagacatggaaccctaacaacaagccattccagtgtgccg

SEQ ID NO: 60533 - DNA, 218 bp, Glycine max
  Clone ID: 700673943H1
cggcggcgtcggttccgagttcgccgtccggaagcgattccgtgacgtggtggcgctctcggaacggctggcgttggcgtatcgcgggttcttcatcccggtgcggcctgacaagagcacggtggagagccaggtgatgcagaagcaggagttcgtggagcagcggcgcgtggcgctggagaagtacctcaggaagctggcggcgcacccggtgatcg

SEQ ID NO: 60534 - DNA, 211 bp, Glycine max
  Clone ID: 700673944H1
ggctcgagggagcttgcattccctgggtctgcacaagctgttgagaagctattaaagaaccaacgagaatcctactttgtggatgctcagcctaagaagaaagaggaggggaataagggaagaaagggtcctttgtcttcaattttgagggctttttactgaataagtatgtactaaaatgtatgctgtaatagctcatagtgagcgagga

SEQ ID NO: 60535 - DNA, 219 bp, Glycine max
  Clone ID: 700673946H1
gcaatggctacttcaaagttgaaaacccagaatgtggttgtatctctctccctaaccttaaccttggtactggtgctactgaccagcaaggcaaactcagcggaaactgtttctttcagctggaacaagttcgtgccgaagcaaccaaacatgatcctccaaggagacgctattgtgacctcctcgggaaagttacaactcaataaggttgacgaaaac

SEQ ID NO: 60536 - DNA, 219 bp, Glycine max
  Clone ID: 700673947H1
tggttaaagttaatgtagcatgtgctgctgttggcttgacatcaagttacactccaactccattgttggaatctggtctgcaaaaagacagagggttaattgtggagtattttggaaggatgtcttacgttgctcataacgttaatcagccccaagagaaagatttgttggagggaaatttttcctttgatattaaatctcgctctagattggaaaaag

SEQ ID NO: 60537 - DNA, 222 bp, Glycine max
  Clone ID: 700673948H1
gtcaattttctattgaccttctcggtggaggaattttagtggacaaaactggagattggatcacacttatacaaaatactccaattagtaacttgttgagagttgctgcttggaagaaaggttgtttaatggtcaagattgtgatgtctgggaatgcagcagtcaaaaggagtgattgggcctcattggtacaagtgtttttaacaaacagcaacagtacag

SEQ ID NO: 60538 - DNA, 220 bp, Glycine max
  Clone ID: 700673949H1
tgtccttgtgttacttctcgttggtttcaccatgtcttgctatttgtatcatcttgtgtaccttcttaagctttgagcaattcccttttacttttatttcactccatcatcatcattcacacatcaaacactactagctccttctaagtgttctctgtctctctctttcttttggggtatggagttcaacaagttcagaatcagaagctatgaggggcaa

SEQ ID NO: 60539 - DNA, 219 bp, Glycine max
  Clone ID: 700673951H1
gttttcttcatatcttccttgtcactgcccgtgtgtcgccgccatggccaccgtcaccacccaagcctccgccgcaattttccggccatgtacctcgaaatcgaggtttttgaccggctcttccggtaaacttaaccgggaagtgactatgcggccaatggggtgccctccttctgcctctttcaaggttgaagccaagaagggagagtggttacctgg

SEQ ID NO: 60540 - DNA, 218 bp, Glycine max
  Clone ID: 700673952H1
gaggctcgcctaggcgagctgatccaactccaatttttctacttcgatagaaaaactcatatctcacattcaagatgttatgttgtaaatcccaacggtcagaatgtggataattttcatagccacctccgacaaaatttgaaaatgatccaatggttaacgaatcagggatgattactttactaaaataggtttaggtaaaatttgaactctcataa

SEQ ID NO: 60541 - DNA, 216 bp, Glycine max
  Clone ID: 700673954H1
tcaagaagctgccactgactcgccccaagtcaccataactgtcccggagaaggagctgtggtgatgctgccggcatatccccagaaatttctactcgaggacgtcacagtgttggcaataacccaaaacatggtagccttgtccctcccaaaaacaaggacctggtcactggacgtaacagcaatggctctagcaaaaccaaagaacgaccaaaac

SEQ ID NO: 60542 - DNA, 219 bp, Glycine max
  Clone ID: 700673955H1
aaatgaccaagttcacaatcctcctcatctctcttctcttctgcatcgcccacacttgcagcgcctccaaatggcagcaccagcaagatagctgccgcaagcagctccagggggtgaacctcacgccctgcgagaagcacatcatggagaagatccaaggccgcggcgatgacgatgatgatgatgacgacgacaatcacattctcaggaccatgcggg

SEQ ID NO: 60543 - DNA, 219 bp, Glycine max
  Clone ID: 700673956H1
cgaggctttattctgcggaagctctgaattcctgagattctcttatcatttttattcctcttttaaatgcacatctcatttgtagccacagttcattagagaaaaaataatggcaattggctttcagttcatactcacactcttctctctattttcggttccctcactcacttttgcttttgcccctatccttcccagatttccttcttcagcagttag

SEQ ID NO: 60544 - DNA, 215 bp, Glycine max
  Clone ID: 700673957H1
attggtccttaaacactcatcagtcatcaccatggccaagctagttttttcccttagtgttctgcttctcagtggctgctgcttcgctttcagttccagagagcagcctcagcaaaacgagtgccagatccaaaaactcaatgccctcaaaccggataaccgtatagagtcagaaggagggctcattgagacatggaaccctaacaacaagccat

SEQ ID NO: 60545 - DNA, 86 bp, Glycine max
  Clone ID: 700673960H1
ctcgagccgtttatatcaagaattttatgcaaactgagtttttcgcttgtgagtttgactcttgaagacattccaaaccatggaag

SEQ ID NO: 60546 - DNA, 216 bp, Glycine max
  Clone ID: 700673961H1
gtgaccattcccatattcagtttttctctcttttcttttgtttttccttccttctccaaatttctcactggtttatgaatggaggtcacggaggtataaccaacaacaatagagagaggggtttcatggaaacttgttcccagtttatggtctctgactctgcacataaaagttaatttattgactgcagttttgcacatgtctcgtacactgtag

SEQ ID NO: 60547 - DNA, 217 bp, Glycine max
  Clone ID: 700673962H1
ttttcatatctaatagggtgttgtgtcagtttttatgtatagtattgtgctcctatcatgttcacccgtatcatgttcacccgtatgtaagtctgatattctgatctatgaatgtcaaatcaaatttctctatgtcaccaacttggatttgatacccgtatgtaagtcctatcatgttacatatcttgactttgaattgggtacccgaattgttcca

SEQ ID NO: 60548 - DNA, 214 bp, Glycine max
  Clone ID: 700673964H1
gaacaatccagcacaacacataatcgaagcctggttcatcgtcatcgtctctctctgtgtctgcgttctcatcagagccatcttctccctttttcacaacaaaaccatttccaccccaccaggccctcccaacatccctgtcatcacaagcttcctatggctccgaaaaaccttctccgaactcgagccaatcctccgaaacttccacacaaca

SEQ ID NO: 60549 - DNA, 216 bp, Glycine max
  Clone ID: 700673965H1
ctaatgaagaaaaaagaaacaaattgagcaatgaatttgtaaatagggcaaaagtaatggataaggaattaatttctctggatatattagaaaaccgaattcgattgtctaatgatgaaactaaaacaaaatatttaactaaaatatatgatcctttcctgaacggacgctttcgtggacaaatcgaaaatgttttttcaacctcaatccaatatg

SEQ ID NO: 60550 - DNA, 217 bp, Glycine max
  Clone ID: 700673967H1
ggacgctgtccagcgccgtctcatgttcgaagacgaatgcattttggtggatgagaatgaccgtgtggttggtcatgattcaaaatacaattgtcacttgatggaaaagattgaagctgagaatttgctgcatagagctttcagtgtattcctgttcaactcaaagtatgagttgcttcttcagcaacgatctgcaacaaaggtaactttccctctt

SEQ ID NO: 60551 - DNA, 205 bp, Glycine max
  Clone ID: 700673968H1
ggagcagttcagtgatagatgatagttcttcaacatgttctactgattctttgccgtcagtagtcatgaatgatccccacaagggaaactgcttttcaaattataaagtccaaaagtcacctagcagaggtaagaaccaaggcaaaacatcatctaatgtgggtagattgacgattgaaatagatagtctgccatctggttctgc

SEQ ID NO: 60552 - DNA, 217 bp, Glycine max
  Clone ID: 700673969H1
ctcggataaggaggaacatcttttcaatggcgtcccaaattacccgtgagtggtctggaatcaatacattcgcacctgctacccagactaagttgcttgaactcttgggaaaacttaaacaagagaatgtgaactccttaactatacttgtgatgggaaaaggtggtgttggaaaatcttcaactgtgaactccatcattggggatagagtggtttc

SEQ ID NO: 60553 - DNA, 206 bp, Glycine max
  Clone ID: 700673970H1
atgccctcaaaccggataaccgtatagagtcagaaggagggctcattgagacatggaaccctaacaacaagccattccagtgtgccggtgttgccctctctcgctgcaccctcaaccgcaacgcccttcgtagaccttcctacaccaacggtccccaggaaatctacatccaacaaggtaagggtatttttggcatgatatacccg

SEQ ID NO: 60554 - DNA, 215 bp, Glycine max
  Clone ID: 700673971H1
tgactctcgaaggacatcatgctgatatatggtgtcttgcagtcagtaatcgtggtgattttatcgtcactggatctcatgatcgttctattcgccgctgggatcgcactgaagagcagttcttcattgaggaagaaaaggagaaaaggttggaggaaatgtttgaggctgatattgacaatgcatttgaaaacaaatatgcattgaaggaagaa

SEQ ID NO: 60555 - DNA, 215 bp, Glycine max
  Clone ID: 700673972H1
tttcaacttcgcggtgtgagtgagacggagagtgctaagcaatcgtcttctcttctcggagcttggctttgcttatcgattctctctcctctcgtttcatcaattccaaggtttgtaaaagatggcagatgccgaggatattcaaccccttgtttgcgacaatggaactggaatggtcaaggcaggatttgctggtgacgatgctcctagggctg

SEQ ID NO: 60556 - DNA, 207 bp, Glycine max
  Clone ID: 700673976H1
ctagtacaccgtattaaagaatttaagatatactatgatgagagcgcggttcccattactgttgctgggagttgttttcctggcatcagtttctgtctcatttggcattgcgtattgggaaaagcagaaccccagtcacaacaagtgcctccgaagttgcaatagcgagaaagactcctacaggaaccaagcatgccacgctcgttg

SEQ ID NO: 60557 - DNA, 215 bp, Glycine max
  Clone ID: 700673977H1
cttttgcagatacactgttttgatgctacaacattagaaagggaatatactttacttaccaatcctatagtaatgagttgccctggttctggaggcataggatatggaccacttgcggtgggaccaagatggcttgcatatagtggaagtccaattgcaatctccaactcaggacatgtgtgtccacaacagttgacaccttccgcaaggtttcc

SEQ ID NO: 60558 - DNA, 215 bp, Glycine max
  Clone ID: 700673978H1
gtgaaacactagctagggtattgggagctctcgttgtttcggagttagggaccttacgcagccatggccactgctacgaatgccgccgccgccccaccacgccagctctcccagaaggaagctgacatccagatgatgttggccgccgacgtccacctcggcaccaagaactgcgacttccaaatggaacgttacatcttcaagcgccgcaacga

SEQ ID NO: 60559 - DNA, 216 bp, Glycine max
  Clone ID: 700673979H1
tgccctaagagtccctgcaggaaccacatactatgtggttaaccctgacaacgacgagaatctcagaatgataacactcgccatacccgttaacaaacccggtagatttgagagtttcttcctatctagcactcaagctcaacagtcctacttgcaagggttcagcaagaatattctagaggcctcatacgacaccaaattcgaggagataaacaa

SEQ ID NO: 60560 - DNA, 214 bp, Glycine max
  Clone ID: 700673980H1
atcatacatagtagtgttggtgggttgcaaagatgcttgggggtcttctccataggggtcataagataaaagggacagtggtgttgatgcgcaagaatgtgttggacgtgaatagcgtaaccagcgttgggggaattattggtcaaggtctcgacttagttggctcaacactcgatactcttactgccttcttgggccgatccgtgtctctcca

SEQ ID NO: 60561 - DNA, 213 bp, Glycine max
  Clone ID: 700673981H1
tgactgttgaactagaaaagtcaatttattgtatgcttcttcaacactggtaccaggaattagtgacatttcttcaccatctccaataacaaattcctggtaccagtgttgaagaagcatacaataaattgactgttgaactagaaaagtgtgttccaacattggttggcatagaatgtcccaaagatgaaaaacttccccgtcgcaaaattt

SEQ ID NO: 60562 - DNA, 214 bp, Glycine max
  Clone ID: 700673982H1
tgttgctgctcatcctccgtaaccttcgagctctgcaccgaagaacgaagccatggggaagacacatggaatgggatctgctcgcaagctcaagtcccacacgcagaggcaaatgtgggctgacaagtcatacaagaaatcacatcttggaaatgaatggaagaaaccttttgctggttcatcccatgccaagggaattgtccttgaaaagata

SEQ ID NO: 60563 - DNA, 216 bp, Glycine max
  Clone ID: 700673983H1
attgtctttgaacactcatcaccatggccaagcttgttctttccctttgtttccttcttttcagtggctgcttcgctctgagagagcaggcacagcaaaatgagtgccagatccaaaagctgaatgccctcaaaccggataaccgtatagagtcggaaggtgggttcattgagacctggaaccctaacaacaagccattccagtgtgccggtgttg

SEQ ID NO: 60564 - DNA, 213 bp, Glycine max
  Clone ID: 700673984H1
ttgctctgcttcaacattgcggaacagaagaagcgccgcagctatggtgaagtactccagagaacccgacaatcccaccaagtcctgcaaggccataggcgctgacctcagagttcattttaagaacactagggagactgcctttgccatcaggaagttgccccttgttaaagctaaacgatacttagaggatgttttggcccacaaacaggc

SEQ ID NO: 60565 - DNA, 215 bp, Glycine max
  Clone ID: 700673985H1
gtgtttgaacagtacagatctccccgcagtagagatttcctccaaaaatcatacttcactttttccaccaaaaaataattaagaaaaaaataaaaagatggaaagataatgtggttccgattcaaaccacacgattccacgaccttattatggagccgcggtggcggtagcggtggccggcgattataacggcggaggagtaagagatggttgtg

SEQ ID NO: 60566 - DNA, 214 bp, Glycine max
  Clone ID: 700673986H1
tgcaaataactgtatctaatgagcatctcattaaaaatgctattgcaatagctatatctaatgagcatctcattagatatagctatgaaaaattactgcgccaagctaaagctccaagtatgtttttacaatccttcaaaaattttgtttcattgtgtgtgtatggtgatgataacttaattagtgttcatgaatatgtcaagccttactttag

SEQ ID NO: 60567 - DNA, 215 bp, Glycine max
  Clone ID: 700673988H1
tgcagaatgggcagaagataacattccctggcgaactcgatgaagcggtatgttgatatgagaatcagtattgtaatttgcattgtgcttcatggattgcagaaatttataatgacccatgagttgttggtattttgcagccggacacaattactggggatatcgtctttgtccttcagcagaaggaacatcccaaattcataagaaaggctgaa

SEQ ID NO: 60568 - DNA, 189 bp, Glycine max
  Clone ID: 700673992H1
tgaaattttgataaaccgcgatcacaggttgccgcaccttaaaaccggaaacaaaagcaatcgttacttgatttcaagaatctctaaatttcttcctacttctttgtgtacgatttcttaagggaaagaaaatcactctctgtgctggtcacagacttcgtgaatcattttcttttccacacaacatac

SEQ ID NO: 60569 - DNA, 214 bp, Glycine max
  Clone ID: 700673993H1
caccaacggtccccaggaaatctacatacaacaaggtaatggtatttttggcatgatattcccgggttgtcctagcacttatcaagagccgcaagaatctcagcaacgaggacgaagccagaggccccaagaccgtcaccaaaaggtacatcgcttcagagagggtgatttgatcgcagtgcctactggtgttgcatggtggatgtacaacaat

SEQ ID NO: 60570 - DNA, 213 bp, Glycine max
  Clone ID: 700673994H1
gctgtgggaagttgaggggaagtgggttgttaaaggagcagttgatgtagacattggtgcaaagccttctgctgagggtggaggagaagatgagggagttgatgatgcagctgttaaggttgttgacattgttgacacattcagacttcaggagcaacccgcattcgataagaagcagtttgttaccttcatgaagaggtttatcaagaattt

SEQ ID NO: 60571 - DNA, 214 bp, Glycine max
  Clone ID: 700673995H1
tgatgccctgagagtcccctcaggaaccacatactatgtggtcaaccctgacaacaacgaaaatctcagattaataacactcgccatacccgttaacaagcctggtagatttgagagtttcttcctatctagcactgaagctcaacaatcctacttgcaaggattcagcaggaacattttagaggcctcctacgataccaaattcgaggagata

SEQ ID NO: 60572 - DNA, 213 bp, Glycine max
  Clone ID: 700673996H1
caatatcctagtataccttaataaataatttaagatactatgatgagagcacggttcccattactgttgctgggacttgttttcctggcttcagtttctgtctcatttggcattgcttactgggaaaaagagaaccccaaacacaacaagtgtctccagagttgcaatagcgagagagactcgtacaggaaccaagcatgccacgctcgttgc

SEQ ID NO: 60573 - DNA, 238 bp, Glycine max
  Clone ID: 700674002H1
cataaaattcttccaccaagttatgggttaccttgtgttgcttcttttctccctcttaggtctctcttctagttccagcatatcaactcatcgttccatattggaccttgacctaaccaagtttaccacacagaaacaggtgtcttcactgttccaactatggaagagtgagcatggacgtgtctaccataaccacgaagaagaggcaaagagacttgagattttcaagaataacttg

SEQ ID NO: 60574 - DNA, 207 bp, Glycine max
  Clone ID: 700674003H1
aaacaaagtttcggttattggtgttcatttttcttcctccatctttctctaaaacattaattgaactctccattccttaaattttaccaacgagctagttccgacacagacaaagcaatggcaaagactgagttagaggtgactgttgagagcaagaacaaagaactaaagcacctgggatttgtgaggattgctgctattcaaact

SEQ ID NO: 60575 - DNA, 235 bp, Glycine max
  Clone ID: 700674004H1
cagccacggtcgccatcggcctggccgtggccgggttcctgacgtcgggggccttcgggctcacggcgctgtcttccttctcctggatccagaactacatccgggagacccagccagcctcggagaacctcgccgccgccgcgaagcatcacctcgccgaggcggcggagtacgtggggcagaagacgaaggaagtggggcagaagaccaaggaggttgggcaggatattcaaac

SEQ ID NO: 60576 - DNA, 198 bp, Glycine max
  Clone ID: 700674005H1
cgttcttcttcgtcgttatcttcttcttttgttgtttgtgtgtttgttttttctctcacctgaaaatgtcttgctgcggtggtaactgtggttgcggaagcgcctgcaagtgcggcaacggctgcggaggctgcaagatgtacccagacttgagctacaccgagtcaaccaccaccgagaccttggtcatgggagtgg

SEQ ID NO: 60577 - DNA, 63 bp, Glycine max
  Clone ID: 700674006H1
gttgaggcgaatcggctcgaggctcacactctcctagtctggtatatgacttcggaggtagac

SEQ ID NO: 60578 - DNA, 233 bp, Glycine max
  Clone ID: 700674007H1
agaacacagaaaagaaggcttttttttgccaacaccagttgcaaaactaatatcctttcaaacggatttgatctacaatggcctggtttctctcttttcctctatccactctcttttttccgtggctacagagtcctaccaccgtgctgaggagaccaaagacagtgttgaatcagcagtgcaacgagctccttctcaaagcactcatggcagcgcactcttgctgaagaaac

SEQ ID NO: 60579 - DNA, 233 bp, Glycine max
  Clone ID: 700674010H1
cagccacggtcgccatcggcctggccgtggccgggttcctgacgtcgggggccttcgggctcacggcgctgtcttccttctcctggatccacaactacatccgggagacccagccagcctcggagaacctcgccgccgccgcgaagcatcacctcgccgaggcggcggagtacgtggggcagaagacgaaggaagtggggcagaagaccaaggaggttgggcaggatattcag

SEQ ID NO: 60580 - DNA, 226 bp, Glycine max
  Clone ID: 700674013H1
gtccttaaacactcatcagtcatcaccatggccaagctagttttttccctttgttttctgcttttcagtggctgctgcttcgcttcagttccagagagcagcctcagcaaaacgagtgccagatccaaaaactcaatgccctcaaaccggataaccgtatagagtcagtaggagggctcattgagacatggcaccctaacaacaagccattccggtgtgccggtgt

SEQ ID NO: 60581 - DNA, 234 bp, Glycine max
  Clone ID: 700674015H1
aacaacagcagcagcagaagagtcatggtggacgcaagcaggggcaacaccagcagcaggaggaagaaggtggcagtgtgctcagtggcttcagcaaacatttcttagcacaatccttcaacaccaacgaggacaaagctgagaaacttcggtctccagatgacgaaaggaagcagatcgtgacagtggagggaggcctcagcgttatcagccccaagtggcaagaacaagaag

SEQ ID NO: 60582 - DNA, 241 bp, Glycine max
  Clone ID: 700674016H1
ctccagaaaaaatggcggtgcctcttctctcgaagaagatcgtgaagaagaggctgaagaagttcaagaggcctcaaagtgacaggaagatttctgtgaagacaaactggcgcagaccaaagggtatcgattcccgtgttaggagaaagttcaagggatgcactttgatgccgaacattggttatgcttcagacaagaagacccgccactatctcccgaatggtttcaagaaatttgttgt

SEQ ID NO: 60583 - DNA, 89 bp, Glycine max
  Clone ID: 700674017H1
tctccattggtccttaaacactcatcagtcatgaccatggccaagctagttttttccctttgttttctgcttttcagtggctgctgctt

SEQ ID NO: 60584 - DNA, 142 bp, Glycine max
  Clone ID: 700674018H1
ctcgagccgattcggctacactcttgtcgagtgcatgctttgctattacctccagcaagctcaacgagtgccaactcaacaacctcaacgcgttggaacccgaccaccgcgttgagtccgaaggtggtcttattgaaacatg

SEQ ID NO: 60585 - DNA, 258 bp, Glycine max
  Clone ID: 700673503H1
ggctatgagatcgtgggtgagtcgaggatccgtgactcgtttgatggactcagcaaatcgaggggctttcagtcgcttcttcagcgacaagggtcgcgttctcagcgaggaggaacaggccaaagaaaacgtctacatccagaaatgggagagggagaggttggagaaacagatgcaacaggctgagaagaccaaggcagacaagggcaaagatgctgctgctgataagaaacctgaaggttctcaaaagggctgagt

SEQ ID NO: 60586 - DNA, 250 bp, Glycine max
  Clone ID: 700673507H1
acggggctaccgtgagtttaagcatatcaataagcggaggaaaagaaacataatctggaattcgagaagctaatcaatcgtttgcggttgctttgttcctcctctcgcagatggttaggggaggaaggtttagcggcaaacgcaatttcaggaaaagggttcggtcaaaggagggaggttctgatgattcggatgaggactatgtggtttcagagaaggtggagagaagtggagctgaggaagaagaacc

SEQ ID NO: 60587 - DNA, 253 bp, Glycine max
  Clone ID: 700673508H1
cgacagacaagtctctcttgctcttctctctcctttttcttctttccttttccctcattttcgtttctttgttaatttcttctcagtcaaccatggactctccgatgtaccaccaagagcaccattactaccaccaccatcatcgtgtgaaccttcttccttcgccgcgacacagtttgagttcttcatacagcagcactagcagcaccagcatcaacaacaatggtctcaccactcctaattactgtcagct

SEQ ID NO: 60588 - DNA, 251 bp, Glycine max
  Clone ID: 700673509H1
caaattctcttgtacatctttaagacaaagcagtatcatcagaaatcaccccaatatgagcagatactgaagaaaaatgaacaaatgtatgccttactggcaattagcctttcactctgcccccaaagcaggcttgttgatgaaactgtgaactctcagttacgtgagaagtatggtgaaaagatggttagaatgcagaggtatgatgatgaggcatttgctatctatgatgagctcttctcatatgcatg

SEQ ID NO: 60589 - DNA, 254 bp, Glycine max
  Clone ID: 700673510H1
gctccaagagaaagatttgttagagggaaatttttcctttgatattaaatctcgctctagattggaaaaagtttcctctacaaaagcacaatttgttagtggaaaaaccttcaaatatgatataattggtgctggttcacattcttcaggagattttcctgaaaaggaagatcaagaaaaacccaaaaagattgataccagattgagacaaagaatagatcctcaatacaatgaggttcaggctcagatggaaa

SEQ ID NO: 60590 - DNA, 249 bp, Glycine max
  unsure (1)..(249): unsure at all n locations
  Clone ID: 700673511H1
tgaaattttaataaaccgcgatcacaggttgccgcaccttaaaaccggaaacaaaagcaatcgttacttgatttcaagaatttctcaatttcttcctacttctttgtgtacgatttcttaagggaaagaaaatcactctctgtgctggtcacagacttcgtgaatcattttcttttccactcctcatataaattaagaacactcncctatnggatataggacttcgtgtcagatttaaactttttctgt

SEQ ID NO: 60591 - DNA, 252 bp, Glycine max
  Clone ID: 700673513H1
aaaggattctacccgccgctcgatgggaattgcgcttcaaggcgtctcgtagggctaatccgcctcacgagggtcaccaacggcacgtgcctttggggggccgaggcccctactgctggtcggcaaacggacggcgggcgcacgcgtcgcttctagcccggattctgacttagaggcgttcagtcataatccaacgcacggtagcttcgcgccactggcttttcaaccaagcgcgatgaccaattgtgcgaa

SEQ ID NO: 60592 - DNA, 254 bp, Glycine max
  Clone ID: 700673514H1
ctgggaaccaagagcaagagtttctaaaatatcagcagcagcagcaaggaggttcccaaagccagaaaggaaagcaacaagaagaagaaaacgaaggaagcaacatattgagtggcttcgcccctgaattcttgaaagaagcgttcggcgtgaacatgcagatagtgagaaacctacaaggtgagaccgaagaggaggatagtggagccattgtgacagtgaaaggaggtctaagagtcacagctccagccatg

SEQ ID NO: 60593 - DNA, 260 bp, Glycine max
  Clone ID: 700673515H1
agattcgggcactgagcaaacgtgccaaatctagttcaaggaaaaccatttcttctgaagataaaccttttaacttgagaagccgcgaccccatctactccaacaagcttggcaagttctttgagatcaccccagagaaaaacccccagcttcgggacttggatatcttcctcagtattgtggatatgaacgagggagctcttcttctaccacacttcaattcaaaggcgatagtgatactggtaattaatgaaggagat

SEQ ID NO: 60594 - DNA, 259 bp, Glycine max
  Clone ID: 700673516H1
gagcaacacttacccatcccatggaatccgcaacatcatggagtaaccctctcccactttccagtctcccttccccttcgcattcacgccacccctccgccttcaaatttatggctttttcaactcttcacactttctcactcccttccctttcttctccctcttcttttcacccattttccctttactctctctctccaaaacccacttctttcaaccctcgcactctcttccctcgcaccatgcacgcctcgcgcat

SEQ ID NO: 60595 - DNA, 257 bp, Glycine max
  Clone ID: 700673517H1
gtctttgaacactcatcaccatggccaagcttgttctttccctttgtttccttcttttcagtggctgcttcgctctgagagagcaggcacagcaaaatgagtgccagatccaaaagctgaatgccctcaaaccggataaccgtatagagtcggaaggtgggttcattgaaacctggaaccctaacaacaagccattccagtgtgccggtgtagccctctctcgcagcacccttaaccgcaatgcccttcgtagacct

SEQ ID NO: 60596 - DNA, 260 bp, Glycine max
  Clone ID: 700673518H1
tctcgagcgaatcggctcgagcaatccttcaaaaattttgactctttgtgtgtgtatggtgatgacaacttaattagtgtacatgaatatgtcaagccttactttagtggttctaaattgaaaagctttctagctggtcataatatcaccattactgatggtattgacaaaactagcgcaactttgcaatttagaaagttagcagattgtgactttctcaaaagaaactttaagcagatgtctaatgtcttgtgggtggc

SEQ ID NO: 60597 - DNA, 256 bp, Glycine max
  Clone ID: 700673519H1
ctcgagccgttttgtcaattttctattgaccttctcggtggaggaattttagtggacaaaactggagattggatcacacttatacaaaattctccaattagtaacttgttgagagttgctgcttggaagaaaggctgtttaatggttaagattgtgatgtctgggaatgcagcagtcaaaaggagtgattgggcctcattggtacaagtgtttttaacaaacagcaacagtacagagcattttgatgcatgtaagt

SEQ ID NO: 60598 - DNA, 255 bp, Glycine max
  Clone ID: 700673520H1
agaaaatgaagagcactagcttgttcgctatctttctactttgcgccttcacctcatacctaccttccgccaccgcccaggacgtgctcgacgtggatggcgatccgattcggaacggtttcatatactacgttttgccggcaataagaggaaacggtggcggaatagaacgagccgcactcgggaaagacacttgccctatcactgtagtgcaatctcccaatccaaactctaaggggttagaaattaagtttg

SEQ ID NO: 60599 - DNA, 250 bp, Glycine max
  Clone ID: 700673521H1
atagtagtgttggtgggttgcaaagatgcttgtggggtcttctccataggggtcataagataaaagggacagtggtgttgatgcgcaagaatgtgttggacgtgaatagcgtaaccagcgttgggggaattattggtcaaggtctcgacttagttggctcaacactcgatactcttactgccttcttgggccgatccgtgtctctccagcttattagtgctaccaaagctgatgccaacggcaaagggaa

SEQ ID NO: 60600 - DNA, 250 bp, Glycine max
  Clone ID: 700673523H1
gatccatccttattcgttcctcactcaccagccacagattctctcttctctattcagtaaacggctgttttgtatacgagctgtcccagtctcagcctatacatcccaaaacatcaaaacaactggttgggctccttgtatggcttcttcctcagttggtagaagggctacatattcaacacaatctgtatcaacaaatgagccagttgtatctgtagattggctttatgataacctgaaggagccagat

SEQ ID NO: 60601 - DNA, 254 bp, Glycine max
  Clone ID: 700673524H1
gagcagcagcgagagagcgaagaaagtgaagattctgagttacgaagacataagaataagaacccttttctcttcggctctaacaggttcgaaactctcttcaaaaaccaatatggtcgcattcgcgtcctccagaggttcaaccaacgctccccacaacttcagaatctccgagactaccgcattttggagttcaactccaaacccaacaccctccttctccccaaccatgctgacgctgattacctcatcgt

SEQ ID NO: 60602 - DNA, 253 bp, Glycine max
  Clone ID: 700673525H1
ctcgagcgcaataattccttcacttgcagaacttagttctctgttgcatcatcatcatcttcattagtgttagccctaaacttcaccttcaaccatgaccacagtgccaccacacagtgtccaagtgcacacaacaacacaccgctacgaagccggcgtcgtcccgccggctcgttttgaggcgccgcgttacgaagccggcatcaaggcgccctcttccatttaccattccgagagaggtccgacgacctct

SEQ ID NO: 60603 - DNA, 247 bp, Glycine max
  Clone ID: 700673526H1
cgcaacaaaaagaaagaatcccaggcgaggagaaagatggaggggaaggagcaggatgtgtcgttgggagcgaacaagttccccgagagacagccgattgggacggcggcgcagagccaagacgacggcaaggactaccaggagccggcgccggcgccgctggttgacccgacggagtttacgtcatggtcgttttacagagcagggatagcagagtttgtggccacttttctgtttctctacatca

SEQ ID NO: 60604 - DNA, 250 bp, Glycine max
  Clone ID: 700673527H1
atgaacaaattccctctcaccctcctcgccgaccaagccatggaaagcgtgaacaagacgaggacgaggacgaagatgaagataaacctcgtcctagtcgaccaagccaaggaaagcgtgaacaagaccaggaccaggacgaggacgaagatgaagatgaagatcaacctcgcaagagccgcgaatggagatcgaaaaagacacaacccagaagacctagacaagaagaaccacgtgaaagaggatgcga

SEQ ID NO: 60605 - DNA, 249 bp, Glycine max
  Clone ID: 700673528H1
attgtctttgaacactcatcaccatggccaagcttgttctttccctttgtttccttcttttcagtggctgcttcgctctgagagagcaggcacagcaaaatgagtgccagatccaaaagctgaatgccctcaaaccggataaccgtatagagtcggaaggtgggttcattgagacctggaaccctaacaacaagccattccagtgtgccggtgttgccctctctcgctgcacccttaaccgcaatgccc

SEQ ID NO: 60606 - DNA, 253 bp, Glycine max
  Clone ID: 700673529H1
acaaatgatcttcacaagacatggcatcactgtgtctaaactcattaccagtcccaccaacttctctttcttcttcttcttcttcttcttctttgcttcttcataacaacaacaacaacaacaacaatcttagtcccttgaaacccattgttgtcagtggagaccccccaacttttgtttctgctcctggtcgcagaattcttgctgttggagatctacatggagatcttaagcaagctaggtctgcacttga

SEQ ID NO: 60607 - DNA, 253 bp, Glycine max
  Clone ID: 700673530H1
acaattagtaacttgttgagagttgctgcttggaagaaaggttgtttaatggtcaagattgtgatgtctgggaatgcagcagtcaaaaggagtgattgggcctcattggtacaagtgtttttaacaaacagcaacagtacagagcattttgatgcatgtaagtggacaaaatcagaaccacattcctgggaattaatcttcccaatagaggtatgtggtcctaataatggttttgaaatgtggagttctgagt

SEQ ID NO: 60608 - DNA, 257 bp, Glycine max
  Clone ID: 700673531H1
ggagtgagagagagtgttcttcgtttgctaccttctcccagaaatggttacgctcaggtttcaccagtaccaggtggtcgggagggctctcccaacggaagcagatcagcatccgaagatctaccgaatgaagctctgggccaccaacgaggttcgcgccaagtctaagttctggtattttttgaggaagctgaagaaggtgatgaagagcaatggtcaggtgctagctatcaacgagatttttgagacgaccccaa

SEQ ID NO: 60609 - DNA, 258 bp, Glycine max
  Clone ID: 700673532H1
ttcaaaccttgctctatactacacagtacacacactagaagaataatggcttccatcctccactactttttagccctctctctttcttgctcttttcttttcttcttatccgactcagtcacccctacaaaaccaataaaccttgttgttctacccgttcaaaatgatggttccacagggctccattgggccaacctccaaaaaagaacccctctaatgcaagtaccagtcctggtggacctcaatggaaatcacttg

SEQ ID NO: 60610 - DNA, 251 bp, Glycine max
  Clone ID: 700673533H1
gccttgtcaatttaggcttccattattgaagacatttaatgacaacggtgctagtaaaattgaacaatccttgatgagggtttgcaatgaatgggttagatatagtctttgtattagccaaagcgcacctgatccaaaacttaatatcataccgaattagatttctggcaaaacgtcaaattcatattgtacattactgtttttagttttacttttgcaatagtcatcatggacttttgcacaattgatgt

SEQ ID NO: 60611 - DNA, 260 bp, Glycine max
  Clone ID: 700673534H1
cggctcgagcaaaactggagattggatcacacttatacaaaattctccaattagtaacttgttgagagttgctgcttggaagaaaggctgtttaatggttaagattgtgatgtctgggaatgcagcagtcaaaaggagtgattgggcctcattggtacaagtgtttttaacaaacagcaacagtacagagcattttgatgcatgcaagtggacaaaatcggaaccacattcctgggaattgatcttcccaatagaggtat

SEQ ID NO: 60612 - DNA, 255 bp, Glycine max
  Clone ID: 700673535H1
ctataatcctgaaaatgcagttcgtagtatttttgttgcgcctttcagaggcggaatgcccattcgggtggttacatttccgaatagcattgtgcagatatgaaccaggcatgaatccaaggtttcatctattgagtaccactaccaatggtgattttgttcaaggagaagatctcggattggttaaagttaatgtagcatgtagctgcagttggcttgacatcatgttacactcgaactccattgtggcaatct

SEQ ID NO: 60613 - DNA, 251 bp, Glycine max
  Clone ID: 700673536H1
acgatttgaagcctggaatgaagggctactcttatcatgcttcgagtgtgacgaccttgatgacatgtgtggacatgatatttgaagatgccctctgccatcgatcaccagtgctatcttcgttgcatgtgagttgtagtgaatagtactcatagatctctgggtgatgttggtaaaggtaagcatgagattgagtctttgaagccaactcttttcatcatcgtcaggaccaacttcagttaaacgaccat

SEQ ID NO: 60614 - DNA, 95 bp, Glycine max
  Clone ID: 700673538H1
cgaggggtttggttaccctgcaatacatgcgtgagatcgcagtcatgatatacggagggagcggaggtgagtgacgattgaggcgagacaggacg

SEQ ID NO: 60615 - DNA, 248 bp, Glycine max
  Clone ID: 700673539H1
gatgcaaacattgaacttgttggcctaaaagaacaacaacaggagcagcaacaggaagagcaacctttggaagtgcggaaatatagagccgaattgtctgaacaagatatatttgtaatcccagcaggttatccagttgtggtcaacgctacctcaaatctgaatttctttgctattggtattaatgccgagaacaaccagaggaacttcctcgcaggttcgcaagacaatgtgataagccagatacc

SEQ ID NO: 60616 - DNA, 241 bp, Glycine max
  Clone ID: 700673541H1
tctttaagacaaagcagtatcatcagaaatcaccccaatatgagcagatactgaagaaaaatgagcaaatgtatgccttactggcaattagccttgcactctgcccccaaagcaggcttgttgatgaaactgtgaactctcagttacgtgagaagtatggtgaaaagatggttagaatgcagaggtatgatgatgaggcatttgctatctatgatgagctcgtctcatatgcatgccccaa

SEQ ID NO: 60617 - DNA, 248 bp, Glycine max
  Clone ID: 700673542H1
aggatgttgcagttccccactcataaagatagctaggtaagagggtgtaagggaagagaaagagatcatagaagagatatagtttaattttgctttgctttaatttgtgaggatttgatttgatggaagaacatctcactccattggctgttacccatctccttcaacacactctcagaagtttgtgcagccatgaaaattctcaatgggtctatgcagtcttctggaggatcttgcctagaaactac

SEQ ID NO: 60618 - DNA, 249 bp, Glycine max
  Clone ID: 700673543H1
tgtggacgcaagcaggggcaacaccagcaggaggaagaggaagaaggtggcagcgtgctcagtggcttcagcaaacacttcttggcacaatccttcaacaccaacgaggacaaagctgagaaacttcagtctccagacgacgaaaggaagcagatcgtgacagtggaaggaggtctcagcgttatcagcaccaagtggcaagaacaacaagatgaagatgaagatgaagacgaagatgatgaagatgaa

SEQ ID NO: 60619 - DNA, 248 bp, Glycine max
  Clone ID: 700673544H1
agaagatgggtttgaagaacaacatggtggtgctaaaggtgtgtttggtgctacttttccttgtggggggtactactagtgccaacttgaggctgagtaagcttggcctgctcatgaaaagtgatcatcatcaacactcaaatgatgatgagtcttcaaaaccatgctgtgatcaatgcgcatgcacaaagtcaaaccctcctcaatgccgctgttcagatatgaggctgaattcgtgccattcagct

SEQ ID NO: 60620 - DNA, 249 bp, Glycine max
  Clone ID: 700673545H1
ggctatgagatcgtgggtgagtcgaggatccgtgactcgtttgatggactcagcaaatcgaggggctttcagtcgcttcttcagcgacaagggtcgcgttctcagcgaggaggaacaggccaaagaaaacgtctacatccagaaatgggagagggagaggttggagaaacagaagcaacaggctgagaagaccaaggcagacaagggcaaagatgctgctgctgataagaaacctgaaggttctcaaaa

SEQ ID NO: 60621 - DNA, 251 bp, Glycine max
  Clone ID: 700673546H1
ctagtaagcgcgagtcatcagctcgcgttgactacgtccctgccctttgtacacaccgccaccgcatgagattgtgctcaaagtgttcaacgtattgcgagggttgcgcccgcaaggttcgtcgctccctcaaaggattcccaggtgtcgacgatgttgtcaccgattgcaaatctcacaaggtggtcgttaagggagagaaagcggatccgctcaaggttttggagagaatacagaggaagactcacaga

SEQ ID NO: 60622 - DNA, 252 bp, Glycine max
  Clone ID: 700673547H1
ctcgagcgatgattctcaattctgaggtctctaaaaagagaaccttaaccacttcagggagatgatgtggtcagtttgtaagcaaaacccatcttctgaccccatcccttgtacagtgtagatctggtttggtgtaatatcttcacataatatacttgtgagaatgaagatatcattgcagattaactcacatagtatgatagtgtgtattcctcaaaggcatgtttttttgaatccatgcattgctgaggt

SEQ ID NO: 60623 - DNA, 255 bp, Glycine max
  Clone ID: 700673548H1
atgtctttgaacactcatcaccatggccaagcttgttctttccctttgtttccttctagtcagtggctgcttcgctctgagagagcaggcacagcaaaatgagtgccagatccaaaagctgaatgccctcaaaccggataaccgtatagagtcggaaggtgggttcattgagacctggaaccctaacaacaagccattccagtgtgccggtgttgccctctctcgctgcacccttaaccgcaatgcccttcgtag

SEQ ID NO: 60624 - DNA, 224 bp, Glycine max
  Clone ID: 700673551H1
cagcagcaacagcagctaccttcgctattggaaccaccggttccctcggccacagaggaagctcgcttcctcaatcaaagtccttatgggctgaaattcaactctctgaatcatttgaacagcttctgtggcctcaaggctatgtcatccgtgagatgcgagtcggaatcctccttcatcggtaacaaaaccggcgctgctatacgggcgtctttcgcatccaa

SEQ ID NO: 60625 - DNA, 249 bp, Glycine max
  Clone ID: 700673553H1
caccaacgaggacatagctgagaaacttcagtctccagacgacgaaaggaagcagatcgtgacagtggaaggaggtctcagcgttatcagccccaagtggcaagaacaacaagatgaagatgaagatgaagacgaagatgatgaagatgaacaaattccctctcaccctcctcgccgaccaagccatggaaagcgtgaacaagacgaggacgaggacgacgatgaagataaacctcgtcctagtcgacc

SEQ ID NO: 60626 - DNA, 247 bp, Glycine max
  Clone ID: 700673554H1
gtggacatacgtgaagattttaattatcagtctaaatatttcattagcacttaatacttttctgttatattcctatcctataagtagtcccgattctcccaacattgcttattcacacaactaactaagaaagtcttccatagccccccaaaaatgaagagcaccatcttctttgctctctttctcttttgtgccttcaccacctcatacctaccttcagccatcgctgatttcgtgctcgataatg

SEQ ID NO: 60627 - DNA, 264 bp, Glycine max
  unsure (1)..(264): unsure at all n locations
  Clone ID: 700673556H1
ttcggctcgagcangagcagcgagagagccaaagagtgcagattctgagttaccacgacataagaataagaacctatatctcttcggctacaacaggttcgaaactctcttcaaaaaccaacatggtcgcattcgcgtcctccagaggttcaaccaacgctccccacaacttcagaatctccgagactaccgcattttcgagttcaactccaaacccaacaccctccttctccccaaccatgctgacgctgattacctcatcgt

SEQ ID NO: 60628 - DNA, 243 bp, Glycine max
  Clone ID: 700673557H1
ccttctgtgtgtgtctctctgctacaccaaatgctttcttgccattgctactgttgagtttcacaaacattcaccaaactcattcattctctcattacccatcaatatttattctgacagcatgtctcagactaactgggaagctgataagatgttagatgtttatatccatgattacttagtgaagagggatttgaaagcttcagctcaggcttttcaagctgtagggaaagtgtctcggac

SEQ ID NO: 60629 - DNA, 243 bp, Glycine max
  Clone ID: 700673559H1
ggctgacctgaacaaacctccagaaatgatctctggcaacatgacaggaggtttatcatctctgttcctacaaaatgttgaattttttcttggcatatggtctgttgcttattatgtctcttgtttgttgttaatgctgcagcaatgtgtgtctattcagcattgttcatgagatttgcatggatggttcagccacgcaactatctactttttgcttgccatgcctcaaatgagactgttcaa

SEQ ID NO: 60630 - DNA, 246 bp, Glycine max
  Clone ID: 700673560H1
aaacactcatcagtcatcaccatggccaagctagttttttccctttgttttctgcttttcagtggctgctgcttcgctttcagttccagagagcagcctcagcaaaacgagtgccagatccaaaaactcaatgccctcaaaccggataaccgtatagagtcagaaggagggctcattgagacatggaaccctaacaacaagccattccagtgtgccggtgttgccctctctcgctgcaccctcaac

SEQ ID NO: 60631 - DNA, 250 bp, Glycine max
  Clone ID: 700673562H1
ctttatatgccactggtatgccttgacaaacttaaattttcattgatctaatgtcacaatatcctgctattatttgattctaggtactctttctttgatgtatctagtggcaggagatgtaaccaacatagcactagatcctttattcatgtttgtattccgcttgggtgtcagtggtgcagccatcgcccatgttatatctcagtatgttctgtgaagtacatttatgcagaactatcttttccatggt

SEQ ID NO: 60632 - DNA, 254 bp, Glycine max
  Clone ID: 700673563H1
cttaattattaacacttccttagttcaatatggggaagccctatcactctctctctttcttccctttgcttgctactcttgtcgagtgcatgctttgctattagctccagcaagctcaacgagtgccaactcaacaacctcaacgcgttggaacccgaccaccgcgttgagtccgaaggtggtttgattcaaacatggaactctcaacaccctgagctgaaatgcgccggtgtcactgtttccaaactcaccct

SEQ ID NO: 60633 - DNA, 254 bp, Glycine max
  Clone ID: 700673564H1
gaaacaaaactacccttttgcttttgctctttgttctttgccatggagtggccacaacaacaatggccttccatgatgatgagggtggtgataaaaagtcaccaaaaagtttgtttttgatgagcaactccacgagggttttcaagactgatgcaggggaaatgcgtgtgctgaaaagccatcgtggtaggatattttataggcacatgcacattggcttcatctctatggaaccaaagtccttgtttgttcct

SEQ ID NO: 60634 - DNA, 80 bp, Glycine max
  Clone ID: 700673565H1
ctcgagccgctctccattggtccttaaacactcatcagtcatgaccatggccaagctagttttcgccctttgtgttctgc

SEQ ID NO: 60635 - DNA, 254 bp, Glycine max
  Clone ID: 700673566H1
gaagaagcgccccgggtagatcttcactgcgatgtcgttctctgaggctgaagaagaagacgccagcaatcgcagcagttccgtcaaatgggggcgggaattgttgatgcagagatcacaagttacttcaatgtttggggctggggatctttgggcaaaagggtacactggtgccaaggtcaaaatggccatatttcacacaggaattcgagctgatcaccctcattttcgtaacatcaagatacgttgaatga

SEQ ID NO: 60636 - DNA, 251 bp, Glycine max
  Clone ID: 700673567H1
gaaagatatcagtggcaaccccagagcacttaggaggttgaggactgcctgtgagagggcaaagagaactctatcttcaactgcccaaaccaccattgaaattgattctctctatgagggaattgatttctactccaccattactcgtgctagatttgaggagctcaatatggatctcttccgcaagtgcatggaaccagttgagaagtgtttaagagatgctaagatggacaagaggactgtccatgatg

SEQ ID NO: 60637 - DNA, 252 bp, Glycine max
  Clone ID: 700673568H1
ggtggttcgatccttggcgcttcggcatgtgataaagaataggggtcgcccactcttcttccaccgtcttcttctctctctcccttccaaatcctctctcttcgccaccaccgccaccgccactgcttcctctcggctctctctcctcccctcctttcaccactctcgctccctctcctccgccgcagctccttccgacgttgtccttgttaattctgaggaagagttcaacaatatcctcaccaaagtcca

SEQ ID NO: 60638 - DNA, 247 bp, Glycine max
  Clone ID: 700673569H1
ctcttccctctgccgccgcaccctgcaaattcaatggcttcagagaagaaactatcgaacccaatgagggaaataaaggtgcagaaactcgtcctcaatctccgttggtgagagtggagatcgtctcaccagagccgccaaggtgttggaacagcttagtggccaaaccccagtgttttccaaagcaaggtacactgttcggtcctttgggattagaagaaatgagaagattgcatgctatgtcact

SEQ ID NO: 60639 - DNA, 243 bp, Glycine max
  Clone ID: 700673570H1
ggtttgattaccaagcaagttatgagcaagatggcagaaatgataaacagtctttgtggtggtgatgaaaaattgatgcgtgaaaggacgcacctgctgttggcttgttgttcaaggatggcaatttgtaagaaagatgtttggagagttgaatgtggaatcccttctggatttccgctcacagttatttgcaatagcatttttaatgagatgctcattagatatagctatgaaaaattactg

SEQ ID NO: 60640 - DNA, 247 bp, Glycine max
  Clone ID: 700673571H1
aattaaacgtctgcggaaagcaacaatgtcaggacctgagtgttgctcagacccaccagttctgaaccccaatgcaggagctggccatgttgacaaactcgctggtactcaattcctatctctcgggttcccctaattccattgccattcttctcatctccgacatttatggctatgaagcatcacgtttgcggcctattgcagacaaggttacagctgctggttattatgtggttgcacctgactt

SEQ ID NO: 60641 - DNA, 73 bp, Glycine max
  Clone ID: 700673572H1
tctctccattgtctttggacactcatcaccatggacaagcttgttctttccctatgcttcctccctttcagtg

SEQ ID NO: 60642 - DNA, 248 bp, Glycine max
  Clone ID: 700673573H1
gttcaatatcctagtataccttaataaataatttaagatactatgatgagagcacggttcccattactgttgctgggacttgttttcctggcttcagtttctgtctcatttggcattgcttactgggaaaaagagaagcccaaacacaacaagtgtctccagagttgcaatagcgagagagactcgtacaggaaccaagcatgccacgctcgttgcaacctccttaaggtggagaaagaagaatgtga

SEQ ID NO: 60643 - DNA, 242 bp, Glycine max
  Clone ID: 700673574H1
ggaaaaagttgtattgaaattttcacaagaggaatttcttacagcttggtcaactcaggtgcgtcctacaacaactctgttggctgatgggtgtccatatttgtatgctatggtgcatgatagttcagtgtctacaataccaggtgattttgtcattggtgttaagttgacaaccataaacaatatgtgtgcatatgggctcaatcctggtatttcaggttctcgtcttttgggtaccattc

SEQ ID NO: 60644 - DNA, 244 bp, Glycine max
  Clone ID: 700673575H1
cgctcttctctctagagctgctgcgttgctaaaacgcaccggtttgttcctgttctcgttcaaaagaaaactgacacaagtgaagcttggtgcataaacagcaatggcagtaaaaccccaaccggttcgggttctctactgcggcgtgtgcagtttgccccccgaatactgcgaattcggatccggtttcgagaaatgcaaaccctggttgatccaaaacgtccctgacctatacgctgatctt

SEQ ID NO: 60645 - DNA, 243 bp, Glycine max
  Clone ID: 700673576H1
ccagaggcgacgagttttagcgacaagggtttcggtcctgttccatcccgatggaaaggcacctgcatgacatcaaaagacttcaattcctcttgttgtaacaggaagataattggcgcgaggttttaccctaacccagaggagaaaacggcaagggatttcaacggacatgggactcacgtttcgtcgacggcagtgggcgtgccggtgagtggcgcatcgttctatggtctggcggcgggg

SEQ ID NO: 60646 - DNA, 247 bp, Glycine max
  Clone ID: 700673577H1
caatagcaaagaaatgtgataagccagatacctagtcaagtgcaggagcttgcattccctgggtctgcacaagctgttgagaagctattaaagaaccaaagagaatcctactttgtggatgctcagcctaagaagaaagaggaggggaataagggaagaaagggtcctttgtcttcaattttgagggctttttactgaataagtatgtactaaaatgtatgctgtaatagctcatagtgagcgagga

SEQ ID NO: 60647 - DNA, 234 bp, Glycine max
  Clone ID: 700673578H1
gaatccatggcagccattggtctgaatggcgtaaaggttgggacgacgtcgtctcaggcgtaccttgaaggcaaggcagtgaaggagacgagagcgttgatggctgaactgtgtcgccatttctacacccttggatgggtgacagggacaggtggcagcatctccatgaaggtccacgatgactccatccccaggcctcaacagctcatactcatggccccttctggtgttcag

SEQ ID NO: 60648 - DNA, 253 bp, Glycine max
  Clone ID: 700673579H1
tggatccagacgcgttggcaaaggcattcgtggagcactactacagcaccttcgacaccaacaggaacggcttagcgaatctctaccaggagggttccatgctcactttcgaagggcagaagatccaaggcgcttccaacatcgttgccaagctcacctccctcccttttcagcagtgccaccactcaatctccaccgtcgactgccagccctccggcgtcaacgccggcatgctcgtcttcgtcagcggaaa

SEQ ID NO: 60649 - DNA, 254 bp, Glycine max
  Clone ID: 700673580H1
cgaatcgagccgaatcggctcgaggtcaaatgtcttcgttcctccacgaactgctccataatagaccctctcataacaacagtgccctcaaaccgtggcatgtttgggtcacacttggtggaacctttgtccattaattcgcacaagttgtggggacctagaatttctgctgctgttgcacaagtagaggctgttgttgttgtggatgatgatggtgctggtttagttgaagaagacacagtggaggagcatga

SEQ ID NO: 60650 - DNA, 251 bp, Glycine max
  Clone ID: 700673582H1
agaagacgaacactatcatggcttcttcactcagaatctcaagacttatctctcgctccttttcttctacttctttcttttcacgaggtgggaatggtttccttggttcaagacaaagtaaattcagcacttctgctgccattgaggaagaacccattaaaccatcaatacaagtagaacacactcaactcttaattgatggaaaatttgtagatgctgcttctggtaaaacttttcaaactttagatcct

SEQ ID NO: 60651 - DNA, 155 bp, Glycine max
  Clone ID: 700673583H1
catacattcgactgaagccaaatgaagcctacattttcgagcaaatgaagtcccaagatggatttatgcagaatacttttgggaccttcgatgacataatgggggcaatggtcaaaacggagcaaaatgagttgacattgctcgatgacataatg

SEQ ID NO: 60652 - DNA, 227 bp, Glycine max
  Clone ID: 700673585H1
ctgccgtttcctttgttggtgttgctgggaactgtcttcctggcatcactctgtctctcattaaaggtgagacacgatgagaataaccctttctacttgacaagctctaacagctttcaaactctctttgagaatcataacggtcgccttcgtctcgttcagacatctaacaaacgatgcccacaacttgagaaccttcgagactaccggattgtccagtttcagtc

SEQ ID NO: 60653 - DNA, 247 bp, Glycine max
  Clone ID: 700673586H1
cggctcgagctcgagccgaatacggctcgaggcaacaaagaccccaggaagaggaagaagaaactgagaatgagaagccacagtgcaagggtaaagacaaacactgccaacgcccccgaggaagccaaagcaaaagcagaagaaatggcattgacgagaccatatgcaccatgagacttcgccacaacattggccagacttcatcacctgacatctacaaccctcaagccggtagcgtcacaaccgc

SEQ ID NO: 60654 - DNA, 233 bp, Glycine max
  Clone ID: 700673587H1
cgatccaggtcaattaatttctctctctctctctctctctctagaatgtcttcccaacgcgcagatctagcgtgccggatcttcccggagcccgatgccttccgaaatcgaccacttcgaccggttatcggactcgctcctccttgtcggttttcaacaagatcggacgtcgtcatagccctaggtcgaatacgatgtcgtacgcgtcgactgcgtcatctccgacgacgact

SEQ ID NO: 60655 - DNA, 242 bp, Glycine max
  Clone ID: 700673588H1
cagaggaacaatggcgggtagggtttcgacgtgcttcttcttcgtgtttgctctttctctccttcttccttttcagatctccgctgaggaatcatcggagaaagagttcgtactcacattggatcactctaactttcacgacactgtcagcaagcacgatttcatcgtcgtcgagttctacgctccatggtgtggccactgtaagaagcttgctcccgagtatgagaaagctgcttctatct

SEQ ID NO: 60656 - DNA, 241 bp, Glycine max
  Clone ID: 700673589H1
ctcgagccgtttttacagtagcaaatgctagtcaccgaacttagtcaatgagctagaatgggttataaagatatctatagatatatatagatatatttatctatagatatctttagaaaaaaaaaaagaaattagccaattaagacgtatcattttatgaatagtagtggggaattatgggacaaaaaataaatccgcttggtttcaaacttggtacaactcaaagtcatgattctatttg

SEQ ID NO: 60657 - DNA, 240 bp, Glycine max
  Clone ID: 700673590H1
gagaaattcaatttcattggaacaattggaacaccggcttttcatcgccaaatagctgcacatttggaaaagatgccattgtggcaaaaagcaattttgtgtggaatgggacattgtttgtctcggaaaagcaaagaaacctggtatactggtgtgaaggagaaatttgtgcagatgatgaaaagcatctatgaaactgaggtcacagattggccagtgccattgaaaatcatttctggt

SEQ ID NO: 60658 - DNA, 243 bp, Glycine max
  Clone ID: 700673591H1
ctttgaacactcatcaccatggccaagcttgttctttcccttagtgtccttcttttcagtggctgcttcgctctgagagagcaggcacagcaaaatgagtgccagatccaaaagctgaatgccctcaaaccggataaccgtatagagtcggaaggtgggttcattgagacctggaaccctaacaacaagccattccagtgtgccggtgttgccctctctcgctgcacccttaaccgcaatgcc

SEQ ID NO: 60659 - DNA, 240 bp, Glycine max
  Clone ID: 700673592H1
ctcgtgctcagacttgtcactaataacatgagaccatcagggttccacgtggggcaaggtgttggagtaggacacatgcttatacttgagataatcatgacatttgggctaatgtacactgtgtatggtactgcaattgatcccaaaaggggttctgttagcaacattgcacctttggcaattggactcattgttggggcaaacatccttgttggtgggccatttgatggagcctgcatg

SEQ ID NO: 60660 - DNA, 244 bp, Glycine max
  Clone ID: 700673593H1
gtattctgatcgctccctgagagagctcgtcgcggcggttgcagaagaagattgcaagatgaagttcaacatcgcgaatcccaccactggatgccagaagaagctcgagatcgacgacgatctgaaactgcgagcattttgggacaagaggatctcacaggaggtcatcggagatgcactcggtgaggaatttaagggctatgtcttcaaaattaccggaggttgtgacaaacaaggatttcca

SEQ ID NO: 60661 - DNA, 247 bp, Glycine max
  Clone ID: 700673594H1
atggaatcaggcgtttagtgctgtctaagaacaaaccattagtggttcagtttcagaaatttagagtactatcttctttgctctctttctagtttgtgccttcaccatctcatacctgccttcagccaccgctcagttcgtgctcgacactgatgatgatcctcttcaaaacggtggcacatactatatgttgccagttatgagaggaaagggcggtggaatagaagtagattcaactggaaaagaa

SEQ ID NO: 60662 - DNA, 251 bp, Glycine max
  Clone ID: 700673595H1
caaattcaagaaattcccaaacttttttactttttattccctttttctcactatacaatacaaatacacattcaacaattttcgattcaagttcacagccatcgacgagtgttgaggaagaataacaatgggaatgatagtggattttgaaaatgaccaaaacgacgccgttctggttccgccccctaacttcgccatggttgaagactgcgttttccgatccagcttccccaccccttccaatttcccct

SEQ ID NO: 60663 - DNA, 250 bp, Glycine max
  Clone ID: 700673596H1
gtggacgcaagcaggggcaacaccagcaggaggaagaggaagaaggtggcagcgtgctcagtggcttcagcaaacacttcttggcacaatccttcaacaccaacgaggacagtgctgagaaacttcagtctccagacgacgaaaggaagcagatcgtgacagtggaaggaggtctcagcgttatcagccccaagtggcaagaacaacaagatgaagatgaagatgaagacgaagatgatgaagatgaaca

SEQ ID NO: 60664 - DNA, 249 bp, Glycine max
  Clone ID: 700673601H1
caatatcctagtataccttaataaataatttaagatactatgatgagagcacggttcccattactgttgctggtacttgttttcctggcttcagtttctgtctcatttggcattgcttactgggaaaaagagaaccccaaacacaacaagtgtctccagatttgcaatagcgagagagactcgtacaggaaccaaacatgccacgctcgatgcaacctccttaaggtggagaaagcagaatgtgaagaa

SEQ ID NO: 60665 - DNA, 250 bp, Glycine max
  Clone ID: 700673603H1
cgaaacttcataaagaaagtcactaaaaaaccgcgggtggggacaccggctcgaccgggttcggctcttccgtcttttttattcgccctcttcaatgagaatcagaaaccgggtccgagtacggagcggcatttcgggttgttgcacccgaacgggtcgagggtttacgacgtggattcgtccgaggaaacgccggaggccagtatccggccgcttccggtgccggagaataatgaaaagtttaagggga

SEQ ID NO: 60666 - DNA, 254 bp, Glycine max
  Clone ID: 700673604H1
accgtattaaagaatttaagatatactatgatgagagcgcggttcccattactgttgctgggagttgttttcctggcatcagtttctgtctcatttggcattgcgtattgggaaaagcagaaccccagtcacaacaagtgcctccgaagttgcaatagcgagaaagactcctacaggaaccaagcatgccacgctcgttgcaacctccttaaggtggaggaagacgaagaatgcgaagaaggtcaaattccacg

SEQ ID NO: 60667 - DNA, 251 bp, Glycine max
  Clone ID: 700673605H1
cacgttctcattctcacttgaagcgggtcacctcaatttgttgccagcatgctaatccatctcctttcactccctttctcgcttcttccaaccaccccaatacttttccatccatttcctctccttcagttcgctccacacccgaatcccattctctcaatcatatcaaaactggggctttccaaaaaccaaaggcaataacagctcggacgcttgtaatactttctgctcttgctatgatcttaatccaa

SEQ ID NO: 60668 - DNA, 240 bp, Glycine max
  Clone ID: 700673607H1
cgtttgaagaagaagaggaaggtggcgaaggggatggagaagacggcgtggcggattcttgctaaccagctggggcacttgagagagatggaaacgcgggttcagcagcgttaagtggagacggcacgcgagaggcagatgctggataatttgcgagtggagcttgataagcagtgggataggaagcttgacgagtgggaaaaggagatacctgcgacggataaggcgagggacaagctt

SEQ ID NO: 60669 - DNA, 253 bp, Glycine max
  Clone ID: 700673608H1
cggaaccgagaataaccgagatgattcggagcgaacggcgttcagaagagcagagcagaagtacaagctctactacgactacaatgcttcttccaagaacaaaaagaaaaaacaacctaaacccgtggacttagcggaggtccttgactttagatctattctagaatgctatcaccaaaacgctgtgcttccttcgggtgttatcgttcttcacgacaagttcacctctccggtttttgctttacaaaatcgc

SEQ ID NO: 60670 - DNA, 251 bp, Glycine max
  Clone ID: 700673609H1
gttttaaatccacaaaatccatgacagataaataggtggatggggaaactgactttcccccagggatcttcccgtcgtgttaaaagaatgcctctttcaatagggggaggagctggtgcaaagaatgctattctcataaatatgccaaatgctgttctttcaatggggagatattttattggagacctcgtctttgaagtttctaagatgacttctccctacattaaatgtacagtctctttcttcatagc

SEQ ID NO: 60671 - DNA, 208 bp, Glycine max
  unsure (1)..(208): unsure at all n locations
  Clone ID: 700673610H1
gaaacaaaactacccttttgcttttgctctttgttctttgccatggagtggccacaacaacaatggccttccatgatgatgagggtggtgataaaaagtcaccaaaaagtttgtttttgatgagcaactccacgagggtttccaagactgtatccaggggaattgncgtgtgcctgaaaagccactggtgagtagcgatatttctata

SEQ ID NO: 60672 - DNA, 246 bp, Glycine max
  Clone ID: 700673611H1
caaacactagttaagactactctctctctatggctggtgcccaattcctcaatctcctcaactcctcttcacgatcttccttggtcaagccctctaggccacttctctacacccccattaacaattatgggcaagcaagcaagggaaagcatagccgtttgatggaagagagggcaccttccacagctgaagaatttctgagggttgcagaggagaagaaggccaaggaagctcaaaagggggtgg

SEQ ID NO: 60673 - DNA, 236 bp, Glycine max
  Clone ID: 700673613H1
gagtggagtaagtgtcgttcagatttcaataaagtatgggctgagatttatgctaaaaatcactacaaatcacttgatcatcgtagcttctacttcaaacagcaagattcaaagaacttgagcaccaaatctttggttactgagattaaagaccttaaagaaaagcagcagaaagaggacgatattattcagtctattgcagctggaaataaacagcctctaatttcacatctgga

SEQ ID NO: 60674 - DNA, 163 bp, Glycine max
  Clone ID: 700673614H1
ctcgagccgctagttttgatggtttgattaccaagcaagttatgagcaagatggcagaaatgataaacagtctttgtggtggtgatgaaaaattgatgcgcgaaaggacacacctgctgttggcttgttgttcaaggatggcaatttgtaagaaagatgtttg

SEQ ID NO: 60675 - DNA, 162 bp, Glycine max
  Clone ID: 700673615H1
gctcacattagtgaattgaaatctggtgtctatgttccactgcatataaaaactaatttgatatgatccttttcttggtggaattcaaaaatatgccactcccatgatgcccctagatgaagaaattcttcctaaggttgcacaagatatggttgaggaatg

SEQ ID NO: 60676 - DNA, 68 bp, Glycine max
  Clone ID: 700673616H1
gaacataatagcagaagggaacaagatggacttactggagttatgggcaattttcggcaccggcgtcg

SEQ ID NO: 60677 - DNA, 82 bp, Glycine max
  unsure (1)..(82): unsure at all n locations
  Clone ID: 700673617H1
aggcacgaaatcttttaccggaaacaagaatggccgatgccgaggatatncaacaacacgtntgcgataatggaaccggaat

SEQ ID NO: 60678 - DNA, 252 bp, Glycine max
  Clone ID: 700673619H1
aaatgatatacttcgagtggtcacaccattacaagaagattgggagatacggtttgcaattattaacgattttcgaagcattgttgaatctgtggaaagcctgagaggagcaactgttgagccatatggatcatttgtgtctaatctcttcacgcgatggggtgacttggatatttcaattgagctatcaaatggtttgcatatttcatctgcagggaaaaaacaaaaacagactttattgggggaggtttt

SEQ ID NO: 60679 - DNA, 250 bp, Glycine max
  Clone ID: 700673620H1
ctccattggtccttaaacactcatcagtcatcaccatggccaagctagttttttccctttgttttctgcttttcagtggctgctgcttcgctttcagttccagagagcagcctcagcaaaacgagtgccagatccaaaaactcaatgccctcaaaccggataaccgtatagagtcagaaggagggctcattgagacatggaaccctaacaacaagccattccagtgtgccggtgttgccctctctcgctg

SEQ ID NO: 60680 - DNA, 254 bp, Glycine max
  Clone ID: 700673621H1
ctcactcgcaagcaaaaagaaagaatcccaggcgaggagaaagatggaggggaaggagcaggatgtgtcgttgggagcgaacaagttccccgagagacagccgattgggacggcggcgcagagccaagacgacggcaaggactaccaggagccggcgccggcgccgctggttgacccgacggagtttacgtcatggtcgttttacagagcagggatagcagagtttgtggccacttttctgtttctctacatca

SEQ ID NO: 60681 - DNA, 251 bp, Glycine max
  Clone ID: 700673622H1
gtggcttcaagctctgcctcgtgctctagttgttggttttgtaaaaactgacatagagtttcagaaaaaaggggaaacttcaggaacaacagctacatttgttctggttgatggatggactgttactgttgcatctgttggggattcccgttgcatattagatactcaaggaggtgttgtttctctcttgacagttgatcacagattggaagaaaatgcagaagagagggaacgcgttactgccagtggtg

SEQ ID NO: 60682 - DNA, 253 bp, Glycine max
  Clone ID: 700673623H1
cggggaacagaagaagaaggtaaatttcttatctgctgatgattttgaaccccctcttatccctcccaagacaatcccagatcctgatgataaaaaacctgaggactgggatgagagagagaaaattccagactcaagtgcagtaaagccagatgactgggatgagaatgcacccttggaaattgttgatgaagaagctgagaaacctgaaggatgggacaatgaacctgaggagatagatgatccagaggca

SEQ ID NO: 60683 - DNA, 253 bp, Glycine max
  Clone ID: 700673624H1
tgcaatttagaaagttagcagattgtgattttctcaagcgaaactttaagcagatgtccaatgttttgtgggtggctcctgaggacaaggcgagtttatggtcacaacttcattatgtttcgtgtaataatctggaaatgcaagaagcttatcttgtcaatctcgaaaatgtgtcacgagaattgtatttgcacagtccagaggaagctcgccaattgagaaggaaagctctctctcgtattgaatggctgcc

SEQ ID NO: 60684 - DNA, 247 bp, Glycine max
  Clone ID: 700673625H1
cacctgagttgaccaagctgtaagaaattcctcttgtgcgtcctgcaacagggttgttgcaggagcacctgagttgaccaagctgtaagaaccctgttggctgatgggtgtccatatttgtatgctatggtgcatgacagttcagagtctacaataccaggtgattttgttattggtgttaagttgacaaccataaacaatatgtgtgcatatgggctcaatcctggtatttcaggttctcgtcttt

SEQ ID NO: 60685 - DNA, 241 bp, Glycine max
  Clone ID: 700673626H1
aaatgaccaagttcacaatcctcctcatctctcttctcttctgcatcgcccacacttgcagcgcctccaaatggcagcaccagcaagatagctgccgcaagcagctccagggggtgaacctcacgccctgcgagaagcacatcatggagaagatccaaggccgcggcgatgacgatgatgatgatgacgacgacaatcacattctcaggaccatgcggggaagaatcactacataaggagg

SEQ ID NO: 60686 - DNA, 244 bp, Glycine max
  Clone ID: 700673627H1
ctggtaattaatgaaggagatgcaaacattgaacttgttggcctaaaagaacaacaacaggagcagcaacaggaagagcaacctttggaagtgcggaaatatagagccgaattgtctgaacaagatatatttgtaatcccagcaggttatccagttgtggtcaacgctacctcaaatctgaatttctttgctattggtattaatgccgagaacaaccagaggaacttcctcgcaggttcgcaag

SEQ ID NO: 60687 - DNA, 75 bp, Glycine max
  Clone ID: 700673628H1
gctcaatgctcaaacgtgtgacagataaaaaccctttcttgaaaccgttctcgaaaatggctgacaaccgactgg

SEQ ID NO: 60688 - DNA, 227 bp, Glycine max
  Clone ID: 700673629H1
gttgtggtcaacgctacctcaaatctgaatttctttgctattggtattaatgccgagaacaaccagaggaacttcctcgcaggttcgcaagacaatgtgataagccagatacctagtcaagtgcaggagcttgcattccctgggtctgcacaagctgttgagcagctattaaagaaccaaagagaatcctactttgtggatgctcagcctaagatgaaagaggaggg

SEQ ID NO: 60689 - DNA, 80 bp, Glycine max
  Clone ID: 700673630H1
ggctgacctgaacaaacctccagaaatgatctctggcaacatgacaggaggtttatcatctctgtcgctacagactgttg

SEQ ID NO: 60690 - DNA, 93 bp, Glycine max
  Clone ID: 700673631H1
gagctcggcacgcggctcgagcaaattagcaatcacagtatctggaattcactggtggtacaaagttgcaaatcatgctgcagagcttactgc

SEQ ID NO: 60691 - DNA, 74 bp, Glycine max
  unsure (1)..(74): unsure at all n locations
  Clone ID: 700673632H1
cggctcgagctcgacgaatcggctcgaggcaacaaagaccccaggaagcggaagacttagattangatgagaag

SEQ ID NO: 60692 - DNA, 257 bp, Glycine max
  Clone ID: 700673633H1
caagaaacggggttgaggaaaatatctgcaccttgaagcttcacgagaacattcctcgcccttcacgcgctgacttctacaaccctaaagctggtcgcattagtaccctcaacagcctcaccctcccagccctccgccaattccaactcagtgcccaatatgttgtcctctacaagaatggaatttactctccacattggaatctgaatgcaaacagtgtgatctatgtgactcgaggacaaggaaaggttagagtt

SEQ ID NO: 60693 - DNA, 245 bp, Glycine max
  Clone ID: 700673635H1
ctcgagcgaatcggctcaggtcaaatgtcttcgttcctaccaagaactgctccataatagaccctctcataacaacagtgccctcaaaccgtggcatgtttgggtcacacttggtggaacctttgtccattaattcgcacaagttgtggggacctagaatttctgctgctgttgcacaagaagaggctgttgttgttgtggatgatgatggtgctggtttagttgaagaagagaaagtggaggag

SEQ ID NO: 60694 - DNA, 250 bp, Glycine max
  Clone ID: 700673636H1
ggtgatgaaaaattgatgcgtgaaaggacgcacctgctgttggcttgttgttcaaggatggcaatttgtaagaaagatgtttggagagttgaatgtggaatcccttctggatttccgctcacagttatttgcaatagcatttttaatgagatgctcattagatatagctatgaaaaattactgcgccaggctaaagctccaagtatgtttatacaatccttcaaaaattttgtgtctttgtgtgtgtatg

SEQ ID NO: 60695 - DNA, 248 bp, Glycine max
  Clone ID: 700673637H1
gctcggcattccgctcgccgtgccggtcgtagagccggcggagggtttggcggcggtggcggcgtacgattccgcggcggcggacgaccttgcggaggtccacggtttagaggaggacccgggctttcgcggtcgtcaccggtgcttggggcgaactctgaatacgtgtcgcagaagggtttgcatgtggcagtggcggtaaaactcggcggtggtgccgctcgatgatttgcagcacgaagtggacc

SEQ ID NO: 60696 - DNA, 244 bp, Glycine max
  Clone ID: 700673639H1
actcgagcgccagttcaatatcctagtacaccgtattatagaatttacgatgtcctatgatgagatcgtggttcccattactgttgctgggagttgttttcctggcatcagtttctgtctcatttggcattgcgtattgggataagcagaaccccaatcataacaagtgcctccgaagttagcatagcgagaaagactccgacagggaccaagcatgccatgctcgttgcaacctccttagggt

SEQ ID NO: 60697 - DNA, 74 bp, Glycine max
  Clone ID: 700673640H1
cgtcgaattgtaccctcagtagacttttagcgcggcgcactctgcatgactggatgggtatcaacgctactacg

SEQ ID NO: 60698 - DNA, 251 bp, Glycine max
  Clone ID: 700673641H1
cgctgaagctctcagaaaggcttgcgaaggatggggaactgatgagaacactgtcatagtaattttgggtcatagaactgtgtatcagaggcagcaaatcagaagagtttatgaggaaatttaccaggaggatcttgtgaagcgcctagagtctgagatcaaaggagactttgagaaagccgtgtaccgatggatactggaacctgcagatcgtgatactgttttggccaatgttgccatcaagagtggca

SEQ ID NO: 60699 - DNA, 237 bp, Glycine max
  Clone ID: 700673642H1
ccaccattatatgcttgatggctgctacccctcttcatcgacgtgccaaggtgttacgtatggttgttagtacctatcaggctgctagtggtgcgggtgctgctgcaatggaagagcttcagctgaaaactcgtgaggtgttggaaggaaaacggcccacttgtaaaatatttacccgacagtatgcttttaatctattctcgcataatgcgtctgttctttcaaatggatataatg

SEQ ID NO: 60700 - DNA, 246 bp, Glycine max
  Clone ID: 700673644H1
cggaacattttagaggcctcctacgataccaaattcgaggagataaacaaggttctgtttagtagagaggaagggcagcagcaaggggagcagaggctgcaagagagcgtgattgtggaaatctcgaaggaacagattcgggcactgagcaaacgtgccaaatctagttcaaggaaaaccatttcttctgaagataaaccttttaacttgagaagccgcgaccccatctactccaacaagcttggc

SEQ ID NO: 60701 - DNA, 216 bp, Glycine max
  Clone ID: 700673645H1
cgaagcttgtgattggaactcacagcgtgaagacaagaagcgagagtgcaggcaaagactgggatcaggttttcgccttcgataaagaaggcctcaattcgacgtcattggagatttccgtttggtcagaggaggtcaaagaaggggatgagaaaagcgagagttctctcggaacggtgtcgtttgatctgcaagaggtgcctaaaagagttcctc

SEQ ID NO: 60702 - DNA, 55 bp, Glycine max
  Clone ID: 700673647H1
ggcgtcgacgttatcttgtacataagaagtaagtgtgtatgatccatctctcagc

SEQ ID NO: 60703 - DNA, 252 bp, Glycine max
  Clone ID: 700673649H1
caggaacattttagaggcctcctacgataccaaattcgaggagataaacaaggttctgtttagtagagaggaagggcagcagcaaggggagcagaggctgcaagagagcgtgattgtggaaatctcgaaggaacagattcgggcactgagcaaacgtgctcaatctagttcaaggaaaaccatttcttctgaagataaaccttttaacttgagaagccgcgaccccatctactccaacaagcttggcaagtt

SEQ ID NO: 60704 - DNA, 247 bp, Glycine max
  unsure (1)..(247): unsure at all n locations
  Clone ID: 700673650H1
tgccgtttctattattgacaccaacagcttggagaaccagctcgaccagatgcctaggangttctatcttgctgggaaccacgagcacgagtttctaaaatatcagcaagagcacggcggtcatcaaagccagaaaggaaagcatcagcaagaagacgaaaacgaaggaggcagcatattgagtggcttcaccctggaattcttggaacatgcattcagcgtggacaagcagatagcgaaaaaccta

SEQ ID NO: 60705 - DNA, 243 bp, Glycine max
  Clone ID: 700673651H1
atggaatcaggcgtttagtgctgtctaagaacaaaccattagtggttcagtttcagaaatttagagtactatcttctttgctctctttctagtttgtgccttcaccatctcatacctgccttcagccaccgctcagttcgtgctcgacactgatgatgatcctcttcaaaacggtggcacatactatatgtcgccagttctgagaggaaagggcggtggaatagaagtagtttcccctggaaa

SEQ ID NO: 60706 - DNA, 235 bp, Glycine max
  Clone ID: 700673653H1
tcaagatggaagtgattagatctcaaggcattcctgctgacgatcttgcaaagcgagctcatgactttgacaaagatctagctcatgaaagcctcaaggattaaattcctgccgttgaccccttatattctactagggtaaataagtttgccgaaattatgatgcttagacccagtgtcgttggtgatcttaaacttctaactgacgggaagttatctgagggtaagcatattcc

SEQ ID NO: 60707 - DNA, 245 bp, Glycine max
  Clone ID: 700673655H1
tctactttgtttttctccttctttttcttctcagtttcatactcttgctcatggacacggacgagtcccgccatatatcagtttcttcaagtgcgtatcaccaagagcttcccacccttgatccccttttctgtcatcagaacacggaagtggattttggcatggaatggttatcagtgtttgtggaagactgtttctccactaagccaagttgcctcttcccaccctactggtggtggcgttca

SEQ ID NO: 60708 - DNA, 227 bp, Glycine max
  Clone ID: 700673656H1
atacaaggtgagaacgaagaggaggatagtggagccattctgacagtcaaaggacgtctaagagtcacagctccagccatgaggaagcgacagcaagaagacgatgacgatgatgagcgtgagctgccacagtgcgtgcagacagccaaaggttgccaacgccaaagcatgaggcgcaaatttggcattcatgcgcccgatggacacacttcgactgcgccagaaca

SEQ ID NO: 60709 - DNA, 112 bp, Glycine max
  Clone ID: 700673657H1
tgaagaggaagatgaggatgaggatgaggaacaagatgaacgtcaatggccattcccagggccacctcatcagaaggaagagcgaaagcaagaggaagatgaggatgatgag

SEQ ID NO: 60710 - DNA, 245 bp, Glycine max
  Clone ID: 700673658H1
gaaggagaagcaaacattgaacttgttggcattaaagaacaacaacagaggcagcaacaggaagagcaacctttggaagtacggaaatatagagctgaattgtctgaacaagatatttgtctactcccagcaggttatccagttgtggtcaacgctacctcagatctgaatttctttgcttatggtatcaatgccgagaacaaccagaggaacttccttgcaggttcgaaagacaatgtgataag

SEQ ID NO: 60711 - DNA, 71 bp, Glycine max
  Clone ID: 700673660H1
cacttcgctaacttgcgacagatatgaactccctcgtggaatctcgctccaatcatgcccacagcccatta

SEQ ID NO: 60712 - DNA, 180 bp, Glycine max
  Clone ID: 700673661H1
cgagtatctaaaatatcagcagcagcagcaaggaggttcccaaagctagacaggaacgcaccaaggagcagactacgaaggaagcaacatattgagtggcttcacacctgaattcttgaaagaaacgttcggagtgctcatgcagatagtgagaaacctacaaggtgagagcgacgagga

SEQ ID NO: 60713 - DNA, 95 bp, Glycine max
  Clone ID: 700673662H1
agtcagtcggggtcggtggagtactgcctctttttcttctctcgcaacaagggcacctgcttcgtcgtcgatcatgtctgacttgaagggctagt

SEQ ID NO: 60714 - DNA, 150 bp, Glycine max
  Clone ID: 700673663H1
cgcaaagcaatggctacttcaaagttgaaaacccagaatgtggttgtatctctctccctaaccttaaccttggtactggtgctactgaccagcagggcaaactcagcggaaactgtttctttcagctggaacaagttcgtgccgaagcaa

SEQ ID NO: 60715 - DNA, 74 bp, Glycine max
  Clone ID: 700673665H1
accggataacacagttatagtcacagttacttccaacacacataaaacagcgaaacctcctctcaccaaccacc

SEQ ID NO: 60716 - DNA, 248 bp, Glycine max
  Clone ID: 700673666H1
caatagcaaagaaatgtgataagccagatacctagtcaagtgcaggagcttgcattccctgggtctgcacaagctgttgagaagctattaaagaaccaaagagaatcctactttgtggatgctcagcctaagaagaaagaggaggggaataagggaagaaagggtcctttgtcttcaattttgagggctttttactgaataagtatgtactaaaatgtatgctgtaatagctcatagtgagcgaggaa

SEQ ID NO: 60717 - DNA, 227 bp, Glycine max
  Clone ID: 700673667H1
ccatagcaaagaaatgtgataagccagatacctagagcaagtgcaggagcttgaataccctgggtctgcacaagctgttgagaagctattaaagaaccaaagagaatcctactttgtggatgctcagcctaagaagaaaaaggaggggaataagggaataacgggtcctttgccttcaatttagctggctttttactgaatacatatgtactaaaatgtatgctata

SEQ ID NO: 60718 - DNA, 246 bp, Glycine max
  Clone ID: 700673668H1
attcaattggcttctggtaatatttaatagagccataaacatttgttagataatcaatattcaataaatgcttgacagctccataagtaccatatccatcaggtaccatggcaactcccaagagggaactgaataatttaaagcactcaaagttttctggagataatcagaaatagaggggccaaagaatagttattgtgaatcacaagtatcttgtgcaaataatcttcataaaatcttgtccca

SEQ ID NO: 60719 - DNA, 244 bp, Glycine max
  Clone ID: 700673669H1
tcgaggaggaagaagaagaagaagatgtcgtacctgttgcctcacttgcactctggatgggccgtcgatcaagcaatcctcgccgaagaggagcgtctcgtcgtcatccgtttcggccacgactgggacgaaacctgcatgcagatggacgaggtgttggcgtcagtggcggagacgataaagaactttgcggtgatatacctggtggacataacggaggtgccggatttcaacaccatgtacg

SEQ ID NO: 60720 - DNA, 247 bp, Glycine max
  Clone ID: 700673671H1
cgcatctgatggtttatgggagcacttgagtaatgagaaagccgtggatattgtaaacagcaatccacatgcgggtagtgccaagagacttatcaaggctgctctacacgaagcagcaagaaaacgagaaatgcgatattcagacctccgtaagattgacaagaaggttcgacgccattttcatgatgatatatccgttattgttttattcttaaatcacgaccttatttccagaggcacagtgcta

SEQ ID NO: 60721 - DNA, 245 bp, Glycine max
  Clone ID: 700673673H1
caacaagcttggcaagttgtttgagattaccccagagaaaaaccctcagcttcgggacttggatgtcttcctcagtgttgtggatatgaacgagggagctctttttctgccacacttcaattcaaaggccatagtggtactagtgattaatgaaggagaagcaaacattgaacttgttggcattaaagatcaacaacagaggcagcaacaggaagagcaacctttggaagtgcggaaatatagag

SEQ ID NO: 60722 - DNA, 226 bp, Glycine max
  Clone ID: 700673675H1
aaacttattaacactttccttagttcaatatggggaagcccttcttcactctctctctttcttccctttgcttgctactcttgtcgagtgcattctttgctattacctccagcaagttcaacgagtgccaactcaacaacctcaacgcgttggaacccgaccaccgcgttgagtccgaaggtggtcttattgaaacatggaatctcaacaccctgagctcattgcg

SEQ ID NO: 60723 - DNA, 73 bp, Glycine max
  Clone ID: 700673676H1
tcctctacacgccgatggtggtattggctgggtctgacatagatctggttccgtagaagctcagatctacggt

SEQ ID NO: 60724 - DNA, 223 bp, Glycine max
  Clone ID: 700673677H1
cttgaagagcagccataatctctggatgttatgaagaaccctgctaattttgccaagcaccaatcaaatccaaaggtagctcctgtaattgcgaaaatgatgaccaaacttggaggtggtcccaagtgaatacttttagatgctggaaagttgaagtctcaaataacttacaagccctctggcatcgggtattgaatgtttattgcatttttaatcttaccga

SEQ ID NO: 60725 - DNA, 164 bp, Glycine max
  Clone ID: 700673678H1
gtgaaaataaatcgagccaaggaatttattaataattgtcttcatttcatattagctgcctgctgcgacttccttatgcataattttactgtttatagaaattgtgaagctagactgttgtaattgtcatgtagatggttccctgtttcatcttacttgatttg

SEQ ID NO: 60726 - DNA, 180 bp, Glycine max
  Clone ID: 700673679H1
caaattagcaatcaaagtatctggaattcactggtggtacaaagttgaaaatcatgctgcagagcttactgctggatattacaaccttaatgatagagacggataccgccccattgcaaggatgctgtctcgccatcatgccattttgaactttacatgtcttgagatgagggattcaga

SEQ ID NO: 60727 - DNA, 248 bp, Glycine max
  Clone ID: 700673681H1
cgtgtatataacgtgcacccttccacatactttctcgtcctcgatccctctcgaattatccttccctatactccataaacgaggtgcttcagatttgctcataataggagggaatcgaatcgaatcgaatcgaaaggaaagtgcagaatagatgacatgccgtggccggcgctctttgagcaagcccgcaagatccacgccgcagccatcgattccggcgtcgaccaggaggttctgaagaatgggtg

SEQ ID NO: 60728 - DNA, 246 bp, Glycine max
  Clone ID: 700673682H1
ccgcaatgcacaaattgggaagaggtcatcgtgacaaactccagcagttcataacaataactggagccagcgagaaactagccctgcaggctctgaaggctagtgattggcatcttgaaggagcatttgatttcttttacagccaaccccagcttaaaacatttactgattctaggcacttggaggagctatacaatagatataaagatgcatatgttgatatgattttggcagatggtatcactc

SEQ ID NO: 60729 - DNA, 245 bp, Glycine max
  Clone ID: 700673683H1
ggattcagcaggaacattttagaggcctcctacgataccaaattcgaggagataaacaaggttctgtttagtagagaggaagggcagcagcaaggggagcagaggctgcaagagagcgtgattgtggaaatctcgaaggaacagattcgggcactgagcaaacgtgacaaatctagttcaagaaaaaccatttcttctgaagataaaccttttaacttgagaagccgcgaccccatctactccaa

SEQ ID NO: 60730 - DNA, 225 bp, Glycine max
  Clone ID: 700673684H1
attattctatatcaattttggttaagagtcttgaaaaagcaagagagaaaaaaataccaaccatggcaaccatttctgatcaacctagagggtcctattcctatggaacctcatatggagcaccctatggaaccacgtattagaccaacaccagcattaacaacccatcttcacgccaaactgtgaagttcataactgttgccactattggcatcacactcttgt

SEQ ID NO: 60731 - DNA, 244 bp, Glycine max
  Clone ID: 700673685H1
gtttagtggtaaaagtgcgattcgttccatggacccctaaatagttaagggatcccccgtttgattcatattccgatcaaaaactttatttcttacttaaagggaatcctttataccctcaatgaatgatttgcggtataatatacattatcgtaatttgtatacaagaagtatcaattctaaattgacaacttgagttctaaaattatgaaacataagtttttagaattggatctataatccg

SEQ ID NO: 60732 - DNA, 244 bp, Glycine max
  Clone ID: 700673686H1
taagaaatgaagagtactatcttctttgctctctttctagtttgtgccttcaccatctcatacctgccttcagccaccgctcagttcgtgctcgacactgatgatgatcctcttcaaaacggtggcacatactatatgttgccagttatgagaggaaagggcggtggaatagaagtagattcaactggaaaagacatatgccctctcactgttgtgcaatcacccaatgagctcgataagggga

SEQ ID NO: 60733 - DNA, 146 bp, Glycine max
  Clone ID: 700673688H1
tggcgaacttcctgaagacgaagacgaccaccgaccgcgtgaagatctacgacgtgaacccggacatcctgcgggccttcgccggcagcggcatctccgtgacggtgaccgcccccaacggcgacatcgccgccttgaaccaaaat

SEQ ID NO: 60734 - DNA, 238 bp, Glycine max
  Clone ID: 700673690H1
tttcgcttcttcgatcttcgatcttcgtcgctgaaaatgagagagtgcatttcaatccacatcggccaggccgggattcaggttggaaacgcctgctgggagctttactgcctcaaacacggcattcagcctgatgggcagatgccaagtgacaagaccgttggtggaggtgatgatgctttcaacaacttcttcagtgacactggaggcaggaaagcacgtgccccgtgcgattttt

SEQ ID NO: 60735 - DNA, 239 bp, Glycine max
  Clone ID: 700673691H1
gccgaccaagccatggaaagcgtgaacaagacgaggacgaggacgaagatgaagataaacctcgtcctagtcgaccaagccaaggaaagcgtgaacaagaccaggaccaggacgaggacgaagatgaagatgaagatcaacctcgcaagagccgcgaatggagatcgacaaagacacaacccagaagacctagacaagaggaaccacgtgaaagaggatgcgagacaagacacggggtt

SEQ ID NO: 60736 - DNA, 183 bp, Glycine max
  Clone ID: 700673692H1
gttattatcagataattaattaaattcctcgtggaatcttgttgaagccatgtctacagctggtcaggtcatcaagtgcagagctgcgagtggcatggtgaagcagggaagccactatcgatagaaaccatagaagtggcaccaccccaaaaaggtgaagtgcgtttgaagatcctcttaaac

SEQ ID NO: 60737 - DNA, 200 bp, Glycine max
  Clone ID: 700673693H1
aattccttcacttgcagaacttagttctctgttgcatcatcatcatcttcattagtgttagccctaaacttcaccttcaaccatgaccacagtgccaccacacagtgtccaagtgcacacaacaacacaccgctacgatgccggcgtcgtcccgtcggctcgttttgaggcgccgcgttacgaagccggcttcaaggcgc

SEQ ID NO: 60738 - DNA, 143 bp, Glycine max
  Clone ID: 700673694H1
gtcttccatagccccccaaaaatgaagagcaccatcttctttgctctctttctcttatgtgccttcaccacctcatacctaccttcagccatcgctgatttcgagctcgataatgaaggtaaccctcttgaaaatggtggcac

SEQ ID NO: 60739 - DNA, 71 bp, Glycine max
  Clone ID: 700673696H1
caggtacatcgcttcaagagagggtgatttgctcgcaatgcctactggtgccccagggtgtatttccaacc

SEQ ID NO: 60740 - DNA, 270 bp, Glycine max
  Clone ID: 700673702H1
aatttttgttcctcactgaccaagccacaacgatgagaaccaaactttctttagctatctttttcttagctcttctaaccttattttcaaacctagcctttggcaaatgtacagaaaccgaggtagaagacgaagaccctgagctcgtaacatgcaaacaccaatgggaacagccacagcaatacactgagggtgacaagcgggtatgcttgcaaagatgtgacaggtatcatcgtatgaagcaatagcgatagaaactaatccacgagg

SEQ ID NO: 60741 - DNA, 119 bp, Glycine max
  Clone ID: 700673703H1
tcaagcgggtcgtcgcgtgccagtcaggggacggattcggaacgggcccttctggagctctttcccgggcgtcgaacagtcaactcagaactggtacggacaaggggtatccgactttt

SEQ ID NO: 60742 - DNA, 136 bp, Glycine max
  Clone ID: 700673704H1
cgctgaagatggttctgttgagaatgcagacaatgttgaatctgcttctatatctgctaaaagtacgtcagaggataacacaggagctgaagatgatgtttcgtcagtggctgcaaacatagagcagctaaatcta

SEQ ID NO: 60743 - DNA, 251 bp, Glycine max
  Clone ID: 700673706H1
gttgaatcatggatcagaaagtcgatttcagtgctccgcattccatgggaaccactatcatcggcgttacttacaacggcggtgtcgttctcggagccgactctcgaaccagcactggagtgtatgttgccaaccgagcatcgcacaaaatcacacagctcactgataatgtttacgtgtgtcgctctggatcggctgctgattctcagattgtctctgactatgtgcgctacttccttcaccaacacacg

SEQ ID NO: 60744 - DNA, 175 bp, Glycine max
  Clone ID: 700673707H1
tttgtttaaattgtctcttgatgatgttgaaactcctaaaggttccatgttggatcttaaaatttctcaatctaaaattgcacttcccaaaaacacagttggaggaaccattctgcgtagtgatctattggcaaattttttgacagagggcaattttagagcaagtgttgatttg

SEQ ID NO: 60745 - DNA, 99 bp, Glycine max
  Clone ID: 700673708H1
gaaccttttatttgtcactaggcgatcactctgttcttcattacataggtttttattcttagtgaacgactagtgcttgtctctatatgatccttgtta

SEQ ID NO: 60746 - DNA, 183 bp, Glycine max
  Clone ID: 700673709H1
cattgactttcccccagggcacttcccgaaatgttaaaagaatgcctctttctatagggggaggagctggtgcaaagaatgctattctcatgaatatgccaaatgctgttctttcaatgtggagatattttgttggagatctcgtctttgaagtttctaagatgacttctccctacattaaat

SEQ ID NO: 60747 - DNA, 84 bp, Glycine max
  Clone ID: 700673711H1
ggtgttttgcatctgcctgtaaaaatggccttcagaggaactggaacgctgattttggtgagtctcttatggcttttctttcct

SEQ ID NO: 60748 - DNA, 224 bp, Glycine max
  Clone ID: 700673712H1
tgcttttccaaacaagattgtttttgatgataagcttgtgttggctaacacacaagaattctttgatggaaattttccagtggattcttggttcccaatttttgtgaattgtctctatcctgtaagtcaattaccttcagaagctgtcgttgtaaatgttacatgtggtagtggacgtggtggtttacccaccactgcttggattagttctgcagtcaacaatc

SEQ ID NO: 60749 - DNA, 131 bp, Glycine max
  Clone ID: 700673713H1
tagtcgagtgctgcatttgggtaacactacaatcgacaggtttgaaacagcacattggaggctggagaacttgcttcaagatagtggggggcatatgtgtagttgttgggatgctgtgaacaacatgatta

SEQ ID NO: 60750 - DNA, 102 bp, Glycine max
  Clone ID: 700673715H1
tgacttaggaacactttccttcgttcaatatggggaagctggtcttcactgctctctctggcttccctttgcttgctactcttgtctagtgcatgctttgct

SEQ ID NO: 60751 - DNA, 194 bp, Glycine max
  Clone ID: 700673717H1
atgaggagggagacagtggaaggaaggaacactcaaatcactgaaccagccatggctaccttctccaaggaacgcgagaactttgtatacgttgccaagttagctgaacaagctgaacgctatgatggttctctctctctctctctcgattttcactgtgaagtgaacactcgttctggttccttcattttagc

SEQ ID NO: 60752 - DNA, 261 bp, Glycine max
  Clone ID: 700673718H1
gtcacaacacagaccctccgccggtgggaacggttacggttacgcttccggtgaggaaactaatgacaacaacaataacctgttttctcccacttccgtgcttcacagttgttccttgtccgaggcagctgagtccgtaaggggcaaagacgatgagtactcctccgtgtcgatgagtagggtcaaggctgagtcaccatttccggttccgagcgaaatagaatttgactttcgaagtatttcgccggtgcctgagagtgt

SEQ ID NO: 60753 - DNA, 276 bp, Glycine max
  Clone ID: 700673719H1
acgagctcgattcggctcgccctcgaccgattcggctcagctgaattctttgaactcaaagcctaaaaaaaacgatctatcgtttagtgtcttccactcgccatggctgtggatcttccctcacatcacttctcgcgccgaaacccacccttccattcgacgccgccctacgatctcgccgtgtccctcaaaacgacggacatgttagaggattttcaagctcgaattttgcttggaggaatcttattgtgaacgagaatgtgaatgcagatgatt

SEQ ID NO: 60754 - DNA, 225 bp, Glycine max
  Clone ID: 700673720H1
gatcccttctcaggttctggattctcagtgtttgcgaacgctgcatcatcctttggggaagaatggatcatcaagggcatagccagaacccatctatgggggtggttggtagtggagctcaattagcatatggttctaacccatatcagcccggccaaataactaggccacggggtctgttgtgacatcagttggtaccattcaatccacacctgctggagctca

SEQ ID NO: 60755 - DNA, 133 bp, Glycine max
  Clone ID: 700673721H1
ccgaaacttcataaagaaagtcactaaaaaaccgcgggtggggacaccggctcgaccgggttcggctcttccgtcttttttattcgccctcttcaatgagaatcagaaaccgggtccgagtacggagcggcat

SEQ ID NO: 60756 - DNA, 268 bp, Glycine max
  Clone ID: 700606020H2
atcgagccgatttcagaatcaagagagaggaagaaaggtgagaagaacaagaagaagaagaacagaaaacccactcacacacactctctgcccctgcacatgcacatgcaccattctcactaatcactagggtttattcatccatccatggagctaaccgttttctctctcttcttcttcttcttcaccttccaccttccctcctgcttctcaggacaatcgagctccatggaatcagtgcctgatcttcagaacactatgtacgctt

SEQ ID NO: 60757 - DNA, 270 bp, Glycine max
  Clone ID: 700606023H2
accaaatgatcattgtcgttcaagggaagggagcaattggatttgcatttccgggatgtcctgagacgtttgagaagccacaacagcaatcaagcagaagaggctcaaggtcgcagcagcaactacaagacagtcaccagaagattcgtcacttcaatgaaggagacgtactagtgattcctcctggtgttccttactggacctataacactggcgatgaaccagttgttgccatcagtcttcttgacacctccaacttcaacaatcagc

SEQ ID NO: 60758 - DNA, 269 bp, Glycine max
  Clone ID: 700606024H2
tagggaagcccttcttcactctctctctttcttccctttgcttgctactcttgtcgagtgcatgctttgctattacctccagcaagttcaacgagtgccaactcaacaacctcaacgcgttggaacccgaccaccgcgttgagtccgaaggtggtcttattgaaacatggaactctcaacaccctgagctgcaatgcgccggtgtcactgtttccaaacgcatcctcaaccgcaacggcctccacttgccatcttactcaccttatccc

SEQ ID NO: 60759 - DNA, 252 bp, Glycine max
  Clone ID: 700606025H2
cttgggaaaggtaagaaaattgtttttcttactagagttgatccttttccagtagctttactggctgttctttttggtgttaagaatgaaattctgagttctaacgccactaatcctatgctgacgcgacttcttgaaaactgtaagagtctcaaatatctggttgatgagtgtccttttgcatttgtgaactagtatgtaatattttattcacttaaataaagcgcattactatgtgcaatgagtgtgttt

SEQ ID NO: 60760 - DNA, 270 bp, Glycine max
  Clone ID: 700606026H2
tagccaatctgcattcaaaattaattttgaatgggatgatgggagtggaattcctggagcattttatatcaagaattttatgcaaactgagtttttccttgtgactttgactcttgaagacattccaaaccatggaagcatccactttgtttgcaattcgtggatttacaatgccaaactcttcaaaagtgaccgcattttctttgccaaccagacatatcttccaagtgagacaccagctccactagtcaaatatagagaagaagagtt

SEQ ID NO: 60761 - DNA, 270 bp, Glycine max
  Clone ID: 700606027H2
tatggatgtacaacaatgaagacactcctgttgttgccgtttctattattgacaccaacagcttggagaaccagctcgaccagatgcctaggagattctatcttgctgggaaccaagagcaagagtttctaaaatatcagcaagagcaaggaggtcatcaaagccagaaaggaaagcatcagcaagaagaagaaaacgaaggaggcagcatattgagtggcttcaccctggaattcttggaacatgcattcagcgtggacaagcagatag

SEQ ID NO: 60762 - DNA, 225 bp, Glycine max
  Clone ID: 700606028H2
ccgttctttcatgcttcttccccgtttctcccacctcctccggcacactcctcctcctctccacgccatggcgcgtgccgtcacgtgcgccactcagccccctcatttccaccgctcatccggcatcgctacctctcgctgcggcgttttctctgcctccaaatcctcgcttttcgggcgcactttcacgcctacgcgggtgcgcggcgaagagcagcgacgcgc

SEQ ID NO: 60763 - DNA, 273 bp, Glycine max
  Clone ID: 700606029H2
gtcacagacagactcagtatatgatactgagaaactggctgagaggatagctaaactgtctggtggagttgcagtcatcaaggttggtgctgccacagagaccgagcttgaggatcgtaagctccgaattgaggatgccaagaatgcaacttttgctgccattgaggaaggtattgtacctggtggaggtactgcactggttcatctctccactcatgtcccagcactcaaggacaagcttgatgatgcagatgagaggctaggagccgacat

SEQ ID NO: 60764 - DNA, 112 bp, Glycine max
  Clone ID: 700606030H2
cgcataaggcaccctttatgttttagaccttggtcagatgcttgaacagttgtacttctgttttggccctgaatctcattctttaatttttattttttaaacacatctctag

SEQ ID NO: 60765 - DNA, 267 bp, Glycine max
  Clone ID: 700606031H2
cttcaccaacaaaaaaagtagcccaaaaccgcaactcaccgcttcgacacgtttcttcgatcattatccacattcctcttctcctcataggatggaacagcaggatatggctgatacaaccacccttagttattggttaaattggaggttctatctgtgtgcagtttgtgttttgctgtctattgtcctttcatttcttgtaatatggaaggataagggttcaaggaaattcagatctggaaaaggagaaaatcaggaagatgggac

SEQ ID NO: 60766 - DNA, 266 bp, Glycine max
  Clone ID: 700606033H2
taagaggaaggaactttagagtaatgggttctttccagacaggatttggagggggagtgggatcgtcttttccttcagcagcaaccttccctcattatgccatccagcaagggataccttataatgtttatgggtactctccttactcgccggattacacttaccctacgagctactatggtgtgtatggaggagcaacagcacagtacccggtttatggaagtggagctgctgctgcagcgttctacccatatctgcagtacgga

SEQ ID NO: 60767 - DNA, 263 bp, Glycine max
  Clone ID: 700606034H2
ggccaatctgcattcaaaattaattttgaatgggatgatgggagtggaattcctggagcattttatatcaagaattttatgcaaactgagtttttccttgtgagtttgactcttgaagacattccaaaccatggaagcatccactttgtttgcaattcgtggatttacaatgccaaactcttcaaaagtgaccgcattttctttgccaaccagacatatcttccaagtgagacaccagctccactagtcaaatatagagaaga

SEQ ID NO: 60768 - DNA, 261 bp, Glycine max
  Clone ID: 700606035H2
agggaaacaaaactacccttttgcttttgctctttgttctttgccatggagtggccacaacaacaatggccttccatgatgatgagggtggtgataaaaagtcaccaaaaagtttgtttttgatgagcaactccacgagggttttcaagactgatgcaggggaaatgcgtgtgctgaaaagccatggtggtaggatattttataggcacatgcacattggcttcatctctatggaaccaaagtccttgtatgttcctcagt

SEQ ID NO: 60769 - DNA, 265 bp, Glycine max
  Clone ID: 700606037H2
atcatggaaatattcgtttgaagagaatgggggaacttgatactagaccattccttgaagcaatgaagcaaagatataatgaggaggatgctgaagagagagcttcagagctgtgttcattgtgggaagaatatctaaaggacccagattggcatccattcaaagttatcatggttgaaggaaaagaaaaggaaattattagagatgacgatgaaaagctgaatgggttgaaaaatgacttgggtgaaggggcatataaagcagt

SEQ ID NO: 60770 - DNA, 262 bp, Glycine max
  Clone ID: 700606038H2
gaagggttcgagtgagagcatacctgtcgggacccgaaagatggtgaactatgcctgagcggggcgaaccagaggaaactctggtggaggcccgcagcgatactgacgtgcaaatcgttcgtctgacttgggtataggggcgaaagactaatcgaaccgtctagtagctggttccctccgaagtttccctcaggatagctggagcccgcgggcgagttctatcgggtaaagccaatgattagaggcatcgggggcgcaacgc

SEQ ID NO: 60771 - DNA, 265 bp, Glycine max
  Clone ID: 700606039H2
ctcgagccgattgcattcgtgaattgttggcatggggtgcagatcgtcttcaacgcgatgcatctgggcgtataccatatatggttgcccttaaacacaaacatggagcctgtgcatcattgctaaatcctacatctgcagaacctcttgtctggccgtctccattgaagttcatcagtgagcttaatcctgaagccaaagctttattagagcaggccttgatggatgcaaacagagaaagagagaaaaacatattgaaagggag

SEQ ID NO: 60772 - DNA, 264 bp, Glycine max
  Clone ID: 700606040H2
acaatgcttttggttgatacttatcataccaatcctgaaaatgcagttcgtagtatttttgttgcgcctttcagaggcggaaggcccattcgggtgggtacatttccgaataccatcgtgcagattgaaccagatatgaattcaaggtttcagcttttgagtaccactaccaatggtgattttgttcaaggggaagatctcgcaatggttaaagttaatgtagcatgtgctgctgttggcttgacatcaagttacactccaact

SEQ ID NO: 60773 - DNA, 263 bp, Glycine max
  Clone ID: 700606041H2
ggcacaacaacaacaaggacggttaaccatttctgccattttgctcataacttgcttggtaatcaaaccatcaaaactagcataatcgcaacacagaatatcgttgccctactcagtaatctattgggccaaccagtccattccatggagtatgggttgattccaacttgacaactaagcttgtcgcttttcttcataatgaacctcacaaaatttaaaaacttctgacgaaccacaagattaaactccatagggagaatagt

SEQ ID NO: 60774 - DNA, 264 bp, Glycine max
  unsure (1)..(264): unsure at all n locations
  Clone ID: 700606042H2
ctcttngggaatttctcaagattttgaaattgctggtaatactcttatgccagctttttctgtcccacaggctactgccagatcttctgaaaatgcggaatcctctgcatgatctggaatttgtgttttctctcgcttgttcgtttgtttaattcaataaaggaaattaggcatgaccctcttgttgagtatgctctgcctatttgaaaatttccacacctcttttaattatcgtaatgatgtgtgaagtgtgtgttattttaa

SEQ ID NO: 60775 - DNA, 267 bp, Glycine max
  Clone ID: 700606043H2
acatatcctagtacaccgtattaaagaatttaagatatactatgatgagagcgcggttcccattactgttgctgggagttgttttcctggcatcagtttctgtctcatttggcattgcgtattgggaaaagcagaaccccagtcacaacaagtgcctccgaagttgcaatagcgagaaagactcctacaggaaccaagcatgccacgctcgttgcaacctccttaaggtggaggaagaagaagaatgcgaagaaggtcaaattccac

SEQ ID NO: 60776 - DNA, 266 bp, Glycine max
  Clone ID: 700606044H2
agaacattttagaggcctcctacgataccaaattcgaggagataaacaaggttctgtttagtagagaggaagggcagcagcaaggggagcagaggctgcaagagagcgtgattgtggaaatctcgaaggaacagattcgggcactgagcaaacgtgccaaatctagttcaaggaaaaccatttcttctgaagataaaccttttaacttgagaagccgcgaccccatctactccaacaagcttggcaagttctttgagatcacccca

SEQ ID NO: 60777 - DNA, 268 bp, Glycine max
  Clone ID: 700606045H2
agcatttggaaatttggctgatgacaccatcaattttgaggcttttccccacaagctggtgcaatttggagagattcaggaaaaagttgtattgaaattttcacaagaggaatttcttacagcttggtcaactcaggtgcgtcctacaacaactctgttggctgatgggtgtccatatttgtatgctatggtgcatgatagttcagtgtctacaataccaggtgattttgtcattggtgttaagttgacaaccataaacaatatgtgt

SEQ ID NO: 60778 - DNA, 271 bp, Glycine max
  Clone ID: 700606046H2
tgtgcattgtcaccctgcaccccgccccccaaatttagtagtagtaatattttaatgatttactgatagtaatacagagttgttatgctgttggctttaaattgcttttgagctatgctaatgctcatttaacttgtctattctaattttaatgcttcacaatcaagccttgtgcatttcaatttgttaaacacttaagcgatcattcagtcctaattcagaattggcatcgatataggttatatgtgacagatatgagtagaccacaata

SEQ ID NO: 60779 - DNA, 268 bp, Glycine max
  Clone ID: 700606047H2
attaaagattcctgtagcgagttcaataataagtcctccaccacactcagatctgcgagtctctgtattgtgtatactgctgcaaattcgatgttcaattcccaatttctattttcaaattctcagaatttcaacggtttaattttaagtgtatgagatctgagcagaaatcataattttccatcgcaccggaagccggaaccctaaccgaacctgatcccaatctccgatgtcttgtttagcgctttctctgcaacccgcaaatgga

SEQ ID NO: 60780 - DNA, 275 bp, Glycine max
  Clone ID: 700606048H2
acttttcgtggaacccatttcccattttcccctttccaaaagaatgaatgcataaagtttggtggcgactgatcctttttcgatcccacataaccaaagagaatgacaatatcactggtaggtttgattatttaacagaaaaggactgctggaaaatgggaggttgctgttgttctgccaggaaacctcacctgcatggaacaccagtgtattactattgcccaccaactttagaagagcgtgagtctttaacatctaatgatggtagggctatg

SEQ ID NO: 60781 - DNA, 262 bp, Glycine max
  Clone ID: 700606050H2
aaaattttgataaaccgcgatcacaggttgccgcaccttaaaaccggaaacaaaagcaatcgttacttgatttcaagaatctctcaatttcttcctacttctttgtgtacgatttcttaagggaaagaaaatcactctctgtgctggtcacagacttcgtgaatcattttcttttccactcttagtttatttgctgaacactctcctatttgatataggacttcgtgtcagatttaaacttcttctgtctctttctcatttc

SEQ ID NO: 60782 - DNA, 263 bp, Glycine max
  Clone ID: 700606051H2
cgttgagtaacaactcaacctgtgacagtttcaaatgagtgaagcaacggcaagattcgaacggcgggtcctggtggcggaggacgaaggcgaggagagcatgtacgctctttcttggagcctcaggaacgtaattttccaaaattccagagatacccttatccttctttacgtcaagccccctcatgccgtttattcccccttagattccactggcaggatagatgatcctgaaactccaggttttctttctttctttcttt

SEQ ID NO: 60783 - DNA, 258 bp, Glycine max
  Clone ID: 700606052H2
cacaggaactgatgttgggtacccaggtgggctttggtttgatccacttggctggggaagtggttctcctgagaagatcaaggagttgagaacaaaggagatcaagaatgggaggttggccatgttggctgtgatgggggcatggttccagcacatttacactggcactggtcctattgacaacctctttgctcaccttgcagatcctggtcatgctactatttttgctgctttcactcccaagtgagaagggttgga

SEQ ID NO: 60784 - DNA, 261 bp, Glycine max
  Clone ID: 700606054H2
acctaagacggttatctccaagcctcactccctcgtttcttccgcccccttcactcaccttctatctgccaattctcttctattaataacacccacctctttggttcctcttcccttcaattcatcacataataacgacactacaaaacattgtttttagctcttttttgttgcagcgaaaccaaaatgtctttcactgcaactaagtttgcaccttctcctctccctctcaattccaccacccccagatccaatgacaag

SEQ ID NO: 60785 - DNA, 263 bp, Glycine max
  Clone ID: 700606055H2
attcaatatcctagtataccttaataaataatttaagatactatgatgagagcacggttcccattactgttgctgggacttgttttcctggcttcagtttctgtctcatttggcattgcttactgggaaaaagagaaccccaaacacaacaagtgtctccagagttgcaatagcgagagagactcgtacaggaaccaagcatgccacgctcgttgcaacctccttaaggtggagaaagaagaatgtgaagaaggtgaaattcc

SEQ ID NO: 60786 - DNA, 266 bp, Glycine max
  Clone ID: 700606056H2
acgttctgttcattcattcagaagcagcgtgggtgtgtgttttgcttcagagaatctttctcctaatggaacagctgaagccaagcgctcctaactcatcccctctcactccactcgccttcttggacagagcagccaccgtctacgcccacgtcccttccctagtctacaaccacaccaccttcacctggtccctcacgcgccgccgatgcctccagctcgcctcctccctctcctccctcggcatccgccgcggcagcgtcgtc

SEQ ID NO: 60787 - DNA, 253 bp, Glycine max
  Clone ID: 700606057H2
cttgtaggtataagcttagctgctcaggctctaatatacccctgccgaagtttatacaacaatgatgggcctgtaagtaacgagtcatgatgagactaagcagctgggacctggcacggagtggatgtaacagttgaggaaaggacagttatgatgctcccaacaagttttggtggatgatcaagacactatgaaaagttgaaaaagtctgcatacttaatttcaacatagtttgaattttgaagtacaagac

SEQ ID NO: 60788 - DNA, 261 bp, Glycine max
  Clone ID: 700606058H2
catcgagccgattcggctcgaggaatagaggttcctatagtgagaaactacccgaagtccagacatattataactcaactggatatggtgatgagcttttatgggcagctagttggctctatcatgctacgggtgatgattcttaccttcagtttgtgactggccaagatggagaagactatgctcaatggggaagcccaacctggttcagttgggataacaagcttgctggaactcaggttttgttatctagattaagct

SEQ ID NO: 60789 - DNA, 264 bp, Glycine max
  Clone ID: 700606059H2
agactatccttatgccgctgatggactggagatatgggctgcaattaagacatgggttcaagaatatgtgcccttgtactatgcaagagatgatgatgtcaaaaatgattctgaactccaacattggtggaaagaagctgtagagaaaggccatggtgatttgaaagacaagccatggtggcctaagttgcagacacttgaagaccttgttgaagtttgcctcattatcatatggattgcttcagctctccatgcagccgttaa

SEQ ID NO: 60790 - DNA, 263 bp, Glycine max
  Clone ID: 700606060H2
ctttctctttctctctctgtctttctatatcctcagcaacacactaggaaaaatgtagaacaactagaatcttttgttccaaacaaaaacgtatgaattggtcggtttttctccggagtcgtcttcacttttctccgagtttttattatcatcatctctctcgtgtccctgtctccatctccatctcttagtttcttcttcaaatggcagaagttgaagacatagacaaccctcatcacgaccaccatcattacctttcttct

SEQ ID NO: 60791 - DNA, 265 bp, Glycine max
  Clone ID: 700606061H2
atagaataagaattcttggcgagaggagcattgtcatagtccttgtagccttggccagtcaaccacaattttctgttaaaggttaattatagttgctttcaactaatttgtcagtagagagaggagcattgtcatagttggtgaaaatagggggtctcctcctttagggtatcgtggcatcagcaccagccatgattcggatcatgaggtgcaaaataacacccacaggatatgtcattggatttaagcaagtgtattcatcagc

SEQ ID NO: 60792 - DNA, 268 bp, Glycine max
  Clone ID: 700606062H2
ccaaaaggtacatcgcttcagagagggtgatttgatcgcagtgcctactggtgttgcatggtggatgtacaacaatgaagacactcctgttgttgccgtttctattattgacaccaacagcttggagaaccagctcgaccagatgcctaggagattctatcttgctgggaaccaagagcaagagtttctaaaatatcagcagcagcagcaaggaggttcccaaagccagaaaggaaagcaacaagaagaagaaaacgaaggaagcaac

SEQ ID NO: 60793 - DNA, 227 bp, Glycine max
  Clone ID: 700606063H2
gatcaaactcaagtttatcgatacctcttcaaagtttgggcatggtcgcttccagaccacacaggagaagcagaagttctttggacgcctcaaagcataattatgttaattggatggaaatgctggaattctatttggttgccatcacttataaactttgtagtgtttctgttttgatattatggattctcgggtagtgagtcattacattgcgtcaatccctcctt

SEQ ID NO: 60794 - DNA, 265 bp, Glycine max
  Clone ID: 700606064H2
cgaggttcggcttgtttcccttcctcacccttaattgagtctaaatttgattcaggttctcccctttcaattcctgcgttctcgggacgacaatagtcatttaggatcttctggtccgggtgtctgcttggtaggacttcatttctggagagtttggtgtaatgtctgaatcagaagctcagcttcctactgcctttgttgctgatgttctattgtggaagaggtggcatgtttccttgggtatcattgttgttgcaacagttgc

SEQ ID NO: 60795 - DNA, 254 bp, Glycine max
  Clone ID: 700606065H2
ctcagctagcattgtttggctgaagaacataaacaggagaactgttgatgttattgcatccagactgtatttttactattcgtatagctatgaacttatgggagatcttgctgaaattcggggcaaccttcttgcattgcaccgaattgccaccctccgccatgatgagctgggtcaggaaacacttcttaatttgttacttcgtaactaccttcactacaacctatatgatcaggctgagaagttgaggtcga

SEQ ID NO: 60796 - DNA, 260 bp, Glycine max
  Clone ID: 700606066H2
ctcgagccgcgccgtcgtcgctgtttttgtgtgtcgcttcttcgtaggtgcagctgcaatggagaagggacgccaaggagaacgtgtcagactctacgtgaggggtacaatccttggatacaaaaggtccaagtcaaaccagtatccaaatacatccctgatccaaattgagggtgtgaatgccaaagaagaagtagcatggtatgctggcaagaaaatggcctatatctacaaggctaaggtgaagaagaatggaagcc

SEQ ID NO: 60797 - DNA, 261 bp, Glycine max
  Clone ID: 700606067H2
aaaattttaataaaccgcgatcacaggttgccgcaccttaaaaccggaaacaaaagcaatcgttacttgatttcaagaatttctcaatttcttcctacttctttgtgtacgatttcttaagggaaagaaaatcactctctgtgctggtcacagacttcgtgaatcattttcttttccactcctagtttatttgctgaacactctcctatttgatataggacttcgtgtcagatttaaactttttctgtttctttctcagtt

SEQ ID NO: 60798 - DNA, 258 bp, Glycine max
  Clone ID: 700606068H2
attacagagaaagatttggctagagatgcaaactcgaagtttgagaatgtgattttgagcaagattgactcaaagttgggtggcttattagctgaagcctcttctgaagaggatttctctggcaaagttggtcagtcaactgttcttagaattacaggacttggatcaaagagggttggattgattggtcttggtcagtcaccttccactccttcaccttttaagggtcttggcgatgccgttgtggaggctgccaag

SEQ ID NO: 60799 - DNA, 259 bp, Glycine max
  Clone ID: 700606069H2
agcttctcctggggccctgatggaaagatctccatcatcaacaagcattgagcgcaggtatgtgaatagaagtagtgttaagcggaatcttgaaattgacgaaagtagaaggaggaacagtactaatgtaagagatttctctgcttctgatgatagacttggcagggagtctactctagagaaaccgctcttggatgagccctctcaagcagattcatctttatatggtaggactaatcagagcaatgcaccattgatt

SEQ ID NO: 60800 - DNA, 257 bp, Glycine max
  Clone ID: 700606070H2
atatcctagtacaccgtattaaagaatttaagatatactatgatgagagcgcggttcccattactgttgctgggagttgttttcctggcatcagtttctgtctcatttggcattgcgtattgggaaaagcagaaccccagtcacaacaagtgcctccgaagttgcaatagcgagaaagactcctacaggaaccaagcatgccacgctcgttgcaacctccttaaggtggaggaagaagaagaatgcgaagaaggtca

SEQ ID NO: 60801 - DNA, 256 bp, Glycine max
  Clone ID: 700606071H2
cttgcggctagggttttagcgcacttcttctagatttaaggaagatgggtaaggaaaaggttcacatcagtattgtggttattggccatgttgactctgggaagtccactaccactggccacctgatctacaagcttggaggcattgacaagcgtgttattgagagatttgagaaggaagctgctgagatgaacaagaggtctttcaagtatgcctgggtgcttgataagcttaaggctgagcgtgaaagaggaat

SEQ ID NO: 60802 - DNA, 260 bp, Glycine max
  Clone ID: 700606072H2
gttcacaatcctcctcatctctcttctcttctgcatcgcccacacttgcagcgcctccaaatggcagcaccagcaagatagctgccgcaagcagctccagggggtgaacctcacgccctgcgagaagcacatcatggagaagatccaaggccgcggcgatgacgatgatgatgatgacgacgacaatcacattctcaggaccatgcgaggaagaatcaactacataaggacggacgaaggaaaagacgaagacgaagaag

SEQ ID NO: 60803 - DNA, 260 bp, Glycine max
  Clone ID: 700606073H2
gtgagtttgttgttcctcactgacctcaccatggcgaccagagccaagctttctttagctatcttccttttctttcttttagccttgatttcagacctagccttgggcaaacttaaagaaaccgaggtcgaagaagatcccgagctcgtaacatgcaaacaccagtgccaacagcaacggcaatacactgagagtgacaagcgaacatgcttgcaacaatgtgacagtatgaagcaagagcgagagaaacaagtcgaaga

SEQ ID NO: 60804 - DNA, 261 bp, Glycine max
  Clone ID: 700606074H2
tctcgagccgaatcggctcgaggagaacttcctcttcgtttcgctgactttggggttttgcataggaatgaggctagtggcgcactgagtggattaacacgtgttaggagattccagcaggacgatgcacatattttctgcagggagtctcagataattgatgaacttcaagcagttcctcacttcatcctttatctgagactccctgcagaaaaaggatgaagtgaggaacagcttgaatttcatcaattatgtctataa

SEQ ID NO: 60805 - DNA, 262 bp, Glycine max
  Clone ID: 700606075H2
tcttcagcatttggtgttgtctggtggaaaagatgatttgtgtgctctcgctgttttcgaggacagtgtcaagaagctcaagagtcctaggaacttgtcgcatgttgctcctcctgagttgaccaaggaccaggttaactctgctgttgaattgctggcagattggttctacgagtcttgtggctctgtgcctctctctgctcttgaacacccaaagtttcaatcttttctcacccagctgggtttgccggtgactctgtta

SEQ ID NO: 60806 - DNA, 261 bp, Glycine max
  Clone ID: 700606076H2
aagaagcaagcatgtgtggcggagcaatcatcgcagatttcatacctcggcagcgtccccgcaccctcacagcctccgaactctggcccaagcgcacgaacctcaacctcaacctcctcctcctccagttaagaggcagaggaaaaacctctacagagggatcaggcagcggccctggggcaaatgggccgcggagattcgcgatccacgtaaaggagttcgtgtctggcttggcaccttcaacaccgccgaagaagccgc

SEQ ID NO: 60807 - DNA, 262 bp, Glycine max
  Clone ID: 700606077H2
acatatcctagtataccttaataaataatttaagatactatgatgagagcacggttcccattactgttgctgggacttgttttcctggcttcagtttctgtctcatttggcattgcttactgggaaaaagagaaccccaaacacaacaagtgtctccagagttgcaatagcgagagagactcgtacaggaaccaagcatgccacgctcgttgcaacctccttaaggtggagaaagaagaatgtgaagaaggtgaaattccac

SEQ ID NO: 60808 - DNA, 261 bp, Glycine max
  Clone ID: 700606078H2
atacaggtatcgctgtcctatatgcttgaagacaatagtcaatgatatgaactgggaatatttagatcgagaggtgtgtggaactattattaaattttgttttgaaatattttttgttggtctatgtatgaccatgttttatgtctttgaactctaaagtaatattccacatgactttcttggagacaaggaaaattcatggggataaaacaactaggaaatgagccttggaagacattttgtatcaaatttttgctatga

SEQ ID NO: 60809 - DNA, 262 bp, Glycine max
  unsure (1)..(262): unsure at all n locations
  Clone ID: 700606079H2
cctactcattctccatacctcaacgaagaggttanagagacggcaacactttgctgtccgccttgaccgagcagagcttcgtcttggccctcgattttgccctaaagtactctcagtcacaacagacaccgtcgtcgtcgtcgtcgtcatcaatggcaccgaagcagaccaaggctgagaagaagatcgcttacgatgcgaactgtgcgacctaatggaggagtacggccagatcctcgttgtgaactccgataacgtggga

SEQ ID NO: 60810 - DNA, 273 bp, Glycine max
  unsure (1)..(273): unsure at all n locations
  Clone ID: 700606080H2
attctcgtcgcattggtcgcttaaaacactcatcaagtcatcaccaatggccaaggctagttttttcccctttgtttctgctttcaagtggtgctgcttcgctttcagttccagagagcagcctcagcgaaacgagtgccagatccanaaactcaatgccctcaaaccggataaccgtatagagtcagaaggagggctcattgagacatggaaccctaacaacatgcattcagcgtggacaagcagatagcgaaaaacctacaaggagagaac

SEQ ID NO: 60811 - DNA, 258 bp, Glycine max
  Clone ID: 700606081H2
cttctcttctcacccccacactcccatctcacacacccctcgcatccaacaatgtctctcaccattccctccaacctctccaagcccgccgccctccgccccaaactaagcccaaagctaaggtccgccgccacaaccaccatcgtctgcagcaccaccaacaacaacaacaacaacaacgtgtcctccgacctgaaggcgttctccgccgcgctggccctctcctccatcctcctctccgcccctctccccgccggc

SEQ ID NO: 60812 - DNA, 256 bp, Glycine max
  Clone ID: 700606082H2
ataaaatgtcttataaaaaaagaatcatatcaattccttctaaactagtcttataataaggatcagagggagtaatataattgactgattccaataacacccaactaattaacaacgtaatcagacccaatctggaaaattcaaaagagtaaggtttcactttggcaagttaaagtgacctctacttggaccaagacagcttccagctatgtattatacatcacatggatggggtaaccgactaatcaactttgtc

SEQ ID NO: 60813 - DNA, 258 bp, Glycine max
  Clone ID: 700606083H2
atggtatttttggcatgatattcccgggttgtcctagcacatttgaagagcctcaacaaaaaggacaaagcagcaggccccaagaccgtcaccagaagatctatcacttcagagagggtgatttgattgcagtgccaaccggttttgcatactggatgtacaacaatgaagacactcctgttgttgccgtttctcttattgacaccaacagcttccagaaccagctcgaccagatgcctaggagattctatcttgctg

SEQ ID NO: 60814 - DNA, 251 bp, Glycine max
  Clone ID: 700606084H2
ctcgagccgcttaattattaacacttccttagttcaatatggggaagcccttcactctctctcattcttccctttgcttgctactcttgtcgagtgcatgctttgctattagctccagcaagctcaacgagtgccaactcaacaacctcaacgcgttggaacccgaccaccgcgttgagtccgaaggtggtttgattcaaacatggaactctcaacaccctgagctgaaatgcgccggtgtcactgtttcc

SEQ ID NO: 60815 - DNA, 257 bp, Glycine max
  Clone ID: 700606085H2
gtgcatcttctttttgttgttctctcaaactttaacaatctcataaataaataatcagaacgaagaagaagaagaattgaattcgaaaaatcgtagcgtagcgttggttgcgattgaaacggtacgatgggaagaggaaaattcaagagcaagcccaccggtcgccgccagttctccaccccggaagatatgcttgctggaacctctaaccgtcctcgaacttttagacagaaagaagctgagcatgaagaggagcc

SEQ ID NO: 60816 - DNA, 255 bp, Glycine max
  Clone ID: 700606086H2
acagattgcaaagtttgttgttgggctaggagacaaggtttcccccactgacataaaggaagggatgcgtgttggggttgatagaaataaatatcagattcagattcctttgcctccaaaaattgatccaagtgtgaccatgatgactgttgaagagaagccagatgtaacatataatgatgttggcggttgtaaggagcagattgaaaagatgcgagaagttgttgaacttcccatgcttcatccagagaaatt

SEQ ID NO: 60817 - DNA, 255 bp, Glycine max
  Clone ID: 700606087H2
agttaacaaacccggtagatttgagagtttcttcctatctagcactcaagctcaacagtcctacttgcaagggttcagcaagaatattctagaggcctcatacgacaccaaattcgaggagataaacaaggttctgtttggtagagaggaggggcagcaacaaggggaggagaggctgcaagagagtgtgattgtggaaatctcaaagaaacaaattcgggaactgagcaaacatgccaaatctagttcaaggaa

SEQ ID NO: 60818 - DNA, 257 bp, Glycine max
  Clone ID: 700606088H2
atcgagccgctcgagccgatcatgtagttcaaatacccctaatggcacaggaggaaattctgtcttctagtgaaagtgatttcagaactgcaatggtgagtaaaaatagcaagcctcaagctactgcaatgcatgtgggagctatagaaattatcattgatagtttcgcaagtcctgactgcaacatagttggtgcaatgcttttggttgatacttatcataccaatcctgaaaatgcagttcgtagtatttttgtt

SEQ ID NO: 60819 - DNA, 255 bp, Glycine max
  Clone ID: 700606089H2
agctgctacaaagaaacaaaagtatgataaaatatgccagaagaaattatcaactcctattgaggtactatgcaaatctcatcctgtagagtttgcctcgtacttccattactgccactctttgacatttgatcagcgacctgattatggattcttgaagcgcctatttcgggacctatttgctcgagaaggttatgattttgattatgtatttgattggaccattttgaagtaccagcaatctcaaaagaatgt

SEQ ID NO: 60820 - DNA, 258 bp, Glycine max
  Clone ID: 700606090H2
ctcgagccgtgatattcatgatgataatcagctacagtatcttgttcagcaacgatgcttttaacttcaatagtaatctcttcagtaatcatattttccttaccagcatttaccacatgctcagataatagctttaatgcatctctttgttgcttctgttcctccaaagaaattggggtttggtctagttggttcagggaaaagaacatctgtccgttctgttttccatgaagaggatgataatgaggccaaaatgag

SEQ ID NO: 60821 - DNA, 256 bp, Glycine max
  Clone ID: 700606091H2
tatacacttccttagttcaatatggggaagcccttcactctctctctttcttccctttgcttgctactcttgtcgagtgcatgctttgctattagctccagcaagctcaacgagtgccaactcaacaacctcaacgcgttggaacccgaccaccgcgttgagtccgaaggtggtttgattcaaacatggaactctcaacaccctgagctgaaatgcgccggtgtcactgtttccaaactcaccctcaaccgcaatg

SEQ ID NO: 60822 - DNA, 256 bp, Glycine max
  Clone ID: 700606092H2
ataccttttcctcgtcccattcaagtgaaaccttgatggctgaagtggatcagtacacgggcggtgagcatgaggttgaggaaacgattgaggttgaggcggaggaagaaatgcacggtggtgaagaggcggttgttgttgcggagaagaagtggccgggttggcccggggagagtgtgtttcggatgttagttcctgcgcagaaggttgggggtatcattggacgcaaaggagagttcattaagaaaattgtcga

SEQ ID NO: 60823 - DNA, 256 bp, Glycine max
  Clone ID: 700606093H2
agaatttcgatgctcagtcatctcttttaccattctcttctctcttgctcttgcaggagagagccatgtccatgcatcgctacctgaggaagattattgggaagctgtttggccaaacactcccattcccactgcactgcgagagcttctaaagcctctcccagccaggtgttgaaatcgatgaactccctaagcaaattgatgatacacagtacccaaaaacattcttctataaagaagaccttcatccaggcaa

SEQ ID NO: 60824 - DNA, 260 bp, Glycine max
  Clone ID: 700606094H2
aaactccttcaccctcactatcgtgacaccatgaacataaatggccttgctcggttatcactggtcaacgacggtggcgttatagaacaaacatttttgtggggaaggtattctgtggaaatgtctgctgtagtttacaaggattgggtttttacagatcaagcattgcctgctgatcttataaaaagaggaatggcaattgaggatccatcgtgccctcatggcattcgccttgtgatagaggactacccttatgctgt

SEQ ID NO: 60825 - DNA, 263 bp, Glycine max
  Clone ID: 700606095H2
tagctacttagtttgagaagaatgatcttcggaagctgaagtacattcttgggatagaagttgcctactctaagtaaggtatctttaattctcaaaggaaatatgtgcttgatctccttaaatagactggtaagttgggttgtaagatgtgcttgaccatgtgtacagggcccttaaccagctaaaatactcctaaagaaagacacatcagataaatctggattctaccatattttggaggaggaaactccaatacatgaagt

SEQ ID NO: 60826 - DNA, 131 bp, Glycine max
  Clone ID: 700606096H2
gtcgagacattgatgcacatcctccattatgtgagtgcaatgatgagctcgataaatgttggtatgacccgctacataatgttgaattcagccatgtgatatatcactcattggtggtcttcatgattaat

SEQ ID NO: 60827 - DNA, 281 bp, Glycine max
  Clone ID: 700605901H2
tctatttctcagtctctgtgtttgcggctgaggattccgaacgagtgaccttcttcgtttctcgcaaagtttaagtaatcatgggtaaggaaaaggttcacatcaacattgtcgtcattggacatgtcgactctgggaagtcaactaccactggtcacttgatctacaagcttggaggtattgacaagcgtgtgattgagaggttcgagaaggaggctgccgagatgaacaagaggtcattcaagtatgcctgggtgctcgacaagctcaaagctgagcgt

SEQ ID NO: 60828 - DNA, 285 bp, Glycine max
  Clone ID: 700605902H2
agaaaaggaagaggaaaagcacgaatggcaacacaagcaggaaaagcaccaaggaaaggaaagtgaagaagaagaagaagaccaagacgaggatgaggagcaagacaaagagagccaagaaagtgaaggttctgagtctcaaagagaaccacgaagacataagaataagaacccttttcacttcaactctaaaaggttccaaactctcttcaaaaaccaatatggccacgttcgcgtcctccagaggttcaacaaacgctcccaacagcttcagaatctccgaga

SEQ ID NO: 60829 - DNA, 280 bp, Glycine max
  Clone ID: 700605903H2
attggcatttctccttctaagaatacaagtggtggttttctacaatatataccttttgtaaatatcgtctgttgttaacttgttaaactgttttgcattttgcacatgacttgtgctggatgtgtgttgtgaatataataaatctaatcacctagccgagaaaattatgggaaaactctttttctgggggaattcattagaaaatcccatatggcattcagtatgcttaaatttttttaatgatctcattgatctatacttctttagtataaaaccagga

SEQ ID NO: 60830 - DNA, 280 bp, Glycine max
  Clone ID: 700605904H2
agccccggaattcttggaacatgcgttcgtcgtggacaggcagatagtgagaaagctacaaggtgagaacgaagaggaagagaagggtgccattgtgacagtgaaaggaggtctcagcgtgataagcccacccacggaagagcagcaacaaagacccgaggaagaggagaagccagattgtgacgagaaagacaaacattgccaaagccaaagcagaaatggcattgacgagaccatttgcacaatgagacttcgccacaacattggccagacttcatca

SEQ ID NO: 60831 - DNA, 283 bp, Glycine max
  Clone ID: 700605906H2
agagcacccagagaccatgcaacaacagcagcagcagaagagtcatggtggacgcaagcaggggcaacaccagcagcaggaggaagaaggtggcagtgtgctcagtggcttcagcaaacatttcttagcacaatccttcaacaccaacgaggacacagctgagaaacttcggtctccagatgacgaaaggaagcagatcgtgacagtggagggaggcctcagcgttatcagccccaagtggcaagaacaagaagacgaagacgaagatgaagacgaagaatat

SEQ ID NO: 60832 - DNA, 279 bp, Glycine max
  Clone ID: 700605908H2
actcttcctcaccgattgctagaatggaatttcgatgctcagtcatctcttttaccattctcttctctcttgctcttgcaggagagagccatgtccatgcatcgctacctgaggaagattattgggaagctgtttggccaaacactcccattcccactgcactgcgagagcttctaaagcctctccctgcaggtgttgagatcgatgaactccctaagcaaattgatgatacacagtacccaaaaacattcttctataaagaagaccttcatccaggca

SEQ ID NO: 60833 - DNA, 277 bp, Glycine max
  Clone ID: 700605909H2
ctgaccaagccatggcgatgagaaccaaactttctttagctatctttttcttttttcttttagccttattttcaaacctagcctttggcaaatgtaaagaaaccgaggtagaagaagaagaccctgagctcgtaacatgcaaacaccaatgccaacagccacagcaatacactgagggtgacaagcgggtatgcttgcaaagatgtgacaggtatcatcgtatgaagcaagagcgagagaaacaaatccaagaggaaactcgtgagaagaaagagga

SEQ ID NO: 60834 - DNA, 246 bp, Glycine max
  Clone ID: 700605910H2
agtcgccgctttgatttcgcgagtaacacatgcagtacagtccttcctctcccaaaacgacctcgttctcctaccttcccaatccctccgtctcgaatccctaatctcatccatcatctcccactctccctcgccgcctctctctccgccgcacagcgactcctggttccgccgcttccgctccgtctccgattccctatggctccacgccttccgcatgtccaaaccctccttctcccatctcct

SEQ ID NO: 60835 - DNA, 274 bp, Glycine max
  Clone ID: 700605911H2
cggctcgagcggctcgagcggctcgagtttggatttggatttggatttggactttggtcgtcaacacagcttttggtccttcgcttcgtttacgaatcctcttcttgttgttcctgcaacgcactgcattcgatcaatccatccatcttcacttgcttggtttcgatcggagggaaatggccgatcagttatccaaaggagaggaattcgagaagaaagctgagaagaagctcagcggttggggcttgtttggctccaagtacgaagatgccgc

SEQ ID NO: 60836 - DNA, 274 bp, Glycine max
  Clone ID: 700605912H2
acgcttgctctctctctctcggtcctttcagctttgactttggtggaaactaaagactagtcaaaatggtgaagttcacagctgaagagctgcgtcgcattatggactataagcataatatccgtaatatgtctgtcattgctcatgttgatcacggaaaatcaaccctgactgattctcttgtggctgctgctggtattattgctcaagaagttgcaggtgatgtccgtatgactgatacccgtgcagatgaagctgagcgtggtattacaat

SEQ ID NO: 60837 - DNA, 276 bp, Glycine max
  unsure (1)..(276): unsure at all n locations
  Clone ID: 700605913H2
caattattaacactttccttagttcaatatggggaagcccttcttcactctctctctttcttccctttgcttgctactcttgtcgagtgcatgctttgctattacctccagcaagttcaacgagtgccaactcaacaacctcaacgcgttggaacccgaccaccgcgttgagtccgaaggtggtcttattgaaacatggaactctcaacaccctgagctgcaatgcgccggtgtcactgtttccanacgcaccctcaaccgcaacggcctccactt

SEQ ID NO: 60838 - DNA, 274 bp, Glycine max
  unsure (1)..(274): unsure at all n locations
  Clone ID: 700605914H2
cttatttgaaaaacacttgggcgttggtgcacatgtttgcttcgttaattttctctggagacaacaggctcactgagaaaacaatttttacttgcagagatttggacatcttggttgtttattatacaatagcaactcaatttagaaaatttctaccgcattacattaggtggcatctgtataccttgttgatctacattctcccatcttttctcactgctgaaattanatataagcggaatttgagtaatattcatatttccggcttatttta

SEQ ID NO: 60839 - DNA, 275 bp, Glycine max
  Clone ID: 700605915H2
ccatcatcatggccacctctgctattcagcaatcagcattcgcaggtcaaactgctctgaagcagctcaatgagttggtccgcaagaccggtggcgccggcaaaggtcgcaccaacatgcgccgtaccgtcaagagtgctcctcagagcatttggtatggccctgatcgtcccaagtacctgggtccattctcagagcagattccgtcatacctgaccggagaattccccggtgactacggatgggacactgctggactatcagctgacccggaa

SEQ ID NO: 60840 - DNA, 242 bp, Glycine max
  Clone ID: 700605916H2
cagcagtgaacctttgccgcatggcacttcgatcctcgaagcttctctctcgcccttatcatcgtctttctgttcaggtgcagatgcagatgcagccctcttctccttcactcactcgaaagatgagcatggatgcacagagtgttgcctctcagcttaatagttctggcatgttgaggactcacgggcttgtttgagggacatggagtgatgcttatgatggcaaaacataaagggttata

SEQ ID NO: 60841 - DNA, 278 bp, Glycine max
  Clone ID: 700605917H2
tgagaagactgccctgtatttgacaacttatttgaattttgtcagatttatgctggtggaactatagatgctgcacgtcgattaaacaatcaattgtgtgatattgctataaactgggccggtggactacatcatgctaagaaatgcgaggcatctggattttgttacatcaatgacttggttttaggaatcttggagcttcttaaatatcatgctcgtgttttgtatattgatatagatgtgcaccatggtgatggtgtagaagaagccttctactt

SEQ ID NO: 60842 - DNA, 277 bp, Glycine max
  Clone ID: 700605918H2
acggcgggcgagaaccccacctgctccggcagcagctacagaacttagcggcaggtgaaatgatcgaacttgcagcgtaattatttcagtccagctgaaattgaaagtaactgctttctgagattctgcaaccgcatgaaaccctagaaatgagtgccgcaggtggtgcatttggtggcaatagggggctccgtccagtgcctcccgaaaaggggatatttccattggaccacatgcatttgtgtgacctcgagaaaatagaatatctcaattgtct

SEQ ID NO: 60843 - DNA, 277 bp, Glycine max
  Clone ID: 700605919H2
cacaaagtccggtgatgccttctttggcaatttcaaagatggatggcgacatggccagtttctttgtattaatgcgaatgggacaaggtacactgaaatttgggaaaatggtgttcttgtagatggcaagtatttagacagatgaccatggtggacaaatgcggtcggtgcccaaaattttgtaattactgtgaattttagtcttttctcgatttttatttgtgttttatgttgtataatagctgtttttgccggcaagctatgttttgtagtctgt

SEQ ID NO: 60844 - DNA, 277 bp, Glycine max
  Clone ID: 700605920H2
attggaaaaagtttcctctacaaaagcacaatttgttagtggaaaaaccttcaaatatgatataattggtgctggttcacattcttcaggagattttcctgaaaaggaagatcaagaaaaacccaaaaagattgataccagattgagacaaagaatagatcctcaatacaatgaggttcaggctcagatggaaacaaatttgtttaaattgtctcttgatgatgttgaaactcctaaaggttctatgttggatcttaaaatttctcaatctaaaatt

SEQ ID NO: 60845 - DNA, 278 bp, Glycine max
  Clone ID: 700605921H2
ggaaaggttagagttgtgaactgccaagggaatgcagtgttcgacggtgagcttaggaggggacaattgctggtggtaccacagaacttcgtggtggcggagcaagccggagaacaaggattcgaatacatagtattcaagacacaccacaacgcagtcactagctacttgaaggatgtgtttagggcaattccctcagaggttcttgcccattcttacaaccttcgacagagtcaagtgtctgagcttaagtatgaaggaaattggggtcctttggt

SEQ ID NO: 60846 - DNA, 273 bp, Glycine max
  Clone ID: 700605922H2
atttgaaattttgataaaccgcgatcacaggttgccgcaccttaaaaccggaaacaaaagcaatcgttacttgatttcaagaatctttcaatttttcctacttctttgtgcacgatttcttaagggaaagaaaatcactctctgtgccggtcacagacttcgtgaatcattttcttttccactcttagtttatttgctgaacactctcctatttgatataggacttcgtgtcagatttaaacttcttctgtctctttctcagttctctgttta

SEQ ID NO: 60847 - DNA, 279 bp, Glycine max
  Clone ID: 700605923H2
tgtggtggaggaggaatacacgaagcaatatataggcaatgaaatgaggcgttttgactggccttttcggatctgatcgaatccaaaccctaatctaatcccacaagcctattagtctcattcaatcgaagaagcgagcgagactgtgtctctctcccaggccatgcgaccaccctgttcctccgccatcgccctctccagagaggattcttttttcgttttcgtcgctttctccgtcgattccaccagccatgactgctgacacccacgccgctccta

SEQ ID NO: 60848 - DNA, 276 bp, Glycine max
  Clone ID: 700605924H2
tttagattggacagatcctgatcagtcacctgagaaagaaaatgaggcctttcaacgtgcaatggctcttgctggcagtgagtttctggatagtgttcgatttcatgtcaattcatggttaccagcaaggtcaattgtaatggagaccctagaggctagacatactgttgatcctagtggagaaattctagttttgactaaattgtgtccttggaagcttcacttatttgagcttgaggagagttgaaaaatgacccttctgtcaaatatgttctg

SEQ ID NO: 60849 - DNA, 278 bp, Glycine max
  Clone ID: 700605925H2
gcaaagggttgctgagaggagcttcgttaactgcaaacgcagtttggccatagaagcagtttcttcccaaaggtaacggttagcgtccaccccaagttggtgaaatttcagagcttctcatcaaccaccgcttgctcctctcttccacccccggatttgcctcgtttggcaaaaactgctcaaatttcacttaccccaaacgaggttgaagaaattgctcccaaaattcaacaagttatagaatggtttggacagctgcagggtattgatcttgaaag

SEQ ID NO: 60850 - DNA, 273 bp, Glycine max
  Clone ID: 700605926H2
gacgttcgttcgtgtctcaaaaaaaggggtactaccactctgtagtgtatatggatgctggaaatcaatgtgttttgtatttgttcacttccttcgtcgtcccccccggagcccgtttcgaaccgccgcgttatgaagccggcgtcaaagcgccctccatttaccattccgagagaggtccaacgacttcccaggtcctcgccgtcctcgccggcctcccggtcggtggcatcctgctcctcctggcgggattgaccctggcaggaaccctca

SEQ ID NO: 60851 - DNA, 55 bp, Glycine max
  Clone ID: 700605927H2
ggaaattttgataaaccgcgattcacgggtgccggcaccttaaaacgggaaacaa

SEQ ID NO: 60852 - DNA, 270 bp, Glycine max
  Clone ID: 700605928H2
gagcgattccaagcacaagttctctgagttgttttgtgagatagcacatagcatacgcaaggaaggagtattacaaccgaaaccctgaagaaaaaaagagtagaggaagaaaaaacacctgcaccaccaacgatgggtgtggattactacaagatcttgcaggttgataggagcgccaaagacgacgacttgaagaaggcttataggaaacttgctatgaaatggcaccctgataagaaccccaacaacaagaaagaagctgaagctaag

SEQ ID NO: 60853 - DNA, 261 bp, Glycine max
  Clone ID: 700605929H2
ctttccaaggtgggcgacaactcaattgatattcctgaagcaaacgtaataattcagatctcttcacatgctggttcaaggcgacaagaagcccagcgtctgggtcgtattcttagggcaaagggaaagcttgaggataggatggcagggggcaaggaggagtataatgcatttttttattcccttgtttcaattgatacccaggagatgtattactccactaagaggcagcaatttttaattgatcagggttacagcttt

SEQ ID NO: 60854 - DNA, 272 bp, Glycine max
  Clone ID: 700605930H2
gttctagatcgcgagagaccgccctttttttttttttttgaaactaatcagataacaatagaaattacgcaacaatatttgtctcagtatgaaagaaacctactctctaatacaaccaatggaaaggaagacaacacatgctagcacattacactcaacactgtacatctataaagacaactaagttaacaatcaattagattctcacataaccgtgcaactactatttacattctcagactaacataggacaaagattacaacacaataag

SEQ ID NO: 60855 - DNA, 259 bp, Glycine max
  unsure (1)..(259): unsure at all n locations
  Clone ID: 700605931H2
tagnagaatcactcccttatccatttccacaccacaccatggcctcaaccaacgctctctcttcagcctccattctacgctctcccaaccgccagtctctgacccgaagagcgaaccataatggaagagtaaattaccggaaaccgaataaccgtttctccgtgaaagcctccgccaaagagattgcctttgaccagcattcccgctctgctatgcaggccggcattgacaagctcgccgacgctgttgggctcactct

SEQ ID NO: 60856 - DNA, 213 bp, Glycine max
  Clone ID: 700605932H2
cttattaacactttccttagttcaatatggggaagcccttcatcactctctctctttcttccctttgcttgctactcttgtcgagtgcatgctttgctattacctccagcaagttcaacgagtgccaactcaacaacctcaacgcgttggaacccgaccaccgcgttgagtccgaaggtggtcttattgaaacatggaactctcaacaccctg

SEQ ID NO: 60857 - DNA, 267 bp, Glycine max
  Clone ID: 700605933H2
tctccattggtccttaaacactcatcagtcatcaccatggccaagctagttttttccctttgttttctgcttttcagtggctgctgcttcgctttcagttccagagagcagcctcagcaaaacgagtgccagatccaaaaactcaatgccctcaaaccggataaccgtatagagtcagaaggagggctcattgagacatggaaccctaacaacaagccattccagtgtgccggtgttgccctctctcgctgcaccctcaaccgcaac

SEQ ID NO: 60858 - DNA, 275 bp, Glycine max
  Clone ID: 700605934H2
tatcactcttcaccttcctctgcgcaatttgtgcgcactccgtcgccgtcacctccgcggcatatccttccatccccggcacggaaaccggagagtgctccctccgcggcgtcggcgtcggcgacggtgttctggtccctccgcggcgagaagtgtacgaggaggggcgaatcttcgacatcacccacaggtatgtccccgagatgccggtgtgggactcgacggaggggctcgggcagcacttcctgtggctcgaaaagagcatgaagaatggc

SEQ ID NO: 60859 - DNA, 276 bp, Glycine max
  Clone ID: 700605935H2
aagctctagagaagtttgttgaggaatctagtacccctgttgttactgtctttaacaatgaaccgagcaatcaccctttcgttgtcaaattcttcaacagtcccaacgcaaaggcaatgttgttcatcaacttcactgccgaaggtgctgaagctatcaaatcaaaataccgtgaagctgctgagcaatataaacaacagggtgtcagctttttggtgggagatgttgagtctagtcaaggtgctttccagtattttggactgaaagaagagcaag

SEQ ID NO: 60860 - DNA, 275 bp, Glycine max
  Clone ID: 700605936H2
gtgacatttatggtaccattgattacatatttggaaatgcagcagtgattctacaagaatgtaacatcatatcaagaaaaccaatgcctggtcaattcacagtaatcactgcacaatctagagatagcccagatgaggacactggtatctcattccaaaattgctcaatcatagcaactcttgatctctattccaactctagcagcttcaagagctaccttgggaggccatggagggtgtattctcgcactgtttaccttgagtcctacattgat

SEQ ID NO: 60861 - DNA, 277 bp, Glycine max
  Clone ID: 700605937H2
ctagtataccttaataaataatttaagatactatgatgagagcacggttcccattactgttgctgggacttgttttcctggcttcagtttctgtctcatttggcattgcttactgggaaaaagagaaccccaaacacaacaagtgtctccagagttgcaatagcgagagagactcgtacaggaaccaagcatgccacgctcgttgcaacctccttaaggtggagaaagaagaatgtgaagaaggtgaaattccacgaccacgaccacgaccacaaca

SEQ ID NO: 60862 - DNA, 273 bp, Glycine max
  Clone ID: 700605940H2
gtttcggcgctttcctcagagagctcaaggatggaggctacctgagatgccttccggatggaaatctcttgtaagttaattgctttgcttgatcttttcattttttttccctcaatatatatatatccttctttaaaagccaaatttttgctgtgctgatatatccttctttaaagtcactttcaaaaagacactttcattgtccctctcctcaccttttccccatacatgaagaaaaatgaacggttaattcattgagcatgaaagttgaca

SEQ ID NO: 60863 - DNA, 274 bp, Glycine max
  Clone ID: 700605941H2
gttcaatatcctagtacaccgtattaaagaatttaagatatactatgatgagagcgcggttcccattactgttgctgggagttgttttcctggcatcagtttctgtctcatttggcattgcgtattgggaaaagcagaaccccagtcacaacaagtgcctccgaagttgcaatagcgagaaagactcctacaggaaccaagcatgccacgctcgttgcaacctccttaaggtggaggaagaagaagaatgcgaagaaggtcaaattccacgacc

SEQ ID NO: 60864 - DNA, 273 bp, Glycine max
  Clone ID: 700605942H2
gagctggtgaatttactgaaagatgataatgatacaattcaggaaggtgttctaaatgttttagcaaaggctggtggtactattcgtgaacaacttgcagtcacatcaagttctgtagaccttatattggagagactatgtttagaaggcagtcggaggcaggcaaagtatgctgtccatgcactggctgcaataactaaggatgatggcctcaagtctctctctgtcctatacaagaaacttgtagatatgctggaagataaaacacatctg

SEQ ID NO: 60865 - DNA, 272 bp, Glycine max
  Clone ID: 700605945H2
ggatctctccgcaagaatgcaatgttcgtgccacactacaacctgaacgcgaacagcataatatacgcattgaatggacgggcattgatacaagtggtgaattgcaacggtgagagagtgtttgatggagagctgcaagagggacgggtgctgatcgtgccacaaaactttgtggtggctgcaagatcacagagtgacaacttcgagtatgtgtcattcaagaccaatgatacacccatgatcggcactcttgcaggggcaaactcattgtt

SEQ ID NO: 60866 - DNA, 271 bp, Glycine max
  Clone ID: 700605947H2
catattcctggtcttactatgaactatgatgtgatgttcagataaaaggtttaggtagtagccaaccttaacaaatgaaaagaagttagcaattgataaaactcacaggtgcatcaacttgctctacctacccaccttattttcggccttgtcaggaacaaagggtctaaataaatagccttacataacgactctaattaactcaccctttttgtaaaaacctctctcagagtttgctcacccctactcttcttccagtctctatctcaat

SEQ ID NO: 60867 - DNA, 267 bp, Glycine max
  Clone ID: 700605948H2
gacttgagagaaagagagagctgaagtagagtccgaaccaagtctcatagctgagagtttaggatcggaattctgcctccgttcttcttcatctcacctaccaccttaacctcatattagcacaaacttggtttgcttctatgagccaaatctcgtgtttccttctgcttcataatggtcttgaagggtctatgtgagaggattgtttcttcaaaatgctcttctaaaagctcaaccgagactgtagataatacacaggtgcccgtt

SEQ ID NO: 60868 - DNA, 271 bp, Glycine max
  Clone ID: 700605949H2
ataaaattcttccaccaagttatgggtttccttgtgttgcttcttttctccctcttaggtctctcttctagttccagcatatcaactcatcgttccatattggaccttgacctaaccaagtttaccacacagaaacaggtgtcttcactgttccaactatggaagagtgagcatggacgtgtctaccataaccacgaagaagaggcaaagagacttgagattttcaagaataacttgaactatatcagggacatgaatgcaaacagaaaat

SEQ ID NO: 60869 - DNA, 272 bp, Glycine max
  Clone ID: 700605950H2
cggctcgagctcagcttcgggacttggatgtcttcctcagtgttgtggatatgaacgagggagctctttttctgccacacttcaattcaaaggccatagtggtactagtgattaatgaaggagaagcaaacattgaacttgttggcattaaagaacaacaacagaggcagcaacaggaagagcaacctttggaagtgcggaaatatagagctgaattgtctgaacaagatatatttgtaatcccagcaggttatccagttgtggtcaacgct

SEQ ID NO: 60870 - DNA, 273 bp, Glycine max
  Clone ID: 700605951H2
aggcacttggtagtcgaaggttatttatgttagattaccatgatatcttcatgccatatgtgaggcagataaatcagctgaattctgccaagacttatgcgacaaggactatcctttttttgagagaagatggaactttaaagccagtggccatcgaattaagtttgccacattctgctggggatctgtcagctgccgtcagtcaagtcgtcttacctgctaaggaaggtgttgagagcacaatttggctactagccaaagcttatgtcatcg

SEQ ID NO: 60871 - DNA, 261 bp, Glycine max
  Clone ID: 700605952H2
gaagaggaaaagatggaggtgattagaaatagaggcattcctgctgatgttcttgcaaagcgagctcatgaatttgaaaaacatgttgctcatgaaagcctcaaggatcaaattcctgctgttgacaagttgtattctactaaggttaataagtttgcaaaaattatgaaccttagacaaagtgttgttggtgatcttaaacttcttactgatgggaagttgtatgagggtaagcatattcctgtatctaatattagtgca

SEQ ID NO: 60872 - DNA, 273 bp, Glycine max
  Clone ID: 700605953H2
gaaagaaaggaaacggaataattcgatacccctctcgtctcgtaactaaccatggcagcgttccgatggaagagcttcgaggagaatgaggatcgcccagccaagcctcgtcattttggcgtcaccgagattcaaagcccccactgcactctcttctcccacaaccttcttcaggatatttttgaatctatgggagactatgtagatgggttaaagttttctggaggttctcacagcatgatgccaaaggctactatcaagcaaatcattgac

SEQ ID NO: 60873 - DNA, 268 bp, Glycine max
  Clone ID: 700605954H2
attcattcttaatctttgtgaaaaataatgttcatcgagaattttaaggttgagtgtcctaatgtgaagtacaccgagactgagattcagtccgtgtacaactacgaaaccaccgaacttgttcacgagaacaggaatggcacctatcagtggattgtcaaacccaaatctgtcaaatacgaatttaaaaccaacatccatgttcctaaattaggggtaatgcttgtgggttggggtggaaacaacggctcaaccctcaccggtggtg

SEQ ID NO: 60874 - DNA, 273 bp, Glycine max
  Clone ID: 700605956H2
caaactaccgtatccccaaaggcttctcttcccatcagaagttaatcatggaacacatgttgcagaaggacacgccagcaagtgtttccaaccctttttgttgcctaaagatttgaagggcaggccagaggaacttaaaaataagttgctggtagattttgatccatcaaagtgctttatcagagatttaaagcaagaattctcaaccacattccaagtatggcatgattatctgggaggtgatgttatcggcctaacatggggagagtcata

SEQ ID NO: 60875 - DNA, 271 bp, Glycine max
  Clone ID: 700605957H2
cgaaaggatctcgaagacccaccaacgcacgaaagccgggatctttcagaaaatggattcctattcgaagggtgcataaccgcatggataagctcacactaacccgtcaatttgggatccaattcggttccttaggaggtatcgggaaggaattttggaatgtaataatatcgattcatacagatacagaagaaagggttctctattgattcaaacgctctacctacgagatagggatagagaaagaggaaaaaaccgaggatttcacata

SEQ ID NO: 60876 - DNA, 271 bp, Glycine max
  unsure (1)..(271): unsure at all n locations
  Clone ID: 700605958H2
ggaagcagtgatggagtcactgaaggacctggaagtacgaaatccanatgcagaacaaccaacaagtagtgttagttctgtgtatgtagatgctgtagagccgtctgataaagatgcttcttcaggagagatttcgagaccggtggagacagaatcttcctcactcaaacacaccacagagtcaaaattcaaaaccacttcctcgacatcagaagaatttgagccattgaacggtgagtcaaattccatttcagtngaacattccaaaatg

SEQ ID NO: 60877 - DNA, 253 bp, Glycine max
  Clone ID: 700605959H2
ctgtgcatctcattctcttccaaaaacgccgcagtctcttctctctcagaaaccctaatggcagagcgcggaagatggcaacgtggcggccaccgtggcgggttcggacgcggcttcggcgggcgagggcgcggaggcgacaggggccgcggccggcgtagaggtccccgccgcgaggaggaggagaagtgggtctcggtgactaagctgggacgcctggtgaaggaaggaagaatccgaagcctggagcaga

SEQ ID NO: 60878 - DNA, 108 bp, Glycine max
  Clone ID: 700605960H2
agataatttgtctaaaatgtaatgtttttatagtcttggagactatttttgtttatggttaaatgcacctttacagcttaataaaccttttgctatgagttgtgtact

SEQ ID NO: 60879 - DNA, 266 bp, Glycine max
  Clone ID: 700605961H2
caaagttgaacaaaactcattttccaactacatttcttccaccaactcataaaatcctcatatctgttcccaaaagcttgtttgtgagaatggcttcgggtgaaaagaaattcccacctcaacaacaacaaacacagcctgggaaggagcatgctatgaatccagtaccccaattcactagccctgactacaagccttcaaataaacttcaaggaaagatagcattagtgactgggggtgactctgggattggacgagcggtgtgt

SEQ ID NO: 60880 - DNA, 265 bp, Glycine max
  unsure (1)..(265): unsure at all n locations
  Clone ID: 700605962H2
caaggatcaaattcctgctgttgacaagttgtattctactaaggttaataagtttgcaaaaattatgaaccttagacaaagtgttgttggtgatcttaaacttcttactgatgggaagttgtatgagggtaagcatattcctgtatctaatattagtgcaggggaaaatcatgtagttcaaatacccttaatggcacaggaggaaattctgtcttctagtgcaagtgatttcagaactgcaatggtgagtanaaatagcaaacct

SEQ ID NO: 60881 - DNA, 264 bp, Glycine max
  Clone ID: 700605963H2
atcacaggaggtcatcggagatgcactcggtgaggaatttaagaggtatgtcttcaaaattaccggaggttgtgacaaacaaggatttccaatgaagcagggagtgctgactcctggtcgtgttagacttttgcttcacaggggaactccttgcttccgtggatatggaaggcgtaatggagagcgtaggagaaagtctgttcgtgggtgcattgtcagcccagacctctctgttttgaacttggtaattgtgaagaaaggtga

SEQ ID NO: 60882 - DNA, 267 bp, Glycine max
  Clone ID: 700605964H2
atcgagccgctcgagccgcgcccacaacctcgtcaagaagaagagcacgagcagagagaggaacaggaagcgcctcgcaaggaggaaaaacgcggagaaaagggaagtgaagaggaagatgaggatgaggatgaggaacaagatgaacgtcaattcccattcccacgcccacctcatcagaaggaagagcgaaagcaagaggaagatgaggatgaggagcagcagcgagagagcgaagaaagtgaagattctgagttacgcagacat

SEQ ID NO: 60883 - DNA, 270 bp, Glycine max
  Clone ID: 700605965H2
gtaaagatctcgcaatggttaaagttaatgtagcatgtgctgctgttggcttgacatcaagttacactccaactccattgttggaatctggtctgcaaaaagacagagggttaattgtggagtattttggaaggatgtcttacgttgctcataacgttaatcagccccaagagaaagatttgttggagggaaatttttcctttgatattaaatctcgctctagattggaaaaagtttcctctacaaaagcacaatttgttagtggaaaaa

SEQ ID NO: 60884 - DNA, 269 bp, Glycine max
  Clone ID: 700605966H2
atttgaaattttgataaaccgcgatcacaggttgccgcaccttaaaaccggaaacaaaagcaatcgttacttgatttcaagaatctctcaatttcttcctacttctttgtgtacgatttcttaagggaaagaaaatcactctctgtgctggccacagacttcgtgaatcattttcttttccactcttagtttatttgctgaacactctcctatttgatataggacttcgtgtcacatttaaacttcttctgtctctttctcagttctct

SEQ ID NO: 60885 - DNA, 272 bp, Glycine max
  Clone ID: 700605967H2
caattttggttaagagtcttgaaaaagcaagagaaaaaaaaataccaaccatggcaaccatttctgatcaacctagagggtcctactcctatggaacctcatatggagcaccctatggaaccacgtatgagaccaacaccagcattaacaacccaccttcacgccaaacagtgaagttcataactgctgccactattggcatcacactcttgctcctgtctgggttgaccctcacaggcactgtcataggtttgatcattgcaacccctctt

SEQ ID NO: 60886 - DNA, 273 bp, Glycine max
  Clone ID: 700605968H2
ctcaagaattgcccccggaatcgaagtgtttcctccgaaagattttgatcagcaaacattcgatacaactggcatgccattcgcttctcaagctacaagagactatagccgaggctcatcaccggagtggttacatatgcaggttggagatggttttgaaagagcaacgtagtctttgaaatcacatcacctgacaataaatgcatataggatctttaatctctctatcagagctcccataaatcatatactcaaggtgttgttgctaagtcc

SEQ ID NO: 60887 - DNA, 272 bp, Glycine max
  Clone ID: 700605969H2
attgataaatcatatcattaaattattaaataagttttgaagttgatacttgtgtctatattgagtatgcttttggtcattgtgcgagcagaaggatttacaaaagtggtgttagtggaaaacgttgtgatggaagtagcactgctcctccttgcacagggtgggttgaaatgatggctcctgttttctcaagagctgcttggcgttgcatttggtatatgatccagaatgacttgatccatgcatggggtctagatatgcagctaggctac

SEQ ID NO: 60888 - DNA, 269 bp, Glycine max
  Clone ID: 700605971H2
cgaaacagttgaacaacttaggtctggtggtcaatttactgagtcctcagagtgtaaatatgttgtatggatttcgtttagtggcttagggaataggattttgaccctagcttctgcttttctctatgctctcctcactaaccgtgttctactggttgaccctggagcggatatggttgatctcttttgtgagccatttccagattcttcctggcttcttcctagtgactttcctcttaatgctcagtttaataatttcagtcagaatt

SEQ ID NO: 60889 - DNA, 269 bp, Glycine max
  Clone ID: 700605972H2
gaaactgagaaaccgttgtggaccagttcaaatgccttatactctgcttttgccttcgagggattcttcctcagctcctcatgcctgagaaaggttctgctgagtatgaggagctgaggaagaatccccagaaggcttacttgaagactattacaccaaagtttcagacccttattgacctttctgttatagaaatcttgtcaaggcatgcatctgatgaggtgtaccttggggagagcgctgatccaaattggacatctgatacaaga

SEQ ID NO: 60890 - DNA, 271 bp, Glycine max
  Clone ID: 700605973H2
ctttggttcagcagccattagcgatttcccttatctctctccatacttaactccaagcacaagaatcatcttcccatttcgtttctgaccaatggcttccctcactgtcccaaaccattgtgttcccactttgcttcgcactcactctctcaactacccatcttcccaaaacctcccacttccttccgcgccatcaaattctcaattttttggcctcaagctatctcattcttccttttccacaattccctcttcttcttcttcactcaaa

SEQ ID NO: 60891 - DNA, 269 bp, Glycine max
  Clone ID: 700605974H2
ggaaaacatcttcaagtggctcccaacagactgataaagatccatcttcaccttttacttctgcatcaccagttccagctgtgtccaaaactgagatccaaaagacttcaactggaagattaactggaagatctgtgggacaagtgcctatgatgtcaagaccttcaagtggtcccttagttcctggtcccaggccaactgctccggttgtctctatggttcaaacttctcccctacttgcacactcagtgagtgcaactcggttgggt

SEQ ID NO: 60892 - DNA, 273 bp, Glycine max
  Clone ID: 700605975H2
aggagataaacaaaggttcctgtttagttcacgaacgcaaggcagcagcataggggagcagaggctgcaagagagcgtgattgtggaaatctcgaaggaacagattcgggcactgagcaaacgtgccaaatctagttcaaggaaaaccatttcttctgaagataaaccttttaacttgagaagccgcgaccccatctactccaacaagcttggcaagttctttgagatcaccccagagaaaaacccccagcttcgggacttggatatcttcct

SEQ ID NO: 60893 - DNA, 269 bp, Glycine max
  Clone ID: 700605976H2
cggctcgagtggagaagaagaagggtgagctaaagtcaattttccttcctttcctttccactagtcacataatcccgctagtggacatggccagactcttcgccttgcacgacgtcgacgtcaccatcatcaccaccgcacataacgccaccgttttccaaaagtccatcgatttagatgcgagtcgcggtcgccccatcagaacgcacgttgtcaacttccccgccgcacaagtgggtctccccgttgggatcgaagccttcaacgtc

SEQ ID NO: 60894 - DNA, 104 bp, Glycine max
  Clone ID: 700605980H2
gctccaggcccacagtaattggcaaaagcattttaaatgagaggctcataggttaaagcaatgaaaaattactgcgccaggcgtaagctccaagtatgtcttta

SEQ ID NO: 60895 - DNA, 268 bp, Glycine max
  Clone ID: 700605982H2
cagaggagaacacaaacagcagcgtcttggtttgtgagagagacagaggcacagagagaaaatggtttcggggtcaggaatctgcgcgaagagggtagttgtggaggcgcggcaccacatgctggggaggctggcatcgatcgtggcgaaggaacttctgaatgggcagaaggtggtggtggtgcgctgcgaggagatttgcatctccggtgggctcgtcaggcagaagatgaagtacttgcgtttcctccgcaagcgcatgaacacc

SEQ ID NO: 60896 - DNA, 269 bp, Glycine max
  Clone ID: 700605983H2
attaataaagatgagtttgaagaacaacatggtggtgctaaaggtgtgtttgttgcttcttttccttgtgggggttacagctgcacgcatggaactgagcttcttcaaaagtgatcagtcatcaagttatgatgatgatgagtattcaaaaccatgctgtgatctctgcatgtgcacacgctcaatgcctcctcaatgcagctgtgaagatattaggctgaattcatgccactcagattgtaagagctgtatgtgcacacgctcacagc

SEQ ID NO: 60897 - DNA, 272 bp, Glycine max
  Clone ID: 700605984H2
ctcactcttcactcaaaactcttctctttcattttcataattcccacacattatggctgagcttcactaccaaccacaacaccaataccccctccgctaccctaacgatccacaccaacaaacccgttcctccacccaccaggtcgtcaaggccgccaccgccgtcacagcgggcggctccctcttgatcctcgcctcgttgatcctcgccgccaccgtcattgccctcaccatcgtcaccccgctgttcgtcattttcagtccggttctcg

SEQ ID NO: 60898 - DNA, 270 bp, Glycine max
  Clone ID: 700605986H2
cttgtaccgaaattcggataatggtgtctctaatttcaacatcaccaccttcttcatctttcaacattcatcccttcttctctccaaggggcgtccaattcagacacaactgcgtaaattaccaacggaaaacggtacggtgcgccgtcaccagcgccgacgcatctcctccgccgtcaacgtcgttggccaaggaacctcacaaatacttcgaccacgtcatcatcaccgttcgcgccggtgacggcggccacggcgcggtgctgaatc

SEQ ID NO: 60899 - DNA, 268 bp, Glycine max
  Clone ID: 700605987H2
cacaattctctttaattaattttctttcatttcatttcatcttttaagttgatctgtgaaaatggcttcatcttcctccaacggcagttccagcggaagcaagagttgggacatcgacggcgacctcgccggcttcggctataaagtccggtcatcggagctgcaacacgtggcagaaaacatggagcgtttagagaacgtgatggacattgtgaactcatcaaccaacaacaatatatctcagcttgcctccgacacaatcttctac

SEQ ID NO: 60900 - DNA, 255 bp, Glycine max
  Clone ID: 700605988H2
cttaattattaacacttccttagttccatatggggaagcccttcactctctctctttcttccctttgcttgctactcttgtcgagtgcatgctttgctattagctccagcaagctcaacgagtgccaactcaacaacctcaacgcgttggaacccgaccaccgcgttgagtccgaaggtggttgactccaacatggaactctcaacaccctgagctgaaatgcgccggtgtcactgtttccaaactcaccctcaa

SEQ ID NO: 60901 - DNA, 265 bp, Glycine max
  Clone ID: 700605989H2
tcttttaacacttcgggaagtgctctatggaggagctggtgcaaagaatgctattctcatgaatatgccaaatgctgttctttcaatgtggagatattttgttggagatctcgtctttgaagtttctaagatgacttctccctacattaaatgtacagtctctttcttcatagcatttggaaatttggctgatgacaccatcaattttgaggcttttccccacaagctggtgcaatttggagagattcaggaaaaagttgtattg

SEQ ID NO: 60902 - DNA, 266 bp, Glycine max
  Clone ID: 700605990H2
aaaattcattggacagtgttattttcagtatcagcatcatggctccaattgcagtgggagatgtcattccagacggcattttggcttacttggatgaagaaaacaaaccccaaactgtctctattcactctctcgccgccggcaagaaagtcatcatctttggggttcccggtgccttcactcctacatgcagcttgaagcacgtgcctggcttcattgagagagcagaagagctgaaaggaaagggtgtggacgaaataatctgt

SEQ ID NO: 60903 - DNA, 267 bp, Glycine max
  Clone ID: 700605992H2
ggccagcgtaaaaaaaagaatgaaagaataatttagtatttggcacaataataaaaaaggtaaaaaataatgaaagtgaagaaaaaaacaggcagggcagcagtataaataatagaagtttgatgatttatatgcagaaccaacaactacacttgttttctatatattcttgcatgatcatgaattcttcctccatttatattcttgtctttgtccagctttggttgttgagcttaccatgcagagagagtgtgtgcatcccaagtg

SEQ ID NO: 60904 - DNA, 266 bp, Glycine max
  Clone ID: 700605993H2
cggctcgagatcataaaattcttccaccaagttatgggtttccttgtgttgcttcttttctccctcttaggtctctcttctagttccagcatatcaactcatcgttccatattggaccttgacctaaccaagtttaccacacagaaacaggtgtcttcactgttccaactatggaagagtgagcatggacgtgtctaccataaccacgaagaagaggcaaagagacttgagattttcaagaataacttgaactatatcagggacat

SEQ ID NO: 60905 - DNA, 265 bp, Glycine max
  Clone ID: 700605994H2
attagaaggaaatattgaatgataagaaaaaacgagaagtaattatgatctgtttgttctgaacaaaaaaaaaaaaaagatcatacatagtagtgttggtgggttgcaaagatgcttgggggtcttctccataggggtcataagataaaagggacagtggtgttgatgcgcaagaatgtgttggacgtgaatagcgtaaccagcgttgggggaattattggtcaaggtctcgacttagttggctcaacactcgatactcttactg

SEQ ID NO: 60906 - DNA, 259 bp, Glycine max
  Clone ID: 700605995H2
aatggtttgattgtgttgatgaggaggattcctttgaggaagtttctttaagtgcagcacttaatggtgttgagggtttggactatatggaaagaattcctcttgccacatctgagggttttcctcatgtgctttcacgcaaaaatggcgaaaaaggcaaaaggagatttgtctctggggatggtgaagagatgacattgattccaggaaccagtgttgaagaggcttacaacaagctaatagttgaacttgagaaaag

SEQ ID NO: 60907 - DNA, 260 bp, Glycine max
  Clone ID: 700605996H2
gttgagatgtgtcctctctcttcatcccttctcttctttaccagaagattattccacctaaaaccgcacctcgccacactgctgcaccctcaccctccattattctttcttcttctctctcttttgtgttttggggaaaagagaagaagtgaggaaccgaagaaagaagaaaagaaaaagaaacaaaaatggctgaatcaaaattattggaccgtggaagttggaagaaacgcgattatctgatcaagcttctcctaatc

SEQ ID NO: 60908 - DNA, 272 bp, Glycine max
  Clone ID: 700606001H2
ctccaagcacacacaaccgctttagatggaactttgagcttccataattccgtgaactcttccccctgggcctccgctggtacgtgctgtctaagcacactgtatgtgctcttaactgagtactgcccagttgggtcagcctcccacacccactagtcgccaatgagaggttgaattctgaacccctccacttcttgaataaatgaaactaccagctttatctcactgtcgaacagtggtctttgccatttgaaatctcatacccatcctgt

SEQ ID NO: 60909 - DNA, 282 bp, Glycine max
  Clone ID: 700606002H2
attcggctcgaggagtcagtcacatcgataaaaaaaaagtacgggaaagaaagggtgtgtcaaaattttgagagccactcccagttttgcaccctcccacaaaatcaaaatcttcgttccgtgttttagcaatcggtagagagcgagacacggtttctgcattattgctttcagagggactcattgcagtcattgattgtaagcaatggagaaaacgcccaaacaaggttccaatgcatcactttttccttctactggaattggatcgaggttctccaattt

SEQ ID NO: 60910 - DNA, 272 bp, Glycine max
  Clone ID: 700606003H2
agccgccgcgatgatgtgcttagtggtttaaataggattgccgtgccgctcgttacgaggagtacacttgaagttgttataccagagtatgcagtaccaaagcttatagctaaatccaaaagcaaacttgctcaaataagtgagttgtcaggagccaatgtaacccttgtagaggatagaccagatgtgacacagaagattattcagatatctggtactccagagcaagcagagagagcccagagcttgctccaaggatttattttgagcac

SEQ ID NO: 60911 - DNA, 272 bp, Glycine max
  Clone ID: 700606004H2
attgacaccaacagcttggagaaccagctcgaccagatgcctaggagattctatcttgctgggaaccaagagcaagagtttctaaaatatcagcaagagcaaggaggtcatcaaagccagaaaggaaagcatcagcaagaagaagaaaacgaaggaggcagcatattgagtggcttcaccctggaattcttggaacatgcattcagcgtggacaagcagatagcgaaaaacctacaaggagagaacgaaagggaagacaagggagccattgt

SEQ ID NO: 60912 - DNA, 269 bp, Glycine max
  Clone ID: 700606006H2
atcaattttggttaagagtcttgaaaaagcaagagaaaaaaaaataccaaccatggcaaccatttctgatcaacctagagggtcctactcctatggaacctcatatggagcaccctatggaaccacgtatgagaccaacaccagcattaacaacccaccttcacgccaaacagtgaagttcataactgctgccactattggcatcacactcttgctcctgtctgggttgaccctcacaggcactgtcataggtttgatcattgcaaccc

SEQ ID NO: 60913 - DNA, 267 bp, Glycine max
  Clone ID: 700606007H2
cttgtgttgcttcttttctccctcttaggtctctcttctagttccagcatatcaactcatcgttccatattggaccttgacctaaccaagtttaccacacagaaacaggtgtcttcactgttccaactatggaagagtgagcatggacgtgtctaccataaccacgaagaagaggcaaagagacttgagattttcaagaataacttgaactatatcagggacatgaatgcaaacagaaaatcaccccattctcatcgtttaggattg

SEQ ID NO: 60914 - DNA, 271 bp, Glycine max
  Clone ID: 700606008H2
agtgattgtgtctctttctccccagtcaagggcttctattgctgttcattttggcatttctccaattcaggctttcaaaaagctgacaagattttttaaatccttgggagtgaaggcagtttttgatacaagttgtagtagagatttgacccttgtcgaatcttgtgtggagttcatcacaaggtatagacagaatcagttggttgatgatgagaggagtaaatcaagccgacctatgattgcatcagcttgcacaggttggatatactat

SEQ ID NO: 60915 - DNA, 276 bp, Glycine max
  Clone ID: 700606009H2
tatcgagccgaatcggctcgagcggctcgagaggaaagacactgagacatgcaatgaaatttccacaattctcaattgtttcttacattcttgtagttgttgttcttcgcgataactccctttcgcggttcagggcagcaaacggattggaacagcgaagagactcaacatggaaatggggttcgccgcagagttcttctgagtttcaaagagaagccctcaggaagtaacgttacctttgaatgtactccttcgggtccttgtgtgccctgtctc

SEQ ID NO: 60916 - DNA, 270 bp, Glycine max
  Clone ID: 700606010H2
atcctcctcatctctcttctcttctgcatcgcccacacttgcagcgcctccaaatggcagcaccagcaagatagctgccgcaagcagctccagggggtgaacctcacgccctgcgagaagcacatcatggagaagatccaaggccgcggcgatgacgatgatgatgatgacgacgacaatcacattctcaggaccatgcggggaagaatcaactacataaggaggaacgaaggaaaagacgaagacgaagaagaagaaggacacatgcag

SEQ ID NO: 60917 - DNA, 269 bp, Glycine max
  Clone ID: 700606011H2
aaagggtaccttgccgataaggcaagggatgtaaaggagagggcaaaggattatggaagttatgctcaaggtagaattaatgaggccacacaaggagcttattagtcatgcctgcttatatatgcatgagtgtatgaggttgaattgaaggtggtgatggtggtggtacccttgtggatttgcatgttcaagttctgcagtttattttgaatcttgtttgcattgttctatgtagttctggtttttgtaatctcgtttgtttttgaagc

SEQ ID NO: 60918 - DNA, 271 bp, Glycine max
  Clone ID: 700606013H2
tatagtagtgttggtgggttgcaaagatgcttgggggtcttctccataggggtcataagataaaagggacagtggtgttgatgcgcaagaatgtgttggacgtgaatagcgtaaccagcgttgggggaattattggtcaaggtctcgacttagttggctcaacactcgatactcttactgccttcttgggccgatccgtgtctctccagcttattagtgctaccaaagctgatgccaacggaaaagggaaacttggaaaggctaccttttt

SEQ ID NO: 60919 - DNA, 236 bp, Glycine max
  Clone ID: 700606014H2
gatagatagagtgatacacatcacattttctcaaagtaatttattaattaataaataaatggcggcggcggcggcagtgacggtgctactcccacctaggattccgaccgccaccaacgttacccgctgctctgctttgccttctctgcctcctcgcggcaccaacactaaaaccactttgctcttatcttccctcaaccacttctcagtgtcccgaaaatcttctctgcttcaga

SEQ ID NO: 60920 - DNA, 277 bp, Glycine max
  Clone ID: 700606015H2
attcttcatcatagtcttaaacattaaaccttagcaaaactcaacaatgctagacatcaaaggctacctcgtactcttcttcctatggttcatatcaaccattctgatacgttccatcttcaagaaaccacagcgtctaagactcccaccgggtcctccaatttcaatacccttgctgggacacgcgccatatctccgttcactgctccaccaagcattgtacaagctatcactgcgctatggacccttgatccacgtcatgatcggttcgaagcac

SEQ ID NO: 60921 - DNA, 278 bp, Glycine max
  Clone ID: 700606016H2
aggtatgaaactgatgaatgaaattgaggctgatcagtcaggaacaatagctgaggtattagctgaggatgggaaaccagtcagtgtagacatgcctctttttgtaatagttccatgagtaccggaagggaccttacttcaaagttgatatgaaatctccctagcttgttggatagcagcatggtatttgatgtcagattttctgttcagaaatttcttgagtgataatgtttgtctcattttaagaaatccttgtcttctttagccccacccctcct

SEQ ID NO: 60922 - DNA, 264 bp, Glycine max
  Clone ID: 700606017H2
atggaatcctgcttgcacaaaagcaatgactatgtcatttaatccaaacccgtgttctgatgcatggagtttggaatttctgaagcgtaccggaattcattgtgatatcatttgtgtcactggatggactgccaccccaatgcaggatgttcaggttacaattgattggtttatttcctctcaggaatgtgttcccaggacctattgtgttttaaatccacaaaatccttttgtgttaaataggtggatgggaaaactgacttt

SEQ ID NO: 60923 - DNA, 265 bp, Glycine max
  Clone ID: 700606018H2
ggtttgaaaagaagccggtgctgtctccttgttctccatcgtaagatataactaattatttttatatcttcatcaagatgcgccgagggagaaccgccgccgccgctgccgccgttgtggatcccacgccggaccaggccaaggagacgacgcggttccgtggcgtgaggaagcggccgtgggggcgattcgcggcggagattcgagatccgtggaagaagcagcgcgtttggctggggaccttcgattccgccgaggatgccgc

SEQ ID NO: 60924 - DNA, 267 bp, Glycine max
  Clone ID: 700606019H2
ctcgttctctttcaccactgttccatagagcaactcaaaaccacacacacaaaaaaacatgaatccccgttttgcccctctctctttctcaatcccttctcttcgaaaaacaccttctctcattggtgctaaccacacctccgctcgcttctgctcccgataaataataccacacaaaaaaaaatcccaactttttttttcttcttcttcttttatttcaattcaattcatttttttttgtgattttttctggttattgttattaat

SEQ ID NO: 60925 - DNA, 240 bp, Glycine max
  unsure (1)..(240): unsure at all n locations
  Clone ID: 700697923H1
tcgcatgcacgcgtacgtaagctcggaattccgagcttgggatcctctagagcggccgccgactagtgagctcgtcgacccgggaattaattccggaccggtacctgcaggcgtaccagctttccctatagtgagtcgtattagagcttggcgtaatcatggtcatagctgtttcctgtgtgaaattgttatccgctcacaattccacacaacatacnggggtnaccccnannnnnnnnn

SEQ ID NO: 60926 - DNA, 273 bp, Glycine max
  unsure (1)..(273): unsure at all n locations
  Clone ID: 700697975H1
gtcgcangcacgcgtacgtaagctcgngaattcggctcgagtgtaattgtttgacagtttcatcaaaaaaaaaaaaaaagggcggcngccgactagtgagctcgtcnacccggganttaattccggacgggtaccngcaggcgtaccagcttncccnanagngagtcgnattanagctnggngnaatcanggncanagcngttnccngngtgaaatngtnatcngctcanaattccacacaacatagnnnnngcctgcngcnnngntgnnggc

SEQ ID NO: 60927 - DNA, 295 bp, Glycine max
  unsure (1)..(295): unsure at all n locations
  Clone ID: 700697993H1
gtcgcatgcacgcgtacgtaagctcggaattcggctcgagcnnttnttcgngnacaactactgacnangnnaactccaanngnaactatgcannctntcnaccncnngganngcnagcatcnacggccgactngcttactggctcnagcnnaatncanctgttttaatggngtgacgctcgccnannntatngtgacaattcgtgagccccngatcgtctnngagttncgatggcctgacgncgactnntgantgatngctgnatggtcattctgngtgcatngacccgnntgcg

SEQ ID NO: 60928 - DNA, 218 bp, Glycine max
  unsure (1)..(218): unsure at all n locations
  Clone ID: 700757170H1
gtcgcangcacgcgtacgtaagctcggaattccgagcttggntcctctagagcggccgccgactagtgagctcgtcancccgggaattaattccggaccggtacctgcaggcgtaccagctttccctatagtgagtcgtattagagcttggcgtaatcatggtcatantgtttcctgtgtgaaattgttatccgctcacaattccacacaacatacgn

SEQ ID NO: 60929 - DNA, 180 bp, Glycine max
  unsure (1)..(180): unsure at all n locations
  Clone ID: 700757724H1
cangcacgcgtacgtaagctcgggccgactagtganntcgtcgacccgggaattaattccggaccggtacctgcaggcgtaccagctttccctatagtgagtcgtattagagcttggcgtaatcatggtcatagctgtttcctgtgtgaaattgttatccgctcacaattccacacaaca

SEQ ID NO: 60930 - DNA, 293 bp, Glycine max
  unsure (1)..(293): unsure at all n locations
  Clone ID: 700757784H1
gagtngnatgnangngtangtaagntnggaattaattaangnnntnaannnnatnantagtaggaggaagaagantagngagnnngtngannngggaattannttnnggannggtanntgnaggngtaanagntttnnntatagtgagtanangntagagttggngtnatnatggtnatagntgtttntgtgnaaaatgttatnggntnanattnnananaanaanganntngaannnnnnnnnnnnnnnnnnnnnnnnnnnnnnnnnnnnnnnnnnnnnnnnnnnnnannnn

SEQ ID NO: 60931 - DNA, 139 bp, Glycine max
  unsure (1)..(139): unsure at all n locations
  Clone ID: 700757953H1
cacgtcgcangcnngcntacgtaagctcgaaantcagctcgagcctccttntnactnctgcngcaggagnaacgggngcaatnngctgttcagntaggcananntagcaggnantacagtgcgttgnaacttgtggagg

SEQ ID NO: 60932 - DNA, 160 bp, Glycine max
  unsure (1)..(160): unsure at all n locations
  Clone ID: 700758058H1
angcacgcgtacgtaagctcgggccgactagtganntcgtcgacccggganttanttccggaccggtacctgcaggcgtaccagctttccctatagtgagtcgtattagagcttggcgtaatcatggtcatagctgtttcctgtgtgaaattgttatccg

SEQ ID NO: 60933 - DNA, 67 bp, Glycine max
  unsure (1)..(67): unsure at all n locations
  Clone ID: 700758091H1
angcacgcgtacgtaagctcgganttcggctcgagaaaaaaaaaaannaaaaaaaaaaaaaaaanac

SEQ ID NO: 60934 - DNA, 143 bp, Glycine max
  unsure (1)..(143): unsure at all n locations
  Clone ID: 700758151H1
actanttgcangcncgangtgacgtgaagctcggnaattcgtgctcncanngttcaanatccgagtataccttagatagnatgangtttgaagnntgantatggatggangaggcanggntccccantgantggntggtgngg

SEQ ID NO: 60935 - DNA, 81 bp, Glycine max
  unsure (1)..(81): unsure at all n locations
  Clone ID: 700758205H1
tcgcncnnacgcgtacgtaagctcgggaattcggctcgagactagttctagatcgcgagcngccgcccttttttttttttn

SEQ ID NO: 60936 - DNA, 291 bp, Glycine max
  unsure (1)..(291): unsure at all n locations
  Clone ID: 700758317H1
gtngtngngtnnganttcggctcaacatanantgggctcccaagggtttnanctttctgggntgtgttnntatgcgtttcagcactgtcactggagtccttctgttgcagtgggaaggcaaantnatggcnttgttntgaacttctacaangatcatgaccctcaanctnaaganatcatcacanaacaagtcaancttctctacaancaccacaagaacactnctttctcctngctcagnaacatcttccatgactgtnntgttcanattgtgatgcttnactgttgcta

SEQ ID NO: 60937 - DNA, 80 bp, Glycine max
  unsure (1)..(80): unsure at all n locations
  Clone ID: 700758845H1
nnnngcatgcncgcgtacgtaagctcggaattcggctcgagnnaaannaaaaaaanaanaaaaaaaaaaataaaaaaaan

SEQ ID NO: 60938 - DNA, 198 bp, Glycine max
  unsure (1)..(198): unsure at all n locations
  Clone ID: 700759082H1
ngtatatgnncgcatgcacgcgtacgtaagctcgggccgactagtganctcgtcgacccgggaattaattccggaccggtacctgcaagcgtaccagctttcccnaaaagtgagtcgtattagagcttggcgtaatcatggtcaatagcngtttcctgtgtgaaantngttantccgctcanaaattcccacacaaca

SEQ ID NO: 60939 - DNA, 203 bp, Glycine max
  unsure (1)..(203): unsure at all n locations
  Clone ID: 700759103H1
gcacgcgtacgtaagctcggaattccgagcttggnatcctctagagcggccgccgactagtgagctcgttcgacccgggaattaattccggaccggtacctgcaggcgtaccagctttccctatagtgagtcgtnttacagcttggcgtaatcatggtcatagctgtttcctgtgtgaaattgttatccgctcacaattccac

SEQ ID NO: 60940 - DNA, 114 bp, Glycine max
  unsure (1)..(114): unsure at all n locations
  Clone ID: 700759346H1
ncctancgcangcacgcgtacgtnagctcggcaattcggctcgagcttttaattgtncgtaatgatgtgtgaagtgtgtgttattttaacaaaaaaaaaaaaaaaaaaaaaaaa

SEQ ID NO: 60941 - DNA, 110 bp, Glycine max
  unsure (1)..(110): unsure at all n locations
  Clone ID: 700759368H1
anacgtcgcangcacgcgtacgtnnagctcggaattcggctcgagnnttttaattgtncgtaatgatgtgtgaagtgtgtgttcattttaaanaaaaaaaaaaaaaaaaa

SEQ ID NO: 60942 - DNA, 314 bp, Glycine max
  unsure (1)..(314): unsure at all n locations
  Clone ID: 700759381H1
gnntaccctnngacgtcgcangcacgcgtacgtaagctcggattgcgcccagcgcncatctgatcgttggcaaccagcatcgcagtgggaacgatgccctcattcagcatttgcatggtttgttgaaaaccggacatggcactccagtcgccttcccgttccgctatcggctgaatttgattgcgagtgagatatttatgccagccagccagacgcagacgcgccgagacagaacttaatgggcccgctaacagcgcgatttgctggtgacccaatgcgaccagatgctccacgcccagtcgcgtaccgtcttc

SEQ ID NO: 60943 - DNA, 166 bp, Glycine max
  unsure (1)..(166): unsure at all n locations
  Clone ID: 700759455H1
anntcgcatgcacgcgtacgtaagctcggaattccgagcttggnatcctctagagcggccgccgactagtgagctcgtcgaaccgggaattaattccggaccggtacctgcaggcgtaccagctttccctatagtgagtcgtatttagagcttggcgtaatcatgg

SEQ ID NO: 60944 - DNA, 235 bp, Glycine max
  Clone ID: 700759680H1
accgacaccttagtgctcttcacccaatttataagcttctaactcctcactaccgtgacaccatgaacatcaacgcacttgctaggcaatctctcattaatgctgatggcataatagagaaatcttttttgccctcaaagcattccgttgagatgtcttcagcggtttataagaattgggttttcactgatcaagcactacctgcagatcttatcaagagaggagtggcaattaa

SEQ ID NO: 60945 - DNA, 216 bp, Glycine max
  unsure (1)..(216): unsure at all n locations
  Clone ID: 700759722H1
catgcacgcgtacgtnnagctcggaattccgagcttggntcctctanagcggccgccgactagtgagctcgtcgacccgggaattaattccggaccggtacctgcaggcgtaccagctttccctatagtgagtcgtattagagcttggcgtaatcatggtcatagctgtttcctgtgtgaaattgttatccgctcacaattccacacaacatacgn

SEQ ID NO: 60946 - DNA, 460 bp, Glycine max
  unsure (1)..(460): unsure at all n locations
  Clone ID: 700759733H1
gggctggttncttgcnaagntngnnnnncnggccggntnngncngganagggncagnanncncagannanaannncaancnggggccntnccngnanaanncggnanannaanaattnccanatnaatncaanagnnnntnnnancttcgannnnnanatnncaaaaatngncaaaaaaaaaanngcgcacannaaagncangaaanacgncaagananactaanncaggtagnnnnnngngttgcgnnngtannccaanagacntaaacnncnnacgngngnncccgngaaagnnccaganannnntgnngaatncaanacgnaanccaaagccaancngannnncgcnggtnnngganccncnncnnnnncanangagctnncgnncngtgncgnnngnnnnagannaaaanaanncangannaantntnaaagaacncnaannngangagancaaag

SEQ ID NO: 60947 - DNA, 289 bp, Glycine max
  unsure (1)..(289): unsure at all n locations
  Clone ID: 700759736H1
attnggccnannngannggagggtatgnanntcgantcgacaggggcngccntggcngnnntgnatgtnatcnnntgaggccngcgannccatgncntgcatngnctggcatgnggncgnaccntncactgagcgccaanccnagnngctgcncacggncgcaccagggnaccnnatnnagtganaangtgggnacacggggaccnngagncctnagcanagcnaagangannaagncngtnatgnacactnacgggagnnntantccgcatggncgngtganttcncc

SEQ ID NO: 60948 - DNA, 250 bp, Glycine max
  unsure (1)..(250): unsure at all n locations
  Clone ID: 700759739H1
gannctcagnccnanccgtaacnnnnagcnncgtgaatcccggctcgnggcgangncgnnagncnagtncaccggnntcaataantagagnnnctatnttgntancacgntccncannacngngcnnggncgcntagccnngngcagtnacgtgnnnnggggcngcgagcananngagncncanaananagnnnccgaggnnangtngngctcnccngggctgaccgntnggtgcagagtgcaaactang

SEQ ID NO: 60949 - DNA, 267 bp, Glycine max
  unsure (1)..(267): unsure at all n locations
  Clone ID: 700759753H1
gnnggcnangagtacgcngagcacggaatnngnnangagancagannnnggngtgtaanannaanggagggncanangangnagnannngtnnncccngnagcanacgaggngngnnagcnggcaaatnngtnntngcanntngncnagngngngnngagagancgnncngangngnnggaggnangaggnagggnngnccgngngngangtnanngcggnngaggcncannngggnnnntgnnancgaggcacncanannnnanan

SEQ ID NO: 60950 - DNA, 215 bp, Glycine max
  unsure (1)..(215): unsure at all n locations
  Clone ID: 700759762H1
angcacgcgtacgtaagctcggaattccgagcttgggatcctctagagcggccgccgactagtgagctcgtcgncccgggaattaattccggaccggtacctgcaggcgtaccagctttccctatagtgagtcgtattagagcttggcgtaatcatggtntagctgtttcctgtgtgaaattgttatccgctcacaattccacacaacatacggc

SEQ ID NO: 60951 - DNA, 215 bp, Glycine max
  unsure (1)..(215): unsure at all n locations
  Clone ID: 700759763H1
tncacgcgtacgtaagctcggaattccgagcttgggatcctctagagcggccgccgactagtgagctcgtcaccccgggaattaattccggaccggtacctgcaggcgtaccagcttnccctatagtgagtcgtattagagcttggcgtaatcatggtcatagctgtttcctgtgtgaaattgttatccgctcacaattccacacaacatacgan

SEQ ID NO: 60952 - DNA, 203 bp, Glycine max
  unsure (1)..(203): unsure at all n locations
  Clone ID: 700759830H1
ncatgcacgcgtacgtnaagctcggaattccgagcttggcatcctctagagcggccgccgactagtgagctcgtcgacccgggaattaattccggaccggtacctgcaggcgtaccagctttccctatagtgagtcgtattagagcttggcgtaatcatggtcatagccgtttcctgtgtgaaattgttatccgctcacaatt

SEQ ID NO: 60953 - DNA, 202 bp, Glycine max
  unsure (1)..(202): unsure at all n locations
  Clone ID: 700759831H1
atgcacgcgtacgtaagctcggaattccgagcttgggatcctctagagcggccgccgactagtgagctcgttcgacccgggaattaattccggaccggtaccngcaggcgtaccagctttccctatagtgagtcgtattagagcttggcgtaatcatggtcatagctgtttccngtgtgaaattgttatccgctcacaatcn

SEQ ID NO: 60954 - DNA, 164 bp, Glycine max
  unsure (1)..(164): unsure at all n locations
  Clone ID: 700759832H1
gtcgcatggcaaaggnnnnagcttcggggantttngggtctcggnagcaagaagaannaaaacccccccaggctttgcgnggctnctnatnatttttgncgncncgttntncnnancgngtnggcnngctnncgctcgttnngctgcgctgcnntcgttncgtn

SEQ ID NO: 60955 - DNA, 202 bp, Glycine max
  unsure (1)..(202): unsure at all n locations
  Clone ID: 700759930H1
catgcacgcgtacgtnagctcggaattccgagcttgggatcctctagagcggccgccgactantgagctcgtcgacccgggaattaattccggaccggtacctgcaggcgtaccagctttccctatagtgagtcgtattagagcttggcgtaatcatgntcatagctgtttcctgtgtgaaattgttatccgctcacaattc

SEQ ID NO: 60956 - DNA, 201 bp, Glycine max
  unsure (1)..(201): unsure at all n locations
  Clone ID: 700759938H1
tcgcatgcacgcgtacgtaagctcggaattccgagcttgggatcctctagagcggccgccgactagtgagctcgtcgaacccgggaattaattccggaccggtacctgcaggcgtaccagctttccctatagtgagtcgtattagagcttggcgtaatcatggtcatanctgtttcctgtgtgaaattgttatccgctcac

SEQ ID NO: 60957 - DNA, 202 bp, Glycine max
  unsure (1)..(202): unsure at all n locations
  Clone ID: 700760030H1
catgcacgcgtacgtaagctcggaattccgagcttggcatcctctagagcggccgccgactagtgagctcgtngacccgggaattaattccggaccggtacctgcaggcgtaccagctttccctatagtgagtcgtattagagcttggcgtaatcatggtcatagctgtttcctgtgtgaaattgttatccgctcacaattc

SEQ ID NO: 60958 - DNA, 90 bp, Glycine max
  unsure (1)..(90): unsure at all n locations
  Clone ID: 700760114H1
acgngcannaagcgtacgtaagctcggaattcggctcgagactagttctagatcgcgagcnaccgccctttttnttttttttttnnnttn

SEQ ID NO: 60959 - DNA, 164 bp, Glycine max
  unsure (1)..(164): unsure at all n locations
  Clone ID: 700760256H1
gtcgcangcacgcgtacgtaagctcggaattccggaccggnacctgcaggcgtaccagctttccctatagtgagtcgtattagagcttggcgtaatcatggtcatagctgtttcctgtgtgaaatngttatccgctcacaattccacacaacatacgacttnnc

SEQ ID NO: 60960 - DNA, 179 bp, Glycine max
  Clone ID: 700760315H1
ctgcgtacgtaagctcggaattccgagcttggcatcctctagagcggccgccgactagtgagctcgtcgacacgggaattaattccggaccggtacctgcaggcgtaccagctttccctatagtgagtcgtattagagcttggcgtaatcatggtcatagctgtttcctgtgtgaaatt

SEQ ID NO: 60961 - DNA, 63 bp, Glycine max
  unsure (1)..(63): unsure at all n locations
  Clone ID: 700760465H1
ngnnnagnagnacgncgcacgcacgcgtacgtaagctcggaattcggctcgagaaaaaaaaaa

SEQ ID NO: 60962 - DNA, 65 bp, Glycine max
  unsure (1)..(65): unsure at all n locations
  Clone ID: 700760508H1
acgnanagtacgtaagctcggaattcggctcgagatcgcgagcggccgccctttttttttttttt

SEQ ID NO: 60963 - DNA, 53 bp, Glycine max
  unsure (1)..(53): unsure at all n locations
  Clone ID: 700760713H1
ngcngnacgcgtacgtaagctcggaattcggctcgaggttattttaaaaaaaa

SEQ ID NO: 60964 - DNA, 215 bp, Glycine max
  Clone ID: 700760748H1
aatgcacgcgtacgtaagctcggaattccgagcttgggatcctctagagcggccgccgactagtgagctcgtcgacacgggaattaattccggaccggtacctgcaggcgtaccagctttccctatagtgagtcgtattagagcttggcgtaatcatggtcatagctgtttcctgtgtgaaattgttatccgctcacaattccacacaacatact

SEQ ID NO: 60965 - DNA, 88 bp, Glycine max
  unsure (1)..(88): unsure at all n locations
  Clone ID: 700760822H1
aatntaangcacgngtacgtaagctcgggaattcggctcgagnttcgggacnttcgggtcccccagacatttccganacntactctnn

SEQ ID NO: 60966 - DNA, 67 bp, Glycine max
  unsure (1)..(67): unsure at all n locations
  Clone ID: 700760860H1
ngtcgcangcacgcgtacgtaagctcggaattcggctcgagtttttttttttttttttttttttttt

SEQ ID NO: 60967 - DNA, 329 bp, Glycine max
  unsure (1)..(329): unsure at all n locations
  Clone ID: 700760953H1
cgtctgagcgtacgtagctcggaattcggctcgagagangccgcgacnccntntatnccnncaagcntagcangttntcncgagattaacgcngcagngnnnaaancctacagnctnacgggnnctctgngatngttctttcgctacacgtcgcttgtcggggatgacggtaaancgcaagtgcgnangngctacctatgnnncncacttgcactctanccaanctnngtccaaattttgcacacaaagcgggcacaactnaagctnggggttnatcnccatgttnggnaatcttaannanttgggaccaaagggggnaaggaaancna

SEQ ID NO: 60968 - DNA, 187 bp, Glycine max
  unsure (1)..(187): unsure at all n locations
  Clone ID: 700761133H1
acgtcgcangcacgcgtacgtaagctcgggccgactagtgagntcgtcgacccgggaattaattccggaccggtacctgcaggcgtaccagctttccctatagtgagtcgtattagagcttggcgtaatcatggtcatagctgtttcctgtgtgaaattnttatccgctcacaattccacacaacat

SEQ ID NO: 60969 - DNA, 224 bp, Glycine max
  unsure (1)..(224): unsure at all n locations
  Clone ID: 700761375H1
agttgcngcacgcgaacgnangcgcgggttnggcacgagcagcaggagannggggancnnnaagcccnnnnnagacngagaggagnngcnacgnagcgnancgagnagagggnanacggnaggangcncagngnganacgggcannagacgnanngacgnnggngacgggggncngngggngcngnggtgganagnagngggnggaacggcaggaggcggggag

SEQ ID NO: 60970 - DNA, 216 bp, Glycine max
  unsure (1)..(216): unsure at all n locations
  Clone ID: 700761406H1
gtcgcatgcacgcgtacgtnagctcggaattccgagcttggatcctctagagcggccgccgactagtgagctcgtcgaancgggaattaattccggaccggtacctgcaggcgtaccagctttccctatagtgagtcgtattagagcttggcgtaatcatggtcatagctgtttcctgtgtgaaattgttatccgctcacaattccacacaacata

SEQ ID NO: 60971 - DNA, 228 bp, Glycine max
  unsure (1)..(228): unsure at all n locations
  Clone ID: 700761746H1
nnnnnacgacgcatgcacgcgtacgtaagctcggaattccgagcttgggatcctctagagcggccgcngnctagtgagctcgtcgacccgggaattaattccggaccggtacctgcaggcgtaccagctttccctatagtgagtcgtattagagcttggcgtaatcatggtcatagctgtttcctgtgtgaaattgttatccgctcacaattccacacaacatacgan

SEQ ID NO: 60972 - DNA, 160 bp, Glycine max
  unsure (1)..(160): unsure at all n locations
  Clone ID: 700762065H1
gacgtcgcntgcacgcgtacgtaagctcggaattccggaccggnacctgcaggcgtaccagctttccctatagtgagtcgtattagagcttggcgtaatcatggtcatagctgtgatcctgtgtgaaatngttatccgcncacaattccacacaanatan

SEQ ID NO: 60973 - DNA, 59 bp, Glycine max
  unsure (1)..(59): unsure at all n locations
  Clone ID: 700762116H1
gcncgcgtacgtaagctcggaattcggctcgagnnaaaaaaaaaaaaaaaaaaaaaaaa

SEQ ID NO: 60974 - DNA, 69 bp, Glycine max
  unsure (1)..(69): unsure at all n locations
  Clone ID: 700762136H1
cgcangcacgcgtacgtaagctcggaattcggctcgagaaaaaaaaaaaaaaaaaaaaaaaaaaaaaan

SEQ ID NO: 60975 - DNA, 211 bp, Glycine max
  unsure (1)..(211): unsure at all n locations
  Clone ID: 700762278H1
ccataggcnacngcggtnacgtnaagctcggnaattcggctcgagcatcaactttgtcatatctcaaatcttnttcttnnnnttctnantnccatntatnntcntgcnacatggnancntgaattttccnacggtgtctntgtgcagncagcagtgaactccagggtcagcgtgtgtacacaacagatggtnaanagnnaggaacaatgcn

SEQ ID NO: 60976 - DNA, 158 bp, Glycine max
  unsure (1)..(158): unsure at all n locations
  Clone ID: 700762485H1
gtcgcatgcacgcgtacgtaagctcgggccgactagtgagntcgtcgacccgggaattaattccggaccggtacctgcaggcgtaccagctttccctatagtgagtcgtattagagcttggcgtaatcatggtcatagctgtttcctgtgtgaaattg

SEQ ID NO: 60977 - DNA, 154 bp, Glycine max
  unsure (1)..(154): unsure at all n locations
  Clone ID: 700762559H1
angagcgtcgcangcacgcgtacgtaagctcggaattccggaccggnacctgcaggcgtaccagctttccctatagtgagtcgtattagagcttggcgtaatcatggtcatagctgtttcctgtgtgaaatngttatccgctcacaattccacn

SEQ ID NO: 60978 - DNA, 202 bp, Glycine max
  Clone ID: 700762595H1
gtcgcatgcacgcgtacgtaagctcggaattccgagcttgggatcctctagagcggccgccgactagtgagctcgtcgacacgggaattaattccggaccggtacctgcaggcgtaccagctttccctatagtgagtcgtattagagcttggcgtaatcatggtcatagctgtttcctgtgtgaaattgttatccgctcaca

SEQ ID NO: 60979 - DNA, 260 bp, Glycine max
  unsure (1)..(260): unsure at all n locations
  Clone ID: 700762645H1
gtgcntgcgctcgtcgtcgccctntcntggtgtatgcgcntgtcngcnngtgngccnctcnntctcctgcnanctctcactngttcntngctcttncantncccctggnctgnnntgtctgnttntccgtgnnntccgngccattnnatgggtnnccttttnnnngcgngnnncanctcccgtntnggncggggngntncttcntnnacgnacncnncncnnctgtttgtntggtgncgcgacctgnccncangtntatc

SEQ ID NO: 60980 - DNA, 323 bp, Glycine max
  unsure (1)..(323): unsure at all n locations
  Clone ID: 700762646H1
nngcgtncgtgcncgcgtgncgtncggttcgaantaggntcngngcnngannntgnnngaggntnnntcnctnacttatttngtacntctgatgnngnggttncggatccannnctcntncnggattttcntcggtattntcggcnatctctngcancctntncctangaanangggnctgcgtgnnacaaagacacacttcgnatnnancnnggattgncccnnganaannccngnannancacccgcccccaaancggggtanccngcaacagcgcaaanaaggcntncnnntaanaatagcagcgagntgaggggaggng

SEQ ID NO: 60981 - DNA, 67 bp, Glycine max
  unsure (1)..(67): unsure at all n locations
  Clone ID: 700762683H1
ngtcgcatgcacgcgtacgtaagctcggaattcggctcgagctttcgagggtttttctttttctttt

SEQ ID NO: 60982 - DNA, 314 bp, Glycine max
  unsure (1)..(314): unsure at all n locations
  Clone ID: 700762902H1
aaantcgcanagcacacctacgnattctganagtgcngacttnctcaacaantcatcngnnatnacaannancaaacntagcnnngngctacaacaccatatangncatacgaccangnnaaacatngttgaantncgganntgaanngcttgnccctnanaatctcaacancatgagcngcaatntgncggagtcatgnnctaagactcatnncacgcganaggcnnctacntgccatcttcntcaccttatcnccggatnatcatcatngnacaagggnnnggancattggagatgnaantccngagtcctg

SEQ ID NO: 60983 - DNA, 319 bp, Glycine max
  unsure (1)..(319): unsure at all n locations
  Clone ID: 700762916H1
gtcgcangcacgcgtacgtaagctcgggaattcggctcgagntcgaaccgatgtnncaancanantcnctcananggacctttgctttnctcctgccntntgccnctccngtatcnttncccttggnncatggnccatgggatgttnncngaaatatgngagtctcttcaantgantnanagcaagngcntcccatcntggnagacctttncngtcancagganacngnantngnttcngngcatggaatggttatcagtgtttncnggagactgtntctcnagtaggccaagtngccnnttgncancctnngggngtn

SEQ ID NO: 60984 - DNA, 419 bp, Glycine max
  unsure (1)..(419): unsure at all n locations
  Clone ID: 700762934H1
anagttccgcctaataaggcnaacggcnnatnaacggttanaaggcttccggggnaaattttccggggcttccggaagggtttttntttttctcccaggnaanncctatnctgggacnagttgnancangnattncnggaacttccaggnggncantnnggagcaaggagantnnntcgcntntaggtnatccgaatnggttncatattntcctccnaattaccnanngttcaanccncggngcccnctaatgntctcntccgcantnggancgcntacntgncnntgangtngcnanangtcantgttcncggggacnggnagnatancggtnagactntnnaangatnnnangaagctnannnncctcgtataagaccantccactntttangntatacancgnacactgcnggagt

SEQ ID NO: 60985 - DNA, 86 bp, Glycine max
  unsure (1)..(86): unsure at all n locations
  Clone ID: 700763043H1
cgtcgcangcacgcgtcacgtaagctcgggaattcggctcgagntttatgaagttcgtaaaanaaaaaaaaaaagggcggccgccc

SEQ ID NO: 60986 - DNA, 248 bp, Glycine max
  unsure (1)..(248): unsure at all n locations
  Clone ID: 700763236H1
gcnncatncacncgtacgtaagctcggaattcggctcgagntcaagtacctatgcngganaagcataaataaaagacgaaattccaataaaaaaaaaaaaaaagggcggccgccgactagtnanctcgtcgncccggganttaattcngnaccggtacctgcaggcgtaccagttttccctatagtggncgtattagancttggngtaatcatggncatagctgtttcctgtgtnaaattgttatccg

SEQ ID NO: 60987 - DNA, 64 bp, Glycine max
  unsure (1)..(64): unsure at all n locations
  Clone ID: 700763259H1
gtngcttgcacgcgtacgtnngctcgcgaattcggctcgngtcgagaacaaaaanaaaaaaaan

SEQ ID NO: 60988 - DNA, 184 bp, Glycine max
  unsure (1)..(184): unsure at all n locations
  Clone ID: 700763632H1
caanacacacacacggaattccgancttnnnatccnctagagcngccgcccgactagtgagctcgtcgaccccgggaattaattccggaccggtacctgcaggcgtaccagctttccctatagtgagtcgtattagagcttggcgtaatcaggtcatagctgtttcctgtgtgaaatngttatc

SEQ ID NO: 60989 - DNA, 262 bp, Glycine max
  Clone ID: 700757167H1
ggccaggcaagccccactcaaccaccacacctctcctcgttcacgctacccctttctgctcttcttctacctttcaagttttaaaagtataaagatggcagagacattcctatttacctcagagtcggtaacgagggacaccctgacaagctctgcgaccaaatctccgatgctgtcctcgacgcttgcctcgagcaggacccagacagcaaagttgcctgcgaaacatgcaccataaccaacttggtcatggtcttcggag

SEQ ID NO: 60990 - DNA, 270 bp, Glycine max
  Clone ID: 700758482H1
gtgaaaagtcatcaaaaggcttatttgagaactattacatcaaagtttcaaactctagttgacctttcagtgatagagatcttgtcaaggcatgcttctgatgaggtctaccttggccaaagggacaacccacattggacctctgactcaaaagcattacaagcctttcaaaaatttggaaacaagctcaaagaaattgaggaaaaacttgcaaggaagaacaatgatcaaagtctctccaatcgacttgggccggttcaactgccatac

SEQ ID NO: 60991 - DNA, 251 bp, Glycine max
  Clone ID: 700760905H1
tctgattttagcaaattaaaatagtagtgttattggtaggttttggcaaagatgttttcagttccaggggtgtcgggaatcctgaacagaggaggagggcataagataaaagggacagtggtgttgatgaggaagaatgtgttggacttcaacagcgtggctgatcttactaaaggaaatgttgggggactcataggcaccggcctcaacgttgttggctcaacacttgataacctcactgctttcttggg

SEQ ID NO: 60992 - DNA, 264 bp, Glycine max
  Clone ID: 700757689H1
cgtgtctctccagcttattagtgctaccaaagctgatgccaacggaaaagggaaacttggaaaggctacctttttggaaggtatcattacttcattgccaactttgggagcaggccaatctgcattcaaaattaattttgaatgggatgatgggagtggaattcctggagcattttatatcaagaattttatgcaaactgagtttttccttgtgagtttgactcttgaagacattccaaaccatggaagcatccactttgtttg

SEQ ID NO: 60993 - DNA, 268 bp, Glycine max
  Clone ID: 700762981H1
catacatagtagtgttggtgggttgcaaagatgcttgggggtcttctccataggggtcataagataaaagggacagtggtgttgatgcgcaagaatgtgttggacgtgaatagcgtaaccagcgttgggggaattattggtcaaggtctcgacttagttggctcaacactcgatactcttactgccttcttgggccgatccgtgtctctccagcttattagtgctaccaaagctgatgccaacggaaaagggaaacttggaaaggcta

SEQ ID NO: 60994 - DNA, 248 bp, Glycine max
  Clone ID: 700760925H1
ttataaactccttcaccctcactatcgtgacaccatgaacataaatggccttgctcggttatcactggtcaacgacggtggcgttatagaacaaacatttttgtggggaaggtattctgtggaaatgtctgctgtagtttacaaggattgggtttttacagatcaagcattgcctgctgatcttataaaaagaggaatggcaattgaggatccatcgtgccctcatggcattcgccttgtgatagagg

SEQ ID NO: 60995 - DNA, 232 bp, Glycine max
  Clone ID: 700761996H1
aatcaaccaatatactacgtactacatgtatgatcctcatcaagcaaaacctaaagtcccaggctatcaaatggactggaatgcaggatttgcttatgcaaagaacggagtgcctattggtccaagggcttattcttattggctttacaacgtaccatggggcatgtacaaatcattgatgtacataaaggaacgttatggaaacccaactgtgttcttatccgaaaatggc

SEQ ID NO: 60996 - DNA, 243 bp, Glycine max
  Clone ID: 700757271H1
gtactattcaaggttacaagaaacttcaagcagttttaagggccataatgctacgtcgtacaaaaggaactttgcttgatgggaagccaataatcaatttgcctcccaagacaattgagctaagtaaggtggatttttcgattgaggagcgagcattctacaccaaattggaatcagactcgcgtcttcaatttaaggcatatgctgctgctgggacagtgagccaaaactatgctaatattc

SEQ ID NO: 60997 - DNA, 287 bp, Glycine max
  Clone ID: 700697954H1
caaaaaatcaagaacaatggcttatgctaggcttgctcctatggctgtcttcttgcttgccacttccaccataatgttcccaacgaagatagaagcagcagattgtaatggtgcatgttcacctttcgagatgccaccgtgccgctcacgtgattgtcgttgtgtccctataggactagttgctggtttctgcatacatccaactggactttcatctgttgcgaagatgatcgacgaacatcccaacttatgtcaatctgatgatgaatgcatgaagaaaggaagtg

SEQ ID NO: 60998 - DNA, 283 bp, Glycine max
  Clone ID: 700756901H1
aaaattagggttttcaatttggggaaataaaaatagggggaaacattctagagagagtgtgtagaaaatatggttgtcgatgatatgacgctgtgcatcatcgtcggctatggaggttcctcttcttctcgtttctccgatgcttatcccaaaaggggtttgatggaggggagatatagtggggattgatatgatgaaggtgtttataaggttgttttgttgaaattgtgtttttgggatggcaatattgtacgaaccagcaataaactcatcgaccagatga

SEQ ID NO: 60999 - DNA, 279 bp, Glycine max
  Clone ID: 700756907H1
tcaatatcctagtataccttaataaataatttaagatactatgatgagagcacggttcccattactgttgctgggacttgttttcctggcttcagtttctgtctcatttggcattgcttactgggaaaaagagaaccccaaacacaacaagtgtctccagagttgcaatagcgagagagactcgtacaggaaccaagcatgccacgctcgttgcaacctccttaaggtggagaaagaagaatgtgaagaaggtgaaattcccgaccacgaccacgacca

SEQ ID NO: 61000 - DNA, 280 bp, Glycine max
  Clone ID: 700756908H1
ggatttcattgtgatatcatttgtgtcactggatggactgccactccaatgcaggatgttcaggttacaattgattggtttatttcctctcaggaatgtgttcccaggacctattgtgttttaaatccacaaaatccttttgtgttaaataggtggatggggaaactgactttcccccagggcacttcccgaagtgtcaaaagaatgcctctttctatagggggaggagctggtgcaaagaatgctattctcatgaatatgcaaatgctgttctttcaat

SEQ ID NO: 61001 - DNA, 276 bp, Glycine max
  Clone ID: 700756915H1
atcatcgcccaagggaaaggagcacttggagttgcaattccaggatgtcctgagacgtttgaggagccacaagaacaatcaaacagaagaggctcaaggtcgcagaagcagcagctacaggacagtcaccagaagattcgtcacttcaatgaaggagacgtactcgtgattcctcctggtgttccttactggacctataacactggcgatgaaccagttgttgccatcagtcttcttgacacctctaacttcaataacagcttgatcaaaccccta

SEQ ID NO: 61002 - DNA, 273 bp, Glycine max
  Clone ID: 700756943H1
ggcacaggaggaaattctgtcttctagtgcaagtgatttcagaactgcaatggtgagtaaaaatagcaagcctcaagctactgcaatgcatgtgggagctatagaaattatcattgatagtttcgcaagtcctgactgcaacatagttggtgcaatgcttttggttgatacttatcataccaatcctgaaaatgcagttcgtagtatttttgttgcgcctttcagaggcggaaggcccattcgggtggttacattccgaataccattgtgcag

SEQ ID NO: 61003 - DNA, 272 bp, Glycine max
  Clone ID: 700756947H1
tttgaagtttctaagatgacttctccctacattaaatgtacagtctctttcttcatagcatttggaaatttggctgatgacaccatcaattttgaggcttttccccacaagctggtacagtttggagagattcaggaaaaagttgtattgaaattttcacaagaggaatttcttacagcttggtcaacccaggtgcgtcctgcaacaactctgttggctgatgggtgtccatatttgtatgctatggtgcatgaagttcagtgtctacaata

SEQ ID NO: 61004 - DNA, 271 bp, Glycine max
  Clone ID: 700756964H1
gactagttctagtggagatctcgtctttgaagtttctaagatgacttctccctacattaaatgtacagtctctttcttcatagcatttggaaatttggctgatgacaccatcaattttgaggcttttccccacaagctggtgcagtttggagagattcaggaaaaagttgtattgaaattttcacaagaggaatttcttacagcttggtcaactcaggtgcgtcctgcaacaactctgttggctgatgggtgccatatttgtatgctatgg

SEQ ID NO: 61005 - DNA, 265 bp, Glycine max
  Clone ID: 700756978H1
ggagagattcaggaaaaagttgtattgaaattttcacaagaggaatttcttacagcttggtcaactcaggtgcgtcctgcaacaactctgttggctgatgggtgcccatatttgtatgctatggtgcatgatagttcagtgtctacaataccaggtgattttgtcattggtgttaagttgacaaccataaacaatatgtgtgcatatgggctcaatcctggtatttcaggttctcgtcttttgggcacattcctcagtccatttc

SEQ ID NO: 61006 - DNA, 267 bp, Glycine max
  Clone ID: 700756984H1
taaaattcttccaccaagttatgggtttccttgtgttgcttcttttctccctcttaggtctctcttctagttccagcatatcaactcatcgttccatattggaccttgacctaaccaagtttaccacacagaaacaggtgtcttcactgttccaactatggaagagtgagcatggacgtgtctaccataaccacgaagaagaggcaaagagacttgagattttcaagaataacttgaactatatcagggcatgaatgcaaacagaaa

SEQ ID NO: 61007 - DNA, 272 bp, Glycine max
  Clone ID: 700757011H1
atcaccatggccaagcttgttctttccctttgtttccttcttttcagtggctgcttcgctctgagagagcaggcacagcaaaatgagtgccagatccaaaagctgaatgccctcaaaccggataaccgtatagagtcggaaggtgggttcattgagacctggaaccctaacaacaagccattccagtgtgccggtgttgccctctctcgctgcacccttaaccgcaatgcccttcgtagaccttcctacaccaacggtccccaggaaatcta

SEQ ID NO: 61008 - DNA, 270 bp, Glycine max
  Clone ID: 700757012H1
tgcagatcatgatgactattgttgatgaccttgtatcagtggacactcttgttgaggaacgcttgacagttgagccatgcaacgagtatatccagagctgtgacattgttgcattcaacaaaatctaagttttcttgttgacttttgagtttggccattttcaagcggctgatcagtctgttactcttcctttaatcgttcatgtttggtctgtttcaatggtggttttcttgcaagaattgtgagaagtaaagagatattatagatata

SEQ ID NO: 61009 - DNA, 270 bp, Glycine max
  Clone ID: 700757018H1
cgttcatcatggttcggttcagcaacaacgtgatcggactcctgaacttcctgaccttcctcctctccatcccgatcctggtggccggagtgtggctgagcaagcagggcgccaccgagtgcgagcggtggctggagaagccggtgatcgcactcggcgtcttcctcatgctcgtctcactcgccggcctcgtcggcgcgtgctgtcgcgtgtcgtggctcctctggctctacctcctcgtcatgttcgtcctcatcgttcttctcttcg

SEQ ID NO: 61010 - DNA, 268 bp, Glycine max
  Clone ID: 700757021H1
gttctaaattgaaaagctttctagctggtcataatatcaccattactgatggtattgacaaaactagtgcaactttgcaatttagaaagttagcagattgtgattttctcaagagaaactttaagcagatgtctaatgttttgtgggtggctcctgaggataaggcgagtttatggtcacaacttcattatgtttcgtgtaataatctggaaatgcaagaagcttatcttgtcaatctcgtaaatgtgttacgagaattgtatttgca

SEQ ID NO: 61011 - DNA, 270 bp, Glycine max
  Clone ID: 700757024H1
cgctggtgctcacttcgatcccgttggcgctctcttcgattcagatattgactggtttgatatacaacactggctgatttgaaatggcttaacttgcaagcataatttatgcagatgcaacaaacgcagcagcaggccacggcgacaccattctcgacctgcactcctcctccttcctccggtggctccgcgtccgaggcaccgccaaagcaggtggctcaagcaatggacaagctcggacaggccgaacgaatcatcgccgacatccga

SEQ ID NO: 61012 - DNA, 270 bp, Glycine max
  Clone ID: 700757029H1
ctacccttttgcttttgctctttgttctttgccatggagtggccacaacaacaatggccttccatgatgatgagggtggtgataaaaagtcaccaaaaagtttgtttttgatgagcaactccacgagggttttcaagactgatgcaggggaaatgcgtgtgctgaaaagccatggtggtaggatattttataggcacatgcacattggcttcatctctatggaaccaaagtccttgtttgttcctcagtacctcgactccaatctcatca

SEQ ID NO: 61013 - DNA, 270 bp, Glycine max
  Clone ID: 700757033H1
agaagaaaaaagagaagaagatgggtttgaagaacaacatggtggtgctaaaggtgtgtttggtgctacttttccttgtggggggtactactagtgccaacttgaggctgagtaagctggcctgctcatgaaaagtgatcatcatcaacactcaaatgatgatgagtcttcaaaaccatgctgtgatcaatgcgcatgcacaaagtcaaaccctcctcaatgccgctgttcagatatgaggctgaattcgtgccattcagcttgcaaatc

SEQ ID NO: 61014 - DNA, 268 bp, Glycine max
  Clone ID: 700757037H1
agaaaatatgattaggaaagaataagtcatcatattttcttgtattgatagccccgctgtcccttttaaactcccgagagagtataaaactgcatcgaatattacaagatgcactcttgtcaaatgaagggggggaaatgatactacaagccactaggcatgggtctagcaaaggaaacaataatgggaggtggaggccgtgtggccaaagttgaaattcagcagaagaagcctctctcaagggttccaaacacaaagccaccattca

SEQ ID NO: 61015 - DNA, 268 bp, Glycine max
  Clone ID: 700757038H1
ccttaaacactcatcagtcatcaccatggccaagctagttttttccctttgttttctgcttttcagtggctgctgcttcgctttcagttccagagagcagcctcagcaaaacgagtgccagatccaaaaactcaatgccctcaaaccggataaccgtatagagtcagaaggagggctcattgagacatggaaccctaacaacaagccattccagtgtgccggtgttgccctctctcgctgcaccctcaaccgcaacgcccttcgtaga

SEQ ID NO: 61016 - DNA, 268 bp, Glycine max
  Clone ID: 700757040H1
ctacccttttgcttttgctctttgttctttgccatggagtggccacaacaacaatggccttccatgatgatgagggtggtgataaaaagtcaccaaaaagtttgtttttgatgagcaactccacgagggttttcaagactgatgcaggggaaatgcgtgtgctgaaaagccatggtggtaggatattttataggcacatgcacattggcttcatctctatggaaccaaagtccttgtttgttcctcagtacctcgactccaatctcat

SEQ ID NO: 61017 - DNA, 272 bp, Glycine max
  Clone ID: 700757047H1
aaacactcatcagtcatcaccatggccaagctagttttttccctttgttttctgcttttcagtggctgctgcttcgctttcagttccagagagcagcctcagcaaaacgagtgccagatccaaaaactcaatgccctcaaaccggataaccgtatagagtcagaaggagggctcattgagacatggaaccctaacaacaagccattccagtgtgccggtgttgccctctctcgctgcaccctcaaccgcaacgcccttcgtagaccttccta

SEQ ID NO: 61018 - DNA, 264 bp, Glycine max
  Clone ID: 700757055H1
ggagctgtcaccgaagttaagttacagggtagatgtggatcatgctgggctttcagcaccacaggatctatagaaggagccaattttcttgccaccggaaagctcgtcagtcttagtgaacaacagctccttgactgtgacaacaagtgtgacataacagaaaagacttcatgtgacaatgggtgtaatggaggtcttatgacaaatgcctacaattatttgctcgagtctggtgggttggaggaggagtcttcatatccctac

SEQ ID NO: 61019 - DNA, 267 bp, Glycine max
  Clone ID: 700757057H1
cagcaacgaggacgaagccagaggccccaagaccgtcaccaaaaggtacatcgcttcagagagggtgatttgatcgcagtgcctactggtgttgcatggtggatgtacaacaatgaagacactcctgttgttgccgtttctattattgacaccaacagcttggagaaccagctcgaccagatgcctaggagattctatcttgctgggaaccaagagcaagagtttctaaaatatcagcagcagcagcaaggaggttcccaaagccag

SEQ ID NO: 61020 - DNA, 266 bp, Glycine max
  Clone ID: 700757058H1
agcaaagcaatggctacttcaaagttgaaaacccagaatgtggttgtatctctctccctaaccttaaccttggtactggtgctactgaccagcaaggcaaactcagcggaaactgtttctttcagctggaacaagttcgtgccgaagcaaccaaacatgatcctccaaggagacgctattgtgacctcctcgggaaagttacaactcaataaggttgacgaaaacggcaccccaaaaccctcgtctcttggtcgcgccctctactc

SEQ ID NO: 61021 - DNA, 263 bp, Glycine max
  Clone ID: 700757066H1
agcagattgtgattttctcaagagaaactttaagcagatgtctaatgttttgtgggtggctcctgaggacaaggcgagtttatggtcacaacttcattatgtttcgtgtaataatctggaaatgcaagaagcttatcttgtcaatctcgtaaatgtgttacgagaattgtatttgcacagtccagaggaagctcgccaattgagaaggaaagctctctctcgtattgaatggctgcaaaaagctgatgtgcctaccatagcac

SEQ ID NO: 61022 - DNA, 264 bp, Glycine max
  Clone ID: 700757077H1
aatgccaggtcttaccatcggagacactattcctgatcttcaagttgaaactaaccaaggcaaaatcaagcttcatcagttctgtgctgatggctggaccatccttttctctcacccaggtgatttcaccccggtttgtaccactgagcttggtaagatggctcagtatgctaaggagttttatcaacgaggagtgaagctcttaggtttatcttgtgatgatgtgcaatcccacaatgagtggatcaaagacattgaagccta

SEQ ID NO: 61023 - DNA, 259 bp, Glycine max
  Clone ID: 700757084H1
ctggaatgaatcatcacatgcttcatgaactcatgggagttgatcctggaactaaccctgtttgccatttccttggaagcaaggccattttatgggtacccaatttatctatggacactgcctatcagactaacgttgttgtttaattagtccatgcatctgcatcttgggcaccataagattgtatataaaataaattatggtgtgttgtgtatgttgtgcaagacctggaacttcacctttctacgtacgtgtgctg

SEQ ID NO: 61024 - DNA, 266 bp, Glycine max
  Clone ID: 700757095H1
accggttcgtggagagcaaggcgtcggcggtgtcgctgcaggtgggggaacacgtgcagttggcttacacacaccacaacgaatcaccgtggcatcccagatcatttgctgttaaggatgagatattctgcttgtttgagggggctctagacaatttgggcagcctgagacaacagtatggactggccaagtcagccaatgaagtgattttggtgattgaggcttacaaagctttacgtgatcgagcaccctaccctgccaatcgt

SEQ ID NO: 61025 - DNA, 270 bp, Glycine max
  Clone ID: 700757103H1
tgattttcctgaaaaggaagatcaagaaaaacccaaaaagattgatgccagattgagacaaagaatagatcctcaatacaatgaggttcaggctcagatggaaacaaatttgtttaaattgtctcttgatgatgttgaactcctaaaggttccatgttggatcttaaaatttctcagtctaaaattgcacttcccaagaacacagttggaggaactattctgcgtagtgatctattggcaaattttctgacagagggcaattttagagca

SEQ ID NO: 61026 - DNA, 268 bp, Glycine max
  Clone ID: 700757108H1
gccggtgatgtccgtatgactgatacccgtgcagatgaagctgagcgtggtattaccatcaagtctacaggtatctcactctactatgaaatgactgatgaagctctcaagagttttaagggagagcgcaatgggatgagtatcttatcaatctcattgactcccctgggcacgttgacttctcatctgaggttactgctgcactccgtattactgatggagctctagttgtggtcgattgtgtggaaggagtttgtgtccaaactga

SEQ ID NO: 61027 - DNA, 266 bp, Glycine max
  Clone ID: 700757120H1
atcacgtcacatcacatataaccatcttcttctttgaaaccttaaattgtgctcaaaaatactatatagttaattaaggttgtgtgaaaatgcgaatgagttgtaacggatgtcgtgttctgcgcaaagggtgtgcgaagattgtagtataagaccgtgtttgcaatggatcaagaacccggagtcaacagctaatgcaactgtttttcttgccaagttctatggtcgtgctggcctcatgaacctcatcaacgctggtcctgaaa

SEQ ID NO: 61028 - DNA, 264 bp, Glycine max
  Clone ID: 700757139H1
caagtcctgactgcaacatagttggtgcaatgcttttggttgatacttatcataccaatcctgaaaatgcagttcgtagtatttttgttgcgcctttcagaggcggaaggcccattcgggtggttacatttcgaataccattgtgcagattgaaccagacatgaattcaaggtttcagcttttgagtaccactaccaatggtgattttgttcaaggaaaagatctcgcaatggttaaagttaatgtagcatgtgctgctgttgg

SEQ ID NO: 61029 - DNA, 265 bp, Glycine max
  Clone ID: 700757140H1
ggtccgtcaaaagtttttaaattttgtgaggttcattatgaagaaaagggacaaacttagttgtcaagttggaatcaacccatactccatggaatggactggtttggccaatagattactgagtaagggcaatgatattctgtgttgcgattatgctagttttgatggtttgattaccaagcaagttatgagcaagatggcagaaatgataaacagtctttgtggtggtgatgaaaaattgatgcgtgaaaggacgcacctgctg

SEQ ID NO: 61030 - DNA, 266 bp, Glycine max
  Clone ID: 700757142H1
ctagggtattgggagctctcgttgtttcggagttagggaccttacgcagccatggccactgctacgaatgccgccgccgccccaccacgccagctctcccagaaggaagctgacatccagatgatgttggccgcgacgtccacctcggcaccaagaactgcgacttccaaatggaacgttacatcttcaagcgccgcaacgacgggatttacattattaaccttgggaagacgtgggagaagcttcagctagcagctagggttata

SEQ ID NO: 61031 - DNA, 266 bp, Glycine max
  Clone ID: 700757143H1
gagaaactttaagcagatgtctaatgttttgtgggtggctcctgaggacaaggcgagtttatggtcacaacttcattatgtttcgtgtaataatctggaaatgcaagaagcttatcttgtcaatctcgtaaatggttacgagaattgtatttgcacagtccagaggaagctcgccaattgagaaggaaagctctctctcgtattgaatggctgcaaaaagctgatgtgcctaccatagcacagattgaagagttccattcgatgca

SEQ ID NO: 61032 - DNA, 271 bp, Glycine max
  Clone ID: 700757145H1
caaagctgctccatttttatacgaagatcagattcaggtctctatcaccaagatccaacaacttctcaaccacaacgagttgctattcccttcgattcacgaacccagaaaattaaaacattaaaaaagatatcaatatcaaaatctaaacggcatcagcaaacatgtctcaacaccatggtgatgaaatggagtatgcggcagatgataatgaaatggcagaggtagaagaggatatgtatttccgtggcagggcatttggtgaatcaga

SEQ ID NO: 61033 - DNA, 269 bp, Glycine max
  Clone ID: 700757160H1
actccctcttatcctccacgacgaccaagccatggaaagcatgaagatgacgaggacgaggacgaagaagaagatcaacctcgtcctgatcaccctccacagcgaccaagcaggcccgaacaacaagaaccacgtgaagaggatgtcagactagaaatggggttgaggaaaatatttgcaccatgaagcttcacgagaacattgctcgcccttcacgtgctgacttctacaacccaaaagctggtcgcattagcaccctcaacagtctc

SEQ ID NO: 61034 - DNA, 153 bp, Glycine max
  Clone ID: 700757180H1
tcaagattccgtatcatcgttgcacaactagaaactatcttattttgcgtctagggaatcattttcttgaaaatttatttacatgtactgtttattttctaggtccgaaattttggatactatttttgaagttggatagccgttttttttgtc

SEQ ID NO: 61035 - DNA, 263 bp, Glycine max
  Clone ID: 700757181H1
tatactatgatgagagtgcggtttcctttgttggtgttgctgggaactgttttcctggcatcagtttgtgtctcattaaaggtgagagaggatgagaataaccctttctacttgagaagctctaacagttccaaactctctttgagaaccaaaacggtcgcattcgtctcctccagagattcaacaaacgctccccacaacttgagaaccttcgagactaccggattgtccagtttcagtcaaaacccaacacaatccttctc

SEQ ID NO: 61036 - DNA, 252 bp, Glycine max
  Clone ID: 700757207H1
gaagggtgccattgtgacagtgaaaggaggtctcagcgtgataagcccacccacggaagagcagcaacaaagacccgaggaagaggagaagccagattgtgacgagaaagacaaacattgccaaagccaaagcagaaatggcattgacgagaccatttgcacaatgagacttcgccacaacattggccagacttcatcacctgacatcttcaaccctcaagctggtagcatcacaaccgctaccagcctcga

SEQ ID NO: 61037 - DNA, 250 bp, Glycine max; identical to SEQ ID NO: 60679
  Clone ID: 700757209H1

SEQ ID NO: 61038 - DNA, 248 bp, Glycine max
  Clone ID: 700757211H1
aacaaaactacccttttgcttttgctctttgttctttgccatggagtggccacaacaacaatggccttccatgatgatgagggtggtgataaaaagtcaccaaaaagtttgtttttgatgagcaactccacgagggttttcaagactgatgcaggggaaatgcgtgtgctgaaaagccatggtggtaggatattttataggcacatgcacattggcttcatctctatggaaccaaagtccttgtttgt

SEQ ID NO: 61039 - DNA, 248 bp, Glycine max
  Clone ID: 700757212H1
gcagcagggagctctgccgcctccaacaaaacagagttcagaacacaaaccctcgaaccgaacgtttttgagggtcagtctctccttcttcattcacataatcttttactcttatagtccctttttcttaattttctgtggcaacaaggttgatagagcacgatggttcagtacaattttaagaagattaccgtggtgccaaatgggaaggatgtggtcgacattatcctctctcgcacccagcgtca

SEQ ID NO: 61040 - DNA, 167 bp, Glycine max
  Clone ID: 700757215H1
gtgtggtgaggccatcttatatgaaataatatcaaaatatattttgtgtaataataaaactatggcctatgtatttaccaccctccgacccagcctatgttaatatctgagtggcgttgtacctttgaatcgccttaataaaatgtcagtcttcaagttttgtcttt

SEQ ID NO: 61041 - DNA, 250 bp, Glycine max
  Clone ID: 700757220H1
gcactcaatggtgttgagggtttggactatatggaaagaattcctcttgccacatctgagggttttccccatgtgctttcacgcaaaaatggtgaaaaaggcaaaaggagatttgtttctggggatggtgaagagatgacattgattccgggaaccagtgttgaagaggcttacaataagctaatagttgaacttgagaaaagtgttcctacattggttggcattgaatgtcccaaggatgagaaacttc

SEQ ID NO: 61042 - DNA, 250 bp, Glycine max
  Clone ID: 700757222H1
caattatattacaaaatctcataatattaataatgtcttccgatatctgtggcattctccctcgtattctcatcgtttccaggcgaaccgttcgcaaaaacaagttcgttgatttcgttggagaataccaccttgaccttatagtaagctacggtggggtgcccgtgattgtccctcgcgtttccggcgttcacacgttgctcaacagctttgagccaattcatggtgttcttctctgcgaaggtgaaga

SEQ ID NO: 61043 - DNA, 249 bp, Glycine max
  Clone ID: 700757223H1
atatcctagtacaccgtattaaagaatttaagatatactatgatgagagcgcggttcccattactgttgctgggagttgttttcctggcatcagtttctgtctcatttggcattgcgtattgggaaaagcagaaccccagtcacaacaagtgcctccgaagttgcaatagcgagaaagactcctacaggaaccaagcatgccacgctcgttgcaacctccttaaggtggaggaagaagaagaatgcgaa

SEQ ID NO: 61044 - DNA, 248 bp, Glycine max
  Clone ID: 700757226H1
ttggcattgaatgtcccaaggatgaaaaacttcctcgtcgcaaagtttttgataaacctaagacgcgctgcttcactattctccctatggagtttaatcttgtggttcgtcagaagtttttaaattttgtgaggttcattatgaagaaaagggacaagcttagttgtcaagttggaatcaacccatattctatggaatggactggtttggccaatagattactgagtaagggcaacgatattctgtgt

SEQ ID NO: 61045 - DNA, 247 bp, Glycine max
  Clone ID: 700757228H1
tggccgtgtcgcagcaaaaccaaaccacatattaacttgtttgctctaagtcatggctctgatcttgcacgcaaccaaagcaaacaagaatgctttcaagactctgattgcggcagagtacagtggcgtccaagtggaattggcccctaatttcgagatgggtgtctctaatagaactcctgaattccttaaaatgaatcccataggaaaggttcctgtcttggaaacgcccgatggtccagtcttt

SEQ ID NO: 61046 - DNA, 245 bp, Glycine max
  Clone ID: 700757233H1
cacacacaactactacaagtacttccttacaatcaaaaccaacaacaactatggcaagttatcaaaagcactacgatgatcagggtcgcaaggttgacgagtatggcaacgttgagaagcaaaccgacgaatacggcaaccctgttcatgctgctagtgtcacctatgtagccaccagaactgctgctggtggttacagtgatgacattaataagcaacatgataccaccaatgcctacggcgta

SEQ ID NO: 61047 - DNA, 244 bp, Glycine max
  Clone ID: 700757234H1
gagtttctgatgatgaattcaataactataagcttgtgttctgtccacagcaagctgaggatgacaaatgtggggatattgggattagtattgatcatgatgatggaaccaggcgtttggtggtgtctaagaacaaaccgttagtggttcagtttcaaaaacttgataaagaatcactggccaagaaaaatcatggcctttctcgcagtgagtgagacacaagtgtgagagtactaaataaatg

SEQ ID NO: 61048 - DNA, 246 bp, Glycine max
  Clone ID: 700757235H1
aattttcacaagaggaatttcttacagcttggtcaacccaggtgcgtcctgcaacaactctgttggctgatgggtgtccatatttgtatgctatggtgcatgatagttcagtgtctacaataccaggtgattttgtcattggtgttaagttgacaaccataaacaatatgtgtgcatatgggctcaatcctggtatttcaggttctcgtcttttgggcaccattcctcagtccatttcacagcaaa

SEQ ID NO: 61049 - DNA, 245 bp, Glycine max
  Clone ID: 700757245H1
ggttaaagttaatgtagcatgtgctgctgttggcttgacatcaagttacactccaactccattgttggaatctggtttgcaaaaagacagagggttaattgtggagtattttggaaggatgtcttacgttgctcataacgttaatcagccccaagagaaagatttgttggagggaaatttttcctttgatattaaatctcgctctagattggaaaaagtttcctctacaaaagcacaatttgtta

SEQ ID NO: 61050 - DNA, 243 bp, Glycine max
  Clone ID: 700757246H1
gtctaattatcttcggctaaactttgatagggttgtgaatattaaatatctagccgaaacttgttttaaggagaagctactgagagagctgttatatgaggttcgaagctttggctatgccatgaaaattttgaattgtacaatatgggtagcaacaggactattgtttggtttagaagggaccttagaattgaggacaatcctgcattaactgctgctgcaaaggagggttctgtactccct

SEQ ID NO: 61051 - DNA, 246 bp, Glycine max
  Clone ID: 700757256H1
aagcaaagcaatggctacttcaaagttgaaaacccagaatgtggttgtatctctctccctaaccttaaccttggtactggtgctactgaccagcaaggcaaactcagcggaaactgtttctttcagctggaacaagttcgtgccgaagcaaccaaacatgatcctccaaggagacgctattgtgacctcctcgggaaagttacaactcaataaggttgacgaaaacggcaccccaaaaccctcgtc

SEQ ID NO: 61052 - DNA, 241 bp, Glycine max; identical to SEQ ID NO: 55968
  Clone ID: 700757257H1

SEQ ID NO: 61053 - DNA, 243 bp, Glycine max
  Clone ID: 700757270H1
caattagtaacttgttgagagttgctgcttggaagaaaggctgtttaatggttaagattgtgatgtctgggaatgcagcagtcaaaaggagtgattgggcctcattggtacaagtgtttttaacaaacagcaacagtacagagcattttgatgcatgtaagtggacaaaatcggaaccacattcctgggaattgatcttcccaatagaggtatgcggtcctaataatggttttgaaatgtgga

SEQ ID NO: 61054 - DNA, 238 bp, Glycine max
  Clone ID: 700757281H1
cgatgagtgcgctgcaaatcaacacttgctctaaaatggtggccacagttggtattcctgagaatacaggtatatcattggcctgtgctatgaatagttcttttagggggcgtgccagttctgatatttacaccatctgctctcaagactgtgaattatggaatcctgcttgcacaaaagcaatgactatgtcatttaatccaaacccgtgttctgatgcgtggagtttggaatttct

SEQ ID NO: 61055 - DNA, 241 bp, Glycine max
  Clone ID: 700757285H1
cactttccttagttcaatatggggaagcccttcttcactctctctctttcttccctttgcttgctactcttgtcgagtgcatgctttgctattacctccagcaagttcaacgagtgccaactcaacaacctcaacgcgttggaacccgaccaccgcgttgagtccgaaggtggtcttattgaaacatggaactctcaacaccctgagctgcaatgcgccggtgtcactgtttccaaacgca

SEQ ID NO: 61056 - DNA, 241 bp, Glycine max
  Clone ID: 700757286H1
ggtcaaccctgacaacatagtatgtggttcctgaggggactctcagggcatcaccagattgaagtctgtaggagtctctgtcgtcgttgttcaccctgacaacaacgaaaatctcagattaataacactcgccatacccgttaacaagcctggtagatttgagagtttcttcctatctagcactgaagctcaacaatcctacttgcaaggattcagcaggaacattttagaggcctcctac

SEQ ID NO: 61057 - DNA, 238 bp, Glycine max
  Clone ID: 700757289H1
caatatcctagtacaccgtattaaagaatttaagatatactatgatgagagcgcggttcccattactgttgctgggagttgttttcctggcatcagtttctgtctcatttggcattgcgtattgggaaaagcagaaccccagtcacaacaagtgcctccgaagttgcaatagcgagaaagactcctacaggaaccaagcatgccacgctcgttgcaacctccttaaggtggaggaaga

SEQ ID NO: 61058 - DNA, 238 bp, Glycine max
  Clone ID: 700757294H1
accggcgcaatggcctccacttgccatcttactcaccttatccccggatgatcatcatcgcccaagggaaaggagcacttggagttgcaattccaggatgtcctgagacgtttgaggagccacaagaacaatcaaacagaagaggctcaaggtcgcagaagcagcagctacaggacagtcaccagaagattcgtcacttcaatgaaggagacgtactcgtgattcctcctggtgttcc

SEQ ID NO: 61059 - DNA, 240 bp, Glycine max
  Clone ID: 700757295H1
gttcagcaaaaagtacttgcaagctcccaaggatgtgtcgcagcaaatcaaaatggccaacaagaaaatgaagaaggaacaatattcttgtgaccatccacctgcatcatgggattggaggaaaaaaggtgtcatcacccaagtaaagtaccaagggggctgtggaagcggttgggcgttttctgccacgggagccatagaagcagcacatgcaatagcaacaggagaccttgttagcct

SEQ ID NO: 61060 - DNA, 248 bp, Glycine max
  Clone ID: 700757352H1
gcttcttcgagtttcacagccaagtcgtaaaagggtttcaagggatggaaaacatgcagagcttctggcaattgggtgatgaactccgtgggcactcaaaagcatcggaggatcacaagtggttaatggttgcctcgaaactggccgaacagacaagattgaagggggagcgtgtgaacaaccttgatcttcaaagggacccattgaaacaaggtcaagggataaatttgggttccaggaagagaaca

SEQ ID NO: 61061 - DNA, 245 bp, Glycine max
  unsure (1)..(245): unsure at all n locations
  Clone ID: 700757361H1
ataaaattcttccaccaagttatgggntttccttggtgttggcttcttttctccctcttangtctctcttctagttccancatatcaactcatcgttccatattgggaccttggacctaaccaagtttaccacacanaaacaggtgtcttcactgttccaactatggaagagtgagcatgggacgtgttaccataaccacnaagaacanggcaaagagacttggacattttcaagaataattgaa

SEQ ID NO: 61062 - DNA, 240 bp, Glycine max
  Clone ID: 700757380H1
aattgtttttcttactagagttgatccttttccagtagctctactggctgttctttttggcgttaagaatgaaattctgagttccaacgccactaaccctatgctgacgcgacttcttgagaactgtaagagtctcaaatatctggttgatgagtgtccttttgcatttgtgaactagtatgtatattttattcacttaaataaagcgcattactatgtgcaatgagtgtgtttaaatat

SEQ ID NO: 61063 - DNA, 246 bp, Glycine max
  Clone ID: 700757383H1
tatatactatgatgagagtgcggtttcctttgttggtgttgctgggaactgttttcctggcatcagtttgtgtctcattaaaggtgagagaggatgagaataaccctttctacttgagaagctctaacagcttccaaactctctttgagaaccaaaacggtcgcattcgtctcctccagagattcaacaacgctccccacaacttgagaaccttcgagactaccggattgtccagtttcagtcaaa

SEQ ID NO: 61064 - DNA, 235 bp, Glycine max
  Clone ID: 700757389H1
aaactacccttttgcttttgctctttgttctttgccatggagtggccacaacaacaatggccttccatgatgatgagggtggtgataaaaagtcaccaaaaagtttgtttttgatgagcaactccacgagggttttcaagactgatgcaggggaaatgcgtgtgctgaaaagccatggtgtaggatattttataggcacatgcacattggcttcatctctatggaaccaaagtcc

SEQ ID NO: 61065 - DNA, 235 bp, Glycine max
  Clone ID: 700757390H1
gtttgttagtacagtggatcccctcaaagagccgcctcttgtaactgcaaacactgttttgtctatactttctgttgattaccctgtcgacaaagtttcctgctatgtatcagatgatggttcagctatgttgacctttgaagcactatcagaaacagctgagtttgcaaagaagtggggcctttttgcaaaaagcacaatattgaaccaagagccccagagttttattttgccc

SEQ ID NO: 61066 - DNA, 233 bp, Glycine max
  Clone ID: 700757393H1
atttgtctctcatcaatggctgccacgagaccggtgcagtgtttgttacgaagggtttgcagaggaagtaggactattggggttgccacagaagttaatgcttcttcttcttctcagaaaatcatcgacaaggaatatgaacacagtgctcacaattaccatcctcttccgattgtattgctcaagcaaagggaacctctgtttgggatccagagggaaacaaatatcttgat

SEQ ID NO: 61067 - DNA, 146 bp, Glycine max
  Clone ID: 700757405H1
caccatcaattttgaggcttttccccacaagctggtacagtttggagagattcaggaaaaagttgtattgaaattttcacaagaggaatttcttacagcttggtcaacccaggtgcgtcctgcaacaactctgttggctgatgggt

SEQ ID NO: 61068 - DNA, 95 bp, Glycine max
  Clone ID: 700757432H1
gcacgtgtggtgcggtgtgctgtcagatgaccatggaggagaagcctctctctgagaaccaaatgctcgtgtatgtgcctcctcatccgttgatc

SEQ ID NO: 61069 - DNA, 111 bp, Glycine max
  Clone ID: 700757472H1
caagtacttccttacaatcaaaaccaacaacaactatggcaagttatcaaaagcactacgatgatcagggtcgcaaggttgacgagtatggcaacgttgagaagcaaaccg

SEQ ID NO: 61070 - DNA, 259 bp, Glycine max
  Clone ID: 700757521H1
ccctcactttctcgctcgccaaacgcccctctctctcctccaatggccgaccagctcaccgacgaccagatcgccgagttcaaggaggccttcagcctcttcgacaaggacggcgatggttgtattactactaaggaacttgggactgtgatgcggtcactagggcaaaacccaactgaggcagaactgcaggatatgattaatgaggttgatgctgatggcaatggaaccatcgacttcccagagttcctcaacctga

SEQ ID NO: 61071 - DNA, 261 bp, Glycine max
  Clone ID: 700757526H1
gacttcttccctgtggaggttgatagtcaagagggagttgctcacattggtgaattgaaatctggtgtctatgttccactgcctacaaaaactaatttggtggaaactcccaaggaatggcaactggatctaccttgtgacaaaattcctagtgtcttgaccacaactgatgagagattggtaggcacagaacatgagggatatgatccttttcttggtggaattcaaaaatatgccactcccatgatgcccctagatgaa

SEQ ID NO: 61072 - DNA, 262 bp, Glycine max
  Clone ID: 700757535H1
atttttgttcgtgcaggtgcagaagatggctcggagctccacaagaatgaaatgggtctctatcttcacacttctattcctctcccactcgcccctcacaatctccgcagaagatgggctagtggcgaatggagattttgaggctaccccaagaaacgggttcccaaacgaggcgattgtggagggccccagcgaggtcccaaactggaagtcaaacggcaacgttgagcttgtggaatcggggcaaaaacagggtgggatg

SEQ ID NO: 61073 - DNA, 256 bp, Glycine max
  Clone ID: 700757540H1
cttaattattaacacttccttagttcaatatggggaagcccttcactctctctctttcttccctttgcttgctactcttgtcgagtgcatgctttgctattagctccagcaagctcaacgagtgccaactcaacaacctcaacgcgttggaacccgaccaccgcgttgagtccgaaggtggtttgattcaaacatggaactctcaacaccctgagctgaaatgcgccggtgtcactgtttccaaactcaccctcaa

SEQ ID NO: 61074 - DNA, 257 bp, Glycine max
  Clone ID: 700757541H1
actcgccatacccgttaacaaacccggtagatttgagagtttcttcctatctagcactcaagctcaacagtcctacttgcaagggttcagcaagaatattctagaggcctcatacgacaccaaattcgaggagataaacaaggttctgtttggtagagaggaggggcagcaacaaggggaggagaggctgcaagagagtgtgattgtggaaatctcaaagaaacaaattcgggaactgagcaaacatgccaaatcta

SEQ ID NO: 61075 - DNA, 249 bp, Glycine max
  Clone ID: 700757571H1
cgcagagtgagtgagtaggttactggaaagaggaatggagaaggaagccgaattgggtgaaaaggagtttgaacaaatggtgcgggctttgccttccgatgctgtcaaggagttattgtcgcacggggtatgcactcgctgcatctttcgcctcttcggcctccaaggccccgtctatgcttctcctccctccctctcttccctcttcgatgcaacacaacaagattgcctttgcacactttgcttagg

SEQ ID NO: 61076 - DNA, 249 bp, Glycine max
  Clone ID: 700757585H1
attccttcacttgcagcactgttgcatcatcatcttcattgcaaaaccctaaacttcaccttcaaccatgaccacacaagtaccaccacacagtgtccaagtccacacaacaacacaccgctacgaagctggcgtcgtcccccccggagcccgtttcgaaccgccgcgttatgaagccggcgtcaaagcgccctccatttaccattccgagagaggtccaacgacttcccaggtcctcgccgtcctcgc

SEQ ID NO: 61077 - DNA, 248 bp, Glycine max
  unsure (1)..(248): unsure at all n locations
  Clone ID: 700757588H1
gctgatgtcgagttcatgcaaaagcgggaaattgagctgcaaaaccacaataattatctgcgagctaagatagctgaacatgagagagctcaacaacagcaatcaaatatgatgtcaggaacactgtgcgagtcccttccttcacaatcatacgacaggaattttttccctgtaaatctcatagcttctgatgatcaacaacaatattctngtcaagaccacactgctctccaattgtctgatnatng

SEQ ID NO: 61078 - DNA, 275 bp, Glycine max
  Clone ID: 700757605H1
cacacacacaaacatatgctacaaactccacttcttcaacacaaaaatccgaaatttgtgctccaacacaaaaaaatgaaacctacaatcaccattctcttgttgtctctactacttctcataacttcaccctccttggcaacccgacccgcatccaaccctgatcaagtcaagcacaacaaaaacaacaaccaaggtggtggtgctggtgctggtgctggcgggttctttggccctggaggagggttcagcatacccggttttggaaacgggtt

SEQ ID NO: 61079 - DNA, 276 bp, Glycine max
  Clone ID: 700757606H1
atccatgacaacaacgacaatgcttcttcgtagctcatccacgccgattctcaattctcgcatccctcactcgaatctcaaccccaaggattcgcctcacgaacctgaaatccttcaccggagcccgcggacgcgctcgctcacgctctccgcgtcgttgagttcgctgtcgcctagcagaatgacgcgagcgttgtcggagactgatctttccgcgcgctccaaaacggcgtcgttcggctccgctttgttttccttctacgagtcggacgatgg

SEQ ID NO: 61080 - DNA, 279 bp, Glycine max
  Clone ID: 700757609H1
accataaccacgaagaagaggcaaagagacttgagattttcaagaataacttgaactatatcagggacatgaatgcaaacagaaaatcaccccattctcatcgtttaggattgaacaagtttgctgacatcactcctcaagagttcagcaaaaagtacttgcaagctcccaaggatgtgtcgcagcaaatcaaaatggccaacaagaaaatgaagaaggaacaatattcttgtgaccatccacctgcatcatgggattggaggaaaaaaggtgtcatca

SEQ ID NO: 61081 - DNA, 280 bp, Glycine max
  Clone ID: 700757616H1
gtaaaaatagcaagcctcaagctactgcaatgcatgtgggagctatagaaattatcattgatagtttcgcaagtcctgactgcaacatagttggtgcaatgcttttggttgatacttatcataccaatcctgaaaatgcagttcgtagtatttttgttgcgcctttcagaggcggaaggcccattcgggtggttacatttccgaataccattgtgcagattgaaccagacatgaattcaaggtttcagcttttgagtaccactaccaatggtgattttgt

SEQ ID NO: 61082 - DNA, 277 bp, Glycine max
  Clone ID: 700757632H1
tgggaagacctttgatacattggagggagctgatccgtcaagcttagccaataaggttgctaaagtagcaggctcaattaaccctggagaatctgcatctcctgccagtcttgggatggctgcaggggcttctgttcttgaaacggtgaaagaattagcaaaagacaatgattcttcaaaggagaaaaatcaagttcaaccagggcttagtggtcctctgaaaaagagaattcagcagcttgttgactctaatcctgtcatgcttttcatgaaagga

SEQ ID NO: 61083 - DNA, 270 bp, Glycine max
  Clone ID: 700757640H1
ctcctcacccaccctaaacccccttcttccaactacgattcttaattcccaatttcttccgccgttcgatttcagactcttcattcgggactcgccatagtgattccttcttcgctcctattcattcgttgcgtgctcgttcggttgttctcgtcgttccagtgaagagttccattttagtcctacacccttagtgtgtgagaatagatggcgccaatcctgcagagcactcagccatgggtcgagaaataccggccaaagcaagtgaaa

SEQ ID NO: 61084 - DNA, 271 bp, Glycine max
  unsure (1)..(271): unsure at all n locations
  Clone ID: 700757643H1
ctaaacacggggcactggtttcgaaccctcgttgtggttaggtcttcttcacctttcgaattttggaatccatgggtcagggaactccgggcggcatgaaccggcagggcgaccggaagccggacggcggcgacaagaaggagaagaagttcgagccgtcggctccgccggcgcgcgtggggcggaaacagcggaagcagaaaggtccggaggcngcggcgcggttgccgacagtgactccggtgacgaatgcaaactgcggcttctgaag

SEQ ID NO: 61085 - DNA, 276 bp, Glycine max
  Clone ID: 700757647H1
acttattaacactttccttagttcaatatggggaagcccttcttcactctctctctttcttccctttgcttgctactcttgtcgagtgcatgctttgctattacctccagcaagttcaacgagtgccaactcaacaacctcaacgcgttggaacccgaccaccgcgttgagtccgaaggtggtcttattgaaacatggaactctcaacaccctgagctgcaatgcgccggtgtcactgtttccaaacgcaccctcaaccgcaacggcctccacttg

SEQ ID NO: 61086 - DNA, 270 bp, Glycine max
  Clone ID: 700757649H1
tctccattggtccttaaacactcatcagtcatcaccatggccaagctagttttttccctttgttttctgcttttcagtggctgctgcttcgctttcagttccagagagcagcctcagcaaaacgagtgccagatccaaaaactcaatgccctcaaaccggataaccgtatagagtcagaaggagggctcattgagacatggaaccctaacaacaagccattccagtgtgccggtgttgccctctctcgctgcaccctcaaccgcaacgcc

SEQ ID NO: 61087 - DNA, 131 bp, Glycine max
  Clone ID: 700757654H1
caaatccttcacttgttgctcgtcttagtttctgtgttgtgtcatttttattgctatatcctaattaaacttcaccctcaaaatgagtgatcccacactagcacaaccacacctagtcgaagtccacacaa

SEQ ID NO: 61088 - DNA, 265 bp, Glycine max
  Clone ID: 700757671H1
ccccagggcacttcccgaagtgtcaaaagaatgcctctttctatagggggaggagctggtgcaaagaatgctattctcatgaatatgccaaatgctgttctttcaatgtggagatattttgttggagatctcgtctttgaagtttctaagatgacttctccctacattaaatgtacagtctctttcttcatagcatttggaaatttggctgatgacaccatcaattttgaggcttttccccacaagctggtgcagtttggagaga

SEQ ID NO: 61089 - DNA, 181 bp, Glycine max
  Clone ID: 700757673H1
cactcctacctaaggagtgtactattatccgcagtttctattctctctagctactttcatgtatgttcaatgctatatatagccttgaattaatgtcaactatgttctaattaacacaaaccgaagctatagcattaattagaacatagttgacattaatgctatagcttcggtttgtgtt

SEQ ID NO: 61090 - DNA, 267 bp, Glycine max
  Clone ID: 700757675H1
cagagatgcttcttgagatgcagaaaaatgaaatgaaaaggcatgaagcttggctggtttatggagccttgctggtcagtgtatatatgatcgactaaagattttcccaacttttccatctcctccccttcatgctgtctggaagaccaatgcaaaagttcttacttcaactcataaacgcaaggcaagccctgagcaattggaacagcagccacctttgaaaaaagctgctacggatggtgagattggtgtggacctaatgaatca

SEQ ID NO: 61091 - DNA, 270 bp, Glycine max
  Clone ID: 700757679H1
gaaaggaaaggttaactaagaagcaatacttcaatggccacccttgttgttcataaccaaacttcttctgctcaagatgctgaggctctccaacaggctttcaaaggatggggggctgatgacaaggccattatagcaatactgggtcacagaaatgttcatcagaggcaagaaatcagaaaagcttatgaggagatttaccaagaggatctcatcaaacgccttgagtccgagatctctggtgactttgagagagctatgtaccggtgg

SEQ ID NO: 61092 - DNA, 265 bp, Glycine max
  Clone ID: 700757682H1
agctgagaaacttcagtctccagacgacgaaaggaagcagatcgtgacagtggaaggaggtctcagcgttatcagccccaagtggcaagaacaacaagatgaagatgaagatgaagacgaagatgatgaagatgaacaaattccctctcaccctcctcgccgaccaagccatggaaagcgtgaacaagacgaggacgaggacgaagatgaagataaacctcgtcctagtcgaccaagccaaggaaagcgtgaacaagaccaggac

SEQ ID NO: 61093 - DNA, 265 bp, Glycine max
  Clone ID: 700757690H1
gcagccccaacgggaaatgaaagatgccctctcactgtggtgcaatctcgcaatgagctcgacaaagggattggaacaatcatctcgtccccatatcgaatccgttttatcgccgaaggccatcctttgagccttaagttcgattcatttgcagttataatgctgtgtgttggaattcctaccgagtggtctgttgtggaggatctaccagaaggacctgctgttaaaattggtgagaacaaagatgcaatggatggttggttta

SEQ ID NO: 61094 - DNA, 280 bp, Glycine max
  Clone ID: 700757703H1
attctctccattggtccttaaacactcatcagtcatcaccatggccaagctagttttttccctttgttttctgcttttcagtggctgctgcttcgctttcagttccagagagcagcctcagcaaaacgagtgccagatccaaaaactcaatgccctcaaaccggataaccgtatagagtcagaaggagggctcattgagacatggaaccctaacaacaagccattccagtgtgccggtgttgccctctctcgctgcaccctcaaccgcaacgcccttcgt

SEQ ID NO: 61095 - DNA, 278 bp, Glycine max
  Clone ID: 700757704H1
cgtaagtgtacatttcatcttagttagggttcaattctcaatcttggtctttgcagttcctagttcctactaccgtgaccttaattctcgggtttcttctgagcgagcagaaggatttcagcatcggagaccgaatcgttcgggtgaggggagtaaataaacagagtgaaccaactcaagcccccaagtagaactgataattagttgcaattttaaaagattgtgattgttgggattgcagagagaagggtggttagtgttagaataggctgagtgtg

SEQ ID NO: 61096 - DNA, 168 bp, Glycine max
  Clone ID: 700757740H1
gcggaatcctctgcatgatctggaatttgtgttttcttttgcttgttcgtttgtttaattcaataaaggaaattaggcatgaccctcttgttgagtatgctctgcctatttgaaaatttccacacctcttttaattatcgtaatgatgtgtgaagtgtgtgttatttt

SEQ ID NO: 61097 - DNA, 102 bp, Glycine max
  unsure (1)..(102): unsure at all n locations
  Clone ID: 700757761H1
taaaattcttccacacannataggaccccagntgtgttgcttcttaggctccctcttaggtctagtnttctagttnntgnatatnaangcatngttnnatat

SEQ ID NO: 61098 - DNA, 266 bp, Glycine max
  Clone ID: 700757781H1
aaaaaataccaaccatggcaaccatttctactgatcaaccaagaggatcctactcctatggaacctcctatggagcaccctatggaaccacctatgagaccaacagcagcattaacaaccctccttcacgccaaaccgtgaagttcataactgctgcaactattggcatcacactcttactcctgtctgggttgaccctcacaggcactgtcataggtttgatcattgcaacccctcttcttgttatcttcagccccatccttgtc

SEQ ID NO: 61099 - DNA, 149 bp, Glycine max
  Clone ID: 700757786H1
ctggaatttgtgttttctttcgcttgttcgtttgtttaattcaataaaggaaattaggcatgaccctcttgttgagtatgctctgcctatttgaaaatttccacacctcttttaattgtcgtaatgatgtgtgaagtgtgtgttatttt

SEQ ID NO: 61100 - DNA, 271 bp, Glycine max
  Clone ID: 700757788H1
ctcgcccgcaccgtccagatcgtaatcaagagaagaggagcgagttttgtttttccttgcagcccaagccatggcgcctctgatcctgcatggtggaaaaaccaacaaaaattcttacaagacactcattgcggcggagtatgccggcgtccaagttgactttgccccaaattttgagatgggtgtctccaataaaactcctgaatttctcaagatcaatcctattggcaaggttcctgtgttggaaacacctgatggtccagtattcgag

SEQ ID NO: 61101 - DNA, 278 bp, Glycine max
  Clone ID: 700757807H1
ctcaaaataatcaaacttgccatacccgtcaacaaacctggcagatatgatgatttcttcttatctagcactcaagcccaacagtcctacttgcaaggcttcagccataatattctagagacctccttccatagcgaattcgaggagataaacagggttttgttgggagaggaagaggagcagaggcagcaagagggagtgatcgtggaactctcaaaggaacaaattcggcaactgagcagacgtgccaaatctagttcaaggaaaaccatttcctc

SEQ ID NO: 61102 - DNA, 284 bp, Glycine max
  Clone ID: 700757815H1
acttattaacactttccttagttcaatatggggaagcccttcttcactctctctctttcttccctttgcttgctactcttgtcgagtgcatgctttgctattacctccagcaagttcaacgagtgccaactcaacaacctcaacgcgttggaacccgaccaccgcgttgagtccgaaggtggtcttattgaaacatggaactctcaacaccctgagctgcaatgcgccggtgtcactgtttccaaacgcaccctcaaccgcaacggcctccacttgccatctta

SEQ ID NO: 61103 - DNA, 118 bp, Glycine max
  Clone ID: 700757824H1
ccttaaaaccggaaacaaaagcaatcgttacttgatttcaagaatctctcaatttcttcctacttctttgtgtacgatttcttaagggaaagaaaatcactctctgtgctggccacag

SEQ ID NO: 61104 - DNA, 273 bp, Glycine max
  Clone ID: 700757837H1
gtgctgctgttggcttgacatcaagctatactccgactccattgttggaatctggtttgcaaaaagacagagggttaattgtggagtattttggaaggatgtcttacgttgctcataacgttaatcagccccaagagaaagatttgttggaaggaaatttttcctttgatattaaatctcgctctagattggaaaaagtttcctctacaaaagcacaatttgttagtggaaaaaccttcaaatatgatatagttggtgctggttcacattctt

SEQ ID NO: 61105 - DNA, 275 bp, Glycine max
  Clone ID: 700757857H1
ggaagaggtgggcgtgggaatgggaattgacgttcatcttgttccttctgatgaggtgggcgtgggaatgggaattgacgttcatcttgttcctcatccgaaggaagagcgaaagcaagaggaagatgaggatgaggagcagcagcgagagagcgaagaaagtgaagattctgagttacgaagacataagaataagaacccttttctcttcggctctaacaggttcgaaactctcttcaaaaaccaatatggtcgcattcgcgtcctccagaggt

SEQ ID NO: 61106 - DNA, 283 bp, Glycine max
  unsure (1)..(283): unsure at all n locations
  Clone ID: 700757861H1
gcataatagattctcctggaacttgaagtacattgttgtcgtgnctgttggatccaacgtttggcagangtttctgttgtnttcacagttcacacacaaatgggaactgaaactacttctaataacggttttaatgatggtgtcactttctggcaactgncagcatnctgattacattcnacctcagcctcnaaaaaccttccatctcccatggncattctaaaccctcctcttaccctcaacantacacatttctttagcagagaacaccacatgagattac

SEQ ID NO: 61107 - DNA, 279 bp, Glycine max
  Clone ID: 700757862H1
actcatcaccatggccaagcttgttctttccctttgtttccttcttttcagtggctgcttcgctctgagagagcaggcacagcaaaatgagtgccagatccaaaagctgaatgccctcaaaccggataaccgtatagagtcggaaggtgggttcattgagacctggaaccctaacaacaagccattccagtgtgccggtgttgccctctctcgctgcacccttaaccgcaatgcccttcgtagaccttcctacaccaacggtccccaggaaatctacat

SEQ ID NO: 61108 - DNA, 267 bp, Glycine max
  Clone ID: 700757865H1
ttctctccatttgtccttgaatataatactcagcatggctaagcttgttctttccctttgttttctgcttttcagtggctgctgcttcgctttcagtttcagagagcagccacagcaaaacgagtgccagatccaacgcctcaatgccctcaaaccggataaccgtatagagtcagaaggtggcttcattgagacatggaaccctaacaacaagccattccagtgtgccggtgttgccctctctcgctgcaccctcaaccgcaacgc

SEQ ID NO: 61109 - DNA, 272 bp, Glycine max
  Clone ID: 700757875H1
catttgctcccagcactgagcttaaccgagcttcacaaagatgaatcgggaaaaattgatgaagatggccggttcggttagaactgggggaaagggcaccgtgagaagaaagaagaaggctgtccacaagacaacaaccacagatgacaaaaggcttcagagcaccctgaagagaataggggtgaatgccatcccggctattgaggaggtcaatatctttaaggatgacgtattatccagtttctaaatcccaaagttcaagcatccattgc

SEQ ID NO: 61110 - DNA, 275 bp, Glycine max
  Clone ID: 700757894H1
cattggtccttaaacactcatcagtcatcaccatggccaagctagttttttccctttgttttctgcttttcagtggctgctgcttcgctttcagttccagagagcagcctcagcaaaacgagtgccagatccaaaaactcaatgccctcaaaccggataaccgtatagagtcagaaggagggctcattgagacatggaaccctaacaacaagccattccagtgtgccggtgttgccctctctcgctgcaccctcaaccgcaacgcccttcgtaga

SEQ ID NO: 61111 - DNA, 284 bp, Glycine max
  Clone ID: 700757908H1
gtgaagagcgaagagaatggctcccaagggtttaatctttttggctgtgttatgcttctcagcactgtcactgagtcgttgtcttgcggaggataatggacttgttatgaacttctacaaggaatcatgccctcaggctgaagacatcatcaagaacaagtcaagcttctctacaagcgccacaagaacactgctttctcctggctcagaaacatcttccatgactgtgctgttcagagttgtgatgcttcactgttgctggactccacaagaaggagcttgtc

SEQ ID NO: 61112 - DNA, 283 bp, Glycine max
  Clone ID: 700757909H1
tctctccattgtctttgaacactcatcaccatggccaagcttgttctttccctttgtttccttcttttcagtggctgcttcgctctgagagagcaggcacagcaaaatgagtgccagatccaaaagctgaatgccctcaaaccggataaccgatagagtcggaaggtgggttcattgagacctggaaccctaacaacaagccattccagtgtgccggtgttgccctctctcgctgcacccttaaccgcaatgcccttcgtagaccttcctacaccaacggtcc

SEQ ID NO: 61113 - DNA, 282 bp, Glycine max
  Clone ID: 700757911H1
gaagatatatacatatatacgagagagtgagtaatcgagaaagagaagaagcatatatatcaaaatggctgcagagatggagagggagtcattgataactgaagctcctaatgcaccagttactgcacagagaagggtcagaaatgacttagaaaattctctaccaaaaccatacttgccaagagcattgaaagctcctgatacgggtcacccaaatggaacagcaggccacaggcaccacaacttatctgttcttcagcagcattgtgctttttttgatca

SEQ ID NO: 61114 - DNA, 282 bp, Glycine max
  Clone ID: 700757913H1
ctcttcctcaccgattgctagaatggaatttcgatgctcagtcatctcttttaccattctcttctctcttgctcttgcaggagagagccatgtccatgcatcgctacctgaggaagattattgggaagctgtttggccaaacactcccattccactgcactgcgagagcttctaaagcctctccctgcaggtgttgaaatcgatgaactccctaagcaaattgatgatacacagtacccaaaaacattcttctataaagaagaccttcatccaggcaaaaca

SEQ ID NO: 61115 - DNA, 288 bp, Glycine max
  Clone ID: 700757916H1
gcggtaacgcgattgctaaccagcaaacacagtccatcaaaatgatcctaggtgaccggaacttgctggaattgactggtgaagatcacagccgagtcagaggtgcacttgtcccattcttgaagccagaatccttgaagagatatgtgggaaaatggatgaagaagttaggaagcaccttgagatgcattggcaggggaaacagcagatcaaggtattgcccctgatgaagactctcacattcaacataatttgctctcttctgtttggtgttgagcgtggaaagca

SEQ ID NO: 61116 - DNA, 277 bp, Glycine max
  Clone ID: 700757956H1
gaagagcactagcttgttcgctatctttctactttgcgccttcacctcatacctaccttccgccaccgcccaggacgtgctcgacgtggatggcgatccgattcggaacggtttcatatactacgttttgccggcaataagaggaacggtggcggaatagaacgagccgcactcgggaaagacacttgccctatcactgtagtgcaatctcccaatccaaactctaaggggttagaaattaagtttgaatctgcataccccgcctattacataaacg

SEQ ID NO: 61117 - DNA, 273 bp, Glycine max
  Clone ID: 700757976H1
ctaaatcatttgatggtggtacaaggtcattagaaaggagtaaaattcttctaaatggaaaacctccaagttactcattcaaccagtcttccgaaggaaccaaagtcagggaagaaaaagataaatggaaaggaaattcagatgataaaccaaatgacttcccaacagtggatacagacgatagtgttccaggagttttgtatgatttgctgcagaaagaggtcttagccttgaggaaagttggtcatgagaaagatcaaagcctaaaagata

SEQ ID NO: 61118 - DNA, 272 bp, Glycine max
  Clone ID: 700757994H1
atttctatgcaggtcattgatgattttgctaagtttaatctgcttctcaaagtcaagaggggacagaaggaagagaagtttaaggtagaggtacacaagaataaccaaggggggttccatctaaatcagatggaacaagatcttcctaattctgatctgaagtttggtcaccctagcaatattgttcttatctatgtctagtgcttacccctttctctgtgccttggcaaataagtagttttacaatgtgtgtatccctttattaactggga

SEQ ID NO: 61119 - DNA, 262 bp, Glycine max
  Clone ID: 700758002H1
agcaaagcaatggctacttcaaagttgaaaacccagaatgtggttgtatctctctccctaaccttaaccttggtactggtgctactgaccagcaaggcaaactcagcggaaactgtttctttcagctggaacaagttcgtgccgaagcaaccaaacatgatcctccaaggagacgctattgtgacctcctcgggaaagttacaactcaataaggttgacgaaaacggcaccccaaaaccctcgtctcttggtcgcgccctct

SEQ ID NO: 61120 - DNA, 257 bp, Glycine max
  Clone ID: 700758046H1
ggcgagaaacaatgtcatcaggtgaggtaaacaatgggagacatgcagaacaaacatatgacccagataaggaatcagcagagaacacacaaactcctcaagaacgtgtgcgcctgagttgtttgcgtgtcttgcatcaacttgcagctagtaccacctgtgcggaggccatggcagcaaccagtgttggaacacctcaggttgttccgctgctaatgaaagccatagggtggcaaggtggaagcattttagctctt

SEQ ID NO: 61121 - DNA, 258 bp, Glycine max
  Clone ID: 700758047H1
gaattgtagacgcagacgcagcagatcagatcctctgtcttcaattcaagttcaagcaggtatggctcaacaacagggggacgaaatggagtatgctgctgatgataatgaaatggcggaagtagaagatgacatgtatttcagtggtagagtgtttggtgattcagagtccgaatcagacgacgatgatgaatatgactccatggaaaatcggatgacagatacctctgctgcagaagctaggaaaggaaaggatat

SEQ ID NO: 61122 - DNA, 260 bp, Glycine max
  Clone ID: 700758048H1
agaagtttttaaattttgtgaggttcattatgaagaaaagggacaagcttagttgtcaagttggaatcaacccatattctatggaatggactggtttggccaatagattactgagtaagggcaacgatattctgtgttgcgattatgctagttttgatggtttgattaccaagcaagttatgagcaagatggcagaaatgatcaacagtctttgtggtggtgatgaaaaactgatgcgtgaaaggacacacctgctgttg

SEQ ID NO: 61123 - DNA, 255 bp, Glycine max
  Clone ID: 700758049H1
gttgcaattccaggatgtcctgagacgtttgaggagccacaagaacaatcaaacagaagaggctcaaggtcgcagaagcagcagctacaggacagtcaccagaagattcgtcacttcaatgaaggagacgtactcgtgattcctcctggtgttccttactggacctataacactggcgatgaaccagttgttgccatcagtcttcttgacacctctaacttcaataaccagcttgatcaaacccctagggtattt

SEQ ID NO: 61124 - DNA, 256 bp, Glycine max
  Clone ID: 700758054H1
ggaaagctctctctcgtattgaatggctgcaaaaagctgatgtgcctaccatagcacagattgaagagttccattcgatgcagaggatgatgaatgctcctgattcaaatgataatatcgatctactgttgagcattgatttgttgggtttacaaggagcaggtaaagcttttccaaacaagattgtttttgatgataagcttgtgttggctaacacacaagaattctttgatggaaattttccagtggattcttg

SEQ ID NO: 61125 - DNA, 257 bp, Glycine max
  unsure (1)..(257): unsure at all n locations
  Clone ID: 700758063H1
ggaagattgaatttcctctccctgatatcaaaacaagaagacgcattttccagntacatacttcaaggatgacattagctgatgatgtcaacttagaagaatttgttatgactaaggatgagttctctggagctgatataaaagcnatntgtactgaagctggcttacttgctttacgagaacgccggatgaaggtgacgcatgccgacttcaagaaggcaaaggataaggttatgtttaagaagaaagaaggggtg

SEQ ID NO: 61126 - DNA, 253 bp, Glycine max
  Clone ID: 700758076H1
gcaaagcaatggctacttcaaagttgaaaacccagaatgtggttgtatctctctccctaaccttaaccttggtactggtgctactgaccagcaaggcaaactcagcggaaactgtttctttcagctggaacaagttcgtgccgaagcaaccaaacatgatcctccaaggagacgctattgtgacctcctcgggaaagttacaactcaataaggttgacgaaaacggcaccccaaaaccctcgtctcttggtcg

SEQ ID NO: 61127 - DNA, 251 bp, Glycine max
  Clone ID: 700758093H1
attcaactcccatattgcctttggacgttctttctgatagacctcctgagaagaagtttgaatgggctaagaggttgctggctaagtatggatctctaatctcagtgatctccatcatggtcctgttcgtatacttggtagcttcaccatcaaaatccagtgcaaagggaagcaagaagaagcgttaatcattggcaaattagtgcatttgcaatcagacactttggaggctagatcatgatattattctg

SEQ ID NO: 61128 - DNA, 277 bp, Glycine max
  Clone ID: 700758110H1
agaagagagcgtcctagtcgcaaccctaataagaagaaccacagcttcaagcgagtgacatccaccagccatgggtcgtatgcacagccgcggtaagggtatatcctcttctgctttgccctacaaaaggacacccccagctggctcaagatctcttcgcaagatgtggaagaaaatatctgcaagtttgcgaagaagggtttgaccccgtctcagattggtgtcattcttcgagattctcacggtattgctcaggtcaacagcgtcactggcagca

SEQ ID NO: 61129 - DNA, 273 bp, Glycine max
  Clone ID: 700758137H1
cggtgctggtggcggcgataaaggaggaggaattggaggtgatgaaaaaggagacgatcatcatggagaaagaggaaaaggtgggaaagatagaggacacaaaggtggcgaaggaggatattgaattattattaagaaggctatggcatatagaataaagggaaaggacgtgttggttggcatggaaccaaagtctagagttagacaactactacctagttctttcttcaacttaaatgtagctttagagatgatactcggtttcattgttcc

SEQ ID NO: 61130 - DNA, 278 bp, Glycine max
  Clone ID: 700758164H1
ggacacccatcagccaacagagttgttgcaatggtgcatgatagttcagtgtctacaataccaggtgattttgtcattggtgtcaagttgacaaccataaacaatatgtgtgcatatgggctcaatcctggtattcaggttctcgtcttttgggcaccattcctcagtccatttcacagcaaactgtttggaatcaaatggcaacagtgagaacaccattgaattttgattctagcaagcagagcttttgtcagttttctattgaccttctcggtgga

SEQ ID NO: 61131 - DNA, 266 bp, Glycine max
  Clone ID: 700758171H1
tgtgaattaaaatatattcaattttgcgtttctctgcctaaaaggattgaaagatgggtcaagcattcggttgctaccaagtcgatcagtcaaatgtggctatcaaggagcattttggaaaatttgatgatgtcctagagcctggatgtcactgcctgccttggtgtcttgggtaccagattgctggtagtctgtcgctgcgagtgcagcaacttgatgttcgatgtgagacgaaaaccaaggacaatgtctttgtcaatgtggtt

SEQ ID NO: 61132 - DNA, 265 bp, Glycine max
  Clone ID: 700758188H1
ttttcgtttgcgttgctgttgcgactgagtgagtgaagatggcgtgcttgcacgaccacagttgcgaagaccatgactgttcctctaactggtctctctacaaacacatcgacctctccaaggtaacgctttgaatgaggcaaatccaggaagtgttaagtcagttttcaaagcttgggaagagcgtctggattcttctggggttcacttggaaagcaatgagggtgatcctgagttacttgtcttcattccatttacttcagat

SEQ ID NO: 61133 - DNA, 252 bp, Glycine max
  Clone ID: 700758220H1
ccttgatccgtgatctcccaatttctcacttgaaagtatgaagaaagaatagataagtaatggcaggagcagaagcaagggctctgtggcagagaactgctaatcgttgctttgtccaagaagatgcaaaaagagctcccaagttggcttgttgccaatcttcatgtgcaacatcaaaatcagttgatactggacctgccagtacagcagatgaatctgatcataatacagttaatgttacccattttaaca

SEQ ID NO: 61134 - DNA, 106 bp, Glycine max
  unsure (1)..(106): unsure at all n locations
  Clone ID: 700758235H1
taatnannaacacttccttagttgcaatgangggtncaagcccttgcactgctcctctgnttgtgctnccccgntggcntgactgactgcntgtgcgaggtggcng

SEQ ID NO: 61135 - DNA, 248 bp, Glycine max
  Clone ID: 700758242H1
agagaatggctcccaagggtttaacctttctggctgtgttaatatgcgtttcagcactgtcactgagtccttctgttgcgggggaagggcaaaataatggccttgttatgaacttctacaaggaatcatgccctcaggctgaagacatcatcacagaacaagtcaagcttctctacaagcgccacaagaacactgctttctcctggctcaggaacatcttccatgactgtgctgttcagagttgtgat

SEQ ID NO: 61136 - DNA, 246 bp, Glycine max
  Clone ID: 700758261H1
aatggcaacagtgagaacaccattgaattttgattctagcaagcagagcttttgtcaattttctattgaccttctcggtggaggaattttagtggacaaaactggagattggatcacacttatacaaaattctccaattagtaacttgttgagagttgctgcttggaagaaaggctgtttaatggttaagattgtgatgtctgggaatgcagcagtcaaaaggagtgattgggcctcattggtaca

SEQ ID NO: 61137 - DNA, 249 bp, Glycine max
  Clone ID: 700758266H1
cgaaccgaaacggggaatcattgtctgcgtctgtaaattgtaaattgcatcatccctgaagctgaacctcaaaaccctagctgtccgcctgtctgcaacggcgtcgttatgatcagttgagaatccaaaggaatcgagtcgaatcatctgaccggcgacagttatgtacagagagcgaggaggcgtcggatccaaatcggaggtaacttccgttgatcggaagcgaatcaacgacgtcctcgataaaca

SEQ ID NO: 61138 - DNA, 244 bp, Glycine max
  Clone ID: 700758268H1
gccacttagtaagaaagagggtgtgaagagagtggggagaagatttggtgttgtggccatggcggagtctaagagtactgtgcttgttacgggagcgggtggtcgcacaggacaaatagtttacaaaaaattaagagagaggccaaaccaatatgtggctagaggtctggttagaacagatgaaagcaaacagaacattggtgctgcagatgacgttattgttggggatataagagatgctgaa

SEQ ID NO: 61139 - DNA, 244 bp, Glycine max
  Clone ID: 700758283H1
ctagttcaatatcctagtataccttaataaataatttaagatactatgatgagagcacggttcccattactgttgctgggacttgttttcctggcttcagtttctgtctcatttggcattgcttactgggaaaaagagaaccccaaacacaacaagtgtctccagagttgcaatagcgagagagactcgtacaggaaccaagcatgccacgctcgttgcaacctccttaaggtggagaaagaag

SEQ ID NO: 61140 - DNA, 239 bp, Glycine max
  Clone ID: 700758313H1
gagggatatgatccttttcttggtggaattcaaaaatatgccactcccatgatgcccctagatgaagaaattctttctaaggttgcacaagatatagttgaggaatggtttgttgtgttgatgaggaggattcctttgaggaagtttctttgagtgcagcactcaatggtgttgagggtttggactatatggaaagaattcctcttgccacatctgagggttttcctcatgtgctttca

SEQ ID NO: 61141 - DNA, 250 bp, Glycine max
  Clone ID: 700758322H1
tcgatttgggggtgccattgatgatgctgctcgctacttcaaggatgctcatgacagggcgcttagtccttatgagtttgttgaaagtatgaagaagaagggaattcgtgtgccagaatagggcacaggatcaagaatagggacaacaaagataagagagttgagctgctacagaagtttgcacgcacacattttccttctgtgaaatacatggaatatgctgttcaagttgagacctacacgctcacaa

SEQ ID NO: 61142 - DNA, 252 bp, Glycine max
  Clone ID: 700758337H1
aagagaactgactggagattctagaaaacatgtttagttgtatgttctggccaggtaaatcaacagacaccctgttgactcaatgtatctttccatgctctggatttgtaaaacccgaagcagtgataaggaaatcattatctgcaaaccccccacatgatcattgatcaaccacactggatgtgaagaattgcaagtaatttttcagggagcaccgtcatagtgttaattggtaacaagttgtactgttgt

SEQ ID NO: 61143 - DNA, 251 bp, Glycine max
  Clone ID: 700758352H1
taaacactcatcagtcatcaccatggccaagctagttttttccctttgttttctgcttttcagtggctgctgcttcgctttcagttccagagagcagcctcagcaaaacgagtgcagatccaaaaactcaatgccctcaaaccggataaccgtatagagtcagaaggagggctcattgagacatggaaccctaacaacaagccattccagtgtgccggtgttgccctctctcgctgcaccctcaaccgcaa

SEQ ID NO: 61144 - DNA, 248 bp, Glycine max
  Clone ID: 700758353H1
ctaattcggagaccttgcaagacttcatcaatggctgtcaaagtttatattgtgtactactccatgtatgggcatgttgagaaactagcagaagaaataaagaaaggggcttccctgtggaaggtgttgaggccaagttatggcaggtacctgagacactgctggatgaggtgcttggtaagatgagtgcaccacccaagagtgacgtaccagtcattacccccaatgaactatccgaggctgatggc

SEQ ID NO: 61145 - DNA, 243 bp, Glycine max
  Clone ID: 700758356H1
acggtcattggcattttatcgtacccacatagaccttttctataggtctaaaacaatattcccctccaaaggtgccatggtgtcctcaaggtggaaataaggattaaggaaggtctcctgtaaagaagaagaagctgttcactccccaactattgtcacactcaggtaatctaggttgtgttttgcttaagaaggaccactatatctcaccaaacataaaagatggatgatccaaagggtagt

SEQ ID NO: 61146 - DNA, 249 bp, Glycine max
  Clone ID: 700758368H1
aagcaatggctacttcaaagttgaaaacccagaatgtggttgtatctctctccctaaccttaaccttggtactggtgctactgaccagcaaggcaaactcagcggaaactgttctttcagctggaacaagttcgtgccgaagcaaccaaacatgatcctccaaggagacgctattgtgacctcctcgggaaagttacaactcaataaggttgacgaaaacggcaccccaaaaccctcgtctcttggtcg

SEQ ID NO: 61147 - DNA, 250 bp, Glycine max
  Clone ID: 700758382H1
cgggaagcaaataagcacgggcgagagcgtggcaatcaaagtaatcaacaaagagcaagtgagaaaagaaggaatgatggaacaaatcaaacgcgaaatttccgtgatgcgttggtgcgacacccaaacgtggtggaaatcaaggaagtgatggccacaaagacaaaaatcttcttcgtgatggaatacgtgcgtggcggggaactcttcgccaaaatctccaaaggcaaactcaaagaagatctcgccc

SEQ ID NO: 61148 - DNA, 237 bp, Glycine max
  Clone ID: 700758395H1
caaacttaattattaacacttccttagttcaatatggggaagcccttcactctctctctttcttccctttgcttgctactcttgtcgagtgcatgctttgctattagctccagcaagctcaacgagtgccaactcaacaacctcaacgcgttggaacccgaccaccgcgttgagtccgaaggtggtttgattcaaacatggaactctcaacaccctgagctgaaatgcgccggtgtc

SEQ ID NO: 61149 - DNA, 263 bp, Glycine max
  Clone ID: 700758403H1
cacaaatgattggtttatttcctctcaggaatgtgttcccaggacctattgtgttttaaatccacaaaatccttttgtgttaaataggtggatggggaaactgactttcccccagggcacttcccgaagtgtcaaaagaatgcctctttctatagggggaggagctggtgcaaagaatgctattctcatgaatatgccaaatgctgttctttcaatgtggagatattttgttggagatctcgtctttgaagtttctaagatga

SEQ ID NO: 61150 - DNA, 263 bp, Glycine max
  Clone ID: 700758404H1
ggagacgttcagtgaggttggacctgtcaggcgttgtttcatagtcactcagaaagggtcagcccaacatcgtggttttggttacgtccaatttgccgtcgaggaagatgctaaccgtgctattgagctgaagaatggtacatctgttgaaggccggaaaattgtagtgaagcatgcaatgcctcgtcctccctgtgaagaacggcaatcaaaaccaaataaagagggcaagacagatgatctcacaaagccaaaagacgatg

SEQ ID NO: 61151 - DNA, 273 bp, Glycine max
  Clone ID: 700758405H1
actagttcaatatcctagtataccttaataaataatttaagatactatgatgagagcacggttcccattactgttgctgggacttgttttcctggcttcagtttctgtctcatttggcattgcttactgggaaaaagagaaccccaaacacaacaagtgtctccagagttgcaatagcgagagagactcgtacaggaaccaagcatgccacgctcgttgcaacctccttaaggtggagaaagaagaatgtgaagaaggtgaaattccacgacc

SEQ ID NO: 61152 - DNA, 272 bp, Glycine max
  Clone ID: 700758408H1
agaatattctagaggcctcatacgacaccaaattcgaggagataaacaaggttctgtttggtagagaggaggggcagcaacaaggggaggagaggctgcaagagagtgtgattgtggaaatctcaaagaaacaaattcgggaactgagcaaacatgccaaatctagttcaaggaaaaccatttcttctgaagataaacctttcaacttgagaagccgcgaccccatctattccaacaagcttggcaagttgtttgagattaccccagagaaa

SEQ ID NO: 61153 - DNA, 270 bp, Glycine max
  Clone ID: 700758414H1
ggtcaagattgtgatgtctgggaatgcagcagtcaaaaggagtgattgggcctcattggtacaagtgtttttaacaaacagcaacagtacagagcattttgatgcatgtaagtggacaaaatcagaaccacattcctgggaattgatcttcccaatagaggtatgtggtcctaataatggttttgaaatgtggagttctgagtgggcaaatcaaacttcatggcatttgagtttccttattgacaatcccaaacagtctacagtttttga

SEQ ID NO: 61154 - DNA, 271 bp, Glycine max
  Clone ID: 700758422H1
actcgctcgacctagttagaactgtgctagggttttacgaaaccaccgaagttgcagaaagaagaagaaaaatggtggctgacaggagcaagaagccgaaggtctccgacaagggcgaaaacctcgatgaaatcgacggagaactcgtcctctccatcgagaagttgcaggagatccaagacgagcttgaaaagatcaacgaggaagccagtgacaaagttctggaaatagagcagaagtacaatgagatacggaagcccgtttatgataa

SEQ ID NO: 61155 - DNA, 267 bp, Glycine max
  Clone ID: 700758425H1
aaggtcgtcacactcgaagcatgataagagtagcccttcataccatagaatcagttccgatttgaagcctggaatggtgtttgttgtccctcccggtcatcccttcgtcaccatagcttccaataaagagaatctcctcatgatttgcttcgaggttaacgctcgagacaacaagaagtttacatttgcagggaaggacaacattgtgagttctctggacaacgttgctaaggagcttgcctttaactatccttctgagatggtgaa

SEQ ID NO: 61156 - DNA, 274 bp, Glycine max
  Clone ID: 700758436H1
atttggcgacactcttgaaaaaagaggttacttggattttgtgaggttgtcttgtagttggagtcatggcgggtgaggttgtgggatttgagatggttcaaggaccagtggagaatggtactgagggaggaaaacctgttttgaatgagaaggagaatggcaagctggaaaaagatgtgggagctgctgcggatgccatcaaatttgggacacatggagaggaatctgcaaaaaagaaagggaatgatgtttcagacgtgaatgccccgaaaga

SEQ ID NO: 61157 - DNA, 266 bp, Glycine max
  Clone ID: 700758441H1
ctcacttttttccactatgaaactctgaactgagaaataaataacattacaaaacgctaaaccctaatcttctgcaattcgtgtgcgtggaaaggttcgagaatggtttcgctggaggaatctcgctctaattcgagccgtttccccttggcgaggagttaccagtaccactcctcggtttcgtccaaaacgcagcgtcacatcggaaggtccatgcgcacgatacgctccagtttcttccaggacgacaacagcagcagctgctg

SEQ ID NO: 61158 - DNA, 262 bp, Glycine max
  Clone ID: 700758457H1
gtcatttaatccaaacccgtgttctgatgcgtggagtttggaatttctgaagcgtaccggatttcattgtgatatcatttgtgtcactggatggactgccactccaatgcaggatgttcaggttacaattgattggtttatttcctctcaggaatgtgttcccaggacctattgtgttttaaatccacaaaatccttttgtgttaaataggtggatggggaaactgactttcccccagggcacttcccgaagtgtcaaaaga

SEQ ID NO: 61159 - DNA, 265 bp, Glycine max
  Clone ID: 700758464H1
attttgtgttatgtattgtcttttaataaaaatagagtattggtataatgagctatgatttggagccatactagatcaggatttgtggtttgtttcatctgattgggaagtagtggttgtcttgtttcaaacttgatgggagacatgtatgtactaaatgataaaatgtaggggagttgtcagtagtttttcaatgacttccatttaaacaacatgaaattaaaattataaggaattaagcttctgtggctatgtactaagtttg

SEQ ID NO: 61160 - DNA, 272 bp, Glycine max
  unsure (1)..(272): unsure at all n locations
  Clone ID: 700758466H1
cattaacacactacgcgtgcnaagaacctctgctctcctcttgcttttgatagagaagaaagaagcgagaagatgtcagacgcgttctgcagcgactgcaagaggcagacggaggtggtgtttgaccactctgccggcgacacggtgtgctcggagtgcggcctcgtactggagtcccantctatcgacgagacctctgagtggcgtaccttcgccaacgagtccggtgacaacgatcccaatcgtgtcggcgggccctccaaccccctcct

SEQ ID NO: 61161 - DNA, 262 bp, Glycine max
  Clone ID: 700758479H1
aatcactggtccacctgttggatcggtatggcctgggcatccctatcggacctgggacaatgggtgctaggcctggattttttcacgatgacaagtcacagaaaaaagatgcaactcgtgacaatgactggacatgtccaaaatgtggcaatgtcaatttttcattcagaactgtctgcaacatgagaaagtgcaacacacccaaacctggatcacaggcctcaaagtcggacaaaaattctaagcaaaagatgcctgaggg

SEQ ID NO: 61162 - DNA, 259 bp, Glycine max
  Clone ID: 700758493H1
ggaatttactctccacattggaacttgaacgcgaacagtgtgatctatgtgactcgagggaaaggaagagttagagtggtgaactgccaagggaatgcagtgttcgacggtgagctaaggaggggacaattgctagtggtgccgcagaactttgtggtggctgagcaagggggagaacaaggattggaatacgtagtgttcaagacacaccacaacgccgtgagcagctacattaaggatgtgtttagggcaatccctt

SEQ ID NO: 61163 - DNA, 252 bp, Glycine max
  Clone ID: 700758509H1
gaaaaacccaaaaagattgatgccagattgagacaaagaatagatcctcaatacaatgaggttcaggctcagatggaaacaaatttgtttaaattgtctcttgatgatgttgaaactcctaaaggttccatgttggatctgaaaatttctcaatctaaaattgcacttcccaagaacacagttggaggaaccattctgcgtagtgatctattggcaaattttttgacagagggcaattttagagcaagtgtt

SEQ ID NO: 61164 - DNA, 252 bp, Glycine max
  Clone ID: 700758510H1
tcctcactgacctcaccatggcgaccagagccaagctttctttagctatcttccttttctttcttttagccttgatttcaaacctagccttgggcaaacttaaagaaaccgaggtcgaagaagatcccgagctcgtaacatgcaaacaccagtgccaacagcaacggcaatacactgagagtgacaagcgaacatgcttgcaacaatgtgacagtatgaagcaagagcgagagaaacaagtcgaagaggaaa

SEQ ID NO: 61165 - DNA, 252 bp, Glycine max
  Clone ID: 700758515H1
cgaagtctcatggtgcatatggtctcgtcaatgccatctacaaccctcaagccggtagcgtcacaaccgccaccagccttgacttcccagccctctcgtggctcagactcagtgctgagtttggatctctccgcaagaatgcaatgttcgtgccacactacaacctgaacgcgaacagcataatatacgcattgaatggacgggcattgatacaagtggtgaattgcaacggtgagagagtgtttgatggag

SEQ ID NO: 61166 - DNA, 244 bp, Glycine max
  Clone ID: 700758557H1
gttcaatatcctagtacaccgtattaaagaatttaagatatactatgatgagagcgcggttcccattactgttgctgggagttgttttcctggcatcagtttctgtctcatttggcattgcgtattgggaaaagcagaaccccagtcacaacaagtgcctccgaagttgcaatagcgagaaagactcctacaggaaccaagcatgccacgctcgttgcaacctccttaaggtggaggaagaaga

SEQ ID NO: 61167 - DNA, 212 bp, Glycine max
  unsure (1)..(212): unsure at all n locations
  Clone ID: 700758569H1
catagctgagctggaaaggaatgtacaagttttacaggcagaagggtctgnagtctcggccgagctcgagtttcttaaccagcagaatcttatcctgagtatggagaataaagcactcaagcaacgtttagaaaatatagcacaagagcagcttatcaaatatttggagcaggaagtactggaaagagagattggaagattacgtgcattgt

SEQ ID NO: 61168 - DNA, 189 bp, Glycine max
  Clone ID: 700758634H1
catctgtatcagaacctagaaatgctcaactcgaagcaccggaactctcacaggctgataagaaatatcaaccatcatcccaggccattgacaaacctgcagatgatggctacaactggcgtaagtatgggcagaagcaggttaagggtatgagtatccacgaagctattacaagtgcacacatctgaa

SEQ ID NO: 61169 - DNA, 302 bp, Glycine max
  Clone ID: 700758708H1
gttgggtttacaaggagcaggtaaagcttttccaaacaaaattgtttttgatgataagcttgtgttggctaacacacaagaattctttgatggaaattttccagtggattcttggttaccaatttttgtgaattgtctttatcctgtaagtcaattaccttcagaagctgttgttgtaaatgttacatgtggtagtggacgtggtggtttacccaccactgcttggattagttctgcagttaacaatcgctcctcagatatcaacaaaaagattcgcacagcacttgggaaaggtaagaaaa

SEQ ID NO: 61170 - DNA, 302 bp, Glycine max
  Clone ID: 700758736H1
ccaacttcaaccttgttcggcatgtctcatttttctcctccattgtcaccaccttctccttcttccccttctaggtttgagaccaaccatcatcatggtgttgtgaaatataataaggatgtgctctctgagcttatgtgttccatggagggtttgaattttggtgaggcttcacttttgtctgctgcttctaagcctcacaacaatttgtcttcttggcttgatgtttctgaggatcacaatcaaaaacagttcagtactctttcaccaaccatcactgcttgtggaagcttttccaacaa

SEQ ID NO: 61171 - DNA, 297 bp, Glycine max
  Clone ID: 700758739H1
atggaagaacagtaagcattaagattcttcctgttggtattcatataggtcagctccaatctgtcatgagtcatcccgagacagaaagcaaggttgcagagttaaaaaaacagttcagagatcaaactgtgctgctcggggtggatgacatggatatcttcaaaggaatcagcttaaaacttttggccatggaacaattgcttttacaacatcctgataagaggggcagagttgttctggtccaaattgctaaccctgcaagaggccgtggaaaggatgtgcaggaggtacaaagtg

SEQ ID NO: 61172 - DNA, 301 bp, Glycine max
  Clone ID: 700758751H1
ctagattgtggggtttctcttttcagttctcatcgtaactaccatagttgctgctccgaaaagggttttcctaacaccgcccatgcaatcaatttccgggttgtacaattcgtgaataggttgttgcttgttctgaaaagtagtggatagtaaaaaatattgaactttttttgagagaaaaatgcagagtaaagaagctgttgtggaagatggggaaataaagagtgtgactgctgtagggtctgaaattgatgggtggaccaattttggggacgatgacataatgcagcagcagtataca

SEQ ID NO: 61173 - DNA, 298 bp, Glycine max
  Clone ID: 700758752H1
gagagattcaggaaaaagttgtattgaaattttcacaagaggaatttcttacagcttggtcaacccaggtgcgtcctgcaacaactctgttggctgatgggtgtccatatttgtatgctatggtgcatgatagttcagtgtctacaataccaggtgattttgtcattggtgttaagttgacaaccataaacaatatgtgtgcatatgggctcaatcctggtatttcaggttctcgtcttttgggcaccattcctcagtccatttcacagcaaactgtttggaatcaaatggcaacagt

SEQ ID NO: 61174 - DNA, 311 bp, Glycine max
  Clone ID: 700758784H1
ggtcgatggaacaatgtaggcaagggaagtcggcaaaatggatccgtaacctcgggaaaaggattggctctgagggctgggcacgggggtcccagtcccgaacccgtcggctgtcggtggactgctcgagctgcttccgcggcgagagcgggtcgtcgcgtgccggtcgggggacggattgggaacgggcccttcggggcctcttccccgggcgtcgaacagtcaactcagaactggtacggacaaggggaatccgactgtttaattaaaacaaagcattgcgatggtccctgcggatgttgacgcaatgt

SEQ ID NO: 61175 - DNA, 283 bp, Glycine max
  Clone ID: 700758806H1
agtccatagtccatacacattactcaactcatcctttctggttctggttcaacacagcacaccatttctaatgctgtaaaatttgtaccatgcagcaaggggctctgcttctgcttttgtgcttggtctctctgttccccctcactcactatgcctgactttcttgccacaaacccacttaccttttcagctgcagaatctccaagattccccttcctcaattcacgcccaactcttacaccaagaacccaactcaacccaaattcccgtgtcctcttttctc

SEQ ID NO: 61176 - DNA, 283 bp, Glycine max
  Clone ID: 700758807H1
caccgatcgaaaagtttccttgacaatctaattctgcaaaaatggcaagcaataaggagtctaagttcccagcacagagccagaaaactcagccaggaaaagaacatgtaatgaatccactcccacaagccacaaatcctgatcacaaggccgccaataaactccagggaaaggtggcgttggtgacaggaggtgactcaggaattggcagagcggtttgcctgtgtttcgcaaaagagggtgcaaccgtggcctttacatacgtaaagggccatgaggacag

SEQ ID NO: 61177 - DNA, 282 bp, Glycine max
  Clone ID: 700758808H1
aagaagatgggtttgaagaacaacatggtggtgctaaaggtgtgtttggtgctacttttccttgtggggggtactactagtgccagcttgaggctgagtgagcttggcctgctcatgaaaagtgatcatcatcaacactcaaatgatgatgactcttcaaaaccatgctgtgatcaatgcgcatgcacaaagtcaaaccctcctcaatgccgctgttcagatatgaggctgaattcgtgccattcagcttgcaaatcttgtatttgcgcattatcgtatcct

SEQ ID NO: 61178 - DNA, 281 bp, Glycine max
  Clone ID: 700758812H1
cacatagtagctattatactctctagagtaattgcggaatctgctagaattttctaataatggcgaaagacgttgagcaggtcacagagcaaggtgaatactccgcgaaggactaccatgaccctcctccggcaccgttgatcgacccagatgagctcacaaagtggtccttgtacagagccgccatagctgagttcatagcaacactcctttttctttacatcaccgtgttgaccattattggctacaagagacagagtgacaccaaaatccccggtaac

SEQ ID NO: 61179 - DNA, 278 bp, Glycine max
  Clone ID: 700758826H1
caaaagaaggtgctttggccgaagaaaacatgagagccatttgctttgaagtatgtgatgttgttctgcacgctgatgctatccacagaggaggtggtcaaatcatccctactgccaggagagtcttctatgcttcccagattactgccaaacccaggcttcttgagcctgtctacctggttgaaatccaggctcctgagcaagctcttggtggaatctacagtgttcttaaccagaaacgtggacatgtgttcgaggaaatgcagaggcctggtacc

SEQ ID NO: 61180 - DNA, 283 bp, Glycine max
  Clone ID: 700758831H1
tgggaatgcagcagtcaaaaggagtgattgggcctcattggtacaagtgtttttaacaaacagcaacagtacagagcattttgatgcatgtaagtggacaaaatcagaaccacattcctgggaattgatcttcccaatagaggtatgtggtcctaataatggttttgaaatgtggagttctgagtgggcaaatcaaacttcatggcatttgagtttccttattgacaatcccaaacagtctacagtttttgatattctcttgggaatctctcaagattttgaa

SEQ ID NO: 61181 - DNA, 81 bp, Glycine max
  Clone ID: 700758850H1
ttaactaacaaccttgatatccccaagttatccgcatgttgaaaaaaagtttatatattaatcatatttcttccgtatttc

SEQ ID NO: 61182 - DNA, 275 bp, Glycine max
  Clone ID: 700758855H1
agaagatctctggagatgctttgaaagatctatacaagtcatttgtgacagagtatccaattgtttcaattgaggatccttttgaccaggatgactgggagcactatgctaagcttactgctgaggttggaaccaatgtacaaattgttggtgatgatctcttggttaccaaccccaagagggttcagaaggcaattgatacaaaagcatgcaatgctcttctccttaaggtcaaccaaattggttctgtgactgagagtattgaagctgtcagg

SEQ ID NO: 61183 - DNA, 272 bp, Glycine max
  Clone ID: 700758859H1
atcaccctttaactttgtgtggacaataaacaaatgtcatgggcgtttctgtctttcaactcagatattagtgtttctttaatatatcgccaatgttgtcatattcttatgttctgtttttaaaaccccttttgttcttagcttaagcgagagtggagtgtgtagcttactagcttgtgtatgtagtctctagatttggtaattgatttgaaatacacaatttcatttgtatcaacgatcttgttcatgtatcttatgtaaactgtgctatt

SEQ ID NO: 61184 - DNA, 281 bp, Glycine max
  Clone ID: 700758864H1
gcaagatggcagaaatgatcaacagtctttgtggtggtgatgaaaaactgatgcgtgaaaggacacacctgctgttggcttgttgttcaaggatggcaatttgtaagaaagatgtttggagagttgaatgtggaatcccttctggatttccgctcacagttatttgcaatagcatttttaatgagatgctcattagatatagctatgaaaaattactgcgccaggctaaagctccaagtatgtttttacaatccttcaaaaattttgtttctttgtgtgtg

SEQ ID NO: 61185 - DNA, 272 bp, Glycine max
  Clone ID: 700758894H1
catagggacgcttggtgaattgtactttcattgttttgcctggatgaaggtcttctttatagaaggatatagttttgaagagatatgcatcaagaaagaagcgtttgagggagaagagaagttttgtgcaaaatccttgggaacagtaattggttttgccatttcaaagctgggaaagaacattcaagtactttcaagttcctttgtcaataagcaagagcaatacactgtggaaggagtgcagaatcttggagacaaagcagtgatgtgtc

SEQ ID NO: 61186 - DNA, 246 bp, Glycine max
  Clone ID: 700758903H1
cctgtatctaatattagtgcaggggaaaatcatgtagttcaaatacccttaatggcacaggaggaaattctgtcttctagtgcaagtgatttcagagctgcaatggtgagtaaaaatagcaaacctcaagctactgcaatgcatgtgggagctatagaaattatcattgatagtttcgcaagtcctgattgcaacatagttggtgcaatgcttttggttgatacttatcataccaatcctgaaaat

SEQ ID NO: 61187 - DNA, 241 bp, Glycine max
  Clone ID: 700758925H1
ctttccttagttcaatatggggaagcccttcttcactctctctctttcttccctttgcttgctactcttgtcgagtgcatgctttgctattacctccagcaagttcaacgagtgccaactcaacaacctcaacgcgttggaacccgaccaccgcgttgagtccgaaggtggtcttattgaaacatggaactctcaacaccctgagctgcaatgcgccggtgtcactgtttccaaacgcacc

SEQ ID NO: 61188 - DNA, 122 bp, Glycine max
  Clone ID: 700758952H1
gcgtcaatgcccgccgtggagccgtcaccggagcctccagcgtctgatctcgtgtttggcgacttctcctccaacttcaacgccttcctcatcccctccatggactcgctcttccacacaac

SEQ ID NO: 61189 - DNA, 237 bp, Glycine max
  Clone ID: 700758957H1
gcagattgtgattttctcaagagaaactttaagcagatgtctaatgttttgtgggtagctcctgaggacaaggcgagtttatggtcacaacttcattatgtttcgtgtaataatctggaaatgcaagaagcttatcttgtcaatctcgtaaatgtgttacgagaattgtatttgcacagtccagaggaagctcgccaattgagaaggaaagctctctctcgtattgaatggctgcaa

SEQ ID NO: 61190 - DNA, 233 bp, Glycine max
  Clone ID: 700758977H1
agaagccacagctgcaacggctgcaggtttggaggtgataatttctattcgacctggaaatggacccctccctgacaatcatggcttcaagacaatcaaatccttctcggagatctaagaccaattgcagtcttctggaatgacattaaatgtgttatcattactaagaatagtgtaacgttcacttcttaattaaaataatgtaattaaaaaaaattaaaataatgtaatgt

SEQ ID NO: 61191 - DNA, 231 bp, Glycine max
  Clone ID: 700758991H1
tcttgttctacaatgaaaagcctctgccttgggccgtttcttgctgctagtgccccagttggtagaagagcctatggaggccacttaagcagaaagtgctttcaaaagcaacttcacttccactcacgttgtgttgctttctcttcattcatatgttctgcaactatatcagtgatgccagaattagaagagaagcaagtgtttgatggagagaaggctaatttgctagtt

SEQ ID NO: 61192 - DNA, 231 bp, Glycine max
  Clone ID: 700758995H1
gtgcggtttcctttgttggtgttgctgggaactgttttcctggcatcagtttgtgtctcattaaaggtgagagaggatgagaataaccctttctacttgagaagctctaacagcttccaaactctctttgagaaccaaaacggtcgcattcgtctcctccagagattcaacaaacgctccccacaacttgagaaccttcgagactaccggattgtccagtttcagtcaaaa

SEQ ID NO: 61193 - DNA, 246 bp, Glycine max
  Clone ID: 700759104H1
gttcaatatcctagtataccttaataaataatttaagatactatgatgagagcacggttcccattactgttgctgggacttgttttcctggcttcagtttctgtctcatttggcattgcttactgggaaaaagagaaccccaaacacaacaagtgtctccagagttgcaatagcgagagagactcgtacaggaaccaagcatgccacgctcgttgcaacctccttaaggtggagaaagaagaatgt

SEQ ID NO: 61194 - DNA, 247 bp, Glycine max
  Clone ID: 700759109H1
tgttaagtaatttcgaaaggcttctgttccttcctatatataaaaccagcctcttgtatctatttgcggaaaacaccctagtttttctcagttgaacctcgatcgcacaccagagagaaaagaaagaataatgccaccttcttactgcgtgaaggagagaaaaccatgtgtgagatgggtcgagaaatatttcaaagattgcctttgcaatttgaaagatgaaatctcgttcagcttcggcctcaca

SEQ ID NO: 61195 - DNA, 248 bp, Glycine max
  Clone ID: 700759115H1
aattttcacaagaggaatttcttacagcttggtcaactcaggtgcgtcctgcaacaactctgttggctgatgggtgcccatatttgtatgctatggtgcatgatagttcagtgtctacaataccaggtgattttgtcattggtgttaagttgacaaccataaacaatatgtgtgcatatgggctcaatcctggtatttcaggttctcgtcttttgggcaccattcctcagtccatttcacagcaaact

SEQ ID NO: 61196 - DNA, 242 bp, Glycine max
  Clone ID: 700759139H1
tcttcatccttctctgttctcctagaacttgattacttgaacattccctatgacagatgaggtggttcttctggatttctggccaagtccatttgggatgagggtcaggattgcacttgctgaaaagggtatcgaatatgagtacaaagaagaggacttgaggaacaagagtcctcttctcttacaaatgaacccggttcacaagaagattccggttctcatccacaatggcaaacccattt

SEQ ID NO: 61197 - DNA, 244 bp, Glycine max
  Clone ID: 700759151H1
gaccaggaccaggacgaggacgaagatgaagatgaagatcaacctcgcaagagccgcgaatggagatcgaaaaagacacaacccagaagacctagacaagaagaaccacgtgaaagaggatgcgagacaagaaacggggttgaggaaaatatctgcaccttgaagcttcacgagaacattgctcgcccttcacgcgctgacttctacaaccctaaagctggtcgcattagtaccctcaacagcc

SEQ ID NO: 61198 - DNA, 241 bp, Glycine max
  Clone ID: 700759176H1
gccagatccaaaagctgaatgccctcaaaccggataaccgtatagagtcggaaggtgggttcattgagacctggaaccctaacaacaagccattccagtgtgccggtgttgccctctctcgctgcacccttaaccgcaatgcccttcgtagaccttcctacaccaacggtccccaggaaatctacatacaacaaggtaatggtatttttggcatgatattcccgggttgtcctagcactta

SEQ ID NO: 61199 - DNA, 268 bp, Glycine max
  Clone ID: 700759308H1
agaagagtgaaactgtggaagcagttgcagaccgagctagctagctagcaagcaagcacagagatggaggcaaagcgaggccatgccctcatgtgcttggcacgtgtttcactcttcctctgcgctctaaccctatccgctgctcacggaagcaccacggttcaagacatcgcgagaaagttgaaactcggggacaacgagcttctgcgcacggagaagaagttcaaggttttcatggagaattacgggaggagctactccacagagg

SEQ ID NO: 61200 - DNA, 269 bp, Glycine max
  Clone ID: 700759317H1
cactcttcactcaaaactcttgtctttcattttgataattcccacactatggctgagcttcactaccaacaacaacaccaataccctcaccgataccctaatgatccatacgaacaacaaactagctactccactcaggtcgtcaaggcggccaccgccgtcaccgcgggcggctccctcttgatcctcgcctcgttgatccttgccggcaccatcatcgccctcaccatcgtcacaccaccgctcgtcatcttcagtccggttctcgt

SEQ ID NO: 61201 - DNA, 267 bp, Glycine max
  Clone ID: 700759318H1
ctccagcttcgttcgccaactcaacacctatggtttcagaaaggtggatccggatcggtgggagttcgcgaacgagtggttcctgcgaggacaaaagcacttattgaggaacatcgtgcggaagaagcacggtggagctgggaggaccaattccaattcgcattattcgcatcccttgaagctggaggagttggacgacgaggctatggtgatggagatagcgaggttgaaggaggagcaaaaagcgttggaggaagagcttcatga

SEQ ID NO: 61202 - DNA, 269 bp, Glycine max
  Clone ID: 700759333H1
cgaccaagcaaggtggaaaagctaagcctttgaagaaacccaagtctgataagaaggattacgacgaggttgacatggctaacattcagaagaaaaaggaagaggagaaggcgctaaaggagttgaaagccaaggcgcaacagaagggaagctttggaggttctgggctcaagaaaagtggaaagaaataagggctctttatcatgattgtatacatccaatattgagccctgtagtttattaccatgataacttctgtcttattgtgg

SEQ ID NO: 61203 - DNA, 261 bp, Glycine max
  Clone ID: 700759357H1
gtgagagatggatcagtttttgtggagggtgttgcctttgcttacaatccttgtttcctttggagtgttcttctacttgcaggattcttacacagcacagttatttcctctcataaagttaccgcgggataagtgcagccttcttccccatcgccacttctggatatccagcaaacgtattgtgaccccacaagggatcatttctggttcagtggagataaatgatgggaaaataatatctgtcgttgagggacatgctat

SEQ ID NO: 61204 - DNA, 257 bp, Glycine max
  Clone ID: 700759389H1
aagtgcgtaaatatttaacgacactggctggggtggggaattgaagcgagtcagcgactaagttgacgttgacttgacgttgacgttgacgtttgagccagtcgagttgtgccctaattcagaaagaattgaattccgggaaggaagttctgaatttctcattgaaggaacgcaaaatcataaaatcaaatacagtaccaaaaaagaataaatttttggtttggtggaaagagaaagaaaagaagggatcatcatga

SEQ ID NO: 61205 - DNA, 254 bp, Glycine max
  Clone ID: 700759394H1
aaatgctgttctttcaatgtggagatattttgttggagatctcgtctttgaagtttctaagatgacttctccctacattaaatgtacagtctctttcttcatagcatttggaaatttggctgatgacaccatcaattttgaggcttttccccacaagctggtacagtttggagagattcaggaaaaagttgtattgaaattttcacaagaggaatttcttacagcttggtcaacccaggtgcgtcctgcaacaa

SEQ ID NO: 61206 - DNA, 118 bp, Glycine max
  Clone ID: 700759417H1
gctaactgttgataccaaagacctaggagatagcaataatagtgggttagaggatgtaaagggttcaacaaggcacactgctacatctgtaattgctggtaaaagatcttctactagt

SEQ ID NO: 61207 - DNA, 261 bp, Glycine max
  Clone ID: 700759431H1
aagagccgcaagaatctcagcaacgaggacgaagccagaggccccaagaccgtcaccaaaaggtacatcgcttcagagagggtgatttgatcgcagtgcctactggtgttgcatggtggatgtacaacaatgaaacactcctgttgttgccgtttctattattgacaccaacagcttggagaaccagctcgaccagatgcctaggagattctatcttgctgggaaccaagagcaagagtttctaaaatatcagcagcagca

SEQ ID NO: 61208 - DNA, 112 bp, Glycine max
  Clone ID: 700759465H1
aaaatgtcttattcttcttcagcttttccttctgtggtctcaaaatgcaccgttgtccctcaccggaactcaactatgggagacctcaagctctctatctccgaccttaaca

SEQ ID NO: 61209 - DNA, 120 bp, Glycine max
  Clone ID: 700759472H1
caattgtaggagcatcagcacaaggggcagtgaaggcaacagaggtgttggagaatgtgggagaaagggctaaggagacagtggacacagctttggatgcagcaaagaagactacagagg

SEQ ID NO: 61210 - DNA, 252 bp, Glycine max
  Clone ID: 700759474H1
ggagcatgatatggccattgaaaaaattgaaaagttagagggaaagttgcaggatcagacaaatgaaaatcttcggctgaaagaaattcaaggaaagagatactggagctccaaagatcaaagcaaagcgacagagtccaaaccatcaatgacagcaactacaacatttctcatcctatactctcactgaactccaactacaacgggagtggaatctctcttcaggatcttataatgtgcaaagatatttgg

SEQ ID NO: 61211 - DNA, 248 bp, Glycine max
  Clone ID: 700759489H1
ctccagactcagccagtgccacgtggaagttaaagcagattatctggaagatatggttattatatggtggggttaaaattgcagccatggttccagttttgtcgtgttcctttatattacaggaattgttgataaatgtggttgatgcagccacaattgtagtcgtggacaacaaaaccttgacattgcagtcatggttgtggactgttctctaaaaccttgttgtatgtggaattgaaagaatagac

SEQ ID NO: 61212 - DNA, 260 bp, Glycine max
  Clone ID: 700759518H1
gcccagagaatcccagctggaaccacttactatttggttaaccctcacgaccaccagaatctcaaaataatcaaacttgccatacccgtcaacaaacctggcagatatgatgatttcttcttatctagcactcaagcccaacagtcctacttgcaaggcttcagccataatattctagagacctccttccatagcgaattcgaggagataaacagggttttgtttggagaggaagaggagcagaggcagcaagagggagt

SEQ ID NO: 61213 - DNA, 258 bp, Glycine max
  Clone ID: 700759524H1
cgagagttctaaagcctctccctgcaggtgttgaaatcgatgaactccctaagcaaattgatgatacacagtacccaaaaacattcttctataaagaagaccttcatccaggcaaaacaatgaaagtacaattcaccaagcgtccctatgcacaaccttatggtgtatatacatggttaacggatattaaagacacctctaaagaaggatatagttttgaagagatatgcatcaagaaagaagcgtttgagggagaag

SEQ ID NO: 61214 - DNA, 252 bp, Glycine max
  Clone ID: 700759552H1
ttgggaatctttttcctaacattgagacaaacttatgttaagggtaaggcaagttccatggcagcaccagcccttagccctgaaccaggatgggaggttcttgatgcatgtgcagcaccgggaaacaaaactgttcaccttgctgcccttatgaagagaaagggtaagattatagcatgtgagctgcaaagagaaaggattaagcgtttgaaagacactataaagctatctggtgcttctaacatacaagtc

SEQ ID NO: 61215 - DNA, 251 bp, Glycine max
  Clone ID: 700759559H1
caacatcaagggaaagtgaaaaagaaaggtatatttgatcagggatatggcaactcgaagatatgagtttggaaggatgaatgaggctagccacccagactccatcagagctgccttggctgaattcctctccacttgcatctttgtctttgctggagaaggctctgcccttgctttgcgacaaatttacaaggaaccagggtcatcagcgggtgagctagtggtaattgcactagctcatgcatttgctc

SEQ ID NO: 61216 - DNA, 246 bp, Glycine max
  Clone ID: 700759592H1
agccccccaaaaatgaagagcaccatcttctttgctctctttctcttttgtgccttcaccacctcatacctaccttcagccatcgctgatttcgtgctcgataatgaaggtaaccctcttgaaaatggtggcacatattatatcttgtcagacataacagcatttggtggaataagagcagccccaacgggaaatgaaagatgccctctcactgtggtgcaatctcgcaatgagctcgacaaaggg

SEQ ID NO: 61217 - DNA, 279 bp, Glycine max
  Clone ID: 700759602H1
cctcttcatatacagtacacacttcagctggtggtagcctggtagatagtgtgcttccaaaatgaagaacaaaaggaagactttactattgctgctgctcatggctgcaactctcttttgcatgccaattgtgtcgtatgctgtttctaatgtcaacattcaagaccatctcaccaatatttctgagctggtaaaaggtccaaatagaaggcttttgtcatttgtggattgtggagagaggtgcagggtgaggtgcagtttgcactcaaggccaaagat

SEQ ID NO: 61218 - DNA, 268 bp, Glycine max
  Clone ID: 700759624H1
ttaattattaacacttccttagttcaatatggggaagcccttcactctctctctttcttccctttgcttgctactcttgtcgagtgcatgctttgctattagctccagcaagctcaacgagtgccaactcaacaacctcaacgcgttggaacccgaccaccgcgttgagtccgaaggtggtttgattcaaacatggaactctcaacaccctgagctgaaatgcgccggtgtcactgtttccaaactcaccctcaaccgcaatggcctc

SEQ ID NO: 61219 - DNA, 258 bp, Glycine max
  unsure (1)..(258): unsure at all n locations
  Clone ID: 700759634H1
agngaacttcaagagggatgaccctcaggattgatnctatcccttctacatcactggatggcatcaaggagtggcttgacacaacagacatcaaatattatgagagcaggctgaatctgaactggcgtcagatcctgaagacaatcacggatgaccctcagagctttattgaaggtggtggttgggagtttctgaatttggaagctactgattcagaatctgagaactcagaggagtcagataaaggttacgaaccat

SEQ ID NO: 61220 - DNA, 275 bp, Glycine max
  Clone ID: 700759649H1
ttgctagaatggaatttcgatgctcagtcatctcttttaccattctcttctctcttgctcttgcaggagagagccatgtccatgcatcgctacctgaggaagattattgggaagctgtttggccaaacactcccattcccactgcactgcgagagcttctaaagcctctccctgcaggtgttgaaatcgatgaactccctaagcaaattgatgatacacagtacccaaaaacattcttctataaagaagaccttcatccaggcaaaacaatgaaa

SEQ ID NO: 61221 - DNA, 269 bp, Glycine max
  Clone ID: 700759651H1
agaaagtcttccatagccccccaaaaatgaagagcaccatcttctttgctctctttctcttttgtgccttcaccacctcatacctaccttcagccatcgctgatttcgtgctcgataatgaaggtaaccctcttgaaaatggtggcacatattatatcttgtcagacataacagcatttggtggaataagagcagccccaacgggaaatgaaagatgccctctcactgtggtgcaatctcgcaatgagctcgacaaagggattggaaca

SEQ ID NO: 61222 - DNA, 266 bp, Glycine max
  Clone ID: 700759662H1
gcaaagcaatggctacttcaaagttgaaaacccagaatgtggttgtatctctctccctaaccttaaccttggtactggtgctactgaccagcaaggcaaactcagcggaaactgtttctttcagctggaacaagttcgtgccgaagcaaccaaacatgatcctccaaggagacgctattgtgacctcctcgggaaagttacaactcaataaggttgacgaaaacggcaccccaaaaccctcgtctcttggtcgcgccctctactcc

SEQ ID NO: 61223 - DNA, 269 bp, Glycine max
  Clone ID: 700759675H1
catgactcatgagttcagtcttttagctaatctaaatgcattggagtatttgttaaaaaaacataggtttgagccaagcttcttgatagaagactaatagacatttatgaggctatggatgactacctattttctttattttttttccctttaataggcaaggagattcatatatcatcaatgggacaaaatggtggacaagtggtgctatggatccaagatgtagaattctgatagtcatggggaaaactgacttcaatgcagtgaag

SEQ ID NO: 61224 - DNA, 270 bp, Glycine max
  Clone ID: 700759681H1
ctagttcaatatcctagtataccttaataaataatttaagatactatgatgagagcacggttcccattactgttgctgggacttgttttcctggcttcagtttctgtctcatttggcattgcttactgggaaaaagagaaccccaaacacaacaagtgtctccagagttgcaatagcgagagagactcgtacaggaaccaagcatgccacgctcgttgcaacctccttaaggtggagaaagaagaatgtgaagaaggtgaaattccacga

SEQ ID NO: 61225 - DNA, 260 bp, Glycine max
  Clone ID: 700759715H1
acttaattagtgttcatgaatatgtcaagccttactttagtggttctaaattgaaaagctttctagctggtcataatatcaccattactgatggtattgacaaaactagtgcaactttgcaatttagaaagttagcagattgtgattttctcaagagaaactttaggcagatgtctaatgttttgtgggtggctcctgaggacaaggcgagtttatggtcacaacttcattatgtttcatgtaataatctggaaatgcaa

SEQ ID NO: 61226 - DNA, 260 bp, Glycine max
  Clone ID: 700759743H1
gttcaaggagtactaattccttcgattatgaaccattctacttgagaggctcccaaatctcttccaacaactttggaaagttctatgagatcacccctgagaagaacccccagcttcgggactttgatatcctcctcaatactgtggatatcaacgagggaggtcttcttctgccacactacaattcaaaggccatagtgatactaatggttactgaaggagaagcaaacattgaactcgttggcctaaaagaacagcaa

SEQ ID NO: 61227 - DNA, 190 bp, Glycine max
  Clone ID: 700759806H1
taagatttgaaattttgataaaccgcgatcacaggttgccgcaccttaaaaccggaaacaaaagcaatcgttacttgatttcaagaatctctcaatttcttcctacttctttgtgtacgatttcttaagggaaagaaaatcactctctgtgctggccacagacttcgtgaatcattttcttttccacaca

SEQ ID NO: 61228 - DNA, 270 bp, Glycine max
  Clone ID: 700759853H1
gcattcacaacttcaagtgtgcttgaggcccaaagtagaaagcccaacagatatgaagtttcccaatacagatatcgcaatgtgccaataaagcgcagagcatgggttgaaggccagatgtctttcgatcagtctgtagtagcaattatgtctaaatgcaaagccagcatgagaatgggaaacactgatgctcaaattttgatggttccagggcgcagattcatagctcatggacattttttcaaaaatctgactcagaaagtgcgagtc

SEQ ID NO: 61229 - DNA, 265 bp, Glycine max
  Clone ID: 700759894H1
ggacgaaacaagccttcttttcagagttagggaaaccatcattgcctgcaattggcaccactacaaaggccaaggaaagcactgatcgggtagaagatgaacaacctgcttgggctccattacgagataactatatgctgacaagttcaaaactaaaggattgggacaaaatgcctgataaaaatgtatcagatgacatgggaaaaacttctgaagatagtagttcagatgaagattagtattttagaactcaagcaagcagaat

SEQ ID NO: 61230 - DNA, 119 bp, Glycine max
  Clone ID: 700759970H1
aaaggagtgattgggcctcattggtacaagtgtttttaacaaacagcaacagtacagagcattttgatgcatgtaagtggacaaaatcggaaccacattcctgggaattgatcttccca

SEQ ID NO: 61231 - DNA, 283 bp, Glycine max
  Clone ID: 700760109H1
gaagaggggtgccctgctttctctttgatcaacaaggccactggtgaagccttgaagcactccatcggtgccactcatcctgttcggctgataccttacaagcccgactatcttgatgagtctattctatggactgaaagccgtgacttaggagatggccacagagctataaggatggtcaacaatgttcatcttaatgtggatgcttttcacggtgacaagaattctggaggtgttcgtgatggcactacaatagtcctctgggactggaacaaaggtgata

SEQ ID NO: 61232 - DNA, 284 bp, Glycine max
  Clone ID: 700760112H1
atcttgcaacgattaacaatggcttcaaccgacaagtcaccggacccaacgccggcgaagggtccggatccaactccggggaagccgatgagtgttggtcagcacgtgatcgacaagagtgcaatgatggtgcagtcgctggaccccattaagcagatgagtcagcacgtgtgctccttcgctatctacagccatgacatgtctcgccagatagagacacatcactactgctccagactccaccagaacttcatacaatgtgctgtctatgattccgatgaatc

SEQ ID NO: 61233 - DNA, 282 bp, Glycine max
  Clone ID: 700760126H1
acggtttccttctaaagcacaacactaaagttcagcaatcagtactctcaagaagaaaattacaagatcatcatcacaataacaatatgagttcaggaattagagcatggagtgtggcaactagcgttggagttgtggaggccttaaaagaccaaggtatatgtaggtggaatcatgctttaagatcagctcaacaccatctcaaaaaccatgttggttcattctctcaggctaacaagctttcttcttctgctatgagctccacaacactaaaacatggga

SEQ ID NO: 61234 - DNA, 192 bp, Glycine max
  unsure (1)..(192): unsure at all n locations
  Clone ID: 700760129H1
anttgnaaagtttgatagancgcgatcanatgttgccgcaccttaaaaccngagacaaaagnantcgntacttgntttcaagagtctcgcnatttcttcctacttntttgtgtacnatttcntaaaggggnngaaaatcantgctctgtgctggccacaganttcgtggatcatttnctgttcnacacnana

SEQ ID NO: 61235 - DNA, 271 bp, Glycine max
  Clone ID: 700760191H1
caaacccgtgttctgatgcatggagtttggaattttttgaagcgtaccggatttcactgtgatatcatttgtgtcactggatggactgccaccccaatgcaggatgttcaggttacaattgattggtttatttcctctcaggaatgtgttcccaggacttattgtgttttaaatccacaaaatccttttgtgttaaataggtggatggggaaactgactttcccccagggcacttcccgaaatgttaagagaatgcctctttctatagggg

SEQ ID NO: 61236 - DNA, 272 bp, Glycine max
  Clone ID: 700760192H1
accattcctcagtccatttcacagcaaactgtttggaatcaaatggcaacagtgagaacaccattgaattttgattctagcaagcagagcttttgtcaattctctattgatcttcttggtggaggaattttagtggacaaaactggagattggatcacacttatacaaaattctccaattagtaacttgttgagagttgctgcttggaagaaaggctgtttaatggttaagattgtgatgtctgggaatgcagcagtcaaaaggagtgattg

SEQ ID NO: 61237 - DNA, 276 bp, Glycine max
  Clone ID: 700760194H1
attccatccgaatttgaataaaaaacaaaagaaaagaaaggtgacatggcaaagtgataataatagctttcttctccgtctcaattcatctcttctctgagtctcaacctaattccccaatcaatcatctttacgtgtttgttcgagaccatggccaaaagccccttcaagcttgaacatcccttggaaagaaggcaggctgagtctgctcgcattagagacaagtatcctgatagaatacctgtgattgttgagaaagctgaaagaagtgacatc

SEQ ID NO: 61238 - DNA, 119 bp, Glycine max
  Clone ID: 700760290H1
ggagaaccagctcgaccagatgcctaggagattctatcttgctgggaaccaagagcaagagtttctaaaatatcagcaagagcaaggaggtcatcaaagccagaaaggaaagcatcagc

SEQ ID NO: 61239 - DNA, 56 bp, Glycine max
  Clone ID: 700760355H1
tattttattcacttaaataaagcgcattactatgtgcaatgagtgtgtttaaatat

SEQ ID NO: 61240 - DNA, 270 bp, Glycine max
  Clone ID: 700760404H1
caataaatgatgagggaatgccacaacacaataggccattcatgaagggtcgcctttacatccagtttaatgttgatttcccagactcagggtttctttcccctgaccaatgccagttactggaaaaggtgttacctcaaaagagcagcaagcatgtgtcagacatggagctggatgattgtgaggagaccactttgcatgatgtcaactttaaggaggagatgagacgaaagcagcaacagcaatatcgcgaggcatatgatgaagatg

SEQ ID NO: 61241 - DNA, 267 bp, Glycine max
  Clone ID: 700760422H1
gaactgagaaagaaacagaagaagtttaatttcaagttcaagctggtgaaatcttggattagtgctctcactcttctatctggtataggacttcgtgggtagacttttccatttctctcctttctttcactctcttcttctcactgatccgcattgccgttcaaagtggtcttatttgaaaaacacttgggcgttggtgcaaatgtttgcttcgttaattttctctggagacgacaggctcactgagaaaacaatttttacttgcag

SEQ ID NO: 61242 - DNA, 269 bp, Glycine max
  unsure (1)..(269): unsure at all n locations
  Clone ID: 700760424H1
tcaatttccaatttccttaatcttgttgtgttgatgtacatggagagaattagagtgaaggaggaagaagcagtgacatgtggtggtggtnnnnnnnnnnnnnnnnnnnnnnnnnnnagcttttctccacagcctatggaagggttgcacgaggtgggtccccctccgtttctgagcaagatctttgacatggtanaagattcttccacggactccattgtgnccatggagcatggctcgcaacagctttgtggtgtgggattctcaca

SEQ ID NO: 61243 - DNA, 264 bp, Glycine max
  Clone ID: 700760441H1
aaataattaattaaattcctcgtggaatcttgttgaagccatgtctacagctggtcaggtcatcaagtgcagagctgcggtggcatgggaagcagggaagccactatcgatagaaaccatagaagtggcaccaccccagaaaggtgaagtgcgtttgaagatcctcttcaactccctttgccgtacagatgtttactggtgggatgctaagggccagactccgctgtttcctcgtatcttaggccacgaagcttcggggattgt

SEQ ID NO: 61244 - DNA, 259 bp, Glycine max
  Clone ID: 700760480H1
gggagtttcttcttggatcttaccctcttgtttgctaatattctcattcttctgtctctgcttcttctccttctgaactaagagatggggttgtctttcaccaagctttttagccggctctttgctaagaaagagatgcgtattctcatggtaggtcttgatgctgctggtaagactaccatcttgtacaagctcaagctgggagaaattgtcacaaccattcccacaattggattcaatgtggagactgtggaatata

SEQ ID NO: 61245 - DNA, 199 bp, Glycine max
  Clone ID: 700760484H1
gttgagaatgagaagcttggccaatcaggagaatccaagcaagtagatacacaattatcactcggcgtggttagtggtaactggcctataacacccgatgctgatggagctaatgtgaccagcatagagcccccaaaggagaaccaatgcttcagtgaatctgcacctgatgcattttttccgcagtggagtttgtccc

SEQ ID NO: 61246 - DNA, 256 bp, Glycine max
  Clone ID: 700760494H1
ctctccattgtctttgaacactcatcaccatggccaagcttgttctttccctttgtttccttcttttcagtggctgcttcgctctgagagagcaggcacagcaaaatgagtgccagatccaaaagctgaatgccctcaaaccggataaccgtatagagtcggaaggtgggttcattgagacctggaaccctaacaacaagccattccagtgtgccggtgttgccctctctcgctgcacccttaaccgcaatgccct

SEQ ID NO: 61247 - DNA, 281 bp, Glycine max
  Clone ID: 700760520H1
agaaagtcttccatagccccccaaaaatgaagagcaccatcttctttgctctctttctcttttgtgccttcaccacctcatacctaccttcagccatcgctgatttcgtgctcgataatgaaggtaaccctcttgaaaatggtggcacatattatatcttgtcagacataacagcatttggtggaataagagcagccccaacgggaaatgaaagatgccctctcactgtggtgcaatctcgcaatgagctcgacaaagggattggaacaatcatctcgtcc

SEQ ID NO: 61248 - DNA, 167 bp, Glycine max
  Clone ID: 700760581H1
aagaggagagtgatcaactctttgagccgtaaaggttcaatacaacgagtgcttgttttcttagggacaagcattgtacttatgtatgattctgtgtaaccatgagtcttccacgttgtactaatgtgaagggcaaaaataaaacacagaacaagttcgtttttctc

SEQ ID NO: 61249 - DNA, 276 bp, Glycine max
  Clone ID: 700760610H1
tttgttggctgctcacctcatatcacttgcttcatttgcgcattatagctggtgcaagtagacatgaaggagggctttgcaacttcctgcattccagatatgtctttatgagaatgaagtttgcacttttcttctcttcctctttttctaaggtcggcaagagcagttcatcatccctcaagatccttaataaagaacatattgtgacaactatgtttgttgggaacttcattggcattgtatgtgctcggtcgttgcattatcagttctatttgt

SEQ ID NO: 61250 - DNA, 276 bp, Glycine max
  Clone ID: 700760612H1
gcaaaaagaaagaatcccaggcgaggagaaagatggaggggaaggagcaggatgtgtcgttgggagcgaacaagttccccgagagacagccgattgggacggcggcgcagagccaagacgacggcaaggactaccaggagccggcgccggcgccgctggttgacccgacggagtttacgtcatggtcgttttacagagcagggatagcagagtttgtggccacttttctgtttctctacatcaccgtcttaaccgttatgggagtcgccggggcta

SEQ ID NO: 61251 - DNA, 270 bp, Glycine max
  Clone ID: 700760619H1
aattagtaacttgttgagagttgctgcttggaagaaaggctgtttaatggttaagattgtgatgtctgggaatgcagcagtcaaaaggagtgattgggcctcattggtacaagtgtttttaacaaacagcaacagtacagagcattttgatgcatgtaagtggacaaaatcggaaccacattcctgggaattgatcttcccaatagaggtatgcggtcctaataatggttttgaaatgtggagttctgagtgggcaaatcaaacttcatg

SEQ ID NO: 61252 - DNA, 111 bp, Glycine max
  Clone ID: 700760625H1
attcaataaaggaaattaggcatgaccctcttgttgagtatgctctgcctatttgaaaatttccacacctcttttaattgtcgtaatgatgtgtgaagtgtgtgttatttt

SEQ ID NO: 61253 - DNA, 270 bp, Glycine max
  Clone ID: 700760643H1
gagaacagatttttgagaagataatttctggtatgtatttgggtgaaattgtaaggagagttttgttgaagttggctgaagaagttgacttctttggagatactgttcctccaaaattgagaattcctttcgtacttaggacacctgacatgtctgcaatacatcaagatacatcttcagatctgaaggtggttggaaacaaattgaaggatatattagagatcaataacacatccctgaaaatgaggaagattgttgtggaactctgtg

SEQ ID NO: 61254 - DNA, 272 bp, Glycine max
  Clone ID: 700760647H1
tttggttccaaagctttctagttgcatatacaatggaaggctagaaatattgccctctaaggactgggatctagagtctattcacagcatggaggttttggatatcataaggaaacacgtcagtaccgtgacaggtttgagatcaaatcctagtgtaagggagagttgggaaacgactcctattcgacaattctggcttgcccgagtctatgtcgcctccatattatatggctactttttgaagtcagtttcattgaggtacaacctagagc

SEQ ID NO: 61255 - DNA, 269 bp, Glycine max
  Clone ID: 700760658H1
tgaacactcatcaccatggccaagcttgttctttccctttgtttccttcttttcagtggctgcttcgctctgagagagcaggcacagcaaaatgagtgccagatccaaaagctgaatgccctcaaaccggataaccgtatagagtcggaaggtgggttcattgagacctggaaccctaacaacaagccattccagtgtgccggtgttgccctctctcgctgcacccttaaccgcaatgcccttcgtagaccttcctacaccaacggtcc

SEQ ID NO: 61256 - DNA, 268 bp, Glycine max
  Clone ID: 700760677H1
gaggattagagggtcgccacgtttagcaataaccaaaccctctctactcttttttcttctccttctcttcgctagggttttagcttcttcctcttcacttcgttctttttcgcctctacaatgagcaacgacaaggacacattcaacgtcgccgatctcacttctgctctcaacgaggacaatagagcagaccttgtcaatgctcttaagagcaagatacagagtttggctggacaacactcggatattctagagtctctgtcgccca

SEQ ID NO: 61257 - DNA, 267 bp, Glycine max
  Clone ID: 700760679H1
attttcccctcattccatccttcaaagactcgaccttgtctccgctctatatgtagctgaaagaagaagctatgaaatggttaggatgatattatatataatttaagaaaagaagctacactctaacaagttgtaaggaaagtatcatgcctggtcattctccaacagaaccttccaattatgcatctcaacaagagcctttgctgcacggtaagaaagggctatccggtaatttaaatcccccagccaaattattcgactacacca

SEQ ID NO: 61258 - DNA, 267 bp, Glycine max
  Clone ID: 700760680H1
atggggaagcccttcactctctctctttcttccctttgcttgctactcttgtcgagtgcatgctttgctattagctccagcaagctcaacgagtgccaactcaacaacctcaacgcgttggaacccgaccaccgcgttgagtccgaaggtggtttgattcaaacatggaactctcaacaccctgagctgaaatgcgccggtgtcactgtttccaaactcaccctcaaccgcaatggcctccacttgccatcttactcaccttatccc

SEQ ID NO: 61259 - DNA, 264 bp, Glycine max
  Clone ID: 700760690H1
ctttccttagttcaatatggggaagcccttcttcactctctctctttcttccctttgcttgctactcttgtcgagtgcatgctttgctattacctccagcaagttcaacgagtgccaactcaacaacctcaacgcgttggaacccgaccaccgcgttgagtccgaaggtggtcttattgaaacatggaactctcaacaccctgagctgcaatgcgccggtgtcactgtttccaaacgcaccctcaaccgcaacggcctccactt

SEQ ID NO: 61260 - DNA, 264 bp, Glycine max
  Clone ID: 700760691H1
ctgacatcactcctcaagagttcagcaaaaagtacttgcaagctcccaaggatgtgtcgcagcaaatcaaaatggccaacaagaaaatgaagaaggaacaatattcttgtgaccatccacctgcatcatgggattggaggaaaaaaggtgtcatcacccaagtaaagtaccaagggggctgtggaagcggttgggcgttttctgccacgggagccatagaagcagcacatgcaatagcaacaggagaccttgttagcctttctg

SEQ ID NO: 61261 - DNA, 275 bp, Glycine max
  Clone ID: 700760711H1
cctgcttgcacaaaagcaatgactatgtcatttaatccaaacccgtgttctgatgcatggagtttggaatttttgaagcgtaccggatttcactgtgatatcatttgtgtcactggatggactgccaccccaatgcaggatgttcaggttacaattgattggtttatttcctctcaggaatgtgttcccaggacttattgtgttttaaatccacaaaatccttttgtgttaaataggtggatggggaaactgactttcccccagggcacttcccg

SEQ ID NO: 61262 - DNA, 274 bp, Glycine max
  Clone ID: 700760726H1
gaaaaacccaaaaagattgatgccagattgagacaaagaatagatcctcaatacaatgaggttcaggctcagatggaaacaaatttgtttaaattgtctcttgatgatgttgaaactcctaaaggttccatgttggatcttaaaatttctcaatctaaaattgcacttcccaaaaacacagttggaggaaccattctgcgtagtgacctattggcaaattttttgacagagggcaattttagagcaagtgttgatttgcagcgcactcatcgta

SEQ ID NO: 61263 - DNA, 274 bp, Glycine max
  Clone ID: 700760727H1
aactactacaagtacttccttacaatcaaaaccaacaacaactatggcaagttatcaaaagcactacgatgatcagggtcgcaaggttgacgagtatggcaacgttgagaagcaaaccgacgaatacggcaaccctgttcatgctgctagtgtcacctatgtagccaccagaactgctgctggtggttacagtgatgacattaataagcaacatgataccaccaatgcctacggcgtagacactggtagacagcattctagtggtggctacgat

SEQ ID NO: 61264 - DNA, 274 bp, Glycine max
  Clone ID: 700760740H1
catatatacgagagagtgagtaatcgagaaagagaagaagcatatatatcaaaatggctgcagagatggagagggagtcattgataactgaagctcctaatgcaccagttactgcacagagaagggtcagaaatgacttagaaaattctctaccaaaaccatacttgccaagagcattgaaagctcctgatacgggtcacccaaatggaacagcaggccacaggcaccacaacttatctgttcttcagcagcattgtgctttttttgatcaaga

SEQ ID NO: 61265 - DNA, 270 bp, Glycine max
  Clone ID: 700760757H1
atcgagaaagagaagaagcatatatatcaaaatggctgcagagatggagagggagtcattgataactgaagctcctaatgcaccagttactgcacagagaagggtcagaaatgacttagaaaattctctaccaaaaccatacttgccaagagcattgaaagctcctgatacgggtcacccaaatggaacagcaggccacaggcaccacaacttatctgttcttcagcagcattgtgctttttttgatcaagatgacaatggaatcattta

SEQ ID NO: 61266 - DNA, 269 bp, Glycine max
  Clone ID: 700760758H1
cccaaggttcagcaactcttgcaggatttcttcaatgggaaagagctttgcaagagcattaaccccgatgaagctgttgcatacggtgcttcagttcaagctgccatcttgagcggtgaaggagacgagaaggttcaggatttgttgctgctggatgttacacctctcagtctcgggctcgaaactgcgggtggtgttatgactgtactaattccgcggaacactacaattcccaccaagaaggagcagattttctcaacctattccga

SEQ ID NO: 61267 - DNA, 270 bp, Glycine max
  Clone ID: 700760768H1
cttcaattcaaaggccatagtggtactagtgattaatgaaggagaagcaaacattgaacttgttggcattaaagaacaacaacagaggcagcaacaggaagagcaacctttggaagtgcggaaatatagagctgaattgtctgaacaagatatatttgtaatcccagcaggttatccagttgtggtcaacgctacctcagatctgaatttctttgcttttggtatcaatgccgagaacaaccagaggaacttccttgcaggttcgaaaga

SEQ ID NO: 61268 - DNA, 268 bp, Glycine max
  Clone ID: 700760773H1
caaccaattcacatcactgaaggaaattatgtcagaaagcaagatgtcagcattgaatatgatgcatgtacaattccaaatgattgtggttcattggttgttgccaaggttggaaatcacaaacaaattgttggtttccatgttgctggaagcaaaggaagactgggatatgcttcattgataccatatgttgagccagttgtgcaagctcaaagtgctgaagtttactttgacttcttccctgtggaggttgatagtcaagagggag

SEQ ID NO: 61269 - DNA, 268 bp, Glycine max
  Clone ID: 700760779H1
agcaaagcaatggctacttcaaagttgaaaacccagaatgtggttgtatctctctccctaaccttaaccttggtactggtgctactgaccagcaaggcaaactcagcggaaactgtttctttcagctggaacaagttcgtgccgaagcaaccaaacatgatcctccaaggagacgctattgtgacctcctcgggaaagttacaactcaataaggttgacgaaaacggcaccccaaaaccctcgtctcttggtcgcgccctctactcca

SEQ ID NO: 61270 - DNA, 265 bp, Glycine max
  Clone ID: 700760790H1
cttaattattaacacttccttagttcaatatggggaagcccttcactctctctctttcttccctttgcttgctactcttgtcgagtgcatgctttgctattagctccagcaagctcaacgagtgccaactcaacaacctcaacgcgttggaacccgaccaccgcgttgagtccgaaggtggtttgattcaaacatggaactctcaacaccctgagctgaaatgcgccggtgtcactgtttccaaactcaccctcaaccgcaatgg

SEQ ID NO: 61271 - DNA, 151 bp, Glycine max
  Clone ID: 700760803H1
gtttccaaactcaccctcaaccgcaatggcctccacttgccatcttactcaccttatccccggatgatcatcatcgcccaagggaaaggagcacttggagttgcaattccaggatgtcctgagacgtttgaggagccacaagaacaatcaa

SEQ ID NO: 61272 - DNA, 149 bp, Glycine max
  Clone ID: 700760806H1
gcgcctttcagaggcggaaggcctattcgggtggttacatttccgaataccattgtgcagattgaaccagacatgaattcaaggtttcagcttttgagtaccactaccaatggtgattttgttcaaggaaaagatctcgcaatggttaa

SEQ ID NO: 61273 - DNA, 148 bp, Glycine max
  Clone ID: 700760808H1
ggttttctggtaattctggtgttattgttttggctgccactaacagaccggatgttcttgattcggcgttgttgaggcctggccggttcgataggcaagttactgtggatagacctgatgttgccggcagagttaaaatccttcaggt

SEQ ID NO: 61274 - DNA, 149 bp, Glycine max
  Clone ID: 700760809H1
gagaatggagtttcaagggttaccggaaggttgcattgctagtatactctctcgcactacgccggcggacgtgtgtaggttttccgtcgtatcaaagattttccgttcggccgctgaatcggacgctgtgtggaaacgttttctccctt

SEQ ID NO: 61275 - DNA, 151 bp, Glycine max
  Clone ID: 700760816H1
aacaacttcaagacgttctgcaaagagtcagaagaaaaatgaagattcttcagtagtacggagaaagagtacaagtgacacagaagatgagtcagaggaagacgagaaagatgaagaaaatgaggaggaaaatgaaaatggtgttcctgac

SEQ ID NO: 61276 - DNA, 151 bp, Glycine max
  Clone ID: 700760817H1
aaattgtctcttgatgatgttgaaactcctaaaggttccatgttggatcttaaaatttctcagtctaaaattgcacttcccaagaacacagttggaggaactattctgcgtagtgatctattggcaaattttctgacagagggcaatttta

SEQ ID NO: 61277 - DNA, 147 bp, Glycine max
  Clone ID: 700760824H1
gaagagatgacattgattccgggaaccagtgttgaagaggcttacaacaagctaatagttgaacttgagaaaagtgttcctacattggttggcattgaatgtcccaaggatgagaaacttcctcgtcgcaaaatttttgacaaacct

SEQ ID NO: 61278 - DNA, 146 bp, Glycine max
  Clone ID: 700760827H1
ctttacaggggagatagaatttagatagtgcaagagaagcgtaatctccaagttctcatcttttttgttcccttttgttttcagagacatacataggccccagaagaacaaattgctacaacctattttgatttgagatctgtctg

SEQ ID NO: 61279 - DNA, 147 bp, Glycine max
  Clone ID: 700760831H1
ataaaaatgtaaattatgtcagccccagggcagatgtacttctccccagaccactggaatccagcgtagttttagatgtacatcatatagcatgtggtgttagacatgcttctctagtcactaggcaaggtgaagtttttacatggg

SEQ ID NO: 61280 - DNA, 146 bp, Glycine max
  unsure (1)..(146): unsure at all n locations
  Clone ID: 700760836H1
ttccacctcacccctttttntcaacgccatgaaaatagatatcagcaattgatcaaaggtcattttgtttttgtggctctgagaggggagtgattctaaactaaaatatatgggggctggggaagagagtacagctaaatcttcta

SEQ ID NO: 61281 - DNA, 145 bp, Glycine max
  Clone ID: 700760839H1
cttgtgacaaaattcctagtgtcttgactacaactgatgagagattggtaggcacagaacatgagggatatgatccttttcttggtggaattcaaaaatatgccactcccatgatgcccctagatgaagaaattctttctaaggt

SEQ ID NO: 61282 - DNA, 144 bp, Glycine max
  Clone ID: 700760845H1
agaatataggaatataagaactaagatggattggatcggagcgtaccgcggaggccagagaagcagggactggtgcgacccttcatcaccattcactgatttgtgggaccctcgtcgtgtcggtgacgctgatgatatcacctc

SEQ ID NO: 61283 - DNA, 143 bp, Glycine max
  Clone ID: 700760856H1
ttcaaggaaaagatctcgcaatggttaaagttaatgtagcatgtgctgctgttggcttgacatcaagttacactccaactccattgttggaatctggtttgcaaaaagacagagggttaattgtggaatattttggaaggatg

SEQ ID NO: 61284 - DNA, 142 bp, Glycine max
  Clone ID: 700760859H1
tgaactcgttgccgttaacgaccctttcatcaccaccgattacatgacatacatgtttaaatacgacagtgttcatggacactggaagcatcacgatgtcaccgttaaggacgagaagacccttctcttcggtgacaagcca

SEQ ID NO: 61285 - DNA, 142 bp, Glycine max
  Clone ID: 700760868H1
ccattcctaaactgcattatctctctactttagtttagagagattcaagtgaaggttttgacccaaaaataaagtacctttggtacttgccacccaaagccagagttcgaggcattaaaataggcaacttttgcagaacctc

SEQ ID NO: 61286 - DNA, 140 bp, Glycine max
  Clone ID: 700760873H1
gaagaagagaatataggaatataagaactaagatggattggatcggagcgtaccgcggaggccagagaagcagggactggtgcgacccttcatcaccattcactgatttgtgggaccctcgtcgtgtcggtgacgctgat

SEQ ID NO: 61287 - DNA, 139 bp, Glycine max
  Clone ID: 700760875H1
aaaaataataccataagcgccttttggctggtccctcaattttttctggtgggtgctggggaagcatttgcctatgttggacaactagaatttttcattagggaggcaccagagagaatgaaatctatgagcactggac

SEQ ID NO: 61288 - DNA, 139 bp, Glycine max
  Clone ID: 700760876H1
cttttcctttcttagagatgctggtaatggaggagtttttgttggcaatgttgcttcagcattcacaacttcaagtgtgcttgaggcccaaagtagaaagcccaacagatatgaagtttcccaatacagatatcgctgt

SEQ ID NO: 61289 - DNA, 141 bp, Glycine max
  Clone ID: 700760880H1
tgcatttgtatcaaccgaggcagagacagatcagccagcaattgaactaaaacctggaattgaccttctaggacctgttgatgagatattttttgatatctatgacagatatgaaccggtcaatgaacccactttggacaa

SEQ ID NO: 61290 - DNA, 253 bp, Glycine max
  Clone ID: 700760908H1
ccaattagtaacttgttgagagttgctgcttggaagaaaggctgtttaatggttaagattgtgatgtctgggaatgcagcagtcaaaaggagtgattgggcctcattggtacaagtgtttttaacaaacagcaacagtacagagcattttgatgcatgtaagtggacaaaatcggaaccacattcctgggaattgatcttcccaatagaggtatgcggtcctaataatggttttgaaatgtggagttctgagt

SEQ ID NO: 61291 - DNA, 256 bp, Glycine max
  Clone ID: 700760917H1
cgaggaagatcctcgaaactatctgacattcttctgccttggcaaccgggaagtgaagaaaccaggagaatatgagccttctgaacaaccagatcccgattcagattatcagagagcccaagaggcccgacgattcatgatttatgttcataccaagatgatgatagttgatgacgaatacataatcgttggatctgccaacatcaaccaaaggtcaatggatggtgctagggactctgagattgccatgggtgct

SEQ ID NO: 61292 - DNA, 250 bp, Glycine max
  Clone ID: 700760919H1
gttcaatatcctagtacaccgtattaaagaatttaagatatactatgatgagagcgcggttcccattactgttgctgggagttgttttcctggcatcagtttctgtctcatttggcattgcgtattgggaaaagcagaaccccagtcacaacaagtgcctccgaagttgcaatagcgagaaagactcctacaggaaccaagcatgccacgctcgttgcaacctccttaaggtggaggaagaagaagaatg

SEQ ID NO: 61293 - DNA, 256 bp, Glycine max
  unsure (1)..(256): unsure at all n locations
  Clone ID: 700760932H1
gggatgangaggagtgctgggggtgagattgcgcccaccactaggcactataggagtgtctccatggatagtttcattgggaagttgatttnngannaggagtcgcccaagctgcctccttcccccgggcagagaagtgctctgatgtcncctgnggggggaattgatgggaatncggcggccttcagcttggagtttggaaatggggagttcagtgggcctgaactgaagaaaattatggccatgaaaagcttgc

SEQ ID NO: 61294 - DNA, 239 bp, Glycine max
  Clone ID: 700760970H1
tgataatattgatctactgttgagcattgatttgttgggtttacaaggagcaggtaaagcttttccaaacaagattgtttttgatgataaacttgtgctggctaacacacaagaattctttgctggaaattttccagtggattcttggttaccaatttttgtgaattgtctttatcctgtaagtcaattaccttcagaagctgtcgttgtaaatgttacatgtggtagtggacgtggtg

SEQ ID NO: 61295 - DNA, 175 bp, Glycine max
  Clone ID: 700760976H1
ggaagaaagggtcctttgtcttcaattttgagggctttttactgaataagtatgtagtactaaaatgtatgctgtaatagctcatagtgagcgaggaaagtatcgggctatttaactatgacttgagctccatctatgaataaataaatcagcatatgatgcttttgttttgtgt

SEQ ID NO: 61296 - DNA, 183 bp, Glycine max
  Clone ID: 700760991H1
ggcaaaaggagatttgtctctggggatggtgaagagatgacactgattccgggaaccagtgttgaagaggcttacaacaagctaatagttgaacttgagaaaagtgttcctacattggttggcattgaatgtcccaaggatgagaaacttcctcgtcgcaaaatttttgacaaacctaagacg

SEQ ID NO: 61297 - DNA, 262 bp, Glycine max
  Clone ID: 700761012H1
gcgaagagaatggctcccaagggtttaatctttttggctgtgttatgcttctcagcactgtcactgagtcgttgtcttgcggaggataatggacttgttatgaacttctacaaggaatcatgccctcaggctgaagacatcatcaaagaacaagtcaagcttctctacaagcgccacaagaacactgctttctcctggctcagaaacatcttccatgactgtgctgttcagagttgtgatgcttcactgttgctggactcca

SEQ ID NO: 61298 - DNA, 263 bp, Glycine max
  Clone ID: 700761034H1
caacagtacagagcattttgatgcatgtaagtggacaaaatcggaaccacattcctgggaattgatcttcccaatagaggtatgcggtcctaataatggttttgaaatgtggagttctgagtgggcaaatcaaacttcatggcatttgagtttccttattgacaatcccaaacagtctacagtttttgacattctcttgggaatttctcaagattttgaaattgctggtaatactcttatgccagctttttctgttccacagg

SEQ ID NO: 61299 - DNA, 265 bp, Glycine max
  Clone ID: 700761111H1
gaatgtgtgtgtgagagttgcatgtgtatataaatgataaaaaatgttattgatttcctaaggataaataccaattcggatctttttatcctcattccatatacttgttaacttgaatataacacactacacataataacaatgaactaagtctggatattgtattgtatcattcccgtaataacttaatttgtaataaactaaataatttatttttttcaatcaatagttgaggattgtgttcaattactagtgaaaaataact

SEQ ID NO: 61300 - DNA, 263 bp, Glycine max
  Clone ID: 700761145H1
gttttgtgggtagctcctgaggacaaggcgagtttatggtcacaacttcattatgtttcgtgtaataatctggaaatgcaagaagcttatcttgtcaatctcgtaaatgtgttacgagaattgtatttgcacagtccagaggaagctcgccaattgagaaggaaagctctctctcgtattgaatggctgcaaaaagctgatgtgcctaccatagcacagattgaagagttccattcgatgcagaggatgatgaatgctcctga

SEQ ID NO: 61301 - DNA, 264 bp, Glycine max
  Clone ID: 700761166H1
ggagactgaaggaagcagatcgtgacagtggaaggaggtctcagcgttatcagccccaagtggcaagaacaacaagatgaagatgaagatgaagacgaagatgatgaagatgaacaaattccctctcaccctcctcgccgaccaagccatggaaagcgtgaacaagacgaggacgaggacgaagatgaagataaacctcgtcctagtcgaccaagccaaggaaagcgtgaacaagaccaggaccaggacgaggacgaagatgaa

SEQ ID NO: 61302 - DNA, 259 bp, Glycine max
  Clone ID: 700761172H1
ggtttacaaggagcaggtaaagcttttccaaacaagattgtttttgatgataaacttgtgctggctaacacacaagaattctttgctggaaattttccagtggattcttggttaccaatttttgtgaattgtctttatcctgtaagtcaattaccttcagaagctgtcgttgtaaatgttacatgtggtagtggacgtggtggtttacctaccactgcttggattagttctgcagttaacaatcgctcctcagatatca

SEQ ID NO: 61303 - DNA, 259 bp, Glycine max
  Clone ID: 700761186H1
gtttcaaatttcaacccaaggagcttgggaacaaactcctgctccttcttctccttggtcataggcaatgggaggtgcactgggaaagagtgaatcacctagaaagggatcgatgccagaaactaagctcgaggctaaaatggttgaagcaatgcagcggagggaatctcaaggaagttccgtgaaatcattcaacactataatcttgaaattcccaaagattgatgagagccttagaaaatgcaaagccatatttgag

SEQ ID NO: 61304 - DNA, 189 bp, Glycine max
  Clone ID: 700761189H1
accaaaaaaatggctttggaaactctcaactcaccaacaacaaccgccccatctttccccttcgacgacccaactattccatgggccaaaagaaaacgttcaaagcgttgttcacgcgaccacccttcggaggaagagtacctcgctctctgcctcatcatgctcgctcgcggcggcaccacccgccgt

SEQ ID NO: 61305 - DNA, 259 bp, Glycine max
  Clone ID: 700761190H1
gaattgctctcttgcaaattggatactgttactggccaatattatcctgagtgggctccaattaattgtcgagttcatcgacaaccaattcacatcactgaaggaaattatgtcagaaagcaagatgtcagcattgaatatgatgcatgtacaattccaaatgattgtggttcattggttgttgccaaggttggaaatcacaaacaaattgttggtttccatgttgctggaagcaaaggaagactgggatatgcttcat

SEQ ID NO: 61306 - DNA, 246 bp, Glycine max
  unsure (1)..(246): unsure at all n locations
  Clone ID: 700761204H1
gttaccatttgctcccagcactgagcttaaccgagcttcacaaagatgaatcgggaaaaattgatgaagatggccggttcggttagaactgggggaaagggcaccgtgagaagaaagaagaaggctgtccacaagacaacaaccacagatgacaaaaggcttcagagcaccctgaaganctaggggtgaatgccatcccggctattgaggaggtcaatatctttaaggatgacgtattatccattt

SEQ ID NO: 61307 - DNA, 252 bp, Glycine max
  Clone ID: 700761215H1
ttgtctttgaacactcatcaccatggccaagcttgttctttccctttgtttccttcttttcattggctgcttcgctctgagagagcaggcacagcaaaatgagtgccagatccaaaagctgaatgccctcaaaccggataaccgtatagagtcggaaggtgggttcattgagacctggaaccctaacaacaagccattccagtgtgccggtgttgccctctctcgctgcacccttaaccgcaatgcccttcg

SEQ ID NO: 61308 - DNA, 253 bp, Glycine max
  Clone ID: 700761222H1
ctcagtctcaactctctccaacaaccacaatggctctcttgggcgccgcctcctcctccgctcgcatcattccctccgtctcactctcttcctcttctcgctccttcttctcactctcatcctcttcttccaaactccaatgcttgcgctcctctcctcgtatttcgcacctctttctcaatcagcgaagagcggaggttcgcgtttcgagtggaggatacggaactgtgtcggcaccgaagtcagttgcgtc

SEQ ID NO: 61309 - DNA, 252 bp, Glycine max
  Clone ID: 700761231H1
cactcatcagtcatcaccatggccaagctagttttttccctttgttttctgcttttcagtggctgctgcttcgctttcagttccagagagcagcctcagcaaaacgagtgccagatccaaaaactcaatgccctcaaaccggataaccgtatagagtcagaaggagggctcattgagacatggaaccctaacaacaagccattccagtgtgccggtgttgccctctctcgctgcaccctcaaccgcaacgcc

SEQ ID NO: 61310 - DNA, 177 bp, Glycine max
  Clone ID: 700761236H1
gataaaccgcgatcacaggttgccgcaccttaaaaccggaaacaaaagcaatcgttacttgatttcaagaatctctcaatttcttcctacttctttgtgtacgatttcttaagggaaagaaaatcactctctgtgctggccacagacttcgtgaatcattttcttttccacacaaca

SEQ ID NO: 61311 - DNA, 250 bp, Glycine max
  Clone ID: 700761247H1
tctctccattgtctttgaacactcatcaccatggccaagcttgttctttccctttgtttccttcttttcagtggctgcttcgctctgagagagcaggcacagcaaaatgagtgccagatccaaaagctgaatgccctcaaaccggataaccgtatagagtcggaaggtgggttcattgagacctggaaccctaacaacaagccattccagtgtgccggtgttgccctctctcgctgcacccttaaccgca

SEQ ID NO: 61312 - DNA, 248 bp, Glycine max
  Clone ID: 700761263H1
ggcactggtttcaccgcacaagtttatgaactctctccccacttccttcacaaggaatggattatggaacagtgggagaagaattattacattagtgccatagccggggctaataatggatcctcattggttgtaatgtctaaaggtacccagtacttacagcaatcctataaagtcagtgattcgtttccatttaagtggatcaacaaaaaatggagagaaggattttatgtcactgctatggccac

SEQ ID NO: 61313 - DNA, 245 bp, Glycine max
  Clone ID: 700761296H1
gagaattcaagcacttccaaaaatgagtagtggaattgctgttttgtagttctccctccctcaattgtctcttaatacagtgctgtctgataattttgttagtacaaaacaagacatggatatggattagacattatatttcgtttccttctctcgtcctagttccaaatgaccgagaaagtttgtttgtttgcaatgctggaattttcttgagagtctgagattgttttgttaattttagtagt

SEQ ID NO: 61314 - DNA, 268 bp, Glycine max
  Clone ID: 700761302H1
gtcagaaagcaagatgtcagcattgaatatgatgcatgtacaattccaaatgattgtggttcattggttgttgccaaggttggaaatcacaaacaaattgttggtttccatgttgctggaagcaaaggaagactgggatatgcttcattgataccatatgttgagccagttgtgcaagctcaaagtgctgaagtttactttgacttcttccctgtggaggttgatagtcaagagggagttgctcacattggtgaattgaatctggtgt

SEQ ID NO: 61315 - DNA, 261 bp, Glycine max
  Clone ID: 700761324H1
gtgtatggtgatgataacttaattagtgttcatgaatatgtcaagccttactttagtggttctaaattgaaaagctttctagctagtcataacatcaccattactgatggtattgacaaaactagtgcaactttgcaatttagaaagttagcagattgtgattttctcaagagaaactttaagcagatgtctaatgttttgtgggtggctcctgaggacaaggcgagtttatggtcacaacttcattatgttcgtgtaata

SEQ ID NO: 61316 - DNA, 260 bp, Glycine max
  Clone ID: 700761341H1
ctcagatggaaacaaatttgtttaaattgtctcttgatgatgttgaaactcctaaaggttccatgttggatctgaaaatttctcaatctaaaattgcacttcccaagaacacagttggaggaaccattctgcgtagtgatctattggcaaattttttgacagagggcaattttagagcaagtgttgatttgcagcgcactcatcgtattagaggaatgattaaaatggtggccacagttggtattcctgagatacaggta

SEQ ID NO: 61317 - DNA, 257 bp, Glycine max
  unsure (1)..(257): unsure at all n locations
  Clone ID: 700761358H1
ctcaattgaatcaaatgatggctgggaattttaatgctcaagcaagggttccttgtctagatctcggtaatgaagactcatcatcaattcatgcagatgagcggaagcccaaaaaaagaggtaggaaacctgccaatgggagagaggagccgctgaaccatgttgaagctgagagacaaagacgtganaagcttaatcagaggttttatgccttgagagctgttgtccctaatatatctaaaatggacaggcatctt

SEQ ID NO: 61318 - DNA, 172 bp, Glycine max
  Clone ID: 700761364H1
gaaattttgataaaccgcgatcacaggttgccgcaccttaaaaccggaaacaaaagcaatcgttacttgatttcaagaatctctcaatttcttcctacttctttgtgtacgatttcttaagggaaagaaaatcactctctgtgctggccacagacttcgtgaatcattttct

SEQ ID NO: 61319 - DNA, 189 bp, Glycine max
  Clone ID: 700761378H1
actatgatgagagtgcggtttcctttgttggtgttgctgggaactgttttcctggcatcagtttgtgtctcattaaaggtgagagaggatgagaataaccctttctacttgagaagctctaacagcttccaaactctctttgagaaccaaaacggtcgcattcgtctcctccagagattcaacaaacgc

SEQ ID NO: 61320 - DNA, 252 bp, Glycine max
  Clone ID: 700761389H1
atatcacctgtccccatttcttgttctctttcctatcccaccaatttaaaaaatatctcttctccaaaaacaaaaacaaaaaaattaacagcttggaagtaaaatattatttttcattgcatgtcatgttttatttggatagacagaaaagaggacaagtaattccaattcaatttgcagttcaacaaactgtctaactcaccccatttaaataggtccacctagataaataatcaaaacaatcgtaactat

SEQ ID NO: 61321 - DNA, 251 bp, Glycine max
  Clone ID: 700761390H1
ttgtctttgaacactcatcaccatggccaagcttgttctttccctttgtttccttcttttcagtggctgcttcgctctgagagagcaggcacagcaaaatgagtgccagatccaaaagctgaatgccctcaaaccggataaccgtatagagtcggaaggtgggttcattgagacctggaaccctaacaacaagccattccagtgtgccggtgttgccctctctcgctgcacccttaaccgcaagcccttcg

SEQ ID NO: 61322 - DNA, 258 bp, Glycine max
  Clone ID: 700761426H1
caacaacagcagaaaagtcatggtggacgcaagcaggggcaacaccagcaggaggaagaggaagaaggtggcagcgtgctcagtggcttcagcaaacacttcttggcacaatccttcaacaccaacgaggacatagctgagaaacttcagtctccagacgacgaaaggaagcagatcgtgacagtggaaggaggtctcagcgttatcagccccaagtggcaagaacaacaagatgaagatgaagatgaagacgaagat

SEQ ID NO: 61323 - DNA, 256 bp, Glycine max
  Clone ID: 700761446H1
ggcaacagtgagaacaccattgaattttgattctagcaagcagagcttttgtcaattctctattgatcttcttggtggaggaattttagtggacaaaactggagattggatcacacttatacaaaattctccaattagtaacttgttgagagttgctgcttggaagaaaggctgtttaatggttaagattgtgatgtctgggaatgcagcagtcaaaaggagtgattgggcctcattggtacaagtgtttttaaca

SEQ ID NO: 61324 - DNA, 250 bp, Glycine max
  Clone ID: 700761474H1
cattagcatgggataacaccacaggattctgatcctattgtgttggccttcgggatcggagtaatgattaacagggacagtcgggggcattcgtatttcatagtcagaggtgaaattcttggatttatgaaagacgaacaactgcgaaagcatttgccaaggatgttttcattaatcaagaacgaaagttgggggctcgaagacgatcagataccgtcctagtctcaaccataaacgatgccgaccaggg

SEQ ID NO: 61325 - DNA, 267 bp, Glycine max
  Clone ID: 700761539H1
ctattgtctttgaacactcatcaccatggccaagcttgttctttccctttgtttccttcttttcagtggctgcttcgctctgagagagcaggcacagcaaaatgagtgccagatccaaaagctgaatgccctcaaaccggataaccgtatagagtcggaaggtgggttcattgagacctggaaccctaacaacaagccattccagtgtgccggtgttgccctctctcgctgcacccttaaccgcaatgcccttcgtagaccttccta

SEQ ID NO: 61326 - DNA, 266 bp, Glycine max
  Clone ID: 700761540H1
ggtgttgagcttgagtgctagaggcctcatacgacaccaaattcgaggagataaacaaggttctgtttggtagagaggaggggcagcaacaaggggaggagaggctgcaagagagtgtgattgtggaaatctcaaagaaacaaattcgggaactgagcaaacatgccaaatctagttcaaggaaaaccatttcttctgaagataaacctttcaacttgagaagccgcgaccccatctattccaacaagcttggcaagttgtttgag

SEQ ID NO: 61327 - DNA, 263 bp, Glycine max
  Clone ID: 700761543H1
caacaaagaggacaaagcagcagaccacaagaccgtcaccagaagatctataacttcagagagggtgatttgatcgcagtgcctactggtgttgcatggtggatgtacaacaatgaagacactcctgttgttgccgtttctattattgacaccaacagcttggagaaccagctcgaccagatgcctaggagattctatcttgctgggaaccaagagcaagagtttctaaaatatcagcaagagcaaggaggtcatcaaagcca

SEQ ID NO: 61328 - DNA, 267 bp, Glycine max
  Clone ID: 700761552H1
aaaaaagagaagaagatgggtttgaagaacaacatggtggtgctaaaggtgtgtttggtgctacttttccttgtggggggtactactagtgccaacttgaggctgagtaagcttggcctgctcatgaaaagtgatcatcatcaacactcaaatgatgatgagtcttcaaaaccatgctgtgatcaatgcgcatgcacaaagtcaaaccctcctcaatgccgctgttcagatatgaggctgaattcgtgccattcagcttgcaaatct

SEQ ID NO: 61329 - DNA, 263 bp, Glycine max
  Clone ID: 700761556H1
caaagcaatggctacttcaaagttgaaaacccagaatgtggttgtatctctctccctaaccttaaccttggtactggtgctactgaccagcaaggcaaactcagcggaaactgtttctttcagctggaacaagttcgtgccgaagcaaccaaacatgatcctccaaggagacgctattgtgacctcctcgggaaagttacaactcaataaggttgacgaaaacggcaccccaaaaccctcgtctcttggtcgcgccctctact

SEQ ID NO: 61330 - DNA, 256 bp, Glycine max
  Clone ID: 700761589H1
acacaacacaagtttcgcgagcatggtggacacatggttgggtcccaccttctgtaatacccttcccctctccttcccaacttgtaccagaatcctctcatcatcgttttcttcttcctcgtcttcaatggctacctctccgtcgcagcagcaccaccatcaccatcgccgctgttattcaaaccctaaccctcctcaccctcaccctcagcccgctctgctcgtcttttccggtgggaccgccttcaacggcgtc

SEQ ID NO: 61331 - DNA, 257 bp, Glycine max
  Clone ID: 700761591H1
gctatgaaaaattactgcgccaggctaaagctccaagtatgtttttacaatctttcaaaaattttgtttctttgtgtgtgtatggtgatgataacttaattagtgttcatgaatatgtcaagccttactttagtggttctaaattgaaaagctttctagctggtcataatatcaccattactgatggtattgacaaaactagtgcaactttgcaatttagaaagttagcagattgtgattttctcaagagaaacttt

SEQ ID NO: 61332 - DNA, 266 bp, Glycine max
  Clone ID: 700761612H1
gtcaagccttactttagtggttctaaattgaaaagctttctagctggtcataatatcaccattactgatggtattgacaaaactagtgcaactttgcaatttagaaagttagcagattgtgattttctcaagagaaactttaggcagatgtctaatgttttgtgggtggctcctgaggacaaggcgagtttatggtcacaacttcattatgtttcatgtaataatctggaaatgcaagaagcttatcttgtcaatctcgtaaatgt

SEQ ID NO: 61333 - DNA, 267 bp, Glycine max
  Clone ID: 700761615H1
taacacacaagaattctttgatggaaattttccagtggattcttggttaccaatttttgtgaattgtctttatcctgtaagtcaattaccttcagaagctgtcgttgtaaatgttacatgtggtagtggacgtggtggtttacccaccactgcttggattagttctgcagttaacaatcgctcctcagatatcaacaaaaagattcgcacagcacttgggaaaggtaagaaaattgtttttcttaccagagttgatccttttccagt

SEQ ID NO: 61334 - DNA, 270 bp, Glycine max
  Clone ID: 700761617H1
accttgctctatactacacagtacacacactagaagaataatggcttccatcctccactactttttagccctctctctttcttgctcttttcttttcttcttatccgactcagtcacccctacaaaaccaataaaccttgttgttctacccgttcaaaatgatggttccacagggctccattgggccaacctccaaaaaagaacccctctaatgcaagtaccagtcctggtggacctcaatggaaatcacttgtgggttaactgtgagca

SEQ ID NO: 61335 - DNA, 268 bp, Glycine max
  Clone ID: 700761619H1
aacgcattgccagaggaagtgattcagcacacttttaacctaaagagccagcaggccaggcaggtgaagaacaacaaccctttcagcttcctggttccacctcaggagtctcagaggagagctgtggcttagagagccctttttgcatgtgctaccacacttttgtccttttgggctctagctagtgctggtagcagtaaataagaatgaataaaagaaacaaaggcttagatgccctttgttaagtgtagaataacgggtatagtaa

SEQ ID NO: 61336 - DNA, 268 bp, Glycine max
  Clone ID: 700761621H1
ggaagatgaggatgaggatgaggaacaagatgaacgtcaattcccattcccacgcccacctcatcagaaggaagagcgaaagcaagaggaagatgaggatgaggagcagcagcgagagagcgaagaaagtgaagattctgagttacgaagacataagaataagaacccttttctcttcggctctaacaggttcgaaactctcttcaaaaaccaatatggtcgcattcgcgtcctccagaggttcaaccaacgctccccacaacttcag

SEQ ID NO: 61337 - DNA, 268 bp, Glycine max
  Clone ID: 700761623H1
aagttatgggtttccttgtgttgcttcttttctccctcttaggtctctcttctagttccagcatatcaactcatcgttccatattggaccttgacctaaccaagtttaccacacagaaacaggtgtcttcactgttccaactatggaagagtgagcatggacgtgtctaccataaccacgaagaagaggcaaagagacttgagattttcaagaataacttgaactatatcagggacatgaatgcaaacagaaaatcaccccattctca

SEQ ID NO: 61338 - DNA, 269 bp, Glycine max
  Clone ID: 700761624H1
aaccgcaacggcctccacttgccatcttactcaccttatccccaaatgatcattgtcgttcaagggaagggagcaattggatttgcatttccgggatgtcctgagacgtttgagaagccacaacagcaatcaagcagaagaggctcaaggtcgcagcagcaactacaagacagtcaccagaagattcgtcacttcaatgaaggagacgtactagtgattcctcctggtgttccttactggacctataacactggcgatgaaccagttgt

SEQ ID NO: 61339 - DNA, 264 bp, Glycine max
  Clone ID: 700761631H1
caatacaatgaggttcaggctcagatggaaacaaatttgtttaaattgtctcttgatgatgttgaaactcctaaaggttccatgttggatcttaaaatttctcaatctaaaattgcacttcccaaaaacacagttggaggaaccattctgcgtagtgacctattggcaaattttttgacagagggcaattttagagcaagtgttgatttgcagcgcactcatcgtatcaaaggaatgattaaaatggtggccacagttggtatt

SEQ ID NO: 61340 - DNA, 264 bp, Glycine max
  Clone ID: 700761632H1
gtggaggagacataatttaaccgctctctatcacagatatttgcaaatgggttccaagaggccgttgtggaacattggaagtctgcctttaggctggctcactttctataacaagactaaggttttggacagacggtggcacattcttggccttggttatgactcaggtgtcgataaaaacgagattgaaggggctgccgttatacactacgatggaattaggaaaccatggttggacattgcaatgggaagatacagaagtta

SEQ ID NO: 61341 - DNA, 262 bp, Glycine max
  Clone ID: 700761638H1
tgcagatgagcttatcgccaatgctgcgtacattggcactcctggaaagggtattcttgctgctgatgagtcaacagggacaattggcaagcgtttggccagcatcagtgtagagaacattgaatccaacaggcgagctcttagggagctgcttttcactgctcctggtgttcttcaatatctcagtggtgtcatcctctttgaggaaaccctctaccagagcacagctgcaggcaagccctttgtgaatgtcttgaaggaa

SEQ ID NO: 61342 - DNA, 263 bp, Glycine max
  Clone ID: 700761639H1
acttattaacactttccttagttcaatatggggaagcccttcttcactctctctctttcttccctttgcttgctactcttgtcgagtgcatgctttgctattacctccagcaagttcaacgagtgccaactcaacaacctcaacgcgttggaacccgaccaccgcgttgagtccgaaggtggtcttattgaaacatggaactctcaacaccctgagctgcaatgcgccggtgtcactgtttccaaacgcaccctcaaccgcaa

SEQ ID NO: 61343 - DNA, 262 bp, Glycine max
  Clone ID: 700761655H1
ctcttgcaaattggatactgttactggccaatattatcctgagtgggctccgattaattgtcgagttcatcgacaaccaattcacatcactgaaggaaattatgtcagaaagcaagatgtcagcattgaatatgatgcatgtacaattccaaatgattgtggttcattggttgttgccaaggttggaaatcacaaacaaattgttggtttccatgttgctggaagcaaaggaagactgggatatgcttcattgataccatat

SEQ ID NO: 61344 - DNA, 262 bp, Glycine max
  Clone ID: 700761665H1
caagctggtgcagtttggagagattcaggaaaaagttgtattgaaattttcacaagaggaatttcttacagcttggtcaactcaggtgcgtcctgcaacaactctgttggctgatgggtgcccatatttgtatgctatggtgcatgatagttcagtgtctacaataccaggtgattttgtcattggtgttaagttgacaaccataaacaatatgtgtgcatatgggctcaatcctggtatttcaggttctcgtcttttgggc

SEQ ID NO: 61345 - DNA, 256 bp, Glycine max
  Clone ID: 700761689H1
ggaagcactgcctgtgttgccgttattagaaacaaccaacttgttgttgcaaatgctggtgattcgcgttgtgtgatatctcggaagggccaggcatacaatttgtctagagaccacaaacctgatcttgagattgagaaggacagaatcttaaaagctggtggttttattcatgcaggacgagttaatggaagtttaaatcttgcaagagctattggtgacatggaatttaaacagaataagtttcttcctgctg

SEQ ID NO: 61346 - DNA, 255 bp, Glycine max
  Clone ID: 700761692H1
aattcataattcctcaccttcaaatctccattctgcttcattttctgcaaagaacaaacccctttctgaagaaagaatatagtcttcagctggacaaggatcatttattttgaaagacaagtttgtgtgacaatcttatagttctaagaagggtgcaagtgagagctttgctgtgatggcaacccgtagatattcttttggaagggctgatgaggccactcatccagactccatgagggccactttggctgaatt

SEQ ID NO: 61347 - DNA, 255 bp, Glycine max
  Clone ID: 700761694H1
ccaaccatgctgacgctgattacctcatcgttatccttaacgggactgccattctttccttggtgaacaacgacgacagagactcctacagacttcaatctggtgatgccctgagagtcccctcaggaaccacatactatgtggtcaaccctgacaacaacgaaaatctcagattaataacactcgccatacccgttaacaagcctggtagatttgagagtttcttcctatctagcactgaagctcaacaatcct

SEQ ID NO: 61348 - DNA, 286 bp, Glycine max
  Clone ID: 700761703H1
tcatgaactaaccccctctcaatcccctaatttctccaacatttccccctttttctaattaatcagatctgcaaaaccctaatttccctaaccctaacgaaacccccaaatccaatggcttcgattcaacgcccggcgagttcgggatcgtcggagggaggagatccggtgatgtacgagaggaagaggaagcgtatggagtcgaaccgcgagtccgcccggcgatcgcggatgaagaagcagaagcagctcgaagacttaaccgacgagtgagcgattggaaggg

SEQ ID NO: 61349 - DNA, 285 bp, Glycine max
  Clone ID: 700761725H1
cacacacaactactacaagtacttccttacaatcaaaaccaacaacaactatggcaagttatcaaaagcactacgatgatcagggtcgcaaggttgacgagtatggcaacgttgagaagcaaaccgacgaatacggcaaccctgttcatgctgctagtgtcacctatgtagccaccagaactgctgctggtggttacagtgatgacattaataagcaacatgataccaccaatgcctacggcgtagacactggtagacagcattctagtggtggctacgatggtg

SEQ ID NO: 61350 - DNA, 148 bp, Glycine max
  Clone ID: 700761879H1
atttgtccttgaatataatactcagcatggctaagcttgttctttccctttgttttctgcttttcagtggctgctgcttcgctttcagtttcagagagcagccacagcaaaacgagtgccagatccaacgcctcaatgccctcaaacc

SEQ ID NO: 61351 - DNA, 150 bp, Glycine max
  Clone ID: 700761882H1
cggcctgagactcgacggccgggtcccgtcctccgccaccgccgcgtcctccactcccgattcaaccctaaccctcgattcccttcccaatcaacccttcgtcataggagtttctggaggtactgcctcgggcaaaaccaccgtctgcga

SEQ ID NO: 61352 - DNA, 147 bp, Glycine max
  Clone ID: 700761890H1
gagaaatgaaacacatgagggaaatgccacaagagcatttcagtttcaagatgtgttctcactggaaaatgaagattctgatgatgtgacaactttgattgacaaaaaggacaatgtctttgtgatgtcaaacaagaaatccaaata

SEQ ID NO: 61353 - DNA, 239 bp, Glycine max
  Clone ID: 700761906H1
aattaagctttcaagagacaaactgctttgaaaaatgggatccaaggttgttgcatccgttgcccttctcctctccatcaacattcttttcatttccatggttagctccagcagccactacgatccacagccccaaccttctcacgtcactgctcttattacacgacctagttgtccggatctgagtatttgcctcaatattttaggcgggtctctaggaaccgtggatgattgttgtg

SEQ ID NO: 61354 - DNA, 237 bp, Glycine max
  Clone ID: 700761919H1
atgaagagtactatcttctttgctctctttctagtttgtgccttcaccatctcatacctgccttcagccaccgctcagttcgtgctcgacactgatgatgatcctcttcaaaacggtggcacatactatatgttgccagttatgagaggaaagggcggtggaatagaagtagattcaactggaaaagaaatatgccctctcactgttgtgcaatcacccaatgagctcgataagggg

SEQ ID NO: 61355 - DNA, 233 bp, Glycine max
  Clone ID: 700761953H1
tacctggagaaaatccaatgaaaataaatcccacttttcaggtgagcataatttgggagaaatgggtgaagagtccttaagtgatgaagagtgtgttaagaaaacgaattcactccttcgtgaagtacatgaagcaattttcaatgaacaggtgtttgatctggtgaatcgagaagcatttaacacagttgcaggtgtcagtgtgactggaatacgggaaaactatttacaat

SEQ ID NO: 61356 - DNA, 234 bp, Glycine max
  Clone ID: 700761954H1
gaaaaaaatcctctctggagtcgaattctaaagctaatcttgaagactttgaagaaggtaactcaaaatctggaattaggtcagcgttctgccgaagaagttgatgactgcgacgtgaaaggggatcaagaaaacctctgaactctcacgtcactgttaactcacaacaccattccaacagttgatgtttgatatagaagtgcacctaaacacatggggacaagcagttttcta

SEQ ID NO: 61357 - DNA, 234 bp, Glycine max
  Clone ID: 700761955H1
caataaatggctgacaatgttgcgcacgcaaccatcaagccaagaagtggagaaattttttgaagaacctacatcagcaggaattttaccaaaaactcaacaagggactcaaattaaggaaagccgtgcggttttgaaggtggcatggtcccattttctggccctcgatgcaacaataaagattcctttgctggtatttgttcctctctacctggctgttaatgtaaaatatgg

SEQ ID NO: 61358 - DNA, 233 bp, Glycine max
  Clone ID: 700761957H1
cattcttgcaacaattttgggaacaaccttctggaaactcttttcctttcttagagatgctggtaatggaggagtttttgttggcaatgttgcttcagcattcacaacttcaagtgtgcttgaggcccaaagtagaaagcccaacagatatgaagtttcccaatacagatatcgcaatgtgccaataaagcgcagagcatgggttgaaggccagatgtctttcgatcagtctg

SEQ ID NO: 61359 - DNA, 232 bp, Glycine max
  Clone ID: 700761973H1
ctgaagcaaagcaatggctacttcaaagttgaaaacccagaatgtggttgtatctctctccctaaccttaaccttggtactggtgctactgaccagcaaggcaaactcagcggaaactgtttctttcagctggaacaagttcgtgccgaagcaaccaaacatgatcctccaaggagacgctattgtgacctcctcgggaaagttacaactcaataaggttgacgaaaacggc

SEQ ID NO: 61360 - DNA, 233 bp, Glycine max
  Clone ID: 700761975H1
ctatatttccatgattttgttgccaagtgcctaacaaaagaaccacgtctccgccctactgcttctgagatgttgaagcacaaattctttgaaaagtggaaaagtggatctgctgcaatgttgccaaaactagaaaaggcgaggcaaatcagggcttcaatggctttgcaggcacaagctcttccagctgcatcagaagatcaggagttagattcaaaactaaatgatgaata

SEQ ID NO: 61361 - DNA, 229 bp, Glycine max
  Clone ID: 700761986H1
cttgctctatactacacagtacacacactagaagaataatggcttccatcctccactactttttagccctctctctttcttgctcttttcttttcttcttatccgactcagtcacccctacaaaaccaataaaccttgttgttctacccgttcaaaatgatggttccacagggctccattgggccaacctccaaaaaagaacccctctaatgcaagtaccagtcctggt

SEQ ID NO: 61362 - DNA, 229 bp, Glycine max
  Clone ID: 700761989H1
cttaattattaacacttccttagttcaatatggggaagcccttcactctctctctttcttccctttgcttgctactcttgtcgagtgcatgctttgctattagctccagcaagctcaacgagtgccaactcaacaacctcaacgcgttggaacccgaccaccgcgttgagtccgaaggtggtttgattcaaacatggaactctcaacaccctgagctgaaatgcgccgg

SEQ ID NO: 61363 - DNA, 273 bp, Glycine max
  Clone ID: 700762009H1
caggccaagccaggtaagcacaaccaaagcaacaccccaaatggcttcagcttctgttcccatggcgttgtcactgagctctgttaccaacaacaacaagccttcatccgaagccttcttcaggccactacccctacgccaaccaaagaggaccctcttcaccacgaaggcagtgtcaaactccaagcctcaaatcaatgcatctttgaaggagaaggcagttgccggactcacagcagcttctgtgacagcatctatggtggttccggagtg

SEQ ID NO: 61364 - DNA, 271 bp, Glycine max
  Clone ID: 700762021H1
ggctacttcaaagttgaaaacccagaatgtggttgtatctctctccctaaccttaaccttggtactggtgctactgaccagcaaggcaaactcagcggaaactgtttctttcagctggaacaagttcgtgccgaagcaaccaaacatgatcctccaaggagacgctattgtgacctcctcgggaaagttacaactcaataaggttgacgaaaacggcaccccaaaaccctcgtctcttggtcgcgccctctactccacccccatccacatt

SEQ ID NO: 61365 - DNA, 270 bp, Glycine max
  Clone ID: 700762023H1
actttgtaaaagatgaagtatggtatgccttagttgttgtgataagcaatgcttctgagcttcatggatatacagtaagagcattatacagagcatttcaaacgtcagctgaacaggagactctagttcgagttacagtgtggtgcattggggagtatggtgacatgttagtcaataatgttggaatgctagacatagaagatccaataacagtgactgagtccgatgcagttgatgtcatagagattgctataaaacgccatgcatcag

SEQ ID NO: 61366 - DNA, 271 bp, Glycine max
  Clone ID: 700762024H1
actcgccatacccgttaacaagcctggtagatttgagagtttcttcctatctagcactgaagctcaacaatcctacttgcaaggattcagcaggaacattttagaggcctcctacgataccaaattcgaggagataaacaaggttctgtttagtagagaggaagggcagcagcaaggggagcagaggctgcaagagagcgtgattgtggaaatctcgaaggaacagattcgggcactgagcaaacgtgccaaatctagttcaaggaaaacc

SEQ ID NO: 61367 - DNA, 266 bp, Glycine max
  Clone ID: 700762035H1
ctcagtttcctttgttacattaaacaaggttggtggatttcttcagaggatggacctggctcgcaagtatgcgtttggaaagatgctggtgattggatcacaggcaccatttaaggtgaaggggttgtggctcttccgcggccaagagattccacaatttgtgattgatgaatgctatgatatggagctctatgactggaccaaggttgatatctctgatgaaactcagaaagagcgcgtcaatcagatgatcgaggattatgaac

SEQ ID NO: 61368 - DNA, 254 bp, Glycine max
  Clone ID: 700762085H1
ggtttatgcaattttttctggaatttcgggttgcttatgatttggggctgatttttcacatggttttttttcttcattcctatctgctgatttgtatgttaacatcaatgtttatgctctcttgttgtcttatgttgtttggttgctgagaaattttaggagaatttcataaacctagaacttttaatgtatttattgttgttactgttaaaaccgctttttaccttaattttcaatatgaagagacaagtttt

SEQ ID NO: 61369 - DNA, 254 bp, Glycine max
  Clone ID: 700762087H1
caccgcacgaatatcttgttgtttggagcgatccgagaaaaactctgtaaacatgttggtttaccaggacctccttacaggtgatgagcttctctctgactccttccgttacaaggaaattgagaatggaatgctgtgggaagttgaggggaagtgggttgttaaaggagcagttgatgtagacattggtgcaaacccttctgctgagggtggaggagaagatgagggagttgatgatgcagctgttaaggttg

SEQ ID NO: 61370 - DNA, 242 bp, Glycine max
  Clone ID: 700762103H1
ctccattgtctttgaacactcatcaccatggccaagcttgttctttccctttgtttccttcttttcagtggctgcttcgctctgagagagcaggcacagcaaaatgagtgccagatccaaaagctgaatgccctcaaaccggataaccgtatagagtcggaaggtgggttcattgagacctggaaccctaacaacaagccattccagtgtgccggtgttgccctctctcgctgcacccttaa

SEQ ID NO: 61371 - DNA, 240 bp, Glycine max
  Clone ID: 700762106H1
cacacaactactacaagtacttccttacaatcaaaaccaacaacaactatggcaagttatcaaaagcactacgatgatcagggtcgcaaggttgacgagtatggcaacgttgagaagcaaaccgacgaatacggcaaccctgttcatgctgctagtgtcacctatgtagccaccagaactgctgctggtggttacagtgatgacattaataagcaacatgataccaccaatgcctacggc

SEQ ID NO: 61372 - DNA, 240 bp, Glycine max
  Clone ID: 700762133H1
gcatgatagttcagtgtctacaataccaggtgattttgtcattggtgtcaagttgacaaccataaacaatatgtgtgcatatgggctcaatcctggtatttcaggttctcgtcttttgggcaccattcctcagtccatttcacagcaaactgtttggaatcaaatggcaacagtgagaacaccattgaattttgattctagcaagcagagcttttgtcagttttctattgaccttctcgg

SEQ ID NO: 61373 - DNA, 235 bp, Glycine max
  Clone ID: 700762139H1
cttagaaatattaaggggttcaatttttcactttacacgatgtacaatgcataacatgattcaccacgtgtaatataatatgaaaaagtaatgtaatactctgaaattttgaagtatatgatgcaggtcgtcatatggtaaaacaactagttataaaggagaaaaatctgaacttttatgtaagtgcaaaagaatagcctttctgacatggtctaaactgaatttgaaatctgac

SEQ ID NO: 61374 - DNA, 228 bp, Glycine max
  Clone ID: 700762148H1
atcaagggtgggtgaagatacttgtttcctcaggttctggggtttttgagaacaaaaatgcagatgtatgggatgatttctttggtcttcttaaatttagaggcatcaatatggataaaattcatttgagaggatcatctgatccatgctggtgtccttctcagtcttctctatctgccaaagtttcctcgaaaataggaccagtcaatcctgtaatggttactgcag

SEQ ID NO: 61375 - DNA, 226 bp, Glycine max
  Clone ID: 700762159H1
gttattatcaaataattaattaaattcctcgtggaatcttgttgaagccatgtctacagctggtcaggtcatcaagtgcagagctgcggtggcatgggaagcagggaagccactatcgatagaaaccatagaagtggcaccaccccagaaaggtgaagtgcgtttgaagatcctcttcaactccctttgccgtacagatgtttactggtgggatgctaagggccag

SEQ ID NO: 61376 - DNA, 227 bp, Glycine max
  Clone ID: 700762163H1
aacaccagtaggcactgcgatcaaatcaccctctctgaagcgatgtacaacaatgaagacactcctgttgttgccgtttctattattgacaccaacagcttggagaaccagctcgaccagatgcctaggagattctatcttgctgggaaccaagagcaagagtttctaaaatatcagcagcagcagcaaggaggttcccaaagccagaaaggaaagcaacaagaaga

SEQ ID NO: 61377 - DNA, 225 bp, Glycine max
  Clone ID: 700762173H1
gaaaagggacaagcttagttgtcaagttggaattaacccatattctatggaatggactggtttggccaatagattactgagtaagggcaacgatattctgtgttgcgattatgctagttttgatggtttgattaccaagcaagttatgagcaagatggcagaaatgatcaacagtctttgtggtggtgatgaaaaactgatgcgtgaaaggacacacctgctgtt

SEQ ID NO: 61378 - DNA, 224 bp, Glycine max
  Clone ID: 700762174H1
ccctgttcctgtgtgtgtgagtgaccgagtgagtttgtttttctcagctgatatatatggcgcttgatcgctccattataagcaaaacgacgtggtacagcgtcgtattatggatgatggtggtgctggtgagagtgcacggtgcagccgcgaggccgaaccggaaggagtgggactcagtcataaagttaccgactgaaccggtggatgctgactcggatgaa

SEQ ID NO: 61379 - DNA, 233 bp, Glycine max
  Clone ID: 700762181H1
ttctctccattgtctttgaacactcatcaccatggccaagcttgttctttccctttgtttccttcttttcagtggctgcttcgctctgagagagcaggcacagcaaaatgagtgccagatccaaaagctgaatgccctcaaaccggataaccgtatagagtcggaaggtgggttcattgagacctggaaccctaacaacaagccattccagtgtgccggtgttgccctctctc

SEQ ID NO: 61380 - DNA, 229 bp, Glycine max
  Clone ID: 700762187H1
gttaagttgacaaccataaacaatatgtgtgcatatgggctcaatcctggtatttcaggttctcgtcttttgggcaccattcctcagtccatttcacagcaaactgtttggaatcaaatggcaacagtgagaacaccattgaattttgattctagcaagcagagcttttgtcaattttctattgaccttctcggtggaggaattttagtggacaaaactggagattgga

SEQ ID NO: 61381 - DNA, 251 bp, Glycine max
  Clone ID: 700762201H1
aagagctccctcgttcatatccacaacactgaggcagcaacaggaagagcaacctttggaagtgcggaaatatagagctgaattgtctgaacaagatatatttgtaatcccagcaggttatccagttgtggtcaacgctacctcagatctgatttctttgcttttggtatcaatgccgagaacaaccagaggaacttccttgcaggttcgaaagacaatgtgataagccagatacctagtcaagtgcagga

SEQ ID NO: 61382 - DNA, 244 bp, Glycine max
  Clone ID: 700762211H1
tggtccttaaacactcatcagtcatcaccatggccaagctagttttttccctttgttttctgcttttcagtggctgctgcttcgctttcagttccagagagcagcctcagcaaaacgagtgccagatccaaaaactcaatgccctcaaccggataaccgtatagagtcagaaggagggctcattgagacatggaaccctaacaacaagccattccagtgtgccggtgttgccctctctcgctgc

SEQ ID NO: 61383 - DNA, 238 bp, Glycine max
  Clone ID: 700762243H1
ttcaagaccaatgatagaccctcgatcggaaaccttgcaggggcaaactcattgttgaacgcattgccagaggaagtgattcagcacacttttaacctaaagagccagcaggccaggcaggtgaagaacaacaaccctttcagttcctggttccacctcaggagtctcagaggagagctgtggcttagagagccctttttgcatgtgctaccacacttttgtccttttgggctctagc

SEQ ID NO: 61384 - DNA, 236 bp, Glycine max
  Clone ID: 700762263H1
gctactgcgactgcgcttcacgatgggtgcttacaagtatgtttcggagctatggcgcaagaagcagtctgatgttatgagattcttgcagcgggtgaggtgctgggagtaccgccagcaaccttctattgtccgtttgaaaggtctactcgcccagacaaggctcgccgcttgggtttcaaggctaagcagggttatgtgatttaccgtgttcgtgtacgaaggggtggccggaa

SEQ ID NO: 61385 - DNA, 237 bp, Glycine max
  Clone ID: 700762267H1
ttattatcaaataattaattaaattcctcgtggaatcttgttgaagccatgtctacagctggtcaggtcatcaagtgcagagctgcggtggcatgggaagcagggaagccactatcgatagaaaccatagaagtggcaccccccagaaaggtgaagtgcgtttgaagatcctcttcaactccctttgccgtacagatgtttactggtgggatgctaagggccagactccgctgtttc

SEQ ID NO: 61386 - DNA, 233 bp, Glycine max
  Clone ID: 700762279H1
agcaggacttcccaggcccctcacgcccctccatcaaggtggatcccctcatcaagatgccactccacagatcatcatcctcggagaaatcaaaaaagaggttgtttcacactgctgtcactgcctctgattctgtgtcaacacgtggcagtgcagagtgatgtactattggttcaagaagttcagggatggaggaggagacgaatccgggatggggggtttcacccggatcc

SEQ ID NO: 61387 - DNA, 232 bp, Glycine max
  Clone ID: 700762285H1
tctctccattgtctttgaacactcatcaccatggccaagcttgttctttccctttgtttccttcttttcagtggctgcttcgctctgagagagcaggcacagcaaaatgagtgccagatccaaaagctgaatgccccaaaccggataaccgtatagagtcggaaggtgggttcattgagacctggaaccctaacaacaagccattccagtgtgccggtgttgccctctctcg

SEQ ID NO: 61388 - DNA, 231 bp, Glycine max
  Clone ID: 700762294H1
atatcctagtataccttaataaataatttaagatactatgatgagagcacggttcccattactgttgctgggacttgttttcctggcttcagtttctgtctcatttggcattgcttactgggaaaaagagaacccaaacacaacaagtgtctccagagttgcaatagcgagagagactcgtacaggaaccaagcatgccacgctcgttgcaacctccttaaggtggagaaa

SEQ ID NO: 61389 - DNA, 231 bp, Glycine max
  Clone ID: 700762296H1
gagaatacaggtatatcattggcctgtgctatgaatagttcttttagggggcgcgccagttctgatatttacaccatctgctctcaagactgtgaattgtggaatcctgcttgcacaaaagcaatgactatgtcattaatccaaacccgtgttctgatgcatggagtttggaatttctgaagcgtactggatttcattgcgatatcatttgtgtcactggatggactgcca

SEQ ID NO: 61390 - DNA, 121 bp, Glycine max
  Clone ID: 700762317H1
ggcttttgtacctggggaattattgctgactcgtggggatcttttgctcattatgcggtttcagtttacttgggtggttatgacaaggaggataaggcagccagagcttatgatctcgcag

SEQ ID NO: 61391 - DNA, 139 bp, Glycine max
  Clone ID: 700762349H1
caaaaaaaaaacaactttgcggctgcgctgctgctaatagcgcgttgcatctgctacctatcatacatattttcgccaaaccgccgattccgttgagcgtttctaccgtagcgctcaggaaggaggcagtggctggtgg

SEQ ID NO: 61392 - DNA, 129 bp, Glycine max
  Clone ID: 700762376H1
ctcaaatgccatgaagtttgattttccttattgacaatcccaaacagtctacagtttttgacattctcttgggaatttctcaagattttgaaattgctggtaatactcttatgccagctttttctgttc

SEQ ID NO: 61393 - DNA, 135 bp, Glycine max
  Clone ID: 700762411H1
cactcatcaccatggccaagcttgttctttccctttgtttccttcttttcagtggctgcttcgctctgagagagcaggcacagcaaaatgagtgccagatccaaaagctgaatgccctcaaaccggataaccgat

SEQ ID NO: 61394 - DNA, 122 bp, Glycine max
  Clone ID: 700762440H1
cccaatagaggtatgtggtcctaataatggttttgaaatgtggagttctgagtgggcaaatcaaacttcatggcatttgagtttccttattgacaatcccaaacagtctacagtttttgata

SEQ ID NO: 61395 - DNA, 250 bp, Glycine max
  Clone ID: 700762441H1
tttgaacactcatcaccatggccaagcttgttctttccctttgtttccttcttttcagtggctgcttcgctctgagagagcaggcacagcaaaatgagtgccagatccaaaagctgaatgccctcaaaccgataaccgtatagagtcggaaggtgggttcattgagacctggaaccctaacaacaagccattccagtgtgccggtgttgccctctctcgctgcacccttaaccgcaatgcccttcgtaga

SEQ ID NO: 61396 - DNA, 252 bp, Glycine max
  Clone ID: 700762464H1
ctccccttgctgcggttgctccatcacctaatcacttccccacttcccctgtaaatcacgtttagttcgcacaaggttttaaaaaatggctgatgctgaggacattcaacctcttgttgttgataatggactggaatggtcaaggcgggttttgcaggtgatgacgctcctagggccgtgttccccagtattattgggcgaccacgccataccggtgtaatggttgggatgggtcagaaggatgcttacgtg

SEQ ID NO: 61397 - DNA, 113 bp, Glycine max
  unsure (1)..(113): unsure at all n locations
  Clone ID: 700762467H1
ggtgaaaanccatgnccgtcctgttcttggagggaatganaccttctccttatcnntcgtagggnganaactggtagacaacnnccncggaaagatgcctaagagtgananta

SEQ ID NO: 61398 - DNA, 118 bp, Glycine max
  Clone ID: 700762473H1
ggaatcctgcttgcacaaaagcaatgactatgtcatttaatccaaacccgtgttctgatgcatggagtttggaatttctgaagcgtactggatttcattgcgatatcatttgtgtcac

SEQ ID NO: 61399 - DNA, 245 bp, Glycine max
  Clone ID: 700762474H1
gagctgataagaaaatgcagttatatcatcatcccttggatttggaaagccagagggtgagacttgcattggaggaggagggtgtagattatacatctcaccatgtcaatcccattactgccaagacttggattccactttcttcaagatgaatcgccatggaagagtcccggttttccaaaatggctctcacatcatttacaatactattgatataatccagtacatagaaagaattgctgtgg

SEQ ID NO: 61400 - DNA, 149 bp, Glycine max
  unsure (1)..(149): unsure at all n locations
  Clone ID: 700762637H1
tctcactcttcttgcagcatctctctccattnccttcataactcaatctcccattattattagagatgacggttgaaaaggaagatttgggtttgagtctaagcttgagcttccctcagaaccccccaactcatcttcatctcaatctg

SEQ ID NO: 61401 - DNA, 183 bp, Glycine max
  Clone ID: 700762640H1
ggaggataataagttgttgtagactttcactttcccaatgaacatctagtgcttcattttggagctatatcaatttcttcatatcttggtggacttgagtgtaaaatcaataagcacaaaaagaatttgaatttgtacttattcaacagatccacccgaaagccattgatttaggtgcatctt

SEQ ID NO: 61402 - DNA, 147 bp, Glycine max
  Clone ID: 700762653H1
ctaagaaagtcttccatagccccccaaaaatgaagagcaccatcttctttgctctctttctcttttgtgccttcaccacctcatacctaccttcagccatcgctgatttcgtgctcgataatgaaggtaaccctcttgaaaatggtg

SEQ ID NO: 61403 - DNA, 160 bp, Glycine max
  Clone ID: 700762789H1
gtcgcagcaaatcaaaatggccaacaagaaaatgaagaaggaacaatattcttgtgaccatccacctgcatcatgggattggaggaaaaaaggtgtcatcacccaagtaaagtaccaagggggctgtggaagcggttgggcgttttctgccacgggagcc

SEQ ID NO: 61404 - DNA, 160 bp, Glycine max
  Clone ID: 700762790H1
ataaaattcttccaccaagttatgggtttccttgtgttgcttcttttctccctcttaggtctctcttctagttccagcatatcaactcatcgttccatattggaccttgacctaaccaagtttaccacacagaaacaggtgtcttcactgttccaactat

SEQ ID NO: 61405 - DNA, 263 bp, Glycine max
  Clone ID: 700762811H1
ctctccattgtctttgaacactcatcaccatggccaagcttgttctttccctttgtttccttcttttcagtggctgcttcgctctgagagagcaggcacagcaaaatgagtgccagatccaaaagctgaatgccctcaaaccggataaccgtatagagtcggaaggtgggttcattgagacctggaaccctaacaacaagccattccagtgtgccggtgttgccctctctcgctgcacccttaaccgcaatgcccttcgtaga

SEQ ID NO: 61406 - DNA, 258 bp, Glycine max
  Clone ID: 700762843H1
ctccattgtctttgaacactcatcaccatggccaagcttgttctttccctttgtttccttcttttcagtggctgcttcgctctgagagagcaggcacagcaaaatgagtgccagatccaaaagctgaatgccctcaaaccggataaccgtatagagtcggaaggtgggttcattgagacctggaaccctaacaacaagccattccagtgtgccggtgttgccctctctcgctgcacccttaaccgcaatgcccttcgt

SEQ ID NO: 61407 - DNA, 273 bp, Glycine max
  Clone ID: 700762927H1
gttcaatatcctagtataccttaataaataatttaagatactatgatgagagcacggttcccattactgttgctgggacttggttttcctggcttcagtttctgtctcatttggcattgcttactgggaaaaagagaaccccaaacacaacaagtgtctccagagttgcaatagcgagagagactcgtacaggaaccaagcatgccacgctcgttgcaacctccttaaggtggagaaagaagaatgtgaagaaggtgaaattccacgaccacg

SEQ ID NO: 61408 - DNA, 270 bp, Glycine max
  Clone ID: 700762989H1
cacgaaacagaaaatgccaggactcacagcaccttccgattactcccaagaacccccccgccactcttctcttctcatcaacgccaaggaacctttcaatgcggagccaccgcgtgctgcgttggttgcttcctacgtcaccccttccgatttcttctataagaggaaccacggtccaatccccatcgttgagaacatcaacagatattccgtgaacgtgtccggcttggtggagcgtcccaaacagctcttcatgaaagatatatggat

SEQ ID NO: 61409 - DNA, 253 bp, Glycine max
  Clone ID: 700763091H1
tacatgtggtagtggacgtggtggtttacccaccactgcttggattagttctgcagttaacaatcgctcctcagatatcaacaaaaagattcgcacagcacttgggaaaggtaagaaaattgtttttcttaccagagttgatccttttccagtagctttactggctgttctttttggcgttaagaatgaaattctgagttctaacgccactaaccctatgctgacgcgacttcttgagaactgtaagagtctc

SEQ ID NO: 61410 - DNA, 261 bp, Glycine max
  unsure (1)..(261): unsure at all n locations
  Clone ID: 700763147H1
gncgtgtgtgatactttcctttcatcttcttcttctctctgcgataaaagcaaaacctaaaatttggtttaggcataggaatctgttgtagagttgatctacctggaatggagggagcatcgtggaatagtagtgtttgtgtggcaccgtttctgagcaagactacgacatggttgatgatccttccaccgacttagtggtgtcgtggggcgaaaacaacaactcctttgttgtttggaagttccccaattcgccacagac

SEQ ID NO: 61411 - DNA, 259 bp, Glycine max
  Clone ID: 700763152H1
ttattaacactttccttagttcaatatggggaagcccttcttcactctctctctttcttccctttgcttgctactcttgtcgagtgcatgctttgctattacctccagcaagttcaacgagtgccaactcaacaacctcaacgcgttggaacccgaccaccgcgttgagtccgaaggtggtcttattgaaacatggaactctcaacaccctgagctgcaatgcgccggtgtcactgtttccaaacgcacctcaaccgca

SEQ ID NO: 61412 - DNA, 279 bp, Glycine max
  Clone ID: 700763306H1
aggaattttagtggacaaaactggagattggatcacacttatacaaaattctccaattagtaacttgttgagagttgctgcttggaagaaaggctgtttaatggttaagattgtgatgtctgggaatgcagcagtcaaaaggagtgattgggcctcattggtacaagtgtttttaacaaacagcaacagtacagagcattttgatgcatgtaagtggacaaaatcggaaccacattcctgggaattgatcttcccaatagaggtatgcggtcctaataa

SEQ ID NO: 61413 - DNA, 276 bp, Glycine max
  Clone ID: 700763328H1
gagaaaatgcgtccctgctgaaaacaccaaaccctaaaacgcgaaaagggttctaagaatttgcgaaggaaagagctagcggagatggagattcactacagtaacagctatttcgagaggcgccccatcctcaagtccaaggctgccgctgtcaaatgggtcaaagaatgggttccccaagatcttgtgacaacaggagggaagtgcatgatcttaaaatgggtaacagaggataccttgaagaccttgaaagaaaaggtaaaagagccttcagtg

SEQ ID NO: 61414 - DNA, 276 bp, Glycine max
  Clone ID: 700763335H1
aattttgataaaccgcgatcacaggttgccgcaccttaaaaccggaaacaaaagcaatcgttacttgatttcaagaatttctcaatttctttctacttctttgtgtacgatttcttaagggaaagaaaatcactctctgtgctggccacagacttcgtgaatcattttcttttccacttttagtttatttgctgaacactctcctatttgatataggacttcgtgtcagatttaaacttcttctgtttctttctcagttctctgttcaatttcaag

SEQ ID NO: 61415 - DNA, 271 bp, Glycine max
  Clone ID: 700763346H1
cacctgctcaataaaaaaacgagcatattcatataaatacttctactacagattcaatctttcgttctctgacagttctttctccaaacccacctttctatcttttccatcagagcattatttgataccctctctgcagcaacgcatttttcctcattctcttaaacactttctcttttctccttcgtttgatctgcattaaaattgcataaatatataaaaaatgaagaagtttgtactcaagttagatttgcatgatgacaaggataag

SEQ ID NO: 61416 - DNA, 271 bp, Glycine max
  Clone ID: 700763356H1
gtttttaacaaacagcaacagtacagagcattttgatgcatgtaagtggacaaaatcggaaccacattcctgggaattgatcttcccaatagaggtatgtggtcctaataatggttttgaaatgtggagttctgagtgggcaaatcaaacttcatggcatttgagtttccttattgacaatcccaaacagtctacagtttttgatattctcttgggaatttctcaagattttgagattgctggtaatactcttatgccagctttttctgtt

SEQ ID NO: 61417 - DNA, 267 bp, Glycine max
  Clone ID: 700763361H1
tgcggtttcctttgttggtgttgctgggaactgttttcctggcatcagtttgtgtctcattaaaggtgagagaggatgagaataaccctttctacttgagaagctctaacagcttccaaactctctttgtccttagcgggagagccatacttaccttggtgaacaacgacgacagagactcctacaaccttcaccctggcgatgcccagagaatcccagctggaaccacttactatttggttaaccctcacgaccaccagaatctca

SEQ ID NO: 61418 - DNA, 269 bp, Glycine max
  Clone ID: 700763369H1
gtttgagattaccccagagaaaaaccctcagcttcgggacttggatgtcttcctcagtgttgtggatatgaacgagggagctctttttctgccacacttcaattcaaaggccatagtggtactagtgattaatgaaggagaagcaaacattgaacttgttggcattaaagaacaacaacagaggcagcaacaggaagagcaacctttggaagtgcggaaatatagagctgaattgtctgaacaagatatatttgtaatcccagcaggtt

SEQ ID NO: 61419 - DNA, 265 bp, Glycine max
  Clone ID: 700763374H1
gaaatccaaattctcggggcagatatctttcgaccttgcttcacaccattcaacgaactgcactcactgtgctctctagaaccctaacttttgtgctaaaaccctaaaccacgtcgaatcgatgattgaaccctacaacaagctggttaaactagcggcgagggctttttacgatgatcttaccagcaaaggagataatcagcccaaaacgggaaggagtgataacaggggaatagctgtggtggttcttgacgcgctcacgaga

SEQ ID NO: 61420 - DNA, 267 bp, Glycine max
  Clone ID: 700763385H1
attcattccccttatctttctctcttctctctccccgcccaaaccctaactccctaccctattccgctttctctcatccatcatgaaaggaggaaagtccaagaccgaatctaagagagccgatgccaaacttgctgtgaataagaagggcgccgccaccaagactaggaaacccgccggaaaggggaaggcagcgaaagatcctaacaagccaaagaggcctccaagtgctttcttcgttttcatggaggaattcaggaaggtgtt

SEQ ID NO: 61421 - DNA, 262 bp, Glycine max
  Clone ID: 700763390H1
caaaagatgaaaacaggatggttaaggccatagattgcttagatgggtctgagattgatattgagcttgctcagttcatgaaaggatactttgaagggcatattcttgaaaatggttggccgcagttattgaaattgaaagattggccttcacctagcgcttctgaagaatttctactgtaccaaagacccgagtttatcagcaaactacctttacttcagtatattcactccaagtggggccttctcaatgttgcagctaa

SEQ ID NO: 61422 - DNA, 282 bp, Glycine max
  Clone ID: 700763401H1
gggaagttgtatgagggtaagcatattcctgtatctaatattagtgcaggggagaatcatgtagttcaaatacccctaatggcacaggaggaaattctgtcttctagtgcaagtgatttcagaactgcaatggtgagtagaaatagcaagcctcaagctactgcaatgcatgtgggagctatagaaattatcattgatagtttcgcaagtcctgactgcaacatagttggtgcaatgcttttggttgatacttatcataccaatcctgaaaatgcagttcgt

SEQ ID NO: 61423 - DNA, 282 bp, Glycine max
  Clone ID: 700763416H1
aactgctcacaaactcatggtagcaatgttggatggagatgagcggtttattgagcctacaccaaaatcactggaaaatttaaccctgcaatctgttaaggatgcagtgatgaatcaattttttggtgataacatggaggtatgcattgtaggtgactttactgaggaggacattgaatcttgcattcttgattaccttggcacagctcaggccgcaagaaatcacgaaagagagaaagaattcaacccacccttatttcgaccatctccatctgatttgca

SEQ ID NO: 61424 - DNA, 276 bp, Glycine max
  Clone ID: 700763428H1
tgaacactcatcaccatggccaagcttgttctttccctttgtttccttcttttcagtggctgcttcgctctgagagagcaggcacagcaaaatgagtgccagatccaaaagctgaatgccctcaaaccggataaccgtatagagtcggaaggtgggttcattgagacctggaaccctaacaacaagccattccagtgtgccggtgttgccctctctcgctgcacccttaaccgcaatgcccttcgtagaccttcctacaccaacggtccccaggaa

SEQ ID NO: 61425 - DNA, 213 bp, Glycine max
  Clone ID: 700763431H1
caatgtttctgtgttatgtgaaaagagaattgaataaatttggcatgcaattcggttgttggattcatgctatatgagtgtgtaaagaggtaacggggggtgatgactttcttggtcattgtcgtggctttgtgacttctattgcaaatgttgtcttgtaactttgttgtattttcggcaatatatctatatgatatctatctttctatcttt

SEQ ID NO: 61426 - DNA, 274 bp, Glycine max
  Clone ID: 700763436H1
ctggtttgcaaaaagacagagggttaattgtggagtattttggaaggatgtcttacgttgctcataacgttaatcagccccaagagaaagatttgttggagggaaatttttcctttgatattaaatctcgctctagattggaaaaagtttcctctacaaaagcacaatttgttagtggaaaaaccttcaaatatgatataattggtgctggttcacattcttcagaagattttcctgaaaaggaagatcaagaaaaacccaaaaagattgatgc

SEQ ID NO: 61427 - DNA, 275 bp, Glycine max
  Clone ID: 700763441H1
ggcaaaaggagatttgtttctggggatggtgaagagatgacattgattccgggaaccagtgttgaagaggcttacaataagctaatagttgaacttgagaaaagtgttcctacattggttggcattgaatgtcccaaggatgagaaacttcctcgtcgcaaaatttttgacaaacctaagacgcgctgcttcactattctccctatggagtttaatcttgtggttcgtcagaagtttttaaattttgtgaggttcattatgaagaaaagggacaa

SEQ ID NO: 61428 - DNA, 273 bp, Glycine max
  Clone ID: 700763444H1
ccccgacggccacctcttccaggtcgagtatgccctcgaagccgtccgcaagggcaacgccgccgtcggcgtccgcggcaccgacaacgtcgtcctcggcgtcgagaagaaatccaccgccaagctccaagactccaggtcggtgaggaagattgtgaatctggacaaccacattgcgctggcatgcgcggggctgaaggccgacgcacgtgtgctcataaacagggcacgtgtggagtgccagagccacaggctcaccgtggaggatcccgt

SEQ ID NO: 61429 - DNA, 272 bp, Glycine max
  Clone ID: 700763446H1
tactaggagtgaagtttaccacacatcactcaattagagatctcaattttcatccccaagctagtatattgttgaacttgcattttctctagtctttttacattgtaaccggaaataatgtgatttgcacatttctgggttatgtcatttgcacatttcatgtatggcttaaatgaatgaaaaaaaagacggattcaattggtccaaatttgacgacattggatatgatacttgatgaatttattcaacctgcaaaacttcatttgtactcg

SEQ ID NO: 61430 - DNA, 274 bp, Glycine max
  Clone ID: 700763456H1
ggtcaccggaactccccatggctgggatgtcctcttctacatcttccagttcttccgcgtcgtcctcctcttcaccgtcatcgttctcgtcggcaccggctggtccttcctcaaacccttcctccaggagcgcgaaaagaaggtcctcatgatcgtcatccctttacaagtcctcgctaatgtggcttccgtcgtcatcggcgaaacggggcccttcatcaaggattgggttacttggaatcaggttttcttgctcgtcgacattatttgctgc

SEQ ID NO: 61431 - DNA, 270 bp, Glycine max
  Clone ID: 700763458H1
catcctttataactctccccatttgccctcttttctcaacaataatgctcccataggagatataataataataatcctctcattctgcctcagccttattgcactacacaaaccctcacattggtagctagctatccaccatgatcaagaccttgaatccttacccaaatccagcaaaaactgctgagatcatgtcaaggtacaggccaatagcaccaaagcctgaaacctctccaaactcgtccatgagtgagggctcttgttcctctc

SEQ ID NO: 61432 - DNA, 270 bp, Glycine max
  Clone ID: 700763461H1
gggatggtgaagagatgacattgattccgggaaccagtgttgaagaggcttacaacaagctaatagttgaacttgagaaaagtgttcctacattggttggcattgaatgtcccaaggatgagaaacttcctcgtcgcaaaatttttgacaaacctaagacgcgctgcttcactattctccctatggagtttaatcttgtggtccgtcaaaagtttttaaattttgtgaggttcattatgaagaaaagggacaagcttagttgtcaagttg

SEQ ID NO: 61433 - DNA, 267 bp, Glycine max
  Clone ID: 700763474H1
cagcaacagtacagagcattttgatgcatgtaagtggacaaaatcggaaccacattcctgggaattgatcttcccaatagaggtatgtggtcctaataatggttttgaaatgtggagttctgagtgggcaaatcaaacttcatggcatttgagtttccttattgacaatcccaaacagtctacagtttttgatattctcttgggaatttctcaagattttgagattgctggtaatactcttatgccagctttttctgttccacaggc

SEQ ID NO: 61434 - DNA, 267 bp, Glycine max
  Clone ID: 700763475H1
gagcacacagtgttggtcgaacccattgtgtgaagttggtgcaccgtttgtacccagagattgatccagctctgaaccctgaccacgtccctcacattctgaagaagtgccctgatgccattccagaccctaaggccgtgcagtacgtgagaaacgaccgtggcacccccatgattctagacaacaattactacagaaatatattggacaacaagggcttgttgatagtggatcaccaactagccaatgacaagaggaccaagcctt

SEQ ID NO: 61435 - DNA, 268 bp, Glycine max
  Clone ID: 700763476H1
cttaaacactcatcagtcatcaccatggccaagctagttttttccctttgttttctgcttttcagtggctgctgcttcgctttcagttccagagagcagcctcagcaaaacgagtgccagatccaaaaactcaatgccctcaaaccggataaccgtatagagtcagaaggagggctcattgagacatggaaccctaacaacaagccattccagtgtgccggtgttgccctctctcgctgcaccctcaaccgcaacgcccttcgtagac

SEQ ID NO: 61436 - DNA, 268 bp, Glycine max
  Clone ID: 700763478H1
cttaattattaacacttccttagttcaatatggggaagcccttcactctctctctttcttccctttgcttgctactcttgtcgagtgcatgctttgctattagctccagcaagctcaacgagtgccaactcaacaacctcaacgcgttggaacccgaccaccgcgttgagtccgaaggtggtttgattcaaacatggaactctcaacaccctgagctgaaatgcgccggtgtcactgtttccaaactcaccctcaaccgcaatggcct

SEQ ID NO: 61437 - DNA, 265 bp, Glycine max
  Clone ID: 700763492H1
tttcctttgatattaaatctcgctctagattggaaaaagtttcctctacaaaagcacaatttgttagtggaaaaaccttcaaatatgatataattggtgctggttcacattcttcagaagattttcctgaaaaggaagatcaagaaaaacccaaaaagattgatgccagattgagacaaagaatagatcctcaatacaatgaggttcaggctcagatggaaacaaatttgtttaaattgtctcttgatgatgttgaaactcctaa

SEQ ID NO: 61438 - DNA, 267 bp, Glycine max
  Clone ID: 700763496H1
gattgggcctcattggtacaagtgtttttaacaaacagcaacagtacagagcattttgatgcatgtaagtggacaaaatcggaaccacattcctgggaattgatcttcccaatagaggtatgcggtcctaataatggttttgaaatgtggagttctgagtgggcaaatcaaacttcatggcatttgagtttccttattgacaatcccaaacagtctacagtttttgacattctcttgggaatttctcaagattttgaaattgctggt

SEQ ID NO: 61439 - DNA, 259 bp, Glycine max
  Clone ID: 700763501H1
ctccattgtctttgaacactcatcaccatggccaagcttgttctttccctttgtttccttcttttcagtggctgcttcgctctgagagagcaggcacagcaaaatgagtgccagatccaaaagctgaatgccctcaaaccggataaccgtatagagtcggaaggtgggttcattgagacctggaaccctaacaacaagccattccagtgtgccggtgttgccctctctcgctgcacccttaaccgcaatgcccttcgta

SEQ ID NO: 61440 - DNA, 52 bp, Glycine max
  Clone ID: 700763526H1
gtaaattctttcacttgagataaaaatatatccatcacctttgttcttatgt

SEQ ID NO: 61441 - DNA, 108 bp, Glycine max
  Clone ID: 700763594H1
attggatttgcatttccgggatgtcctgagacgtttgagaagccacaacagcaatcaagcagaagaggctcaaggtcgcagcagcaactacaagacagtcaccagaag

SEQ ID NO: 61442 - DNA, 156 bp, Glycine max
  Clone ID: 700760635H1
cttagacctcatcatcataaaccccctccagagaacaagaaacatccgaatggcaactatgactggtgtgagcctttcaagccccagggttttcttcaacgcatcaccctcaccgcaaaacacgtacgccgtaaagttcgcagttccactcagcca

SEQ ID NO: 61443 - DNA, 267 bp, Glycine max
  Clone ID: 700758672H1
ctctctgctctgcattggtgttcccatctttcagaatcacaacttcagctttctccaaatgtggcatcagggcttccattgccgttgagcaacaaacttcgcagactaaggttgctctcctcaaaattggtaccagaggaagtccatagctctggctcaggcatatgagaccagagacaagctcatggcatcacatccagagctagcggaagaaggggctattcagattgtgataataaaaacaactggtgacaaatactatcacag

SEQ ID NO: 61444 - DNA, 266 bp, Glycine max
  Clone ID: 700757107H1
aaacccgattttcataatttcttgcgcaagatcaccaaggagaacaatacccttcttgtgtttgatgaagttatgactgggtttcgtttgtcatacggaggtgctcaagagtattttggcataactcctgatatacaactctaggaaagatcattggtggaggtctgccggtgggggcttatggagggaggagggatattatggagaaggtggcaccagctggcccaatgtatcaggctgggaccttgagtgggaacctttggcca

SEQ ID NO: 61445 - DNA, 236 bp, Glycine max
  Clone ID: 700762772H1
caatggcaatggcttcttcaatccctaatgcgccttctgcgttcaattctcagagctacgttggtctcagagcgccactgaggaccttcaacttttcttctcctcaagctgccaaaattcctcgctcccaacgccttttcgtcgtcagagcctccgattcggagttcgaagccgccgttgtcgccggtacagttccgccggcgctcccgtgccgcccagaccggcggctccggttg

SEQ ID NO: 61446 - DNA, 270 bp, Glycine max
  Clone ID: 700757662H1
gacggcgctaaggcatacaaggacagcaaagtctgcaacatgcttacaatgcaagaattccacagaagataccatgatgaaactgggatcacatttgcttccctttacccaggttgcatcgccacaacaggcttgttcagagagcacattcccttgttcagacttctcttccctccattccaaaagtacataaccaagggctttgtctcagaagatgaatcaggaaagagacttgcacaggttgtgagtgatccaagcctaacaaaatca

SEQ ID NO: 61447 - DNA, 253 bp, Glycine max
  Clone ID: 700758320H1
cactttctctcgtttcaatcgaaaaaaatcatgggcagaaaattcttcgtcggtggcaactggaaatgcaatgggaccactgaggaggtgaagaagattgttactactttaaatgaagtaaagtccctggagaagatgttgtagaagttgttgtgagccctccttttgtgttccttccttttgtaaaaagtttgctgcgccctgatttccatgtctcggcccaaaattgttgggttcgcaaaggtggtgctta

SEQ ID NO: 61448 - DNA, 145 bp, Glycine max
  Clone ID: 700760847H1
gaaaattcttcgtcggtggcaactggaaatgcaatgggaccactgaggaggtaaagaagattgttactactttgaatgaggctaaagtccctggagaagatgtcgtagaagttgttgtgagccctccttttgtgttccttcctgt

SEQ ID NO: 61449 - DNA, 238 bp, Glycine max
  Clone ID: 700758937H1
tctcagtggtgtcatcctctttgaggaaaccctctaccagagcacagctgcaggcaagccctttgtgaatgtcttgaaggaagctggtgtgcttcctggcatcaaggttgacaagggcacagtcgagcttgctggaactaatggagaaaccaccactcagggtctagatggccttggtcagcgttctgccaagtactacgaagctggtgcacgttttgccaaatggcgtgcagtgctg

SEQ ID NO: 61450 - DNA, 248 bp, Glycine max
  Clone ID: 700758028H1
gccaggagaatggcctggttcccattgttgagcctgaggtccttgttgatggacctcgtgacattcacaagtgtgccgccgtcaccgagcgtgtccttgcagcatgctacaaggctttgggtgatcaccgtgtccttcttgagggtaccctattgaagccaaacatggtcacccctggatcccagtctgctaaggtttcccctcaggtggttgccgagcacactgtcagagcccttcagagaaccgtg

SEQ ID NO: 61451 - DNA, 270 bp, Glycine max
  Clone ID: 700756960H1
caggagctgaacccttccttcgtaagaaatcaaagtgccaccctttacatcagccaatgagttcaagtcaatagagaagttcaaaattttcaacacaaataatttgtgggtgaacttaaacgcagttaaaaggcttgttgaagctgatgctcttaagatggaaattattcccaatccaaaggaagttgacggaataaaagttcttcagctggaaactgcagctggtgctgcaataaggttctttgacaaggctatgggattaatgttcct

SEQ ID NO: 61452 - DNA, 242 bp, Glycine max
  Clone ID: 700758287H1
acttgaagtgctttctctcagcagatccacaagctttgtcaacagtttgtgctgaattgagtgaggcatgcaagaagcatggcttcttccttgttgtcaaccatggagttgatagcaagctcatagctcaagctcataagctcatagatgatttcttctgcatgcaactctcacagaagcagaaggctcagagaaagattggagaacattgtggctatgctaatagcttcattggaagattc

SEQ ID NO: 61453 - DNA, 269 bp, Glycine max
  Clone ID: 700698057H1
cttgttttcaatgatgatatccaaggcaagaaagaaaaaccttgcaggtttgttagcagcactcaagatggttagtgggaccctggcagagatgacttatttgttccttggtgctggggaggctggaactggtattgcagaacttattgctcttgagatttcgaaacagacgaatgctccaattgaagagtgccgcaagttggtttggctggtggactcaaagggtttgattgttgatctcgtaaaggctcacttcagccattcaagaa

SEQ ID NO: 61454 - DNA, 241 bp, Glycine max
  Clone ID: 700757283H1
ttctcaacaacttctggtacttcctactccaagcgcacttctgctccgcaattatcatgggcaaggtcaagatcggaatcaacggatttggaagaattggccgtttggtagccagagtggctctgcagagagacgatgttgaactcgttgccgttaacgaccctttcatcaccaccgattacatgacatactggtgtacatacgacagtgttcatggacactggaagcatcacgatgtcac

SEQ ID NO: 61455 - DNA, 268 bp, Glycine max
  Clone ID: 700763342H1
cactatcttggttcccgcagtcatgggcatggtcacgatcggaatcaacggatttggaagaattggccgtttggtggccagggtggctctgcagatagacgatgttgaactcgttgccgttaacgatcctttcattaccaccgattacatgacatacctgtgtacatacgacagtgttcacgggcactggaagcatcacggtgtcaccgttaaggatgataagacccttctcttcggtgacaagccagtcactgtttctggacacagg

SEQ ID NO: 61456 - DNA, 250 bp, Glycine max
  Clone ID: 700762316H1
cccctatctctcaccaacttccgctacttcctactccaaccactttcttttttcccgcagtcatgggcaaggtcaagatcggaatcaacggatttggaagaattggccgtttggtggccagggtggctctgcagagagacgatgttgaactcgttgccgttaacgatcctttcattaccaccgattacatgacatacatgtctaaatacgacagtgttcacgggcactggaagcatcacgatgtcaccgt

SEQ ID NO: 61457 - DNA, 281 bp, Glycine max
  Clone ID: 700762962H1
caacaacttctgctacttcctactccaaccgcacttctgctccgcaattatcatgggcaaggtcaagatcggaatcaacggatttggaagaattggccgtttggtagccagagtggctctgcagagagacgatgttgaactcgttgccgttaacgaccctttcatcaccaccgattacatgacatacatgtttaaatacgacagtgttcatggacactggaagcatcacgatgtcaccgttaaggacgagaagacccttctcttcggtgacaagccagtca

SEQ ID NO: 61458 - DNA, 259 bp, Glycine max
  Clone ID: 700757083H1
ttctcaacaacttctgctacttcctactccaaccgcacttctgctccgcaattatcatgggcaaggtcaagatcggaatcaacggatttggaagaattggccgtttggtagccagagtggctctgcagagagacgatgttgaactcgttgccgttaacgaccctttcatcaccaccgattacatgacatacatgtttaaatacgacagtgttcatggacactggaagcatcacgatgtcaccgttaaggacgagaagac

SEQ ID NO: 61459 - DNA, 276 bp, Glycine max
  Clone ID: 700760151H1
gactgttgatggaccatcagccaaggactggagaggtggaagagctgcttcatttaacatcattcctagcagcactggagctgccaaggctgttgggaaagtcctccctgctttgaatggaaaattgactggtatggcattccgtgttcccaccgtggatgtctctgttgttgacctcacagtgaggctggagaaagaagcttcctacgatgaaattaaaaatgctatcaaggaggaatcagagggcaagttgaagggaattcttggttacactga

SEQ ID NO: 61460 - DNA, 266 bp, Glycine max
  Clone ID: 700762033H1
cgctctctaataacatttctaatctcattctccttctgttcaaacactctctctcatggcatcagataagaagattaggatcggcatcaacgggtttggaaggattggccgtttggtggccagggttgcccttcaaaggaatgatgttgaacttgttgctgtcaacgatcttttcatcaccactgattacatgacatacatgttcaagtacgacaccgttcatggccagtggaagcattttgatgtgaaggtgaaggactctaaga

SEQ ID NO: 61461 - DNA, 267 bp, Glycine max
  Clone ID: 700763386H1
gcttcctacgatgaaattaaaaatgctatcaaggaagcttctttctccagcctcactgtgaggtcaacaacagagacatccacggtggggctggagaaagaagattcctacgatgaaattacaaatgctatcaaggaggaatcagagggcaagttgaagggaattcttggttacactgaagatgatgtggtctccactgactttaacggcgatagcagatcaagtatttttgatgcaaaggctggaattgcattgaataagaacttt

SEQ ID NO: 61462 - DNA, 239 bp, Glycine max
  Clone ID: 700761928H1
caaagggttaatcaatggaatcttgatttcatggagcatagtgaacagggagacaggtaccgtgaattagcccatagagtggatgaggctcttggcttcatgaatgttgctgggctcacagccgaccatcccatcatgagtacaacagacttttggacctcccatgagtgtttgcttctcccttatgagcaagcacttactagggaggattctactactgggcttcattatgattgctc

SEQ ID NO: 61463 - DNA, 264 bp, Glycine max
  Clone ID: 700763676H1
cgtgactgcagttaatgtctgtggggatggagtcctgcaggtttatacccctggcgaagagaggtttctaaaggtcgagaagaagaacattcggatttcccgagattggatcaataacaggtgggttgatatacagggaaagcccgacatttgcagctatttatcttcaaatgccaggtccagcatcaggatgtcagctaattctgcagtggtagatggatctatgtctgattgctctgcaatattagaaagtaaaccaacacc

SEQ ID NO: 61464 - DNA, 257 bp, Glycine max
  Clone ID: 700763678H1
taagaaagtcttccatagccccccaaaaatgaagagcaccatcttctttgctctctttctctattgtgccttcaccacctcatacctaccttcagccatcgctgattcgtgctcgataatgaaggtaaccctcttgaaaatggtggcacatattatatcttgtcagacataacagcatttggtggcataagagcagccccaacgggaaatgaaagatgccctctcactgtggtgcaatctcgcaatgagctcgacaa

SEQ ID NO: 61465 - DNA, 142 bp, Glycine max
  Clone ID: 700763680H1
caacttgcacccaccattatttaagttattattttaagtcacattcttggtagaattagaacacagcactctttggctcccacttgctagcaatttttagcttagagatgtattatacaaacgattttcatgaggaagaaaa

SEQ ID NO: 61466 - DNA, 266 bp, Glycine max
  Clone ID: 700763681H1
gctgatgataccatcaattttgaggcttttccccacaagctggtgcagtttggagagattcaggaaaaagttgtattgaaattttcacaagaggaatttcttacagcttgtcaactcaggtgcgtcctgcaacaactctgttggctgatgggtgtccatatttgtatgcaatggtgcatgatagttcagtgtctacaataccaggtgattttgtcattggtgtcaagttgacaaccataaacaatatgtgtgcatatgggctccat

SEQ ID NO: 61467 - DNA, 269 bp, Glycine max
  Clone ID: 700763682H1
atcaaggtcgtcacactcgaagcatgataagagtagcccttcataccatagaatcagttccgatttgaagcctggaatggtgtttgttgtccctcgcggtcatcccttcgtcaccatagcttccaatacagagaatctcctcatgatttgcttcgaggttaacgctcgagacaacaagaagtttacatttgcagggaaggacaacattgtgagttctctggacaacgttgctaaggagcttgcctttaactatccttctgagatggtga

SEQ ID NO: 61468 - DNA, 263 bp, Glycine max
  Clone ID: 700763683H1
ataacactggcgatgaaccagttgttgccatcagtcttcttgacacctctaacttcaataaccagcttgatcaaacccctagggtattttaccttgctgggaacccagtatagagtacccagagaccatgcaacaacaacaacagcagaaaagtcatggtggacgcaagcaggggcaacaccagcaggaggaagaggaagaaggtggcagcgtgctcagtggcttcagcaaacacttcttggcacaatccttcaacaccaacg

SEQ ID NO: 61469 - DNA, 267 bp, Glycine max
  Clone ID: 700763684H1
ggctcgaggaagacaacccagtctggttttgtgaatttcataagagacaagtacacagcacttcctgatacccgtgaaaggatggtagcaacagaagtaaccgcacttggaggtattcgtatgaatcgctgtatagcctccctcagaagccgctttactttacagaaaagtatcaggaagtgaaaaaagttctggctgacactttttttggcccaccaaaagggggagtctatagcccatctgttcaaaacacactctacctgatgg

SEQ ID NO: 61470 - DNA, 268 bp, Glycine max
  Clone ID: 700763685H1
cgggcctttacatttccgaataatctcagtagcagtactcaaaagctgaaaccttgaattcatgtctggttcagcttttgagtaccactaccaatggtgattttgtcaaggaaaagatctcgcaatggttaaagttaatgtagcatgtgctgctgttggcttgacatcaagttacactccaactccattgttggaatctggtttgcaaaaagacagagggctaattgtggaatattttggaaggatgtcttacgttgctcataacgtt

SEQ ID NO: 61471 - DNA, 267 bp, Glycine max
  Clone ID: 700763686H1
ataaagatgcgtttgaagagcccatggtggtgctaacaggtgtgtttgatgcttcttttccttgtgggggttacagctgcacgcatggaactgagcttcttcaaaatgatcagtcatcaagttatgatgctgatgagtattcaaaacgatgctgtgatctctgcaggtgcacacgctcaatgcctcctcaatgcagctgtgcagacattagagcgaattcatgccactcagattgtaagagctgcatgtgcacacgctcacagccag

SEQ ID NO: 61472 - DNA, 267 bp, Glycine max
  Clone ID: 700763687H1
aggacatgatggtactcaaggacttggtttgaatgacattcttagtttatcagatacaaaaccagataaagtatcagataaaaaacaagatatagttgaaggtgtcagggtatagtgaaattcgcaaaagagttcttggatcttattgatgctgcagatgctacagcacagagtgaaattgaccgtgaggctctcaagaggttagctgcagctggttcggtgaaaggtgctttagaaggtcatgaattgagaggattagcattacgc

SEQ ID NO: 61473 - DNA, 269 bp, Glycine max
  Clone ID: 700763688H1
aaggatttgaatgacacgaaactgcgaaatgccctaattcaagaagctggcattcggattttgtgattgggagagaaaccgacccagttgtgctactgcgaatgccgctgtcccgtgcaattcgaaggttctgaagaacaagggtttagaattagggtcttaaaccaactcaacctactttgtgggtaaaattagggattcaggtctaagttgaaaaattagggttttggcaagtcccctaaatgtcgatgggcaaacccagagacggt

SEQ ID NO: 61474 - DNA, 265 bp, Glycine max
  Clone ID: 700763689H1
gttgagtagcaaagcaatgagcgcagtgggtgggtttactctcactctcagtcccatcaatttgaaactcccccttctcccttccaatcgcctctttaaccgcaccccttcaaatcttccatttccttctccctacgctccaacgacgagcaacaacccctcggcctcgacatcgccgcactaaggtcagcttccgtgaggctcattgatgggaatcagatcatggtcggagttgtgtccaagactctggcccgtcaaatggccc

SEQ ID NO: 61475 - DNA, 265 bp, Glycine max
  Clone ID: 700763690H1
ctctgcaaaacccaaacactgtctccgtctggatggcggcatcgcgaatcgtggcccatcctccgccctatccccaccgtcaatctccgccgtcagatgccccgcgtccctcaacctcacacttaatccaaaacggtaccgtaacctcggcattcgcgcctcccttcgcggccacgaggagaagaacaagaacgatctcgccgataaaccccactccgtcgagttgcgagccaccagcacccccgacgacgtcgtttcccgagat

SEQ ID NO: 61476 - DNA, 266 bp, Glycine max
  Clone ID: 700763691H1
ctccagagttgcaatagcgagagagactcgtacaggaaccaagcatgccacgctcgttgcaacctccttaaggtggagaaagaagaatgtgaagaaggtgaaatccacgaccacgaccacgaccacaacacccggagagggaacctcagcaacccggtgagaaggaggaagacgaagatgagcaaccacgtccaatcccattcccacgcccacaacctcgtcaagaagaagagcacgagcagagagaggaacaggaatggcctcgc

SEQ ID NO: 61477 - DNA, 253 bp, Glycine max
  Clone ID: 700763692H1
attttggttaagagtcttgaaaaagcaagagaaaaaaaaataccaaccatggcaaccatttctgatcaacctagagggtcctactcctatggaacctcatatggagcaccctatggaaccacgtatgagaccaacaccagcattaacaacccaccttcacgccaaacagtgaagttcataactgctggcactattggcatcacactcttgctcctgtctgggttgaccctcacaagcactgtcatagggttga

SEQ ID NO: 61478 - DNA, 265 bp, Glycine max
  Clone ID: 700763693H1
caaccatcgaccgatctcaattctcaaccttaacctctcagaatgtcttacgcttatctcttcaaatacatcatcatcggtgacaccggagttgggaagtcttgcttctacttcaattcacagacaagcgctttcagcccgtccatgacttgaccatcggtgttgaatttggtgccaggatgatcacaattgataacaagccaatcaagttgcaaatatgggatacggctggtcaagaatcattcagatctattacaaggtctta

SEQ ID NO: 61479 - DNA, 267 bp, Glycine max
  Clone ID: 700763695H1
ggataatgtgctttgtgaattgtcacttggccgcacacttggaagcagttaatcggcggaatgctgattttgatcacatttatcgaaatatggtgttcacccgatgtccaacctacttaatactgcagctggtatggtaccatacctgttcttgctttgctctcttgccttctccacatatttattttggctactttactcttctggcttgccattggtcctctctgttacagctggcgtctctacttctgttcatgtgcttcgtgg

SEQ ID NO: 61480 - DNA, 270 bp, Glycine max
  Clone ID: 700763696H1
agttcatcgacaaccaattcacatcactgaaggaaattatgtcagaaagcaagatgtcagcattgaatatgatgcatgtacaattccaaatgattgtggttcattggtgttgccaaggttggaaatcacaaacaaattgttggtttccatgttgctggaagcaaaggaagactgggatatgcttcattgataccatatgttgagccagttgtgcaagctcaaagtgctgaagtttacttcgacttcttccctgtggaggttgatagtcaa

SEQ ID NO: 61481 - DNA, 259 bp, Glycine max
  Clone ID: 700763391H1
ctcgagccgctctctctttcgatctgggtactaaccctaacccgcttcgaaccgtggcttcctcaggctcgcagaacctctctcgaagaaaaccttcttcttcttcgtcttcgtcttctcaacaaacacccgggtcgacccggatcgtttaccgagaatctcggatcccatcggaatccgatttcccgatctggcagcagaactggttcatcgcattgctcttcgtcatggctctcggattcttcgccctcgccatttt

SEQ ID NO: 61482 - DNA, 262 bp, Glycine max
  Clone ID: 700763392H1
taaacttcttactgatgggaagttgtatgagggtaagcatattcctgtatctaatattagtgcaggggagaatcatgtagttcaaatacccctaatggcacaggaggaaattctgtcttctagtgcaagtgatttcagaactgcaatggtgagtagaaatagcaagcctcaagctactgcaatgcatgtgggagctatagaaattatcattgatagtttcgcaagtcctgactgcaacatagttggtgcaatgcttttggtt

SEQ ID NO: 61483 - DNA, 262 bp, Glycine max
  Clone ID: 700763393H1
ctgatctgaatgcgaagaacgaacgagagtgcagcggcaatgggtagaagcactttggctttggttctcgcgattctgatctcttttcagggaacccacgttagatccgatgcctccgatcaccgttacaaggatggagactccgtccctctttacgccaacaaagttggtccctttcacaaccccagtgaaacgtatcggtactttgacctgccattctgtgtaacaggtcatgagaaagaaaagactgaagccctcggtg

SEQ ID NO: 61484 - DNA, 76 bp, Glycine max
  Clone ID: 700763394H1
tgctaagctcttgttcaatcctgagagcttggggaacaaacctggtgatcagaatcagcatcacactattggccaa

SEQ ID NO: 61485 - DNA, 263 bp, Glycine max
  Clone ID: 700763396H1
aattttgataaaccgcgatcacaggttgccgcaccttaaaaccggaaacaaaagcaatcgttacttgatttcaagaatctctcaatttcttcctacttctttgtgtacgatttcttaagggaaagaaaatcactctctgtgctggccacagacttcgtgaatcattttcttttccactcttagtttattttctgaacactctcctatttgatataggacttcgtgtcagatttaaacttcttctgtttctttctcagttctct

SEQ ID NO: 61486 - DNA, 277 bp, Glycine max
  Clone ID: 700763402H1
agctggtgcagtttggagagattcaggaaaaagttgtattgaaattttcacaagaggaatttcttacagcttggtcaactcaggtgcgtcctgcaacaactctgttggctgatgggtgcccatatttgtatgctatggtgcatgatagttcagtgtctacaataccaggtgattttgtcattggtgttaagttgacaaccataaacaatatgtgtgcatatgggctcaatcctggtatttcaggttctcgtcttttgggcaccattcctcagtccat

SEQ ID NO: 61487 - DNA, 280 bp, Glycine max
  Clone ID: 700763403H1
cccatctattccaacaactttggaaagttctttgagatcacccctgagaaaaacccacagcttcgggacttggatatcttcctcagttctgtggatatcaacgaaggagctcttcttctaccacacttcaattcaaaggccatagtgatactagtgattaatgaaggagatgcaaacattgaacttgttggcattaaagaacaacaacagaagcagaaacaggaagaggaacctttggaagtgcaaaggtacagagctgaattgtctgaagacgatgtat

SEQ ID NO: 61488 - DNA, 296 bp, Glycine max
  Clone ID: 700763404H1
cacgcgtatcggatctcgagctacatggcagaaatgataaacagtctttgtggtggtgatgcaaaattgatgcgtgaaaggacacacctgctgttggcttgttgttcaaggatggcaatttgtaagaaagatgtttggagagttgaatgtggaatcccttctggatttccgctcacagttatttgcaatagcatttttaatgagatgctcattagatatagctatgaaaaattactgcgccaggctagagctccaagcatgtttttacaatccttcaaaaattttgtttctttgtg

SEQ ID NO: 61489 - DNA, 276 bp, Glycine max
  Clone ID: 700763405H1
ctgggatatgcttcattgataccatacgttgagccagttgtgcacgctcaaagtgctgaagtttactttgacttcttccctgtggaggttgatagtcaagagggagttgctcacattggtgaattgaaatctggtgtctatgttccactgcctacaaaaactaatttggtggaaactcccaaggaatggcaactggatctaccttgtgacaaaattcctagtgtcttgactacaactgatgagagattggtaggcacagaacatgagggatatgat

SEQ ID NO: 61490 - DNA, 279 bp, Glycine max
  Clone ID: 700763406H1
atcatcgaagtaataacaacattcgcgcgctcttcgtattttccttcttcaatccgcgcgacaccaaaaccctagatccggcgcaatcatcggctcttgagggatacagcaccgtccatgaccccaacttccgggttggcggttcctatgatgagagaaggtttatagatgaaagatatccaagggatgccgtttaccagagacataatttcccccgtgacattttggatagggaggcttatctgccgccaggacctcctgttggccactggagtcaaa

SEQ ID NO: 61491 - DNA, 258 bp, Glycine max
  Clone ID: 700763407H1
ttatgtcagaaagcaagatgtccgcattgaatatgatagcatgtacaattccaaatgactgtggttcattggttgttgccaaggttggaaatcacaaacaaattgttggtttccatgttgctggaagcaaaggaagactgggatatgcttcattgataccatatgttgagccagttgtgcaagctcaaagtgctgaagtttactttgacttcttccctgtggaggttgatagtcaagagggagttgctcacattggtg

SEQ ID NO: 61492 - DNA, 278 bp, Glycine max
  Clone ID: 700763408H1
agattttgaaattgctggtaatactcttatgccagctttttctgttccacaggctactgccagatcttctgcgaatgcggaatcctctgcatgatctggaatttgtgttttctttcatttgtccgtttgtttaattcaataaaggaaattaggcatgaccctcttgttgagtatgctctgcctatttgaaaatttccacacctcttttaattgtcgtaatgatgtgtgaagtgtgtgttattttaaaaaaaaaaaaaaaaaaaaagggcggccgccga

SEQ ID NO: 61493 - DNA, 295 bp, Glycine max
  Clone ID: 700763410H1
tatgcatgcggctcaagaacgcctattcggtgtggttacatttccgaataccattgtgcagattgaaccagacatgaattcaaggtttcagcttttgagtaccactaccaatggtgattttgttcaaggaaaagatctcgcaatggttaaagttaatgtagcatgtgctgctgttggcttgacatcaagttacactccaactccattgttggaatctggtttgcaaaaagacagagggttaattgtggaatattttggaaggatgtcttacgttgctcataacgttaatcagccc

SEQ ID NO: 61494 - DNA, 278 bp, Glycine max
  Clone ID: 700763411H1
cggctcgagaagaaagtgaagtgaaggaaagggtgggagggagtgctactgatactgaaattgaaatggaggagaagaagctcaaactgtattcctactggataagctcctgttccttccgagtccgatttgctctcaacctcaaaggactaccttacgattacctagcagtcacttcattttctgaccctgagtttcttaagctcaaccccattggatttgttcccgtgcttgtcgatggagattcagtaattgttgactctcttgccattattatg

SEQ ID NO: 61495 - DNA, 279 bp, Glycine max
  Clone ID: 700763412H1
cactcgagcgaattcggctcgactccattgtctttgaacactcaccaccatggccaagcactgttctttccctttgtttacatcttttcagtggctgcttcgctctgagagagcaggcacagcaaaatgagtgccagatccaaaagctgaatgccctcaaaccggataaccgtatagagtcggaaggtgggttcattgagacctggaaccctaacaacaagccattccagtgtgccggtgttgccctctctcgctgcacccttaaccgcaatgcccttc

SEQ ID NO: 61496 - DNA, 278 bp, Glycine max
  Clone ID: 700763413H1
ctgagagtcccctcaggaaccacatactatgtggtcaaccctgacaacaacgaaaatctcagattaataacactcgccatacccgttaacaagcctggtagatttgagagtttcttcctatctagcactgaagctcaacaatcctacttgcaaggattcagcaggaacattttagaggcctcctacgataccaaattcgaggagataaacaaggttctgtttagtagagaggaagggcagcagcaaggggagcagaggctgcaagagagcgtgattgt

SEQ ID NO: 61497 - DNA, 278 bp, Glycine max
  Clone ID: 700763415H1
taaacactcatcagtcatcaccatggccaagctagttttttccctttgttttctgcttttcagtggctgctgcttcgctttcagttccagagagcagcctcagcaaaacgagtgccagatccaaaaactcaatgccctcaaaccggataaccgtatagagtcagaaggagggctcattgagacatggaaccctaacaacaagccattccagtgtgccggtgttgccctctctcgctgcaccctcaaccgcaacgcccttcgtagaccttcctacacca

SEQ ID NO: 61498 - DNA, 71 bp, Glycine max
  Clone ID: 700763417H1
cgatcgaatcggctcgagagagattcaggacaaagttgtactgaaattttcacaagcggaatttcttacag

SEQ ID NO: 61499 - DNA, 277 bp, Glycine max
  Clone ID: 700763418H1
ggaaaaccatttcttctgaagataaacctttcaacttgagaagccgcgaccccatctattccaacaagcttggcaagttgtttgagattaccccagagaaaaaccctcagcttcgggacttggatgtcttcctcagtgttgtggatatgaacgagggagctctttttctgccacacttcaattcaaaggccatagtggtactagtgattaatgaaggagaagcaaacattgaacttgttggcattaaagaacaacaacagaggcagcaacaggaaga

SEQ ID NO: 61500 - DNA, 277 bp, Glycine max
  Clone ID: 700763419H1
ctcaatttcttcctacttctttgtgtactatttcttaagggtaagaaaatcactctctgtgctggccacagacttcgtgaatcattttcttttccactcttcgtataatttatgaacactctcctatttgatataggacttcgtgtcagatttaaacttcttctgtttctttctcagttctctgcttaatttcaagttcaagctggtgaaatcttggattagtgctctcactcttctatctgatataggacttcgtgggtagacttttccatttctc

SEQ ID NO: 61501 - DNA, 272 bp, Glycine max
  Clone ID: 700763420H1
tatttctcacactcgcaagtctcaagcaactcacacaggaagcggcaaacaaagcacacagaaagtaaaaagcggaaattaaggagcggtggtgacggtggtagtgaataaataaaagcagcaccataccatggggggagaagaagtagcaagagtcaaagcagagttgttcgacgacaacgaaagcgatcgcaacgacgacgacgttttgagcgagagcaaggactcgggagtgacgacggctcacgcagtaaagaagagatggatgacgg

SEQ ID NO: 61502 - DNA, 275 bp, Glycine max
  Clone ID: 700763421H1
caatatcctagtacaccgtattaaagaatttaagatatactatgatgagagcgcggttcccattactgttgctgggagttgttttcctggcatcagtttctgtctcatttggcattgcgtattgggaaaagcagaaccccagtcacaacaagtgcctccgaagttgcaatagcgagaaagactcctacaggaaccaagcatgccacgctcgttgcaacctccttaaggtggaggaagaagaagaatgcgaagaaggtcaaattccacgaccacga

SEQ ID NO: 61503 - DNA, 273 bp, Glycine max
  Clone ID: 700763422H1
gaggggaaccactctcaaccttcagatttttggactacggtgtgaccatttcattttacagggctccttatttggttgagattgatgtggtccaaggaaagagaattttgaggctggaggaggttgatgggaatggtgacgcatggagaagtgcagatgtgctgtctttcaacactggacattggtgggatcatcaaggctctcttcaagggtgggattatatggaattaggaggcaaatactaccaagatatggatcgtttagcagctttgg

SEQ ID NO: 61504 - DNA, 275 bp, Glycine max
  Clone ID: 700763423H1
acttaattagtgttcatgaatacgtcaagccttactttagtggttctaaattgaaaagctttctagctggtcataatatcaccattactgatggtattgacaagactagtgcaactttgcaatttagaaagttagcagattgtgattttctcaagagaaactttaagcagatgtctaatgttttgtgggtagctcctgaggacaaggcgagtttatggtcacaacttcattatgtttcgtgtaataatctggagatgcaagaagcttatcttgtc

SEQ ID NO: 61505 - DNA, 279 bp, Glycine max
  Clone ID: 700763424H1
agctattaaagaaccaaagagaatcctactttgtggatgctcagcctaagaagaaagaggaggggaataagggaagaaagggtcctttgtcttcaattttgagggctttttactgaataagtatgtactaaaatgtatgctgtaatagctcatagtgagcgaggaaagtatcgggctatgtaactatgactagagcttcaactatgaataaataaatcgacagcatatgatgcttttgttttgtgttcaaaaaaaaaaaaaaaagggcggccgccgact

SEQ ID NO: 61506 - DNA, 277 bp, Glycine max
  Clone ID: 700763425H1
acagtcaccagaagattcgtcacttcaatgaaggagacgtactagtgattcctcctggtgttccttactggacctataacactggcgatgaaccagttgttgccatcagtcttcttgacacctccaacttcaacaatcagcttgatcaaaaccccagagtattttaccttgctgggaacccagatatagagcacccagagaccatgcaacaacagcagcagcagaagagtcatggtggacgcaagcaggggcaacaccagcagcaggaggaagaagg

SEQ ID NO: 61507 - DNA, 273 bp, Glycine max
  Clone ID: 700763426H1
ctctccattgtctttgaacactcatcaccatggccaagcttgttctttccctttgtttccttcttttcagtggctgcttcgctctgagagagcaggcacagcaaaatgagtgccagatccaaaagctgaatgccctcaaaccggataaccgtatagagtcggaaggtgggttcattgagacctggaaccctaacaacaagccattccagtgtgccggtgttgccctctctcgctgcacccttaaccgcaatgcccttcgtagaccttcctaca

SEQ ID NO: 61508 - DNA, 273 bp, Glycine max
  Clone ID: 700763427H1
ttcgagcgaatcggctcgagactagttcaatatcctagtataacttaataaataatttaagatactatgatgagagcacggttcccattactgttgctgggacttgttttcctggcttcagtttctgtctcatttggcattgcttactgggaaaaagagaaccccaaacacaacaagtgtctccagagttgcaatagcgagagagactcgtacaggaaccaagcatgccacgctcgttgcaacctccttaaggtggagaaagaagaatgtgaa

SEQ ID NO: 61509 - DNA, 263 bp, Glycine max
  Clone ID: 700763429H1
ctgaaaccttgaattcatgtctggttcagcttttgagtaccactaccaatggtgattttgttcaagggaaagatctcgcaatggtcaaagtcaacattagcacatgctacattaactttaaccattgcgagatctttcccttgaactaaatcaccattggttaaagttaatgtagcatgtgctgctgttggcttgacatcaagttacactccaactccattgttggaatctggtttgcaaaaagacagagggttacttgtgga

SEQ ID NO: 61510 - DNA, 276 bp, Glycine max
  Clone ID: 700763430H1
ggaaggcatagtacacaggacagttgaagtgaatggcataaaaatgcatgttgctgagaaaggtgaaggtcccgtggtcttgttcctccacggcttcccggagctctggtactcctggcgccaccagattctggctctcagcaacctcggctaccgcgccgtggctccagatctccgcggctacggagacaccgaggcaccagcttcaatcagcagctacaccatcctccacttagtttctgacatcgtcgcgctcattcactcacttgctgtgga

SEQ ID NO: 61511 - DNA, 277 bp, Glycine max
  Clone ID: 700763433H1
ggacatcttggttgtttattatacaatagcaactcaatttagaaaatttctaccgcattacattaggtggcatctgtataccttgttgatctacattctcccatcttttctcactgctgaaattaaatataagcggaatctgagtaatattcatatttccggcttattttacgacggcagatacaaattctggactagacacgagaaaaatcttgctttgacagaagaggaaaagatggaagtgattagaaatagaggcattcctgctgatgttctt

SEQ ID NO: 61512 - DNA, 266 bp, Glycine max
  Clone ID: 700763434H1
gttcaatatcctagtataccttattatataatttaagatactatgatgagagcacggttcccattactgtcgctgggacttgttttcgtggcttcagtttctgtctcatttggcattgcttactgggacaaagagaaccccatacacaacaagtgtctccagagttgctatagcgagagcgactcgtacaggaaccaagcatgccacgctcgttgcaacctccttaaggtggagtaagaagaatgtgaagaaggtgaaattccacg

SEQ ID NO: 61513 - DNA, 273 bp, Glycine max
  Clone ID: 700763435H1
tgctgtgcaataccttattttccccaaatgtagtagactgtgcactcatgctactttgtaaaccgctatctcaggcgagccgtatcctgcattcagtttctgtctagctttgtatgctacgagaggttggctcttacacaaggcatgaatattggtgaaccgaagtgttcatcggagacctgtatggttgtaggttacactgctgagaaatgttacattatctcttccaaagattgtatttctatttgtttgtttaggctgaaatgtagtgct

SEQ ID NO: 61514 - DNA, 274 bp, Glycine max; identical to SEQ ID NO: 55842
  Clone ID: 700763437H1

SEQ ID NO: 61515 - DNA, 274 bp, Glycine max
  Clone ID: 700763438H1
tgagaatacaggtatagcattggcctgtgctatgaatagttcttttagggggcgtgccagttctgatatttacaccatctgctctcaagactgtgaattatggaatcctgcttgcacaaaagcaatgactatgtcatttaatccaaacccgtgttctgatgcatggagtttggaatttttgaagcgtaccgtatttcactgtgatatcatttgtgtcactggatggactgccaccccaatgcaggatgttcaggttacaattgattggtttatt

SEQ ID NO: 61516 - DNA, 274 bp, Glycine max
  Clone ID: 700763439H1
gcagatgtctaatgttttgtgggtggctcctgaggacaaggcgagtttatggtcacaacttcattatgtttcgtgtaataatctggaaatgcaagaagcttatcttgtcaatctcgtaaatgtgttacgagaattgtatttgcacagtccagaggaagctcgccaattgagaaggaaagctctctctcgtattgaatggctgcaaaaagctgatgtgcctaccatagcacagattgaagagttccattcgatgcagaggatgatgaatgctcct

SEQ ID NO: 61517 - DNA, 274 bp, Glycine max
  Clone ID: 700763442H1
ctcgagccgcgggtatgcttgcaaagatgtgacaggtatcatcgtatgaagcaagagcgagagaaacaaatccaagaggaaactcgtgagaagaaagaggaggaaagcagtgaaagggaagaagaacaacaagagcagcatgaggaacaagatgaaaatccctacatttttgaggaagataaggattttgagaccagagtcgaaactgaaggtggcagaattcgggttctcaagaagttcactgaaaaatccaagcttcttcagggcattgaga

SEQ ID NO: 61518 - DNA, 273 bp, Glycine max
  Clone ID: 700763445H1
gccgtttctattattgacaccaacagcttggagaaccagctcgaccagatgcctaggagattctatcttgctgggaaccaagagcaagagtttctaaaatatcagcaagagcaaggaggtcatcaaagccagaggaaaggagatgatttaggatgaaggagatagagtgggaagtgtgctgaaggccttgataggttgcggtgttgaacaacaagagtgcttttgttggaggcactttcaccattttttggatgagaatcagagcttcgtgcg

SEQ ID NO: 61519 - DNA, 286 bp, Glycine max
  Clone ID: 700763447H1
attcggctcgatatttgtctcaaattaaaggcaagaaaagtgagagtggccatttcaataattttcaacaacttatggacttggcattttcatggaatctcagtgcaaatatcttgaaggaacgaatcaaagctgataaaagtgatatggtttatgtcttctctgctggaaggaaggacaaaatagtacattgcttcttgaataaagaaggcgaatgtagtatacgtcctgattcaatagaagatccagaagcacaacttttgctcaaagcttcagaaactatgct

SEQ ID NO: 61520 - DNA, 288 bp, Glycine max
  Clone ID: 700763448H1
ggaatttcggtcttcggctcgaggatcatacatagtagtgttggtgggttgcaaagatgcttgggggtcttctccataggggtcataagataaaagggacagtggtgttgatgcgcaagaatgtgttggacgtgaatagcgtaaccagcgttgggggaattattggtcaaggtctcgacttagttggctcaacactcgatactcttactgccttcttgggccgatccgtgtctctccagcttattagtgctaccaaagctgatgccaacggaaaagggaaacttggaa

SEQ ID NO: 61521 - DNA, 271 bp, Glycine max
  Clone ID: 700763449H1
aggaaaggttaactaagaagcaatacttcaatggccacccttgttgttcataaccaaacttcttctgctcaagatgctgaggctctccaacaggcttccaaaggatggggggctgatgacaaggccattatagcagtactgggtcacagaaatgttcatcagaggcaagaaatcagaaaagcttatgaggagatttaccaagaggatctcatcaaacgccttgagtccgagatctctggtgactttgagagagctatgtaccggtggatgt

SEQ ID NO: 61522 - DNA, 269 bp, Glycine max
  Clone ID: 700763450H1
tccgagcgaatcggctcgagatcgttatccttaacgggactaccattctggccttggagaacaacgacgacagagacacctagagacttgaatctggtgatgccctgagagtgacgtcaggaaccgcatagtatgtggtcaacgctgacaacaacgagaatctcaggttaataacactcggcatacccgttaacaagcctggtagatttgagagtttcttcctatctagcactgaagctcaacaatcctacttgcaaggattcagcagg

SEQ ID NO: 61523 - DNA, 271 bp, Glycine max
  Clone ID: 700763451H1
aagcaatggctacttcaaagttgaaaacccagaatgtggttgtatctctctccctaaccttaaccttggtactggtgctactgaccagcaaggcaaactcagcggaaactgtttctttcagctggaacaagttcgtgccgaagcaaccaaacatgatcctccaaggagacgctattgtgacctcctcgggaaagttacaactcaataaggttgacgaaaacggcaccccaaaaccctcgtctcttggtcgcgccctctactccacccccat

SEQ ID NO: 61524 - DNA, 269 bp, Glycine max
  Clone ID: 700763452H1
gaagacgaagatgatgaagatgaacaaattccctctcaccctcctcgccgaccaagccatggaaagcgtgaacaagacgaggacgaggacgaagatgaagataaacctcgtcctagtcgaccaagccaaggaaagcgtgaacaagaccaggaccaggacgaggacgaagatgaagatgaagatcaacctcgcaagagccgcgaatggagatcgaaaaagacacaacccagaagacctagacaagaagaaccacgtgaaagaggatgcga

SEQ ID NO: 61525 - DNA, 271 bp, Glycine max
  Clone ID: 700763453H1
ataaaaaaccactctacaaaactctccagtaattctgaaaattttattttcttttggtgaaattaacagctctgtgattgatcaatggcgacaaaggaaggcaaagccataggcatcgatctcggcacgacctacagctgcgtgggcgtgtggcaaaacgaccgcgtcgagatcatccccaacgaccaaggcaaccgaaccactccctcttatgtagccttcaccgacaccgagaggctcatcggagacgcggcgaagaaccaagtcgcca

SEQ ID NO: 61526 - DNA, 271 bp, Glycine max
  unsure (1)..(271): unsure at all n locations
  Clone ID: 700763454H1
cattttcagaggaacaatggcgggtagggtttcgacgtgcttcttcttcgtgtttgctctttctctccttcttccttttcagatctccgctgaggaatcatcggagaaagagttcgtactcacattggatcactctaactttcacgacactgtcagcaagcacgatttcatcgtcgtcgagttctacgctccatggtgtggccactgtaagaagcttgctcccgagtatgangcagctgcttctatcttgagtagtcatgatcctccggtt

SEQ ID NO: 61527 - DNA, 272 bp, Glycine max
  Clone ID: 700763455H1
agcaaaatgaccaagttcacaatcctcctcatctctcttctcttctgcatcgcccacacttgcagcgcctccaaatggcagcaccagcaagatagctgccgcaagcagctccagggggtgaacctcacgccctgcgagaagcacatcatggagaagatccaaggccgcggcgatgacgatgatgatgatgacgacgacaatcacattctcaggaccatgcggggaagaatcaactacataaggaggaacgaaggaaaagacgaagacgaaga

SEQ ID NO: 61528 - DNA, 269 bp, Glycine max
  Clone ID: 700763457H1
ctctccattggtccttaaacactcatcagtcatcaccatggccaagctagttttttccctttgttttctgcttttcagtggctgctgcttcgctttcagttccagagagcagcctcagcaaaacgagtgccagatccaaaaactcaatgccctcaaaccggataaccgtatagagtcagaaggagggctcattgagacatggaaccctaacaacaagccattccagtgtgccggtgttgccctctctcgctgcaccctcaaccgcaacg

SEQ ID NO: 61529 - DNA, 271 bp, Glycine max
  Clone ID: 700763459H1
aagaaggtgaaattccacgaccacgaccacgcccacaacacccggagagggaacctcagcaacccggtgagaaggaggaagacgaagatgagcaaccacgtccaatcccattcccacgcccacaacctcgtcaagaagaagagcacgagcagagagaggaacaggaatggcctcgcaaggaggaaaaacgcggagaaaagggaagtgaagaggaagatgaggatgaggatgaggaacaagatgaacgtcaattcccattcccacgcccacc

SEQ ID NO: 61530 - DNA, 270 bp, Glycine max
  Clone ID: 700763460H1
ctcgagccgttctcatcaagttactatctataattaattaaattcctcgtggaatattgaagaagccatgtctacagctgggcaggtcatcaagtgcagagctgcggtggcatgggaagcagggaagccactgtcaatagaaaccatagaagtggcaccaccccagaaaggtgaagtgcgtttgaggatcctcttcaactccctttgccgtagtgatgtttattggtgggatgctaaggaccagactcctctgtttcctcgtatcttagg

SEQ ID NO: 61531 - DNA, 270 bp, Glycine max
  Clone ID: 700763462H1
atttcctctcaggaatgtgttcccaggacctattgtgttttaaatccacaaaatccttttgtgttaaataggtggatgggaaaattgactttcccccagggcacttcccgaagtgttaagagaatgcctctttctatagggggaggagctggtgcaaagaatgctattctcatgaatatgccaaatgctgttctttcaatgtggagatattttgttggagatctcgtctttgaagtttctaagatgacttctccctacattaaatgtaca

SEQ ID NO: 61532 - DNA, 272 bp, Glycine max
  Clone ID: 700763463H1
ctcgagccgcttaattattaacacttccttagttcaatatggggaagcccttcactctctctctttcttccctttgcttgctactcttgtcgagtgcatgctttgctattagctccagcaagctcaacgagtgccaactcaacaacctcaacgcgttggaacccgaccaccgcgttgagtccgaaggtggtttgattcaaacatggaactctcaacaccctgagctgaaatgcgccggtgtcactgtttccaaactcaccctcaaccgcaat

SEQ ID NO: 61533 - DNA, 268 bp, Glycine max
  Clone ID: 700763466H1
acagtacagagcattttgatgcatgtaagtggacaaaatcggaaccacattcctgggaattgatcttcccaatagaggtatgtggtcctaataatggttttgaaatgtggagttctgagtgggcaaatcaaacttcatggcatttgagtttccttattgacaatcccaaacagtctacagtttttgatattctcttgggaatttctcaagattttgagattgctggtaatactcttatgccagctttttctgttccacaggctactgc

SEQ ID NO: 61534 - DNA, 270 bp, Glycine max
  Clone ID: 700763467H1
atcacaaccactcttaatttctctctgccttgctcatttacacacctctccaacctttcactttcagctttatttgaatccctctctctcctttccaaatggctagcgttgaggttgcacatcaaacaccaacaacagttccagaaaatgaaacaaccgaggtaatcaagacccaggaaacaaccccggaaccagtaccagccactgaggctcctgcaacagaacaagcagcagctgaggttcctgctcaagaagaacaacaagcaactg

SEQ ID NO: 61535 - DNA, 267 bp, Glycine max
  Clone ID: 700763468H1
ctggacaattaaagaatagagtttcgtttcgtaaagcaatgaaaaaagctattgaattaactgaacaggcgggtacaaaaggagttcaagtacaaattgcaggacgtatcgacggaaaagaaattgcacgtgttgaatggatcagagaaggtagagttcctctacaaaccattcgagcgaaaatcgattattgttgctatacagttcgaactatttatggggttttagggatcaaagtttggatattttctagataaagaaaaatat

SEQ ID NO: 61536 - DNA, 270 bp, Glycine max
  unsure (1)..(270): unsure at all n locations
  Clone ID: 700763470H1
gcgaaggcgcgtgtatggtgtgcaagggcttgccggggcaagaagacagactgttatgcgtcacgtgtgacaccccttggcacgtgccctgcctgttcgcccctccacccactctgtccgccaccgcacgatggctatgccctgattgttccattctggactctgacgttccaccagtccccgctcacanccgcaaccaactggtggctgcaatgctggccgttgaaaatgacgcttctctcacccaacacgacaacccccgaaaacgtc

SEQ ID NO: 61537 - DNA, 264 bp, Glycine max
  Clone ID: 700763471H1
caaggatggcaatttgtaagaaagatgtttggagagttgaatgtggaatcccttctggatttccgctcacagttatttgcaatagcatttttaatgagatgctcattagatatagctatgaaaaattactgcgccaggctaaagctccaagtatgtttttacaatctttcaaaaattttgtttctttgtgtgtgtatggtgatgataacttaattagtgttcatgaatatgtcaagccttactttagtggttctaaattgaaaa

SEQ ID NO: 61538 - DNA, 271 bp, Glycine max
  Clone ID: 700763472H1
gatcttttagaaactcaataaacagaattgccatgtctgctcctctagtttattcctcaaagcacattccaataaagccagcaacttacatacaagaagaagtggctcttcaatttcccaatccagaaaagaagaaagagggaatcacaagagatgttggtactcaaagcacacccccttatcttagttcaaccagtcccagccctgcttcaactccatccatcacagagagatcaaaacctcgaatttctgactcccttaacttaaatgc

SEQ ID NO: 61539 - DNA, 269 bp, Glycine max
  Clone ID: 700763473H1
tttgatcgcagtgcctactggtgttgcatggtggatgtacaacaatgaagacactcctgttgttgccgtttctattattgacaccaacagcttggagaaccagctcgaccagatgcctaggagattctatcttgctgggaaccaagagcaagagtttctaaaatatcagcagcagcagcaaggaggttcccaaagccagaaaggaaagcaacaagaagaagaaaacgaaggaagcaacatattgagtggcttcgccctgaattcttgaa

SEQ ID NO: 61540 - DNA, 261 bp, Glycine max
  Clone ID: 700763477H1
gctttctagctggtcatagtatctacattactgatggtattgacaagactagtgcaactttgcaatttagaaagttagcagattgtgattatctcaagagaaactttaagcagatgtctaatgttttgtgggtagctcctgaggacaaggcgagtatatggtcacaacttcattatgtctcgtgtaataatctggaaatgcatgatgcttatcttgtcaatctcgtaaatgtgttacgagaattgtattagtagagtccag

SEQ ID NO: 61541 - DNA, 268 bp, Glycine max
  Clone ID: 700763479H1
agcaagcgtcccactatctccaacggatatggtcgtttaactgaagttggtcctgacgatgatgaaaagagttggcttcaaagactcaatctcatgcttacctttaccaacatcacccagagatctatgagtactattcactacaactcacatgcaacgaagatagcactggtgatcgatggcagagggcatcttcaaatatcatgtccacacatgtcatcaaggtcgtcacactcgaagcatgataagagtagcccttcataccata

SEQ ID NO: 61542 - DNA, 154 bp, Glycine max
  Clone ID: 700763480H1
caacttgcaccctccattatttaagttattattttaagtcacattcttggtagaattagaacacagcactctttggctcccacttgctagcaatttttagcttagagatgttattatacaaacgattttcataaggaagaaaaagatggtatac

SEQ ID NO: 61543 - DNA, 268 bp, Glycine max
  Clone ID: 700763482H1
gtcatttacgcttctcttctctgcagcaactatgcctaaccctaaggtcttcttcgacatgaccatcggcggtcaatctgctggccgcatcgtgatggagctctacgccgacgtcactccccgcaccgccgagaacttccgcgcgctttgcaccggcgagaagggcgtagggcggagcggcaagcccctccactacaagggctcgtccttccaccgcgtgatcccgagtttcatgtgtcagggtggcgacttcaccgccggaaacgga

SEQ ID NO: 61544 - DNA, 265 bp, Glycine max
  Clone ID: 700763485H1
ctccattgtctttgaacactcatcaccatggccaagcttgttctttccctttgtttccttcttttcagtggctgcttcgctctgagagagcaggcacagcaaaatgagtgccagatccaaaagctgaatgccctcaaaccggataaccgtatagagtcggaaggtgggttcattgagacctggaaccctaacaacaagccattccagtgtgccggtgttgccctctctcgctgcacccttaaccgcaatgcccttcgtagacctt

SEQ ID NO: 61545 - DNA, 269 bp, Glycine max
  Clone ID: 700763486H1
atggaactctcaacaccctgagctgcaatgcgccggtgtcactgtttccaaacgcaccctcaaccgcaacggcctccacttgccatcttactcaccttatccccaaatgatcattgtcgttcaagggaagggagcaattggatttgcatttccgggatgtcctgagacgtttgagaagccacaacagcaatcaagcagaagaggctcaaggtcgcagcagcaactacaagacagtcaccagaagattcgtcacttcaatgaaggagacg

SEQ ID NO: 61546 - DNA, 258 bp, Glycine max
  Clone ID: 700763487H1
gttcctcactgaccaagccatagcgatgagaaccaaactttctttagctatctttttcttttttcttttagccttattttcaaacctagcctttggcaaatgtaaagaaaccgaggtagaagaagaagaccctgagctcgtaacatgcaaacaccaatgccaacagccacagcaatacactgagggtgacaagcgggtatgcttgcaaagatgtgacaggtatcatcgtatgaagcaagagcgagagaaacaaatcca

SEQ ID NO: 61547 - DNA, 268 bp, Glycine max
  Clone ID: 700763488H1
ggaaatttttcctttgatattaaatctcgctctagattggaaaaagtttcctctacaaaagcacaatttgttagtggaaaaaccttcaaatatgatatagttggtgctggttcacattcttcagaagatttttctgaaaaggaagatcaagaaaaacccaaaaagattgatgccagattgagacaaagaatagatcctcaatacaatgaggttcaggctcagatggaaacaaatttgtttaaattgtctcttgatgatgttgaaactc

SEQ ID NO: 61548 - DNA, 265 bp, Glycine max
  Clone ID: 700763489H1
tggatagtaattaacctcactcaaactcgggatcacagaaaccaacaacagttcttgcactgaggtttcacgatgttgctggaacttgcacttggtttgtttgtgttagctttgtttctgcacttgcgtcccacaccaagtgcaaaatcaaaagcacttcgccacctcccaaaccctccaagcccaaagcctcgtcttcccttcattggccaccttcacctcttaaaagataaacttctccactatgcactcatcgatctctcca

SEQ ID NO: 61549 - DNA, 260 bp, Glycine max
  Clone ID: 700763490H1
cgacaaccaattcacatcactgaaggaaattatgtcagaaagcaagatgtcagcattgaatatgatgcatgtacaattccaaatgattgtggttcattggttgttgccaaagttggaaatcacaaacaaattgttggtttccatgttgctggaagcaaaggaagactgggatatgcttcattgataccatacgttgagccagttgtgcaagctcaaagtgctgaagtttactttgacttcttccctgtggaggttgatag

SEQ ID NO: 61550 - DNA, 260 bp, Glycine max
  Clone ID: 700763491H1
gaaaggatctatgattatgatgtctacaatgatttaggtgatccggataaaggtgaaaatcatgcccgtcctgttcttggaggaaatgacacctttccttatcctcgtagggggagaactggtagaaaaccaacaaggaaagatcctaatagtgagagtaggagcaatgatgtttatcttccaagagatgaggcttttggacacttgaagtcatctgactttcttacttatggactaaaatccgtatctcaaaatgttct

SEQ ID NO: 61551 - DNA, 264 bp, Glycine max
  Clone ID: 700763493H1
tacacacacacacacacactaagaataatggcttctatcctccactactttttagccctctctctttctttctctttccttttcttcttatccgactccgtccccattccccaacaccacactaaccctacaaaacctataaaccttctggttctacccgttcaaaatgatgcttccacagggctccattgggccaacctccaaaaaaggacccctctaatgcaagtaccagtcctggtggacctcaatggaaaccacttgtgg

SEQ ID NO: 61552 - DNA, 263 bp, Glycine max
  Clone ID: 700763494H1
cgggggaatttatgatggagaaaactgtacaagtccgtatgggattaatcactttgttttacttgtgggttatggttcagcggatggtgtagattactggatagcgaaaaattcatggggagaagattggggagaagatggttacatttggatccaaagaaacacgggtaatttattaggagtgtgtgggatgaattatttcgcttcatacccaaccaaagaggaatcagaaacactggtgtctgctcgcgttaaaggtcatc

SEQ ID NO: 61553 - DNA, 265 bp, Glycine max
  Clone ID: 700763495H1
cattgtctttgaacactcatcaccatggccaagcttgttctttccctttgtttccttcttttcagtggctgcttcgctctgagagagcaggcacagcaaaatgagtgccagatccaaaagctgaatgccctcaaaccggataaccgtatagagtcggaaggtgggttcattgagacctggaaccctaacaacaagccattccagtgtgccggtgttgccctctctcgctgcacccttaaccgcaatgcccttcgtagaccttcct

SEQ ID NO: 61554 - DNA, 238 bp, Glycine max
  Clone ID: 700763502H1
ccgggttgtcctagcacatttgaagagcctcaacaacctcaacaaagaggacaaagcagcagaccacaagaccgtcaccagaagatctataacttcagagagggtgatttgatcgcagtgcctactggtgttgcatggtggatgtacaacaatgaagacactcctgttgttgccgtttctattattgacaccaacagcttggagaaccagctcgaccagatgcctaggagattctatc

SEQ ID NO: 61555 - DNA, 250 bp, Glycine max
  Clone ID: 700763503H1
gagaaaaatcttgctttgacagaagaggaaaagatggaagtgattagaaatagaggcattcctgctgatgttcttgcaaagcgagctcatgaatttgaaaaacatgttgctcatgaaagcctcaaggatcaaattcctgctgttgacaagttgtattctactaaggttaataagtttgcaaaaattatgaaccttagacaaagtgttgtaggtgatcttaaacttcttactgatgggatgttgtatgggg

SEQ ID NO: 61556 - DNA, 245 bp, Glycine max
  Clone ID: 700763504H1
gttcaatatggggaagcccttcactctctctctttcttccctttgcttgctactcttgtcgagtgcatgctttgctattagctccagcaagctcaacgagtgccaactcaacaacctcaacgcgttggaacccgaccaccgcgttgagtccgaaggtggtttgattcaaacatggaactctcaacaccctgagctgaaatgcgccggtgtcactgtttccaaactgaccctcaaccgcaatggcc

SEQ ID NO: 61557 - DNA, 259 bp, Glycine max
  Clone ID: 700763505H1
tatcgagccgattcggctcgagggttcccaaagccagaaaggaaagcaacaagaagaagaaaacgaaggaagcaacatattacgtggcttcgcccctgaattcttgaaagaagcgttcggcgtgaacatgcagatagtgagaaacctacaaggtgagaacgaagaggaggatagtggagccattgtgacagtgaaaggaggtctaagagtcacagctccagccatgaggaagccacagcaagaagaagatgatgatgat

SEQ ID NO: 61558 - DNA, 258 bp, Glycine max
  Clone ID: 700763506H1
ctctgcttcaacttgctccctcagaagcgaagaagaagccacagagaactagtctcctactctcacccgcaagagaaaaatggcatctcacatcgttggatacccccgtatgggtcccaagagagagctcaagttcgctctcgagtctttctgggatggcaagagcagcgccgaggatttgcagaaggtgtcttctgatctcagggcatccatctggaagcagatggctgatgctgggatcatgtacatccccagcaa

SEQ ID NO: 61559 - DNA, 256 bp, Glycine max
  Clone ID: 700763507H1
tgttcaatatcctagtataccttaataaataatttaagatactatgatgagagcacggttcccattactgttgctgggacttgttttcctggcttcagtttctgtctcatttggcattgcttactgggaaaaagagaaccccaaacacaacaagtgtctccagagttgcaatagcgagagagactcgtacaggaaccaagcatgccacgctcgttgcaacctccttaaggtggagatagaagaatgtgatgaaggt

SEQ ID NO: 61560 - DNA, 257 bp, Glycine max
  Clone ID: 700763509H1
aaagttttaacatgaaaggcaataatacacttttgttgcatttattctacactactctcttccagtttcttgtagtgtcaagttcatcttcaacagggaatgaaagtaacgatgacactaacagtaaagaagtttatatcgtgtacatgggagctgcagattcaacaaaagcttctcttaaaaatgagcacgctcagattctgaattcagtgctaagaaggaatgagaatgccctagtacggaactacaagcatggt

SEQ ID NO: 61561 - DNA, 237 bp, Glycine max
  Clone ID: 700763510H1
ctctgagaggaggggccatagtttgggaccctttgaagcctaatctccacccaaacccattttcccgggaagttccctctgaaacgaagacgaaaatgcagaatcacaggctgaagcagcagcaacaagctctgatgcagcaagctcttctccaacaacagtgtctctaccaccctggactccttgatcctcctcagatggaaccaattccaagtggaaatctgcctcctggttttg

SEQ ID NO: 61562 - DNA, 227 bp, Glycine max
  Clone ID: 700763511H1
ctggggaagcaggcatgaactaatgttggggaacacgttcgagcccaaccaaaattctaaacctccaaacaaggaggttcctcctcaggaatttaatgatagggtgctggaaggttttcaagtcacccccctttggcatcaaggttttattcgcgatgatggaaggtcaaattatgtagagacggtaaagacagctcgtggagtgtatagtacacgtcctgaatatg

SEQ ID NO: 61563 - DNA, 236 bp, Glycine max
  Clone ID: 700763512H1
ggctcgagaagctggtgcagtttggagagattcaggaaaaagttgtattgaaattttcacaagaggaatttcttacagcttggtcaactcaggtgcgtcctgcaacaactctgttggctgatgggtgtccatatttgtatgcaatggtgcatgatagttcagtgtctacaataccaggtgattttgtcattggtgtcaagttgacaaccataaccaatatgtgtgcatatgggctc

SEQ ID NO: 61564 - DNA, 252 bp, Glycine max
  Clone ID: 700763513H1
gttgaaggaaatggctgaagcacaactacgagaccagcatggcaaccctgtcccactcaccgatcaatacggtaatccggttatcttaactgacgagcgcggtaatcccgtccaactcactggtgtcgctaccaccgctaccggcacagcaggttctgggtttgggtcctatggtaccggtgcttacggtggtggtgcaagtgcaaccaccgttgcagatcttttggcaacccaaccaaggagtggcaggga

SEQ ID NO: 61565 - DNA, 254 bp, Glycine max
  Clone ID: 700763514H1
gggacattgtttgtctcggaaaagcaaagaaacatggtattctgggatgaaggaaaaatttgtgcaaatgatgaagagcatctatgaaacagaagttacagattggccagtaccactgaaaatcatttctggaaccattcttgcaacaattttgggaacaaccttctggaaactcttttccttacttagagatgctggtaatggaggagtttttgtaggcaatgttgcttcagcattcacaacttcaagtgtgc

SEQ ID NO: 61566 - DNA, 81 bp, Glycine max
  Clone ID: 700763516H1
gtcatctggtgttacagtggacaaccataaacaatatgtgtgcatatgggctcaatcctggtatttcaggttctcgtcttt

SEQ ID NO: 61567 - DNA, 253 bp, Glycine max
  Clone ID: 700763517H1
aattcttccaccaagttatgggtttccttgtgttgcttcttttctccctcttaggtctctcttctagttccagcatatcaactcatcgttccatattggaccttgacctaaccaagtttaccacacagaaacaggtgtcttcactgttccaactatggaagagtgagcatggacgtgtctaccataaccacgaagaagaggcaaagagtcttgagattttcaagaataacttgaactataggcgggatatgaa

SEQ ID NO: 61568 - DNA, 253 bp, Glycine max
  Clone ID: 700763518H1
attctgggatgaaggaaaaatttgtacaaatgatgaagagcatctatgaaacagaagttacagattggccagtaccactgaaaatcatttctggaaccattcttgcaacaattttgggaacaaccttctggaaactcttttcctttcttagagatgctggtaatgggggagtttttgttggcaatgttgcttcagcattcacaacttcaagtgtgcttgaggcccaaagtagaaagcccaacagatatgaagt

SEQ ID NO: 61569 - DNA, 199 bp, Glycine max
  Clone ID: 700763519H1
ttcaaaccttgctctatactacacagtacacacactagaagaataatggcttccatcctccactactttttagccctctctctttcttgctcttttcttttcttcttatccgactcagtcacccctacaaaaccaataaaccttgttgttctacccgttcaaaatgatggttccacagggctccattggtgcaacctcc

SEQ ID NO: 61570 - DNA, 257 bp, Glycine max
  Clone ID: 700763520H1
ctgtctcgtttacacatctctccaacctttcactttcgtttctcagttttattcgaatccctctctcaatctcctttccaaatggccagcgttgaggttgcacagcaaacaccaacaacagttccagaaattgaaacacccgaggtaagcaagacccaggaaacaaccccagtcactgaggctcctgcaacagaacaaccagcagctgaggttcctgcaacagaacaaccagccgctgaggctcctgccccagaatc

SEQ ID NO: 61571 - DNA, 255 bp, Glycine max
  Clone ID: 700763521H1
caaagtccttgtttgttcctcagtacctcgactccaatctcatcatattcatccgtagaggggaagcaaagctgggattcatatatgatgatgaactagcggaaaggagattgaagacaggggacttgtacatgattccatctggttcagcattctatttggtgaacataggagaaggtcagagacttcacgttatctgcagcattgacccctctacaagcttgggattagagaccttccagtccttctatattg

SEQ ID NO: 61572 - DNA, 248 bp, Glycine max
  Clone ID: 700763522H1
ctcgagcgctctttgcccccacaagatctgcttctgggctttttaggatacaaaatgggtgagaaagactcagagaagctcatttgggaacagatgagaaccccgacagctgccactcccattgctgcaccccaacagcaccgcacattaccaaggcttcttgtccttctcatcctcttcgtctccgtcacctacactgtctacacgctcaagctcgtctccacctcacgcgcctgcaacaacgacgc

SEQ ID NO: 61573 - DNA, 245 bp, Glycine max
  Clone ID: 700763523H1
attaggtggcatctgtataccttgttgatctacattctcccatcttttctcactgctgaaattaaatataagcggaatctgagtaatattcatatttccggcttattttacgacggcagatacaaattctggactaaacacgagaaaaatcttgctttgacagaagaggaaaagatggaagtgattagaaatagaggcattcctgctgatgttcttgcaaagcgagctcatgaatttgaaaaaca

SEQ ID NO: 61574 - DNA, 255 bp, Glycine max
  Clone ID: 700763524H1
tggaaaaggaaaagttggaaaggatacgttcttggaagggattaatacttcgttaccaactttgggagcaggagagtctgcattcaatattcattttgaatgggacggaagcatgggaatccccggtgcgttttacataaagaactacatgcaagttgagttcttcctcaagagtttgactcttgaagccatttcaaaccaaggaaccatccgctttgtttgcaactcatgggtttataacactagactttacaa

SEQ ID NO: 61575 - DNA, 253 bp, Glycine max
  Clone ID: 700763525H1
tggggaagcccttcttcactctctctctttcttccctttgcttgctactcttgtcgagtgcatgctttgctattacctccagcaagttcaacgagtgccaactcaacaacctcaacgcgttggaacccgaccaccgcgttgagtccgaaggtggtcttattgaaacatggaactctcaacaccctgagctgcaatgcgccggtgtcactgtttccaaacgcaccctcaaccgcaacggcctcaacttgccatc

SEQ ID NO: 61576 - DNA, 233 bp, Glycine max
  Clone ID: 700763527H1
cagtcaggaatcggctcagaaggttctgttggtaagagagggagcactagacgaggagaggctgcaagagagtgtgatagtggaaatctcaaagaaacaaattcgggaactgagcaaacatgccaaatctagttcaaggaaaaccatttcttctgaagataaacctttcaacttgagaggccgcgaccccatctattccaacaagcttggcaagttgtttgagattaccccag

SEQ ID NO: 61577 - DNA, 238 bp, Glycine max
  Clone ID: 700763528H1
cttgcaactcaataaaacttgataggcaatgtaaggatgcgttcatagactgaatgaccgagatttcctctagggactggttctttgtattagctaaactgtgcaatattatttacgtatttgttatccttaatggccatccttgtacaatgtatgtagatgcaactctacttaaaactttatttggcaggatattatattttagtgtaatacttgtgtgaactcttacattcttgtt

SEQ ID NO: 61578 - DNA, 259 bp, Glycine max
  Clone ID: 700763529H1
gagggttgcttctggctttttgttctctgggggctgtggtgtggctgccattgctgctttatcttggatttacaactacgtttctgggaaccagcctgcgggttctgacacccttgactatgcaaaagggtaccttactgataaggcaagggatgtgaaggagagggcaaaggattatggaagttatgctcagggtagaattaatgaggccacacaaggaccttattagtcatgcatgcatgaatatatgcatgtgtgt

SEQ ID NO: 61579 - DNA, 202 bp, Glycine max
  Clone ID: 700763530H1
tggattatctagttgacaatgcgagaaagaagagaaactgcagaaagttaacatctgttggtgcaattcagagatatattaggaaaacaaactgccccacagctggaacagataagtctaacagatgcctgattaaagacgatgatttattggtgtctgcaatattcaggaataaggacttcagcccagagacgatccgggg

SEQ ID NO: 61580 - DNA, 75 bp, Glycine max
  Clone ID: 700763531H1
gacacacacacactaagaataatgggttctatcttccactactttttagccctctctctttctttctctttcctt

SEQ ID NO: 61581 - DNA, 243 bp, Glycine max
  Clone ID: 700763532H1
cttaattattaacacttccttagttcaatatggggaagcccttcactctctctctttcttccctttgcttgctactcttgtcgagtggatgctttgctattagcttcagcaaacacttcttggcacaatccttcaacaccaacgaggactcagctgagaaacttcagtctccagacgacgaaaggaagcagatcgtgacagtggaaggaggtctcagcgttatcagccccaagtggcaagaac

SEQ ID NO: 61582 - DNA, 253 bp, Glycine max
  Clone ID: 700763533H1
ctcgagccgtgaaaatgcagttcgtagtatttttgtcgcgcctttcagaggcggaaggcctattcgggtggttacatttccgaataccattgtgcagattgaaccagacatgaattcaaggtttcagcttttgagtaccactaccaatggtgattttgttcaaggaaaagatctcgcaatggttaaagttaatgtagcatgtgctgctgttggcttgacatcaagtgacactccaactccagtgttggaatct

SEQ ID NO: 61583 - DNA, 215 bp, Glycine max
  Clone ID: 700763534H1
ctgcattggagtggcagtccatccagtgacacaaatgatatcacaatgaaatccggtacgcttcagaaattccaaactccacgcatcagaacacgggtttggattaaatgacatagtcattgcttttgtgcaagcaggattccataattcacagtcttgagagcagatggcgtaaatatcagaactggcacgccccctaaaagaactattcatag

SEQ ID NO: 61584 - DNA, 216 bp, Glycine max
  Clone ID: 700763535H1
ctttttcagtttagccaacaaaatcacacgccctcagcgtctctgtttctctctctgccgctacttattcgtggggttcttcttccttgcatttttattttattatcttggtgtgaatattcactcaaacccatgaaaccattcatgtgcaccatgaacaacaacaacctcaaagattcagataacttccacaactcttcatggaccatagcaaaa

SEQ ID NO: 61585 - DNA, 255 bp, Glycine max
  Clone ID: 700763536H1
cggctcgagattttgataaaccgcgatcacaggttgccgcaccttaaaaccggaaacaaaagcaatcgttacttgatttcaagaatctctcaatttcttcctacttctttgtgtacgatttcttaagggaaagaaaatcactctctgtgctggccacagacttcgtgaatcattatcttttccactcttagtttatttgctgaacactctcctatttgatataggacttcgtgtcagatttaaacttcttctgtt

SEQ ID NO: 61586 - DNA, 255 bp, Glycine max
  Clone ID: 700763537H1
aaaggtaagaaaattgtttttcttactagagttgatccttttccagtagctctactggctgttcttttaggcgttaagaatgaaattctgagttccaacgccactaaccctatgctgacgcgacttcttgagaactgtaagagtctcaaatatctggttgatgagtgtccttttgcatttgtgaactagtatgtaatatttaaacacactcattgcacatagtaatgcgctttatttaagtgaataaagcgcatt

SEQ ID NO: 61587 - DNA, 255 bp, Glycine max
  Clone ID: 700763538H1
tgtgactcgagggaaaggaagagttagagtggtgaactgccaagggaatgcagtgttcgacggtgagctaaggaggggacaattgctagtggtgccgcagaactttgtggtggctgagcaagggggagaacaaggattggaatacgtagtgttcaagacacaccacaacgccgtgagcagctacattaaggaagtctttagggcaatcccttcggaggttctttccaattcttacaacttggccagagtcaagtg

SEQ ID NO: 61588 - DNA, 248 bp, Glycine max
  Clone ID: 700763539H1
cgaatttctgaacgactatttaaaaacaaatattcgaagtctccgggggatgcattcattgtcttcaatatttctgttcgtatcgttactttcatctctaactactcttcttctgcatcatttctcagttgcagcaccggttacgaaaattcgtggacccgatttctagtgttgagctgcgattgcatgtggaaatcgatttctggatcaatgcatctgacaaacgattggagtaggacatgagtttg

SEQ ID NO: 61589 - DNA, 253 bp, Glycine max
  Clone ID: 700763540H1
cggaagccttggaagacattactgctctcttctatgatgaagagcgcaacgagatctatacaggcaataggcatggtctggttcatgtctggtctaactgatgcattgttgagtttattcttgtctcgtgttttctcattagtattgatccatgggttgcagtcatagttctctcctgatgtaagaacctttgggagagctgtaaccattaggtgttattgtatcatttatgttttggttgttttgtcatcta

SEQ ID NO: 61590 - DNA, 252 bp, Glycine max; identical to SEQ ID NO: 59263
  Clone ID: 700763541H1

SEQ ID NO: 61591 - DNA, 213 bp, Glycine max
  Clone ID: 700763542H1
gttgagtagttcttcatcatagtcttaaacattaaaccttagcaaaactcaacaatgctagacatcaaaggctacctcgtactcttcttcctatggttcatatcaaccattctgatacgttccatcttcaagaaaccacagcgtctaagactcccaccgggtcctccaatttcaatacccttgctgggacacgcgccatatctccgttcactg

SEQ ID NO: 61592 - DNA, 189 bp, Glycine max
  Clone ID: 700763543H1
gcttggaagaaaggctgtttaatggttaagattgtgatgtctgggaatgcagcagtcaaaaggagtgattgggcctcattggtacaagtgtttttaacaaacagcaacagtacagagcattttgatgcatgtaagtggacaaaatcggacccacattcctgggatttgatcttcccaatagaggaatgt

SEQ ID NO: 61593 - DNA, 226 bp, Glycine max
  Clone ID: 700763544H1
cgggaggttgattgccaatgacaggctggataggtgtgtggggatttatgttgaggtgaggagttcgaatgtgagggcaagtttgcaggcgctaaatttggattaccttgagatttctgtggcggagttcaatgatgtgcagagcatttaggggcatatggcccattgggggaagcatttggagttcgcggtgaagcatttgtttgaggctgagtataagctttgc

SEQ ID NO: 61594 - DNA, 250 bp, Glycine max
  Clone ID: 700763546H1
aatatatatactatgatgagagtgcggtttcctttgttggtgttgctaggaactgttttcctggcatcagtttgtgtctcattaaaggtgagagaggatgagaataaccctttctacttgagaagctctaacagcttccaaactctctttgagaaccaaaacggtcgcattcgtctcctccagagattcaacaaacgctccccacaacttgagaaccttcgagactaccggattgtccagtttcagtcaa

SEQ ID NO: 61595 - DNA, 85 bp, Glycine max
  Clone ID: 700763547H1
ctctcttcttctcactgatccgcattgccgttcaaagtggtcttatttgaaaaacacttgggcgttggtgcaaatgtttgcttcg

SEQ ID NO: 61596 - DNA, 211 bp, Glycine max
  Clone ID: 700763548H1
atcattagaccaggaatgaatcattcctcctggtcctgatcctaaatagggttagggttagggtttatgcaatcgaattcctgagacggtgcatttgtacgtaatcgatggcgaatcgcacggatcctgcagctaagagcataaggggcacgaaccctcagaacctggtggagaagattctccgatcgaagatataccagaacacctattg

SEQ ID NO: 61597 - DNA, 227 bp, Glycine max
  Clone ID: 700763549H1
gcaaaacaaggttctccaaaaatggacaacctatttaccacttcgttggaacctccactttcagtgaatacactgttctccatgaaggatgtgtcgccaagatcaaccctgctgcccctcttgacaaagttgctgttgtcagttgtggattctgcacaggttttggggctactgtgaatgttgcaacgccaaggcctaataatgctgttgctttagttagaacagga

SEQ ID NO: 61598 - DNA, 215 bp, Glycine max
  Clone ID: 700763550H1
cttattaacactttccttagttcaatatggggaagcccttcttcactctctctctttcttccctttgcttgctactcttgtcgagtgcatgctttgctattacctccagcaagttcaacgagtgccaactcaacaacctcaacgcgttggaacccgaccaccgcgttgagtccgaaggtggtcttattgaaacatggaactctcaacaccctgag

SEQ ID NO: 61599 - DNA, 232 bp, Glycine max
  Clone ID: 700763551H1
gaagacgaagatgatgaagatgaacaaattccctctcaccctcctcgccgaccaagccatggaaagcgtgaacaagacgaggacgaggacgaagatgaagataaacctcgtcctagtcgaccaagccaaggaaagcgtgaacaagaccaggaccaggacgaggacgaagatgaagatgaagatcaacctcgcaagagccgcgaatggagatcgaaaaagacacaacccagaa

SEQ ID NO: 61600 - DNA, 215 bp, Glycine max
  unsure (1)..(215): unsure at all n locations
  Clone ID: 700763552H1
agatggtgctacgtcaggattacctttgagatacctagaaactctctccataggacacctccgtcaagtagtagtgatggattcagcacaagagtcagtgattttttttnatttttataaaatatttattattattattatcatacatgtgaaaaggaaacgtgaaacataatcaattgtactataaaataattgccgctaaaatctttaatggt

SEQ ID NO: 61601 - DNA, 253 bp, Glycine max
  Clone ID: 700763553H1
cacaaatcttagccgccattgatttttcctcttccatttctcttactttctcagcctttttcgattacccatttggttatttcgccctaatggctcttgctccatccaaagtttccaccttttctggtttttctcccaaacccagtgttgggggtgctcagaaaaacccaacttgctctgtttctctgagctttttgaatgagaaacttggaagcagaaaccttagggtttgtgcctcaacggtgcctctcac

SEQ ID NO: 61602 - DNA, 230 bp, Glycine max
  Clone ID: 700763555H1
cattgtctttgaacactcatcaccatggccaagcttgttctttccctttgtttccttcttttcagtggctgcttcgctctgagagagcaggcacagcaaaatgagtgccagatccaaaagctgaatgccctcaaaccggataaccgtatagagtcggaaggtgggttcattgagacctggaaccctaacaacaagccattgcagtgtgccggtgttgcctctctcgctgc

SEQ ID NO: 61603 - DNA, 252 bp, Glycine max
  Clone ID: 700763556H1
aagcagagcttttgtcagttttctattgaccttctcggtggaggaatcttagtggacaaaactggagattggatcacacttatacaaaattctccaattagtaacttgttgagagttgctgcttggaagaaaggctgtttaatggtcaagattgtgatgtctgggaatgcagcagtcaaaaggagtgattgggcctcattggtacaagtgtttttaacaaacagcaacagtacagagcattttgatgcatgt

SEQ ID NO: 61604 - DNA, 256 bp, Glycine max
  Clone ID: 700763557H1
cggctcgaggaaattttgataaaccgcgatcacaggttgccgcaccttaaaaccggaaacaaaagcaatcgttacttgattacaagaatctctcaatttcttcctacttctttgtgtacgatttcttaagggaaagaaaatcactctctgtgctggccacagacttcgtgaatcattttcttttccactcatagtttaactcctgcacactctcctatttgatataggacttcgtgtcacatttaaactttttctg

SEQ ID NO: 61605 - DNA, 235 bp, Glycine max
  Clone ID: 700763558H1
cttcactctctctctttcttccctttgcttgctactcttgtcgagtgcatgctttgctattagctccagcaagctcaacgagtgccaactcaacaacctcaacgcgttggaacccgaccaccgcgttgagtccgaaggtggtttgattcaaacatggaactctcaacaccctgagctgaaatgcgccggtgtcactgtttccaaactcacccgcaaccgcaatggcctccacttg

SEQ ID NO: 61606 - DNA, 244 bp, Glycine max
  Clone ID: 700763559H1
ggcaaattttttgacagagggcaattttagagcaagtgttgatttgcagcgcactcatcgtatcacaggaatgattaggatggtggccacagttggtattcctgagaatacaggtatagcattggcctgtgctatgagtagttcttttagggggcgtgccagttctgatatttacaccatctgctctcaagactgtgaatgatcgaatcctgcttgcacagaagcaatgactatgtcatttagt

SEQ ID NO: 61607 - DNA, 236 bp, Glycine max
  Clone ID: 700763560H1
taattattaacacttccttagttcaatatggggaatcccttcactctctctctgtcttccctttgcttgctactcttgtcgagtgcatgcgttgctattagctccagcaagctcaacgagtgccaactcaacaacctcaacgcgttggaacccgaccaccgcgttgagtccgaaggtggtttgattcaaacatggaactctcacaaccctgagctgaaatgcgccggtgtcactgt

SEQ ID NO: 61608 - DNA, 253 bp, Glycine max
  Clone ID: 700763561H1
ctcgagaaacctgattttgagcccattgctgctcttggcattgagatttggacaatgcaggatggcatcctatttgacaatattctgatagctaacgatgataaagttgcagaatcctatcgggagaccacatggaagcccaagtttaccattgagaaagaaaaacagaaggctgaagatgaggctgcaactggttcagatggtattgcaggcttccagaagaaggtatttgacctcttgtacaagattgcag

SEQ ID NO: 61609 - DNA, 163 bp, Glycine max
  Clone ID: 700763562H1
acttcaagtgtgcttgaggcccaaagtagaaagcccaacagatatgaagtttcccaatacagatatcgcaatgtgccaataaagcgcagagcatgggttgaaggccagatgtctttcgatcagtctgtagtagcaattatgtctaaatgcaaagccagcatga

SEQ ID NO: 61610 - DNA, 189 bp, Glycine max
  Clone ID: 700763563H1
cactgacacagtgacacagtggttctctcacctctccttctctgtgtaactctgccaccactcttcatttccccaagagaaaaagaaaaaggaaaagaaaaaaactgttcaactttttttcaactgaatcaatcactagcttccatttcttcacaggtggaactgtgaatgtgcaccacagctttttga

SEQ ID NO: 61611 - DNA, 250 bp, Glycine max
  Clone ID: 700763565H1
agaatacaggtatatcattggcctgtgctatgaatagttcttttagggggcgcgccagttctgatatttacaccatctgctctcaagactgtgaattgtggaatcctgcttgcacaaaagcaatgactatgtcatttaatccaaacccgtgttctgatgcatggagtttggaatttctgaagcgtactggatttcattgcgatatcatttgtgtcactggatggactgccaccccaatgcaggatgttca

SEQ ID NO: 61612 - DNA, 235 bp, Glycine max
  Clone ID: 700763566H1
gtgcggtttcctttgttggtgttgctgggaactgttttcctggcatcagtttgtgtctcattaaaggtgagagaggatgagaataaccctttctacttgagaagctctaacagcttccaaactctctttgagaaccaaaacggtcgcattcgtctcctccagagattcaacaaacgctccccacaacttgagaaccttcgagactacgggattgcccattttgagtaaaccccca

SEQ ID NO: 61613 - DNA, 227 bp, Glycine max
  Clone ID: 700763567H1
tctcgagccgaatcggctcgagatccgagatcaaccccgacgaaggcaaggggtttttctcggcttcttcagatttctgaaatggcgcctgtttcagctttagccaagtacaagctcgtcttcctgggtgaccaatccgtgggcaaaaccagcatcatcactcgcttcatgtatgataaattcgataacacctatcaggctacaattggtatggatttccaaccaaa

SEQ ID NO: 61614 - DNA, 251 bp, Glycine max
  Clone ID: 700763568H1
gcagaatgggcagaagataacattccctggcgaactgcatgaagcgccggacacaattactggggatatcgtctttgtccttcagcagaaggaacatcccaaattcaaaagaaaggctgaagatctttttgtagagcacactttgtcccttaccgaggccttgtgtggcttccaatttgtgctgactcacttggatagcggtcagcttcttattaaatcaaatcccggggaagttgtgaagcctgattcat

SEQ ID NO: 61615 - DNA, 87 bp, Glycine max
  Clone ID: 700763569H1
gaaaatcactctctgtgctggccacagacttcgtgaatcattatctattccactcgtagtacaattcctggacactctccaagttga

SEQ ID NO: 61616 - DNA, 142 bp, Glycine max
  Clone ID: 700763570H1
ttgaaattttgataaaccgcgatcacaggttgccgcaccttaggaccggaaacaacagcgatcgtctcttgattgcacgattctcacaatttctgcatactctctatgtgtacgatttcttaggggaaagaaaatcactctc

SEQ ID NO: 61617 - DNA, 250 bp, Glycine max
  Clone ID: 700763571H1
ctttggaaagttctttgagatcacccctgagaaaaacccacagcttcgggacttggatatcttcctcagttctgtggatatcaacgaaggagctcttcttctaccacacttcaattcaaaggccatagtgatactagtgattaatgaaggagatgcaaacattgaacttgttggcattaaagaacaacaacagaagcagaaacaggaagaggaacctttggaagtgcaaaggtacagagctgaattgtct

SEQ ID NO: 61618 - DNA, 254 bp, Glycine max
  Clone ID: 700763572H1
ctcgagccgatcaaaactaaacagtttaataattaccactaatttttcaagtggtaagatgacacccaaaattgagcatgcttgtttttttttatgccaaattactattattgtctctgatagtaatcttttactcaatgacagttaatttagagacctaagaatcatggtatttttgcaacctattagagttgttaaccttagagcaaccatttgatgtgagggagatatgtttattttggttatatttctga

SEQ ID NO: 61619 - DNA, 270 bp, Glycine max
  Clone ID: 700763573H1
tcagaattccgctagggaaattatcctttgatattaaatctcgctctagattggaaaaagtttcctctacaaaagcacaatttgttagtggaaaaaccttcaaatatgatataattggtgctggttcacattcttcagatgattttcctgaaaaggaagatcaagaaaaacccaaaaagattgatgccagattgagacaaagaatagatcctcaatagaatgaggttcaggctcagatggaaacaaatttgtttaaattgtctcttgatg

SEQ ID NO: 61620 - DNA, 107 bp, Glycine max
  Clone ID: 700763575H1
gaaattttgataaaccgcgatcacaggttgccgcaccttagaaccggaaacagtagcaaacgttacttgatttcaagaatctctcgatttcttcctacttctttgtg

SEQ ID NO: 61621 - DNA, 251 bp, Glycine max
  Clone ID: 700763576H1
attgtctttgaacactcatcaccatggccaagcttgttctatccctttgtttccttcttttcagtggctgcttcgctctgagagagcaggcacagcagaatgagtgccagatccaaaagctgaatgccctcagaccggataaccgtatagagtcggaaggtgggttcattgagacctggaaccctaacaacaagccattccagtgtgccggtgttgccctctctcgctgcacccttaaccgcaatgccctt

SEQ ID NO: 61622 - DNA, 252 bp, Glycine max
  Clone ID: 700763577H1
gctttctagctggtcataatatcaccattactgatggtattgacaagactagtgcaactttgcaatttagaaagttagcagattgtgattttctcaagagaaactttaagcagatgtctaatgttttgtgggtagctcctgaggacaaggcgagtttatggtcacaacttcattatgtttcgtgtaataatctggaaatgcaagaagcttatcttgtcaatctcgtaaatgtgttacgagaattgtatttgc

SEQ ID NO: 61623 - DNA, 104 bp, Glycine max
  Clone ID: 700763578H1
ggctcgagtggtccttaaacactcatcagtcaccaccatggccaagcgcgttagttccctttgtattcacgcttttcagtggctgctgcttagctttcagtacc

SEQ ID NO: 61624 - DNA, 106 bp, Glycine max
  Clone ID: 700763580H1
gtataccttaataaataatttaagatactatgatgagagcacggttcccattactgtagctgggacttgttctcctggcttcagtttctgtctcatttggcattgc

SEQ ID NO: 61625 - DNA, 240 bp, Glycine max
  Clone ID: 700763581H1
gttcctcactgaccaagccatggcgatgagaaccagactttctttagctatctttttcttttttcttttagccttattttcaaacctagcctttggcaaatgtaaagaaaccgaggtagaagaagaagaccctgagctcgtaacatgcaaacaccaatgccaacagccacagcaatacactgagggtgacaagcgggtatgcttgcaaagatgtgacatgtatcatcgtatgaagcaaga

SEQ ID NO: 61626 - DNA, 243 bp, Glycine max
  Clone ID: 700763582H1
tcaatatcctagtacaccgtattaaagaatttgagatgtactatgatgagagcgcggttcccattactgttgctgggagttgttttcctggcatcagtttctgtctcatttggcattgcgtattgggaaaagcagaaccccagtcacaacaagtgcctccgaagttgcaatagcgagaaagtactcctacaggaaccaagcatgccacgctcgttgcaacctcctaagggtggaggaagaaaa

SEQ ID NO: 61627 - DNA, 251 bp, Glycine max
  Clone ID: 700763583H1
ctcgagccgccttagttcaatatggggaagcccttcttcactctctctctttcttccctttgcttgctactcttgtcgagtgcatgctttgctattacctccagcaagttcaacgagtgccaactcaacaacctcaacgcgttggaacccgaccaccgcgttgagtccgaaggtggtcttattgaaacatggaactctcaacaccctgagctgcaatgcgccggtgtcactgtttccaaacgcaccctcaa

SEQ ID NO: 61628 - DNA, 94 bp, Glycine max
  Clone ID: 700763584H1
agttatttcacgcgccctctctccattttgacctccctttcctcttcgttccccactcactgcaacggcgccggagatccgtcgctctcctcct

SEQ ID NO: 61629 - DNA, 254 bp, Glycine max
  Clone ID: 700763585H1
agttgccacgccgctcttcgtcctcttcagcccggtgctggttccagccacggtcgccatcggcctggccgtggccgggttcctgacgtcgggggccttcgggctcacggcgctgtcttccttctcctggatcctgaactacatccgggagacccagccagcctcggagaacctcgccgccgccgcgaagcatcacctcgccgaggcggcggagtacgtggggcagaagacgaaggaagtggggcacaagacca

SEQ ID NO: 61630 - DNA, 248 bp, Glycine max
  Clone ID: 700763586H1
agtggttacgaccaggggaggaagaccttgttcagaggtttgatccatcgtctccgcttgatacaattggattttttattgccaaatttctcgtggggtctaaagatacctgacaactattcatgagttggcgtggatatatgtttacttcataattgccactgaaggaagccatcaagtttttttatgattggcctctggcaacagtctgagagcttctcatatgtccatttggaaaatgaattaag

SEQ ID NO: 61631 - DNA, 251 bp, Glycine max
  unsure (1)..(251): unsure at all n locations
  Clone ID: 700763587H1
aagatttgaaattttgataaaccgcgatcacatgttgccgcaccttaaaaccggaaacaaaagcaatcgttacttgatttcaagaatctctcaatttcttcctacttctttttgtactatttcttaagggaaagaaaatcactctctatgctggccacatacttcgtgaatcattttcttttccactcttaattcatttcgagaanactctcctatttgatataggacttctgtcagctttaaacctcttc

SEQ ID NO: 61632 - DNA, 254 bp, Glycine max
  Clone ID: 700763588H1
atcggagacactattcctgatcttcaagttgaaactaaccaaggcaaaatcaagcttcatcagttctgtgctgatggctggaccatccttttctctcacccaggtgatttcaccccggtttgtaccactgagcttggtaagatggctcagtatgctaaggagttttatcaacgaggagtgaagctcttaggtttatcttgtgatgatgtgcaatcccacaatgagtggatcaaagacattgaagcctacactcc

SEQ ID NO: 61633 - DNA, 248 bp, Glycine max
  Clone ID: 700763589H1
ataggaatataagaactaagatggattggatcggagcgtaccgcggaggccagagaagcagggactggtgcgacccttcatcaccattcactgatttgtgggaccctcgtcgtgtcggtgacgctgatgatatcacctcctctctcgcccatgctcacgttgactggcgtgagactgataaagctcatatcttccgtgctgatcttccaggggtgaagaaagaggatctgaaggtgcaggtggaggag

SEQ ID NO: 61634 - DNA, 237 bp, Glycine max
  Clone ID: 700763590H1
ctagttcaatatcctagtataccttaataaataatttaagatactatgatgagagcacggttcccattactgttgctgggacttgttttcctggcttcagtttctgtctcatttggcattgcttactgggaaaaagagaaccccaaacacaacaagtgtctccagagttgcaatagcgagagagactcgtacaggaaccaagcatgccacgctcgttgcaacctccttaaggtggag

SEQ ID NO: 61635 - DNA, 248 bp, Glycine max
  Clone ID: 700763591H1
atttccaaaaatgccagtgaagatgaaatcaagaaggcctatagaaaggcggctatgaagaaccatccagataagggaggagatcctgaaaagtttaaggagttaggtcaagcatatgaagttttaagtgatcctgagaagaaagaactgtatgaccagtatggtgaagatgcccttaaagaagggatggggggaggaggctcgtttcataatccatttgatatatttgaatcattttttggaggagc

SEQ ID NO: 61636 - DNA, 251 bp, Glycine max
  Clone ID: 700763592H1
ggacaaggcgagtttatggtcacaacttcattatgtttcgtgtaataatctggaaatgcaagaagcttatcttgtcaatctcgtaaatgtgttacgagaattgtatttgcacagtccagaggaagctcgccaattgagaaggaaagctctctctcgtattgaatggctgcaaaaagctgatgtgcctaccatagcacagattgaagagttccattcgatgcagaggatgatgaatgctcctgattcaaatg

SEQ ID NO: 61637 - DNA, 248 bp, Glycine max
  Clone ID: 700763593H1
atcttaaacttcttactgatgggaagttgtatgagggtaagcatattcctgtatctaatattagtgcaggggaaaatcatgtagttcaaatacccttaatggcacaggaggaaattctgtcttctagtgcaagtgatttcagagctgcaatggtgagtaaaaatagcaagcctcaagctactgcaatgcatgtgggagctatagaaattatcattgatagtttcgcaagtcctgattgcaacatagtt

SEQ ID NO: 61638 - DNA, 243 bp, Glycine max
  Clone ID: 700763595H1
atggtaaccattgtgggttcttacaatgtcactcctaatcaaccaactccaaaggatccttcatggctatccgatagtgaccaaatcggtgtcctaggtcatgtagccattgtctacatatacgaggcaaatcccaacagcaacaccattgagagattgaggaactctcttagcaagcttttggtgtactactatccattcgctggcagattcagcttgacaaaaagtggtcgaatagaagtg

SEQ ID NO: 61639 - DNA, 251 bp, Glycine max
  Clone ID: 700763596H1
gtagcccaaaccagaacaaagagggtaatgatggttctgatgatgatcctagccgaataaaatcatctgcttcgccgttcaaacgcaaaattgacctcaatatccaaccagagcgagaagaagaattatcacctggttcggattctggcggcatgatgaagttgctccatgatgctactgagcgatatctcaaacagcagactgtgaactctggtactggagattcatcaggcagtcagtcacagctggta

SEQ ID NO: 61640 - DNA, 277 bp, Glycine max
  Clone ID: 700763601H1
aatcggctcagttgaaattttgataaaccgcgatcacaggttgccgcaccttaaaaccggaaacaaaagcaatcgttacttgatttcaagaatttctcaatttctttctacttcttcgtgtacgatttcttaagggaaagaaaatcactctctgtgctggccacagacttcgtgaatcattttcttttccacttttagtctattcacctgaacactctcctatttgatataggacttcgtgtcagatttaaacttcttctgcttctttctcagttct

SEQ ID NO: 61641 - DNA, 275 bp, Glycine max
  Clone ID: 700763602H1
atgtctaccttgttgatctacatcctcccatcttttctcactgctgaaattaaatataagcggaatcagagtaatattcagatttccggcttattttacgacggcagatacaaattctggactaacacgagaaaaatcttgctttgacagaagaggaaaagatggaagtgattagaaatagaggcattcctgctgatgttcttgcaacgcgagctcatgaatttgaaaaactgttgctcatgaaagcctcaaggatcaaattcctgctgttgaca

SEQ ID NO: 61642 - DNA, 289 bp, Glycine max
  Clone ID: 700763603H1
ctcgaatccctgtgtgttaaataggtggatgggaaaattgactttcccccagggcacttcccgaagtgttaagagaatgcctctttctatagggggaggagctggtgcaaagaatgctattctcatgaaatgccaaatgctgttctttcaatgtggagatattttgttggagatctcgtctttgaagtttctaagatgacttctccctacattaaatgtacagtctctttcttcatagcatttggaaatttggctgatgataccatcaattttgaggcttttccccaca

SEQ ID NO: 61643 - DNA, 287 bp, Glycine max
  Clone ID: 700763604H1
tgaataatgagaagagaaaaaagattgtagagcaaagtaaaagcaaagattggtatggtaaattcgagtttattctacgtctgccttacaccaagtgtagaattatagataaaataggttccggtagtcttaaattaatttcggaggatatggatcagcaagtttagctcccttaataatttaagccctagatgttgtgttgatgcccagaaatgaatatttgaagttagaaaactgaaatattgcaattttatttaaaaaaaacaaaaaaaaaaaaaaaggggggg

SEQ ID NO: 61644 - DNA, 284 bp, Glycine max
  Clone ID: 700763605H1
accagttcaatatcctagtacaccgtattaaagaatttaagatctactatgatgagagcgcggttcccattactgttgctgggagttgttttcctggcatcagtttctgtctcatttggcatgcgtattgggaaaagcagaaccccagtcacaacaagtgcctccgaagttgcaatagcgagaaagactcctacaggaaccaagcatgccacgctcgttgcaacctccttaaggtggaggaagaagaagaatgcgaagaaggtcaaactccacgaccacgacca

SEQ ID NO: 61645 - DNA, 275 bp, Glycine max
  Clone ID: 700763607H1
gaagcaaggtatatagcttgagtgaagcatgtgaattggcatgggcattttgaagtgcaagatggggtccctctcaaatggtgggggtacaatgtcatgttgttatgttgatgatggaatgcgtatgtggaaaaagcaagcaagctggctggagtaggtcacggccaacgaagatagagatgatttggattcctcaattttggaagagaaatcgaccagaccattgatgtgcctgaattgtgtttactaatttgtttgtgaccctgtgtttataa

SEQ ID NO: 61646 - DNA, 276 bp, Glycine max
  Clone ID: 700763608H1
ctcaggtgcgtcctgcaacaactctgttggctgatgggtgcccatatttgtatgctatggtgcatgatagttcagtgtctacaataccaggtgattttgtcattggtgttacgttgacaacataaacaatatgtgtgcatatgggctcaatcctggtatttcaggttctcgtcttttgggcaccattcctcagtccatttcacagcaaactgtttggaatgaaatggcaacagtgagaacaccatgaattttgattctagcaagcagagttttgtc

SEQ ID NO: 61647 - DNA, 280 bp, Glycine max
  Clone ID: 700763609H1
gctctctctctccttctcgctctttcagctttgacttttgttggaaactaaggcctaatcaaaatggtgaagttcacagctgaagagctacgtcgtattatggactataagcataatatcgtaatatgtctgtcattgctcatgttgatcacggaaaatcaaccctcactgattctcttgtggctgctgctggtattattgctcaagaagttgccggtgatgtccgtatgactgatacccgtgcagatgaagctgagcgtggtattaccatcaagtctac

SEQ ID NO: 61648 - DNA, 280 bp, Glycine max
  Clone ID: 700763610H1
ctcgagatcgagccctcgagccgattcggctcgagaaagatcatacatagtagtgttggtggcatgcacagctcttgggggtcttctccataggggacataagataaaagggacagtggtgttgtgcgcaagaatgtgttggacgtgaatagcgtaaccagcgttgggggaattattggtcaaggtctcgacttagttggctcaacactcgatactcttactgccttcttgggccgatccgtgtctctccagcttattagtgctaccaaagctgatgcca

SEQ ID NO: 61649 - DNA, 279 bp, Glycine max
  Clone ID: 700763611H1
ctctagaattctcagatttgcggggcgagatgatgcagcagccaggacccggcatggcacctcccaccatgggccagcagccgcagcaacagtaccagcagcagcctccgccgcagcagaacaaccctacgtcatgatgccgccgcagcatcaggcgccgcagcctatgtgggccccatccgcccagcctccgctgccgcagcagcctgctagcgccgacgaggtccgaaccctctggatcggggatctgcagtactggatggacgagaatatctctac

SEQ ID NO: 61650 - DNA, 262 bp, Glycine max
  Clone ID: 700763612H1
atgaattgcctgtatcttttcatatccatgatacaggaaacacgatcgagtagcaagacaagacataaagatgagcataaattattattatagataacataatattatgggagcaggaaaagacgagggtgcatgtgcatgtgcatgatgagaaaagcaattcaagcgatcttgttgtatccagagtcgtttagtctagtcttgctactcgatcgtgtctcctgtatcatggatatgaatatgaattgcctgtttacttttc

SEQ ID NO: 61651 - DNA, 273 bp, Glycine max
  Clone ID: 700763613H1
caaggaggaaaaacgcggagaaaagggaagtgaagaggaagatgaggatgaggatgaggaacaagatgaacgtcaattcccattcccacgcccacctcatcagaaggaagagcgaaagcagaggaagatgaggatgaggagcagcagcgagagagcgaagaaagtgaagattctgagttacgaagacataagaataagaaccctttctcttcggctctaacaggttcgaaactctcttcaaaaaccaatatggtcgcattcgcgtcctccaga

SEQ ID NO: 61652 - DNA, 281 bp, Glycine max
  Clone ID: 700763614H1
cagaagaggaaaagatggaagtgcattagaaatagaggcattcctgctgatgttcttgcaaagcgagctcatgaatttgaaaaacatgttgctcatgaaagcctcaaggatcaaattcctctgttgacaagttgtattctactaaggttaataagtttgcaaaaattatgaaccttagacacagtgttgttggtgctcttaaacttcttactgatgggaagttgtatgagggtaagcatattcctgtatctaatattagtgcaggggagaatcatgtagtt

SEQ ID NO: 61653 - DNA, 279 bp, Glycine max
  Clone ID: 700763615H1
gactgggatatgcttcattgataccatatgttgagccagttgtgcaagctcaaagtgctgaagtttacttcgacttcttccctgtggaggttgatagtcaagagggagttgctcacattggtgaattgaaatctggtgtctatgttccactgcctacaaaaactaatttggtggaaactcccaaggaatggcaactggatctaccttgtgacaaaattcctagtgtcttgactacaactgatgaacgattggtaggcacagaacatgagggatatgatc

SEQ ID NO: 61654 - DNA, 280 bp, Glycine max
  Clone ID: 700763616H1
tcggctcgagcttctctggttgattcggatctagagtcttcagtttctcctcgttgttcttcgctttcctgttttcaatttcgattctttcgttaatttaataagatgtttgggagggcaccgaagaagacgataatacgaggtactacgaaatcctcggcgtctccaagaacgcttcgcaggatgatctgaagaaggcttacaagaaagccgccattaagaatcaccccgacaagggcggtgatcccgagaagtttaaagagctggcgcaagcttatga

SEQ ID NO: 61655 - DNA, 288 bp, Glycine max
  Clone ID: 700763617H1
agacagaatctactctctttttttctaccttagattccttctccaacaatggctctcgccgtttccactacttcttcctcttcagcagctgctgcagcttctagctccttcttctctcgtctcggatcttcctccgacgcaaaagctcctcaaatcggttcgtttcggtttccggagaggtcgcttgtttcgtctgttgttgtcaatgtaactcaacgacgctccttggtgaggccactcaacgacgaaccgcaacggaacgattctattgttcctcttgcagcaact

SEQ ID NO: 61656 - DNA, 282 bp, Glycine max
  Clone ID: 700763618H1
aaaagatcatacatagtagtgttggtgggttgcaaagatgcttgggggtcttctccataggggtcataagataaaagggacagtggtgttgatgcgcaagaatgtgttggacgtgaataggtaaccagcgttgggggaattattggtcaaggtctcgacttagttggctcaacactcgatactcttactgccttcttgggccgatccgtgtctctccagcttattagtgctaccaaagctgatgccaacggaaaagggaaacttggaaaggctacctttttg

SEQ ID NO: 61657 - DNA, 269 bp, Glycine max
  Clone ID: 700763619H1
acggatcctccgcctggaactcttgttttgccgcgctcgtgcttccgcttcggatccatctagcgtcacgaaaaaaatccagaattctgtgttcggttcagctcttttggatttgctagaccgaagcgcgaaccatttcgaagatcgttgaagaatggcatcaacggcgagtggggccaccggatggtacaggggaagagtgaaggcggttccttccggggactgtttggtcattgtggcgatctccagcaccaaacctggtcctttgc

SEQ ID NO: 61658 - DNA, 275 bp, Glycine max
  Clone ID: 700763620H1
acatagtagtgttggtgggttgcaaagatgcttgggggtcttctccataggggtcataagataaaagggacagtggtgttgatgcgcaagaatgtgttggacgtgaatagcgtaaccacgttgggggaattattggtcaaggtctcgacttagttggctcaacactcgatactcttactgccttcttgggccgatccgtgtctctccagcttattagtgctaccaaagctgatgccaacggaaaagggaaacttggaaaggctacctttttggaa

SEQ ID NO: 61659 - DNA, 280 bp, Glycine max
  Clone ID: 700763621H1
aattcttccaccaagttatgggtttccttgtgttgcttcttttctccctcttaggtctctcttctagttccagcatatcaactcatcgttccatattggaccttgacctaaccaagttaccacacagaaacaggtgtcttcactgttccaactatggaagagtgagcatggacgtgtctaccataaccacgaagaagaggcaaagagacttgagattttcaagaataacttgaactatatcagggacatgaatgcaaacagaaaatcaccccattctcat

SEQ ID NO: 61660 - DNA, 278 bp, Glycine max
  Clone ID: 700763622H1
atgaccaagttcacaatcctcctcatctctcttctcttctgcatcgcccacacttgcagcgcctccaaatggcagcaccagcaagatagctgccgcaagcagctccagggggtgaacctcacgccctgcgagaagcacatcatggagaagatccaaggccgcggcgatgacgatgatgatgatgacgacgacaatcacattctcaggaccatgcggggaagaatcaactacataaggaggaacgaaggcaaagacgaagacgaagaagaagaaggaca

SEQ ID NO: 61661 - DNA, 279 bp, Glycine max
  Clone ID: 700763623H1
tatttcttcttatctagcactcaagcccaacagtcctacttgcaaggcttgagtgctagataagaagaaatcatcatatctgccaggtttgttgacgggtatggcaagtttgattatttgagattcatgtggtcgtgagggttaaccaccttgtaagtccatctgctctcaagactgtgaattgtggaatcctgcttgcacaaaagcaatgactatgtcatttaatccaaacccgtgttctgatgcatggagtttggaatttctgaagcgtactggatt

SEQ ID NO: 61662 - DNA, 260 bp, Glycine max
  Clone ID: 700763624H1
atcgaagccggggagcggaggtgcggcgtcggcgcagaacgaagccatagaccggcgagagcgtctccggcgattggctctggagaccatagacctggcgaaggatccctatttcatgcgcaaccacctcggaagctacgaatgcaaactctgtctcactctccacaacaacgagggtcaactacttggctcacactcagggaaagcgccaccacaccaacttggccacacgtgcagtcgcgaggccaaagatccccgcg

SEQ ID NO: 61663 - DNA, 277 bp, Glycine max
  Clone ID: 700763625H1
gaaaaaccaaatatctcatcaaaatagttcctagatccgatcccatattcattttcagaccatttccacattttggggccccaagaaataaagaaagaaaccctctgtcttggttttctttcaccctagggtttctctcgcgcgatcgacacctagggtttgttaggtgtcccaacttcggtgctgcatttgtttcaagcatcgtcgttccgattctttgcgcggggacggcgatttcggaaacggcgatttcaataatgagcagcagttgtgtcgt

SEQ ID NO: 61664 - DNA, 277 bp, Glycine max
  Clone ID: 700763626H1
gttccaagagatgaaaattttggtcacttgaagtcctcggattttcttgcatatggaataaaatctttatctcaatatgtcttaccggcgttcgaatctgttttcgatttgaacttcacgccaaatgagtttgatagcttccaagatgtgcgtgacctccacgaaggtggaattaagcttcctacagaagtaattagcacaattatgcccttaccggtggtcaaagaactctttcgtacagatggtgaacaagtcctcaagtttccaccacctcatg

SEQ ID NO: 61665 - DNA, 274 bp, Glycine max
  Clone ID: 700763627H1
gcatttttaatgagatgctcattagatatagctatgaaaaattactgcgccaggctaaagctccaagtatgtttttacaatccttcaaaaattttgtttctttgtgtgtgtatggtatgataacttaattagtgttcatgaatacgtcaagccttactttagtggttctaaattgaaaagctttctagctggtcataatatcaccattactgatggtattgacaagactagtgcaactttgcaatttagaaagttagcagattgtgattttctc

SEQ ID NO: 61666 - DNA, 275 bp, Glycine max
  Clone ID: 700763628H1
tcttgcaactgcacaaagtgttcgagatgctctcattataaactggaatgctacctatgattactatgagaagctgaatgttaagcaggcatattacctttcgatggaatttttgcgggtagagcactattaaatgcaataggaaatctagagttaactggtccccatgctgaggctttgagcaagctcgggcataaattagaaaatgtggcataccaggagccagatgctgcacttggaaatggtggtcttgggcgtcttgcttcatgtttctt

SEQ ID NO: 61667 - DNA, 272 bp, Glycine max
  Clone ID: 700763629H1
gttctacatagcatctcctttaccaccattctagatatcagagaactttgcagctctcttaggtttttaaaaaacaccacgcaaacagcaagatggccacttccgacagtaacatgtactaaattatgttccagtttatgtgatgctcccactcggagttgtcaatgttgacaatgtttttgaagacccagatggccttaaagaacagctcttgcagcttcgagctgcgggtgttgacggggttatggttgatgtgtggtgggggatcatag

SEQ ID NO: 61668 - DNA, 269 bp, Glycine max
  Clone ID: 700763631H1
attcatcgcgttgctaacttaacaccaatgacaaaatcacctggtattgtcattggtgttaagttgacaaccataaacaatatgtgtgcatatgggctcaatcctggtatttcaggttctgtcttttgcagttcattcctcagtccatttcacagcaaactgtttggaatcaaatggcaacagtgagaacaccattgaattttgattctagcaagcagagcttttgtcaattctctattgatcttcttggtggaggaatcctagtggac

SEQ ID NO: 61669 - DNA, 283 bp, Glycine max
  Clone ID: 700763633H1
gtacaagtggtgaattgcaatggtgagagagtgtttgatggagagctgcaagagggacaggtgttaattgtgccacaaaactttgcggtggctgcaagatcacagagcgacaacttcggtatgtttcattcaagaccaatgatagaccctcgatcggcaaccttgcaggtgcaaactcattgttgaacgcattgccggaggaagtgattcagcaacttttaacctaaggaggcagcaggccaggcaggtcaagaacaacaaccctttcagcttcctggttcca

SEQ ID NO: 61670 - DNA, 281 bp, Glycine max
  Clone ID: 700763634H1
cggaatttgagtaatattcatatttccggcttattttacgacggcagatacaaattctggactaaacacgagaaaaatcttgctttgacagaagaggaaaagatggaggtgattagaatagaggcattcctgctgatgttcttgcacagcgagctcatgaatttgaaaaacatgttgctcatgaaagcctcaaggatcaaattcctgctgttgacaagttgtattctactaaggttaataagtttgcaaaaattatgaaccttagacaagtgttgttggtg

SEQ ID NO: 61671 - DNA, 280 bp, Glycine max
  Clone ID: 700763635H1
ctacacagtacacacactagaagaataatggcttccatcctccactactttttagccctctctctttcttgctcttttcttttcttcttatccgactcagtcacccctacaaaaccataaaccttgttgttctacccgttcaaaatgatggttccacagggctccattggtccaacctccaaaaaagaacccctctaatgcaagtaccagtcctggtggacctcaatggaaatcacttgtgggttaactgtgagcagcagtactcatccaaaacgtacca

SEQ ID NO: 61672 - DNA, 276 bp, Glycine max
  Clone ID: 700763636H1
cttgagataagcaagccaaatctttagctcttctgaaccaactttcatataacaaccttgcagcagtcatttgattcaaaaggaatcataatggaagaggagcaaaaactggttaagggaccacaaatttggagggaagtgaaagtgcggccaaacttgagctcacagtggatgaagtggtggaggagtatgtggggtccttagggttctctcagatggtgcatgtgttcttggtgtcattggcatggatatttgatgctcagagtacttggccac

SEQ ID NO: 61673 - DNA, 277 bp, Glycine max
  Clone ID: 700763637H1
agaatataggaatataagaactaagatggattggatcggagcgtaccgcggaggccagagaagcagggactggtgcgacccttcatcaccattcactgatttgtgggaccctcgtcgtgtcggtgacgctgatgatatcacctcctctctcgcccatgctcacgttgactggcgtgagactgataaagctcatatcttccgtgctgatcttccaggggtgaagaaagaggatctgaaggtgcaggtggaggagaataagatcctgcagataagcggg

SEQ ID NO: 61674 - DNA, 269 bp, Glycine max
  Clone ID: 700763639H1
gccagcattatcattgctttgcttatagccatgaccatgaacagtggattatgtatgatgacaagactgtcaaggtaattggtggatgggcggatgttcttacaatgtgtgaaaggggcatctacaacctcaggttcttttcttcctagctgtaaactagatttttggtggaactgataacatcatttgctggactgaagaatgttgacttttgggtttcaattggtttctggagtggcttgtttatgcagatcattgcataacacaaa

SEQ ID NO: 61675 - DNA, 273 bp, Glycine max
  Clone ID: 700763640H1
cattggtccttaaacactcatcagtcatcaccatggccaagctagttttttccctttgttttctgcttttcagtggctgctgcttcgctttcagttccagagagcagcctcagcaaacgagtgccagatccaaaaactcaatgccctcaaaccggataaccgtatagagtcagaaggagggctcattgagacatggaaccctaacaacaagccattccagtgtgccggtgttgccctctctcgctgcaccctcaaccgcaacgcccttcgtag

SEQ ID NO: 61676 - DNA, 264 bp, Glycine max
  Clone ID: 700763641H1
gtgcggtttcctttgttggtgttgctgggaactgttttcctggcatcagtttgtgtctcattaaaggtgagagaggatgagaataaccctttctacttgagaagctctaacagctccaaactctctttgagaaccaaaacggtcgcattcgtctcctccagagattcaacaaacgctccccacaacttgagaaccttcgagactaccggattgtccagtttcagtcaaaacccaacacaatccttctccgccaccatgctgacg

SEQ ID NO: 61677 - DNA, 272 bp, Glycine max
  Clone ID: 700763642H1
tacttcactgttgctggactccacaagaaggagcttgtctgagaaggaaacagatagaagctttgggttgagaaatttcaggtacattgagaccatcaaagaagcttggaaaggaatgcccaggagttgtttcctgtgctgatatcctcgttctctctgccagagatggcattgtttcgctaggaggtccccatatccctcttaaaacaggaagaagggatggtagaaggagcagagccgatgtggtagagcagttcctcccagaccacaat

SEQ ID NO: 61678 - DNA, 258 bp, Glycine max
  Clone ID: 700763644H1
ctttgcacagcacacggaacagatggcaagtgattacgaaatagcaagcgattcctgactggatgttcctcgcaccagcagagctacatggaatttagaaacaacatggttgtctcatgcagcagcctcaagcatcagatatcctgctgttgcacaagttgtattactactaaggctactaactttgcacaaattatgaaccttagccagagtgttgttggtgatcttagattcttcctgatgggaagtgtctgaggg

SEQ ID NO: 61679 - DNA, 271 bp, Glycine max
  Clone ID: 700763645H1
taagatttgacattttgataaaccgcgatcacaggttgccgcaccataaaaccggaaacaaaagcaatcgttacttgatttcaagaatctctcaatttcttcctacttctttgtgtacgatttcttaagggaaagaaaatcactctctgtgctggccacagacttcgtgaatcattttcttttccactcttagcccacctcacgcacactctcctatttgatataggacttcgtgtcagatttaaacttcttctgtttctttctcagttct

SEQ ID NO: 61680 - DNA, 263 bp, Glycine max
  Clone ID: 700763647H1
ctctcgagccgaatcggctcgagaatatcctagtacaccgtatcatagaatttacagatctcattatgatgagagcgcggttgccattactgttgctgggagttgttttcctggcatcgtttctgtctcatttggcattgcgtattgggaaaagcagaaccccagtcacaacaagtgcctccgaagttgcaatagcgagaaagactcctacaggaaccaagcatgccacgctcgttgcaacctccttaaggtggaggcagaag

SEQ ID NO: 61681 - DNA, 277 bp, Glycine max
  Clone ID: 700763648H1
gagtagagcagcagagaagagagaaaacggcactgcagccgtagaaggaaaaccgaccatggtgcacgtctccttttacaggaactatggtaagacgtttaagaagccccgccgtcgtacgagaaggagcgtctagacgcggagctgaagctggtgggggagtacgggctgcggtgcaagagggagctgtggagggtgcagtacgcgctcagccgcatccgcaacaacgcgcggaatctccttaccctcgacgagaagaaccgcgccggatcttcga

SEQ ID NO: 61682 - DNA, 271 bp, Glycine max
  Clone ID: 700763649H1
cttatttgaacaacacttgggcgttggtgcaaatgtttgcttcattaattttctctggagacaacaggctcactgcgaaaacaatctttacttgcagagatttggacatccttggtgtctattatacaatagcaactcaatttagaaaatttctaccgcattacattaggtggcatctgtataccttgttgatctacattctcccatcttttctcactgctgaaattacatataagcggaatctgagtaatattcatatctccggcttatt

SEQ ID NO: 61683 - DNA, 272 bp, Glycine max
  Clone ID: 700763650H1
ggcagaggaagaagaagaagaggatgagaagccacagtgcaagggtaaagacaaacactgccaacgcccccgaggaagccaaagcaaaagcagaagaaatggcattgacgagaccaatgcaccatgagacttcgccacaacattggccagacttcatcacctgacatctacaaccctcaagccggtagcgtcacaaccgccaccagccttgacttcccagccctctcgtggctcagactcagtgctgagtttgggatctctcgcaagaatgc

SEQ ID NO: 61684 - DNA, 274 bp, Glycine max
  Clone ID: 700763651H1
gtaagaaagatgtttggagagttgaatgtggaatcccttctggatttccgctcacagttatttgcaatagcatttttaatgagatgctcattagatatagctatgaaaaattactgcgccaggctaaagctccaagtatgtttttacaatccttcaaaaattttgtttctttgtgtgtgtatggtgatgataacttaattagtgttcatgaatatgtcaagccttactttagtggttctaaattgaaaagctttctagctagtcataacatcac

SEQ ID NO: 61685 - DNA, 274 bp, Glycine max
  Clone ID: 700763652H1
gtcttcttgatccttctttttctccttgaactcaaacatggcagatgaggtggttctgctagatttctggccaagtccatttgggatgagggtcaggattgcacttgctgaaagggtatcaaatatgagtacaaagaagaggacttgaggaacaagagtcctcttctcctccaaatgaacccggttcacaagaagattccggttctcatccacaatggcaaacccatttgtgaatccctcattgctgttcagtacattgaggaggtttggaatg

SEQ ID NO: 61686 - DNA, 268 bp, Glycine max
  Clone ID: 700763653H1
ggcaaagatctcgcaatggttaaagttaatgtagcatgtgctgctgttggcttgacatcaagctatactccgactccattgttggaatctggtttgcaaaaagacagagggtaattgtggagtattttggaaggatgtcttacgttgctcataacgttaatcagccccaagagaaagatttgttggaaggaaatttttcctttgatattaaatctcgctctagattggaaaaagtttcctctacaaaagcacatttgttagtggaaaa

SEQ ID NO: 61687 - DNA, 270 bp, Glycine max
  Clone ID: 700763654H1
cgctgggatttcctgtgtcttgaaaaggataaggggaaaggaagatgtccagtctagcatggcggcagttttggttcaggggccttgttttcattagtaagtggcatgggtggaccaaatcaagcaacaaatgcactcacttctggacttttctttgcacttgttcaaggtggacttttccagataggacaaaagttttctcaaccacctgctgaagatactcactatgctaaaacaagacacatgttgaacatcttggccttcagagtt

SEQ ID NO: 61688 - DNA, 272 bp, Glycine max
  Clone ID: 700763655H1
gacgataaaagctaaaaaatcattcattccgtttcattcattcactctctcaacaaaactctctctctcaatctccttaccttgcaagcaccccacccacacactgtccaacgtaaccgatcaaaaacccatctctgtctacctgtgtctgatctcaaagttggctctcacaaaaacgtgaaaaaatttcattcccgtgagattctcctccaccgatgcagattgcatttcaggaatcctgggtgtctacgatacgtaatcaccttttccat

SEQ ID NO: 61689 - DNA, 272 bp, Glycine max
  Clone ID: 700763657H1
gattcaaacatggaactctcaacaccctgagctgaaatgcgccggcgtcactgtttccaaactcaccctcaaccgcaatggcctccacttgccatcttactcaccttatcccggatgatcatcatcgcccaagggaaaggagcacttggagttgcaattccaggatgtcctgagacgtttgaggagccacaagaacaatcaaacagaagaggctcaaggtcgcagaagcagcagctacaggacagtcaccagaagattcgtcacttcaatga

SEQ ID NO: 61690 - DNA, 246 bp, Glycine max
  Clone ID: 700763658H1
aaaagatcatacatagtagtattggtgggctgcacagatgcttgggggtcttctccataggggtgataagatagaagggacagtggtgttgatgcgcatgaatgtgttggcgtgaatagcgtaaccagcgttgggggaattattggtcaatgtctcgacttagttggctcaacactcgatactcttactgccttcttggaccggtccgtgtctctccagcttattagtgctcacatagcctgtgcc

SEQ ID NO: 61691 - DNA, 265 bp, Glycine max
  Clone ID: 700763659H1
cggctcgaggttattatcaaataattaattaaattcctcgtggaatcttgttgaagccatgtctacagctggtcaggtcatcaagtgcagagctgcggtggcatgggaacagggaagccactatcgatagaaaccatagaagtggcaccaccccagaaaggtgaagtgcgtttgaagatcctcttcaactccctttgccgtacagatgtttactggtgggatgctaagggccagactccgctgtttcctcgtatcttaggccacg

SEQ ID NO: 61692 - DNA, 270 bp, Glycine max
  Clone ID: 700763661H1
cgatcttcgatcttcgtcgctgaaaatgagagagtgcatttcaatccacatcggccaggccgggattcaggttggaaacgcctgctgggagctttactgcctcgaacacgcattcagcctgatgggcagatgccaagtgacaagaccgttggtggaggtgatgatgttttcaacaccttcttcagtgaaactggggcaggaaagcacgtgccccgtgcgatttttgtagatcttgagcccactgtgattgatgaggttaggactgggaca

SEQ ID NO: 61693 - DNA, 271 bp, Glycine max
  Clone ID: 700763662H1
gatcaatggagaactcagacgagcaacttccgttgtctccacaaaaccctaacaatgccgaagaagacgacgacgacatcgaagagccagaagacgaagacgacagaagaggggaggaggacgacgacgacgacgacgtcgtttcgcaggagcaatccccattgtcgcagctgcgcgagcagcgttcgaagctggacacctgtcccggcgattggcgtcggagctggtgccaatccgagtccacgacgtgctgattcgcggcaacacgaag

SEQ ID NO: 61694 - DNA, 263 bp, Glycine max
  Clone ID: 700763663H1
gaatttcttacagcttggtcaactcaggtgcgtcctgcaacaactctgttggctgatgggtgcccatatttgtatgctatggtgcatgatagttcagtgtctacaataccagtgattttgtcattggtgttaagttgacaaccataaacaatatgtgtgcatatgggctcaatcctggtatttcaggttctcgtcttttgggcaccattcctcagtccatttcacagcaaactgtttggaatcaaatggcaacagtgagaaca

SEQ ID NO: 61695 - DNA, 273 bp, Glycine max
  Clone ID: 700763664H1
taagtttgcaaaaattatgaaccttagacaaagtgttgttggtgatcttaaacttcttactgatgggaagttgtatgagggtaagcatattcctgtatctaatattagtgcagggagaatcatgtagttcaaatacccctaatggcacaggaggaaattctgtcttctagcgacgcgatttcagaactgcaatggtgagtagaaatagcaagcctcaagctactgcaatgcatgtgggagctatagaaattatcattgatagtcttcgcaagt

SEQ ID NO: 61696 - DNA, 267 bp, Glycine max
  Clone ID: 700763665H1
gaatccagcccgagagcagaaggaggaacacgaatggcatcgcaaggaggaaaaacacggaggaaagggaagtgacgaggacaagatgaacgtgaacacccacgcccacaccaacctcatcaaaaggaagaggaaaagcacgaatggcaacacaagcaggaaaagcaccaaggacaggaaagtgaagaagaagaagaagaccaagacgaggatgaggagcaagacaaagagagccaagaaagtgaaggttctgagtctcaaagagaa

SEQ ID NO: 61697 - DNA, 277 bp, Glycine max
  Clone ID: 700763666H1
attaacactttccttagttcaatatggggacgcccttcttcactctctctctttcttccctttgcttgctactcttgtcgagtgcatgctttgctattacctccagcaagttaacgagtgccaactcaacaacctcaacgcgttggaacccgaccaccgcgttgagtccgaaggtggtcttattgaaacatggaactctcaacaccctgagctgcaatgcgccggtgtcactgtttccaaacgcaccctcaaccgcaacggcctccacttgccatct

SEQ ID NO: 61698 - DNA, 270 bp, Glycine max
  Clone ID: 700763668H1
agattgaaccagacatgaattcaaggtttcagcttttgagtaccactaccaatggtgattttgttcaaggaaaagatctcgcaatggttaaagttaatgtagcatgtgctgtgttggcttgacatcaagctatactccgactccattgttggaatctggtttgcaaaaagacagagggttaattgtggagtatcttggaaggatgtcttacgttgctcataacgttaatcagccccaagagaaagatttgttggaaggaatttttccttt

SEQ ID NO: 61699 - DNA, 269 bp, Glycine max
  Clone ID: 700763670H1
ggcttattttacgacggcagatacaaattctggactacacacgagcaaaatcttgcattgacagaagaggacaagatggaagtgattagaaatagaggcattcctgctgagttcttgcacagcgagctcatgaatttgaaaaacatgttgctcatgaaagcctcaaggatcaaattcctgctgttgacaagttgtattctactaaggttaataagtttgcaaaaattgatgaaccttagacaaagtgttgttggtgatcttaaattctt

SEQ ID NO: 61700 - DNA, 267 bp, Glycine max
  Clone ID: 700763673H1
aaaattcttccaccaagttatgggtttccttgtgttgcttcttttctccctcttaggtctctcttctagttccagcatatcaactcatcgttccatattcggaccttgacctaaccaagtttaccacacagaaacaggtgtcttcactgttccaactatggaagagtgagcatggacgtgtctaccataaccacgaagaagaggcaaagagacttgagattttcaagaataacttgaactatatcagggacatgaatgcaaacagaa

SEQ ID NO: 61701 - DNA, 267 bp, Glycine max
  Clone ID: 700763675H1
tcaccacctatttttacttttctcgaaaaccctaattcatacgtcgccgttttgtgcttctctctctgagctctccacaggatcaggaaccgaagcgttgaaatggggtaatatgatgatgatggtgatgaatcgaatttccatttcctgatgtgaggaacaaagcaccaccaccaccttggctaggttcatgtagggtttgttgagaatcttatagttttttattttctttatcaaattctcgcttgatcaggaattggatttgtg

SEQ ID NO: 61702 - DNA, 258 bp, Glycine max
  Clone ID: 700763117H1
caggcaaattgctttaaaatttttggagtcagataagaaaactgctgagcttgttggaaatacaaaaatgaaggccagcaccaatgttaggcataatgttcgtccttgtactagttctgccagggcccaacttatcccagatattcttcgctgttatagcagtggaggccggacaattgtatttgccgagacaaaagaatgtgcttctcagcttgcaaggatcttgaatggagcaaagctctccatggtgacgtacag

SEQ ID NO: 61703 - DNA, 268 bp, Glycine max
  Clone ID: 700763118H1
aaagcatgccgggttatgtctggagacacaaggattccctaatgccataaaccagccaaattttccatctgttgtggttcgtccgggtgagaagtatcaacataccatgttgtttgagttttcccttgagtgatgtttgttggagtggcataacaatggggtagacatcttgttgtgcatattatgtttgcgttcaaataattgaatgaccatttcattgtccaagtcgtgttgttttatcactcctgaatgttgacatatattgcaa

SEQ ID NO: 61704 - DNA, 265 bp, Glycine max
  Clone ID: 700763119H1
ctttccttagttcaatatggggaacccttcttcactctctctatttcttccctttgcttgctactcttgtcgagtgcatgctttgctattacctccagcaagttcaacgagtgccaactctacaacctcaacgcgttggaacccgaccaccgcgttgagtccgaaggtggtcttattgctacatggaactctcagcaccctgagctgcaatgcgccggtgtcaatgtttccaaacgctagctcatccgcaactgctccacttgcc

SEQ ID NO: 61705 - DNA, 257 bp, Glycine max
  Clone ID: 700763120H1
taaaattcttccaccaagttatgggtttccttgtgttgcttcttttctccctcttaggtctctcttctagttccagcatatcaactcatcgttccatattggaccttgacctaaccaagtttaccacacagaaacaggtgtcttcactgttccaactatggaagagtgagcatggacgtgtctaccataaccacgaagaagaggcatcgagacttgagattttcaagaataacttgaactatatcagggacatgatg

SEQ ID NO: 61706 - DNA, 265 bp, Glycine max
  Clone ID: 700763121H1
gttaaacactcttcttcatcgtcgtcgcaatgggacgtgtgatccgtgcgcagcgtaacgggagcaggctcggtcttcaagtcccacacgcaccaccgcaagggccctgcccgcttccggagcctggatttcggagagcgcaacggctacctgaagggtgtcgtcactgacgtcatccacgatcctggccgtggcgcggctctcgctaaggtcgccttccgctacccgttccgctacaattagcagaacgagctctcatcgccgc

SEQ ID NO: 61707 - DNA, 266 bp, Glycine max
  Clone ID: 700763123H1
tcaacgtaccaatcttaatccttgtatttctcatttgtcccaaacaaaattaatttttgtggaacactttttcgacacccccgaattcccacctgcagattctccccatcaattttcagcatagtgattgtggaagctcaacagagggcattggtactgtagatagggctaggagtccctgacatgtatatgcctgtggctacctctgccacgctgcgcggcggattgcctactgacagtggggactctgttgtggcattagacca

SEQ ID NO: 61708 - DNA, 264 bp, Glycine max
  Clone ID: 700763125H1
aaaaataaaaaaaggggtgagagaaggtgttggtttggtttggcgagcgagagcgagaaaagaggaggaaacaatgggcgaggtatctgaaagtaccacgacgaagaggaagaagaagggacgcccctctcttttggatcttcaaaagcgatctctcaaaaaagaacagcaaaatcaccaccagcagcgacaaagcaacaactccaattcagccaattcccacaacaacaagaacaagaccaacaaaaacgctgttccccacga

SEQ ID NO: 61709 - DNA, 258 bp, Glycine max
  Clone ID: 700763127H1
gcaacagtgagaacaccattgaattttgattctagcaagcagagcttttgtcagttttctattgaccttctcggtggaggaatcttagtggacaaaactggagattggatcacacttatacaaaattctccaattagtaacttgttgagagttgctgcttggaagaaaggctgtttaatggtcaagattgtgatgtctgggaatgcagcagtcaaaaggagtgattgggcctcattggtacaagtgtttttaacaaca

SEQ ID NO: 61710 - DNA, 260 bp, Glycine max
  Clone ID: 700763128H1
cacacacaactactacaagtacttccttacaatcaaaaccaacaacaactatggcaagttatcaaaagcactacgatgatcagggtcgcaaggttgacgagtatggcaacgttgagaagcaaaccgacgaatacggcaaccctgttcatgctgctagtgtcacctatgtagccaccagaactgctgctggtggttacagtgatgacattaataagcaacatgataccaccaatgcctacggcgtagacactggtagacag

SEQ ID NO: 61711 - DNA, 261 bp, Glycine max
  Clone ID: 700763129H1
gaaaattctccaattagtaacttgttgagagttgctgcttggaagaaaggctgtttaatggttaagattgtgatgtctgggaatgcagcagtcaaaaggagtgattgggcctcattggtacaagtgtttttaacaaacagcaacagtacagagcattttgatgcatgtaagtggacaaaatcggaaccacattcctgggaattgatcttcccaatagaggtatgtggtcctaataatggttttgaaatgtggagtctgagt

SEQ ID NO: 61712 - DNA, 262 bp, Glycine max
  Clone ID: 700763131H1
gaagaagagaacatagtggtgtttatgtacgatgacatagctacagacgagttaaatcccagacctggagtcatcatcaaccaccctgagggacaagatgtgtatgctggtgttcctaaggattacaccggtgagaatgtgacggcccagaacctctttgccgttattcttggagacaagaataaagtgaagggaggaagtggcaaagtgatcaatagcaaacctgaggacagaatattatatactactctgatcatggagt

SEQ ID NO: 61713 - DNA, 262 bp, Glycine max
  Clone ID: 700763132H1
tctcgagccgattcggctcgacttccttagttcaatatggggcagtccttcactctctagctttcttccctttgcttgagctatcttgtcgagtgcatgctttgctattagctccagcaagctcaacgagtgccaactcaacaacctcaacgcgttggaacccgaccaccgcgttgagtccgaaggtggtttgattcaaacatggaactctcaacaccctgagctgaaatgcgccggtgtcactgtttccaaactcacctca

SEQ ID NO: 61714 - DNA, 261 bp, Glycine max
  Clone ID: 700763133H1
accgattgctagaatggaatttcgatgctcagtcatctcttttaccattctcttctctcttgctcttgcaggagagagccatgtccatgcatcgctacctgaggtagattattgggaagctgtttggccaaacactgccattcccactgcactgcgagagcttctaaagcctctccctgcaggtgttgatatcgatgaactcgctaagcaaattgatgatacacagtacgcaaaaacattcttctatgaagcagaccttca

SEQ ID NO: 61715 - DNA, 194 bp, Glycine max
  Clone ID: 700763134H1
cttccttagttcaatatggcgaagcccttcactctctctctttcttccctttgcttgctactcttgtcgagtgcatgctttgctattagctccagcaagctcaacgagtgccaactcaacaacctcaacgcgttggaacccgaccaccgcgttgagtccgacggtggtttgattcaaacatggaactctcaaca

SEQ ID NO: 61716 - DNA, 185 bp, Glycine max
  Clone ID: 700763135H1
ttttcactttcaggtattttacttgctgggaacccagatatagagtacccagagaccatgcaacaacaacaacagcagaaaagtcatggtggacgcaagcaggggcaacaccagcaggaggaagaggaagaaggtggcagcgtgctcagtggcttcagcaaacacttcttggcacaatccttcca

SEQ ID NO: 61717 - DNA, 261 bp, Glycine max
  Clone ID: 700763136H1
atcgattgctagaatggaatttcgatgctcagtcatctcttttaccattctcttctctcttgctcttgcaggagagagccatgtccatgcatcgctacctgaggaagattattgggaagctgtttggccaaacactcccattcccactgcactgcgagagcttctaaagcctctccctgcagatgttgaaatcgatgaactccctaagcacattgatgatacacagtacccaaaaacattcttctataaagaagacttcat

SEQ ID NO: 61718 - DNA, 252 bp, Glycine max
  Clone ID: 700763138H1
ggtgcctactggtgttgcatggtggatgtacaacaatgaagacactcctgttgttgccgtttctattattgacaccaacagcttggagaaccagctcgaccagatgcctaggagattctatcttgctgggaaccaagagcaagagtttctaaacatatcagcaagagcaaggaggtcatcaaagccagaaaggtaagcatcagcacgaagaagaaaacgacagaggcagcatattgagtggcttcaccctgg

SEQ ID NO: 61719 - DNA, 258 bp, Glycine max
  Clone ID: 700763139H1
ctgtctctgtctctactcctggaaaatttgaggaatttttcgggcctggaggacgagacccagaatcggtcctctcagcattcagctggaatgtgctgcaagctgcgctccaaaccccataaggaaagttagaaaagctttttgatcaacagaacgagggaagtattttcgcaataagcagagaacaggtgcgtgcgttggcccctaccaagaaaagctcttggtggccattcggtggcgaatccaagcctcattcaa

SEQ ID NO: 61720 - DNA, 257 bp, Glycine max
  Clone ID: 700763140H1
gggcacttcccgaagtgtcaaaagaatgcctctttctatagggggaggagctggtgcaaagaatgctattctcatgaatatgccaaatgctgttctttcaatgtggagatattttgttggagatctcgtctttgaagtttctaagatgacttctccctacattaaatgtacagtctctttcttcatagcatttggaaatttggctgatgacaccatcaattttgaggcttttccccacaagctggtgcagttggaga

SEQ ID NO: 61721 - DNA, 255 bp, Glycine max
  Clone ID: 700763141H1
gttcctcactgaccaagccatagcgatgagaaccaaactttctttagctatctttttcttttttcttttagccagattttcaaacctagcctttggcaaatgtaaagaaaccgaggtagaagaagaagaccctgagctcgtaacatgcaaacaccaatgccaacagccacagcaatacactgagggtgacaagcgggtatgcttgcaaagatgtgacaggtatcatcgtatgaagcaagagcgagagaaacaaat

SEQ ID NO: 61722 - DNA, 107 bp, Glycine max
  Clone ID: 700763143H1
gacattttgataaaccgcgatcacaggttgccgcaccttaaaaccggggacaaaagccatcgttacttgatttcaagaatctctcaattacgtcgtactactttgtg

SEQ ID NO: 61723 - DNA, 73 bp, Glycine max
  Clone ID: 700763144H1
gcacctcatcactgcactcgcatggagtcaaatgtgatgaactcaacacttgagcctgtgagagcggagacca

SEQ ID NO: 61724 - DNA, 247 bp, Glycine max
  Clone ID: 700763145H1
gtaactgtaaatatgggtggtgcttgttaatcatattcttattcaaacggatgtcattgtacactatgagtatcagatttctattatttcttgttggctcctgacgatactagaaggcctcaattgaactttggtttcaaattccttacaacgaaaatcatgtttttgctagagaggcgtgtactgaaggagtcctttggtgaacttattctttgtttggaagtgtgatattagtaagacaggatac

SEQ ID NO: 61725 - DNA, 258 bp, Glycine max
  Clone ID: 700763146H1
tgcacttcccaagaacacagttggaggaactattctgcgtagtgatctattggcaaattttctgacagagggcaattttagagcaagtgttgatttgcagcgcactcatcgtattaaaggaatgattaaaatggtggccacagttggtattcctgagaatacaggtatatcattggcctgtgctatgaatagttcttttagggggcgtgccagttctgatatttacaccatctgctctcaagactgtgaatttggaat

SEQ ID NO: 61726 - DNA, 261 bp, Glycine max
  Clone ID: 700763148H1
accaatttgattgtcaggaccatttggcagaattggtcaatgaagacttttatgatgaaaaatttaattttattggcacaattgggactccagcttttcatcgacaaattgctgcacacttggagaaaatgccattatggcaaaaagcaattttgtgtggaatgggacattgtttgtctcggaaacgcaaagaaacatggtattctgggatgaaggaaaaatttgtacaaatgatgaagagcatctatgaaacgaagttac

SEQ ID NO: 61727 - DNA, 260 bp, Glycine max
  Clone ID: 700763150H1
ggaacagcataatatacgcttgaatggacgggcattgatacaagtggtgaattgcaacggtgagagagtgtttgatggagagctgcaagagggacgggtgctgatcgtgccacaaaactttgtggtggctgcaagatcacagagtgacaacttcgagtatgtgtcattcaagaccaatgatacacccatgatcgggactcttgcaggggcaaactcattgttgaacgcattaccagaggaagtgattcagccactttcaa

SEQ ID NO: 61728 - DNA, 259 bp, Glycine max
  Clone ID: 700763151H1
ggatttttcgaccagagtcgaaacagaaggtggcagcattcgggttctcaagaagttcactgagaaatccaagcttcttcaaggcattgagaatttccgtttggccatcttagaagctagagcacacacgttcgtgtccccacgccactttgattccgaggttgtcttgttcaacattaaggggagagccgtacttgggttggtgagggacagtgaaacagaaaaaatcaccctagaacctggagacatgaacacatac

SEQ ID NO: 61729 - DNA, 258 bp, Glycine max
  Clone ID: 700763153H1
tgagtcactagcacttcccgagttacaggttaaagaagacactgatctcttcatcattgacgaagttggtaagatggagttgttcagttcctcattcttccctgcagttctaagagttttggagtcaaatatcccagttttggcttccattccagttccaaaattcggcagagacatacctgaagttgcaaggttgcggaatcatgcaggggcaacttgttttacattgagcgttagtaacagagatgcgttagagaa

SEQ ID NO: 61730 - DNA, 258 bp, Glycine max
  Clone ID: 700763154H1
tggagttgcaattccaggatgaactgagacgtttgaggagccacaagaacaatcaaacagaagaggctcaaggtcgcagaagcagcagctacaggacagtcaccagaagattcgtcacttcaatgaaggagacgtactcgtgattcctcctggtgttccttactggacctataacactggcgatgaaccagttgttgccatcagtcttcttgacacctctaacttcaataaccagcttgatcaaacccctagggtatt

SEQ ID NO: 61731 - DNA, 256 bp, Glycine max
  Clone ID: 700763155H1
gaggttgagtagttcttcatcatagtcttaaacattaaaccttagcaaaactcaacaatgctagacatcaaaggctacctcgtactcttcttcctatggttcatatcaaccattctgatacgttccatcttcaagaaaccatagcgtctaagactcccaccgggtcctccaatttcaatacccttgctgggacacgcgccatatctccgttcactgctccaccaagcattgtacaagctatcactgcgctatggac

SEQ ID NO: 61732 - DNA, 258 bp, Glycine max
  Clone ID: 700763156H1
gggaaaattgactttccccagggcacttcccgaagtgttaagagaatgcctctttctatagggggaggagctggtgcaaagaatgctattctcatgaatatgccaaatgctgttctttcaatgtggagatattttgttggagatctcgtctttgaagtttctaagatgacttctccctacattaaatgtacagtctctttcttcatagcatttggaaatttggctgatgataccatcaattttgaggctttccccaca

SEQ ID NO: 61733 - DNA, 257 bp, Glycine max
  Clone ID: 700763157H1
gcatgtgggagctatagaaattatcattgatagtttcgcaagtcctgactgcaacatagttggtgcaatgcttttggttgatacttatcataccaatcctgaaaatgcagttcgtagtatttttgttgcgcctttcagaggcggaaggcccattcgggtggttacatttccgaataccattgtgcagattgaaccagacatgaattcaaggtttcagcttttgagtaccactaccaatggtgattttgttcaaggaa

SEQ ID NO: 61734 - DNA, 257 bp, Glycine max
  Clone ID: 700763158H1
taaaattcttccaccaagttatgggtttccttgtgttgcttcttttctccctcttaggtctctcttctagttccagcatatcaactcatcgttccatattggaccttgacctaaccaagtttaccacacagaaacaggtgtcttcactgttccaactatggaagagtgagcatggacgtgtctaccataaccacgaagaagaggcacagagcacttgagattttcaagaataacttgaactatatcagggcatgaat

SEQ ID NO: 61735 - DNA, 256 bp, Glycine max
  Clone ID: 700763159H1
ggatggactgccactccaatgcaggatgttcaggttacaattgattggtttatttcctctcaggaatgtgttcccaggacctattgtgttttaaatccacaaaatccttttgtgttaaataggtggatggggaaactgactttcccccagggcacttcccgaagtgtcaaaagaatgcctctttctatagggggaggagctggtgcaaagaatgctattctcatgaatatgccaaatgctgttctttcatgtggag

SEQ ID NO: 61736 - DNA, 259 bp, Glycine max
  Clone ID: 700763161H1
ttcaaccaagcgcgggtaaacggcgggagtaactatgactctcttaaggtagccaaatgcctcgtcatctaattagtgacgcgcatgaatggattaacgagattcccactgtccctgtctactatccagcgaaaccacagccaagggaacgggcttggcggaatcagcggggaaagaagaccctgttgagcttgactctagtccgactttgtgaaatgacttgagaggtgtaggataagtgggagctggaacagcgaaa

SEQ ID NO: 61737 - DNA, 252 bp, Glycine max
  Clone ID: 700763162H1
gatgaatgctcctgattcaaatgataatattgatctactgttgagcattgatttgttgggtttacaaggagcaggtaaagcttttccaaacaagattgtttttgatgataagcttgtgttggctaacacacaagaattctttgatggaaattttccagtggattcttggttaccaatttttgtgatctgtctttatcctgtaagtgcattacaacgacagcttctgaaggtaattgacttacaggataagac

SEQ ID NO: 61738 - DNA, 256 bp, Glycine max
  Clone ID: 700763163H1
gttaataaataatttaagatactatgatgagagcacggttcccattactgttgctgggacttgttttcctggcttcagtttctgtctcatttggcattgcttactgggaaaaagagaaccccaaacacaacaagtgtctccagagttgcaatagcgagagagactcgtacaggaaccaagcatgccacgctcgttgcaacctccttaaggtggagaaagaagaatgtgaagaaggtgaaattccacgatcagacca

SEQ ID NO: 61739 - DNA, 162 bp, Glycine max
  Clone ID: 700763165H1
ctagtatatcttaataactagtttaagatactatgatgagagcacggttcccattactgttgctgggactagcattcctggacttcaggttctgtctcattgagcattgcttagtggcgtcaagtgaggcccaaatacaacaagtatctccagagctgccat

SEQ ID NO: 61740 - DNA, 200 bp, Glycine max
  Clone ID: 700763166H1
aaagaatgctattctcatgaatatgccaaatgctgttctttcaatgtggagatattttgttggagatctcgtctttgaagtttctaagatgacttctccctacattaaatgtacagtctctttcttcatagcatttggacatttggctgatgataccatcaattttgaggcttttccccacaagctggtgcagtttggag

SEQ ID NO: 61741 - DNA, 256 bp, Glycine max
  Clone ID: 700763167H1
gtgctcttccactcccgtaccgtctctgcctctctgcaatccacagttgaaaatgcctttcaagaggtacgttgagatcgggagggttgctcaaatcaactacggcaaggaatatggcaggctcgtcgtcatcgtcgacgtcattgaccagaacagagtacttgtcgatgcccctgatatggtgaggtcccaagtcacattcaaaaggctttcccttaccgacatcaagattgacatcatgagggtcccaagaaga

SEQ ID NO: 61742 - DNA, 256 bp, Glycine max
  Clone ID: 700763168H1
tttcttcttatctagcactcaagcccaacagtcctacttgcaaggcttcagccataatattctagagacctccttccatagcgaattcgaggagataaacagggttttgtttggagaggaagaggagcagaggcagcaagagggagtgatcgtggaactctcaaaggaacaaattcggcaactgagcagacgtgccaaatctagttcaaggaaaaccatttcctccgaagatgaaccattcaacttgagaagccgc

SEQ ID NO: 61743 - DNA, 255 bp, Glycine max
  Clone ID: 700763169H1
caagggtccaactctgcttgatgcacttgaccaggttagtgagcccaagaggccctctgacaagcccctcaggcttccccttcaggatgtgtacaagattggaggtattggaactgtgccagtgggacgtgttgagaccggtgtcttgaagcctggaatggtggtgacttttgcaccaactggactgacaactgaagtcaagtctgtggagatgcaccatgaatctcttacagaggcacatcctggtgacaatgt

SEQ ID NO: 61744 - DNA, 252 bp, Glycine max
  Clone ID: 700763170H1
tgtctttatcctgtaagtgaattaccttcagaagctgtcgttgtaaatgttacatgtggtagtggacgtggtggtttacctaccactgcttggattagttctgcagttaacaatcgctcctcagatatcaacaaaaagattcgcacagcacttgggaaaggtaagaaaattgtttttcttactagagttgatccttttccagtagctctactggctgttctttttggcgttaagaatgaaattctggttcca

SEQ ID NO: 61745 - DNA, 254 bp, Glycine max
  Clone ID: 700763171H1
gaagaaaaacccaaaaagattgatgccagattgagacaaagaatagatcctcaatacaatgaggttcaggctcagatggaaacaaatttgtttaaattgtctcttgatgatgttgaaactcctaaaggttccatgttggatcttaaaatttctcagtctaaaattgcacttcccaagaacacagttggaggaactattctgcgtagtgatctattggcaaattttctgacagagggcaattttagagcagtgtt

SEQ ID NO: 61746 - DNA, 254 bp, Glycine max
  Clone ID: 700763172H1
cggctcgagcgattgctagaatggaatttcgatgctcagtcatctcttttaccattctcttctatcttgctcttgcaggagagagccatgtccatgcatcgctacctgaggaagattattgggaagctgtttggccaaacactcccattcccactgcactgcgagagcttctaaagcctctccctgcaggtgttgaaatcgatgaactccctaagcaaattgatgatacacagtacccaaaaacattttctata

SEQ ID NO: 61747 - DNA, 253 bp, Glycine max
  Clone ID: 700763173H1
aaactcactctgcagttagctacaaaaccccaacccgattcggatccgattaggttctctcggatcctctccaccgcctcctccgattcccaaatccactccctcctcctgtcttcgctcgagatccgagctaagcacgggattcggatttccgtttccatcgctctctcttcaccagttttgcgcttaaatggcatcaagcgaggggtttctgaccgatggacagagagagattctgaaaatagcgatcaga

SEQ ID NO: 61748 - DNA, 257 bp, Glycine max
  Clone ID: 700763175H1
cagcgaccaagcaggcccgaacaacaagaaccacgtggaagaggatgtcagactagaaatggggttgaggaaaatatttgcaccatgaagcttcacgagaacattgctcgcccttcacgtgctgacttctacaacccaaaagctggtcgcattagcaccctcaacagtctcaccctcccagccctccgccaattcggactcagtgcccaatatgttgtcctctacaggaatggaatttactctccacatggaacttg

SEQ ID NO: 61749 - DNA, 251 bp, Glycine max
  Clone ID: 700763176H1
cgagcggttcaatatcctagtacaccgtattaaagaatttaagatatactatgatgaaagcgcggttcccattactgttgctgggagttgttttcctggcatcagtttctgtctcatttggcattgcgtattgggaaaagcagaaccccagtcacaacaagtgcctccgaagttgcaatagcgagaaagactcctacaggaaccaagcatgccacgctcgttgcaacctccttaaggtggaggaaaagaag

SEQ ID NO: 61750 - DNA, 252 bp, Glycine max
  Clone ID: 700763177H1
gattggatcacacttatacaaaattctccaattagtaacttgttgagagttgctgcttggaagaaaggctgtttaatggtcaagattgtgatgtctgggaatgcagcagtcaaaaggagtgattgggcctcattggtacaagtgtttttaacaaacagcaacagtacagagcattttgatgcatgtaagtggacaaaatcagaaccacattcctgggcattgatcttcccaatagaggtatgtggtctaata

SEQ ID NO: 61751 - DNA, 255 bp, Glycine max
  Clone ID: 700763178H1
gaaaagctttctagctggtcataatatcaccattactgatggtattgacaagactagtgcaactttgcaatttagaaagttagcagattgtgattttctcaagagaaactttaagcagatgtctaatgttttgtgggtagctcctgaggacaaggcgagtttatggtcacaacttcattatgtctcgtgtaataatctggaaatgcaagaagcttatcttgtcaatctcgtaaatgtgttacgagaatgtatttg

SEQ ID NO: 61752 - DNA, 252 bp, Glycine max
  Clone ID: 700763180H1
ttcgagccgttctgcgtagtgatctattggcaaattttctgacagagggcaattttagagcaagtgttgatttgcagcgcactcatcgtattaaaggaatgattaaaatggtggccacagttggtattcctgagaatacaggtatatcattggcctgtgctatgaatagttcttttagggggcgtgccagttctgatatttacaccatctgctctcaagactgtgaattatggaatcctgcttgcaacaagc

SEQ ID NO: 61753 - DNA, 250 bp, Glycine max
  Clone ID: 700763181H1
cttaattattaacacttccttagttcaatatggggaagcccttcactctctctctttcttccctttgcttgctactcttgtcgagtgcatgctttgctattagctccagcaagctcaacgagtgccaactcaacaacctcaacgcgttggaacccgaccaccgcgttgagtccgaaggtggtttgattcaaacatggaactctcaacaccctgagctgaaatgcgccggtgtcactgtttccaaactcac

SEQ ID NO: 61754 - DNA, 255 bp, Glycine max
  Clone ID: 700763182H1
gtagcttgttcataaccggatgaaggataatatatcttgttagcaatcttttcctctgccagttgttccaaaatctcaagtaatcaagtggatttgtacaagctgagttatattttttaagcttagcacattaagaatattgaaaagatttaccttttaaattcatctagagttagtttttactttagccactgtaaaagtcctactgtatctgactagaactagatcaaccagacaaagtggcagcgtgccatt

SEQ ID NO: 61755 - DNA, 251 bp, Glycine max
  Clone ID: 700763183H1
atggccttgctcggttatcactggtcaacgacggtggcgttatagaacaaacatttttgtggggaaggtattctgtggaaatgtctgctgtagtttacaaggattgggattttacagatcaagcattgcctgctgatcttataaaaagaggaatggcaattgaggatccatcgtgccctcatggcattcgccttgtgatagaggactacccttatgctgttgatggacttgagatatgggatgcttcaaga

SEQ ID NO: 61756 - DNA, 251 bp, Glycine max
  Clone ID: 700763184H1
gttgttcaaggatggcaatttgtaagaaagatgtttggagagttgaatgtggaatcccttctggatttccgctcacagttatttgcaatagcatttttaatgagatgctcattagatatagctatgaaaaattactgcgccaggctaaagctccaagtatgtttttacaatccttcaaaaattttgtttctttgtgtgtgtatggtgatgataacttaattagtgttcatgaatacgtcaagcctacttta

SEQ ID NO: 61757 - DNA, 230 bp, Glycine max
  Clone ID: 700763185H1
attaacacttccgtagttcaatatctggaagcccttcacactctctcgtgcttccctttgcttgctactcttgtcgaatgcatgctttgctattagctgccagtcaagctcatcgagtgcgaactcaataaccttaacgcgttcgaaactgaccaccgcgttgagtccgcagtggtttgagtcgtacatggagctctcgacaccctgagctgctatgtgccggtgtcact

SEQ ID NO: 61758 - DNA, 254 bp, Glycine max
  Clone ID: 700763186H1
gcaaatgtttgcttcgttaattttctctggagacgacaggctcactgagaaaacaatttttacttgcagagatttggacatcttggttgtttattatacaatagcaactcaatttagaaaatttctaccgcattacattaggtggcatctgtataccttgttgatctacattctcccatcttttctcactgctgaaattaaatataagcggaatctgagtaatattcatatttccggcttattttacgacggca

SEQ ID NO: 61759 - DNA, 251 bp, Glycine max
  Clone ID: 700763187H1
gtttttgcgttgctgcttcgttgtgtgtgcactcggttctgtttggcgtctggacaaaaaacatgggggaagaagaagaagaagaagtgagcgtcaccgctttgcatcatccaaacagcggaaacgatgatcagaggctcgaattcgatatatatcctttgagcagttactattttggatccaaagatgctgttccctccaaagacctcaccttagttgatcgtgttctcaggatgaagtccaatatgctg

SEQ ID NO: 61760 - DNA, 252 bp, Glycine max
  Clone ID: 700763188H1
ctcgagccgtcaaaattgatggtacagtttggagagattcaggaaaaagttgtattgaaatagttcacaagaggaatttcttacagcttggtcaacccaggtgcgtcctgcaacaactctgttggctgatgggtgtccatatttgtatgctatggtgcatgatagttcagtgtctacaataccaggtgattttgtcattggtgttaagttgacaaccataaacaatatgtgtgcatatgggctcaacctggt

SEQ ID NO: 61761 - DNA, 256 bp, Glycine max
  Clone ID: 700763189H1
gaagaaacgaagatagaatgtgcacagccctaaagacgaattaccagcttagcgaggagatcggtcgcggtcgtttcggcaccatcttccgctgcttccacccactctccaacgtaccctacgcctgcaaactcatcgacaaatccctcctccatgactccaccgaccgcgactgcctccagaacgaacccaaattcatgaccctcctttcacctcacccaaacatccttcaaatcttccatgttttcgaggacga

SEQ ID NO: 61762 - DNA, 249 bp, Glycine max
  Clone ID: 700763190H1
caagagatgatttacagagatatgccacatacatgtgattctgctctctgaaaatcatctcttgtcaacaggccatttacttctccaaaactgaaaagggccaatgaaaatggcagtaactagttccgctgctctgcaaagtttctgaagtcctcaaatgtgattcgtgcatccttaaggcgtggatcatcattcagtccatcaaccctttcaagcaacctgcctagatgactcatgtcggcagagcaa

SEQ ID NO: 61763 - DNA, 252 bp, Glycine max
  Clone ID: 700763191H1
tctctccattgtctttgaacactcatcaccatggccaagcttgttctttccctttgtttccttcttttcagtggctgcttcgctctgagagagcaggcacagcaaaatgagtgccagatccaaaagctgaatgccctcaaaccggataaccgtatagagtcggaaggtgggttcattgagacctggaaccctaacaacaagccattccagtgtgccggtgttgccctctctcgctgcacccttaacgcaatg

SEQ ID NO: 61764 - DNA, 255 bp, Glycine max
  Clone ID: 700763192H1
caatttgttagtggaaaaaccttcaaatatgatataattggtgctggttcacattcttcagatgattttcctgaaaaggaagatcaagaaaaacccaaaaagattgatgccagattgagacaaagaatagatcctcaatacaatgaggttcaggctcagatggaaacaaatttgtttaaattgtctcttgatgatgttgaaactcctaaaggttccatgttggatcttaaaatttctcagtctaaattgcacttc

SEQ ID NO: 61765 - DNA, 75 bp, Glycine max
  Clone ID: 700763193H1
ctggaattcgagaagctaatcaatcgtttgcgcttccattgttccacctctagcagatggttacgggatgcagtt

SEQ ID NO: 61766 - DNA, 245 bp, Glycine max
  Clone ID: 700763194H1
tctctccattgtctttgaacactcatcaccatggccaagcttgttctttccctttgtttccttcttttcagtggctgcttcgctctgagagagcaggcacagcaaaatgagtgccagatccaaaagctgaatgccctcaaaccggataaccgtatagagtcggaaggtgggttcattgagacctggaaccctaacaacaagccattccagtgtgccggtgttgcctctctcgctgcaccctaacg

SEQ ID NO: 61767 - DNA, 123 bp, Glycine max
  Clone ID: 700763195H1
gtgcggtttcctttgttggtgttgctgggaactgttttcctggcatcagtttgtgtctcattataggtgacatatgaggagaataaccctttctacttgagaagctctaacagcttccaaact

SEQ ID NO: 61768 - DNA, 239 bp, Glycine max
  unsure (1)..(239): unsure at all n locations
  Clone ID: 700763196H1
ggctcgagatgcaaggaatggtatgaagagtagtagtgctagtagtagtgcnattggtccaactagaattatcattagttgccctgagaagggtgaggttgttgggaagcttgttttactacctggaagctttcaagagctagttgagattggagccaagaaatttggtttctatcctaataaggttgtatgcaaagatggaggtgaaattgaagatctggaggtgattagggaggtga

SEQ ID NO: 61769 - DNA, 284 bp, Glycine max
  Clone ID: 700763201H1
tctccattggtccttaaacactcatcagtcatcaccatggccaagctagttttttccctttgttttctgcttttcagtggctgctgcttcgctttcagttccagagagcagcctcagcaaaacgagtgccagatccaaaaactcaatgccctcaaaccggataaccgtatagagtcagaaggagggctcattgagacatggaaccctaacaacaagccattccagtgtgccggtgttgccctctctcgctgcaccctcaaccgcaacgcccttcgtagaccttc

SEQ ID NO: 61770 - DNA, 284 bp, Glycine max
  Clone ID: 700763202H1
ctcttataatcacacacagctaccttatagctatggaaactggaggctttcatggctaccgcaagctccccaacacaacctctgggttgaagctgtcagtgtcagacatgaacatgaacatgaggcagcagcaggtagcatcatcagatcagaactgcagcaaccacagtgcagcaggagaggagaacgaatgcacggtgcagggcgcaagacaggctcatgccaatcgctaacgtgatacggatcatgcgcaagattctccctccacacgcaaaaatctccgt

SEQ ID NO: 61771 - DNA, 278 bp, Glycine max
  Clone ID: 700763203H1
agctcatacatagtagtgttggtgggttgcaaagatgcttgggggtcttctccataggggccataagataaaagggacagtggtgttgatgcgcaagaatgtgttggacgtgaatagcgtaaccagcgttgggggaattattggtcaagtctcgacttagttggctcaacactcgatactcttactgccttcttgggccgatccgtgtctctccagcttattagtgctaccaaagctgatgccaacggaaaagggaaacttggaaaggctaccttttt

SEQ ID NO: 61772 - DNA, 270 bp, Glycine max
  Clone ID: 700763204H1
agtccctatggagtttaatcttgtggttcgtcagaagtttttaaattttgtgaggttcattatgaagaaaagggacaagcttagttgtcaagttggaatcaacccatactccatggaatggactggtttggccaatagattactgagtaaggcaacgatattctgtgttgcgattatgctagttttgatggtttgattaccaagcaagttatgagcaaaatggcagaaatgatccgtactccttgtggtggtgatgcaaattgatgcgtg

SEQ ID NO: 61773 - DNA, 279 bp, Glycine max
  Clone ID: 700763205H1
ctctctaagctgaaatctgaagctaacttaagggccatgagatggccaatggcaacactagtcatcgcttcaagctcttgcttttccttctaactctgcactcttcattcgctgagattttcttcgaagagagattcgaagatggatggagagccgttgggtgctatccgattggaaaaggagtgaaggaaaagcgggtaccttcaagcacacagcaggaaaatggtctggggatcctgatgacaaaggtcttcagacatataatgacgccaagcattt

SEQ ID NO: 61774 - DNA, 279 bp, Glycine max
  Clone ID: 700763206H1
gtctctccgcagcagccacacttcttcgccgtttcagctgaagagccatccgcaggtaagcaatggttaagcataataatgttatccccaatgggcacttccggaaacactggcaaaactatgtgaagacttggtttaatcaaccagcccgaaagaccagaagacggttggctcggcagaagaaggctgtcaagattttccccaggcctactgctggatctctgaggcctattgttcatggccagactctgaaatacaacatgacagtcagagccggga

SEQ ID NO: 61775 - DNA, 279 bp, Glycine max
  Clone ID: 700763207H1
ctctcgagccgattcggctcgacggcatgttgaagttccagtttcattggtgttgtcttgatttactttggcagttcttaagagttatgaagcctttgtcctcaggggcgttggtcatggcagcaagttatcctggtctgtcatcacaatctttcccgttgggatgggttgttttttactaccaaagccctagctttttaagcttcattttttttttttttgaacttgtcattgtaaccttcgataccatgtaatgatactgagatatgcccttaaaaa

SEQ ID NO: 61776 - DNA, 201 bp, Glycine max
  Clone ID: 700763208H1
aattcagctcgagtgcaatttcaataaaccgcgatcacaggttgccgcaccttaaaaccggaaacaaaagcaatcgttacttgatttcaagaatctatcaatttcttcctacttctttgtgtacgatttcttaagggacagaaaatcactctctgtgctggcccagacttcgtgaatcattttcttttccactcttagttt

SEQ ID NO: 61777 - DNA, 276 bp, Glycine max
  Clone ID: 700763209H1
gtcccatagcagcgatgggaatcgatcttaaggctgggggtaagagcaaaaagaccaaaagaacagcaccaaaatccaatgacatctacctcaaattacttgtcaagctttatcggttccttgttcgaaggactggcagcaatttcaatgtgttatactcaagcgcttgttcatgagcaaggttaacaagcctccaatttctttgtcaaggttaattaagtatacaaaggggcaggaggataaaattgctgtaatagtggggactgtaactgatga

SEQ ID NO: 61778 - DNA, 272 bp, Glycine max
  Clone ID: 700763210H1
gattcatatgataatatcgatctactgttgagcattgatttgttgggcttacaaggagcaggtaaagcttttccaaacaagattgtttttgatgataagcttgtgctggctaacacacaagaattctttgatggaaattttccagtggttcttggttaccaatttttgtgaattgtctttatcctgtaagtcaattaccttcagaagctgtcgttgtaaatgttacatgtggtagtggacgtggtggcttacccaccactgcttggattagt

SEQ ID NO: 61779 - DNA, 231 bp, Glycine max
  Clone ID: 700763211H1
taataatttaagctactatgatgagagcacggttcccattactgttgctgggacttgttttcctggcttcagtttctgtctcatttggcattgcatactgggaaaaagagaaccccaaacacaacaagtgtctccagagttgcaataggcgagagactcgtacaggaaccaagcatgccaagctcgttgcaacctccttaaggtggagaaagaagaatgtgaagaaggtga

SEQ ID NO: 61780 - DNA, 272 bp, Glycine max
  Clone ID: 700763212H1
gaaagatgtttggagagttgaatgtggaatcccttctggatttccgctcacagttatttgcaatagcatttttaatgcgatgctcattagatatagctatgaaaaattactgcgccaggctaaagctccaagtatgtttttacaatcttcaaaaattttgtttctttgtgtgtgtatggtgatgataacttaattagtgttcatgaatatgtcaagccttactttagtggttctaaattgaaaagctttctagctggtcataatatcaccat

SEQ ID NO: 61781 - DNA, 263 bp, Glycine max
  Clone ID: 700763213H1
ggcatggtttgattgtgttgatgaggaggattcctttgaggaagtttctttgagtgcagcactcaatggtgttgagggtttggactatatggaaagaattcctcttgccacatctgagggttttcctcatgtgctttcacgcaaaatggtgaaaaaggcaaaaggcgatttgtttctggggatggtgaagagatgacattgattccgggaaccagtgttgaagaggcttacaacaagctaacagttgaacttgagcacagtgt

SEQ ID NO: 61782 - DNA, 274 bp, Glycine max
  Clone ID: 700763214H1
ttagttcaatatcctagtataccttaataaataatttaagatagtatgatgagagcacggttcccattactgttgctgggacttgttttcctggcttcagtttctgtctcatttggcattgcttactgggaaaaagagaaccccaaacacaacaagtgtctccagagttgcaatagcgagagagactcgtacaggaaccaagcatgccacgctcgttgcaacctccttaaggtggagaaagaagaatgtgaagaaggtgaaattccacgaccac

SEQ ID NO: 61783 - DNA, 273 bp, Glycine max
  Clone ID: 700763215H1
tgcttgggttgctccaatggcggatacccaagaaattgaggagcaaggacatgaagaagtgatttcagacaaaacattcaagaagcagcaggaaactcttgatgaaattctttcacgacacaggaaagagatattgcagctgcagaaaaggacgttgagatgaaaaaggctgcagctagaggtagcaaggctgagcagaaagctaagaagaagcaagtggcaggaagaggtttctcaactttctgctacgcttaaggacaaccaagccaaaga

SEQ ID NO: 61784 - DNA, 275 bp, Glycine max
  Clone ID: 700763216H1
gacaaaatggcgccattggagtcactggagaaagagtatccactcattgactctaatgttcaaagcttctgcgcctcccacggccattttctctgttgaagattttcttctgcacgatctcgacgcattactttcctttacggataatcttccacttcacagaccctgaagcagggaattgaccagctgatctcaataatagacgctcttcatccaccattgctaaacggcttgcagctcttggaagatgctcagcgtaataaacatgttttgtc

SEQ ID NO: 61785 - DNA, 288 bp, Glycine max
  Clone ID: 700763217H1
ttcggctcgagagatttggaattttgataaaccgcgatcacaggttgccgcaccttaaaaccggaaacaaaagcaatcgttacttgatttcaagaatttctcaatttctttctacttctttgtgtacgatttcttaagggcaagaaaatcactctctgtgctggccacagacttcgtgaatcattttcttttccacttttagtccatcaactgcacattttcctatttgatataggacttcgtgtcagatttaaacttcttctgtttcttactcagatctctgttcaa

SEQ ID NO: 61786 - DNA, 278 bp, Glycine max
  Clone ID: 700763218H1
ttagttcaatatcctagtataccttaataaataatttaagatactatgatgagagcacggttcccattactgttgctgggacttgttttcctggcttcagtttctgtctcatttggcattgcttactgggaaaaagagaaccccaaaacaacaagtgtctccagagttgcaatagcgagagagactcgtacaggaaccaagcatgccacgctcgttgcaacctccttaaggtggagaaagaagaatgtgaagaaggtgaaattccacgaccacgacca

SEQ ID NO: 61787 - DNA, 271 bp, Glycine max
  Clone ID: 700763219H1
cggttcaatatcctagtacaccgtattaaagcatttaagatatactatgatgagagcgcggttcccattactgttgctgggagttgttttcctggcatcagtttctgtctcatttggcattgcgtattgggaaaagcagaaccccagtcaaacaagtgcctccgaagttgcaatagcgagacaccttcctacaggaaccaagcatgccacgctcgttgcaacctccttaaggtggaggaagaagaagaatgcgaagaaggtcaaattccac

SEQ ID NO: 61788 - DNA, 280 bp, Glycine max
  Clone ID: 700763220H1
cgtctgcttcgtgttgtagctagctcctcgaaaatgctggcacgcctcgccgcgagtcgcttcaacgagatccgtcagattttccgtcagccttctagggctttctcgaccgctctgaactaccaccttgacacaccggacaacaaccctaacttccatgggaattcaccgaggccaatcaagcaaaggttaaggagattttgtctcactatccatccaactataagcaatctgctacaattcctcttttggatcttgcccagcagcagcatggcggctg

SEQ ID NO: 61789 - DNA, 277 bp, Glycine max
  Clone ID: 700763221H1
gggcaaagagcggttctgaagtttgctcagtacactggtgctcatgctattgctggaaggcacactcctggtaccttcaccaatcagcttcaaacttccttcagcgagcctcgtctccttattcttaccgatccaagaacagatcaccgcctattaaggaagctgctcttgggaatattcccaccattgctttctgtgacaccgattcacctatgaggtacgtggacattggaattgctgccaacaacaagggcaaacacagcattggttgtctctt

SEQ ID NO: 61790 - DNA, 84 bp, Glycine max
  Clone ID: 700763222H1
ctcgagccgctcgagccgctcgagcggtcgaggccactagctacgagcctattttattcactcgttgcacgttgtagttcacaa

SEQ ID NO: 61791 - DNA, 277 bp, Glycine max
  Clone ID: 700763223H1
tagccaacagagttgttgcaggacgcacctgagttgactgatgggtgtccatatttgtatgcaatggtgcatgatagttcagtgtctacaataccaggtgattttgtcattggtgtcaagttgacaaccataaacaatatgtgtgcatatgggctcaatcctggtatttcaggttctcgtcttttgggcaccattcctcagtccatttcacagcaaactgtttggaatcaaatggcaacagtgagaacaccattgaattttgattctagcaagcaga

SEQ ID NO: 61792 - DNA, 83 bp, Glycine max
  Clone ID: 700763224H1
ctcgagccgctcgagccgctcgagcggctcgcggcacctagtatgaggtattttgttcactgcttgcacattgtagttcacaa

SEQ ID NO: 61793 - DNA, 270 bp, Glycine max
  Clone ID: 700763226H1
gtgagaacaccattgaattttgattctagcaagcagagcttttgtcaattctctattgatcttcttggtggaggaattttagtggacaaaactggagattggatcacacttatacaaaattctccaattagtaacttgttgagagtgctgcttggaagaaaggctgtctaatggttaagattgtgatgtctgggaatgcagcagtcaaaaggagtgattgggcctcattggtacaagtgtttttaacaaacagcaacagtacagagcatt

SEQ ID NO: 61794 - DNA, 177 bp, Glycine max
  Clone ID: 700763227H1
atgaaattctgagttccaacgccactaaccctatgctgacgcgacttcttgagaactataagagtctcacatatctggttgatgagtgtccttttgcatttgtgaactagtatgtaatattttattcacttaaataaagcgcacactatgtgcaatgagtgtgtttaaatataaaaa

SEQ ID NO: 61795 - DNA, 270 bp, Glycine max
  Clone ID: 700763228H1
gttaattattaacacttccttagttcaatatggggacgcccttcactctctctctttcttccctttgcttgctactcttgtcgagtgcatgctttgctattagctccagcaagctcaacgagtgccaactcaacaacctcaacgcctggaacccgaccaccgcgttgagtccgaaggtggtttgattcaaacatggatgtctcaacacccagagctgaaatgcgccggtgtcactgtttccaaactcactctcaaccgctaatggcctcc

SEQ ID NO: 61796 - DNA, 270 bp, Glycine max
  Clone ID: 700763229H1
tggcatttccatcagtaagaaattgttggatcaaacatctgatgacttccacaaggtgttgcacactgctattcgctgcatcaatgaccataagaagtactatgagaaggttttgcgcaatgcagtcaagacgtttggaactgacgaggatggactaagccgcgtgattgttacaagggctgagaaggatctgaaggacatcaaagaggactactacaagagcaacagtgttcaccttgaggatgaagtgtccaaggaaacttctgggga

SEQ ID NO: 61797 - DNA, 250 bp, Glycine max
  Clone ID: 700763230H1
ctctcgacccgaatcggctcgagaaacttttttggtgattgccccataccgtactaatgtaagttaggcgagaaacattcaggttttttgtgacgctcaagaacttgctggacaccctattggagaagtctcctagatgatggccagtcagaatatgtattattccagtgacctgtggatatattttttgtgtttccccatctctagaagcaatgactgtgtctccccatctctagaagcaatgacttgg

SEQ ID NO: 61798 - DNA, 273 bp, Glycine max
  Clone ID: 700763231H1
cgctctagagcattgggtggagtggcagaagggtgccacaaaaacacgtgtggcctcatgtccactaatcccatcacccaacaaaccggtttaggtgaactaggagaagacgttcttgcaatccacgccacacaagggtcgacccacaacttggcccattggtcacagtcccacaattcctcttttcttgtgcaccttccttccttgttcaaaagggtcttcctagaaacactcaaggtgtggctgggctaggccatgcaccaatttctcttc

SEQ ID NO: 61799 - DNA, 295 bp, Glycine max
  Clone ID: 700763232H1
cacgcgcacggaactcggctcgcggtacaacttaaagcacaaaagtttataaacataaatatttaacaaactacttatgctccatgcaccactaagcagcttaagcttactatattctcttcagtgggagataaaggctgacattgctgagatcattccacaactcaaatcccactttgatcataatcagggaaatgctttacgtgttaagcagactttgcatgcaaaagcttctgcgagtaaacacttctctttgcaagcatgcactgctaggatgataggccaccatgcagca

SEQ ID NO: 61800 - DNA, 271 bp, Glycine max
  Clone ID: 700763233H1
atggttgaatcaattgctgcaacttcactccttggccaccgtccaatttgtggtggaaatttaaccagggatgtatctgttaaacgcaaatctttgaatactgttcggttcccaacaactgagtttcttggtggtggaaggattgtggttctctggctttgcctaaatctgataagcaagataggtttgtgttttcatcaattaaggccttggctgtggagttaacaagagaagcacatgcttatagggaagagaattgcccacagggata

SEQ ID NO: 61801 - DNA, 275 bp, Glycine max
  Clone ID: 700763234H1
gcactcttcatcaagctccgctccaacacaggggacaatgagggccatccttcacgtgcagggagggcaatgcgggaaccagatcggttccaagttctgggaagtggtgtgcgacgagcacggcatagatccgacggggaagtacgcggaaactcagatctgcaactcgagcgcgtgaacgtctactacaatgaagcctcgtgcgggcgcttcgtgccacgcgcggtgctgatggacctggagcccggaaccatggacagcgtgcggaccgggcg

SEQ ID NO: 61802 - DNA, 274 bp, Glycine max
  Clone ID: 700763235H1
taccgattgctagaatggaatttcgctgctcagtcatctcttttaccattactcttctctcttgctcttgcaggagagagccatgtccatgcatcgctacctgaggaagattattgggaagctgtttggccaaacactcccattccactgcactgcgagagcttctaaagcctctccctgccactgttgaaatcgatgaactccctaagcaaattgatgatacacagtacccaaaaacattcttctataaagaagaccttcatccaggcaaaac

SEQ ID NO: 61803 - DNA, 265 bp, Glycine max
  Clone ID: 700763237H1
cgattactgtatctaatatctcctgcaggggcccatcatgtagttcaaatacccttaatggcacaagaggaaattctgtcttctagtgcaagtgctttcagacctgcaatggtgcgcagaaatagcacgcctcaagctactgcaatgcagtgggagctatagaaattatcattgatagtttcgcaagtactgcattgccacatcagttggtgcaatgcttttggttgatacttatcataccaatcctgcaaatgccgttcgtagt

SEQ ID NO: 61804 - DNA, 271 bp, Glycine max
  Clone ID: 700763238H1
atcttggtttgtttattggatggttgatagaaatctcaacaaagtataggtccctttccttttcaattggaatctcatttaatttctctcactgtttccaaactataaagcagtggctctataatcttgtcaagacacttttgagcggtaccactgggcatttgccttggctggttttcttgcattggccatggcagcaataagctggacacttgaaaccagtgaaacctactggttttggcatagcatttggcatattacaatatacaca

SEQ ID NO: 61805 - DNA, 271 bp, Glycine max
  Clone ID: 700763239H1
cgcaaatttcgccacttgcagatgaaaagttccaaactttccactccaatccccggctcaatcctaaccccttgttcctttcactgtaagcattcctcaatttgacaattttctcctctctccacaaaatgatgtgtgtgccactttctctctcctcaattggggcgtgcaagtttccacctttttctttctttctatctttctttctttccattatctacgttagttttgcactgtttgttgtttggcttgcaatctcgttgcatgctgg

SEQ ID NO: 61806 - DNA, 186 bp, Glycine max
  Clone ID: 700763240H1
taagatttgaaattttgataaaccacgatcacacgttgccgcaccttaaaaccggaaacaaaagcaatcgttacttgatttcacgaatctctcaatttcttcctacttctttgtgtacaattacttaagggaaagaaaatcactctctgtgctggccacagacttcgtgaatcattttcttttcca

SEQ ID NO: 61807 - DNA, 274 bp, Glycine max
  Clone ID: 700763249H1
ggaagctggtctagagggtttctacggccagtcaaaacctgagtctaaccctaacttcaatgtaggaaccgatttcattgcaaacaaccaaatcccagggattgatttcgcaacagtgcattcctaccccgaccaatggatataagttcaggttatgaggaccaaatctcattcttaggccggtggctgaatgagcacatccaagatgcacagaacacccttcacaagccacttctatttgcggagtttggtatttccacaaagagttatggtg

SEQ ID NO: 61808 - DNA, 257 bp, Glycine max
  Clone ID: 700763250H1
gggacgccattcttcactctctctcccacttccctttgcttgctactcttgtcgagtgcatgctttgctattacctccagcaagttcaacgagtgccaactcaacaacctcaacgcgtaggaacccgaccaccgcgttgagtcgacggtggtctcattgaaacatggaactctcaagaccctgagctgcaatgcgccggtgtcactgtttccaaacgcaccctcaccacccacggcctccacttgccatcttactca

SEQ ID NO: 61809 - DNA, 55 bp, Glycine max
  Clone ID: 700763251H1
gtcttattcacttaaatacagcgcattactatgtgccatgagtgtgtttaaatat

SEQ ID NO: 61810 - DNA, 272 bp, Glycine max
  Clone ID: 700763253H1
ctctccatttgtccttgaatataatactcagcatggctaagcttgttctttccctttgttttctgcttttcagtggctgctgcttcgctttcagtttcagagagcagccacagcaaaacgagtgccagatccaacgcctcaatccctcaaaccggataaccgtatagagtcagaaggtggcttcattgagacatggaaccctaacaacaagccattccagtgtgccggtgttgccctctctcgctgcaccctcaaccgcaacgcccttcgca

SEQ ID NO: 61811 - DNA, 271 bp, Glycine max
  Clone ID: 700763254H1
atttgcaagcgaaatgcttgctggtgtaaatccaaacttgattcgttgtcttaaggatttccctccacgaagcaagctagatagccacgtctatggtgatcatactagtaaaataaccaaagaacacctagagcccaacttagaagggctcactgtagatgaggcaattcaaaacaagagattgttcctactagatcatcatgacccaatcatgccatatttgaggcgaataaatgcaacctccacaaaggcttatgctaccagaaccatc

SEQ ID NO: 61812 - DNA, 269 bp, Glycine max
  Clone ID: 700763255H1
gtctctctctctctctctctctctgcggaaaccggaatatctcagttctctgatcagatccatccgacgtcgtttcagtgataatggctccgttcagcggcgatgagacggcaccgtttttcggcttccttggagctgcagctgccctcgtcttctcctgtatgggagctgcctatggcacagcgaagagtggcgttggcgtggcttcgatgggtgtgatgagaccagagctggtgatgaagtctattgtccctgttgttatggctgga

SEQ ID NO: 61813 - DNA, 271 bp, Glycine max
  Clone ID: 700763256H1
gagtgaagcagcagagggaggagcggcattaaaaatgcagatcttcgtgaaaaccctaacggagaagaccataaccctcgaggtcgaaagcagcgacaccattgacaataccaaggcctaagattcaagaccaggaaggcatcctccggatcagcagcgtttgattttcgccggaaagcaacttgaagatggaaggaccttggccgattacaacatccagaaggaatcaacccttcaccttgtcctcaggcttcgtggtggcatcatcgag

SEQ ID NO: 61814 - DNA, 268 bp, Glycine max
  Clone ID: 700763257H1
cgactcacaagatctctttgagatggtttgctccaatagcagtgaagcaaatatttcaattccagtagtcatgatagcaaagtcagcaggacaatctctcaacaagtctttcacatctggaagcaaagtggaaattttgttatatgctccgcctcggccacttgtggacttctcagttgcatttttgtggttgatgtctgttggaactattgtatgtgcttcactatggtccgatctgactaccccagagaagtctgatgaacgctat

SEQ ID NO: 61815 - DNA, 269 bp, Glycine max
  Clone ID: 700763258H1
agaccacaacacccggagacggaacctcagcaacccggtgagaaggaggaagacgacgatgagcaaccacgtccaatcccattcccacgcccacaacctcgtcaagaagaagagcacgagcagagagaggaacaggaatggctcgcaaggaggaaaaacgcggagaaaagggaagtgaagaggaagatgaggatgaggatgcaggaacaagcatgaacgtcaattcccattcccacgcccacctcatcagaaggaagagcgaaagcaag

SEQ ID NO: 61816 - DNA, 265 bp, Glycine max
  Clone ID: 700763260H1
taattattaacacttccttagttcaatatggggaagcccttcactctctctctttcttccctttgcttgctactcttgtcgcgtgcatgctttgctattagctccagcaagctcaacgagtgccaactcaacaacgtcacgcgttggaacccgaccaccgcgttgagtccgaaggtggtttgattcaaacatggaactctcaacaccctgagctgaaatgcgccggtgtcactgtttccaaactcaccctcaaccgcaatggcct

SEQ ID NO: 61817 - DNA, 262 bp, Glycine max
  Clone ID: 700763261H1
ctgtcttcagaatctttctcgattctctgttttgcccttcgatacacttgttacgcgccaccgcaagaaccttcccctttccctgggtttcgtcaataattctcatcaaaatctaactatggcactcaaggctgcctcagttctataccgagtgcagacacaagtagtgccgataaggaggaagataagtctgagacatatagtcatagcatgacagatgccatgggtgctgttttgacttataggcatgaattaggaatga

SEQ ID NO: 61818 - DNA, 267 bp, Glycine max
  Clone ID: 700763262H1
catcaggacccatttggcagaattggtcaatgaagacttttatgatgaaaaatttaattttattggcacaattgggactccagcttttcatcgacaaattgctgcacacttggagaaaatgccattatggcaaaaagcaatttgtgtggactgggacattgtttgtctcggaaaagcaaagaaacatggtattctgggatgaaggaaaaatttgtgcaaatgcatgaagagcatctatgaaacagaagttacagattggccagtacc

SEQ ID NO: 61819 - DNA, 262 bp, Glycine max
  Clone ID: 700763263H1
attcactacaactcacatgcaacgaagatagcactggtgatcgatggcagagggcatcttcaaatatcatgtccacacatgtcatcaaggtcgtcacactcgaagcatgataagagtagcccttcataccatagaatcattccgatttgaagcctggaatggtgtttgttgtccctcccggtcatcccttcgtcaccatagcttccaataaagagaatctcctcatgatttgcttcgaggttaacgctcgagacaacaagaa

SEQ ID NO: 61820 - DNA, 267 bp, Glycine max
  Clone ID: 700763264H1
gatattttgttggagatctcgtctttgaagtttctaagatgacttctccctacattaaatgtacagtctctttcttcatagcatttggaaatttggctgatgacaccatcaattttgaggcttttccccacaagctggtgcagtttggagagattcaggaaaaagttgtattgaaattttcacaagaggaatttcttacagcttggtcaactcaggtgcgtcctgcaacaactctgttggctgatgggcgcccatatttgtatgcta

SEQ ID NO: 61821 - DNA, 178 bp, Glycine max
  Clone ID: 700763265H1
gttcaatatcctagtataccttaataaataatttaagatactatgatgagagcacggttcccattactgttgctgggacttgttttcctggctacagtttctgtctcatttggcattgcttactgggataaagagaacgcaaacacaacaagtgtctccagagttgcaatagcgagag

SEQ ID NO: 61822 - DNA, 268 bp, Glycine max
  Clone ID: 700763266H1
aggaattttagtggacaaaactggagattggatcacacttatacaaaattctccaattagtaacttgttgagagttgctgcttggaagaaaggctgtttaatggttaagattgtgatgtctgggaatgcagcagtcaaaagagtgattgggcctcattggtacaagtgtttttaacaaacagcaacagtacagagcatttcgatgcatgtaagtggacaaaatcggaaccacattcctgggaattgatcttcccaatagaggtatgtg

SEQ ID NO: 61823 - DNA, 218 bp, Glycine max
  Clone ID: 700763268H1
tcgagttcttcatcgacttcttcggaggaaacaccgacgacggaggccagagggcgcaagaggaagaggaagtggaaggacttctttgagaggctcatgaaggaggtgatagagaagcaggaggagctgcaaaggaggttctggaggccatagagaagagagaacaagagcgtgtggtgagagaggaagcgtggagaatgcaagagatgcacaggatc

SEQ ID NO: 61824 - DNA, 239 bp, Glycine max
  Clone ID: 700763269H1
gacaaggaaaaccctaagagatgaagagaactcctatcttgttccctctcttctttcttctttgtgccttcacctcatatctaccttcagccaccgctgatgatgatcatgtgtacgacactgacggcgataagcttcaatacggtgtcaattatttcgtgttgccagtgataagaggaaatggcggtggaataccagtagcaaaagcaggaaacgaaacttgccctctgactgtggtg

SEQ ID NO: 61825 - DNA, 265 bp, Glycine max
  Clone ID: 700763270H1
ttcaaaccttgctctatactacacagtacacacactagaagaataatggcttccatcctccactactttttagccctctctgtttcttgctcttttcttttcttcttatccgactcagtcacccctacaaaaccaataaacttgttgttctacccgttcaaaatgatggctccacagggctccactcctccccacctccaaaaaagaacccctctaatgcaagtaccagtcctggtggacctcaatggaaatcacttgtgggtta

SEQ ID NO: 61826 - DNA, 269 bp, Glycine max
  Clone ID: 700763271H1
gacgactacggcctcgaggtctccgtcggcctcccgcagcccgccgctcacgccgtccctgccaaggaggccatcaacgtcgacgaggacgacttgtctcgccgcctggccgaactcaaggctagaggttaattactctgcaataatactatcatcgtatctcgattctcattgctgacgcagtggaacattatatactatatgtttgtgcatatttaaccgagttcggttggcacttgttatgtggactccccctttgaggggtgtta

SEQ ID NO: 61827 - DNA, 264 bp, Glycine max
  Clone ID: 700763272H1
cttaaacactcatcagtcatcaccatggccaagctagttttttcactttgttttctgcttttcagtggctgctgcttcgctttcagttccagagagcagcctcagaaaaacgagtgccagatccaaaaactcaatgccccaaaccggataaccgtatagagtcagaaggagggctcattgagacatgcccccacccaacaagccattccagtgtgccggtgttgccctctctcgctgcaccctcaaccgcaacgcccttcgtag

SEQ ID NO: 61828 - DNA, 265 bp, Glycine max
  Clone ID: 700763273H1
atggaaacaaatttgtttaaattgtctcttgatgatgttgaaactcctaaaggttccatgttggatcttaaaatttctcagtctaaaattgcacttcccaagaacacagttggaggaactattctgcgtagtgatctattggcaaattttctgacagagggcaattttagagcaagtgttgatttgcagcgcactcatcgtattaaaggaatgattaaaatggtggccacagttggtattcctgagaatacaggtatatcattgg

SEQ ID NO: 61829 - DNA, 260 bp, Glycine max
  Clone ID: 700763274H1
actagttcaatatcctagtataccttaataaataatttaagatactatgatgagagcacggttcccattactgttgctgggacttgttttcctggcttcagtttctgtctcatttggcattgcttactgggaaaaaggaaccccaaacacaacaagtgtctccagagttgcaatagcgagagagactcgtacaggaaccaagcatgccacgctcgttgcaacctccttaaggtggagaaagaagaatgtgaagaaggtga

SEQ ID NO: 61830 - DNA, 263 bp, Glycine max
  Clone ID: 700763275H1
ggcagaggaagaaggtggcagcgtgctcagtggcttcagcaaacacttcttggcacaatccttcaacaccaacgaggacatagctgagaaacttcagtctccagacgacgaaaggaagcagatcgtgacagtggaagaggtctcagcgttatcagccccaagtggcaagaacaacaagatgaagatgaagatgaagacgaagatgatgaagatgaacaaattccctctcaccctcctcgccgaccaagccatggaaagcgtga

SEQ ID NO: 61831 - DNA, 258 bp, Glycine max
  Clone ID: 700763276H1
gtggcgttctgagtgggcaaattaaacttcatggcatttgagtttccttattgacaatcccaaacagtctacagtttttgatattctcttgggaatttctcaagattttgagattgctggtaatactcttatgccactttttctgttccacaggctactgccagatcttctgaaaatgcggaatcctctgcatgatctggaatttgtgctttcttttgcttgttcgtttgtttaattcaatacaggaaattaggcatg

SEQ ID NO: 61832 - DNA, 259 bp, Glycine max
  Clone ID: 700763277H1
taagatttgaaattttgataaaccgcgatcacaggttgccgcaccttaaaccggaaacaaaagcaatcgttacttgatttcaagaatctctcaatttcttcctacttctttgtgtacgatttcttaagggccagaaatcactctctgtgctggccacagacttcgtgaatcattttcttttccactcttagtccatctactcacactctcctatttgatataggacttcgtgtcagatttagacttcttctgcttcttt

SEQ ID NO: 61833 - DNA, 265 bp, Glycine max
  Clone ID: 700763278H1
cgtacttattaacacttccttagttcaatatggggaagcccttcactctctctctttcttccctttgcttgctactcttgtcgagtgcatgctttgctattagctccagcaagctcaacgagtgccaactcaacaacctcaacgcgttggaacccgaccaccgcgttgagtccgaaggtggtttgattcaaacatggaactctcaacaccctgagctgaaatgcgccggtgtcactgtttccaaactcaccctcaaccgcaatgg

SEQ ID NO: 61834 - DNA, 263 bp, Glycine max
  Clone ID: 700763279H1
ctctcgagccgaatcggctcgagcgcgtactgtgtatcatcaatttgattagggagttcatccaggcaaaacaatgaaagtacagttcaccaagcgtccctatgcacaaccttatggtgtatatacatggttaacggatttaaagacacctctaaagaaggatatagttttgaagagatatgcatcaagaaagaagcgtttgagggagacgagaagttttgtgcaaaatccttgggaacagtaattggttttgccatttcaaa

SEQ ID NO: 61835 - DNA, 210 bp, Glycine max
  Clone ID: 700763280H1
caaagacgcacgcagcgttctaaaaccctaatcgggtatgtgcacagagcgctttgtagcacgtgcttaaggtctgttttaaacattgcttgtttagttggttccttttgatgtcatggtggcattgtgatgcaaatgtgcgtgagctcatactgagaaggagctcatctgctaagtccatttgaagaggatgtatggaagggcatcatc

SEQ ID NO: 61836 - DNA, 244 bp, Glycine max
  Clone ID: 700763281H1
attgttgcagctctagctagggtttcgcaagtgcgatcgaagaagaacaacgacgatggcgatggctgcagctctgcgtcgcgaaggaaggcgttttatccaaccaatcaacgccctgcactcttctcttcaattctcctcatctctcaagaccaagcccctcatggcgcgcgctcaatttcactcaagtgtgaagaacggatgaagagtgtgaggaatatccagaagttcaccaaggccatga

SEQ ID NO: 61837 - DNA, 266 bp, Glycine max
  Clone ID: 700763282H1
acccacttcgtttgatctttgctgccgctcctttctgttgatagctgcttccttgacccttcgtttcatttttccatttcctaacaatttatggcctcacacgttccttccaaccctgcaacactgctacctctgaaaactatcaaagctttggttacttttctctgtacgagtacaaaccacagtttttcaacgtttttaaacccacccatcaggttgaaacctcaggctaggattttggttataacagtgattcaaaccatgct

SEQ ID NO: 61838 - DNA, 255 bp, Glycine max
  Clone ID: 700763283H1
caagttattatcaaataattaattaaattcctcgtggaatcttgttgaagccatgtctacagctggtcaggtcatcaagtgcagagctgcggtggcatgggaagcagggcaaccactatcgatagaaaccatagaagtgcaccaccccagcaaggtgaagtgcgtttgaagatgctcttcaactccctttgccgtacagatgtttactggtgggatgctacgggctacactccgctgtttcctcgtatcttaggc

SEQ ID NO: 61839 - DNA, 251 bp, Glycine max
  Clone ID: 700763286H1
ttcattattaacacttccttagttcaatatggggaagcccttcactctctctctttcttccgtttgcttgctactcctgtcgagtgcatgctttgctattagctccagcaagctcaacgagtgcgaactcaacaactcaacgcgttggaacccgaccaccgcgttgagtccgacggtggtctgattcaaacatggaactctcaacaccctgagctgaaatgcggcggtgtcactgtttccaaactaacctc

SEQ ID NO: 61840 - DNA, 204 bp, Glycine max
  Clone ID: 700763287H1
gtacaagtacttccttacaatccaaaccaacaacaactatggccagttatcaaaagcactacgatgatcagggtcgcaaggttgacgagtatggcaacgttgagaaggcaaccgacgaatacggcaaccctgttcatgctggtagtgtcacctatgtagccaccagaactgctgctggtggttacagtgctgccattaataagc

SEQ ID NO: 61841 - DNA, 263 bp, Glycine max
  Clone ID: 700763288H1
caacaataagaacagaacaagagttaagaaacagagcatagagtgatttcattggtagcttcatgttgctctgttctgttcctctctccacccaccaaatcactctatgctctgtttcttaactcttgtactgttctattgttggtctcggagcttggaccagcatacatcaacatgaagccaccaacgaaacccatttcgacccctcatccaaccgagatatttccaccaccgttgatgagattcttgagcaacaatgcctc

SEQ ID NO: 61842 - DNA, 262 bp, Glycine max
  Clone ID: 700763289H1
gaggaagatgaggatgaggatgaggaacaagatgaacgtcaattcccattcccacgcacacctcatcagaaggaagagcgaaagcaagaggaagatgaggatgaggagcagcagcgagagagcgaagaaagtgaagttctgagttacgaagacataagaataagaacccttttctcttcggctctaacaggttcgaaactctcttcaaaaaccaatatggtcgcattcgcgtcctccagaggttcaaccaacgctccccaca

SEQ ID NO: 61843 - DNA, 255 bp, Glycine max
  Clone ID: 700763290H1
gttcaatatcctagtataccttaataaataatttaagatactatgatgagagcacggttcccattactgttgctgggacttgttttcctggcttcagtttctgtctcatttggcattgcttactgggaaaaagaaaccccaaacacaacaagtgtctccagagttgcaatagcgagagagactcgtacaggaaccaagcatgccacgctcgttgcaacctccttaaggtggagtcagtagaatgtgaagaaggtg

SEQ ID NO: 61844 - DNA, 259 bp, Glycine max
  Clone ID: 700763292H1
tggaaacaaatttgtttaaattgtctcttgatgatgttgaaactcctaaaggttccatgttggatctgaaaatttctcaatctaaaattgcacttcccaagaacacagttggaggaaccattctgcgtagtgatctattggcaaattttttgacagagggcaattttagagcaagtgttgatttgcagcgcactcatcgtattagaggaatgattaaaatggtggccacagttggtattcctgagaatacaggtatatc

SEQ ID NO: 61845 - DNA, 255 bp, Glycine max
  Clone ID: 700763293H1
agcacagattgaagagttccattcgatgcagaggatgatgaatgctcctgattcaaatgataatattgatctactgttgagcattgatttgttgggtttacaaggagcaggtaaagcttttccaaacaagatttttttgatgataaacttgtgctggctaacacacaagaattctttgctggaaattttccagtggattcttggttaccaatttttgtgaattgtctttatcctgtaagtcaattaccttcagaa

SEQ ID NO: 61846 - DNA, 249 bp, Glycine max
  Clone ID: 700763294H1
tgtgagcgagcgagcgaggtagggttttcgatgttcccccgtctttgaattcagttcgcgacgatggggtccatccccgatccaggcgagttgagcgagttgactcagccgagcttcgacgagttccagcgccaagttccctcatgaccagctgcagcctcctctggaaggagctctccgaccacttctcctccctcgagcaagacctgcaccacaaatccgaagccctcaaacgcaagattcgcaccc

SEQ ID NO: 61847 - DNA, 260 bp, Glycine max
  Clone ID: 700763295H1
aactcattttcgaactacatttcttccaccaactcataaaatactcatatctgttcccaaaagcttgtttgtgagaatggcttcgggtgaaaagaaattcccacctcaagaacaacaaacacagcctgggaagagcatgctatgaatccagtaccccaattcactagccctgagtacaagccttcaaataaacttcaaggaaagatagcattagtgactgggggtgactctgggattggacgagcggtgtgtaacttgtt

SEQ ID NO: 61848 - DNA, 261 bp, Glycine max
  Clone ID: 700763296H1
attttgtgaggttcattatgaagaaaagggacaaacttagttgtcaagttggaatcaacccatactccatggaatggactggtttggccaatagattactgagtaagggcaatgatattctgtgttgcgattatgctagttttgatggtttgattaccaagcaagttatgagcaagatggcagaaatgataaacagtctttgtggtggtgatgaaaaattgatgcgtgaaaggacgcacctgctgttggcttgttgttcaa

SEQ ID NO: 61849 - DNA, 281 bp, Glycine max
  Clone ID: 700763301H1
atattctattaaattaataagctggtgatgtaattaatattaatatgtagttttggcaatcttattggcagaagatgctaggtggagttcatcaatattctggtaggtataatatcttcatgaatctaatataacgttattcatagtgaaaataaatcgagccaaggaatttattaataattgtcttcatttcatattagctgcctgctgcgacttccttatgcataattttactgtttatagaaattgtgaagctatactgttgtaattgtcatgtaaat

SEQ ID NO: 61850 - DNA, 289 bp, Glycine max
  Clone ID: 700763302H1
tcggatcgagttgtgtcttaaatccacaaaatccttttgtgttaaataggtggatggggaaactgactttcccccagggcacttcccgaaatgttaagagaatgcctctttctatagggggaggagctggtgcaaagaatgctattctcatgaatatgccaaatgctgttctttcaatgtggagatattttgttggagatctcgtctttgaagtttctaagatgacttctccctacattaaatgtacagtctctttcttcatagcatttggaaatttggctgatgacac

SEQ ID NO: 61851 - DNA, 278 bp, Glycine max
  Clone ID: 700763303H1
gaatgaatgagaagtcttagcaaacactctttgtcggttaatgttttccctggtgacagctgcaactcttttttcttcttcttttggggggggagggggtgttgtttggatttggatttggatcttcattaggtgagttttttgtattcttgttgtatctaatgaaaagttttcttttgttttgtttttggttggttttaccgtggtactgaatatgttgtttgttttggtcggttggttcaatcacagatagcttttggtagaacaagttttgcagt

SEQ ID NO: 61852 - DNA, 279 bp, Glycine max
  Clone ID: 700763304H1
gttcaatatcctagtacaccgtattaaagaatttaagatatactatgatgagagcgcggttcccattactgttgctgggagttgttttcctggcatcagtttctgtctcatttggcattgcgtattgggaaaagcagaaccccagtcacaacaagtgcctccgaagttgcaatagcgagaaagactcctacaggaaccaagcatgccacgctcgttgcaacctccttaaggtggaggaagaagaagaatgcgaagaaggtcaaattccacgaccacgac

SEQ ID NO: 61853 - DNA, 278 bp, Glycine max
  Clone ID: 700763305H1
cttaattattaacacttccttagttcaatatggggaagcccttcactctctctctttcttccctttgcttgctactcttgtcgagtgcatgctttgctattagctccagcaagctcaacgagtgccaactcaacaacctcaacgcgttggaacccgaccaccgcgttgagtccgaaggtggtttgattcaaacatggaactctcaacaccctgagctgaaatgcgccggtgtcactgtttccaaactcaccctcaaccgcaatggcctccacttgcca

SEQ ID NO: 61854 - DNA, 278 bp, Glycine max
  Clone ID: 700763307H1
agacaattaccttcagaagctgtcgttgtaaatgttacatgtggtagtggacgtggtggtttacccaccactgcttggattagttctgcagttaacaatcgctcctcagatatcaacaaaaggattcgcacagcacttgggagaggtaagaaaattgtttttcttactaagagttgaaccttttccagtagctttactggctgttctttttggcgttaagaatgaaattctgagttctaacgccactaaccctatgctgacgcgacttcttgagaact

SEQ ID NO: 61855 - DNA, 279 bp, Glycine max
  unsure (1)..(279): unsure at all n locations
  Clone ID: 700763308H1
tcaacatgcctgtaacctgacttctttgttgggtcatcaacagccaatgtgccancatctatcactgcagctccaggtttgatccaactgcccttgatcatcatcggctgtcctgctgctgatgacccaacaaagaagtcaggttacaggcttgttggacatgtagattttggggaagcatctaaagttgctggttggattactccagttcctggtggtgttagtccaatgacagtcacaatgttgctgaagaatactttggatggagccaagcgctac

SEQ ID NO: 61856 - DNA, 277 bp, Glycine max
  Clone ID: 700763309H1
aagcagagcttttgtcaattctctattgatcttcttggtggaggaattttagtggacaaaactggagattggatcacacttatacaaaattctccaattagtaacttgttgagagttgctgcttggaagaaaggctgtttaatggttaagattgtgatgtctgggaatgcagcagtcaaaaggagtgattgggcctcattggtacaagtgtttttaacaaacagcaacagtacagagcattttgatgcatgtaagtggacaaaatcggaaccacatt

SEQ ID NO: 61857 - DNA, 289 bp, Glycine max
  Clone ID: 700763310H1
gtcggctcgagactccgtgccctagcttcttcttcctcctcctcctctgccattgcagcaaggcacacacctcaggctccaacccatttcacgagggatcggattcgctcgccatcatggggaagaagaagaagagagtttcctcgaaggtgtggtgttattactgcgatcgcgaattcgacgacgagaagatcttggtgcagcatcagaaagccaagcactttaagtgccatgtctgccacaagaagctctctaccgctggcggcatggccatccacgtcctccaggt

SEQ ID NO: 61858 - DNA, 278 bp, Glycine max
  Clone ID: 700763311H1
gcctcgcaaagcttcaccattatcgtgggtcttgatcttcttccttagcatttccttgagtggagttaaggtattaagtgaagagcagcaccatgccaaatctcaagaaggacctgtggtggaaagggatcaaaggaggacattacttgtcactgaattcggagagatcactgccattgacatcaaggaaggacaaaaggaactgccctaccatcttcggttcatcacattggagccaaactcgctatttctccctgtgcttctccatgcagatatgg

SEQ ID NO: 61859 - DNA, 277 bp, Glycine max
  Clone ID: 700763312H1
attgaatgtcccaaggatgagaaacttcctcgtcgcaaaatttttgacaaacctaagacgcgctgcttcactattctccctatggagtttaatcttgtggttcgtcagaagtttttaaattttgtgaggttcattatgaagaaaagggacaagcttagttgtcaagttggaatcaacccatactccatggaatggactggtttggccaatagattactgagtaagggcaacgatattctgtgttgcgattatgctagttttgatggtttgattacca

SEQ ID NO: 61860 - DNA, 268 bp, Glycine max
  Clone ID: 700763313H1
tttactctccacattggaatctgaatgcaaacagtgtgatctatgtgactcgaggacaaggaaaggttagagttgtgaactgccaagggaatgcagtgttcgacggtgagcttaggaggggacaattgctggtggtaccacagaacttcgtggtggcggacaagccggagaacaaggattcgaatacatagtattcaagacacaccacaacgcagtcactagctacttgaaggatgtgtttagggcaattccctcagaggttcttgcc

SEQ ID NO: 61861 - DNA, 276 bp, Glycine max
  Clone ID: 700763314H1
cattggtccttaaacactcatcagtcatcaccatggccaagctagttttttccctttgttttctgcttttcagtggctgctgcttcgctttcagttccagagagcagcctcagcaaaacgagtgccagatccaaaaactcaatgccctcaaaccggataaccgtatagagtcagaaggagggctcattgagacatggaaccctaacaacaagccattccagtgtgccggtgttgcgctctctcgctgcaccctcaaccgcaacgcccttcgtagac

SEQ ID NO: 61862 - DNA, 276 bp, Glycine max
  unsure (1)..(276): unsure at all n locations
  Clone ID: 700763315H1
aatttcgatgctcagtcatctcttttaccattctcttctctcttgctcttgcaggagagagccatgtccatgcatcgctacctgaggaagattattggcaagctgtttggccaaacactcccattcccactgcactgcgagagcttctaaagcctctccctgcaggtgttgaaatcgatgaactccctaagcaaattgatgatacacagtacccaaaaacattcttctataaagaagaccttcatccaggcanaacaatgaaagtacaattcacca

SEQ ID NO: 61863 - DNA, 227 bp, Glycine max
  Clone ID: 700763316H1
gtagattgaaccagacatgaattcaaggtttcagcttttgagtaccactaccaatggtgattttgttcaaggaaaagatctcgcaatggttaaagttaatgtagcatgtgctgctgttggcttgacatcaagctatactccgactccattgttggaatctggtttgcaaaaagacagagggttaattgtggagtattttggaaggatgtcttacgttgctcataacg

SEQ ID NO: 61864 - DNA, 278 bp, Glycine max
  Clone ID: 700763317H1
gaaagttagcagattgtgattttctcaagagaaactttaagcagatgtctaatgttttgtgggtggctcctgaggacaaggcgagtttatggtcacaacttcattatgtttcgtgtaataatctggaaatgcaagaagcttatcttgtcaatctcgtaaatgtgttacgagaattgtatttgcacagtccagaggaagctcgccaattgagaaggaaagctctctctcgtattgaatggctgcaaaaagctgatgtgcctaccatagcacagattgaa

SEQ ID NO: 61865 - DNA, 278 bp, Glycine max
  Clone ID: 700763318H1
gcattgcttcgcctcacaacagcagctgcagcagcaatggctcccaaacgaggtggaaaggctccggctcttgccgctaagaagaagcctgagaaggtcacgaatccgttgttcgagaagcgtccgaagcagttcggaatcggaggggcgttgcctccgaagagagacttgactaggttcgtgaagtggccaaagaatgttcaaattcagaggaagaagaggattctgaagcagaggttgaaggttcccccagctttgaaccagtttaccaaaactct

SEQ ID NO: 61866 - DNA, 276 bp, Glycine max
  Clone ID: 700763319H1
acctccttcattcccttcctacactcttcatgcactattttcattttgctaagggatcgatcataaggaggaagaaatacaaggttttgggacctcttctcttggcttataaaaagtccaaaacaggtgaattcagaaaggatcttgtgggttgttttgtttgtttgtttgttctaatctttgtggataataaataacctcagaattgaactttgttattacactgtatttgactgtttcctttggaggttggttctaaactccttaattttcttg

SEQ ID NO: 61867 - DNA, 277 bp, Glycine max
  Clone ID: 700763320H1
taaacactcatcagtcatcaccatggccaagctagttttttccctttgttttctgcttttcagtggctgctgcttcgctttcagttccagagagcagcctcagcaaaacgagtgccagatccaaaaactcaatgccctcaaaccggataaccgtatagagtcagaaggagggctcattgagacatggaaccctaacaacaagccattccagtgtgccggtgttgccctctctcgctgcaccctcaaccgcaacgcccttcgtagaccttcctacacc

SEQ ID NO: 61868 - DNA, 276 bp, Glycine max
  Clone ID: 700763321H1
tcaatatcctagtacaccgtattaaagaatttaagatctactatgatgagagcgcggttcccattactgttgctgggagttgttttcctggcatcagtttctgtctcatttggcattgcgtattgggaaaagcagaaccccagtcacaacaagtgcctccgaagttgcaatagcgagaaagactcctacaggaaccaagcatgccacgctcgttgcaacctccttaaggtggaggaagaagaagaatgcgaagaaggtcaaattccacgaccacga

SEQ ID NO: 61869 - DNA, 273 bp, Glycine max
  Clone ID: 700763322H1
tatgaactctatacagggacagttctttttccaggttttactaacaatgacatgctatggctccacatggaattgaagggtatttttccgaaaaagatgcttcgtaagggagcatttattgaacaacattttgatcagtacctgaattttcttgctacagaggaggaccctgtgacgaaaaaggctataaagcggatgattgtaaacataaagccaaaagatattggaacaatcatcagtggctctccaggggaggatccaaagatgttaacc

SEQ ID NO: 61870 - DNA, 277 bp, Glycine max
  Clone ID: 700763323H1
gagggtgatttgatcgcagtgcctactggtgttgcatggtggatgtacaacaatgaagacactcctgttgttgccgtttctattattgacaccaacagcttggagaaccagctcgaccagatgcctaggagattctatcttgctgggaaccaagagcaagagtttctaaaatatcagcagcagcagcaaggaggttcccaaagccagaaaggaaagcaacaagaagaagaaaacgaaggaagcaacatattgagtggcttcgcccctgaattcttga

SEQ ID NO: 61871 - DNA, 277 bp, Glycine max
  unsure (1)..(277): unsure at all n locations
  Clone ID: 700763324H1
ggattcgcacagcacttgggaaacgtaagaaaattgtctgaggtactatagttgatcgcantgcagtagctttactggctgttctagttggcgttaagaatgaaattctgagttctaacgccactaatcctatgctgacgcgacttcttgagaactgtaagagtctcaaatatctggttgatgagtgtccttttgcatttgtgaactagtatgtagtatgctattcacttaaataaagcgcattactatgtgcaatgagtgtgtttaaatataaaaa

SEQ ID NO: 61872 - DNA, 276 bp, Glycine max
  Clone ID: 700763325H1
cttaattattaacacttccttagttcaatatggggaagcccttcgctctctctctttcttccctttgcttgctactcttgtcgagtgcatgctttgctattagctccagcaagctcaacgagtgccaactcaacaacctcaacgcgtaggaacccgaccaccgcgttgagtccgaaggtggtttgattcaaacatggaactctcaacaccctgagctgaaatgcgcaggtgtcactgtttccaaactcaccctcaactgcaatggcctccacttgc

SEQ ID NO: 61873 - DNA, 273 bp, Glycine max
  Clone ID: 700763326H1
attaacactttccttagttcaatatggggaagcccttcttcactctctctctttcttccctttgcttgctactcttgtcgagtgcatgctttgctattacctccagcaagttcaacgagtgccaactcaacaacctcaacgcgttggaacccgaccaccgcgttgagtccgaaggtggtcttattgaaacatggaactctcaacaccctgagctgcaatgcgccggtgtcactgtttccaaacgcaccctcaaccgcaacggcctccacttgc

SEQ ID NO: 61874 - DNA, 268 bp, Glycine max
  Clone ID: 700763327H1
caaccttaaaaacctagagactaaaaaaataaatttaaatttgaaagacaaaaaaaatgacctaaatttgagaaattaaaaacatgtttaagcttacaaaacactttatttctatctatttatttttaattcctcaatggaaagtttaataataacatgaaaagtttacctaatgtgaaacacatgaccattattaattcatcacaacttttcgaggtctcacattgcaagtcaagtcgagtgaatgtcactattctaattcattttt

SEQ ID NO: 61875 - DNA, 272 bp, Glycine max
  Clone ID: 700763329H1
aggagtctgacatgtgtgcgagtcaacgggcgagtaaacccgtaaggcgcaaggaagctgattggtgggatccccctgtgggttgcaccgccgaccgaccctgatcttctgtgaagggttcgagtgagagcatacctgtcgggacccgaaagatggtgaactatgcctgagcggggcgaagcagagggaaactctggtggaggcccgcagcgatactgacgtgcaaatcgttcgtctgacttgggtataggggcgaaagactaatcgaaccg

SEQ ID NO: 61876 - DNA, 274 bp, Glycine max; identical to SEQ ID NO: 55842
  Clone ID: 700763330H1

SEQ ID NO: 61877 - DNA, 258 bp, Glycine max
  Clone ID: 700763331H1
tgcattcacaggggtgaagcctcccaatggcataagcttctttggaagcctctcaggaagggcctctgatggtcgtctcagtctagattttatgactgaagagttgaagctgccatacctgaatgcatatttggactcggttggatcgaattacaggcatggtgcaaactttgcagtaggaggctcctccattcggcctggtggtattagtccattccctcttggccttcaagtagctcagttcctactgttcaagtt

SEQ ID NO: 61878 - DNA, 273 bp, Glycine max
  Clone ID: 700763332H1
ctgtgatatcatttgtgtcactggatggactgccaccccaatgcaggatgttcaggttacaattgattggtttatttcctctcaggaatgtgttcccaggacttattgtgttttaaatccacaaaatccttttgtgttaaataggtggatggggaaactgactttcccccagggcacttcccgaaatgttaagagaatgcctctttctatagggggaggagctggtgcaaagaatgctattctcatgaatatgccaaatgctgttctttcaat

SEQ ID NO: 61879 - DNA, 275 bp, Glycine max
  unsure (1)..(275): unsure at all n locations
  Clone ID: 700763336H1
gcatctcctttaccaccattctagatatcagagaactttgcagctctcttaggtntttaaaaaacaccacgcaaacagcaagatggccacttccgacagtaacatgctactaaattatgttccagtttatgtgatgctcccactcggagttgtcaatgttgacaatgtttttgaagacccagatggccttaaagaacagctcttgcagcttcgagctgcgggtgttgacggggttatggttgatgtgtggtgggggatcatagaactgaaggggc

SEQ ID NO: 61880 - DNA, 273 bp, Glycine max
  Clone ID: 700763337H1
gtatttttgtcgcgcctttcagaggcggaaggcctattcgggtggttacatttccgaataccattgtgcagattgaaccagacatgaattcaaggtttcagcttttgagtaccactaccaatggtgattttgttcaaggaaaagatctcgcaatggttaaagttaatgtagcatgtgctgctgttggcttgacatcaagttacactccaactccattgttggaatctggtttgcaaaaagacagagggttaattgtggaatattttggaagga

SEQ ID NO: 61881 - DNA, 251 bp, Glycine max
  Clone ID: 700763339H1
ctcactttctaccaccagcctttctagcaggaggagcagtgtatattaagaggggcgataagttataaaatagacattttctaagaaaatgaacaagttataggcatgaacattttacttcaaggtagtggaaaaaaatgccatatgtaatccttagtaagttttgttttgttttaaattttgttggtaggctgagacaattttttgaacagatgttataataaaaggtgcatgtggcaggtgtttcataa

SEQ ID NO: 61882 - DNA, 271 bp, Glycine max
  Clone ID: 700763340H1
gagatattcgttagtttaattagagggaaaatttttaagtatggttgtgacttgtgactgatcttgttttattattcaatgcatggctactttgtttaattgaagctctataacttgagacagctaatatcatttatctgtataattatttgctaaaaagggtatattatagtatccttttgttcctttatatatatatattaccttgtacaaggatttcccatcatcattctatgtcctttcgttatgatccctgaactgaagtctaatc

SEQ ID NO: 61883 - DNA, 272 bp, Glycine max
  Clone ID: 700763341H1
caagttattatcaaataattaattaaattcctcgtggaatcttgttgaagccatgtctacagctggtcaggtcatcaagtgcagagctgcggtggcatgggaagcagggaagccactatcgatagaaaccatagaagtggcaccaccccagaaaggtgaagtgcgtttgaagatcctcttcaactccctttgccgtacagatgtttactggtgggatgctaagggccagactccgctgtttcctcgtatcttaggccacgaagcttcgggga

SEQ ID NO: 61884 - DNA, 272 bp, Glycine max
  Clone ID: 700763343H1
ctctaatccgtttccgccgttccgctccttcctaccacactctccactctctctttccgacgattaaccgtttctcctcctccgcctccgccgccatggttgctcacgcgaaggacgaggcgtacctcagcgcgacgattccgaagcgcatccgtctcttcgagaccatcctggcggagcagcacactcagcgcctctcgctctcgccggatcctatcaaggttactctccccgacggcagcgtcaaggaggcgaagaagtggcatacgacg

SEQ ID NO: 61885 - DNA, 270 bp, Glycine max
  Clone ID: 700763344H1
atcgagccgctcgagcggctcgaggtggtagctcctgaggacaacaggagtttatggtcacagcttcattaggtttcgtgtaatgatctggaaatgcaagaagcttatcttgtcaatctcgtaaatgtgttacgagaattgtatttgcacagtccagaggaagctcgccaattgagaaggaaagctctctctcgtattgaatggctgcaaaaagctgatgtgcctaccatagcacagattgaagagttccattcgatgcagaggatgatg

SEQ ID NO: 61886 - DNA, 270 bp, Glycine max
  Clone ID: 700763345H1
gattttagcaaattaaaatagtagtgttattggtaggttttggcaaagatgttttcagttccaggggtgtcgggaatcctgaacagaggaggagggcataagataaaagggacagtggtgttgatgaggaagaatgtgttggacttcaacagcgtggctgatcttactaaaggaaatgttgggggactcataggcaccggcctcaacgttgttggctcaacacttgataacctcactgctttcttgggccgaagtgtcgccctacagctc

SEQ ID NO: 61887 - DNA, 223 bp, Glycine max
  Clone ID: 700763347H1
gaccaagttcacaatcctcctcatctctcttctcttctgcatcgcccacacttgcagcgcctccaaatggcagcaccagcaagatagctgccgcaagcagctccagggggtgaacctcacgccctgcgagaagcacatcatggagaagatccaaggccgcggcgatgacgatgatgatgatgacgacgacaatcacattctcaggaccatgcggggaagaatc

SEQ ID NO: 61888 - DNA, 273 bp, Glycine max
  Clone ID: 700763348H1
cttaattattaacacttccttagttcagtatggtggaagcccttcactctctctctttcttccctttgcttgctactcttgtcgagtgcatgctttgctattagctccagcaagctcaacgagtgccaactcaacaacctcaacgcgttggaacccgaccaccgcgttgagtccgaaggtggtttgattcaaacatggaactctcaacaccctgagctgaaatgcgccggtgtcactgtttccaaactcaccctcaaccgcaatggcctccat

SEQ ID NO: 61889 - DNA, 271 bp, Glycine max
  Clone ID: 700763349H1
aattaagctgccaacagatataatcagcaagattagtccactacccgtgcttaaggaaatcttccgaactgatggtgaacaggcccttaagtttcctcctcctaaagtaattcaagtgagtaagtctgcatggatgactgatgaagaatttgcaagagaaatgcttgctggtgtaaatccaaacttgattcgttgtcttaaggatttccctccacgaagcaagctagatagccaagtctatggtgatcatactagtcaaataaccaaagaa

SEQ ID NO: 61890 - DNA, 271 bp, Glycine max
  Clone ID: 700763350H1
agcaaagcaatggctacttcaaagttgaaaacccagaatgtggttgtatctctctccctaaccttaaccttggtactggtgctactgaccagcaaggcaaactcagcggaaactgtttctttcagctggaacaagttcgtgccgaagcaaccaaacatgatcctccaaggagacgctattgtgacctcctcgggaaagttacaactcaataaggttgacgaaaacggcaccccaaaaccctcgtctcttggtcgcgccctctactccaccc

SEQ ID NO: 61891 - DNA, 270 bp, Glycine max
  Clone ID: 700763351H1
ctcgagccgctcgagccgattcggctcgagtggagaggattttcagcttaaacttttatgcaggacctccagttagatttaagctgtctcacagggatcattcaaattttgtgaattgtgtaagatattctccggatggcagtaaatttataagtgtaagttctgacaagaagggtatcatattcgatggaaacagtgcagagaagattggtgagttgtcttctgaaggtgggcatactggtagtatttatgctgttagctggagtcctg

SEQ ID NO: 61892 - DNA, 271 bp, Glycine max
  Clone ID: 700763352H1
gagcttcagtgctagataggaagaaactcaacaatcctacttgcaaggattcagcaggaacattttagaggcctcctacgataccaaattcgaggagataaacaaggttctgtttagtagagaggaagggcagcagcaaggggagcagaggctgcaagagagcgtgattgtggaaatctcgaaggaacagattcgggcactgagcaaacgtgccaaatctagttcaaggaaaaccatttcttctgaagataaaccttttaacttgagaagc

SEQ ID NO: 61893 - DNA, 272 bp, Glycine max
  Clone ID: 700763353H1
ggcttccttaagctccttagtgctgctccttgcagctctaattctatcccctcaagttcttgcaaactatgagctctcccccagtgtacaagcctcccactgagaaaccaccagtttagaagcccccagttgagaagcctcctgtttacaagcctccagttgagaaccctccagtttataagcctccagtagagaagccaccagtgtacaagcccccagttgaggatcctccagtgtacaagcccccagttgagaaacctccagtgtacaag

SEQ ID NO: 61894 - DNA, 266 bp, Glycine max
  Clone ID: 700763354H1
ctcttcttctcttgcggctagggttttagcgcacttcttctagatttaaggaagatgggtaaggaaaaggttcacatcagtattgtggtcattggccatgtcgactctgggaaatccactaccactggtcacctgatttacaagcttggaggcattgacaagcgtgttattgagaggtttgagaaggaagctgctgagatgaacaagaggtctttcaagtatgcctgggtgctggacaaacttaaggctgagcgtgaaagaggaat

SEQ ID NO: 61895 - DNA, 270 bp, Glycine max
  Clone ID: 700763355H1
gttttgatggtttgattaccaagcaagttatgagcaagatggcagaaatgataaacagtctttgtggtggtgatgaaaaattgatgcgtgaaaggacgcacctgctgttggcttgttgttcaaggatggcaatttgtaagaaagatgtttggagagttgaatgtggaatcccttctggatttccgctcacagttatttgcaatagcatttttaatgagatgctcattagatatagctatgaaaaattactgcgccaggctaaagctccaa

SEQ ID NO: 61896 - DNA, 267 bp, Glycine max
  Clone ID: 700763357H1
ctcgagccggttgtgaatgactcgtgctatcatcaacttgtcagccattggttaaacactcgtgcagttgttgagccattcatcatagcaacaaacaggcatctcagtgttgttcaccctatttataaactccttcaccctcactatcgtgacaccatgaacataaatggccttgctcggttatcactggtcaacgacggtggcgttatagaacaaacattcttgtggggaacgtattctgtggaaatgtctgctgtagtttacaag

SEQ ID NO: 61897 - DNA, 268 bp, Glycine max
  Clone ID: 700763358H1
ccttagttcaatatggggaagcccttcttcactctctctctttcttccctttgcttgctactcttgtcgagtgcatgctttgctattacctccagcaagttcaacgagtgccaactcaacaacctcaacgcgttggaacccgaccaccgcgttgagtccgaaggtggtcttattgaaacatggaactctcaacaccctgagctgcaatgcgccggtgtcactgtttccaaacgcaccctcaaccgcaacggcctccacttgccatctt

SEQ ID NO: 61898 - DNA, 266 bp, Glycine max
  Clone ID: 700763359H1
aatttttgtgaattgtctttatcctgtaagtcaattaccttcagaagctgtcgttgtaaatgttacatgtggtagtggacgtggtggtttacctaccactgcttggattagttctgcagttaacaatcgctcctcagatatcaacaaaaagattcgcacagcacttgggaaaggtaagaaaattgtttttcttactagagttgatccttttccagtagctctactggctgttctttttggcgttaagaatgaaattctgagttcca

SEQ ID NO: 61899 - DNA, 267 bp, Glycine max
  Clone ID: 700763362H1
tgaaattttgataaaccgcgatcacaggttgccgcaccttaaaaccggaaacaaaagcaatcgttacttgatttcaagaatctctcaatttcttcctacttctttgtgtacgatttcttaagggaaagaaaatcactctctgtgctggccacagacttcgtgaatcattttcttttccactcttagtttatttgctgaacactctcctatttgatataggacttcgtgtcagatttaaacttcttctgtttctttctcagttctctg

SEQ ID NO: 61900 - DNA, 175 bp, Glycine max
  Clone ID: 700763363H1
ctccattggtccttaaacactcatcagtcatcaccatggccaagctagttttttccctttgttttctgcttttcagtggctgctgcttcgctttcagttccagagagcagcctcaggaaaacgagtgccagatccaaaaactcaatgccctcaaaccggataaccgtatagagtc

SEQ ID NO: 61901 - DNA, 271 bp, Glycine max
  Clone ID: 700763364H1
caacagcacaatttgttagtggaaaaaccttcaaatatgatatagttggtgctggttcacattcttcagaagatttttctgaaaaggaagatcaagaaaaacccaaaaagattgatgccagattgagacaaagaatagatcctcaatacaatgaggttcaggctcagatggaaacaaatttgtttaaattgtctcttgatgatgttgaaactcctaaaggttccatgttggatcttaaaatttctcaatctaaaattgcacttcccaaaaa

SEQ ID NO: 61902 - DNA, 272 bp, Glycine max
  Clone ID: 700763365H1
cttttcctttcttagagatgctggtaatgggggagtttttgttggcaatgttgcttcagcattcacaacttcaagtgtgcttgaggcccaaagtagaaagcccaacagatatgaagtttcccaatacagatatcgcaatgtgccaataaagcgcagagcatgggttgaaggccagatgtctttcgatcagtctgtagtagcaattatgtctaaatgcaaagccagcatgagaatgggaaacactgatgctcaaattttgatggttccagggc

SEQ ID NO: 61903 - DNA, 272 bp, Glycine max
  Clone ID: 700763366H1
accaagttcacaatcctcctcatctctcttctcttctgcatcgcccacacttgcagcgcctccaaatggcagcaccagcaagatagctgccgcaagcagctccagggggtgaacctcacgccctgcgagaagcacatcatggagaagatccaaggccgcggcgatgacgatgatgatgatgacgacgacaatcacattctcaggaccatgcggggaagaatcaactacataaggaggaacgaaggaaaagacgaagacgaagaagaagaagg

SEQ ID NO: 61904 - DNA, 271 bp, Glycine max
  Clone ID: 700763367H1
aaacctacaaggtgagaacgaagaggaggatagtggagccattgtgacagtgaaaggaggtctaagagtcacagctccagccatgaggaagccacagcaagaagaagatgatgatgatgaggaagagcagccacagtgcgtggagacagacaaaggttgccaacgccaaagcaaaaggagcagaaatggcattgatgagaccatttgcacaatgagacttcgccaaaacattggtcagaattcatcacctgacatctacaaccctcaagct

SEQ ID NO: 61905 - DNA, 270 bp, Glycine max
  Clone ID: 700763368H1
gatcaatggaaaactcagacgagcaacttcccttctctccacaaaaccctaacaatgccgaagaagaagacgacgacatcgaagagccagaagacgaagacgaagaagaggaggaggaggacgacgacgacgacgacgtcgtttcgcaggagcaatccccattgtcgcggctgcgcgagcagcgttcgaagctggaaaccctgtcccggcgattggcgtcggagctggtcccaatccgagtccacgacgtgctgattcgcggcaacacga

SEQ ID NO: 61906 - DNA, 265 bp, Glycine max
  Clone ID: 700763370H1
gacctcatcggtagatatttcggaacccctgctcttggatcctcacgggaacgaggaaaaggaagagtatttgcgcgaagaggttccggagtggaaggagcagataacgataagagggttggtggtgagtgctgtgttggggagcttgttctgcatcatcacccacaagctaaatctcaccgttgggatcatcccttctcttaatgttgctgctggcttgttggggttcttctttgtgaggacctggactgggttgttgaccaag

SEQ ID NO: 61907 - DNA, 271 bp, Glycine max
  Clone ID: 700763371H1
gcaaaatgaccaagttcacaatcctcctcatctctcttctcttctgcatcgcccacacttgcagcgcctccaaatggcagcaccagcaagatagctgccgcaagcagctccagggggtgaacctcacgccctgcgagaagcacatcatggagaagatccaaggccgcggcgatgacgatgatgatgatgacgacgacaatcacattctcaggaccatgcggggaagaatcagctacataaggaggaacgaaggaaaagacgaagacgaaga

SEQ ID NO: 61908 - DNA, 270 bp, Glycine max
  Clone ID: 700763372H1
ctaagaaagtcttccatagccccccaaaaatgaagagcaccatctactttgctctctttctcttttgtgccttcaccacctcatacctaccttcagccatcgctgatttcgtgctcgataatgaaggtaaccctcttgaaaatggtggcacatattatatcttgtcagacataacagcatttggtggaataagagcagccccaacgggaaatgaaagatgccctctcactgtggtgcaatctcgcaatgagctcgacaaagggattggaa

SEQ ID NO: 61909 - DNA, 266 bp, Glycine max
  Clone ID: 700763373H1
gaaattttcaagtccttggagggatgggcctcggagtgggtcctaccgctgctgaagcccgtggagcaatgctggcagccacaaaacttcctccctgacccctcccttccgcatgaagagttcagccatcaggtgaaggagcttcgcgaacgcactaaagagttacctgatgagtactttgttgtgctggtgggtgatatggtcaccgaggacgcgcttcccacttaccagaccatgatcaacaaccttgatggagtgaaagatga

SEQ ID NO: 61910 - DNA, 263 bp, Glycine max
  Clone ID: 700763375H1
ggtgaccatcagccaacagagttgttgctatgctgcatgatagttcagtgtctacaataccaggtgattttgtcattggtgttaagttgacaaccataaacaatatgtgtgcatatgggctcaatcctggtatttcaggttctcgtcttttgggcaccattcctcagtccatttcacagcaaactgtttggaatcaaatggcaacagtgagaacaccattgaattttgattctagcaagcagagcttttgtcaattctctatt

SEQ ID NO: 61911 - DNA, 263 bp, Glycine max
  Clone ID: 700763376H1
gattcagatagctcctatgagaatgcagatttgagtcgttctaaaagaaaaaaggccaagaaacgggggaagtcccgttccaaagaaggagatgacagctcagagtgggcttcaaaagagcttttggagtttgttatgcacatgagaaatggagacaaatctgttttatctcagttcgatgtgcatactcttttgctagagtatatcaaaagaaataagcttcgagatcctcgccgaaaaagtcagattatttgtgatgcaag

SEQ ID NO: 61912 - DNA, 171 bp, Glycine max
  Clone ID: 700763377H1
ccgcgatcacaggttgccgcaccttaaaaccggaaacaaaagcaatcgttacttgatttcaagaatctctcaatttcttcctacttctttgtgtacgatttcttaagggaaagaaaatcactctctgtgctggccacagacttcgtgaatcattttcttttccacacaaca

SEQ ID NO: 61913 - DNA, 265 bp, Glycine max
  Clone ID: 700763378H1
attcaaaccttgctctatactacacagtacacacactagaagaataatggcttccatcctccactactttttagccctctctctttcttgctcttttcttttcttcttatccgactcagtcacccctacaaaaccaataaaccttgttgttctacccgttcaaaatgatggttccacagggctccattgtcacaacctccaaaaaagaacccctctaatgcaagtaccagtcctggtggacctcaatggaaatcacttgtgggtt

SEQ ID NO: 61914 - DNA, 220 bp, Glycine max
  Clone ID: 700763379H1
aaggccggtggcagcatagtagcaagcgcacaccacaatcaaagaacaatctccactccaagcaaaccaaagcgaatcggagattcaaactcagttcttcaactctctgatctccacttccacttcagcttcttcgccatggctaacgacgattgctgcgccacgcaactcatcgacggccacggcgagttcaacgtcgccggcctcgacagcttcatca

SEQ ID NO: 61915 - DNA, 265 bp, Glycine max
  Clone ID: 700763380H1
ctttgaacactcatcaccatggccaagcttgttctttccctttgtatccttcttttcagtggctgcttcgctctgagagagcaggcacagcaaaatgagtgccagatccaaaagctgaatgccctcaaaccggataaccgtatagagtcggaaggtgggttcattgagacctggaaccctaacaacaagccattccagtgtgccggtgttgccctctctcgctgcacccttaaccgcaatgcccttcgtagaccttcctacacca

SEQ ID NO: 61916 - DNA, 267 bp, Glycine max
  Clone ID: 700763381H1
ctgtgttgacaaaccctaaccctgaggagtatgagtggttattgagattgaggaattgacgaaaaggaaaggaaagggggagatgtacctgaagaaaccgctatggagtgaaacagggaaagacgatggtggaagtgcaaagacagaagaagaggatcatggtgatggtgcagtgagtgaggtcgtgaagtcactgcagcaacagagagtgtatagagaagtcactcttgcactcagaactggcctcagagacgcgcgtgccgagtt

SEQ ID NO: 61917 - DNA, 263 bp, Glycine max
  Clone ID: 700763382H1
tgcacagcacttgggaaaggtaagaaaattgtttttcttaccagagttgatccttttccagtagctttactggctgttctttttggcgttaagaatgaaattctgagttctaacgccactaaccctatgctgacgcgacttcttgagaactgtaagagtctcaaatatctggttgatgagtgtccttttgcatttgtgaactagtatgtaatattttattcacttaaataaagcgcattactatgtgcaatgagtgtgtttaa

SEQ ID NO: 61918 - DNA, 242 bp, Glycine max
  Clone ID: 700763383H1
ctccatcttcactgttttcaaacatgcatctcttcttcttctttcttctttcctccatacacctctctctacaactcaaccataccacctcattattctcactctctttccctctcacaccactctctctctccaccagcaccgcctccaagatgatgctactcaactctctccttgcaaacaacaacaactataacacacgacttaaatcaccaccttattcctctccctacaactacaag

SEQ ID NO: 61919 - DNA, 267 bp, Glycine max
  Clone ID: 700763384H1
tctcgagccgattcggctcgagaagccattccagtgtgccggtgttaccctctctcgctgcacgctcaaccgcaacgcccttcgtagaccttcctacaccaacggtccccaggaaatctacatccaacaaggtaagggtatttttggcatgatatacccgggttgtcctagcacatttgaagagcctcaacaacctcaacaaagaggacaaagcagcagaccacaagaccgtcaccagaagatctataacttcagagagggtgattt

SEQ ID NO: 61920 - DNA, 266 bp, Glycine max
  Clone ID: 700763387H1
aagaagatgggtttgaagaacaacatggtggtgctaaaggtgtgtttggtgctacttttccttgtggggggtactactagtgccagcttgaggctgagtgagcttggcctgctcatgaaaagtgatcatcatcaacactcaaatgatgatgactcttcaaaaccatgctgtgatcaatgcgcatgcacaaagtcaaaccctcctcaatgccgctgttcagatatgaggctgaattcgtgccattcagcttgcaaatcttgtatttg

SEQ ID NO: 61921 - DNA, 263 bp, Glycine max
  Clone ID: 700763388H1
aattcctggagcattttatatcaagaacttccactcccatcatcccattcaaaattaattttgaatgcagattggcctgctcccaaagttaattttgaatgggatgatgggagtggaattcctggagcattttatatcaagaattttatgcaaactgagtttttccttgtgagtgtgactcttgaagacattccaaaccatggaagcatccactttgtttgcaattcgtggatttacaatgccaaactcttcaaaagtgaccg

SEQ ID NO: 61922 - DNA, 261 bp, Glycine max
  Clone ID: 700763389H1
gccacccccaccggactgggataatagagatcgtggaagagatggcttctctgatgaagggaaaggatttgaaaggaggccactgtcaccccctccacctcttttgccatcacttcctcaccatcgtggtggtcgatgggctcgagatgttagacagagaagccgctctccaataagaggtggcccaccaccaaaagaatatcgccgggatacgttcatgcatcgtgcaacagatgataggcgcggactgggacgagatag

SEQ ID NO: 61923 - DNA, 258 bp, Glycine max
  Clone ID: 700762841H1
agtttgcaaaaattatgaaccttagacaaagtgttgttggtgatcttaaacttcttactgatgggaagttatatgagggtaagcatattcctgtatctaatattagtgcaggggaaaatcatgtagttcaaatacccctaatggcacaggaggaaattctgtcttctagtgcacgtgatttcagaactgcaatggtgagtaaaaatagcaagcctcaagctactgcaatgcatgtgggagctatagaaattatcattg

SEQ ID NO: 61924 - DNA, 256 bp, Glycine max
  Clone ID: 700762842H1
aaaagctgatgtgcctaccatagcacagattgaagagttccattcgatgcagaggatgatgaatgctcctgattcaaatgataatattgatctactgttgagcattgatttgttgggtttacaaggagcaggtaaagcttttccaaacaagattgtttttgatgataagcttgtgttggctaacacacaagaattctttgatggaaattttccagtggattcttggttaccaatttttgtgaattgtctttatcct

SEQ ID NO: 61925 - DNA, 257 bp, Glycine max
  Clone ID: 700762845H1
actcgccatacccgttaacaagcctggtagatttgagagtttcttcctatctagcactgaagctcaacaatcctacttgcaaggattcagcaggaacattttagaggcctcctacgataccaaattcgaggagataaacaaggttctgtttagtagagaggaagggcagcagcaaggggagcagaggctgcaagagagcgtgattgtggaaatctcgaaggaacagattcgggcactgagcaaacgtgccaaatcta

SEQ ID NO: 61926 - DNA, 250 bp, Glycine max
  Clone ID: 700762849H1
agacaccaggggttcaccaggggccagcctgtttcgacgctctgggtgcgaactcatagaatccgctggcttcccctactgcatcaccagtggcttctccatcgccgcttccaggttggctctgcccgacaccggcttcatctcctacggcgaaatgctggagcagggccaactcatcacccaagccgtttccattcccgtcattggcgacgcgacaacggctacggcaatgccatgaacctcaagcgaa

SEQ ID NO: 61927 - DNA, 249 bp, Glycine max
  Clone ID: 700762850H1
ggagctggtgcaaagaatgctattctcatgaatatgccaaatgctgttctttcaatgtggagatattttgttggagatctcgtctttgaagtttctaagatgacttctccctacattaaatgtacagtctctttcttcatagcatttggaaatttggctgatgacaccatcaattttgaggcttttccccacaagctggtgcagtttggagagattcaggaaaaagttgtattgaaattttcaccagag

SEQ ID NO: 61928 - DNA, 254 bp, Glycine max
  Clone ID: 700762851H1
ctctagggttatcatttctccatttccattttctctctcacttttcaagaatcgtaagctatgggaaagtcttacccaactgtgagtgctgattaccagaaggccgttgagaaggcgaagaagaagctcagaggcttcatcgctgagaagagatgcgctcctctaatgctccgtttagcatggcactctgctggaacctttgacaagggcacgaagaccggtggacccttcggaaccatcaagcaccctgccga

SEQ ID NO: 61929 - DNA, 254 bp, Glycine max
  Clone ID: 700762852H1
aatttctcattctcccatttcctctcagaaccctcgatcactcccacgcgctcctatatcctctccttcaccgtcgctctctccaacgatcacaacaacatcgtcatcccatggcaaacgccgcatctggtatggcagtccatgatgactgcaagttaaggtttttggagctgaagacaaagaggacacaccgtttcatagtttttaagattgaggagcagcagaagcaggtcattgtggagaagctggtgagc

SEQ ID NO: 61930 - DNA, 255 bp, Glycine max
  Clone ID: 700762853H1
aaaatgaccaagttcacaatcctcctcatctctcttctcttctgcatcgcccacacttgcagcgcctccaaatggcagcaccagcaagatagctgccgcaagcagctccagggggtgaacctcacgccctgcgagaagcacatcatggagaagatccaaggccgcggcgatgacgatgatgatgatgacgacgacaatcacattctcaggaccatgcggggaagaatcaactacataaggaggaacgaaggaaaa

SEQ ID NO: 61931 - DNA, 212 bp, Glycine max
  Clone ID: 700762855H1
cttcataaacgccgcccaaaaccatttatagggtttacttttctttgccaagaaaatgagagagtgcatttcaatccacattagtcaggccgctatccaggtcggaaacgcatgctgggaactctattgccttgaacacggcattcagcccgatgggcagatgccgagtgacaagaccgttggaggaggagacgacgccttcaacacattct

SEQ ID NO: 61932 - DNA, 250 bp, Glycine max
  Clone ID: 700762856H1
cattggtccttacagactcatcagtcatcaccatggccaagctagttcattcactttagtttctgattttcagtggctgctgcttcgctttcagttccaaagagcagcctcaggaaaacgagtgccagatccaaaaactcaatgccctcaaaccggataaacgtatagagtcagaaggagggctcattgcgacatgggaccctaacaaaaagacattccagtgtgccgatgatgccctctatcactgcac

SEQ ID NO: 61933 - DNA, 254 bp, Glycine max
  Clone ID: 700762857H1
caacgacgacagatactcctacagacttcaatctggtgatgccctgagagtcccctcaggaaccacatactatgtggtcaaccctgacaacaacgaaaatctcagattaataacactcgccatacccgttaacaagcctggtagatttgagagtttctcgcctatctagcactgaagctcaacaatcctacttgcaaggattcagacggaacattttagaggcctcctacgataccaaattcgaggagataaac

SEQ ID NO: 61934 - DNA, 256 bp, Glycine max
  Clone ID: 700762859H1
caaatatttgtcaatattgaaccatttgaggttctacttgccagaactgtatccaaagctgcataaaattttgtttttggatgatgacatagtggttcagaaggacctcactgggttatggaagattgatatggatggcaaggtgaatggagcagtagaaacatgttttgggtcattccatagatatgcacagtacatgaatttctctcaccccttgattaaagcaaagtttaatccaaaggcttgtgcatgggct

SEQ ID NO: 61935 - DNA, 255 bp, Glycine max; identical to SEQ ID NO: 55764
  Clone ID: 700762860H1

SEQ ID NO: 61936 - DNA, 256 bp, Glycine max
  Clone ID: 700762861H1
ctcgagccgcaagcttactggtgctcaggttcttctcagtcgtttgaggttgttcctacagtcctggttatccctatgaagaaattttaagcacatttcacaatcagaccggcatagtcatgtgctcctacctcccaatgttcaccagctttaatagaacaaggggtggcttgattcaattgaaccatggcaggcctcagcctctccaatatgttgtcaatgcagcctttttggctgctctttacagtgattatct

SEQ ID NO: 61937 - DNA, 255 bp, Glycine max
  Clone ID: 700762862H1
gctttggttctgaatctgaggaagacatgggtggtggcttatactctgatgaggatggtgacttaaatgaagaatattcatttaggaaaaataaagggaacaaaggtgatccttgcagacaaaataaggggaatagacacgattctggaagaaggaactttaccaaagacaggaagtcaggatctattggtggtcgccgagcaaatatgctcagtgatgattttgctggatcatcccagcagtcttataggaaca

SEQ ID NO: 61938 - DNA, 255 bp, Glycine max
  Clone ID: 700762864H1
caagcttgttctttccctttgtttccttcttttcagtggctgcttcgctctgagagagcaggcacagcaaaatgagtgccagatccaaaagctgaatgccctcaaaccggataaccgtatagagtcggaaggtgggttcattgagacctggaaccctaacaacaagccattccagtgtgccggtgttgccctctctcgctgcacccttaaccgcaatgcccttcgtagaccttcctacaccaacggtccccagga

SEQ ID NO: 61939 - DNA, 245 bp, Glycine max
  Clone ID: 700762865H1
tacgagttctttgctaatcgacaacttgtaacaatattttcagcacctaattattgtggggagtttgacaatgctggtgctatgatgagtgttgatgagacgctaatgtgctctttccaaatattaaagccagctgataaaaaagcaaagctcaattttggaagtacaaccactgctaagcctggaaactctccagcaggtgtaaaggttggaagatattagtccttcctggatgcgaagtgtga

SEQ ID NO: 61940 - DNA, 250 bp, Glycine max
  Clone ID: 700762872H1
gtctttgaacactcatcaccatggccaagcttgttctttccctttgtagccttcttttcagtggctgcttcgctctgagagagcaggcacagcaaaatgagtgccagatccaacagctgaatgccctcaaaccggataaccgtatagagtcggaaggtgggttcattgagacctggaaccctaacaacaagccattccagtgtgccggtgttgccctctctcgctgcacccttaaccgcaatgcccttcg

SEQ ID NO: 61941 - DNA, 245 bp, Glycine max
  Clone ID: 700762873H1
cttgaatctcgaaggaatcaagtgggaacttctcccttgctctctttagggaagtaatagtaacggaagaacccaagggagcaagcttttagttagttagttaattaattaattaattaattaattaatatttgttattaattttgtttttgaccggttaggatgatgatagtattattattattattatttttttatcatcgagaatgatagtatgtgataatttataagtttattgtatggtt

SEQ ID NO: 61942 - DNA, 248 bp, Glycine max
  Clone ID: 700762874H1
gttggtttggtgatgttttacaggtgtagcagcaaggatcctggttatatcaggatgaatatgcatgacaatcaggatacaaaagatgacgagcctctcttgaagattgagataaataatcctgctttgctagctggaaattggtcccagctttgtgcaacatgcaagattgtcaggcctcttcgagcaaaacactgttccacctgtgatcgttgtgtggaacaatttgatcaccattgtccttgggt

SEQ ID NO: 61943 - DNA, 254 bp, Glycine max
  Clone ID: 700762875H1
cttaaacactcatcagtcatcaccatggccaagctagttttttccctttgttttctgcttttcagtggctgctgcttcgctttcagttccagagagcagcctcagcagaacgagtgccagatccaaaaactcaatgccctcaaaccggataaccgtatagagtcagaaggagggctcattgagacatggaaccctaacaacaagccattccagtgtgccggtgttgccctctctcgctgcaccctcaaccgcaa

SEQ ID NO: 61944 - DNA, 253 bp, Glycine max
  Clone ID: 700762877H1
gagatgaggaaatcatgtggcttcttcttcttgctcctcctccttgtctttgcttcccaggtggtggtgcagacggagggaagagtgtgtgagtcacaaagccacgggttccatggtttgtgtaatagagaccacaactgtgctttggtctgcaggaacgaaggtttctccggtggcaggtgcaaaggcttccgccgccgctgcttttgcaccaggatttgttgagatctcatcaaacactactcttgccatg

SEQ ID NO: 61945 - DNA, 254 bp, Glycine max
  Clone ID: 700762878H1
aggacatcaaagtacttttagcaagatatgagtccaaccctgagtccgaggcacagttgaaattgcttttacctcagctagtttctacatttggaggaaataaatcagtcactgaaattattgaggagctaaaaaaacaccagtcaagcactgaccctaatgtcgtggagtgggctaatgaagctctccaaggcctcagaaaaggtgctcctttttcccttttacttgaccaacaagtacttctcttcggttgc

SEQ ID NO: 61946 - DNA, 251 bp, Glycine max
  Clone ID: 700762879H1
cgttaacacttccttagttcaatatggggacgcccttcactctctctctgtcttccctttgcttgctactcttgtcgagtgcatagctttgctatgagctccagcaagctcaacgcgtgccaactcaacaacctcaacgcgttggaacccgaccaccgcgttgagtccgacggtggtttgattcaaacatggaactctcaacaccctgagctgcaatgcgccggtgtcactgtttccaaactcaccctcaa

SEQ ID NO: 61947 - DNA, 248 bp, Glycine max
  Clone ID: 700762880H1
tgttaacacttccttagttcaatatggggaaacccttcactctctctctttcttccctttgcatgctactcttgtcgagtgcatgctttgctattagctccagcaagctcaacgagtgccaactcaacaacctcaacgcgttggaacccgaccaccgcgttgagtccgaaggtggtttgattcaaacatggaactctcaacaccctgagctgaaatgcgccggtgtcactgattccaaactcaccctc

SEQ ID NO: 61948 - DNA, 252 bp, Glycine max
  Clone ID: 700762881H1
caggcaagccccactcaaccaccacacctctcctcgttcacgctacccctttctgctcttcttctacctttcaagttttaaaagtataaagatggcagagacattcctatttacctcagagtcggtgaacgagggacaccctgacaagctctgcgaccaaatctccgatgctgtcctcgacgcttgcctcgagcaggacccagacagcaaagttgcctgcgaaacatgcagcaaaaccaacttggtcatggt

SEQ ID NO: 61949 - DNA, 247 bp, Glycine max
  Clone ID: 700762882H1
gttcaatatcctagtataccttaataaataatttaagatactatgatgagagcacggttcccattactgttgctgggacttgttttcctggcttcagtttctgtctcatttggcattgcttactgggaaaaagagaaccccaaacacaacaagtgtctccagagttgcaatagcgagagagactcgtacaggaaccaagcatgccacgctcgttgcaacctccttaaggtggagcaagaagatgtga

SEQ ID NO: 61950 - DNA, 249 bp, Glycine max
  unsure (1)..(249): unsure at all n locations
  Clone ID: 700762883H1
ttttgcctttctctctcttcactgggaggagagagagagagagatagacggatgaagtgacagactggcattaaggaggacgaccctttggtgtttggatcttcaaggaagagagacccttgggatttcgtcaccatgagtctcttcggtcttggaaacagagaccaaaacacatatccagncaaaaagagtgctccatctggaagtaagggtgctcaacttcaaaaacacattgatgccacgttgggt

SEQ ID NO: 61951 - DNA, 250 bp, Glycine max
  Clone ID: 700762884H1
ccataacactttctctctctttgccggtgccacaatccctctctctctccgacgtacatttccatctttttagggtttcatttcatggactccgattcctggatttccacgcgcctctcttccccttcacgccgccaccattatcgatctgatctgtacgcggaggagagtgaagggaacgatgatttcagggcggagtttctatgccctttctgcgccgaggattacgacgtcgtttccctctgttgcc

SEQ ID NO: 61952 - DNA, 221 bp, Glycine max
  Clone ID: 700762885H1
gttatttctcagcgcgtaaagcatggctttgttggtggagaaaaccacgagtggtcgcgagtacaaggtcaaggacctttcccaggccgacttcggccgcctcgagatcgagctggccgaggttgagatgcccggcctcatggcctgtacggaccgagttgcggacccctacccagtcccttgcaacgggggacccgcactcaccgagctccctcgcacat

SEQ ID NO: 61953 - DNA, 249 bp, Glycine max
  Clone ID: 700762888H1
taagaaatgaagagtactatcttctttgctctctttctagtttgtgccttcaccatctcatacctgccttcagccaccgctcagttcgtgctcgacactgatgatgatcctcttcaaaacggtggcacatactatatgttgccagttatgagaggaaagggcggtggaatagaagtagattcaactggaaaagaaatatgccctctcactgttgtgcaatcacccaatgagctcgataaggggattgga

SEQ ID NO: 61954 - DNA, 250 bp, Glycine max
  Clone ID: 700762889H1
gccgcggcgatgacgatgatgatgatgacgacgacaatcacattctcaggaccatgcggggaagaatcaactacataaggaggaacgaaggaaaagacgaagacgaagaagaagaaggacacatgcagaagtgctgcacagaaatgagcgagctgagaagccccaaatgccagtgcaaagcgctgcagaagataatggagaaccagagcgaggaactggaggagaagcagaagaagaaaatggagaagga

SEQ ID NO: 61955 - DNA, 251 bp, Glycine max
  Clone ID: 700762890H1
caaacttattaacactttccttagttcaatatggggaagcccttcttcactctctctctttcttccctttgcttgctactcttgtcgagtgcatgctttgctattacctccagcaagttcaacgagtgccaactcaacaacctcaacgcgttggaacccgaccaccgcgttgagtccgaaggtggtcttattgaaacatggaactctcaacaccctgagctgcaatgcgccggtgtcactgtttccaaacg

SEQ ID NO: 61956 - DNA, 121 bp, Glycine max
  Clone ID: 700762891H1
cagaaaacaaaggctttagcttgccttttgttcactgtaaaataataatgtaagtactctctataatgagtcacgaaacttttgcgggaataaaaggagaaattccaatgagttttctgtc

SEQ ID NO: 61957 - DNA, 249 bp, Glycine max
  Clone ID: 700762892H1
gatatcatcacattgcaaagaaaatacacattacattactaagtctttgttcatttgagtagtagtgatggctagcctcaaggttgcatgtgtggttgctgtgatgtgcatggttgtggtggccatgagtgctgcacccatggcacaggccgcaatcacgtgcgggcaggtcgccggcgacatgtctccgtgcttcagttatcttcgaagcggcggaaaaccgtcgcaggcctgctgcaacggagtgaa

SEQ ID NO: 61958 - DNA, 248 bp, Glycine max
  Clone ID: 700762893H1
agcaaaatgaccaagttcacaatcctcctcatctctcttctcttctgcatcgcccacacttgcagcgcctccaaatggcagcaccagcaagatagctgccgcaagcagctccagggggtgaacctcacgccctgcgagaagcacatcatggagaagatccaaggccgcggcgatgacgatgatgatgatgacgacgacaatcacattctcaggaccatgcggggaagaatcaactacataaggaggaa

SEQ ID NO: 61959 - DNA, 252 bp, Glycine max
  Clone ID: 700762894H1
tagacacgtaatcaaaaccatgcagatacgaacctgccactccatcaccacccaaacccttccacaacttccgtgttcttctagaaaagcccaccaccgccaccttcttccgccgttaaacgctgcggtttccgcggcgccgttcaaagcccggaaggcccactcaatgcctccagaaaagaaagaaattttcaagtccttggagggatgggcctcggagtgggtcctaccgctgctgaagcccgtggagca

SEQ ID NO: 61960 - DNA, 249 bp, Glycine max
  Clone ID: 700762895H1
aacacttccttagttcactatggagacgcccttcactctctctctttctacccttagcttgctactcttgtcgagtgcatgctttgctattagctccagcaagctcaacgagtgccaactcaacaacctcaacgcgttggaacccgaccaccgcgttgagtccgcaggtggtatgatgcaaacatggaactctcaacaccctgagctgacatgcgccggtgtcactgtttccaaactcaccctcaaccg

SEQ ID NO: 61961 - DNA, 194 bp, Glycine max
  Clone ID: 700762896H1
gttcaatatcctagtataccttaataaataatttaagatactatgatgagagcacggttcccattactgttgctgggacttgttttcctggcttcagtttctgtctcatttggcattgcttactgggaaaaagagaaccccaaacacaacaagtgtctccagagttgcaatagcgagagagacgcgtccaggaa

SEQ ID NO: 61962 - DNA, 282 bp, Glycine max
  Clone ID: 700762901H1
ctcgagccgtttttaatgagatgctcattagatatagctatgaaaaattactgcgccaggctaaagctccaagtatgtttttacaatccttcaaaaattttgtttctttgtgtgtgtatggtgatgataacttaattagtgttcatgaatacgtcaagccttactttagtggttctaaattgaaaagctttctagctggtcataatatcaccattactgatggtattgacaagactagtgcaactttgcaatttagaaagttagcagattgtgattttctca

SEQ ID NO: 61963 - DNA, 280 bp, Glycine max
  Clone ID: 700762904H1
gtctgaactcaattgtgagtgaacaggggtttctcgcatttacttcactttgcacttcacttctctctctctctcttgggttgcattgaagctttatgtttgagattctgaagtgaggagcaactttcttcttaatgttcactttgggattattcattgtgttggttggtgacaagatgcaactatgaagagatttctctctcacagttttctccttcaaattgctgtctctcttcttcttgttcttcttctgtttatgaccaagtctcagggctctcca

SEQ ID NO: 61964 - DNA, 275 bp, Glycine max
  Clone ID: 700762905H1
ctcgagccgcactcatcaccatggccaagcttgttctttcactacgagtccatcatttcagtggctagttcgttctgagaaagcatgtacagcacaatgagtgccagatccaaaagctgaatgccctcaaaccggataaccgtatagagtcggaaggtgggttcattgagaactggaatcctaacaacaagcaattccagtgtgtcggtgttgacctctctcgctgcacccttaacagtaatgccctacgtagatcttcctacactaacggtccc

SEQ ID NO: 61965 - DNA, 281 bp, Glycine max
  Clone ID: 700762906H1
caaaagacgagaaactgaaataccaggattgagcccatatgcacaactattggctcaatcctggtatttcaggttctcgtctattgggacacattcatcagtccatttaacagcaaactgtttggaatcaaatggcaacagtgagatgaccattgaattttgattctagcaagcagagcttatgtcaatactctattgatcttcttggtggaggaattttagtggacaaaactggagattggatcacacttatacaaaattctccaattagtaacttgttg

SEQ ID NO: 61966 - DNA, 281 bp, Glycine max
  Clone ID: 700762907H1
ccgattgctagaatggaatttcgatgctcagtcatctcttttaccattctcttctctcttgctcttgcaggagagagccatgtccatgcatcgttacctgaggaagattattgggaagctgtttggccaaacactcccattcccactgcactgcgagagcttctaaagcctctccctgcaggtgtcgaaatcgatgaactccctaagcaaattgatgatacacagtacccaaaaacattcttctataaagaagaccttcatccaggcaaaacaatgaaagt

SEQ ID NO: 61967 - DNA, 279 bp, Glycine max
  Clone ID: 700762908H1
cttttctcttctccctttttctctctgtctctctctctcggtctcgctcttcttctcatcaagcacagagttacagactcacagatcttccgattctctttcgtcttggtttatgagctcgaaggagagacccactcttggtggcacgcggattaagacccgcaaacgaaatattgctgcgccgctggaccctgcagcattctcggatgcagtggtccagatttatttggataatgctggtgatctggaacttattgctaagagtattgaatcttcaga

SEQ ID NO: 61968 - DNA, 285 bp, Glycine max
  Clone ID: 700762909H1
aggaaaggaaagtgaagaagaagaagaagaccaagacgaggatgaggagcaagacaaagagagccaagaaagtgaaggttctgagtctcaaagagaaccacgaagacataagaataagaacccttttcacttcaactctaaaaggttccaaactctcttcaaaaaccaatatggccacgttcgcgtcctccagaggttcaacaaacgctcccaacagcttcagaatctccgagactaccgcattttggagttcaactccaaacccaacacccttcttctccccca

SEQ ID NO: 61969 - DNA, 271 bp, Glycine max
  Clone ID: 700762910H1
gattcaaatgataatatcgatctactgttgagcattgatttgttgggtttacaaggagcaggtaaagcttttccaaacaagattgtttttgatgataagcttgtgttggctaacacacaagaattctttgatggaaattttccagtggattcttggttaccaatttttgtgaattgtctttatcctgtaagtcaattaccttcagaagctgtcgttgtaaatgttacatgtggtagtggacgtggtggtttaccaccactgcttggattag

SEQ ID NO: 61970 - DNA, 281 bp, Glycine max
  Clone ID: 700762911H1
gagaaagagaaagagcatttagagagtgttgagttgtgtgacatgtaacaccaaactcactcaaacctacctttgtttttctccttctttttcttctcagtttcattctcttgctcatggacatggatgtttgccgaaatatatcagttctctcaagtgagtgtcagcaagagcttcccacccttgatgaccttttctgtcatcagaacacggaagtggattttggcatggaatggttatcagtgtttgtggaagactgtttctctagtaggccaagttgc

SEQ ID NO: 61971 - DNA, 271 bp, Glycine max
  Clone ID: 700762912H1
ctcgctcaaaaaaattttccgagaaaacaaaagaaaagaaaagaaacccttccttccgttgttttctgtatatatccatcctttttccttgcacccccaacatgataccctcggaacattattggacccaaacaagacctaaccattttttgggtcatggatccgcgacgtgctcaacgagcggcgcattgaccctaaggtccgtagggtcgggttcttcgctccacccgaacccgacccgatctaattcgaagtctctccctcggcaaac

SEQ ID NO: 61972 - DNA, 273 bp, Glycine max
  Clone ID: 700762914H1
ttaacacttccttagttcaatatggggaagcccttcactctctctctttcttccctttgcttgctaactcttgtcgagtgcatgctttgctattagctccagcaagctcaacgagtgccaactcaacaacctcaacgcgttggaacccgaccaccgcgttgagtccgaaggtggtttgattcaaacatggaactctcaacaccctgagctgaaatgcgccggtgtcactgtttccaaactcaccctcaaccgcaatggcctccacttgccatc

SEQ ID NO: 61973 - DNA, 270 bp, Glycine max
  Clone ID: 700762915H1
gtattaaagaatttaagatatactatgatgagagcgcggttcccattactgttgctgggagttgttttcctggcatcagtttctgtctcatttggcattgcgtattgggaaaagcagaaccccagtcacaacaagtgcctccgaagttgcaatagcgagaaagactcctacaggaaccaagcatgccacgctcgttgcaacctccttaaggtggaggaagaagaagaatgcgaagaaggtcaaattccacgaccacgaccacaacacccg

SEQ ID NO: 61974 - DNA, 279 bp, Glycine max
  Clone ID: 700762917H1
tgtcaattgccaggagacgctttaggccaggtgttccgcgccactcttgatcttctggttgcatacaaggatcaagttgcagaagctgcaaaagaggaagaagctgaagatgatgatgatgatgatatggatgactttcaaactgatgatgaagatgaggatgacaatggttctgacaaggaaatgggaattgatgctgaggatggggatgaagctgacagtagtaaatttacaaagttggctgaacagacaaagacattcaggcccaatgatgaggat

SEQ ID NO: 61975 - DNA, 279 bp, Glycine max
  Clone ID: 700762918H1
tcaaggtttcagcttttgagtaccactaccaatggtgattttgttcaagggaaagatctcgcaatggttaaagttaatgtagcatgtgctgctgttggtctgacatcaagttacactccaactccattgttggaatctggtttgcaaaaagacagagggttaattgtggagtattttggaaggatgtcttacgttgctcataacgtctttcagccccaagagaaagatttgttggagggaaatttttcctttgatattaaatctctctctagattggaa

SEQ ID NO: 61976 - DNA, 278 bp, Glycine max
  Clone ID: 700762919H1
taaaattcttccaccaagttatgggtttccttgtgttgcttcttttctccctcttaggtctctcttctagttccagcatatcaactcatcgttccatattggaccttgacctaaccaagtttaccacacagaaacaggtgtcttcactgttccaactatggaagagtgagcatggacgtgtctaccataaccacgaagaagaggcaaagagacttgagattttcaagaataacttgaactatatcagggacatgaatgcaaacagaaaatcaccccat

SEQ ID NO: 61977 - DNA, 277 bp, Glycine max
  Clone ID: 700762920H1
ttgtcctgcaagatccagccccgcacccacgacaatcagctctcctacgtcgtcggcgacaccacgatcctcgccgtcgaccgctctgttatgttcctcgccttcctctccaagctcgccggcgaagacctcgacgctctcatctccgtcaccaacgacgacgacctcgaacacatgatgctcgactacgagagactctatcgccctaacctaaaacctattagaatgagactcttccttttcacactctctaattaataacctaattcctctttct

SEQ ID NO: 61978 - DNA, 276 bp, Glycine max
  Clone ID: 700762921H1
caacacatcatagcactgaaccaacggcggccgaaaccaccgttcgacgccgatctttttccaccgtttcttcaaagtttacaagaaagtcatggcaatgaaccatgccaggtctattagacacattcttaccaccaaagaggtagttggggttgcatgccaacgaactttcgccaccggtaaagcaaagaaaggatctaaagggggtacagctgctgatgcacccaaagcatcaactcttagcaaggaagtcaagtcaagtacagttgtaggtgc

SEQ ID NO: 61979 - DNA, 276 bp, Glycine max
  Clone ID: 700762922H1
aggcattcctgctgatgttcttgcaaagcgagctcatgaatttgaaaaacatgttgctcatgaaagcctcaaggatcaaattcctgctgttgacaagttgtattctactaaggttaataagtttgcaaaaattatgaaccttagacaaagtgttgttggtgatcttaaacttcttactgatgggaagttgtatgagggtaagcatattcctgtatctaatattagtgcaggggaaaatcatgtagttcaaatacccctaatggcacaggaggaaat

SEQ ID NO: 61980 - DNA, 278 bp, Glycine max
  Clone ID: 700762923H1
ccttgctctatactgcacagtacacacactagaagaataatggcttccatcctccactactttttagccctgtctctttcttggtctttgctcttcttctgatccgactcagtcacccctataaaaccaataaaccttgttgttctacccgttcaaaatgatggttccacagggctccattggtccaacctccaaaaaagaacgcctctaatgcaagtaccagtcctggtggacctcagtggaaatcacttgtgggttaactgtgagcagcagtactc

SEQ ID NO: 61981 - DNA, 279 bp, Glycine max
  Clone ID: 700762924H1
ctccattggtccttaaacactcatcagtcatcaccatggccaagctagttttttccctttgttttctgcttctcagtggctgctgcttcgctttcagttccagagagcagcatcagcaaaacgagtgccagatccaaaaactcaatgcactcaaaccggataaccgtatagagtcagaaggagggctcattgagacatggaaccctaacaacaagccattccagtgtgccggtgttgcactctctcgctgcaccctcaaccgcaacgctcttcgtagac

SEQ ID NO: 61982 - DNA, 271 bp, Glycine max
  Clone ID: 700762925H1
ctagtacaccgtattaaagaatttaagatatactatgatgagagcgcggttcccattactgttgctgggagttgtgttcctggcatcagtttctgtctcatttggcattgcgtattgggaaaagcagaaccccagtcacaacaagtgcctccgaagttgcaatagcgagatagactcctacaggaaccaagcatgccacgctcgttgcaacctccttaaggtggaggaagaagaagaatgcgaagaaggtcaaattccacgaccacgacca

SEQ ID NO: 61983 - DNA, 222 bp, Glycine max
  unsure (1)..(222): unsure at all n locations
  Clone ID: 700762926H1
ctcaaaattgatggtggtcacagccaatatgggctttcccaaagctggtgcagtntggagagattccaggacaaagttgtattgaaattttcaccagaggaatttcttacagcttggtcaactcaggtgcgtcctgcaacaactctgttggctgatgggtgcccatatttgtatgctatggtgcatgatagttcagtgtctacaataccaggtgattttgtc

SEQ ID NO: 61984 - DNA, 272 bp, Glycine max
  Clone ID: 700762928H1
accaaagccttcctagaacgaaaaaaaaaagaagagcaattttccctcaccaaagaagaagaagcaaacaatggccgatcaacttaccgatgaacagatctccgagttcaaggaagccttcagcttgttcgacaaggacggcgatggttgcatcacaaccaaggagcttggaactgttatgcgttcattggggcaaaacccaactgaggcagagctccaggacatgatcaatgaagtggatgctgatgggaatggtaccattgacttccctg

SEQ ID NO: 61985 - DNA, 270 bp, Glycine max
  Clone ID: 700762929H1
cgacaaccaattcacatcactgaaggaaattatgtcagaaagcaagatgtcagcattgaatatgatgcatgtacaattccagatgattgtggttcattggttgttgccaaggttggaaatcacaaacaaattgttggtttccatgttgctggaagcaaaggaagactgggatatgcttcattgataccatatgttgagccagttgtgcaagctcaaagtgctgaagtttactttgacttcttccctgtggaggttgatagtcaagaggga

SEQ ID NO: 61986 - DNA, 274 bp, Glycine max
  Clone ID: 700762930H1
aagaaagatgtttggagagttgaatgtggaatcccttctggatttccgctcacagttatttgcaatagcatttttaatgagatgctcattagatatagctatgaaaaattactgcgccaggctagagctccaagcatgtttttacaatccttcaaaaattttgtttctttgtgtgtgtatggtgatgataacttaattagtgttcatgaatatgtcaagccttactttagtggttctaaattgaaaagctttctagctggtcataatatcacca

SEQ ID NO: 61987 - DNA, 273 bp, Glycine max
  Clone ID: 700762931H1
attgtctttgaacactcatcaccatggccaagcttgttctttccctgtgtttccttcttttcagtgcgctgcttcgctctgagagagcaggcacagcaacatgagtgccagatccaaaagctgaatgccctcaaaccggataaccgtatagagtcggaaggtgggttcattgagacctggaaccctaacaacaagccattccagtgtgccggtgttgccatctctcgctgcacccttaaccgcaatgcccttcgtagaccttcctacaccaag

SEQ ID NO: 61988 - DNA, 275 bp, Glycine max
  Clone ID: 700762932H1
taaaattactcagtctaacattgctcttccctagaacacagtttgatgagctatcctgcgcagtgatccgattggcagatttgctgacatggggccattttacagctcgtgttgcattgcagcgcactcatcgtgattaacggaatgattacaatggtggccacagttggtattcctgagaatacacgtatatcattggcctgtgctatgcatggtgcttccagggggcgttccagttctgatattgacaccatctgctcttcagactgtgagtt

SEQ ID NO: 61989 - DNA, 278 bp, Glycine max
  Clone ID: 700762933H1
caatccttcaacaccaacgaggaatagctgagaaacttcagtctccagacgacgaaaggaagcagatcgtaacagtggaaggaggtctcagcgttatcagccccaagtggcaagaacaacaagatgaagatgaagatgaagacgaagatgatgaagatgaacaaattccctctcaccctcctcgccgaccaagccatggaaagcgtgaacaagacgaggacgaggacgaagatgaagataaacctcgtcctagtcgaccaagccaaggaaagcgtgaa

SEQ ID NO: 61990 - DNA, 276 bp, Glycine max
  Clone ID: 700762935H1
gaaaaaaatggagaactatcagtacccggcgtcgtaccctgactccggcgagtcctccccgcgctcgcgcgagatcgacttcgagaacccgccgccgtgggacgagcagcagaaccaaaactacaaggccaagttcatgtgcagctacggcggcaagatccagccccgcacccacgacaatcagctctcctacgtcggcggcgacaccaagatcctcgccgtcgaccgatccgttaagttctccgccttcctctccaagctctccgccctctgcga

SEQ ID NO: 61991 - DNA, 266 bp, Glycine max
  unsure (1)..(266): unsure at all n locations
  Clone ID: 700762936H1
taaacactcatcagtcatcaccatggccaagctagttttttccctttgatttctgcttttcagtggctgctagttcgatttcagttccagagcgcagtgctaaaaanacgagtgccagatccaaaaactcaatgccctcaaaccggataaccgtatagagtcagaaggagggctcattgagacatggaaccctaacaagaagccattccagtgtgccggtgttgccctctctcgctgcaccctcaaccgcaacgcccttcgtagac

SEQ ID NO: 61992 - DNA, 85 bp, Glycine max
  Clone ID: 700762937H1
gaatatctggttgatgagtgaccttttgcatttgtgaactagtatgtaatattttattcacttaaatcaagcgcattactatgtg

SEQ ID NO: 61993 - DNA, 273 bp, Glycine max
  Clone ID: 700762938H1
gacctagacaagaagaaccacgtgaaagaggatgcgagacaagaaacggggttgaggaaatatctggcacttgaagcttcacgagaacattgctcgaccttcacgcgctgacttctacaaccctaaagctggtcgcattagtaccctcaacagcctcaccctcccagccctccgccaattccaactcagtgcccaatatgttgtcctctacaagaatggaatttactctccacattggaatctgaatgcaaacagtgtgatctatgtgactcg

SEQ ID NO: 61994 - DNA, 276 bp, Glycine max
  Clone ID: 700762941H1
gaggcttttccccacaagctggtacagtttggagagattcaggaaaaagttgtattgaaatgttcacaagaggaatttcttacagcttggtcaacccaggtgcgtcctgcaacaactctgttggctgatgggtgtccatatttgtatgctatggtgcatgatagttcagtgtctacaatactaggtgattttgtcattggtgttaagttgacaaccataaacaatatgtgtgcatatgggctcaatcctggtatttcaggttctcgtcttttgggc

SEQ ID NO: 61995 - DNA, 266 bp, Glycine max
  Clone ID: 700762942H1
accgattgctagaatggactttcgatgctcagtcatctcggttaccattctcgactctcttgctcttgcaggagagagtcatgtccatgcatcgctacctgaggaagattatcgggaagctgttgggccaaacactcccattgccactgcgctgcgagagcttctgaatcctctccctgccaggtgttgaaatcgctgcactcgctaggcaagttgcatgatacacagtacccagaaacattctgctatagagacgatcttcatcc

SEQ ID NO: 61996 - DNA, 281 bp, Glycine max
  Clone ID: 700762943H1
gagaaagagaaagagcatttagagagtgttgagttgtgtgacatgtaacaccaaactcactcaaacctacctttgtttttctccttctttttcttctcagtttcattctcttgctcatggacatggatgtttgccgaaatatatcagtttcttcaagtgagtgtcagcaagagcttcccacccttgatgaccttttctgtcatcagaacacggaagtggattttggcatggaatggttatcagtgtttgtggaagactgtttctctagtaggccaagttgc

SEQ ID NO: 61997 - DNA, 280 bp, Glycine max
  unsure (1)..(280): unsure at all n locations
  Clone ID: 700762944H1
tgaaattttgataaaccgcgatcacaggttgccgcaccttaaaaccggaaacaaaagcaatcgttacttgatttcaagaatctctcaatttcttcctacttctttgtgtacgatttcttaagggaaagaaaatcactctctgtgctggccacagacttcgtgaatcattttcttttccactcttagtataaccggtgnacactctcctatttgatataggacttcgtgtcagatttaaacttcttctgtttctttctcagttctctgcttaatttcaagt

SEQ ID NO: 61998 - DNA, 282 bp, Glycine max
  unsure (1)..(282): unsure at all n locations
  Clone ID: 700762945H1
cggctcgagttttgataaaccgcgatcacaggttgccgcaccttaaaaccggaaacaanagcaatcgttacttgatttcaagaatctctcaatttcttcctacttctttgtgtacgatttcttaagggaaagaaaatcactctctgtgctggccacagacttcgtgaatcattttcttttccactcttagtttattcactgaacactctcctatttgatataggacttcgtgtcagatttaaacttcttctgtttctttctcagttctctgcttaatttcaa

SEQ ID NO: 61999 - DNA, 283 bp, Glycine max
  Clone ID: 700762946H1
aaccattctgcgtagtgatctattggcaaattttttgacagagggcaattttagagcaagtgttgatttgcagcgcactcatcgtattagaggaatgattaaaatggtggccacagttggtattcctgagaatacaggtatatcattggcctgtgctatgaatagttcttttagggggcgcgccagttctgatatttacaccatctgctctcaagactgtgaattgtggaatcctgcttgcacaaaagcaatgactatgtcatttaatccaaacccgtgttct

SEQ ID NO: 62000 - DNA, 283 bp, Glycine max
  Clone ID: 700762947H1
ctcgagccgcttgaaagtttttctaatccatcaaataaagaccagcttgaagaaagaatggcacgcatcaaagaggatccatctctgaaacatattttggaggagatagagactggcggtcctgctgctatgatgaggtactggaataatgaggaggttttgcagaagttgggacaagccatgggtcttgccaattcgggagatgcaggtgcctctgctgaaaattctggggcagatgagaccgaagatttgggaaatgaagatgaatcaattgttcatcata

SEQ ID NO: 62001 - DNA, 249 bp, Glycine max
  Clone ID: 700762948H1
ggcgtggcacaccacctggtgaacagcagcgcaactcatacatgatggcagagatgtgtccagtgatataaagtcaagaaactcagatatgagctggtcacaccagccacaaaatactcatgctcagtgggagcataatttggattatttatctgaaaccagagatttgactaagtggcaatcctagtggagatcccattaagaggcagctatctggaattttggacagtgaatttgaatccaggagaa

SEQ ID NO: 62002 - DNA, 274 bp, Glycine max
  Clone ID: 700762949H1
tggttaccaatttccgcgacttgtcgttatcctgtaagtcaattagctccagatccttgtgctgtctatgtagaatgttctagtggatcttgtggtttactcacctctgcttggattatttctgcagttaatggtcgctcctcagatatcaactggaatcaacgcacatcccatgggataggctggattattgattagcttactagagttggtcctcgaccagcagctttactggcaggccagtttggcgggaatgattaccttctgagttcta

SEQ ID NO: 62003 - DNA, 274 bp, Glycine max
  Clone ID: 700762950H1
taaaattcttccaccaagttatgggtttccttgtgttgcttcttttctccctcttaggtctctcttctagttccagcatatcaactcatcgttccatattggaccttgacctaaccaagtttaccacacagaaacaggtgtcttcactgttccaactatggaagagtgagcatggacgtgtctaccataaccacgaagaagaggcaaagagacttgagattttcaagaataacttgaactatatcagggacatgaatgcaaacagaaaatcacc

SEQ ID NO: 62004 - DNA, 272 bp, Glycine max
  Clone ID: 700762951H1
cgaacagcataatatacgcattgaatggacgggcattgatacaagtggtggattgcaacggtgagagagtgtatgatggagagctgcaagagggacgggtgctgatcgtgccacaaaactttgtggtggctgcacgatcacagagtgacaacttcgagtatgtgtcattcaagaccaatgatacacccatgatcggcactcttgcaggggcgaactcattgttgaacgcattaccagaggaagtgattcagcacactttcaacctaaaaagc

SEQ ID NO: 62005 - DNA, 272 bp, Glycine max
  Clone ID: 700762952H1
cttattaacactttccttagttcaatatggggaagcccttcttcactctctctctttcttccctttgcttgctactcttgtcgagtgcatgctttgctattacctccagcaagttcaacgagtgccaactcaacaacctcaacgcgttggaacccgaccaccgcgttgagtccgaaggtggtcttattgaaacatggaactctcaacaccctgagctgcaatgcgccggtgtcactgtttccaaacgcaccctcaactgcaacggcctccat

SEQ ID NO: 62006 - DNA, 271 bp, Glycine max
  Clone ID: 700762953H1
gaaaacagtcgaaaacaagatggaacacacagtttctgcgttgaggtctttgatcggatctcactctccgccggtggatgccatagtggtgccctctgacgattatcacctgagggaatatgtgtctgcacgagacaagcgccgcgaattcgtttccggcttcactggaagtgccggcttggcacttataacaaataaagaagcactgctgtggacggctggacggtattttttgcaggctgagacagaacttagtgctgggtggaagcta

SEQ ID NO: 62007 - DNA, 218 bp, Glycine max
  Clone ID: 700762954H1
aatacgacagctcctaactggatcaagatctcaactgaagttgtcgaaggcaatatccgcaatttgcgaagaaaggtctgaccccgtctcagattggtgtcattctcagagattctcacggtaatgctcacgtctatagcgtcactggcatcgagatccttcgcatcctcaaaggtcacggacttgcgcctgatgttcccgaggacctgtaccagttg

SEQ ID NO: 62008 - DNA, 268 bp, Glycine max
  Clone ID: 700762955H1
ctcgagccgctcgagccgctcgccttgcttgccctttgtcttccatactttcaagtcctttacgtgatcagctgcgcgttttgtgctgcttctgttgttattgccttggaagacttgcacaagaatggtgttctctacagaggtgtgtcacctgatgttttgatgttggaacaaactggacatatacagctggtggacttcagatttggaaaacagctttctggtgagagaacattcacaatttgtgggatggcagattcactggctc

SEQ ID NO: 62009 - DNA, 272 bp, Glycine max
  Clone ID: 700762956H1
tagaaggaaggtgacaatttggtcgtcgttggtacccagaggctcggacctgacccggatatggttcagaagcagatccggatcgtggatttcaggtccggacgccaggtttacgccggatcggcgttctcggtgtcgccatcgccgaccgcgctgcccttgccgtcgttttcgaagaagcagccggcggttgcggttgccgactccgcgacccgtgatctcaggcgtcttcttcggcttgaatgagccgattcgcgtccatttctgggttt

SEQ ID NO: 62010 - DNA, 275 bp, Glycine max
  Clone ID: 700762957H1
cttaattattaacacttccttagttcaatattggggaagcccttcactctctctctttcttcgctttgcttgctactcttgtcgagtgcatgctttgctattagctccagcaagctcaacgagtgccaactcaacaacctcaacgcgttggaacccgaccaccgcgttgagtccgaaggtggtttgattcaaacatggaactctcaacaccctgagctgaaatgcgccggtgtcactgtttccaaactcaccctcaaccgcaatggcctccactt

SEQ ID NO: 62011 - DNA, 273 bp, Glycine max
  Clone ID: 700762958H1
cagcaacgatgacgaagccagaggccccaagaccgtcaccaaaaggtacatcgcttcagagagggtgatttgatcgcagtgcctactggtgtagcatggtggatgtacaacaatgaagacactcctgttgttgccgtttctattattgacaccaacagcttggagaaccagctcgaccagatgcctaggagattctatcttgctgggcaacaagagcaagagtttctaaaatatcagcagcagcagcaaggaggttcccaaagccagaaagga

SEQ ID NO: 62012 - DNA, 278 bp, Glycine max
  Clone ID: 700762959H1
atgtctagtctatcttcttctccttcatttgcaagctacggtacccatcctggcgcggccccacttagccgaatttcatgcggtgccagacccaagaggaagaaaagcaaccacaattcggaagcgcaagagctggttcgtttgctcacgagcaagataagcaacgacaaagagcctctgctgaagacgctgaacaagtatgtcaagcaggtccgaacccaacattgctttttgctcttcgaagaactcgccaagcacgacaactggctccaatgcct

SEQ ID NO: 62013 - DNA, 243 bp, Glycine max
  Clone ID: 700762960H1
ctcttaagggtacttctatggtcactatagaccccgcactgacattcactggtgtgtggagaagtactcaccaagagctggagctggacaaattatcactcatctgtcccatctcagagatcacactgcactgatcttatgtgaaggggagggataggtgctcatctgcatggagagtaaccatgatgtctctgctgacagtgttgcgtgtaatgtgaaagagattgaataattggcatgtat

SEQ ID NO: 62014 - DNA, 275 bp, Glycine max
  Clone ID: 700762961H1
attgttgtgactcgttcttcttcgtcgttatcttcttcttttgttgtttgtgtgtttgtattctctctcacctgaaaatgtcttgctgcggtggtaactgtggttgcggaagcgcctgcaagtgcggcaacggctgcggaggctgcaagatgtacccagacttgagctacaccgagtcaaccaccaccgagaccttggtcatgggagtggcaccagttaaggctcaattcgagagtgctgaaatgggtgttcccgctgagaacgatggctgcaaa

SEQ ID NO: 62015 - DNA, 281 bp, Glycine max
  Clone ID: 700762963H1
atgggaaacaaaactacccttttgcttttgctctttgttctttgccatggagtggccacaacaacaatggacttccatgatgatgagggtggtgataaaaagtcaccaaaaagtttgtttttgatgagcaactccacgagggttttcaagactgatgcaggggaaatgcgtgtgctgaaaagccatggtggtaggatattttataggcacatgcacattggcttcatctctatggaaccaaagtccttgtttgttcctcagtacctcgactccaatctcat

SEQ ID NO: 62016 - DNA, 278 bp, Glycine max
  unsure (1)..(278): unsure at all n locations
  Clone ID: 700762964H1
ctgaggacaaggcgagtttatggtcacaacttcattagatntcatgtaataatctggaaatgcaagaagcttatcttgtcaatctcgtaaatgtgttacgagaattgtatttgcacagtccagaggaagctcgccaattgagaaggaaagctctctctcgtattgaatggctgcaaaaagctgatgtgcctaccatagcacagattgaagagttccattcgatgcagaggatgatgaatgctcctgattcaaatgataatatcgatctactgttgagc

SEQ ID NO: 62017 - DNA, 277 bp, Glycine max
  Clone ID: 700762965H1
ctctaccttgattcgcaacacttcctgagttccgtatggggcagcgcttcactctctctctttcttgcctttgcttgctactcttgtcgagtgcatggctttgctattagctccagcaagctcaacgagtgccaactcaacaacctcaacgcgttggaacccgaccaccgcgttgagtccgaaggtggtttgattcaaacatggaactctcaacaccctgagctgaaatgcgccggtgtcactgtttccaaactcaccctcaacagcaatggcctcc

SEQ ID NO: 62018 - DNA, 269 bp, Glycine max
  Clone ID: 700762967H1
gttcaatatcctagtataccttaataaataatttaagatactatgatgagagcacggttcccattactgttgctgggacttgttttcctggcttcagtttctgtctcatttggcattgcttactgggaaaaagagaaccccaaacacatcaagtgtctccagagttgcaatagcgagagagactcgtacaggaaccaagcatgccatgctcgttgcaacctccttaaggtggagatagaagaatgtgaagaaggtgaaattccacgacc

SEQ ID NO: 62019 - DNA, 269 bp, Glycine max
  Clone ID: 700762968H1
tgaaattttgataaaccgcgatcacaggttgccgcaccttaaaaccggaaacaaaagcaatcgttacttgatttccagaatctctcaatttcttcctacttctttgtgtacgatttcttaagggaaagaaaatcactctctgtgctggccacagacttcgtgaatcattttcttttccactcttagtttaatttgtgaacactctcctatttgatataggacttcgtgtcagatttaaacttctactgtttctttctcagttctctgtt

SEQ ID NO: 62020 - DNA, 229 bp, Glycine max
  Clone ID: 700762969H1
actgtttcacgttgttgttcccagcataaatagcagaaaatgagaaactctctcatgagttctgtctgattgcatagcattagttggtagttgtctcaaacatctcttgacctttggccataatcaaaaaccaagacactgttcatcaagctgctcaattatcaagccaactttgcttggttccactgcagatttgcaccctattcttatctccgtagattggattgaa

SEQ ID NO: 62021 - DNA, 268 bp, Glycine max
  Clone ID: 700762970H1
ttctctccattggtccttaaacactcatcagtcatcaccatggccaagctagttttttccctttgttttctgcttttcagtggctgctgcttcgctttcagttccagagagcagcctcagcaaaacgagtgccagatccaaaaactcaatgccctcaaaccggataaccgtatagagtcagaaggagggctcattgagacatggaaccctaacaacaagccattccagtgtgccggtgttgccctctctcgctgcaccctcaaccgca

SEQ ID NO: 62022 - DNA, 269 bp, Glycine max
  Clone ID: 700762971H1
attggtccttaaacactcatcagtcatcaccatggccaagctagttttttccctttgttttctgcttttcagtggctgctgcttcgctttcagttccagagagcagcctcagcaaaacgagtgccagatccaaaaactcaatgccctcaaaccggataaccgtatagagttcgaaggagggctcattgagacatggaaccctaacaacaagccattccagtgtgccggtgttgccctctctcgctgcaccctcaaccgcaacgcccttc

SEQ ID NO: 62023 - DNA, 269 bp, Glycine max
  Clone ID: 700762972H1
tttagttatctactcttttctgcatgtatgttctctcaacgactcctccgcgaaagagtattattcaatattttggttgggttgaatcccggggttgaagcgttgcagacatcacggctattctaagagtgtctcgctccctcattcatgtccgatctgtacgacggaggacgggtagttgcgtaactgccgttaacccttcgccgcacggtgggcgtggtgctttgccttctgaaggtggtagcccttcagacttgctcttcctcgct

SEQ ID NO: 62024 - DNA, 244 bp, Glycine max
  Clone ID: 700762973H1
atttattactagtttctgaggctcccgtgtcctttctctaagatccctagattgcttgtgaatgctagaaaccctagacagcttcgattggaagcgctcccatttcacatcaagggcgaccgcattcggttcttgcaagcaatcctggtactactgctgcctcgggctcgtcccctgaatttgaaccattcatcaccacctttcttcattcattcacggttttccttttacgactcgatttgtt

SEQ ID NO: 62025 - DNA, 270 bp, Glycine max
  Clone ID: 700762974H1
ccatcatatcattagacaactagttgatctcttcttctactagagttctctctactctgggtagtgatatatcatgaatcaatggctgacgctatctttggataccctttcagacgcttcatctggggtcaccctccaattttcagagaatggtctggctcaatagccctcttagattggctcgaatcacccactgcccacatcttaaaagttaatgttccaggattcagcaaggaagacatacaggtgcagattgaggatgggaatatt

SEQ ID NO: 62026 - DNA, 224 bp, Glycine max
  Clone ID: 700762975H1
caacgaatgcgagtatattgtctcgagacgctgtcgtctctcctaccagtctcatgtcgcatcttctagtatctcagactaaagttgaagtatcgatgcctgcagttgatgaaactatactgcgtagtgatctaacggccaatcccctggcactgggcgatcttcgagcgcgtgtcgctgtacgatcgcgctcaccgtgttctcggtatgcttatcgttgaggc

SEQ ID NO: 62027 - DNA, 276 bp, Glycine max
  Clone ID: 700762976H1
ccagattgagacaaagaatagatcctcaatacaatgaggttcaggctcagatggaaacaaatttgtttaaattgtctcttgatgatgttgaaactcctaaaggttccatgttggatcttaaaatttctcaatctaaaattgcacttcccaaaaacacagttggaggaaccattctgcgtagtgatctattggcaaattttttgacagagggcaattttagagcaagtgttgatttgcagcgcactcatcgtattaaaggaatgattaaaatggtgg

SEQ ID NO: 62028 - DNA, 274 bp, Glycine max
  Clone ID: 700762977H1
tgggaatgcagcagtcaaaaggagtgattgggcctcattggtacaagtgtttttaacaaacagcaacagtacagagcattttgatgcatgtaagtggacaaaatcggaaccacattcctgggaattgatcttcccaatagaggtatgtggtcctaataatggttttgaaatgtggagttctgagtgggcaaatcaaacttcatggcatttgagtttccttattgacaatcccaaacagtctacagtttttgcatattctcttgggaattctcaa

SEQ ID NO: 62029 - DNA, 273 bp, Glycine max
  Clone ID: 700762978H1
gttcgattgtgttgatgaggaggattcctttgaggaagtttctttaagtgcagcacttaatggtgttgagggtttggactaatatggaaagaattcctcttgccacatctgagggatttcctcatgtgctttcacgcaaaaatggtgaaaaaggcaaaaggagatttgtctctggggatggtgaagagatgacactgattccgggaaccagtgttgaagaggcttacaacaagctaatagttgaacttgagaaaagtgttcctacattggttg

SEQ ID NO: 62030 - DNA, 278 bp, Glycine max
  Clone ID: 700762979H1
gcagattgagacaaagaatagatcctcaatacaatgaggttcaggctcagatggaaacaaatttgtttaaattgtctcttgatgatgttgaaactcctaaaggttccatgttggatcttaaaatttctcaatctaaaattgcacttcccaaaaacacagttggaggaaccattctgcgtagtgatctattggcaaattttttgacagagggcaattttagagcaagtgttgatttgcagcgcactcatcgtattaaaggaatgattaaaatggtggcc

SEQ ID NO: 62031 - DNA, 240 bp, Glycine max
  unsure (1)..(240): unsure at all n locations
  Clone ID: 700762980H1
ggctgatgacaccatcaattatgatgccaaatgctatgaagtgatgcagtgtacatataatgtagggagaattgaattgcactacttnaaagacgagatctttaacgaaatgtctccacatgtgcgtaatagtctcattctgcatagcattgggagttaggctgatgtgaccacgagtatgaggcttcagcgcataagctggtgcgagatggagagattcgagataaggtggtattgata

SEQ ID NO: 62032 - DNA, 269 bp, Glycine max
  Clone ID: 700762982H1
agaaagtcttccatagccccccaaaaatgaagagcaccatcttctttgctctctttctcttttgtgccttcagcacctcatacctaccttcagccatcgctgatttcgtgctcgataatgaaggtaaccctcttgaaaatggtggcacatattatatcttgtcagacataacagcatttggtggaataagagcagccccaacgggaaatgaaagatgccctctcactgtggtgcaatctcgcaatgagctcgacaaagggattggaaca

SEQ ID NO: 62033 - DNA, 264 bp, Glycine max
  Clone ID: 700762983H1
gctggaagcaaaggaagactgggatatgcttcattgataccatatgttgagccagttgtgcaagctcaaagtgctgaagtttacttcgacttcttccctgtggaggttgatagtcaagagggagttgctcacattggtgaattgaaatctggtgtctatgttccactgcctacaaaaactaatttggtggaaactcccaaggaatggcaactggatctaccttgtgataaaattcctagtgtcttgactacaactgatgaaaga

SEQ ID NO: 62034 - DNA, 267 bp, Glycine max
  Clone ID: 700762984H1
taacttgctctatactacacagtacacacactagaagaataatggcttccatcctccactactttttagccctctctctttcttgctcttttcttttcttcttatccgactcagtcacccctacaaaaccaataaaccttgttgttctacccgttcaaaatgatggttccacagggctccattgggccaacctccaaaaaagaacccctctaatgcaagtaccagtcctggtggacctcaatggaaatcacttgtgggttaactgtg

SEQ ID NO: 62035 - DNA, 264 bp, Glycine max
  Clone ID: 700762985H1
ctcgagccgcatgaacttcataggatgagttcatggaagggagaactcttaagggtaccttctatggtcactatagactccgcactgacattcctggtgttgtggagaagtactcaacaaggagctggagctggacaaatttatcactcattctgtcccattctcagagatcaacactgcatttgatcttatgctgaaaggggagggaataaggtgcctcatctgcatggaagagtaaatcaatgatgttctctgctgaacagt

SEQ ID NO: 62036 - DNA, 267 bp, Glycine max
  Clone ID: 700762986H1
ataaaattcttccaccaagttatgggtttccttgtgttgcttcttttctcgctcttaggtctctcttctagttccagcatatcaactcatcgttccatattggaccttgacctaaccaagtttaccacacagaaacaggtgtcttcactgttccaactatggaagagtgagcatggacgtgtctaccataaccacgaagaagaggcaaagagacttgagattttcaagaataacttgaactatatcagggacatgaatgcaaacaga

SEQ ID NO: 62037 - DNA, 267 bp, Glycine max
  Clone ID: 700762987H1
cacaaactagagcgagaaatattatagtagctctgcgtttttggggtatcattattcaaccacccattttctctcttcttcttcttccattgagagaattgtctttcatcgtgtgtgatcggtgagatgtacgtagcttccatgcgcaagtctttcaaggactccttgaaagtccttgaagctgatatccagcacgccaataccctggcttcagattttccaagggagtatgatggtgcatgccttcagatgagaatgtcatacagt

SEQ ID NO: 62038 - DNA, 271 bp, Glycine max
  Clone ID: 700762988H1
aagagcaagagtttctaaaatatcagcagcagcagcaaggaggttcccaaagccagaaaggaaagcaacaagaagaagaaaacgaaggaagcaacatattgagtggcttcgcccctgaattcttgaaagaagcgttcggcgtgaacatgcagatagtgagaaacctacaaggtgagaacgaagaggaggatagtggagccattgtgacagtgaaaggaggtctaagagtcacagctccagccatgaggaagccacagcaagaagaagatga

SEQ ID NO: 62039 - DNA, 268 bp, Glycine max
  Clone ID: 700762990H1
taaacactcatcagtcatcaccatggccaagctagttttttccctttgttttctgcatttcagtggctgctgtttcgctttcagttccagagagcagcctcagcaaaacgagtgccagatccaaaaactcaatgccctcaaaccggataaccgtatagagtcagaaggagggctcattgagacatggaaccctaacaacaagccattccagtgtgccggtgttgccctctctcgctgcaccctcaaccgcaacgcccttcgtagacct

SEQ ID NO: 62040 - DNA, 271 bp, Glycine max
  Clone ID: 700762991H1
cgaacagcataatatacgcattgaatggacgggcattgatacaagtggtgaattgcaacggtgagagagtgtttgatggagagctgcaagagggacgggtgctgatcgtgccacaaaactttgtggtggctgcaagatcacagagtgacaacttcgagtatgtgtcattcaagaccaatgatacacccatgatcggcactcttgcaggggcaaactcattgttgaacgcattaccagaggaagtgattcagcacactttcaacctaaaaag

SEQ ID NO: 62041 - DNA, 277 bp, Glycine max
  unsure (1)..(277): unsure at all n locations
  Clone ID: 700762993H1
caataattccttcacttgcagaacttagttctctgttgcatcatcatcatcttcattagtgttagccctanacttcaccttcaaccatgaccacagtgccaccacacagtgtccaagtgcacacaacaacacaccgctacgaagccggcgtcgtcccgccggctcgttttgaggcgccgcgttacgaagccggcatcaaggcgccctcttccatttaccattccgagagaggtccgacgacctctcaggttctcgcagttgtcgccggccttccggt

SEQ ID NO: 62042 - DNA, 270 bp, Glycine max
  Clone ID: 700762994H1
ctcgagccggttcaatatcgtagtataccttaataaataatttaagatactatgatgagaggaaggttctcattactgttgctgagaattgtcttcctggcttcagtttctgtctcatttggcattgactactgggaaaaagagaaccccaaacataacaagtgtctccagagttgcaatagcgagagagagtcgtacaggaaccaagcatgccacgctcgttgcaacctgcttaaggtggagaaataagatgtggagaaggtggttcca

SEQ ID NO: 62043 - DNA, 270 bp, Glycine max
  Clone ID: 700762996H1
gtctgggttgaccctcacaggcactgtcataggtttgatcattgcaacccctcttcttgttatcttcaagcccatccttgtccctgctgcgtttgtgctgttcctggttgcttctggctttttgttctctgggggctgtggtgtggctgccattgctgctttatcttggatttacaactacgtttctgggaaccagcctgcgggttctgacacccttgactatgcaaaagggtaccttactgataaggcaagggatgtgaaggagagggc

SEQ ID NO: 62044 - DNA, 256 bp, Glycine max
  Clone ID: 700763001H1
tgttgaaatcctaaaggttccatgttggatcttaaaatttctcagtctaaaattgcacttcccaagaacacagttggaggaactattctgcgtagtgatctattggcacattttctgacagagggcaattttagagcaagtgttgatttgcagcgcactcatcgtattaaaggaatgattaaaatggtggccacagttggtattcctgagaatacaggtatatcattggcctgtgctatgaatagttcttttaggg

SEQ ID NO: 62045 - DNA, 276 bp, Glycine max
  Clone ID: 700763002H1
gtcggagagcaagagagagagagagagcaaaatggctgatacaagtggaggagatgcagtgagaccggtggtaatatgtgatcacaagtgtggctgcacagttccatgcactggtggttccacttgcaggtgcacaagtgtcggcatgacaactggaggcggtgatcacgtgacatgctcgtgcggagagtactgtgggtgcaatccatgctcatgtcccaagactgcggcttctggaactggttgcagatgtggcacagattgctcatgtgcctc

SEQ ID NO: 62046 - DNA, 278 bp, Glycine max
  Clone ID: 700763003H1
gtgattgttgtgactcgttcttcttcgtcgttatcttcttcttttgttgtttgtgtgtttgttttttctctcacctgaaaatgtcttgctgcggtggtaaacagtggttgcggaagcgcctgcaagtgcggcaacggctgcggaggctgcaagatgtacccagacttgagctacaccgagtcaaccaccaccgagaccttggtcatgggagtggcaccagttaaggctcaattcgagagtgctgaaatgggtgttcccggtgagaacgatggctgcaa

SEQ ID NO: 62047 - DNA, 251 bp, Glycine max
  Clone ID: 700763004H1
gtggacacaaatttgtttacattgtctcttgcatgatgttgaaactcctaaaggttccatgttggatacttaaaatttctcagtctaaaattgcacttcccaagaacacagttggaggcactattctgcgtagtgatctattggcaaattttctgacagagggcaattttagagccagtgttgatttgcagcgcactcatcgtattaaaggaatgattaaactggtggccacattggtattcctgagaata

SEQ ID NO: 62048 - DNA, 271 bp, Glycine max
  Clone ID: 700763005H1
gcaaggtatgggacttgagtctcacattgaaagtatgggattctaactataatgactagcttttgtggttcaaggttcttattataatctttgaattttatttctggtttgtattttgagaaattctgttccttttggatggatttgttccggataacctggaattatcccaacaagcactctggctagtgaccatcatcgtagtagtaacgatgaataaagagcgaaattgggcttatggagccttctaattatggtctaacacttgggt

SEQ ID NO: 62049 - DNA, 270 bp, Glycine max
  Clone ID: 700763006H1
gctcggcgctccattgtctttgaacactcatcaccatggccaagcttgttctttccctagtgtttccttcttttcagtggctgcttcgctctgagagagcaggcacagcaaaatgagtgccagatccaaaagctgaatgccctcaaaccggataaccgtatagagtcggaaggtgggttcattgagacctggaaccctaacaacaagccattccagtgtgccggtgttgccctctctcgctgcacccttaaccgcaatgcccttcgtaga

SEQ ID NO: 62050 - DNA, 273 bp, Glycine max
  Clone ID: 700763007H1
caaacttaattattaacacttccttagttcaatatggggaagcccttcactctctctctttcttccctttgcttgctactcttgtcgagtgcatgctttgctattagctccagcaagctcaacgagtgccaactcaacaacctcaacgcgttggaacccgaccaccgcgttgagtccgaaggtggtttgattcaaacatggaactctcaacaccctgagctgaaatgcgccggtgtcactgtttccaaactcaccctcaaccgcaatggcctc

SEQ ID NO: 62051 - DNA, 268 bp, Glycine max
  Clone ID: 700763008H1
cagcaaagggcagcagcttgatgcggttcactttacctatgaagtgggtctggtggaaaagttccctcctgttcccttgttgaagtcttttctcaaggatgctaagaaagttgcggcttctattttggaagatcctaataatgcaggccgagctgcgtacctagctgcaaggaaagagcagtctgcactcagggctgtgattaaatgcattgaagaatacaaacttgaggatgagttccctccagaaaatctgaagaagcgacttgac

SEQ ID NO: 62052 - DNA, 252 bp, Glycine max
  Clone ID: 700763009H1
ctccattggtccttaaacactcatcagtcatcaccatggccaagctagttttttccctttgttttctgcttttcagtggctgctgcttcgctttcagttccagagagcagcctcagcaaaacgagtgccagatccaaaaactcaatgccctcaaaccggataaccgtatagagtcagaaggagggctcattgagacatggaaccctaacaacaagccattccagtgtgccggtgttgccctctctcgctgca

SEQ ID NO: 62053 - DNA, 261 bp, Glycine max
  Clone ID: 700763010H1
cagaattagggttttccaattcacagagcaacacaacgaaccaacaatggcgcagctcagccgcagtcgcagccgcagcacgggcaagcagcgctggagcaggtgcagtgcttcggtcgcaagaagaccgccgtggccgtgacctactgcaagcgcgggcgcggtctcatcaagatcaacggctgctccattgagctcgtggagccggagatcctccgcttcaaggccttcgagcctatcctcctgttgggtaagagccgc

SEQ ID NO: 62054 - DNA, 251 bp, Glycine max
  Clone ID: 700763011H1
agagtcttgaaaaagcaagagaaaaaaaaataccaaccatggcaaccatttctgatcaacctagagggtcctactcctatggaacctcatatggagcaccctatggaaccacgtatgagaccaacaccagcattaacaacccaccttcacgccaaacagtgaagttcataactgctgccactattggcatcacactcttgctcctgtctgggttgaccctcacaggcactgtcataggtttgatcattgca

SEQ ID NO: 62055 - DNA, 265 bp, Glycine max
  Clone ID: 700763012H1
gttcaatatcctagtataccttaataaataatttaagatactatgatgagagcacggttcccattactgttgctgggacttgttttcctggcttcagtttctgtctcatttggcattgcttactgggaaaaagagaaccccaaacacaacaagtgtctccagagttgcaatagcgagagagactcgtacaggaaccaagcatgccacgctcgttgcaacctccttaaggtggagaaagaagaatgtgaagaaggtgacattccac

SEQ ID NO: 62056 - DNA, 270 bp, Glycine max
  Clone ID: 700763013H1
tatggggaagcccttcactctctctctttcttccctttgcttgctactcttgtcgagtgcatgctttgctattagctccagcaagctcaacgagtgccaactcaacaacctcaacgcgttggaacccgaccaccgcgttgagtccgaaggtggtttgattcaaacatggaactctcaacaccctgagctgaaatgcgccggtgtcactgtttccaaactcaccctcaaccgcaatggcctccacttgccatcttactcaccttatccccg

SEQ ID NO: 62057 - DNA, 270 bp, Glycine max
  Clone ID: 700763014H1
atgagtccattggagagccttgcatcatctgctgtccgcacagcaaacaaggccaaagcaaaactcattgttgtactgacacgtggcgggtctacagctaagttggttgctaagtataggccagcggttccaatattatcggtggtggttccagtgttgagcacagactcatttgattggacatgcagtgatgagacgccagcaaggcacagcttgatatataggggcttgattccaatattgggggagggatccgccaaggctactgat

SEQ ID NO: 62058 - DNA, 269 bp, Glycine max
  Clone ID: 700763015H1
gaacctacttgcaaggattcaacaggaacattttagaggcctcctacgataccaaattcgaggagataaacaaggtactagtttagtagagaggaagggcagcagcaaggggagcagaggctgcaagagagcgtgattgtggaaatctcgaaggaacagattcgggcactgagcaaacgtgccaaatctagttcaaggaaaaccatttcttctgaagataaacctttaacttgagaagccgcgaccccatctactccaacaagcttggc

SEQ ID NO: 62059 - DNA, 272 bp, Glycine max
  Clone ID: 700763016H1
gtgttggattagttctgcagttaacaatcgctcctcagatatcaacaaaaagattcgcacagcacttgggaaaggtaagaaaattgtttttcttactagagttgatccttttccagtagctctactggctgttctttttggcgttaagaatgaaattctgagttccaacgccactaaccctatgctgacgcgacttcttgagaactgtaagagtctcgaatatctggttgatgagtgtccttttgcatttgtgaactagtatgtaatatttt

SEQ ID NO: 62060 - DNA, 150 bp, Glycine max
  Clone ID: 700763018H1
tctcgagccgaatcggctcgagatgaaagaaaggacattaggcaacaccctcttgttgaacatgctctgcctatttgaagcatttccacacctcttttaattgtcgtaatgatgtgtgaagtgtgtgttattttaaaaaaaaaacaaaaa

SEQ ID NO: 62061 - DNA, 229 bp, Glycine max
  Clone ID: 700763019H1
ggaattttagtggacaaaactggagattggatcacacttatacaaaattctccaattagtaacttgttgagagttgctgcttggaagaaaggctgtttaatggttaagattgtgatgtctgggaatgcagcagtcaaaaggagtgattgggcctcattggtacaagtgtttttaacaaacagcaacagtacagagcatttgctgcatgtaagtggaacaaatcgggaac

SEQ ID NO: 62062 - DNA, 256 bp, Glycine max
  Clone ID: 700763020H1
ccgcaagagcgcgaatggagatcgaaaaagacacaacccagaagacctagacaagaagaaccacgtgaaagaggatgcgagacaagaaacggggttgaggaaaatatctgcaccttgaagcttcacgagaacattgctcgcccttcacgcgctgacttctacaaccctaaagctggtcgcattagtaccctcaacagcctcaccctcccagccctccgccaattccaactcagtgcccaatatgttgtcctctaca

SEQ ID NO: 62063 - DNA, 231 bp, Glycine max
  Clone ID: 700763021H1
gtccacacccttggaggctgcgagacccgttgtgttctctcttctctctctcttctttctattttctatttccctctcttcttcgctccttttagggttttctcaactcttcgatttggggcttaaaccctctccgattaagattcggatttagggcttccctatctacattccgcctccaaagaaaaaacgctctcgtggttggttcgtaatgggccccgttgctaatcc

SEQ ID NO: 62064 - DNA, 268 bp, Glycine max
  Clone ID: 700763022H1
ggcggcggaggttagagcaacgggaagtaacgttataacgccgggaagacttgcggctatggctcaatcagctgctgcttataatgctgactgcaagcatgaccaggacaaggtcaagcttgccgacgttctgaccggagcaaccgccaaattgcccgcggacaaggccgcgacgctgcaagatgctgaaggggtggcgagtgctgaggccaggaacaaccccgatgccaccgccactaccggtggggtagccgcttctgttgcggct

SEQ ID NO: 62065 - DNA, 244 bp, Glycine max
  Clone ID: 700763023H1
atatcctagtataccttaataaataatttaagatactatgatgagagcacggttcccattactgttgctgggacttgttttcctggcttcagtttctgtctcatttggcattgcttactgggaaaaagagaaccccaaacacaacaagtgtctccagagttgcaatagcgagagagactcgtacaggaaccaagcatgccacgctcgttgcaacctccttaaagtggagaaagagaatgtgaag

SEQ ID NO: 62066 - DNA, 265 bp, Glycine max
  Clone ID: 700763024H1
caggtatcatcgtatgaagcaagagcgagagaaacaaatccaagaggaaactcgtgagaagaaagaggaggaaagccgtgaaagggaagaagaacaacaagagcagcatgaggaacaagatgaaaatccctacatttttgaggaagataaggattttgagaccagagtcgaaactgaaggtggcagaattcgggttctcaagaagttcactgaaaaatccaagcttcttcagggcattgagaacttcgtttggccatttggaagc

SEQ ID NO: 62067 - DNA, 267 bp, Glycine max
  Clone ID: 700763025H1
tggacaagcttagttgtcaagttggaatcaacccatattctatggaatggactggtttggccaatagattactgagtaagggcaacgatattctgtgttgcgattatgctagttttgatggtttgattaccaagcaagttatgagcaagatggcagaaatgatcaacagtctttgtggtggtgatgaaaaactgatgcgtgaaaggacacacctgctgttggcttgttgttcaaggatggcaatttgtaagaaagatgtttggagag

SEQ ID NO: 62068 - DNA, 265 bp, Glycine max
  Clone ID: 700763026H1
tcaatatcctagtataccttaataaataatttaagatactatgatgagagcacggttcccattactgttgctgggacttgttttcctggcttcagtttctgtctcatttggcattgcttactgggaaaaagagaaccccaaacacaacaagtgtctccagagttgcaatagcgagagagactcgtacaggaaccaagcatgccacgctcgttgcaacctccttaaggtggagaaagaagaatgtgaagaaggtgaaattccacga

SEQ ID NO: 62069 - DNA, 239 bp, Glycine max
  Clone ID: 700763027H1
gaatagttcttttagggggcgtgccagttctgatatttacaccatctgctctcaagactgtgaattatggaatcctgcttgcacaaaagcaatgactatgtcatttaatccaaacccgtgttctgatgcatggagtttggaatttttgaagcgtaccggatttcactgtgatatcatttgtgtcactggatggactgccaccccaatgcaggatgttcaggtacaattgattggtttat

SEQ ID NO: 62070 - DNA, 262 bp, Glycine max
  Clone ID: 700763028H1
gccgaacaaggtcagccagatcatccagagttgcttttgttgttgaactgaatcaaaatggagcgaaggaacatgcagaggttggatctagctattctatggaatggctatctctactgagagaacatagagtctttgcttatttaggtagagctctcatgtcatctgttgcaatgaattgcattgctaagacagttggtgcttctagcactgataactttcctcaggagagcattgataatactctagagcccagagatca

SEQ ID NO: 62071 - DNA, 268 bp, Glycine max
  Clone ID: 700763030H1
tgatctttcctaatcgtcatcataccaaacaatttttcttcatatctgtctccgggagagtcgctttgacgggaaacaagggttttcgctgcaattctaatcggtcaaattggaatcgtcggatcaatttgtcatgaagttcctggagtgttctgctttagatcggcttaatgatttcttgggtaatttgaatctgggagaacgtactatcaaaggatgccttgaagcttatagttgcaaacatgctggatcggataaaaaactctcc

SEQ ID NO: 62072 - DNA, 269 bp, Glycine max
  Clone ID: 700763031H1
gcaaagcaatggctacttcaaagttgaaaacccagaatgtggttgtatctctctccctaaccttaaccttggtactggtgctactgaccagcaaggcaaactcagcggaaactgtttctttcagctggaacaagttcgtgccgaagcaaccaaacatgatcctccaaggagacgctattgtgacctcctcgggaaagttacaactcaataaggttgacgaaaacggcaccccaaaaccctcgtctcttggtcgcgccctctactccacc

SEQ ID NO: 62073 - DNA, 270 bp, Glycine max
  Clone ID: 700763032H1
aggtgaaatctgtggcaccatttgggttatgcttcaactccaacaagatcaatgcatatcctagcgtggaccttgtgatggacaagcccaatggtcctgtttggagaatctctggtgaggacttgatggtgcaggcacaacctggggtcacgtgtttgggtgttatgaatggaggaatgcaacctagagctgaaattaccttaggggcacgtcagttggaagagaacctggtggtgttcgatcttgcaaggtcaagggttgggtttagca

SEQ ID NO: 62074 - DNA, 214 bp, Glycine max
  Clone ID: 700763033H1
caccattactgatggtattgacaagactagtgcaactttgcaatttagacagttagcagattgtgattttctcaagagaaactttaagcagatgtctaatgttatgtgggtagctcctgaggactaggcgagtttatggtcacaaattgaacatgttgcgtgtaataatctggaaatgcaatgagcttatcttgtacatctcgtaaatcaggta

SEQ ID NO: 62075 - DNA, 270 bp, Glycine max
  Clone ID: 700763034H1
ctatgatgagagtgcggtttcctttgttggtgttgctgggaactgttttcctggcatcagtttgtgtctcattaaaggtgatagaggatgagaataaccctttctacttgagaagctctaacagcttccagactctctttgagaaccagaacgtggcgattcgtctcctccagagattcgacaaacgcgcgccacaacttcagaaccatcgagactaacggagtgttcagtttcagtcagaacacatcacaatgcttgttcatcagcatg

SEQ ID NO: 62076 - DNA, 265 bp, Glycine max
  Clone ID: 700763035H1
gaggaaattctgtcttctagtgcaagtgctttcagaactgcaatggtgagtaaaaatagcaagcctcaagctactgcaatgcatgtgggagctatcagaattatcattgatagtttcgcaagtgctgactgcaacatagttggtgcaatgcttttagttgatacttatcatgccaatcctgaaaatgcagttcgtagtatttttgttgcgactttcagaggcggattgcccattcgggtggttacatttccgaataccattgtgc

SEQ ID NO: 62077 - DNA, 260 bp, Glycine max
  Clone ID: 700763036H1
ccattgtctttgaacactcatcaccatggccaagcttgttctttccctttgtttccttcttttcagtggctgcttcgctctgagagagcaggcacagcaaaatgagtgccagatccaaaagctgaatgccctcaaaccggataaccgtatagagtcggaaggtgggttcattgagacctggaaccctaacaacaagccattccagtgtgccggtgttgccctctctcgctgcacccttaaccgcaatgcacttcgtagac

SEQ ID NO: 62078 - DNA, 132 bp, Glycine max
  Clone ID: 700763037H1
cgaaccactctgaagccgatcacgttatacacaacactctcaactctccctagactctaaccaatccagccatggctactatttccacactcactgcaatgtccgcctgcaagatctcctcctctgccgcca

SEQ ID NO: 62079 - DNA, 268 bp, Glycine max
  Clone ID: 700763038H1
tatgagtattattcactacaactcacagatctctgggtgatgttggtaaaggtaagcatgaggttgagtctttgaagccaacatcacccagagatctatgagtactattcactacaactcacatgcaacgaagatagcactggtgatggatggtagagggcatcttcaaatatcatgtccacacatgtcatcaacgtcagactcaaagcatgataagagtagcccctcataccatagaatcagtgcggacttgaagcctggactggtg

SEQ ID NO: 62080 - DNA, 266 bp, Glycine max
  Clone ID: 700763039H1
ggatttcttcacatcctacgatgaggtttatgacagttttgatgctatgggcttgcaagagaatctcctgagaggcatttatgcatatggttttgagaagccatcagctattcagcaaaggggaatagttccattctgcaagggacttgacgttatacaacaggcccagtctggaactgggaaaacagcaactttctgctctggaattctgcagcaacttgactatagtgtgactgaatgccaagccttggttttagcaccaacta

SEQ ID NO: 62081 - DNA, 264 bp, Glycine max
  Clone ID: 700763040H1
gatagtagtgttggtgggttgcaaagatgcttgggggtcttctccataggggtcataagatacaagggacagtggtgttgatgcgcacgaatgtgttggacgtgaatagcgtaaccagcgttgggggaattattggtcaaggtctcgacttagttggctcaacactcgatactcttactgccttcttgggccgatccgtgtctctccagcttattagtgctaccaaagctgatgccaacggaacagggaaacttggaaaggcta

SEQ ID NO: 62082 - DNA, 259 bp, Glycine max
  Clone ID: 700763041H1
attgctggtaatactcttatgccagctttttctgttccacaggctactgccagatcttctgaaaatgcggaatcctctgcatgatctagaatttgtgttttctttcatttgtccgtttgtttaattcaataaaggaaattaggcatgaccctcttgttgagtatgctctgcctatttgaaaatttccacacctcttttaattgtcgtaatgatgtgtgaagtgtgtgttattttaaaaaaaaaaaaaaaaaagggcggc

SEQ ID NO: 62083 - DNA, 262 bp, Glycine max
  Clone ID: 700763042H1
gttaaacctcgtcctttcccctgcttcgttttcaaaacttttgcgaaatttctatcttcttcaccttgctctcaccttctgggtaatgtttgaaacttggtgttagctgagctgtttgacaaaaatgaatattgcacaagttacagcatggcagcctgggatttgtgtgaaaaatatgtctcagttgcaccggcttcaatctaaaccatgtgttataccaaagagttttggtcctctcacttgtgttctactgagcttaaga

SEQ ID NO: 62084 - DNA, 258 bp, Glycine max
  Clone ID: 700763044H1
gacttattaacactttccttagttcaatatggggaagcccttcttcactctctctctttcttccctttgcttgctactcttgtcgagtgcatgctttgctattacctccagcaagttcaacgagtgccaactcaacaacctcaacgcgttggaacccgaccaccgcgttgagtccgaaggtggtcttattgaaacatggaactctcaacaccctgagctgcaatgcgccggtgtcactgtttccaaacgcaccctcaa

SEQ ID NO: 62085 - DNA, 262 bp, Glycine max
  Clone ID: 700763045H1
tgacttcttcagaagggagatgcagcacataagtacatgcaaggatctagaaacatgaaaattgacaactggatccttcttgataattatgtacaaggacgggtgctttcctctggttctcaagctagggctttgcaacttcattcaaaacgctctaagaaacacatgtctatgaaacggcataagaaggatggatcattagatcttcctcaagagttccagaaatttgatattttcaagccaatgcacgaaatgtggaaag

SEQ ID NO: 62086 - DNA, 262 bp, Glycine max
  Clone ID: 700763046H1
tggtccttaaacactcatcagtcatcaccatggccaagctagttttttccctttgttttctgcttttcagtggctgctgcttcgctttcagttccagagagcagcctcagcaaaacgagtgccagatccaaaaactcaatgccctcaaaccggataaccgtatagagtcagaaggagggctcattgagacatggaaccctaacaacaagccattccagtgtgccggtgttgccctctctcgctgcaccctcaaccgcaacgc

SEQ ID NO: 62087 - DNA, 266 bp, Glycine max
  Clone ID: 700763047H1
cgcacaaaaccaagccacccactaacttgtttggtccaagacatggctctgatcctgcatgctaccaaaacaaacaagaatgccttcaagactctgattgcggcagagtacagtggcgtccaagtggaattggcccctaatttcgagatgggtgtctctaacaaaactcctgaatttctcaagatgaatcctattggaaaggttcctgttttggaaacgcccgatggtccagtctttgagagcaatgcaatcgctcgttacgttgc

SEQ ID NO: 62088 - DNA, 262 bp, Glycine max
  Clone ID: 700763048H1
gttcaatatcctagtacaccgtattaaagaatttaagatctactatgatgagagcgcggttcccattactgttgctgggagttgttttcctggcatcagtttctgtctcatttggcattgcgtattgggaaaagcagaaccccagtcacaacaagtgcctccgaagttgcaatagcgagaaagactcctacaggaaccaagcatgccacgctcgttgcaacctccttaaggtggaggaagaagaagaatgcgaagaaggtca

SEQ ID NO: 62089 - DNA, 264 bp, Glycine max
  Clone ID: 700763049H1
tggttaccaatttttgtgaattgtctttatcctgtaagtcaattaccttcagaagctgtcgttgtaaatgttatctgtggtagtggacgtggtggtttacccaccactgcttggattagttctgcagttaataatcgctcctcagatatcaacaaaaagattcgcacagcacttgggaaaggtaagaaaattgtttttcttactagagttgatccttttccagtagctttactggctgttctttttggcgttaagaatgaaatt

SEQ ID NO: 62090 - DNA, 255 bp, Glycine max
  Clone ID: 700763050H1
ctgtgttcgacttcgtcaaaagcatcatgagccgctacgacagctgctccggcgacccagcttcctatcgtgatcggaggcgtgattctgggctaggtgcacctacagggtttggtggttctgtacaacactcttcatcaaacaggagggattatgatgatggtgggtcaccacagaggaacctcagtttggatggtttacctcattttgagaaaaacttctacattgagtcaccagctgtaagggcaatgacag

SEQ ID NO: 62091 - DNA, 264 bp, Glycine max
  Clone ID: 700763051H1
caccatggccaagcttgttctttccctttgtttccttcttttcagtggctgcttcgctctgagagagcaggcacagcaaaatgagtgccagatccaaaagctgaatgccctcaaaccggataaccgtatagagtcggaaggtgggttcattgagacctggaaccctaacaacaagccattccagtgtgccggtgttgccctctctcgctgcacccttaaccgcaatgcccttcgtagaccttcctacaccaacggtccccagga

SEQ ID NO: 62092 - DNA, 257 bp, Glycine max
  Clone ID: 700763052H1
gagggtttgaatctcaccactctcccttctgtttgcaaaactgctccttctgccatcatccgaggatcaaagagaaaaacaagagatggagtggtgtgtgtcaatgccaaagattgaactgcatgctcaccttaatggctccatccgagactccacacttcttgaactcactaaggctttgattggaaagggtgccattaatttttccgaagtggagcatatcatcctcaaatataaccgttcagtggaagaagttt

SEQ ID NO: 62093 - DNA, 256 bp, Glycine max
  Clone ID: 700763055H1
gacttattaacactttccttagttcaatatggggaagcccttcttcactctctctctttcttccctttgcttgctactcttgtcgagtgcatgctttgctattacctccagcaagttcaacgagtgccaactcaacaacctcaacgcgttggaacccgaccaccgcgttgagtccgaaggtggtcttattgaaacatggaactctcaacaccctgagctgcaatgcgccggtgtcactgtttccaaacgcaccctc

SEQ ID NO: 62094 - DNA, 261 bp, Glycine max
  Clone ID: 700763056H1
gatagatcctcaatacaatgaggttcaggctcagatggaaacaaatttgtttaaattgtctcttgatgatgttgaaactcctaaaggttccatgttggatcttaaaatttctcaatctaaaattgcacttcccaaaaacacagttggaggaaccattctgcgtagtgacctattggcaaattttttgacagagggcaattttagagcaagtgttgatttgcagcgcactcatcgtatcaaaggaatgattaaaatggtggc

SEQ ID NO: 62095 - DNA, 64 bp, Glycine max
  Clone ID: 700763057H1
cgcaaaacatgttgcatagaagcttcaagcccgcaaagtgaataacgatattgaagctcgccgt

SEQ ID NO: 62096 - DNA, 257 bp, Glycine max
  Clone ID: 700763058H1
catgattactggtacctcccaggctgattgtgctgtccttatcattgactccaccactggtggttttgaagctggtatttctaaggatggacagactcgtgagcatgctcttcttgctttcacccttggtgtgaagcagatgatctgctgctgtaacaagatggatgccactaccccgaagtactctaaggctaggtatgatgaaattgtgaaggaagtctcttcctacttgaagaaggttggttacaacccagaca

SEQ ID NO: 62097 - DNA, 258 bp, Glycine max
  Clone ID: 700763059H1
ataaaattcttccaccaagttatgggtttccttgtgttgcttcttttctccctcttaggtctctcttctagttccagcatatcaactcatcgttccatattggaccttgacctaaccaagtttaccacacagaaacaggtgtcttcactgttccaactatggaagagtgagcatggacgtgtctaccataaccacgaagaagaggcaaagagacttgagattttcaagaataacttgaactatatcagggacatgaat

SEQ ID NO: 62098 - DNA, 262 bp, Glycine max
  Clone ID: 700763060H1
gagaaaatcaacatttttttttctatcaattcacacgacaaaatttagcagagttcaaaacaccaaccaagtaaagtaaagaagggaagatgtcactgataccaagtttcttcggtggtcgaaggagcaatgttttcgaccctttctcgctcgacgtatgggaccccttcaaggatttgtctttcccttctgctgaagattcagctttcttgaaaacacgagtggattggaaggagaccccagaagcgcacgtgttcaaggc

SEQ ID NO: 62099 - DNA, 260 bp, Glycine max
  Clone ID: 700763061H1
ctataattccttcacttgcgtaacttagttctctgttgcatcatcatcatcgtcatgagtgttagccctaaacttcaccttcaaccatgacctgagtgccaccacacagtgtccaagtgtacacaacaacacaccgctacgacgccggcgtcgtcccgccggctcgttttgacgcgccgcgttacgaatccggcatcagggcgcgctcttccatttaccattccgtgataagtccgacgacctctcaggtcctcgcattg

SEQ ID NO: 62100 - DNA, 247 bp, Glycine max
  Clone ID: 700763062H1
cttgttgttagtggctctgatgatggaactgctaaattatgggatatgcgtcaaaggggttccatccaaacattcccagataaataccagattaccgctgttggcttctcagatgcatcagataagatcttcactggtggtattgacaatgatgtcaagatttgggatttgcgtaaaggggaagttaccatgacacttcaaggtcatcaagacatgattactgatatgcagctgagtcctgatgggt

SEQ ID NO: 62101 - DNA, 268 bp, Glycine max
  Clone ID: 700763063H1
cggtcatgcaatcgttgatcaaattgacgaacaggcgaatcgatgtgatacggaggaagagaagagcgacagagaagtttctgaagaaagatattgctgatctattgctcaacggtctcgatatcaacgaaaccatagcaagaggacagtgttaactcaaccacaagcccttcagcccttccataggcattgatatcgacttattaacactttccttagttcaatatggggaagcccttcttcactctctctctttcttccctttgct

SEQ ID NO: 62102 - DNA, 267 bp, Glycine max
  Clone ID: 700763064H1
cccactaacaattccttcacttgcagcactgttgcatcatcatcttcattgcaaaaccctaaacttcaccttcaaccatgaccacacaagtaccaccacacagtgtccaagtccacacaacaacacaccgctacgaagctggcgtcgtcccccccggagcccgtttcgaaccgccgcgttatgaagccggcgtcaaagcgccctccatttaccattccgagagaggtccaacgacttcccaggtcctcgccgtcctcgccggcctcc

SEQ ID NO: 62103 - DNA, 264 bp, Glycine max
  Clone ID: 700763065H1
caacaccactcatgccagagaagctagggagcatttctgctcacaaattaggagattcactgatattgagaagggaaccagtatttgtatcaacaggtgtgttgatttggggagaactgctctctacatagctgcagaggatgattctctagtgtcacattcatcagttccacttcctgtcgatgattttattacgagattagatgatctttcgatggactactgtccgcactacagccccaaatatgattcatcgccggagaa

SEQ ID NO: 62104 - DNA, 264 bp, Glycine max
  Clone ID: 700763066H1
ccaccatatcattagacaacgagtttatctcttcttctactagagttctcttttctctgggtagtgtaatatcattaatcaatggctgacgctatctttggataccctttcagacgcttcatctggggtcaccctccaattttcagagaatggtctggctcaatagccctcttagattggctcgaatcacccactgcccacatcttaaaagttaatgttccaggattcagcaaggaagacataaaggtgcagattgaggatggg

SEQ ID NO: 62105 - DNA, 264 bp, Glycine max
  Clone ID: 700763067H1
tcataatttaagatactatgatgagagcacggttcccattactgttgctgggacttgttttcctggcttcagtttctgtctcatttggcattgcttactgggaaaaagagaaccccaaacacaacaagtgtctccagagttgcactagcgagagagactcgtacaggaaccaagcatgccacgctcgttgcaacctccttaaggtggagaaagacgaatgtgaagaaggtgaaattccacgaccacgaccacgtccacagcacc

SEQ ID NO: 62106 - DNA, 250 bp, Glycine max
  Clone ID: 700763068H1
gctattaaagaaccaaagagaatcctactttgtggatgctcagcctaagaagaaagaggaggggaataagggaagaaagggtcctttgtcttcaattttgagggctttttactgaataagtatgtactaaaatgtatgctgtaatagctcatagtgagcgaggaaagtatcgggctatgtaactatgactagagcttcaactatgaataaataaatcgacagcatatgatgcttttgttttgtgtccttc

SEQ ID NO: 62107 - DNA, 260 bp, Glycine max
  Clone ID: 700763069H1
cggctcgagcggctcgaggaatgcttaagcttaagaacaacaagaagcatcatgttcatagaaaaagtgaagttagcgtaacaaagagttggtgtgcaatgattccttggcttttgggagcagcctatataaatcgccaattcttaataaacgttcgaaacatcctacttttctttcttgacgcaattcagacgccgttcctattcttgatcttcatcatgtccaatcccaaatccgagtcagtagtgtctgaaccctct

SEQ ID NO: 62108 - DNA, 235 bp, Glycine max
  Clone ID: 700763070H1
taaggtctcagattttggattggctagaacagcactggatgagagaaacaagcacatctccacacatgttatgggaacatttggctacttagctcctgaatatgcaatgactggccatcttctggtcaagagtgatgtttatagttatggagttgtactccttgagctcctaactggaagaaagcctgtggatttgtcacaaccccgggtccagaaatctcgtgacagggttcgt

SEQ ID NO: 62109 - DNA, 258 bp, Glycine max
  Clone ID: 700763071H1
gttcaatatcctagtacaccgtattaaagaatttaagatatactatgatgagagcgcggttcccattactgttgctgggagttgttttcctggcatcagtttctgtctcatttggcattgcgtattgggaaaagcagaaccccagtcacaacaagtgcctccgaagttgcaatagcgagaaagactcctacaggaaccaagcatgccacgctcgttgcaacctccttaaggtggaggaagaagaagaatgcgaagaag

SEQ ID NO: 62110 - DNA, 256 bp, Glycine max
  Clone ID: 700763072H1
gttcaatatcctagtataccttaataaataatttaagatactatgatgagagcacggttcccattactgttgctgggacttgttttcctggcttcagtttctgtctcatttggcattgcttactgggaaaaagagaaccccaaacacaacaagtgtctccagagttgcaatagcgagagagactcgtacaggaaccaagcatgccacgctcgttgcaacctccttaaggtggagaaagaagaatgtgaagaaggtg

SEQ ID NO: 62111 - DNA, 255 bp, Glycine max
  Clone ID: 700763075H1
gaacaaactttgccttacttcaatttttctactgtagaggacccatgtaaggtttatatggacaaggtacccaccaactctagatgtagaagtgcatcttcatttacactagatagtaatgtgtctaatcgtaatgataagaataatgaacatggagaaattgactgtggtagagagaatgggttggttgatgtttccaaagtatgttttgatgcttcaccggacttgatggaccataaacatttaacagttgta

SEQ ID NO: 62112 - DNA, 256 bp, Glycine max
  Clone ID: 700763076H1
gagcaaaccagtaagataacagcagatgcccttgatctagatggatacacagtggacgaggcactagcaagtcggaggttatttatgttagattaccatgatgtattcatgccatatataaggcggataaatcagacatatgccaaggcttatgcgacaaggactatcctttttctgagagaaaatggaaccttaaagccagtggccatcgaattaagtttgccacatcctgctggggtactgtcaggtgctgtca

SEQ ID NO: 62113 - DNA, 199 bp, Glycine max
  Clone ID: 700763077H1
ttcgagccgaatcggctcgagagttgcttttacaaatatttattactcagttttgttttgatgtttagaaacacatttgagtttgcaaatctaaatctgtttttttggcaaaaaaaataaaaaaggggggccgccgcaaagtgacttagcggacccgggaataaattcgggacaggtacctccgggcgtccaagctttc

SEQ ID NO: 62114 - DNA, 260 bp, Glycine max
  Clone ID: 700763078H1
tctagaatggaatttcgatgctcagtcatctcttttaccattctcgtctctcttgctcttgcaggagagagccatgtccatgcatcgctacctgaggaagattattgggaagctgtttggccaaacactcccattcccactgcactgcgagagcttctaaagcctctccctgcaggtgttgaaatcgatgaactccctaagcaaattgatgatacacagtacccaaaaacattcttctataaagaagaccttcatccagg

SEQ ID NO: 62115 - DNA, 254 bp, Glycine max
  Clone ID: 700763079H1
tgggaattgatcttcccaatagaggtatgtggtcctaataatggttttgaaatgtggagttctgagtgggcaaatcaaacttcatggcatttgagtttccttattgacaatcccaaacagtctacagtttttgatattctcttgggaatttctcaagattttgagattgctggtaatactcttatgccagctttttctgttccacaggctactgccagatcttctgaaaatgcggaatcctctgcatgatctgg

SEQ ID NO: 62116 - DNA, 262 bp, Glycine max
  Clone ID: 700763080H1
tacttattaacactttccttagttcaatatggggaagcccttcttcactctctctctttcttccctttgcttgctactcttgtcgagtgcatgctttgctattacctccagcaagttcaacgagtgccaactcaacaacctcaacgcgttggaacccgaccaccgcgttgagtccgaaggtggtcttattgaaacatggaactctcaacaccctgagctgccatgcgccggtgtcactgtttccaaacgcaccctcaaccgc

SEQ ID NO: 62117 - DNA, 265 bp, Glycine max
  unsure (1)..(265): unsure at all n locations
  Clone ID: 700763082H1
ngacaccttcaaacccgaaccctaaccctagaagaaagaaaaaaacccacaacacacaatcagtactaccaactagggtttttgtcatggctagtttgcaaactagggttttcttgatggcccttctgtgcctgctggctcttggtgcaaccattattccaatggcacaaggggaagtgtcatgtggccaagttgtgagtaacctgaccccatgcatctcctatgtgctatatggtggagccacggttcctgcacagtgctgcaa

SEQ ID NO: 62118 - DNA, 260 bp, Glycine max
  Clone ID: 700763084H1
ctcgagccgcttcaaacttaattattaacacttccttagttcaatatggggaagcccttcactctctctctttcttccctttgcttgctactcttgtcgagtgcatgctttgctattagctccagcaagctcaacgagtgccaactcaacaacctcaacgcgttggaacccgaccaccgcgttgagtccgaaggtggtttgattcaaacatggaactctcaacaccctgagctgaaatgcgccggtgtcactgtttccaa

SEQ ID NO: 62119 - DNA, 258 bp, Glycine max
  Clone ID: 700763085H1
agcaaacattgaacttgttggcattaaagaacaacaacagaggcagcaacaggaagagcaacctttggaagtgcggaaatatagagctgaattgtctgaacaagatatatttgtaatcccagcaggttatccagttgtggtcaacgctacctcagatctgaatttctttgcttttggtatcaatgccgagaacaaccagaggaacttccttgcaggttcgaaagacaatgtgataagccagatacctagtcaagtgca

SEQ ID NO: 62120 - DNA, 115 bp, Glycine max
  Clone ID: 700763086H1
gtgacaatcatgcccgtcctgttcttggaggaaatgacactttccttatcctcgtagggggagactggtagaaaccacaaggaagatccaatagtgagataggagcatgtgttta

SEQ ID NO: 62121 - DNA, 257 bp, Glycine max
  Clone ID: 700763087H1
tggttgttgggccaacttcttgaccttgttctacatagcttttgttttgcttcacactgtgcctgtgctttatgagaaatatgaagatcatgtcgactcttttggtgagaaagcaattgccgagattaagaagcaatatggagtgtctgactgcaaggtattgagcaagatactcagaggacctctgaaagataaaaagaaagattgaagtgggcactagattctgacaaatatgttgtagtggggtttcaggaacc

SEQ ID NO: 62122 - DNA, 256 bp, Glycine max
  Clone ID: 700763088H1
atggggaagcccttcactctctctctttcttccctttgcttgctactcttgtcgagtgcatgctttgctattagctccagcaagctcaacgagtgccaactcaacaacctcaacgcgttggaacccgaccaccgcgttgagtccgaaggtggtttgattcaaacatggaactctcaacaccctgagctgaaatgcgccggtgtcaatgtttccaaactcaacctcaaccgcaatggcctccaattggcatcttact

SEQ ID NO: 62123 - DNA, 248 bp, Glycine max
  Clone ID: 700763090H1
gctagaatggaatttcgatgctcagtcatctcttttaccattctcttctctcttgctcttgcaggagagagccatgtccatgcatcgctacctgaggaagattattgggaagctgtttggccaaacactcccattcccactgcactgcgagagcttctaaagcctctccctgcaggtgttgaaatcgatgaactccctaagcaaattgatgatacacagtacccaaaaacattcttctataaagaaga

SEQ ID NO: 62124 - DNA, 256 bp, Glycine max
  Clone ID: 700763092H1
tctcgagccgattcggctcgagatttatggtttgcatcactattcggtttcccgtgatgttacatgcgggaccacggcactgacgtctttgccttggtgataatattttccggatctttcatgcatatatttgttctcagtgtgtgctcttttgtgtgcaaacaacaatctcttcccttagtaaaataaaaataaaaatccttctttcttctgaatcttcaatcttgcattgatccatggcagccaaaacatctac

SEQ ID NO: 62125 - DNA, 254 bp, Glycine max
  Clone ID: 700763093H1
gtctttgaacactcatcaccatggccaagcttgttctttccctttgtttccttcttttcagtggctgcttcgctctgagagagcaggcacagcaaaatgagtgccagatccaaaagctgaatgccctcaaaccggataaccgtatagagtcggaaggtgggttcattgagacctggaaccctaacaacaagccattccagtgtgccggtgttgccctctctcgctgcacccttaaccgcaatgcccttcgtaga

SEQ ID NO: 62126 - DNA, 258 bp, Glycine max
  Clone ID: 700763094H1
tgcagatgtcacaggatctgcaaccctgagcatagttcaggttttctggggtttggacaaaaagcttgctcagaggaagcactttccttctgtaaactggcttatttcttattcaaaatactcaacggcacttgaaaccttttatgagcaatttgatccagattttatcaacattaggacaaaggctcgtgaagttctgcaaagggaagatgacctgaatgaaattgttcagcttgtgggcaaggatgctttagctga

SEQ ID NO: 62127 - DNA, 258 bp, Glycine max
  Clone ID: 700763095H1
gacatcttggttgtttattatacaatagcaactcgatttagaaaatttctaccgcattacattaggtggcatctgtataccttgttgatctacattctcccatcttttctcactgctgaaattaaatataagcggaatcagagtaatactcagatttccggcttattttacgacggcagatacaaattctggactaaacacgagaaaaatcttgctttgacagaagaggaaaagatggaagtgattagaaatagaggc

SEQ ID NO: 62128 - DNA, 258 bp, Glycine max
  Clone ID: 700763096H1
ctcatcaccatggccaagcttgttctttccctttgtttccttcttttcagtggctgcttcgctctgagagagcaggcacagcaaaatgagtgccagatccaaaagctgaatgccctcaaaccggataaccgtatagagtcggaaggtgggttcattgagacctggaaccctaacaacaagccattccagtgtgccggtgttgccctctctcgctgcacccttaaccgcaatgcccttcgtagaccttcctacaccaag

SEQ ID NO: 62129 - DNA, 242 bp, Glycine max
  Clone ID: 700763101H1
ctcggagagaaagagagagagagagagaaaatggctgatacaagtggaggagatgcagtgagaccggtggtaatatgtgataacaagtgtggctgcacagttccatgcactggtggttccacttgcaggtgcacaagtgtcggcatgacaactggaggcggtgatcacgtgacatgctcgtgcggagagtactgtgggtgcaatccatgctcatgtcccaagactgcggcttctggaactgg

SEQ ID NO: 62130 - DNA, 288 bp, Glycine max
  Clone ID: 700763102H1
ttcggctcgaggaaacctacaaggtgagaacgaagaggaggatagtggagccattgtgacagtgacaggaggtctaagagtcacagctccagccatgaggaagccacagcaagaagaagatgatgatgatgaggaagagcagccacagtgcgtggagcacagacaaaggttgccaacgccaaagcaaaaggagcagcaatggcattgctgagaccatttgcacaatgagacttcgccaaaacattggtcagcattcatcaactgacatctacaacactcagctggtag

SEQ ID NO: 62131 - DNA, 207 bp, Glycine max
  Clone ID: 700763103H1
tcggctcgagctccattgtctttgaacactcatcaccatggccaagcttgttctttccctttgtttccttcttttcagtggctgcttcgctctgagagagcaggcacagcaaaatgagtgccagatccaaaagctgaatgccctcaaaccggataaccgtatagagtcggaaggtgggttcattgagacctggaaccctaacaacaa

SEQ ID NO: 62132 - DNA, 265 bp, Glycine max
  Clone ID: 700763104H1
gtcaagactgtgaattatggaatcctgcttttgttcaagcaggacttccataattcacagtcttgagagcagatggtgtaaatatcagaactggcacgccccctaaaagaactattcatagagtgggccaatgatatacctgtattctcaggaataccaactgtggccaccattttaatcattcctttaatacgatgagtgcgctgcaaatcaacacttgctctcaagactgtgaattatggaatcctgcttgcacaaagcaatg

SEQ ID NO: 62133 - DNA, 267 bp, Glycine max
  Clone ID: 700763105H1
attcggggatgcacctaacaacatgcgacagtttcaaaaccaagatattttccacgatttggccttcaccccattaaccatcaccctgcagggagagtacaacgtgagagtcaactcaataagaatcaaccagcacagtgtgttcccactgaacaagatatcatccaccatcgtagggtcgacctctggaggaaccatgattagcacctcaactcctcacatggttctccagcaatccgtgtaccaggctttcactcagtgtttgct

SEQ ID NO: 62134 - DNA, 266 bp, Glycine max
  Clone ID: 700763106H1
gttaaacttttccctacaccaaaatcatctcttcactaatggaaggtggactaaagggaagctcattacaagatatgaagcttttgtttgttgaaatgggtgttggctatgaccttcatggtcaggacataacagctgccgcaatgagagcatgcagagatgcaatttctgccaattcaattccagctttccgtaaaggtagcatccctggtgttacatctgatcacatgaaattacatgtcaaactgggggtgcctatcctctgc

SEQ ID NO: 62135 - DNA, 263 bp, Glycine max
  Clone ID: 700763108H1
gtaaaacttggcattagggttgtgatttgtggaactattggttgttcggccatagtttcatcaattttttgtaacattatatgaaagacttaaatatgtttgtgacccctgatatatatactcgaattttgcgaaaaagaagaatctaagatgacttctccctacattaaatgtacagtctctttcttcatagcatttggaaatttggctgatgacaccatcaattttgaggcttttccccacaagctggtgcagttggagag

SEQ ID NO: 62136 - DNA, 263 bp, Glycine max
  Clone ID: 700763109H1
cttccttagttcaatatggggaagccttcactctctctctttacttccctttgcttgctactcttgtcgagtgcatgctttgctattagctccagcaagctcaacgagtgccaactcaacaacctcaacgcgttggaacccgaccaccgcgttgagtccgaaggtggtttgattcaaacatggaactctcaacaccctgagctgaaatgcgccggtgtcactgtttccaaactcaccctcaaccgcaatggcctccattgcca

SEQ ID NO: 62137 - DNA, 265 bp, Glycine max
  Clone ID: 700763110H1
aagcacaacttttgctcaaagcttcagaaactatgctcatgaaagcttatgcttttttgaagtacaacaatgcaaccactttgattgttcggacccatttggcagaattggtcaatgaagacttttatgatgaaaaatttaattttattggcacaattgggactccagcttttcatcgacaaattgctgcacacttggagaaaatgccattatggcaaaaagcaattttgtgtggaatgggacattgtttgtctcggaaaagcaa

SEQ ID NO: 62138 - DNA, 262 bp, Glycine max
  Clone ID: 700763111H1
gagcaaaccagtaagataacagcagatgcccttgatctagatggatacacagtggacgaggcactagcaagtcggaggttatttatgttagattaccatgatgtattcatgccatatataaggcggataaatcagacatatgccaaggcttatgcgacaaggactatcctttttctgagagaaaatggaaccttattcccagtggccatcgaattaagtttgccacatcctgctgggagactgtcaggtgctgtcagcaagt

SEQ ID NO: 62139 - DNA, 266 bp, Glycine max
  Clone ID: 700763112H1
gaagttgacaaccataaacaatatgtgtgcatatgggctcaatcctggtatttcaggttctcgtcttttgggcaccattcctcagtccatttcacagcaaactgtttggacatcaaatggcaacagtgagaacaccattgaattttgattctagcaagcagagcttttgtcagttttctattgaccttctcggtggaggcatcttagtggacaaaactggagattggatcacacttatacaaaattctccaattagtacttgttga

SEQ ID NO: 62140 - DNA, 262 bp, Glycine max
  Clone ID: 700763113H1
gaactagctcttctggcaaaggaacgttgttcctaggccctttggtcgtaattcttagcacccttgtttgggcagcatggttcataattcaaaaagacataagcaagacatttccagctccttacacgagcactggcttaatgtgtttcatggcaagctttcaatgcgtgatcattgccgtgtgtgtcgaccacagggcctcagcttggtcactccacaatgctatgagactttcctctgccctttatgcgggaatttttgc

SEQ ID NO: 62141 - DNA, 267 bp, Glycine max
  Clone ID: 700763114H1
gtacaccgtattaaagaatttaagattactatgatgagagcgcggttcccattactgttgctgggagttgttttcctggcatcagtttctgtctcatttggcattgcgtattgggaaaagcagaaccccagtcacaacaagtgcctccgaagttgcaatagcgagaaagactcctacaggaaccaagcatgccacgctcgttgcaacctccttaaggtggaggaagaagaagaatgcgaagaaggtcaaattccacgaccacgacca

SEQ ID NO: 62142 - DNA, 263 bp, Glycine max
  Clone ID: 700763115H1
gttctgagatggtgaacggagtattcgaccgaaaggagagtttctttttcccttttgagttgccgagagaggagcgtggtcgtcgcgctgatgcgtgagaggtttagaacaatcaagaaaaggtgtgcatgtggctgaagatcacggggaatgtattaagcttcagagactctttaaattaaattttctgtattttgtgttatatgttactagttctttaaattagccagatggagtttatgtgtatctaaatgcaggctgct

SEQ ID NO: 62143 - DNA, 169 bp, Glycine max
  Clone ID: 700763116H1
tgaaattttgataaaccgcgatcacaagttgccgcaccttaaaaccggaaacaaaagcaatcgttacttgatttcaagaatctctcaatttcttcctacttctttgtgtacgatttcttaagggatagaaaatcactctctgtgctggccacagacttcgtgaatcatt

SEQ ID NO: 62144 - DNA, 131 bp, Glycine max
  Clone ID: 700762544H1
gtctgagacactgtgctccctctcttctctattctatttctatgtgacactctctctcaaaccctatccctccaatccccaatcaatggcgatcctgtctcaatccaccgccagcttctcctgctccttct

SEQ ID NO: 62145 - DNA, 173 bp, Glycine max
  Clone ID: 700762545H1
ccaaaaccaaaataccacctgcgtccccaatatcacttcttctctctcaattagggtttgcgtttttacactctctccgacacccccccccccctctctctgcttctcctcgatccctcgggtttcaatgcctgccaaatctttcagcaaaatccaaacagtgccaagcagtt

SEQ ID NO: 62146 - DNA, 244 bp, Glycine max
  Clone ID: 700762546H1
gtcccaaggatgaaaaacttcctcgtcgcaaagtttttgataaacctaagacgcgctgcttcactattctccctatggagtttaatcttgtggttcgtcagaagtttataaattttgtgaggttcattatgaagaaaagggacaagcttagttgtcaagttggaatcaacccatattctatggaatggactggtttggccaatagattactgagtaagggcaacgatattctgtgttgcgatta

SEQ ID NO: 62147 - DNA, 243 bp, Glycine max
  Clone ID: 700762547H1
gtctttgaacactcatcaccatggccaagcttgttctttccctttgtttccttcttttcagtggctgcttcgctctgagagagcaggcacagcaaaatgagtgccagatccaaaagctgaatgccctcaaaccggataaccgtatagagtcggaaggtgggttcattgagacctggaaccctaacaacaagccattccagtgtgccggtgttgccctctctcgctgcacccttaaccgcaatg

SEQ ID NO: 62148 - DNA, 108 bp, Glycine max
  Clone ID: 700762548H1
gaaagaaaccctcactttactttacttccattgcattcacattctcattcttcagctcgccggtgacaccttcatcgttttccgccatgtcctcctattccgcacaac

SEQ ID NO: 62149 - DNA, 200 bp, Glycine max
  Clone ID: 700762549H1
attcccttaggaatccagcttccaaagcttacgaacaggtgtttgcacctcaccatggttgggcaatcaggaaggctgtttccgtgggaatgtatgtccttcctacaaaggaacagcttctgaagaaacttaatgaggatggtaagtgcaggattaagtttgcttgaactttttattgaactttaagtcctgaaaaaaga

SEQ ID NO: 62150 - DNA, 106 bp, Glycine max
  Clone ID: 700762551H1
ggttgccgcaccttaaaaccggaaacatcagcaatcgttacgtgatggcaagaatctctcgatttctgcctactggcgggtgtactatttctgaaggtctagacaa

SEQ ID NO: 62151 - DNA, 250 bp, Glycine max
  Clone ID: 700762552H1
gaattcggctcgcgagtacgacaatattcacaaacaaatataatcaaaggggtacacgacttttgactacatgcatgacagtgtgaaaaaagaatggcacgcaccgtgcttgctatgcgcccctatttgggggacctacatgggagggagctaacagggctttttagtgataactcccaaggtggtcatatctctctggcccgtctctagaggtatcatccccttcgagaaacatattgcagcagtaggg

SEQ ID NO: 62152 - DNA, 107 bp, Glycine max
  unsure (1)..(107): unsure at all n locations
  Clone ID: 700762553H1
gcagaggtttctacgcgtcgatcgttgggaattgcgctactcngcgtctcgcacggctaatcctcctcatgagtgtcagcagctgcgcgttcatntggagagccgag

SEQ ID NO: 62153 - DNA, 217 bp, Glycine max
  Clone ID: 700762554H1
atcacttcaactctgcatttgaattctcaattggggtgttttgctgccatatatttcaatagaaaaaggggatttgcgtgcaaacttcgtcatggaggtattcaaaagggccataatacagcctgggccaccggaaagttttgctttgaggacggttcaagaagtaattaagcctcagacacaaacaacattggcccaagatgagaaccagttccta

SEQ ID NO: 62154 - DNA, 238 bp, Glycine max
  Clone ID: 700762555H1
gataaacctcgtcctagtcgaccaagccaaggaaagcgtgaacaagaccaggaccaggacgaggacgaagatgaagatgaagatcaacctcgcaagagccgcgaatggagatcgaaaaagacacaacccagaagacctagacaagaagaaccacgtgaaagaggatgcgagacaagaaacggggttgaggaaaatatctgcaccttgaagcttcacgagaacattgctcgcccttcac

SEQ ID NO: 62155 - DNA, 106 bp, Glycine max
  Clone ID: 700762556H1
aattattaacacttccttaggtcgagatggggaagcccttcactctgtctctttgttccctttgcttgctactcttgtcgagtgcatgctttgggattagctccag

SEQ ID NO: 62156 - DNA, 236 bp, Glycine max
  Clone ID: 700762557H1
acgaccacgaccacgaccacaacacccggagagaaggaggaagacgaagatgagcaaccacgtccaatcccattcccacgcccacaacctcgtcaagaagaagagcacgagcagagagaggaacaggaatggcctcgcaaggaggaaaaacgcggagaaaagggaagtgaagaggaagatgaggatgaggatgaggaacaagatgaacgtcaattcccattcccacgcccacctca

SEQ ID NO: 62157 - DNA, 58 bp, Glycine max
  Clone ID: 700762558H1
agctcgacgagctcgacccggagaaaaacacgcttctctttgcccacttcttaatcac

SEQ ID NO: 62158 - DNA, 128 bp, Glycine max
  Clone ID: 700762560H1
caccacctcgtcaagaagaagagcacgagcagagagaggaacaggcatggcctcgccaggaggaaaaacgcggagaacagggaagtgaagaggaagatgaggatgaggatgaggaacaagatgaacgt

SEQ ID NO: 62159 - DNA, 234 bp, Glycine max
  Clone ID: 700762561H1
ctccattggtccttaaacactcatcagtcatcaccatggccaagctagttttttccctttgttttctgcttttcagtggctgctgctccgctttcagttccagagagcagcctcaagaaaacgagtgccagatccaaaaactcaatgccctcaaaccggataaccgtatagagtcagaaggagggctcattgagacatggaaccctaacaacaagccattccagtgtgccggtg

SEQ ID NO: 62160 - DNA, 70 bp, Glycine max
  Clone ID: 700762563H1
actagttctagatcgcgagccaccgcccttttttttttttttttttcgtttttttttaaagttttgtaaa

SEQ ID NO: 62161 - DNA, 234 bp, Glycine max
  unsure (1)..(234): unsure at all n locations
  Clone ID: 700762564H1
ctccattggtccttaaagattcatcagtcattaccatggccaagctagtgnttccgctttgttttctgcttttcagtggctgttngttcgatttcagttccagagagcagcttgtataaaacgagtgccagatcgaaaaactcaatgtcgtcaaaccggataagcgtatagagtcagaaggagggctcattgagacatggaaccctagcaacaagccattccagtgtgccggtg

SEQ ID NO: 62162 - DNA, 234 bp, Glycine max
  Clone ID: 700762567H1
ctcgagccgagatgagtttgagggcatcagagatagcgaagaagttgaatctgcaacctcacccagaaggtgggttttacgtggagacattccgagaccattccgtccagctttcgacctctcagctcccccccgaatacaaagtggatcgccctgtatcgacctccatctattttctcgttccttctgggagtgtgtctcgcctccatcgcatactctgcgccgaaacctggc

SEQ ID NO: 62163 - DNA, 222 bp, Glycine max
  Clone ID: 700762568H1
tggggaagcccttcttcactctctctctttcttccctttgcttgctactcttgtcgagtgcatgctttgctattacctccagcaagttcaacgagtgtcaactcaacaacctcaacgcgttggaacccgaccaccgcgttgagtccgaaggtggtcttattgaaacatggaactctcaacactctgagctgcaatgcgccggtgtcactgtttccaaacgca

SEQ ID NO: 62164 - DNA, 234 bp, Glycine max
  Clone ID: 700762569H1
aaatgaccaagttcacaatcctcctcatctctcttctcttctgcatcgcccacacttgcagcgcctccaaatggcagcaccagcaagatagctgccgcaagcagctccagggggtgaacctcacgccctgcgagaagcacatcatggagaagatccaaggccgcggcgatgacgatgatgatgacgacgacgacaatcacattctcaggaccatgcggggaagaatcaactaca

SEQ ID NO: 62165 - DNA, 236 bp, Glycine max
  Clone ID: 700762570H1
ccaaaaggtacatcgcttcagagagggtgatttgatcgcagtgcctactggtgttgcatggtggatgtacaacaatgaagacactcctgttgttgccgtttctattattgacaccaacagcttggagaaccagctcgaccagatgcctaggagattctatcttgctgggaaccaagagcaagagtttctaaaatatcagcagcagcagcaaggaggttcccaaagccataaaggaa

SEQ ID NO: 62166 - DNA, 236 bp, Glycine max
  Clone ID: 700762571H1
gcaaatcaaacttcatggcatttgagtttccttattgacaatcccaaacagtctacagtttttgatattctcttgggaatctctcaagattttgaaattgctggtaatactcttatgccagctttttctgttccacaggctactgccagatcttctgaaaatgcggaatcctctgcatgatctggaatttgtgttttctttcgcttgttcgtttgtttaattcaataaaggaaatt

SEQ ID NO: 62167 - DNA, 235 bp, Glycine max
  Clone ID: 700762572H1
ctcaaggtcgcagaagcagcagctacaggacagtcaccagaagattcgtcacttcaatgaaggagacgtactcgtgattcctcctggtgttccttactggacctataacactggcgatgaaccagttgttgccatcagtcttcttgacacctctaacttcaataaccagcttgatcaaacccctagggtattttaccttgctgggaacccagatatagagtacccagagaccatg

SEQ ID NO: 62168 - DNA, 106 bp, Glycine max
  Clone ID: 700762573H1
tggagatatcaagatgagtgaatcatctggtaggagaagatacctaatggtcgtgggaattaacactgctttcagcagcagaaaaagaagagactcagttcgagag

SEQ ID NO: 62169 - DNA, 231 bp, Glycine max
  Clone ID: 700762575H1
gaaagacacagccattgtttgtttactttccattgattgagcgaaactcttgttttttctgcgatcattttccattgggtggaagaaagtctcaacctttagtcgaaagagcaaggatctgagtgagtgagcgatcatgtgtggtggtgcgattatctccgacttcattccagcgggtcccgccggcggggcgcacgcgtgaccgccgacatcctgtggccgaatttgagg

SEQ ID NO: 62170 - DNA, 247 bp, Glycine max
  Clone ID: 700762576H1
ctcgagccgaatccgctcgaggtcaacccaggtgcgtcctgcaacaactctgttggctgatgggtgtacatatttgtatgctatggtgcatgatagttcagtgtctacaataccaggtgattttgtcattggtgttaagttgacaaccataaacaatatgtgtgcatatgggctcaatcgtggtatttcaggttctcgtcttttgggcaccattcctcagtccatttcacagcaaactgtttggaat

SEQ ID NO: 62171 - DNA, 82 bp, Glycine max
  Clone ID: 700762577H1
actcgagccgctcgagccgctcgagcgctcgagctcgactggtgaacttttgataaaccgagatcacagattgccgcacctt

SEQ ID NO: 62172 - DNA, 238 bp, Glycine max
  Clone ID: 700762579H1
caaatgatatcacagtgaaatcatttgtgtcactggatggactgccaccccaatgcaggatgttcaggttacaattgattggtttatttcctctcaggaatgtgttcccaggacttattgtgttttaaatccacaaaatccttttgtgttaaataggtggatggggaaactgactttcccccagggcacttcccgaaatgttaagagaatgtctctttctatagggggaggagctggt

SEQ ID NO: 62173 - DNA, 81 bp, Glycine max
  Clone ID: 700762580H1
actctccattgtctttgaacactcatcaccatggccaagcttgttctttcgctttgtttccttcttttcagtggctgcttc

SEQ ID NO: 62174 - DNA, 231 bp, Glycine max
  Clone ID: 700762582H1
gggtttccttgtgttgcttcttttctccctcttaggtctctcttctagttccagcatatcaactcatcgttccatattggtccttgacctaaccaagtttaccacacagaaacaggtgtcttcactgttccaactatggaagagtgagcatggacgtgtctaccataaccacgaagaagaggcaaagagacttgagattttcaagaataacttgaactatatcagggacat

SEQ ID NO: 62175 - DNA, 234 bp, Glycine max
  Clone ID: 700762583H1
gcaagctcaacgagtgccaactcaacaacctcaacgcgttggaacccgaccaccgcgttgagtccgaaggtggtttgattcaaacatggaactctcaacaccctgagctgaaatgcgccggtgtcactgtttccaaactcaccctcaaccgcaatggcctccacttgccatcttactcaccttatccccggatgatcatcatcgcccaagggaaaggagcacttggagttgcaa

SEQ ID NO: 62176 - DNA, 218 bp, Glycine max
  Clone ID: 700762584H1
caatatcctagtataccttaataaataatttaagatactatgatgagagcacggttcccattactgttgctgggacttgttttcctggcttcagtttctgtctcatttggcattgcttactgggaaaaagagaaccccaaacacaacaagtgtctccagagttgcaatagcgagagagactcgtacaggaaccaagcatgccacgctcgttgcaacct

SEQ ID NO: 62177 - DNA, 232 bp, Glycine max
  Clone ID: 700762585H1
catttttggcatgatattcccgggttgtcctagcacttatcaagagccgcaagaatctcagcaacgaggacgaagccagaggccccaagaccgtcaccaaaaggtacatcgcttcagagagggtgatttgatcgcagtgcctactggtgttgcatggtggatgtacaacaatgaagacactcctgttgttgccgtttctattattgacaccaacagcttggagaaccagctc

SEQ ID NO: 62178 - DNA, 71 bp, Glycine max
  Clone ID: 700762586H1
atcacttcaactctgcataggaaaactcaatgggggtgtgtagctgccatacattgcaatagaaaaagggg

SEQ ID NO: 62179 - DNA, 235 bp, Glycine max
  Clone ID: 700762587H1
tacaaaagcacaatttgttagtggaaaaaccttcaaatatgatatagttggtgctggttcacattcttcagaagatttttctgaaaaggaagatcaagaaaaacccaaaaagattgatgccagattgagacaaagaatagatcctcaatacaatgaggttcaggctcagatggaaacaaatttgtttaaattgtctcttgatgatgttgaaactcctaaaggttccatgttggat

SEQ ID NO: 62180 - DNA, 104 bp, Glycine max
  Clone ID: 700762588H1
cgcacacagacctaccgtaagagctatggaaagtggaggctttcacggctaccgcaagctccccaacaccaccgctggtaaaccggatagtattacattaaaat

SEQ ID NO: 62181 - DNA, 218 bp, Glycine max
  Clone ID: 700762589H1
caagaaaaacccaaaaagattgatgccagattgagacaaagaatagatcctcaatacaatgaggttcaggctcagatggaaacaaatttgtttaaattgtctcttgatgatgttgaaactcctaaaggttccatgttggatcttaaaatttctcagtctaaaattgcacttcccaagaacacagttggaggaactattctgcgtagtgatctattggc

SEQ ID NO: 62182 - DNA, 231 bp, Glycine max
  Clone ID: 700762590H1
agagacctccttccatagcgaattcgaggagataaacagggttttgttgggagaggaagaggagcagaggcagcaagagggagtgatcgtggaactctcaaaggaacaaattcggcaactgagcagacgtgccaaatctagttcaaggaaaaccatttcctccgaagatgaaccattcaacttgagaagccgcaaccccatctattccaacaactttggaaagttctttga

SEQ ID NO: 62183 - DNA, 229 bp, Glycine max
  Clone ID: 700762591H1
atgtccattggtgcttaaacattcatcaggcatcatgatggataatgtagtaagtactctctataatgtgcttttcaactgctgctggtttgatttgagttctagagatgagtctgatgtcaacgagtgccagatccaaaaactcaatgccctcaaaccggataaccgtatagagtcagaaggagggctcattgagacatggaaccctaacaacaagccattcgagtgt

SEQ ID NO: 62184 - DNA, 238 bp, Glycine max
  Clone ID: 700762592H1
tccaaaccacaatctgaatacaagaacgaataatagacaacaaaagataggactgagttttcttttattcgttcttgtattcagattgtggtttggagatttcttcagaggtcaaaaggttcagatgtactagcaacaaagcaggccttgttgttcattatcttgcttcagtatgttccaagatttctccgaatggtaccattgacttcagagcttaagagaacagccggtgtctttc

SEQ ID NO: 62185 - DNA, 105 bp, Glycine max
  Clone ID: 700762593H1
gataccatcgggttacaaagtcactccccgtgacggccccaggcctcgggacacatgagcagtaccgctcgccatccgacatcaagcatgtgtggttgctgtgat

SEQ ID NO: 62186 - DNA, 237 bp, Glycine max
  Clone ID: 700762594H1
gaagccgcgaccccatctattccaacaagcttggcaagttgtttgagattaccccagagaaaaaccctcagcttcgggacttggatgtcttcctcagtgttgtggatatgaacgagggagctctttttctgccacacttcaattcaaaggccatagtggtactagtgattaatgaaggagaaccacacattgaacttgttggcattaaagaacaacaacagaggcagcaacaggaag

SEQ ID NO: 62187 - DNA, 74 bp, Glycine max
  Clone ID: 700762596H1
cttgagaactgtcagagtctcaaacatcagggtgatgagagtccaatcgcagttgtgaccgagtatgtaatatt

SEQ ID NO: 62188 - DNA, 161 bp, Glycine max
  Clone ID: 700762602H1
cgcacgcacgcgtacggaaccacgcggttccctttgttggtgttgctgggaactgttttcctggcatcagtttgttcctcattaaaggtgagagaggatgagaataaccctttctacttgagaagctctaacagcttcaaaactctctttgagacccaaaa

SEQ ID NO: 62189 - DNA, 173 bp, Glycine max
  Clone ID: 700762604H1
tctatatcaattttggttaagagtcttgaaaaagcaagagaaaaaaaaataccaaccatggcaaccatttctgatcaacctagagggtcctactcctatggaacctcatatggagcaccctatggaaccacgtatgagaccaacaccagcattaacaacccaccttcacgcca

SEQ ID NO: 62190 - DNA, 159 bp, Glycine max
  Clone ID: 700762605H1
cacttccttagttcaatatggggaagcccttcactctctctctttcttccctttgcttgctactcttgtcgagtgcatgctttgctattagctccagcaagctcaacgagtgccaactcaacaacctcaacgcgttggaacccgacaaccgcgttgagt

SEQ ID NO: 62191 - DNA, 163 bp, Glycine max
  Clone ID: 700762606H1
cactgatccgcattgccgttcaaagtggtcttatttgaaaaacacttgggcgttggtgcaaatgtttgcttcgttaattttctctggagacgacaggctcactgagaaccaaatttttacttgcagagatttggacatcttggttgtttattatccaatagca

SEQ ID NO: 62192 - DNA, 137 bp, Glycine max
  Clone ID: 700762607H1
tggtgtatctctttcacatttaagaaaagtctcgaatcttggtttattgattggtggaatactaggcaatccgaaattttcttgaatgatattaaagaaaagagtattctaaaaaaattcatagaatttgaggaact

SEQ ID NO: 62193 - DNA, 184 bp, Glycine max
  Clone ID: 700762608H1
aactcgagccgaatcggctcgaggaatgcatcagatctcaacacgtggaccgcgctgcttataatcggatgcaaacctatttatattcaaccctttagtctccgtttctggtccgccctttcccatctcatctattctcgcctcagcttcaactcaaaacccttccaaaaccctaaaaagccac

SEQ ID NO: 62194 - DNA, 157 bp, Glycine max
  Clone ID: 700762609H1
gtttaatttcaagaacaagatctcaccagcttgaacttgaaattaaacagagaactgagaaagaaacagaagaagtttaatttcaagttcaagctggtgaaatctaggattagtgctcccactttcctatctggtataggacttcgtgggtagactt

SEQ ID NO: 62195 - DNA, 171 bp, Glycine max
  Clone ID: 700762610H1
atctgctagtatttccttctaatacatagtgagttacactattatcaacttgaggttgtgaagaatattaagagtgtgtcacatcacttttactacatttacttgcaagaaatcgatgatgagttcaagtaggagagcatggactgtggcgattagtgttggagttgtgga

SEQ ID NO: 62196 - DNA, 179 bp, Glycine max
  Clone ID: 700762611H1
atattcccgggttgtcctagcacttatcaagagccgcaagaatctcagcaacgaggacgaagccagaggccccaagaccgtcaccaaaaggtacatcgcttcagagagggtgatttgatcgcagtgcctactggtgttgcatggtggatgtacaacaatgaagacactcctgttgttgc

SEQ ID NO: 62197 - DNA, 144 bp, Glycine max
  Clone ID: 700762612H1
cactaccaatggtgattttgttcaaggaaaagctctcgcaatggttaaagttactgtagcatgtgctgctgttggcttgacatcaagttacactcccactccattgttggaatctggattgcaataagccagagggttaattgt

SEQ ID NO: 62198 - DNA, 139 bp, Glycine max
  Clone ID: 700762613H1
aacagctttcatggttccattggtggctggtgatggaaccaaaactcaggcacttgctgtttgccactcagatacttctggactgaatcatcacatgcttcgtgaactcatgggatttgatcttggaaataaccctgtt

SEQ ID NO: 62199 - DNA, 165 bp, Glycine max
  Clone ID: 700762614H1
tgcagggttggtgttgagcggtgagacgatgggggagaacgagaaaggagagcgatggagcggaggctcgacaaatctgacggagatggcctcaaatctcgactctctccagaagcttctcctcaccaaagcccgtcttcgtcgacgacgacaccttctcaaaag

SEQ ID NO: 62200 - DNA, 180 bp, Glycine max
  Clone ID: 700762615H1
aagatctccatatctgttcccaaaagcttgtttgtaagaatggcttccggtgaacagaaattccctcctcaacaacaacaaacacagcctgggaaggagcatgctatgactccagtaccccaattcactagccctgactacaagccttcaaataaacttcaggggaagattgcattagtc

SEQ ID NO: 62201 - DNA, 176 bp, Glycine max
  Clone ID: 700762616H1
cctattggcaaattttttgacatagggcaattttagagcaagtgttgatttgcagcgcactcatcgtatcaaaggaatgattaaaatggtggccacagttggtattcctgagaatacaggtatagcattggcctgtgctatgaatagttcttttagggggcgtgccagttctgatt

SEQ ID NO: 62202 - DNA, 272 bp, Glycine max
  Clone ID: 700762617H1
cacgaaatctgctcgagcttcagatgattttcctgaaaaggaagatcaagaaaaacccaaaaagattgatgccagattgagacaaagaatagatcctcaatacaatgaggttcaggctcagatggaaacaaatttgtttaaattgtctcttgatgatgttgaaactcctaaaggttccatgttggatcttaaaatttctcagtctaaaattgcacttcccaagatcacagttggaggaactattctgcgagatgaccaattggcaattttct

SEQ ID NO: 62203 - DNA, 161 bp, Glycine max
  Clone ID: 700762618H1
aggaaggatctctatggtaacattgtcttgagtggtggttccacaatgttccctggcattgctgataggatgagcaaggagattacagcattggcaccaagtagcatgaaaattaaggttgtagcaccaccagagaggaagtacagtgtctggattggagg

SEQ ID NO: 62204 - DNA, 176 bp, Glycine max
  Clone ID: 700762621H1
caatatcctagtataccttaataaataatttaagatactatgatgagagcacggttcccattactgttgctgggacttgttttcctggcttcagtttctgtctcatttggcattgcttactgggaaaaagagaaccccaaacacaacaagtgtctcaagagtaatcatagcgagag

SEQ ID NO: 62205 - DNA, 168 bp, Glycine max
  Clone ID: 700762623H1
ctcgagcgaatcggctcggattcaagacacaccacaacgcagtcactagctacttgaaggttgtaagaatgggcacgttcctctgagggaattgccctaaacacatccttcaagtagctagtgactgcgttgtggtgtgtctgaaatactatgtattcgaatccttgt

SEQ ID NO: 62206 - DNA, 178 bp, Glycine max
  Clone ID: 700762625H1
caaaagtttttaaattttgtgaggttcattatgaagaacagggacaaacttagatgtcaagttggattcaacccatactccatggaatggactggtttggccactagattactgagtaagggcaatgatattctgtgttgccatcttgctcataacttgcttggtactcaaaccatca

SEQ ID NO: 62207 - DNA, 179 bp, Glycine max
  Clone ID: 700762626H1
gaatgcctttctatagggggaggagctggtgcaaagaatgctattctcatgaatatgccaaatgctgttctttcaatgtggagatattttgttggagatctcgtctttgaagtttctaagatgacttctcgctacattaaatgtacagtctctttcttcatagcatttggaaatttggc

SEQ ID NO: 62208 - DNA, 175 bp, Glycine max
  Clone ID: 700762627H1
aaaattgcacttcccaaaaacacagttgctggaaccattctgcgtagtgacctattcggcaaattttttgacagagggcaattttagagcaagtgttgatttgcagcgcactcatcgtatcaaaggcatgattaaaatggtggccacagttggtattcctgagaatacaggtgta

SEQ ID NO: 62209 - DNA, 53 bp, Glycine max
  Clone ID: 700762628H1
gggtgttgctcacattggtgaattgaaatctggtgtctatgttccacacaaca

SEQ ID NO: 62210 - DNA, 126 bp, Glycine max
  Clone ID: 700762629H1
tctcgagccgctcgagccgctcgagcggtcgagcacacaactagtacaagtacttcctagcaatcacgaccaacaacaactgtggcaaattatcaaaagcactacgatgatcagggtcgcaaggtt

SEQ ID NO: 62211 - DNA, 65 bp, Glycine max
  Clone ID: 700762631H1
ctcgagccgttttggttggctttggcaaaaaacaaacaaacaaaaaagggcgccccccacttaac

SEQ ID NO: 62212 - DNA, 148 bp, Glycine max
  Clone ID: 700762632H1
cacattcttcagaagattttcctgaacaggaagatcaagataaacccagaaagattgatgccagattgagacaaagaatagatcctcaatacaatgaggttcaggctcagatggaaacaaatttgtttaaattgcctctggatgatgt

SEQ ID NO: 62213 - DNA, 170 bp, Glycine max
  Clone ID: 700762633H1
tgaaagtgaataagaagaacaagagatgagtcagggtggtcagggaggaggaggatcccattccctggcgtttcgcgtcatgcgtctgtgccgcccttccttcaacgtcgaacctcccctccgcttcgaccccgccgacctcttcgccggcgaggacctcttagacgacc

SEQ ID NO: 62214 - DNA, 180 bp, Glycine max
  Clone ID: 700762634H1
agcatgtgctgctgttggcttgacatcaagctatactccgactccattgttggaatctggtttgcaaaaagacagagggttaattgtggagtattttggaaggatgtcttacgttgctcataacgttaatcacccccaagagaaagatttgttggaaggaaatttcccctttgatattaa

SEQ ID NO: 62215 - DNA, 173 bp, Glycine max
  Clone ID: 700762635H1
gaaaggatcagaggcaaggggtttgggttgtgctgtatgaggaaccaaatcactaaaaaattactatgagcagagaattaaaagtgttttgggggtgaagggaaaacatgctgaaaagcttgtgttctcggatctgaagggttttgacttttgaatccctctagtgtatcctt

SEQ ID NO: 62216 - DNA, 175 bp, Glycine max
  Clone ID: 700762636H1
gcattttgatgcatgtaagtggacaaaatcggaaccacattcctgggaattgatcttcccaatagaggtatgtggtcctaataatggttttgaaatgtggagttctgagtgggcaaatcaaacttcatggcatttgagttcccttattgacaaccccaaacagtctacagttttt

SEQ ID NO: 62217 - DNA, 138 bp, Glycine max
  Clone ID: 700762638H1
tgaacactcatcaccatggctaagcttgttctttccctttgtttcgttcttttcagttggtgcttcgatctgagatatcaggcacagcaaagtgagtgcgagatccaaaatttgaatgccctcaaaccggataacggg

SEQ ID NO: 62218 - DNA, 136 bp, Glycine max
  Clone ID: 700762639H1
gaaaaaagagaagaagatgggtttgaagaacaacatggtggtgctaaaggtgtgtttggtgctacttttccttgtggggggtactactagtgccaacttgaggctgagtaagcttggcctgctcatgaaaagtgat

SEQ ID NO: 62219 - DNA, 218 bp, Glycine max
  Clone ID: 700762641H1
tcggctctatatttccgcacttccaaaggttgctcttcctgttgctgctcctgttgttgttcttttaggccgaattgtctgaacaagatatatttgtaatcccagcaggttatccagttgtggtcaacgctacctcaaatctgaatttctttgctattggtattaatgccgagaacaaccagaggatcttcctcgaaggttcgcaagacaatgtgata

SEQ ID NO: 62220 - DNA, 194 bp, Glycine max
  Clone ID: 700762642H1
cagacttcaatctggtgatgccctgagagtcccctcaggaaccacatactatgtggtcaaccctgacaacaacgaaaatctcagattaataacactcgccatacccgttaacaagcgtggtagatttgagagtttctacatatctagcactgaagctcaacaatcctacttgcagggattcagcaggaacattt

SEQ ID NO: 62221 - DNA, 172 bp, Glycine max
  Clone ID: 700762643H1
tacacactcatcagtcatcaccatggccaagctagttttttccctttgatttctgctttacagtggctgctgcttcgatttcagttccagacagcagactcagagcgacgagtgccagatccataaactcaatgccctcaaaccggataaccgtatagactcaccaggaggg

SEQ ID NO: 62222 - DNA, 171 bp, Glycine max
  Clone ID: 700762644H1
ggtcatcaaagccagaaaggaaagcatcagcaagaagaagaaaacgaaggaggcagcatattgagtggcttcaccctggaattcttggaacatgcattcagcgtggacaagcagatagcgataaacctacaaggagagaacgaaggggaagacaagggagccattgtgaca

SEQ ID NO: 62223 - DNA, 185 bp, Glycine max
  Clone ID: 700762647H1
aattcggctagagaaattttgataaacagagatgacaggttgtagcagcttaaaaccggaaacaaaagtaatcgttacttgatttcaagaatctatgaatttattaatatttatttgtgtacgatttgttaagggaagaaaatgactatatgtgatggaaaaagatttagtgaatgattttattt

SEQ ID NO: 62224 - DNA, 151 bp, Glycine max
  Clone ID: 700762648H1
gctcgagactaaagtgtgtcaaactcactatgatactgagactattgtctcctccagagtaaccattgttgaatacgcttttgctcctctgcactactctgcatctcccatgttgctacatggttctcactgagcctgatgatgatgaggt

SEQ ID NO: 62225 - DNA, 149 bp, Glycine max
  Clone ID: 700762649H1
ccgctacgaagctggcgtcgtcccccccggagcccgtttcgaaccgacgcgttatgaagccggcgtcaaagcgccctccatttaccattccgagagaggtccaacgacttcccaggtcctcgccgtcctcgccggcctcccggtcggtg

SEQ ID NO: 62226 - DNA, 148 bp, Glycine max
  Clone ID: 700762650H1
cgattgctagaatggaatttcgatgctcagtcatctcttttaccattctcttctctcttgctcttgcaggagagagccatgtccatgcatcgctacctgaggaagattattgggaagctgtttggccaaacactcccattcccactgg

SEQ ID NO: 62227 - DNA, 100 bp, Glycine max
  Clone ID: 700762651H1
atttgaaattttgataaaccgcgatcacaggttgccgcaccttaaaaccggaaacaaaagcagtcgttacttgatttcaagaatctctcaattacttcct

SEQ ID NO: 62228 - DNA, 146 bp, Glycine max
  Clone ID: 700762654H1
gacgaagatgaagatgaagatcaacctcgcaagagccgcgaatggagatcgaaaaagacacaacccagaagacctagacaagaagaaccacgtgaaagaggatgcgagacaagaaacggggttgaggaaaatatctgcaccttgaa

SEQ ID NO: 62229 - DNA, 106 bp, Glycine max
  Clone ID: 700762657H1
caacgagcaggtaaagcttttccaaacaatgctcaacagtagatcgatatcatcatttggatcagttcgcactcatacattatcaaatgttactttacccatgaaa

SEQ ID NO: 62230 - DNA, 107 bp, Glycine max
  Clone ID: 700762658H1
gacatggttcttgaaactgacattttctttttcctttctggtcacggtactccatgtataggacaccgactagatacgctgtcctatacatggagtaccgtaccaaa

SEQ ID NO: 62231 - DNA, 146 bp, Glycine max
  Clone ID: 700762663H1
cgccgccggtggtgatatacccaccaccaatctcaccaccgtacccgccgccgcacggtggcagtccttttcctcaaaggacttgcccaattgatgccctaaaattggggctttgcttggatgtgcttggagggttggtgcatgtg

SEQ ID NO: 62232 - DNA, 145 bp, Glycine max
  Clone ID: 700762665H1
ctttgcactcgtccgtggtgaatctgtttatgcagcaaatacttgatgggcattgggatgagagcatagtcacattgaataaaattggtctagcagatgaaaatgttgtccaggcagcttcgtttttgatattggagcagaagtt

SEQ ID NO: 62233 - DNA, 143 bp, Glycine max
  Clone ID: 700762666H1
acaatgaagacactcctgttgttgccgtttctattattgacaccaacagcttggagaaccagctcgaccagatgcctaggagattctatcttgctgggaaccaagagcaagagtttctaaaatatcagcaagagcaaggaggt

SEQ ID NO: 62234 - DNA, 142 bp, Glycine max
  Clone ID: 700762667H1
atgtcaccaattatccatattgttaccgtgggatctggcacaacagaatcaatagcaaatgttacagaaattcactatggattaaatttctcttctgataatggtgatgatgaatttggaatttcctctgtcaaattttcaa

SEQ ID NO: 62235 - DNA, 131 bp, Glycine max
  Clone ID: 700762668H1
gatcagcgctgttccaagaccttcctcccaagaggatccgttgttcctcttcttcttctcccgttcacctctctcctcctccttcttccctcctccaccacctcgccgcccttttccctgacatggaccac

SEQ ID NO: 62236 - DNA, 136 bp, Glycine max
  Clone ID: 700762669H1
cttaaaaccggaaacaaaagcaatcgatacttgatttcaagaatctctcaattacttcctacttctttgtgtacgatttcttaagggaaagaaaatcactctctgtgctggccacagacttcgtgcatcattttct

SEQ ID NO: 62237 - DNA, 175 bp, Glycine max
  Clone ID: 700762670H1
gctggtaatactcttatgccagctttttctgttccacaggctactgccagatcttctgaaaatgcggaatcctctgcatgatctggaatttgtgttttctttcatttgtccgtttgtttaattcaataaaggaaattaggcatgaccctcttgttgagtatgctctgcctatttg

SEQ ID NO: 62238 - DNA, 98 bp, Glycine max
  Clone ID: 700762671H1
tggagggcaagaaaaagacaacaaattgccttctcttcctgttcctctccctcaccctctgtctctctctctccgccgcattacaactccaaaccaag

SEQ ID NO: 62239 - DNA, 145 bp, Glycine max
  Clone ID: 700762672H1
accttgctctatactacacagtacagacactagaagaataatggcttccatcctccactactttgtagccctctctctttcttgctctattctccgcttcttatccgactcagtcacccctacaaaaccaataaaccttgttgtt

SEQ ID NO: 62240 - DNA, 147 bp, Glycine max
  Clone ID: 700762673H1
cattggtccttaaacactcatcagtcatcaccatggccaagctagttttttccctttgttttctgcttttcagtggctgctgcttcgctttcagttccagagagcagcctcagcaaaacgagtgccagatccaaaaactcaatgccc

SEQ ID NO: 62241 - DNA, 100 bp, Glycine max
  Clone ID: 700762674H1
tcatcgcatcagcatggaacacagcacatcctggaacgaggcagataacagcgtctcttcacaacgaagcctcgtttcagttccttccctcaactcacac

SEQ ID NO: 62242 - DNA, 253 bp, Glycine max
  Clone ID: 700762675H1
ttttgcctttctctctcttcactgggaggagagagagagagagagagacggaggaagtgacagactggcattaaggaggacgaccctttggtgtttggatcttcaagaaagagagacccttgggatttcgtcaccatgagtctcttcggtcttggaaacagaaaccaaaaaacatttcgtccaaaaaagagtgctccatctggaagtaagggtgctcaacttcaaaaacacatcgatgccacgttgggtagtg

SEQ ID NO: 62243 - DNA, 257 bp, Glycine max
  Clone ID: 700762676H1
gcaatttcttacttaattattactttgtcgttaattcctaattgctaaatgcttgataaatagtcctaacactttttccttgcaaaatcttatggttttggacaagtattaagaaaatcatagcatttggctcactggctagttatattccgttcttacctatgccataacttcaccatattgactaaatataagttgaaatatatcttagtttgctctaccattactcaatcataggatataactattttgctttt

SEQ ID NO: 62244 - DNA, 101 bp, Glycine max
  Clone ID: 700762678H1
accaatttctgtggcggctctatcagtacttattttctcttctgagattgagatttggatccaccctcttccccttctttcggtctttgatttgatctttt

SEQ ID NO: 62245 - DNA, 212 bp, Glycine max
  Clone ID: 700762681H1
aactggaaatgtaggaagctgttccccactagacaatagcacagctgcaccaaatacagagacaatgcacaactttccatctcattcaaatggcactccttcaaatcaaaaatctaatgggagcaacaacatcaatgacagggcctccactaatacatatctgggcaccaaacctgatacttttgacaagaagccggattctggaagaggga

SEQ ID NO: 62246 - DNA, 225 bp, Glycine max
  Clone ID: 700762682H1
gtataccttaataaataatttaagatactatgatgagagcacggttcccattactgttgctgggacttgttttcctggcttcagtttctgtctcatttggcattgcttactgggaaaaagagaaccccaaacacaacaagtgtctccagagttgcaatagcgagagagactcgtacaggaaccaagcatgccacgctcgttgaaacctccttagggtggagaaag

SEQ ID NO: 62247 - DNA, 140 bp, Glycine max
  Clone ID: 700762684H1
cacaaaggcttatgctaccagaaccatccttttcctgaaaaatgacggaactttaaggccacttgccatagagttgagtttgccacatcctcagggagatcaatctggtgcttttagtcaagtttttctgcctgcagatg

SEQ ID NO: 62248 - DNA, 143 bp, Glycine max
  Clone ID: 700762686H1
taaacactcatcagtcatcatcatggccaagctagttttttccctttgttttctgcttttcagtggctgctgcttcgctttcagttccagagagcagcctcagcaaaacgagtgccagatccaaaaactcaatgccctcaaac

SEQ ID NO: 62249 - DNA, 221 bp, Glycine max
  Clone ID: 700762687H1
gcttgcttgtactggaccttatctctatcgtgatactgtactgttgcagaaggtttgtagggtgttgagaggttattacctttctgctcttgagcttgtaagtcatggcaatggtgtcttgaatcctcaattacaagttcctggaaatcctcacctacatcttaaggaggcaaggctaagggtggaggatgctttaggagcatgtctactaccatctctgc

SEQ ID NO: 62250 - DNA, 145 bp, Glycine max
  Clone ID: 700762688H1
gagcaaagagagagtgtgtgaaaagtgaaacaaaaaacagaacaacaatggcgacactttaggttcctcagcctcttccccccgttgcagatggttgtgagcagctccgaaaagccttctcaggttggggaactaacgaggagct

SEQ ID NO: 62251 - DNA, 143 bp, Glycine max
  Clone ID: 700762689H1
gtttgttgttcctcactgacctcaccatggcgaccagagccaagctttctttagctatcttccttttctttcttttagccttgatttcaaacctagccttgggcaaacttaaagaaaccgaggtcgaagaagatcccgagctc

SEQ ID NO: 62252 - DNA, 142 bp, Glycine max
  Clone ID: 700762692H1
ccctaattgaatccaagcaagcagggaaggggagtattattatttgatacgaaatacaaagctcttcaaaacccaaacaacaaccgtactgcacaactccaccactgtgcaatggccgacgaggaacctgttgatcagaaga

SEQ ID NO: 62253 - DNA, 143 bp, Glycine max
  Clone ID: 700762693H1
aagtcttccatagccccccaaaaatgaagagcaccatcttctttgctctctttctcttttgtgccttcaccacctcatacctaccttcagccatcgctgatttcgtgctcgataatgaaggtaaccctcttgaaaatggtggc

SEQ ID NO: 62254 - DNA, 146 bp, Glycine max
  Clone ID: 700762696H1
ggaaaaacttgcaaggaagaacaatgatcaaagtctctccaatcgacttgggccggttcaactgccatacactttgctccatcctaacagtgaggaagggttgacttgcagggggattcctaatagcatctctatctaagggagca

SEQ ID NO: 62255 - DNA, 254 bp, Glycine max
  Clone ID: 700762701H1
ctcgagccgcaagtacttccttacaatcaaaaccaacaacaactatggcaagttatcaaaagcactacgatgatcagggtcgcaaggttgacgagtatggcaacgttgagaagcaaaccgacgaatacggcaaccctgttcatgctgctagtgtcacctatgtagccaccagaactgctgctggtggttacagtgatgacattaataagcaacatgataccaccaatgcctacggcgtagacactggtagacag

SEQ ID NO: 62256 - DNA, 238 bp, Glycine max
  Clone ID: 700762702H1
ctcggccgtttggagcagctgcaggttccccatgtgaatcaaaatcgttctgtgaatgcctctcgcggtcgtagaaaaagtgctgatgattttactcatggtagaatcgccacagcttctgtttccccgctctcacatgacattgcaaatacacgtccttgaaagctgatgcatgtttccacatgaactcaaacacgttcatatcatgcacacatgctatctaataggttttacgtat

SEQ ID NO: 62257 - DNA, 255 bp, Glycine max
  Clone ID: 700762703H1
gccgcctcagccagctcctgcttctcgctctgttaaacctcaaaaccttctaaaaccccttttcctatttctatgcatcttctccttcttatctaatccgtacttcacctttaattgcttaagtcctattctcgctgaaggaggaaatggctggaaaatcgggcaaggggaggaacagaaaagggtcccataatgctcccagtgcttcagaacctccagtccttccaatgttcctgtgaatgctatgtggaagtc

SEQ ID NO: 62258 - DNA, 93 bp, Glycine max
  Clone ID: 700762705H1
aggggaagcccttcactctctctctttcttccctttgcttgctactcttgtcgagtgcatgctttgctattagctccagcaagctcaacgagt

SEQ ID NO: 62259 - DNA, 108 bp, Glycine max
  Clone ID: 700762706H1
cactcatcagtcatcaccatggccaagctagttttttccctttgttttctgcttttcagtggctgctgcttcgctttcagttccagagagcagcctcagcaaaacgag

SEQ ID NO: 62260 - DNA, 256 bp, Glycine max
  Clone ID: 700762707H1
atttggctgatgacaccatcaattttgaggcttttccccacaagctggtgcagtttggagagattcaggaaaaagttgtattgaaattttcacaagaggaatttcttacagcttggtcaactcaggtgcgtcctgcaacaactctgttggctgatgggtgtccatatttgtatgctatggtgcatgataattcagtgtctacaataccaggtgattttgtcattggtgttaagttgacaaccataaacaatatgtg

SEQ ID NO: 62261 - DNA, 213 bp, Glycine max
  Clone ID: 700762708H1
gcacctcattgccataccccctttcaagcaggagaaaatctctcgctccctttctctttcttctcttcacgccgccatcaccatgccttcactctctctctctgaaactgacaccaccacccctaaacctatttccaacaaaaagataccaaagacccaatccctcactgatcccgacctcgatggggttacggggaagatgacgaagaagcg

SEQ ID NO: 62262 - DNA, 256 bp, Glycine max
  Clone ID: 700762709H1
gcagtgatgatcctgaggattccaaagctgtgaagaactttttgctgtggaggatggagaaagcatgatgaatggggaaaacaatgatgagtatgatgatgtattgactgcagaggaaagaatgcaattagattctgccctgcatatggggaactctgatgttacttacgaggatgaggaacatggagcctttgatggtcaagaaaatggttctgcagcttcctgtgagacttctgaagccaatggtgtggttaaa

SEQ ID NO: 62263 - DNA, 253 bp, Glycine max
  Clone ID: 700762710H1
aagaaatgaagagtactatcttctttgctctctttctagtttgtgccttcaccatctcatacctgccttcagccaccgctcagttcgtgctcgacactgatgatgatcctcttcaaaacggtggcacatactatatgttgccagttatgagaggaaagggcggtggaatagaagtagattcaactggaaaagaaatatgccctctcactgttgtgcaatcacccaatgagctcgataaggggattggactagt

SEQ ID NO: 62264 - DNA, 245 bp, Glycine max
  Clone ID: 700762711H1
taatatcaccattactgatggtattgacaaaactagtgcaactttgcaatttagaaagttagcagattgtgattttctcaagagaaactttaagcagatgtctaatgttttgtgggtggctcctgaggacaaggcgagtttatggtcacaacttcattatgtttcatgtaataatctggaaatgcaagaagcttatcttgtcaatctcgtaaatgtgttacgagaattgtatttgcacagtccag

SEQ ID NO: 62265 - DNA, 252 bp, Glycine max
  unsure (1)..(252): unsure at all n locations
  Clone ID: 700762712H1
tgttagactctgcttctttctccaacttcacacacaaaaaaacatggcaaaggatagaacaattggtgtggctctagatttacccanaagcagcaagaatgctctgaaatgggcatttgagaacttagccgataaaggtgacaccatttatgtcattcacatcaacccaaactctctagacgagtcacgcaacaagctatgggcaaaatctggttctcctcttattctttggtagagttcagagagctgaga

SEQ ID NO: 62266 - DNA, 95 bp, Glycine max
  Clone ID: 700762713H1
caaaggctttagcttgccttttgttcactgtaaaataataatgtaagtactctctataatgagtcacgaaacttttgcgggaataaaaggagaaa

SEQ ID NO: 62267 - DNA, 254 bp, Glycine max
  Clone ID: 700762714H1
tcaatatcctagtataccttaataaataatttaagatactatgatgagagcacggttcccattactgttgctgggacttgttttcctggcttcagtttctgtctcatttggcattgcttactgggaaaaagagaaccccaaacacaacaagtgtctccagagttgcaatagcgagagagactcgtacaggaaccaagcatgccacgctcgttgcaacctccttaaggtggagaaagaagaatgtgcagaaggtg

SEQ ID NO: 62268 - DNA, 161 bp, Glycine max
  Clone ID: 700762716H1
aacacttccttagttcaatatggggaagcccttcactctctctctttcttccctttgcttgctactcttgtcgagtgcatgctttgctattagctccagcaagctcaacgagtgccaactcaacaacctcaacgcgttggaacccgacaaccgcgttgagt

SEQ ID NO: 62269 - DNA, 246 bp, Glycine max
  Clone ID: 700762717H1
cttaattattaacacttccttagttcaatatggggaagcccttcactctctctctttcttccctttgcttgctactcttgtcgagtgcatgctttgctattagctccagcaagctcaacgagtgccaactcaacaacctcaacgcgttggaacccgaccaccgcgttgagtccgaaggtggtttgattcaaacatggaactctcaacaccctgagctgaaatgcgccggtgtcactgtttccaaac

SEQ ID NO: 62270 - DNA, 224 bp, Glycine max
  Clone ID: 700762718H1
taaaagcataagagatgcttcgtatactacacaacctctagaactgcttaatgtgttaagttttgaaaacctgaggaaccatggaagcattattagtgattctgaaggcaacgcaggtgacagtgggaccacaaggtctattgacaatgaggtaattggtgaccgtcaacttgatgtcaaatagtaatgggaaattgtctccactggcatcctcaaatacaatg

SEQ ID NO: 62271 - DNA, 94 bp, Glycine max
  Clone ID: 700762719H1
atactatgatgagagtgcggtttcctttgtaggtgttgctgggaactgttttcctggcatcagtcagtgtctcattaaaggtgagagaggatga

SEQ ID NO: 62272 - DNA, 194 bp, Glycine max
  Clone ID: 700762720H1
gcgatgacagagaaggtgttgagggagcatgaggaggctagggctaaggaagatgctgactctgataggaagaaggatctttttgatattttgttgaacctcattgaagctgatggtgctgacaataagctcactagagagagtgccaaagcctttgctctggacatgttcatcgccggcacaaacggccccga

SEQ ID NO: 62273 - DNA, 169 bp, Glycine max
  Clone ID: 700762721H1
gttgtgcctcactgacctcaccatggcgaccagagccatgcttactttagctatcagcctactctttctatgagccttgatttcagacctagccttgggcaaacttatagaaatcgatgtcgtagaagatcccgagctcgtaacatgcagacaccagtgccaacagcaa

SEQ ID NO: 62274 - DNA, 207 bp, Glycine max
  Clone ID: 700762722H1
aacttattaacactttccttagttcaatatggggaagcccttcttcactctctctcttgcttccctttgcttgctactcttgtcgagtgcatgctttgctattacctccagcaagttcaacgagtgccaactcaacaaccaaaacgcgttggaacccgaccaccgcgttgagtccgaaggtggtcttattgaaacatggaactctca

SEQ ID NO: 62275 - DNA, 256 bp, Glycine max
  Clone ID: 700762723H1
cttaattattaacacttccttagttcaatatggggaagcccttcactctctctctttcttccctttgcttgctactcttgtcgagtgcatgctttgctattagctccagcaagctcaacgagtgccaactcaacaacctcaacgcgttggaacccgaccaccgcgttgagtccgaaggtggtgtgattacatacatggactctcaacaccccgagctgaaatgcgccggtggtcatgtttccaaactcaccctcaa

SEQ ID NO: 62276 - DNA, 202 bp, Glycine max
  Clone ID: 700762724H1
ctcgagccgctatatacacacacacacacactaagaataatggcttctatcctccactacattttagccctctctctatctctctctatccttttcttcttatccgactccgtccccattccccaacaccacactaaccctacaatatctataaaccttctggttctacccgttcaaaatgatgcttccacagggctccatt

SEQ ID NO: 62277 - DNA, 214 bp, Glycine max
  Clone ID: 700762725H1
gcaagtttagcaacagttcgtttagaagaaaatgatgtggaagagcttgaaatgttactcgaggcttatttcagtgaaatcgaccacacattgaacaaattaaccacactgcgagagtacattgatgataccgaagattatattaatattcaacttgacaaccatcgtaatcagctgattcagttggagctctttcttagctccagaactgatt

SEQ ID NO: 62278 - DNA, 228 bp, Glycine max
  Clone ID: 700762726H1
tatacacacacacacacacactaagaataatggcttctatcctccactactttttagccctctctctttctttctctttccttttcttcttatccgactccgtccccattccccaacaccacactaaccctacaaaacctataaaccttctggttctacccgttcaaaatgatgcttccacagggctccattgggccaacctccaaaaaaggacccctctaatgcaag

SEQ ID NO: 62279 - DNA, 174 bp, Glycine max
  Clone ID: 700762727H1
tgataaactgcgatcacaggttgccgcaccttaaaaccggaaacaaaagcaatcgttacttgatttcaagaatttctcaatttctttctacttctttgtgtacgatttcttaagggaaagaaaatcactctctgtgctggccacagacttcgtgaatcatttacttttccacac

SEQ ID NO: 62280 - DNA, 129 bp, Glycine max
  Clone ID: 700762728H1
atcagtttttcatcaccaccacaaagactgttgcgtgaaaggacacacctgctgttggcttgttgttcaaggatggcaatcttgtaagacagatgtttggagagttgaatgtggaatcccttctggatt

SEQ ID NO: 62281 - DNA, 250 bp, Glycine max
  Clone ID: 700762729H1
gttcaatatcctagtataccttaataaataatttaagatactatgatgagagcacggttcccattactgttgctgggacttgttttcctggcttcagtttctgtctcatttggcattgcttactgggaaaaagagaaccccatacacaacaagtgtctccagagttgcaatagcgagagagactcgtacaggaaccaagcatgccacgctcgttgcaacctccttaaagtggagaaagcagaatgtgaag

SEQ ID NO: 62282 - DNA, 250 bp, Glycine max
  Clone ID: 700762730H1
cggctcgaggcagccgttaattttggtcagtatccttatggaggtttgataatgaaccgcccaactgcttctagaaggttgcttcctgagaaaggcaccccagaatatgaagaaatgattaataaccatgaaaaggcttatttgagaacaattacatcaaagttgccgactctcattagcctttcagtgatagagatcttgtcgacacatgcttctgatgaggtctaccttggccagagggacaaccaca

SEQ ID NO: 62283 - DNA, 247 bp, Glycine max
  Clone ID: 700762731H1
cttccatagccccccaaaaatgaagagcaccatcttctttgctcactttctcttttgtgccttcaccacctcatacctaccttcagccatcgctgatttcgtgctcgataatgaaggtaaccctcttgaaaatggtggcacatattatatcttgtcagacataacagcatttggtggaataagagcagccccaacgggaaatgaaagatgccctctcactgtggtgcaatctcgcaatgagctcgac

SEQ ID NO: 62284 - DNA, 162 bp, Glycine max
  Clone ID: 700762732H1
agctctttaaagataacatttttccaagcaaactattttctgcagaggttgttctaattttgaaaaggataaaatttaagtgttattcttcaattaaacttggtttttcctgggtcatgctgagctgtaattccaaccattaataagcagattaatatagta

SEQ ID NO: 62285 - DNA, 249 bp, Glycine max
  Clone ID: 700762733H1
ggtagtgtgtccctaagaatgcgcgggtggaccccacactccacaacaaaacaacaacgatggtgggattctacgacctctccgacaccgacaacgacaacgactccgccatcctcgctggcccaagacgcagtcgttttggagcaagtctccgccatcaacttctccggcttcaccgacgaatcccttctcccctcccaactcgaaaccgtttccgcaacctcaaattcttccctccctccaaaacca

SEQ ID NO: 62286 - DNA, 160 bp, Glycine max
  Clone ID: 700762734H1
attgtaacttgtaacaacaactatggctagcgatgacagcgaagagttcaggctagtgtcagcggcgttcaaaaacggggggaagttaccgaggcactacaccgacgatagtcagggtacgacgaagtccatatcccctccattggagtggtataacctc

SEQ ID NO: 62287 - DNA, 163 bp, Glycine max
  Clone ID: 700762736H1
agacaattcaattcaatctgcctcgatcatggagaggaaaacatttgggtttttgttcttgctcctccttgtcttagcttctgatgtgacggtgaagagagcagaggcgatcagattgcttgacaatgaggcacgggttccagggtagatgcttatgcgacag

SEQ ID NO: 62288 - DNA, 220 bp, Glycine max
  Clone ID: 700762738H1
taggaatataagaactaagatggattggatcggagcgtaccgcggaggccagagaagcagggactggtgcgacccttcatcaccattcactgatttgtgggaccctcgtcgtgtcggtgacgctgatgatatcacctctcctctcgcccatgctcacgttgactggcgtgagactgataaagctcatatcttccgtgctgatcttccaggggtgaagaag

SEQ ID NO: 62289 - DNA, 154 bp, Glycine max
  Clone ID: 700762739H1
ctcgagccgcgcgatcacaggttgccgcaccttaaaaccggaaacaaaagcaatcgttactacgatttcaagaatctctcaatttcttcctacttctttgtgtacgatctcttaagggacagataatcactctctgtgctggccacagacttcg

SEQ ID NO: 62290 - DNA, 231 bp, Glycine max
  Clone ID: 700762740H1
aattttcacaagaggaatttcttacagcttggtcaacccaggtgcgtcctgcaacaactctgttggctgatgggtgtccatatttgtatgctatggtgcatgatagttcagtgtctacaataccaggtgattttgtcattggtgttaagttgacaaccataaacaatatgtgtgcatatgggctcaatcctggtatttcaggttctcgtcttttgggcaccattcctcagt

SEQ ID NO: 62291 - DNA, 245 bp, Glycine max
  Clone ID: 700762741H1
gaatgcagcagtcaaaaggagtgattgggcctcattggtacaagtgtttttaacaaacagcaacagtacagagcattttgatgcatgtaagtggacaaaatcggaaccacattcctgggaattgatcttcccaatagaggtatgtggtcctaataatggttttgaaatgtggagttctgagtgggcaaatcaaacttcatggcatttgagttccctattgacaatccaaacagtctacagttttg

SEQ ID NO: 62292 - DNA, 230 bp, Glycine max
  Clone ID: 700762742H1
cttggatcctgacaaattcaaagaaatggctactaaggtctatgattttcaaaagcccgacactagtccacttttcaagcttctagcatcagggtttgcaaattatgatggcgacaagtgggctaaacacagaaagatcgtgagtccagcattcaatgtagagataatgaagctcttggtaccgatattttgccagagttgcgatgatttgatcagccaatgggagagtt

SEQ ID NO: 62293 - DNA, 226 bp, Glycine max
  Clone ID: 700762743H1
gaaattttgataaaccgcgatcacaggttgccgcaccttaaaaccggaaacaaaagcaatcgttacttgatttcaagaatctctcaatttcttcctacttctttgtgtacgatttcttaagggaaagaaaatcactctctgtgctggccacagacttcgtgaatcattttcttttccactctaagtttatttgctagacactctcctatttgatataggactcgtg

SEQ ID NO: 62294 - DNA, 239 bp, Glycine max
  Clone ID: 700762745H1
caccaggtgcccttctaatgggagatgccttcaatatgcgtcaccctttaaccggaggaggaatgactgtggctttatctgacattgttgtgctaagggacttacttaaaccccttcatgatctccatgatgcttctgctctttgcagataccttgaatcattctacaccctacgcaagctcgtagcatctacaataaacacactagccggggcattgtacaaagttttttgtgcatct

SEQ ID NO: 62295 - DNA, 222 bp, Glycine max
  Clone ID: 700762746H1
ttgaacactcatcaccatggccaagcttgttctttccctttgtttccttcttttcagtggctgcttcgctctgagagagcaggcacagcaaaatgagtgccagatccaaaagctgaatgccctcaaaccggataaccgtatagagtcggaaggtgggttcattgagacctggaaccctaacaacaagccattccagtgtgccggtgttgcctctctcgctgc

SEQ ID NO: 62296 - DNA, 115 bp, Glycine max
  unsure (1)..(115): unsure at all n locations
  Clone ID: 700762748H1
tcgcacgcacgcgtgcgtggcactcggctcgaggaccgctcgctcgcactgtgcagatcttaatcaagaggagtgagttncgtctttccagccatgacgacgctggtcctgcatg

SEQ ID NO: 62297 - DNA, 98 bp, Glycine max
  Clone ID: 700762749H1
caccaggctggagtagtcctcgatataccgacatcttattggcagtatgctaagttcagctaatcaccactccaactcgagccatagcctgagagatc

SEQ ID NO: 62298 - DNA, 261 bp, Glycine max
  Clone ID: 700762750H1
gacacccatcagccaacagagttgttgcaggacgcacctgagttgaccaagctgtaagaaattccaggtgattttgtcattggtgtcaagttgacaaccataaacaatatgtgtgcatatgaggctcaatcctggtatattcagttctcgacttttgggcaccattgctgcagtccatttgcacagcaaactgtgttggacttcaaatggccaacagttgagaacacccattgaattttgattctaagcaagcagagcttt

SEQ ID NO: 62299 - DNA, 250 bp, Glycine max
  unsure (1)..(250): unsure at all n locations
  Clone ID: 700762752H1
ctcgagccgattgaaattttcacaagaggaatttcttacagcttggtcaacccaggtgcgtactgcaacaactctgttggctgatgggtgtccatatttgtatgctatggtgcatgatagttcagtgtctacaataccaggtgatttagtcattggtgttaagttgacaaccattaacaatatgtgtgcatatgggctcaatcctggtatntcaagttctcgtcttttgggcaccattctcagtccattt

SEQ ID NO: 62300 - DNA, 250 bp, Glycine max
  Clone ID: 700762755H1
ctatgatgagagtgcggtttcctttgttggtgttgctgggaactgttttcctggcatcagtttgtgtctcattaaaggtgagagaggatgagaataaccctttctacttgagaagctctaacagcttccaaactctctttgagaaccaaaacggtcgcattcgtctcctccagagattcaacaaacgctccccacaacttgagacccgtcgagactaccggattgtccagtttcagtcaaaaccaacaca

SEQ ID NO: 62301 - DNA, 107 bp, Glycine max
  Clone ID: 700762756H1
ccattggtccttaaacactcatcagtcatcaccatggccaagctagttttatccctttgtttactgcttttcagtggatgctgcttcgctatcagttccagagagca

SEQ ID NO: 62302 - DNA, 218 bp, Glycine max
  Clone ID: 700762757H1
aagggcttggagactcatctgaatcagcccctattgcctttcctcaagacatacaaatggaggaaaggcctgaacctgttaggaacaacccacctcacggtactcggcgctaccaggatcagatggtcccaagtattacttcttcccatgtgagagtggaagaggtagaaacatcttcagaccttcgaaactcggctgcagacagcagagccgaagtg

SEQ ID NO: 62303 - DNA, 228 bp, Glycine max
  Clone ID: 700762758H1
ggcggaacccttcttcactctctctctttcttccctttgcttgccactcttgctcgactgcatgctctcctattacctccagcaagttcaacgagtgccaactcaacaacctcaacgcgttggaacccgacaaccgcgttcagtccgacagtggtcttattgaaacatggaactctcaacaccctgagctgcaatgcgacggtgtcactgtttccaaacgcaacctca

SEQ ID NO: 62304 - DNA, 177 bp, Glycine max
  Clone ID: 700762759H1
cattttagctttctcttccttcataatttctcacctttcagatctccattcagcttcattttctgcatagagacaaccctgttctggagaaagaatatagtcttcagctggacaacgatcattcatcttgagagcagagtttgtgtgtgacaatctttatagttctaaagtaggtgc

SEQ ID NO: 62305 - DNA, 232 bp, Glycine max
  Clone ID: 700762760H1
ctcgagccgttggtccttaaacactcatcagtcatcaccatggccaagctagttttttccctctgtactctgcttttcagtggctgctgcttcgctttcagttccagagagcagcctcagcaaaacgagtgccagatccaaaaactcaatgacaacacaccggataaccgtatagagtcagaaggagggctcattgagacatggaaccctaacaacaagccattccagtgtg

SEQ ID NO: 62306 - DNA, 242 bp, Glycine max
  Clone ID: 700762761H1
gagcaagagtttctaaaatatcagcaagagcaaggaggtcatcaaagccagaaaggaaagcatcagcaagaagaagaaaacgaaggaggcagcatattgagtggcttcaccctggaattcttggaacatgcattcagcgtggacaagcagatagcgaaaaacctacaaggagagaacgaaggggaagacaagggagccattgtgacagtgacaggaggtctgagcgtgataaaaccacccac

SEQ ID NO: 62307 - DNA, 164 bp, Glycine max
  Clone ID: 700762762H1
gcaaatcaaacttcatggcatttgagtttccttattgagaatcccaaacagtctacagtatcagatatactcttgggaatctctcaagatttggaaatctcgctggtaatactcttatgccagctttttctgtcccacaggctactgccagatcttctgccaat

SEQ ID NO: 62308 - DNA, 244 bp, Glycine max
  Clone ID: 700762763H1
ggaggtattggacctgtgccagtgggacgtgttgagaccggtgtcttgaagcctggaatggtggtgacttttgcaccaactggactgacaactgaagtcaagtctgtggagatgcaccatgaatctcttacagaggcacatcctggtgacaatgtgggattcaatgttaagaatgttgctgttaagcgtttgaagcgtggttatgttgcctcaaactcaaaggatgaccctgcaaaggaggctg

SEQ ID NO: 62309 - DNA, 244 bp, Glycine max
  Clone ID: 700762764H1
cggctccaggacgaagaggattaagaggatccgacggtcgccacgtttagcaacaaccaaaccctctctactctttcttcttctcttcgctagggttttagcttcttcctcttcacttcgttcttctggcctctaccatgagcaacgacaaggacaccttcaacgtcgctgatctcacttccgctctcaacgaggacaatagagcagaccttgtcaatgctctcaagagcaagatacagagttt

SEQ ID NO: 62310 - DNA, 239 bp, Glycine max
  Clone ID: 700762765H1
ggcgatgagcatcatactttctttagctatctatttcttctttctattagccttatgttcaaacctagcctttggcaaatgtaaagaaaccgaggtagaagaagaagaccctgagctcgtaacatgcaaacaccaatgccaacagccagagcaatacactgagggtgacaagcgggtatgcttgcaaagatgtgacacgtatcatcgtatgaagcaagacgagagaaacaatccagagg

SEQ ID NO: 62311 - DNA, 232 bp, Glycine max
  Clone ID: 700762766H1
gcaccaaagaggagttccaacaaggacaggcacaccaaggttgagggcagggggaggaggataaggatgcctgctctctgtgctgccagaatcttccagttgaccagagaattgggccacaaatctgatggggaaaccatccagtggctcctccagcaggctgagccatccatcatagctgcccatgggactggcacaatcccagcatctgctcttgctgctgctggcaatc

SEQ ID NO: 62312 - DNA, 183 bp, Glycine max
  Clone ID: 700762767H1
cgcattgccagaggaagtgattcagcacacttttaacctaaagagccagcaggccaggcaggtgaagaacaacaaccctttcagcttcctggttccacctcaggagtctcagaggagagctgtggcttagagagcccttttgcatgtgctaccacacttttgtccttttgggctctagctagt

SEQ ID NO: 62313 - DNA, 207 bp, Glycine max
  Clone ID: 700762768H1
aagctacatatcatacatagcgaagatgtgtgttgttctcttcttcttgtgtgaagccaaagccacaacaacaaccattggaacaacccaacaacatagtgaacaacaaccttggtaataataaccatggagagcaccgaagactcatccacgagttcacagcaacaaccgaacctgccacccgggtttcggttccacacaacatac

SEQ ID NO: 62314 - DNA, 245 bp, Glycine max
  Clone ID: 700762769H1
gattcaggaaaaagttgtattgaaattttcacaagaggaatttcttacagcttggtcaactcaggtgcgtcctgcaacaactctgttggctgatgggtgcccatatttgtatgctatggtgcatgatagttcagtgtctacaataccaggtgattttgtcattggtgttaagttgacaaccataaacaatatgtgtgcatatgggctcaatcctggtatttcaagttctcgtcttttgggcacca

SEQ ID NO: 62315 - DNA, 122 bp, Glycine max
  Clone ID: 700762770H1
cggctcgaggttctgcaagctcaaagtgctgaagtttactttgacttcttccctgtggaggttgatagtcaagagggagttgctcacattggtgaattgaaatctggtgtctatgttccaca

SEQ ID NO: 62316 - DNA, 224 bp, Glycine max
  Clone ID: 700762771H1
attgtttaaaagatacatttatgcagaagacaaagaaactttaccaggatacacatactcagcgcaatattgcaaaattgaatgatgaactctatgaagttcaccagataatgactcggaatgtgcaggaagttcttggtgttggtgaacagttggaccaggtcagccaaatgtccagtcgaatatcatcagaatctcgcatatatgctgataaagctagagat

SEQ ID NO: 62317 - DNA, 229 bp, Glycine max
  Clone ID: 700762773H1
cttaattattaacacttccttagttcaatatggggaagctcttcactctctctctttcttccctttgcttgctactcttgtcgagtgcatgctttgctattagctccagcatgctcaacgagtgccaactcaacaacctcaacgcgttggaacccgaccaccgcgttgagtccgaagtggtttgattcaacatggaactctcaacaccctgagtgagatgcgccggtgt

SEQ ID NO: 62318 - DNA, 175 bp, Glycine max
  Clone ID: 700762774H1
ggaggattcctttgaggaagtttctttgagtgcagcactcaatggtgttgagggtttggactatatggaaagaattcctcttgccacatctgagggttttcctcatgtgctttcacgcaaaaatggtgaaaaaggcaaaaggagatttgtttctggggatggtgaagagatgaca

SEQ ID NO: 62319 - DNA, 177 bp, Glycine max
  Clone ID: 700762775H1
attcaaaccttgctctatactacacagtacacacactagaagaataatggcttccatcctccactactttttagccctctctctttcttgctcttttcttttcttcttatccgactcagtcacccctacaaaaccaataaaccttgttgttctacccgttcataatgatggttccac

SEQ ID NO: 62320 - DNA, 245 bp, Glycine max
  unsure (1)..(245): unsure at all n locations
  Clone ID: 700762776H1
atcacacacaactactacaagtacttccttacaatcaaaaccaacaacaactatggcaagttatcaaaagcatcacgatgatcagggtcgcaaggttgacgagtatggcaacgttgagaagcaaaccgacgaatacggcaaccctgttcatgatngtagtgtcacctatgtagccaccagaactgctgctggtggttacagtgatgacattaataagcaacatgataccaccatgcctacggcgt

SEQ ID NO: 62321 - DNA, 234 bp, Glycine max
  Clone ID: 700762777H1
aagctctagttacggatgctgacaacgtcatcccaaaggctgttgacgccttcaggagtgttgaaaacgttgagggaaatggtggccccggaaccatcaagaagatcactttccttgaggatggagaaaccaagtttgtgttgcacaaaatagaagcgattgatgaggctaacttgaggtatagctatagcgtagttgggggagatgggttgccagacacagtggagaagatca

SEQ ID NO: 62322 - DNA, 200 bp, Glycine max
  Clone ID: 700762778H1
aattattaacacttccttagttcaatatggagaagcccttcactctctctctttcttccctttgcttgctactcttgtcgagtgcatgctttgctattagctccagcaagctcaacgagtgccaactcaacaacctcaacgcgttggcacccgaccaccgcgttgagtccgaagtggtttgattcaaacatggaactctc

SEQ ID NO: 62323 - DNA, 239 bp, Glycine max
  Clone ID: 700762779H1
ttaattattaacacttccttagttcaatatggggaagcccttcactctctctctttcttccctttgcttgctactcttgtcgagtgcatgctttgctattagctccagcaagctcaacgagtgccaactcaacaacctcaacgcgttggaacccgaccaccgcgttgagtccgaagtggtctgattcaaacatggaactctcaacaccctgagctgaaatgcgccggtgtcactgtttc

SEQ ID NO: 62324 - DNA, 156 bp, Glycine max
  Clone ID: 700762781H1
gttggcttgacatcaagctatactccgactccattgttggaatctggtttgcaaaaagacagagggttaattgtggagtattttggaaggatgtcttacgttgctcataacgttaatcagtcccaagagacagatttgttggaaggaaatttttcc

SEQ ID NO: 62325 - DNA, 239 bp, Glycine max
  Clone ID: 700762782H1
aggctcgagctcgagccgttcttggtggatccattcagatctcatccacgatgtgttgcatttgtatttcacgatgctgaacccgaagccgcgcttcttctaatcacacgacgactcattccgtacacttgacactctcgtcaacaatggccgatgttgccggagccacagtgagtccctctatcggtgaaaccaacgatgcgcagaagaatgtgtccgatttgggagcgttgtttgga

SEQ ID NO: 62326 - DNA, 103 bp, Glycine max
  Clone ID: 700762783H1
cttcctcaccgattgctagaatggaatttcgatgctcagtcatctcttttaccattctcttctctcttgctcttgcaggagagagccatgtccatgcatcgct

SEQ ID NO: 62327 - DNA, 242 bp, Glycine max
  Clone ID: 700762784H1
tgatctggctcccacacattatgtccctactatgagtcgacatccattaacaggagattggtacccagcaattaataaacctgctgcagtccttcactggcttaatcatgtaaatattgatgctgaattcatagtgattcttgatgctgatatgatcttgagaggcccaataacaccatgggagttcaaagctgctcgtagtcatcctgtttcgactccctatgactaccttatcggctgtg

SEQ ID NO: 62328 - DNA, 193 bp, Glycine max
  Clone ID: 700762785H1
gtggaatcccttctggatttccgctcacagttatttgcaatagcatttttaatgagatgctcattagatatagctatgaaaaattactgcgccaggctagagctccaagcatgtttttacaatccttcaaaaattttgtttctttgtgtgtgtatggtgatgataacttaattagtgttcatgaatatgtcaa

SEQ ID NO: 62329 - DNA, 169 bp, Glycine max
  Clone ID: 700762786H1
cattcccacgcccacaacctcgtcaagaagaagagcacgagcagagagaggaacaggaatggcctcgcaaggaggataaacgcggagaaaagggaagtgaagaggaagatgaggatgaggatgaggaacaagatgaacgtcaattcccattcccacgcccacctcatca

SEQ ID NO: 62330 - DNA, 246 bp, Glycine max
  Clone ID: 700762787H1
cattgtctttgaacactcatcaccatggccaagcttgttctttccctttgtctccttcttttcagtggctgcttcgctctgagagagcaggcacagcagaatgagtgccagatccaaaagctgaatgccctcaaaccggataaccgtatagagtcggaaggtgggttcattgagacctggaaccctaacaacaagccattccaatgtgccggtgttgccctctctcgctgcacccttaacgcaatg

SEQ ID NO: 62331 - DNA, 235 bp, Glycine max
  Clone ID: 700762788H1
aggacccatttggcagaattggtcaatgaagatttttatgatgaaaaatttaattttattggcacaattgggactccagcttttcatcgacaaattgctgcacacttggagaaaatgccattatggcaaaaagcaattttgtgtggaatgggacattgtttgtctcggaaaagcaaagatacatggtattctgggatgaaggaaaatttggtccaatgttgaggagctctatgaa

SEQ ID NO: 62332 - DNA, 243 bp, Glycine max
  unsure (1)..(243): unsure at all n locations
  Clone ID: 700762791H1
attatgctagttttgatggtttgattaccaagcaagttatgagcaagatggcagaaatgataaacagtctatgtggtggtgatgaaaaattgatgcgtgaaaggacacacctgctgttggcttgttgttcaaggatggcaatttgtaagaaagatgtttggagagttgaatgtggaatcccttctggatttccgctcacagnntattgcaatagcnattttaatgagatgctcattagatata

SEQ ID NO: 62333 - DNA, 159 bp, Glycine max
  Clone ID: 700762792H1
tctctcttccatctcctcggttaaactgaaccaattcaatattcccagctagttcttcattgaagaagctatggactttcttaactttatgcttaacttgttggtccctccaggcagtatgctcaccttggctttctcatggccagcactttgcttcct

SEQ ID NO: 62334 - DNA, 160 bp, Glycine max
  Clone ID: 700762793H1
agcaaaatgaccaagttcacaatcctcctcatctctcttctcttctgcatcgcccacacttgcagcgcctccaaatggcagcaccagcaagatagctgccgcaagcagctccagggggtgaacctcacgccctgcgagaagcacatcatggagaagatcc

SEQ ID NO: 62335 - DNA, 244 bp, Glycine max
  Clone ID: 700762794H1
gaaaaacgtggctctgcattatcgctagcggccgacaccatttctgattgtagcatcattattattactgaattctgcagtttcaaggtgaagcctgaagcgccatggaagctcaagcggttcaagtcttgcgatattcagctacgctgcattccaataatcccaagcttgagaaaacacggaccaatggctctctccgaatgtttggtggatttaagaaacagctttttgtttcgtctaagtt

SEQ ID NO: 62336 - DNA, 241 bp, Glycine max
  Clone ID: 700762795H1
ctcgagccgcatggccaagcttgttctttccctttgtttccttcttttcagtggctgcttcgctctgagagagcaggcacagcaaaatgagtgccagatccaaaagctgaatgccctcaaaccggataaccgtatagagtcggaaggtgggttcattgagacctggaaccctaacaacaagtcattccagtgtgccggtgttgccctctctcgctgcacccttaacccgcatgcccttcgt

SEQ ID NO: 62337 - DNA, 237 bp, Glycine max
  Clone ID: 700762796H1
atggcatttgagtttccttattgacaatcccaaacagtctacagtttttgacattctcttgggaatttcttccaattagtaacttgttgagagttgctgcttggaagaaaggctgtttaatggttaagattgtgatgtctgggaatgcagcagtcaaaaggagtgattgggcctcattggtacaagtgtttttaacaaacagcaacagtacagagcattttgatgcatgtaagtgga

SEQ ID NO: 62338 - DNA, 98 bp, Glycine max
  Clone ID: 700762802H1
cgagactaccgcattttggagttcaactccaaacccaacaccctccttctccccaaccatgactgacgctgattgacctcatgcgtgtatcctgtaac

SEQ ID NO: 62339 - DNA, 262 bp, Glycine max
  Clone ID: 700762803H1
atctggtttgcaaaaagacagagggttaattgtggaatattttggaaggatgtcttacgttgctcataacgttaatcagccccaagagaaagatttgttggagggaaatttttcctttgatattaaatctcgctctagattggaaaaagtttcctctacaaaagcacaatttgttagtggaaaaaccttcaaatatgatataattggtgctggttcacattcttcagatgatttacctgaaaaggagactcaggaaaacccc

SEQ ID NO: 62340 - DNA, 259 bp, Glycine max
  Clone ID: 700762804H1
cctttgtttccttcttttcagtggctgcttcgctctgagagagcaggcacagcaaaatgagtgccagatccaaaagctgaatgccctcaaaccggataaccgtatagagtcggaaggtgggttcattgagacctggaaccctaacaacaagccattccagtgtgccggtgttgccctctctcgctgcacccttaaccgcaatgcccttcgtagaccttcctacaccaacggtccccaggaaatctacatacaacaaggt

SEQ ID NO: 62341 - DNA, 263 bp, Glycine max
  Clone ID: 700762805H1
tgcagaccgagctagctagctagcaagcaagcacagagatggaggcaaagcgaggccatgccctacatgtgcttggcacgtgtttcactcttcctctgcgctctaaccctatccgctgctcacggaagcaccacggttcaagacatcgcgagaaagttgaaactcggggacaacgagcttctgcgcacggagaagaagttcaaggttttcatggagaattacgggaggagctactccacagaggaggagtatctgcgccgttt

SEQ ID NO: 62342 - DNA, 260 bp, Glycine max
  Clone ID: 700762806H1
atgatgaggaagagcagccacagtgcgtggagacagacaaaggttgccaacgccaaagcaaaaggagcagaaatggcattgatgagaccatttgcacaatgagacttcgccaaaacattggtcagaattcatcacctgacatctacaaccctcaagctggtagcatcacaaccgccaccagccttgacttcccagccctctggcttctcaaactcagtgcccagtatggatcactccgcaagaatgctatgttcgtgcca

SEQ ID NO: 62343 - DNA, 261 bp, Glycine max
  Clone ID: 700762807H1
ctcgagccgcgcgaacagcataatatacgcattgaatgggcgggcattggtacaagtggtgaattgcaatggtgagagagtgtttgatggagagctgcaagagggaggggtgctgatcgttccacaaaactttgcggtggctgcaaaatcccagagcgataactttgagtatgtgtcattcaagaccaatgatagaccctcgatcggaaaccttgcaggggcaaactcattgttgaacgcattgccagaggaagtgattca

SEQ ID NO: 62344 - DNA, 259 bp, Glycine max
  Clone ID: 700762808H1
caaatatttcactagctactactcttcttagtttctctgttgtatcatttttattgctatatcctaatcaaacttcactctcaaaatgagtgatcccacactagcacaacagcatctagtcaaagtccacacaacaacacacgcaacagttgttaccacacacaatcataaccaaacaccctcaataaatgcctcaggtgaaaagaagaagattgtgggggtgttctacaaagggaatgaatatgctaaattgaatcca

SEQ ID NO: 62345 - DNA, 235 bp, Glycine max
  Clone ID: 700762810H1
gttcaatatcctagtacagcggattaaagcatttaagatatactatgatgcgagcgcggttcccattactgttactgggagtggttttcctggcatcagtggctgtctcatttggcattgcgtattgggatacgcagaaccccagtcacaacaagtgcctccgaagttgctatagcgagacagactcctacaggcaccaagcatgccacgctcgttggcacctccttagggtgga

SEQ ID NO: 62346 - DNA, 150 bp, Glycine max
  Clone ID: 700762812H1
attaagtattaatactattaattagaagaaccattgtatactcatgtagtatactagaacactagtacgatgtgatccgggaggggatgttttaaagcttgtttgtatatccctgcctccccttaattatgagaaattttactttggatg

SEQ ID NO: 62347 - DNA, 263 bp, Glycine max
  Clone ID: 700762813H1
gtgccaactcaacaacctcaacgcgttggaacccgaccaccgcgttgagtccgaaggtggtcttattgaaacatggaactctcaacaccctgagctgcaatgcgccggtgtcactgtttcacaaacgcaccctcaaccgcaacggcctccacttgccatcttactcaccttatccccaaatgatcattgtcgttcaagggaagggagcaattggatttgcatttccgggatgtcctgagacgtttgagaagccacaacagcaa

SEQ ID NO: 62348 - DNA, 263 bp, Glycine max
  Clone ID: 700762814H1
gatggagagctgcaagagggacgggtgctgatcgtgccacaaaactttgtggtggctgcaagatcacagagtgccaacttcgagtatgtgtcattcaagaccaatgatacacccatgatcggcactcttgcaggggcaaactcattgttgaacgcattaccagaggaagtgattcagcacactttcaacctaaaaagccagcaggccaggcagataaagaacaacaaccctttcaagttcctggttccacctcaggagtctca

SEQ ID NO: 62349 - DNA, 265 bp, Glycine max
  Clone ID: 700762815H1
tatggccactgttctcagaacccccaccttccggccaccgactccgccgcgcgccgcaaagtcgccgaaaccatcgcgcttcgccgtcgtgtccttcagacagagcaccacctgcgggagaaaaccctcctcgcttctctcctaccctgccgttccctaatgttccctctctacggttcgtcaggttcgttcccttcgctttcgacggcgacaccgaggccccgcaagttcaggagccggaggttcaggttctggacccttcaga

SEQ ID NO: 62350 - DNA, 265 bp, Glycine max
  Clone ID: 700762816H1
cttaattattaacacttccttagttcaatatggggaagcccttcactctctctctttcttccctttgcttgctactcttgtcgagtgcatgctttgctattagctccagcaagctcaacgagtgccaactcaacaacctcaacgcgttggaacccgaccaccgcgttgagtccgaaggtggtttgattcacacatggaactctcaacaccctgagctgaaatgcgccggtgtcactgtttccaaactcaccctcaaccgcaatgg

SEQ ID NO: 62351 - DNA, 261 bp, Glycine max
  Clone ID: 700762818H1
caagaacaatcaaacagaagaggctcaaggtcgcagaagcagcagctacaggacagtcaccagaagattcgtcacttcaatgaaggagacgtactcgtgattcctcctggtgttccttactggacctataacactggcgatgaaccagttgttgccatcagtcttcttgacacctctaacttcaataaccagcttgatcaaacccctagggtattttaccttgctgggaacccagatatagagtacccagagaccatgcaa

SEQ ID NO: 62352 - DNA, 245 bp, Glycine max
  Clone ID: 700762820H1
catcaccatggccaagctagttttttccctttgttttctgcttttcagtggctgctgcttcgctttcagttccagagagcagcctcagcaaaacgagtgccagatccaaaaactcaatgccctcaaaccggataaccgtatagagtcagaaggagggctcattgagacatggaaccctaacaacaagccattccagtgtgccggtgttgcccactctcgtgaaacctaaacggcaagccctttgg

SEQ ID NO: 62353 - DNA, 258 bp, Glycine max
  Clone ID: 700762821H1
cgcactccgtcttcatcaatcagcatcaccaccgctccaacacaggggacaatgagggagatccttcacgttcagggagggcaatgcgggaaccagatcggttcgaagttctgggaagtggtgtgcgacgagcacggcatagatccgacggggaagtacgtcggaaactcagatctacaactcgagcgcgtgaacgtgtactacaacgaagcttcctgcgggcggtttgtcccacgcgcagtgctgatggacctggag

SEQ ID NO: 62354 - DNA, 255 bp, Glycine max
  Clone ID: 700762823H1
ctcgagccgattcggctcgagacaatatgtgtgcatatgggctacaatcctggtatttcaggttctcgtcttttgggcaacattcctcagtccatttcacagcaaactgtttggaatgaaatggcaacagtgagagcaccattgaattttgattctagcaagcagagcttttgtcaattttctattgaccttctcggtggaggaattttcgtggacaaaactggagattggatcacacttatacaaaattctcca

SEQ ID NO: 62355 - DNA, 215 bp, Glycine max
  Clone ID: 700762824H1
cttcttctcttctctgttacagcaatggattctttcccaacacttctctcattcgccgtcatctccttcaccgtcgccctcttatacctccgccgcgtgttccgaccgccgtcagttccgctcccgccggaagccaggcctaccttgatcgacgaacgtgcagtgatatcggcatacaagagcgaaatccgcgccttcatgacgacgctggacgt

SEQ ID NO: 62356 - DNA, 258 bp, Glycine max
  Clone ID: 700762825H1
ctcgagcgaatcggctcagaaacaattcaattcaatctgcctcgatcatggagaggacaacatttgggtttttgttcttgctcctccttgtcttagcttctgatgtgacggtgaagagagcagaggcgaaagattgcttgacaaggaggcacgggttccagggtagatgcttattcgacaggcaatgtgcacatgtgtgcaggagcgatggtttcatcggtggtcagtgccgaggccctcttcgacaatgcttttgca

SEQ ID NO: 62357 - DNA, 258 bp, Glycine max
  Clone ID: 700762826H1
gcaaaaacaaaatcccagtatcaaaattcttctctttttttcatatttcgcaaagacatggatttcagagtgatgggtttggagtctccactgttccacacgctgcaacacacgatggacatgtcagaggacggtgcaggagacaacaagacacacaatgctccaacatggtcatacgttcgagacgcgaaagcaatggctgcaacacctgcggatgtgaaggagtatccgaattcttacgtgttcgagatcgacatg

SEQ ID NO: 62358 - DNA, 261 bp, Glycine max
  Clone ID: 700762830H1
acaccctacttctacttccctttgttctcaaaccttatcccttatcctcccaaaaccaaaccatgtctacctccgcagcttctctcgcactcccaaccctcactctccgaactcgacaacctctctgttctccccaatgcttctcctcgtccctctccctcacccctaactccaaacccatttccatttccgccgttttcctcaaaacaacgctgtcgtcgtcgtcgccgttgtcgctgtcgtctcgcttcgttccccatg

SEQ ID NO: 62359 - DNA, 260 bp, Glycine max
  Clone ID: 700762831H1
tgttctgaagccaattattgatgtctttgtttctaatggcaatcgctacaatctgctccattctgctgttctggaactttttgagtttattcggaaggaaaatctgaaattattgctgagatacatagtcgattctttttgggaccagctggtgaaatttgagaatttggcttcaattcactcactgaaagttaaatatgagcagtgtttggataatggtgggacaaatgatgatgccactactgcagtggaccttcgaa

SEQ ID NO: 62360 - DNA, 229 bp, Glycine max
  Clone ID: 700762832H1
atggtgcatgatagttcagtgtctacaataccataccatacaaatatcgccacccatcagccaacagagttgttgcaggacgcaccggggttgaccaagctgtaagaactctgttggctgatgggtgtccatatacgtaatgctatggtgcatgatagttcagtgtctactataccaggtgattttgccattggtgttaagttgccaaccataaaccatatgtgcacat

SEQ ID NO: 62361 - DNA, 259 bp, Glycine max
  Clone ID: 700762833H1
acctcattgtattgaggatcaggctcagatggaaacaaatttgtttaaattgtctcttgatgatgttgaaactcctaaaggttccatgttggatcttaaaatttctcagtctaaaattgcacttcccaggaacacagttggaggaactattctgcgtagtgatctattggcaaattctcctgacagagggcaattttagagcaagtgttgatttgcagcgcactcatcgtattaaaggaatgattaaactggtggccac

SEQ ID NO: 62362 - DNA, 249 bp, Glycine max
  Clone ID: 700762835H1
ctctttcttcctcttcctcagtagtgcgattttcgattctactctctgcaactatgcctaaccctaaggtcttcttcgacatgaccatcggcggtcaacctgccggccgcatcgtgatggagctctacgccgacgtgactccgagcaccgccgagaacttccgcgcgctctgcaccggcgagaagggcgccgggcggagcggcaagccctcccactacaaaggctcgtccttccaccgcgtgatcccga

SEQ ID NO: 62363 - DNA, 255 bp, Glycine max
  Clone ID: 700762836H1
attaataaagatgagtttgaagaacaacatggtggtgctaaaggtgtgtttgttgcttcttttccttgtgggggttacagctgcacgcatggaactgagcttcttcaaaagtgatcagtcatcaagttatgatgatgatgagtattcaaaaccatgctgtgatctctgcatgtgcacacgctcaatgcctcctcaatgcagctgtgaagatattaggctgaattcatgccactcagattgtaagagctgtatgtg

SEQ ID NO: 62364 - DNA, 255 bp, Glycine max
  Clone ID: 700762838H1
cctggttccacctcaggagtctcagaggagagctgtggcttagagagcccattttgcatgtgctaccacacttttgtccttttgggctctagctagtgctggtagcagtaaataagaatgaataaaagaaacaaaggcttagatgccctttgttaagtgtagaataacgggtatagtaactatgtacccttgtgtaatgagtcactcaagtacctatgcgggaaaagcataaataaaagaagaaattccaataaa

SEQ ID NO: 62365 - DNA, 238 bp, Glycine max
  Clone ID: 700762266H1
tctaaattgaaaagctttctagctggtcataatatcaccattactgatggtattgacaaaactagtgcaactttgcaatttagaaagttagcagattgtgattttctcaagagaaactttaggcagatgtctaatgttttggggtggcatctgaggacaaggcgagtttatggtcacaacttcattatgtttcatgttataatctggaaatgcaagaagcttatcttgtcaatctcgt

SEQ ID NO: 62366 - DNA, 182 bp, Glycine max
  Clone ID: 700762268H1
attttgataaaccgcgatcacaggttgccgcaccttaaaaccggaaacaaaagcaatcgttacttgatttcaagaatttctcaatttctttctacttctttgtgtacgatttcttaagggaaagaaaatcactctctgtctggccacagacttcgtgaatcattttcttttccacacatcat

SEQ ID NO: 62367 - DNA, 236 bp, Glycine max
  Clone ID: 700762270H1
actaacaataattccttcacttgcagaacttagttctctgttgcatcatcatcatcttcactagtgttagccctaaacttcaccttcaaccatgaccacagtgccaccacacagtgtccaagtgcacacaataacacacactacgaagccggcgtcgtcccgccggctcgttttgaggcgccgcgttacgaagccggcatcaaggctccctcttccatttaccattccgagagagg

SEQ ID NO: 62368 - DNA, 233 bp, Glycine max
  Clone ID: 700762272H1
ctcagcatggctaagcttgttctttccctttgtgttctgcttgtcagtggctgctgcttcgcttccagtttcagagagcagccacagcaaaacgagtgccagatccaacgcctcaatgccctcaaaccggataaccgtatgagtcagtcggtggcttcattgagacatggaaccctaacaacaagccattccagtgtgccggtgttgcactctctcgctgcaccctcaaccgc

SEQ ID NO: 62369 - DNA, 236 bp, Glycine max
  Clone ID: 700762273H1
cgaaggcagtggcagcgacgatccggctcacggtgccggccggaggagctcggccggcgccaccggttggaccggcgctgggtcagtaccggctgaacctgatggcgttctgcaaggacttcaacgcccgcacccagaatacaaggcagtgacacccatggccgttacgataacggcgtacaaggacaacaccttcgagttcaccgttaagtcgccgccggtgtcgtggtacctga

SEQ ID NO: 62370 - DNA, 231 bp, Glycine max
  Clone ID: 700762275H1
ttcaagattcaggtactgcgtttcggaagcagacacagatggctcgtacgaagcaaaccgctcgtaagtccacaggaggaaaggctcctaggaagcagcttgcaaccaaggctgcacgtaagtctgcaccaactactgtggtgtgaagaagccccaccgttatcgtcctggtaccgttgctcttcgtgagattaggaaataccagaagagtaccgagcttttgatccggaa

SEQ ID NO: 62371 - DNA, 189 bp, Glycine max
  Clone ID: 700762277H1
taagatttgaaattttgataaaccgcgatcacaggttgccgcaccttaaaaccggaaacactagcaatcgttacttgatttcaagaatctctcaatttcttcctacttctttgtgtacgatttcttaagggtaagaaatcactctctgtgctggccacagacttcgtgaatcattttcttttccacaca

SEQ ID NO: 62372 - DNA, 234 bp, Glycine max
  Clone ID: 700762280H1
aaaattcttccaccaagttatgggcctccttgtgttgcttcttttctccctcttaggtctctcttctagttccagcatatcaactcatcgttccatattggaccttgacctaaccaagtttaccacacagaaacaggttcttcactgttccaactatggaagagtgagcatggacgtgtctaccataaccacgaagaagaggcaaagagacttgagattttcaagaataacttg

SEQ ID NO: 62373 - DNA, 227 bp, Glycine max
  Clone ID: 700762281H1
ggttgatgtgtggtgggggatcatagaactgaaggggcctaagcagtatgattggagagcctacaggagtttgtttcagctggttcaagaatgtggcttgacactgcaagctattatgtcattccatcaatgtggagggacgtaggagatatagttaacatcccaattccccagtgggtgcttgacattggagaatcaaatcatgatatcttctacaccaaccgctc

SEQ ID NO: 62374 - DNA, 223 bp, Glycine max
  Clone ID: 700762282H1
agaggacaagatctaagtgattagaaatagaggcattcctgctgatgtttttcaaattcatgaactcgctttgcaagaacatcagcaggaatgcctctatttctaatcacttccatctgatgttcttgcaaagcgagtcatgaatttgagaaacatgttgctcatgaaagcctcaaggctcaaattcctgatgttgacaagttgtattctactaaggttaata

SEQ ID NO: 62375 - DNA, 234 bp, Glycine max
  Clone ID: 700762283H1
aacttattaacactttccttagttcaatatcggggaagcccttcttcactctctctctttcttccctttgcttgctactcttgtcgagtgcatgctttgctattacctccagcaagttcaacgagtgccaactcaacacctcaacgcgttggaacccgaccaccgcgttgagtccgaaggtggtcttattgaaacatggaactctcaacaccctgagctgcaatgcgccggtgt

SEQ ID NO: 62376 - DNA, 230 bp, Glycine max
  Clone ID: 700762284H1
agcaaaatgaccaagttcacaatcctcctcatctctcttctcttctgcatcgcccacacttgcagcgcctccaaatggcagcaccagcaagatagctgccgcaagcagctccagggggtgaacctcacgccctgcgaaagcacatcatggagaagatccaaggccgcggcgatgacgatgatgatgatgacgacgacaatcacattctcaggaccatgcggggaagaatc

SEQ ID NO: 62377 - DNA, 231 bp, Glycine max
  Clone ID: 700762287H1
ctaaagccgtggggcccaccgggttgcccgttgataacaggcgcgtggatttcaacatcatctctggcacctccatgtcgtgccctcacgtgagcggcttagccgcgctgatcaaatcggctcaccctgattggagccagccgcggtgagatcggctctgatgacaacggcttacacagtttacaaaactggtgagaagttgcaagacagcgcaacgggaaaaccatccac

SEQ ID NO: 62378 - DNA, 230 bp, Glycine max
  Clone ID: 700762288H1
gaataatcgtattgatttcaatctttgctgtatcgaacatctctgtacacttcattcccaaagccactcttttctctgctgtttcggcactgttttgagtaggtagatgaggaaaaaggattaaccaaatttgagtggcatcaaagttggcatagcagaagtggaatcagctcttgtttcgcaacaggaacatggatgcacaagccaagaaaaaagcattgtttcgtgct

SEQ ID NO: 62379 - DNA, 229 bp, Glycine max
  Clone ID: 700762290H1
aaaatggtggccacagttggtattcctgagaatacaggtatagcattggcctgtgctatgaatagttcttttagggggcgtgccagttctgatatttacaccatctgctctcaagactgtgaattatggaatcctgcttgcacaaaagcaatgactatgtcatttaatccaaacccgtgttctgatgcatggagtttggaatttttgaagcgtaccggatttcactgtg

SEQ ID NO: 62380 - DNA, 228 bp, Glycine max
  Clone ID: 700762291H1
ccgattgcaagcaatggactccttcaattccttcttcgattcaacaaaccgatggaattacgatactctcaaaaacttccgtcaaatttctccggtcgttcagaatcacctcaagcaggtttattttactctgtgttcgccgtggttgctgcggctgttggggcttaccttcatgtcctcttgaacattaggggttttcttactacagtggcatgcgtgggaagcagt

SEQ ID NO: 62381 - DNA, 229 bp, Glycine max
  Clone ID: 700762292H1
ccagcaagctcaacgagtgccaactcaacaacctcaacgcgttggaacccgaccaccgcgttgagtccgaaggtggtttgattcaaacatggaactctcaacaccctgagctgaaatgcgccggtgtcactgtttcaaactcaccctcaactgcaatggcctccacttgccatcttactcaccttatccccggatgatcatcatcgcccaagggaaaggagcacttgga

SEQ ID NO: 62382 - DNA, 225 bp, Glycine max
  Clone ID: 700762293H1
gtgccggtgttgccctctctcgctgcaccctcaaccgcaacgcccttcgtagaccttcctacaccaacggtccctaggaaatctacatccaacaaggtaagggtatttttggcatgatatacccgggctgtcctacacatttgaagagcctcaacaacctcaacaaagaggacaaagcagcagaccacaagaccgtcaccagaagatctataacttcagagaggg

SEQ ID NO: 62383 - DNA, 231 bp, Glycine max
  Clone ID: 700762295H1
gaaacctgctttggaaatggttactcaaaaggccctagagaaaaaggcacaagctggaaagtgggctgaacctcatgtggaaaccattaaaactaaatgggtcccggccgtaaaagaacagtggtctgtggtgaaacaaatgctgaacctcatgtgcaattattgaccacgaaaactgttgaagtttatgaggcatcaaagaatgcaatttccccccacttaagcaaggca

SEQ ID NO: 62384 - DNA, 148 bp, Glycine max
  Clone ID: 700762301H1
cacctttgttcactcttcttctcttgcggctagggttttagcgcacttcttctagatttaaggaagatgggtaaggaaaaggttcacatcagtattgtggtcattggccatgtcgactctgggaaatccactaccactggtcacctga

SEQ ID NO: 62385 - DNA, 222 bp, Glycine max
  Clone ID: 700762302H1
tcggctcgagcagttattatcaaataattaattaaattcctcgtggaatcttgttgaagccatgtctacagctggtcaggtcatcaagtgcagagctgcggtggcatgggaagcagggaagccactatcgatagaaaccatagaagtggcaccaccccagaaaggtgaagtgcgtttgaaagtcctcttcaactccctttgccgtacagatgtttactggtg

SEQ ID NO: 62386 - DNA, 238 bp, Glycine max
  Clone ID: 700762303H1
accagctcgaccagatgcctaggagattctatcttgctgggaaccaagagcaagagtttctaaaatatcagcagcagcagcaaggaggttcccaaagccagaaaggaaagcaacaagaagaagaaaacgaaggaagcaacatattgagtggctcgcccctgaattcttgaaagaagcgttcggcgtgaacatgcagatagtgagaaccctacaaggtgagaacgaagaggaggatagt

SEQ ID NO: 62387 - DNA, 141 bp, Glycine max
  Clone ID: 700762304H1
aaaggctttagcttgccttttgttcactgtaaaataataatgtaagtactctctataatgagtcacgaaacttttgcgggaataaaaggagaaattccaatgagttttctgtcaaaaaaaaaaaaaaaagggcggccgccg

SEQ ID NO: 62388 - DNA, 255 bp, Glycine max
  Clone ID: 700762305H1
aattaattaaattcctcgtggaatcttgttgaagccatgtctacagctggtcaggtcatcaagtgcagagctgcggtggcatgggaagcagggaagccactatcgatagaaaccatagaagtggcaccaccccagaaaggtgaagtgcgtttgaagatcctcttcaactccctttgccgtacagatgtttactggtgggatgctaagggccagactccgctgtttcctcgtatcttaggccacgaagcttcgggg

SEQ ID NO: 62389 - DNA, 222 bp, Glycine max
  Clone ID: 700762306H1
cgagtgccaactcaacaacctcaacgcgttggaacccgaccaccgcgttgagtccgaaggtggtttgattcaaacatggaactctcaacaccctgagctgaaatgcgccggtgtcactgtttccaaactcaccctcaaccgcaatggcctccacttgccattctactcaccttatccccggatgatcatcatcgcccaagggaaaggagcacttggagttgc

SEQ ID NO: 62390 - DNA, 120 bp, Glycine max
  Clone ID: 700762307H1
gccgcagttggatgattgggtgctttgccgtatttacaacaagaagggcacgatcgagaaactgcaaccaagcagcgatgttgctcatacccgaaatatcgaatcctcggaaatcgaaga

SEQ ID NO: 62391 - DNA, 259 bp, Glycine max
  Clone ID: 700762308H1
ttaagaatttcctgaatcgactggttgaagaacatgaaagcattgaccttgaatggcttagagacgttccacctgacaaagcaaacgaatacttgctcagcataagaggattgggattgaaaagtgtggaatgcgtgcggcttctaacactgaccatcttgccttcccggtagacacaaatgtcggacgtattgccgtacgactgggatgggtgcctctgcagccactgcctgagtcactgcagttgcatctcctagaa

SEQ ID NO: 62392 - DNA, 208 bp, Glycine max
  Clone ID: 700762309H1
tggggcaagcagcaagtcctatcccaaccctaaccctaacttcgaaccttcgtcctttctctcttcttccttcagattcatccgtaccgttagttactactggattcgcggttgattgctgctaccgggtttctcctctttcacgtataagatgcacttccggtcatcattttaccaacatgcagattttgagttggtttctgattat

SEQ ID NO: 62393 - DNA, 220 bp, Glycine max
  Clone ID: 700762310H1
cgagaattgtatttgcacagtccagaggaagctcgccaattgagaaggaaagctctctctcgtattgaatggctgcaaaaagctgatgtgcctaccatagcacagattgaagagttccattcgatgcagaggatgatgaatgctcctgattcaaatgataatattgatctactgttgagcattgatttgttgggtttacaaggagcaggtaaagcttttc

SEQ ID NO: 62394 - DNA, 140 bp, Glycine max
  Clone ID: 700762311H1
taagaatggaatttactctccacattggaatctgtaatgcaaacagtgtgatctatgtgactcgaggacaaggaaaggttagagttgtgaactgccaagggaatgcagtgttcgacggtgagcttaggaggggacaattg

SEQ ID NO: 62395 - DNA, 139 bp, Glycine max
  Clone ID: 700762312H1
acttattaacactttccttagttcaatatggggaagcccttcttcactctctctctttcttccctttgcttgctactcttgtcgagtgcatgctttgctattacctccagcaagttcaacgagtgccaactcaacaacc

SEQ ID NO: 62396 - DNA, 138 bp, Glycine max
  Clone ID: 700762313H1
tctgcttaatcgaactattcagattctaaaaaatgagttggtggtgggctggagcaatcggtgctgccaagaagaaattcgaggaagaggaaccgccgcgaagcttccagagcgtgggcctggtgatcggcgtgacgg

SEQ ID NO: 62397 - DNA, 137 bp, Glycine max
  Clone ID: 700762314H1
attctctccattgtctttgaacactcatcaccatggccaagcttgttctttccctttgtttccttcttttcagtggctgcttcgctctgagagagcaggcacagcaaaatgagtgccagatccaaaagctgaatgcc

SEQ ID NO: 62398 - DNA, 132 bp, Glycine max
  Clone ID: 700762315H1
agagtttttgatgtacctcactgaccaggccatggagatgagaaccagactttcttgagctatctatttcttttcactaatagcctaatttccaaacatagccttgggcaaatgtacagaaaccgaggtaga

SEQ ID NO: 62399 - DNA, 216 bp, Glycine max
  Clone ID: 700762318H1
cgtattaaagaatttaagatatactatgatgagagcgcggttcccattactgttgctgggagttgttttcctggcatcagtttctgtctcatttggcattgcgtattgggtaaagcagaaccccagtcacaacaagtgcctccgaagttgcatagcgataaagactcctacaggaaccaagcatgccacgctcgttgcaacctccttaaggtggag

SEQ ID NO: 62400 - DNA, 197 bp, Glycine max
  Clone ID: 700762319H1
tgtccagccggcgttcgaatctgcgttcgatttgaaatccacgccaattgagttttatagcttccaagatgtgcatgacttgtatgaaggtggaattaagcttcctagagatgtaattagcacaattatccccttaccagtgatcaaagaactctatcgtaccgatggtcaacacatcctcaagtttccacacaaca

SEQ ID NO: 62401 - DNA, 255 bp, Glycine max
  Clone ID: 700762320H1
ggtggcacatattatatcttgtcagacataacagcatttggtggaataagagcagccccaacgggaaatgaaagatgccctctcactgtggtgcaatctcgcaatgagctcgacaaagggattggaacaatcatctcgtccccatatcgaatccgttttatcgccgaaggcatcctttgagccttaagttcgattcatttgcagttataatgctgtgtgttggaattcctaccgagtggtctgttgtggaggatc

SEQ ID NO: 62402 - DNA, 228 bp, Glycine max
  Clone ID: 700762321H1
aattcctaccgagtggtctgttgtggaggatctaccagaaggacctgctgttaaaattggtgagaacaaagatgcaatggatggttggtttagacttgagagagtttctgatgatgaattcaataactataagcttgtgttctgtccaagcaagctgaggatgacaaatttggggatattgggattagtattgatcatgatgatggaaccaggcgtttggtggtgtct

SEQ ID NO: 62403 - DNA, 237 bp, Glycine max
  Clone ID: 700762322H1
tctcgagccgaatcggctcgaggttcaatatcctagtacaccgtactaaagaatttaagatatactatgatgagagcgcggttcccattactgttgctgggagttgttttcctggcatcagtttctgtctcatttggcattgcgtattcggaaaagcagaaccccagtcacaacaagtgcctccgaagttgcaatagcgagaaagactcctacaggaaccaagcatgccacgctcgt

SEQ ID NO: 62404 - DNA, 238 bp, Glycine max
  unsure (1)..(238): unsure at all n locations
  Clone ID: 700762323H1
gttccacactgcatacgacctcgntntgagaaccaaactttctttagctatctttttctttttagcttttagccgtattttcaaacctagcctttggcaaatgtaaagaaaccgacgtagaagaagaagaccctgacgtcgtaacatgcaaacaccaatgccaacagccacagcaatacactgagggtgactagcgggtatgcttgcaaagatgtgacaggtatcatcgtatgaagct

SEQ ID NO: 62405 - DNA, 211 bp, Glycine max
  Clone ID: 700762324H1
attctctccattggtccttaaacactcatcagtcatcaccatggccaagctagttttttccctttgttttctgcttttcagtggctgctgcttcgctttcagttccagagagcagcctcagcaaaacgagtgccagatccaaaaactcaatgccctcaaaccggataaccgtatagagtcagaaggagggctcattgagacatggacccct

SEQ ID NO: 62406 - DNA, 256 bp, Glycine max
  Clone ID: 700762325H1
gagaaaacaagaagtagtgagaagaagggagagaatggaggaaaaggcaaaagctgagcagaagaagataggtatgaccgagacttggttgaagaagcaccgtcttctttacaatggagccactagacaccctcttattattagcattcggatggcaccatcaacactgcttccttcaaaacatggctcgcacaggattacttgttcgttcgggcgtttgtcccatttgtggctagtgtgctgataaaagcgtgga

SEQ ID NO: 62407 - DNA, 138 bp, Glycine max
  Clone ID: 700762326H1
acaaaattccttttggaaattccaatacctcgtgaacgatcggctcactctcgctctccctagatcgcgcactttcgctctacctcgtcgcgtgctcgttctacgctatcgtgctctcgcgctctctcggatctaact

SEQ ID NO: 62408 - DNA, 137 bp, Glycine max
  Clone ID: 700762327H1
ttgaacttcttgagaagattgtgcttcagaattctgcattcagtggcaactttaatttgcagaatcttcttattttgacagcaataaaggctgatccatccagagttatggattatgttaatagattggctaatttt

SEQ ID NO: 62409 - DNA, 248 bp, Glycine max
  Clone ID: 700762328H1
acactacaacctgaacgcgaacagcataatatacgcattgaatggacgggcattgatacaagtggtgaattgcaacggtgagagagtgtttgatggagagctgcaagagggacgggtgctgatcgtgccacaaaactttgtggtgctgcaagatcacagagtgacaacttcgagtatgtgtcattcaagaccaatgatacacccatgatcggcactcttgcaggggcaaactcattgttgaacgcatt

SEQ ID NO: 62410 - DNA, 135 bp, Glycine max
  unsure (1)..(135): unsure at all n locations
  Clone ID: 700762329H1
gttccagagtagaggaagcgcgtctaagaaaggaacattccccactacaacatcttccgnaacttgattcaagtcacgtcacttgcattgaaagagtgtgtggtcttggtctgaacccaagaggtattcgacctc

SEQ ID NO: 62411 - DNA, 137 bp, Glycine max
  Clone ID: 700762330H1
cggctcgagcacacattcacagttatactctctctctctttgtcgcttggatcactgatctcgtctcaattttcagatatgtcgacatctgataagccagaagtggtggaaaggggtagcaaggatgaaaaacacaa

SEQ ID NO: 62412 - DNA, 247 bp, Glycine max
  Clone ID: 700762331H1
tgttttttctttgagaagtaaaagatcttagtgcaagtaattaacatgtaatctcagcaagcaaaccgtgaagaacttgatgagaaggcaaggcaaggtgaaactgttgttcctggaggaactggtgggaagagtcttgaggctcaagaaatcttgctgaaggaaggagccgtggagggcagacgaggaagcagcagctagggtcagaggggtatcatgaaatggggaccaaatgagggcagacaag

SEQ ID NO: 62413 - DNA, 114 bp, Glycine max
  Clone ID: 700762332H1
aagaatcaaagaaaggggtggtggctgcttcgaaagcttaataatttgtttatttccagaacatcatagttttcgcagcagcaaactaacaaattactcatatcatataataag

SEQ ID NO: 62414 - DNA, 143 bp, Glycine max
  Clone ID: 700762333H1
aacttattaacactttccttagttcaatatggggaagcccttcttcactctctctctttctaccctttgcttgctactcttgacgagtgcatgctttgctattacctccagcaagttcaacgagtgccaactcaacaacctca

SEQ ID NO: 62415 - DNA, 228 bp, Glycine max
  unsure (1)..(228): unsure at all n locations
  Clone ID: 700762334H1
acaaaattccttttggaaattccttttcctcgtgaacgatcggctcactctcgctctccctagatcgcgcactttcgctctccctcgtcgcgtgctcgttctcgctatcgtgctctcgcgctctctcggatctaactctgtctgtaatcatgtcaggcaagtatatcgantctgctattcttggatcatttggagttgcatgggtttgtgattattatgtntcagaaa

SEQ ID NO: 62416 - DNA, 214 bp, Glycine max
  unsure (1)..(214): unsure at all n locations
  Clone ID: 700762335H1
aagatctataacttcagtgatggtgatttgatcgcagtgcctactggtgttgcatggcggatgtacatcaatgaagacactcctgttgttgccgtgtctattattgacaccaacagcttggtgnaccagctcgaccagatgcctagggattctatcttgctgggaaccaagatcaagtttttctaaaatatcagcaagagtgtggaggtcatca

SEQ ID NO: 62417 - DNA, 249 bp, Glycine max
  Clone ID: 700762336H1
aaaggaaataatcttaagtggaaccttctgcgaaattagccttccttcgtcccttgattgaagtataaattaggggtgttgaaattcaaagccatatccgtcattaaccaaatttgtgtttctccgattgcaagcaatggactccttcaattccttcttcgattcaacaaaccgatggaattacgatactctcaaaaacttccgtcaaatttctccggtcgttcagaatcacctcaagcaggtttattt

SEQ ID NO: 62418 - DNA, 254 bp, Glycine max
  Clone ID: 700762337H1
ttgtccttgaatataatactcagcatggctaagcttgttctttccctatgtcttctgctttacagtggctgctgcttcgctttcagtttcagagatcagccacagcaaaacgagtgccagatccaacgcctcaatgccctcaaaccggataaccgtatagagtcagatggtggcttcattgagacatggaaccctaacaacaagccattccagtgtgccggtgtcgccctctctcgctgcaccctcaaccgcaa

SEQ ID NO: 62419 - DNA, 249 bp, Glycine max
  Clone ID: 700762338H1
tctgcagttaacaatcgctcctcagatatcaacaaaaagattcgcacagcacttgggaaaggtaagaaaattgtttttcttactagagttgatccttttccagtagctctactggctgttctttttggcgttaagaatgaaattctgagttccaacgccactaaccctatgctgacgcgacttcttgagaactgtaagagtctcaaatatctggttgatgagtgtccttttgcatttgtgaactagtat

SEQ ID NO: 62420 - DNA, 225 bp, Glycine max
  Clone ID: 700762340H1
caaacacaacaagtgtctccagagttgcaatagcgagagagactcgtacaggaaccaagcatgccacgctcgttgcaacctccttaaggtggagaaagaagaatgtgaagaaggtgaaattccacgaccacgaccacgcccacaacaccggagagggaacctcagcaacccggtgagaaggaggaagacgaagatgagcaaccacgtccaatcccattcccacgc

SEQ ID NO: 62421 - DNA, 79 bp, Glycine max
  Clone ID: 700762341H1
tggaggtcgctgctttgtcaagctatgaggacaaggaggacaagttcaaagaggaggttgctcaattacggcagcgttt

SEQ ID NO: 62422 - DNA, 227 bp, Glycine max
  Clone ID: 700762342H1
cgattgctagaatggaatttcgatgctcagtcatctcttttaccattctcttctctcttgctcttgcaggagagagccatgtccatgcatcgctacctgtggaagattattgggaagctgtttggccaaacactcccattcccactgcactgcgagatcttctaaagcctctccctgcaggtgttgaaatcgatgaactccctaagcacattgatgatacacagtac

SEQ ID NO: 62423 - DNA, 132 bp, Glycine max
  unsure (1)..(132): unsure at all n locations
  Clone ID: 700762343H1
taaaattcttccaccaagtaaagggctgtcntgtgatgcttctttactcccactaaggtctctcatctagtaggagcataagatctcgggcttcggtataggagcatggcgtagccgagtttaccacagagg

SEQ ID NO: 62424 - DNA, 242 bp, Glycine max
  Clone ID: 700762344H1
gtggaatatgcttcaaggatctcttcctggtggtggaagttcaaatttttcttcaaatatgcatgggataaatggcttctgctttggttcattatgtatgaacccagaattgtcagcattgaagagaagagaactcaagaagattcattagccaactatttgatcgaatatctggactattaactcaggacacgaaacaggcaaggacatgccagtattgcaccagtgggtcagttgctaga

SEQ ID NO: 62425 - DNA, 131 bp, Glycine max
  Clone ID: 700762345H1
gtctttgaacactcttcaccgtggccaagcttgttctttccctttgtttccttcttttcagtggctgcttcgctctgagagagcaggcacagcaaaatgagtgccagatccaaaagctgaatgcccgcaaa

SEQ ID NO: 62426 - DNA, 136 bp, Glycine max
  Clone ID: 700762346H1
tcggctcgaggagaatgtgtatgagggtccccttgatgatcaatatgcttcagctatcagagactgtgatcctgacggtctctgatgctctatgtctgatagatactcctggcgactgcatacggcagaattaccg

SEQ ID NO: 62427 - DNA, 131 bp, Glycine max
  Clone ID: 700762347H1
gtcctacaaacttaattatgaacacttccttagttcaatatggggaagccctacactctctctctttctgcccttagcttgctactctagtcgagtgcatgccttgcgaggagctccagcaagctcaacga

SEQ ID NO: 62428 - DNA, 216 bp, Glycine max
  Clone ID: 700762348H1
cttaattattaacacttccttagttcaatatggggaagcccttcactctctctctttcttccctttgcttgctactcttgtcgagtgcatgctttgctattagctccagcaagctcaacgagtgccaactcaacaacctcaacgcttggaacccgaccaccgcgttgagtccgaaggtggtttgattcaaacatggaactctcaacaccctgagct

SEQ ID NO: 62429 - DNA, 113 bp, Glycine max
  Clone ID: 700762350H1
tgtcattgctcatgatgatcacggaaaatcaaccctgactgattctcttgtggacactgctggtattattgctcaagacgttgcaggtgatctctgtatgactgatacccgag

SEQ ID NO: 62430 - DNA, 253 bp, Glycine max
  Clone ID: 700762351H1
tgcttccgaagaaaacttaaaaaaatatatatttttttaagttttacttcggaagcttttgatccaaacacgcactgcaccttctagagatgtcttgatgaattgatctgatcagtccatatgaaaacttaaaaaaatatatattttgtttttcaactttaatctttaccagacatggtggaagagactaatttccactttatccatatgattagtttgtagttcgattgttatcggttcatttccgttcaac

SEQ ID NO: 62431 - DNA, 251 bp, Glycine max
  Clone ID: 700762352H1
gtgctgtagaaaatggtgttgtcaaggagcaagctcagcctataacgacaaagccaacatccaatgggagcaatgaagatcattctctacaaaaggcggacgtgtacaagacactcagtggtcacagagctggtgaggctgccattgtctatgaacatggagctgatgttgaggcactaatgccaaaactacggcgatctgattactacacactgcctcgtatacatgaactggcggccaaggaaagagct

SEQ ID NO: 62432 - DNA, 112 bp, Glycine max
  Clone ID: 700762353H1
gttgccgcaccttaaaaccggagacaaaagcaatcgttacttgatttcaagaatttctcaatttctttctacttctttgtgtacgatttcttaagggaaagaaaatcactct

SEQ ID NO: 62433 - DNA, 246 bp, Glycine max
  Clone ID: 700762354H1
ggctcgagaatcaatgtgttagcatgtgagggggcagagagggttgaaaggccagaaacctacaagcagtggcaagtcaggaaccagagagcagggttcaagcaacttccattggcccaagagcatgtgaatagagtgaaggaatggtgaagaaggaataccataaagattttgtagttggtgaggatggcaagtgggttttgcaaggatggaaagggcgaattctttttgctgtttcttctggga

SEQ ID NO: 62434 - DNA, 247 bp, Glycine max
  Clone ID: 700762355H1
accttaataaataatttaagatactgtgatgagagcacggttcccattactgttgctgggacttgttttcctggcttcagtttctgtctcatttggcattgcttactgggaaaaagagaaccccaaacacaacaagtgtctccagagttgcaatagcgagagagactcgtacaggaaccaagcatgccacgctcgttgcaacctccttaaggtggagaaagaagaatgtgaagaaggtgaaattcca

SEQ ID NO: 62435 - DNA, 244 bp, Glycine max
  Clone ID: 700762356H1
gttccagagtagaggaaaggcgtctaagaaaggaacattccccactaaaacatctttctaaacttgattcaagtcacgtcacttgcattgaaagagtgtgtggtcttggtctgaacccaagaggtattcgacctccaaagctacaatgaattcgataaacttggtcatagatcctccaaagctaccaagatgattctttggtcagtgcagaactagttccctaagaatgaaaggacccccctca

SEQ ID NO: 62436 - DNA, 248 bp, Glycine max
  Clone ID: 700762357H1
ttctcgagccgattcggctcgagcttttcagcaccttaccttattcgcctccaatagcaaggcggtaccaaaatagtgtgaaccatggctgcaacgaatgcgtcaatctttgcatcttccacgcaaccatgcttctctgtgcctccaccattccaaacacgcttgctactccttttctcaatgtttcgtcaccaagaagttaccttgtgaagaaaaagcatgtgaaatttagcaaaaaaatcagtgct

SEQ ID NO: 62437 - DNA, 133 bp, Glycine max
  Clone ID: 700762358H1
agtatatggttatagtttatcctccacatacatgacaagacactgtacgtacgtaagtacatatgcagcaaatttattcaaagacaacaatattatatatatgcatgcatatgtacttacgtacgtacagtgt

SEQ ID NO: 62438 - DNA, 136 bp, Glycine max
  Clone ID: 700762359H1
gtacgtgaactcggaatctcgctctaggctgagaacatcaaaccgatagcggtgttgctgcccaagcatgagttggacgttaaccctgatggctcagcagttgacaaccttgatgctttcatgggccgtagtgtct

SEQ ID NO: 62439 - DNA, 247 bp, Glycine max
  Clone ID: 700762360H1
caacactctctccaaagttcaaattaagtctgaggtgtgagaaagagagaattgatatgggtgccggtctagttgcgttcctcttaatggttcttgtgcaattggtctatgcagtgatgaacattacttcaaagctttcaatagaatctggaatgagccctcttgtccttgttgcttatcgacaactcttttgtactgtgtccattgctccctttgcttattggctcgagtggaatacgcttcccag

SEQ ID NO: 62440 - DNA, 133 bp, Glycine max
  Clone ID: 700762361H1
cgagctggttctctcttgctgggaaccaagagcaagagtttctaaaatatctgcaagagcaaggaggtcatcaaagccagaaaggaaagcatcagcaagaagaagaaaacgaaggaggcagcatattgagtgg

SEQ ID NO: 62441 - DNA, 130 bp, Glycine max
  Clone ID: 700762362H1
ctcacttgaattactttaggaggaggtagtctgcatggatgactgatgaagaatttgcaagagaaatgcttgctggtgtaaatccaaacttgattcgttgtcttaaggatttccctccacgaagcaagct

SEQ ID NO: 62442 - DNA, 235 bp, Glycine max
  Clone ID: 700762364H1
gtcagaaagcaagatgtcagcattgaatatgatgcatgtacaattccaaatgattgtggttcattggttgttgccaaagttggaaatcacaaacaaattgttggtttccatgttgctggaagcaaaggaagactgggatatgctcattgataccatacgttgagccagttgtgcaagctcagagtgctgaagtttactttgacttcttccctgtggaggttgataatccagaggg

SEQ ID NO: 62443 - DNA, 260 bp, Glycine max
  Clone ID: 700762365H1
attccaatatattccattctctctgtgtatttccctacctctcccttcaagatgcagatcttcgtcaagaccctcaccggcaagaccatcacccttgaggtggaaagctctgacaccatcgacaacgtcaaggccaagatccaggacaggaaggaatccccccgaaccagaagcgtctcttttccgccggaaagcaacttgaggacggccgtacccttgctgactacaacattcagaaggagagtactcttcacctcgtc

SEQ ID NO: 62444 - DNA, 241 bp, Glycine max
  Clone ID: 700762366H1
ctcagcatggctaagcttgttctttccctttgttttctgcttttcagtggctgctgcttcgctttcagtttcagagagcagccacagcaaaacgagtgccagatccaacgcctcaatgccctcaaaccggataaccgtatagagcagaaggtggcttcactgagacatggaaccctaacaacaagccattccagtgtgccggtgttgccctctctcgctgcaccctcaaccgcaacgccct

SEQ ID NO: 62445 - DNA, 110 bp, Glycine max
  Clone ID: 700762368H1
catgaacatcaacgcacttgtcaggcaatctctaattaatgctaatggcataatggagacaacctttttgccctcaaagtattctgtggagatgtcttcggcggtttata

SEQ ID NO: 62446 - DNA, 218 bp, Glycine max
  Clone ID: 700762372H1
gttcaatatcctagtacaccgtattaaagaatttaagatatactatgatgagagcgcggttcccattactgttgctgggagttgttttcctggcatcagtttctgtctcatttggcattgcgtattgggaaatgcagaaccccagtcacaacaagtgcctccgaagttgcaatagcgagaaagactcttacaggaaccaagcatgcaacgttcgttgc

SEQ ID NO: 62447 - DNA, 237 bp, Glycine max
  Clone ID: 700762373H1
ctcgagccgcaaaaatggagaaccaacaaccggcacctatctccgtgacactgctacatctgctatccaaaacttcgctcccatcaacaaaatccaccaacatctctgcgcgtttcacttttactcatatgacatgagccggcaagtggaggcacaccatttttgcgcgcaccagaacgaggagatgaggcagtgccttatctacgacagccccgagaagaaagccaggctcatagg

SEQ ID NO: 62448 - DNA, 237 bp, Glycine max
  Clone ID: 700762374H1
ccattggtccttaaacactcatcagtcatcaccatggccaagctagttttttccctttgttttctgcttttcagtggctgctgcttcgctttcagttccagagagcagcctcagcaaaacgagtgccagatccaaaaactcaatgccctcaaaccggataaccgtatagagtcagaaggagggctcattgagacatggaaccctaacaacaagccattccagtgtgccggtgttgcc

SEQ ID NO: 62449 - DNA, 127 bp, Glycine max
  Clone ID: 700762375H1
cacacaactactacaagtactgccttacaatcaaaaccaacaacaactatggcaagttatcaaaagcactacgatgatcagggtcgcaaggttgacgagtatggcaacgttgagaagcaaaccgacg

SEQ ID NO: 62450 - DNA, 129 bp, Glycine max
  Clone ID: 700762378H1
ctcgagccgaatcggctcgagttaacactttccttagttcaataaggggaagcccttcttagctctctctctttggtcccattgcttgctactcttgtcgagtgcatgctttgctattacctccagcaa

SEQ ID NO: 62451 - DNA, 247 bp, Glycine max
  Clone ID: 700762379H1
ctcactctctattctaagtttccgcagccaccactcagtcgcagcgagtgatgatcgcttcgccgcagtaatcgccggaaacgaattcgccgtttccctgccgagatctctcaatctccgacgactcagatacctctattcattttcctccggttaggttgttagggtataaatagtacgtagtttttccttatttatggcttcggagaatgtgaagaccggggattccgccgtcaccaccatcgtc

SEQ ID NO: 62452 - DNA, 221 bp, Glycine max
  Clone ID: 700762381H1
aacacttccttagttcaatatggggaagcccttcactctctctctttcttccctttgcttgctactcttgtcgagtgcatgctttgctattagctccagcaagctcaacgagtgccaactcaacaacctcaacgcgttggaaccgaccaccgcgttgagtccgaaggtggtttgattcaaacatggaactctcaacaccctgagctgaaatgcgccggtgt

SEQ ID NO: 62453 - DNA, 216 bp, Glycine max
  Clone ID: 700762382H1
cacacagactctttctctctctagaatccatggcagccattggtctgaacggcgtaaaggtggggacgacgtcgtctcaggcgtaccttgaaggcaaggcagtgaaggagacgagggctttgatggctgaactgtgtcgccatttctacacccttggatgggtgacagggacaggtggcagcatctccatgaaggtccacgatgactcaattccca

SEQ ID NO: 62454 - DNA, 242 bp, Glycine max
  Clone ID: 700762383H1
gataacttaattagtgttcatgaatatgtcaagccttactttagtggttctaaattgaaaagctttctagctggtcataatatcaccattactgatggtattgacaaaactagtgcaactttgcaatttagaaagttagagattgtgattttctcaagagaaactttaggcagatgtctaatgttttgtgggtggctcctgaggacaaggcgagtttatggtcacaacttcattatgtttca

SEQ ID NO: 62455 - DNA, 118 bp, Glycine max
  Clone ID: 700762384H1
gatcattccttcacttgcagaacttagttcactgtagcatcaacatcatcatcattagtgtcagccctaaacttcagcttcaaccatgaggacagtgccaccacaccgtgtccaagtg

SEQ ID NO: 62456 - DNA, 128 bp, Glycine max
  Clone ID: 700762386H1
gttattatcaaataattaattaaattcctcgtggaatcttgttgaagccatgtctacagctggtcaggtcatcacgtgcagagctgcggtggcatgggcagcagggaagccactatcgatagaaacca

SEQ ID NO: 62457 - DNA, 247 bp, Glycine max
  Clone ID: 700762388H1
ctcgtttaaaggtatcagcttatccctgagtaaccagaactcattgtaattaacaattggatagtagttcccattagtatgacaaagtggcagttattcctgcagattgaccagtccttccagattcaccgtagttatggaagcatgcttgaaggcgaggctgatgaactcaagagggtattcttggaagggaatccttacctcctggcaattaccatggttgtttctcttcttcatacagtctttg

SEQ ID NO: 62458 - DNA, 243 bp, Glycine max
  Clone ID: 700762389H1
attttgccaaactaaaatagttgtgttggtagctttggcaaagatgttttcagcaggccataagatcaaagggacagtggtgttgatgcccaagaatgagttggaagttaaccctgatggctcagcatatgacaaccttaatgctttcttgggccgtagtgtctcccttcagctcattagtgctaccaaggctgatgcacatggaaaaggaaaagttggaaaggatacgttcttggaagggat

SEQ ID NO: 62459 - DNA, 127 bp, Glycine max
  Clone ID: 700762390H1
cattgtctttgaacactcatcaccatggccaagcttgtactttccctttgtttccttcttttcagtggctgcttcgctctgagagagcaggcacagcaaaatgagtgccagatccaaaagctgaatg

SEQ ID NO: 62460 - DNA, 185 bp, Glycine max
  Clone ID: 700762391H1
caacaatcctacttgcaaggattcagcaggaacattttagaggcctcctacgataccaaattcgaggagataaacaaggttctgtttagtagagaggaagggcagcagcaaggggagcagaggctgcaagagagcgtgattgtggaaatctcgaaggaacagattcgggcactgagcaaacgtgc

SEQ ID NO: 62461 - DNA, 127 bp, Glycine max
  Clone ID: 700762392H1
gtttgaggaatgtgcaagcataaatggtcaatgaaattgatctttaattaatgtagtactactttagtaatgtagtgacttagtttgggtacttcttttgctcaactcatgcattcttaattaatga

SEQ ID NO: 62462 - DNA, 124 bp, Glycine max
  Clone ID: 700762393H1
ggaggaacacaaaaaagaagggttttttttgcccacaccagttgcaaaactaatatcctttcaaacggatttgatctataatggcctggtttctctcttttcccctatccactctcttttctcc

SEQ ID NO: 62463 - DNA, 237 bp, Glycine max
  Clone ID: 700762394H1
gggaaactgactttcccccagggcacttcccgaaatgttaagagaatgcctctttctatagggggaggagctggtgcaaagaatgctattctcatgaatatgccaaatgctgttctttcaatgtggagatattttgttggagatctcgtctttgaagtttctaagatgacttctccctacattaaatgcacagtctctttcttcatagcatttggaaatttggctgatgacaccatc

SEQ ID NO: 62464 - DNA, 128 bp, Glycine max
  Clone ID: 700762395H1
ccagacagacagacagacaaaggtagagaagcagagagagagagcgagccagaaaactgaaaatcaaaaaaaagcgttaagtctctttacctacatttttggtttggtttttcttcatctcgcaggag

SEQ ID NO: 62465 - DNA, 128 bp, Glycine max
  unsure (1)..(128): unsure at all n locations
  Clone ID: 700762396H1
caataccaggtgattttgtagacactgaactatcatgcaccatagcatacaaatatggtcanccatcagccaacagagttgtagcaggacgcacctgagttggctgatgggtgcccatatttgtatgc

SEQ ID NO: 62466 - DNA, 128 bp, Glycine max
  Clone ID: 700762401H1
gaggaatcttagtggacaaaactggagattggatcacacttatacaaaattctccaattagtaacttgttgagagttgctgcttggaagaaaggctgtttaatggtcaagattgtgatgtctgggaat

SEQ ID NO: 62467 - DNA, 248 bp, Glycine max
  Clone ID: 700762402H1
tgatagaccctcgatcggaaaccttgcaggggcaaactcattgttgaacgcattgccagaggaagtgattcagcacacttttaacctaaagagccagcaggccaggcaggtgaagaacaacaaccttttaatttccggtccccacctgaggattctcagaggagagctgtggcttagagagccctttttgcatgtgctaccacacttttgtccttttgggctctagctagtgctggtagcagtaaata

SEQ ID NO: 62468 - DNA, 243 bp, Glycine max
  Clone ID: 700762403H1
acatacatagtagtgttggtgggttgcaaagatgcttgggggtcttctccataggggtcataagataaaagggacagtggtgttgatgcgcaagaatgtgttggacgtgaatagcgtaaccagcgttgggggaattttggtcaaggtctcgacttagttggctcaacactcgatactcttactgccttcttgggccgatccgtgtctctccagcttattagtgctaccaaagctgatgccaac

SEQ ID NO: 62469 - DNA, 127 bp, Glycine max
  Clone ID: 700762404H1
agttggatctagttatgatttaggtatctcaatttgccgctcttccgctgcgccgcccccttatcgtcaccacaaaacctaagacactcaatagatcttaacttggtaaccactttctcacggcaag

SEQ ID NO: 62470 - DNA, 256 bp, Glycine max
  Clone ID: 700762405H1
gttcaatatcctagtataccttaataaataatttaagatactatgatgagagcacggttcccattactgttgctgggacttgttttcctggcttcagtttctgtctcatttggcattgcttactgggaaaaagagaccccaaacacaacaagtgtctccagagttgcaatagcgagagagactcgtacaggaaccaagcatgcgacgctcgttgcaacctccttaaggtggagaaagaagaatgtgaagaaggtga

SEQ ID NO: 62471 - DNA, 251 bp, Glycine max
  unsure (1)..(251): unsure at all n locations
  Clone ID: 700762406H1
cgacatgctagaagtgaagtgaccatatcttaatttcaaatcataaaattcttccaccaagttatgggtatacttgtgttgcttcttttctccctcttaggtctctcttctagttccagcatatcaactcatcgtccatattggaccttgaccaaaattaaaaaccacacagaaacaggtgtcnncantgnnccaactatggaagagtgagcatggacgngtctaccataaccacgaagaagaggcaaaga

SEQ ID NO: 62472 - DNA, 253 bp, Glycine max
  Clone ID: 700762407H1
aggaattttagtggacaaaactggagattggatcacacttatacaaaattctccaattagtaacttgttgagagttgctgcttggaagaaaggctgtttaatggttaagattgtgatgtctgggaatgcagcagcaaaaggagtgattgggcctcattggtacaagtgtttttaacaaacagcaacagtacagagcattttgatgcatgtaagtggacaaaatcggaaccacattcctgggaattgatcttcc

SEQ ID NO: 62473 - DNA, 146 bp, Glycine max
  Clone ID: 700762408H1
aggacttgtttctttgttaagatctcaggattctaatatggttgcatcctactatcaaagaaatcttgatagcttgaattttgatggaaggctttttattattggctttcaaggtggggttagtacacaagcagtctacgcccttt

SEQ ID NO: 62474 - DNA, 68 bp, Glycine max
  Clone ID: 700762409H1
agggcgccctcatcaactccaatcccaacacgaaatcgaactacgaaccatcgtccattctcactact

SEQ ID NO: 62475 - DNA, 253 bp, Glycine max
  Clone ID: 700762412H1
acaacaatcagcttgatcaaaaccccagagtattttaccttgctgggaacccagatatagagcacccagagaccatgcaacaacagcagcagcagaagagtcatggtggacgcaagcaggggcaacaccagcacaggaggaagaaggtggcagtgtgctcagtggcttcagcaaacatttcttagcacaatccttcaacaccaacgaggacacagctgagaaacttcggtctccagatgacgaaaggaagcag

SEQ ID NO: 62476 - DNA, 253 bp, Glycine max
  Clone ID: 700762413H1
agtgattaatgaaggagaagcaaacattgaacttgttggcattaaagaacaacaacagaggcagcaacaggaagagcaacctttggaagtgcggaaatatagagctgaattgtctgaacaagatatatttgtatcccagcaggttatccagttgtggtcaacgctacctcagatctgaatttctttgcttttggtatcaatgccgagaacaaccagaggaacttccttgcaggttcgaaagacaatgtgataa

SEQ ID NO: 62477 - DNA, 250 bp, Glycine max
  Clone ID: 700762414H1
gagagactgaaccgcatcgggagcgggagcggcgggacggtgtacaaggtggtccaccgcaccagcgggcgcgtgtacgcctgaaggtgatatacggtcaccacgaggagtccgtgcggcggcagatccaccggaaatccagatcctccgtgacgtgaacgatccgaacgtggtgaagtgccacgagatgtacgatcagaacagcgaaatccaggtgctgctggagttcatggacggagtctcactggag

SEQ ID NO: 62478 - DNA, 252 bp, Glycine max
  Clone ID: 700762415H1
cttaacacttccttagttcaatatggggaagcccttcactctctctctttcttccctttgcttgctactcttgtcgagtgcatgctttgctattagctccagcaagctcaacgagtgccaactcaacaacctcacgcgttggaacccgaccaccgcgttgagtccgaaggtggtttgattcaaacatggaactctcaacaccctgagctgaaatgcgccggtgtcactgtttccaaactcaccctcaaccgc

SEQ ID NO: 62479 - DNA, 255 bp, Glycine max
  Clone ID: 700762416H1
ctgaagcgtaccggatttcattgtgatatcatttgtgtcactggatggactgccactccaatgcaggatgttcaggttacaattgattggtttatttcctctcaggaatgtgttcccaggacctattgtgttttaatccacaaaatccttttgtgttaaataggtggatggggaaactgactttcccccagggcacttcccgaagtgtcaaaagaatgcctctttctatagggggaggagctggtgcaaagaatg

SEQ ID NO: 62480 - DNA, 105 bp, Glycine max
  Clone ID: 700762417H1
agctggtcataatatcaccattactgatggtattgacaaaactagtgcaactttgcaatttagaaagttagcagattgtgattttctcaagagaaattttaggca

SEQ ID NO: 62481 - DNA, 125 bp, Glycine max
  Clone ID: 700762418H1
gtgtcatcagccatatttgaggcttttccccataagctggtgcagtttggagagattcaggaaaaagttgtattgaaattttcacaagaggaattccttacagcttggtcaactcaggtgcgtcc

SEQ ID NO: 62482 - DNA, 256 bp, Glycine max
  Clone ID: 700762419H1
tcaaactccccttttcccatgaaaccctcttccaccaccgtcacatacccctaccaccatggccacactccacaacaaccaaccaattccccgtccagcgccgccgtttccatccaatccgcctaccgcgcccacgcatccgcgtcctctaccggaaaatcgccgccgtcgatgccgaagccgatcggctgcagcgcctgatccagcggcaggacacggtggacgccgtgcgcgccaaccacctcgagaaactgcg

SEQ ID NO: 62483 - DNA, 246 bp, Glycine max
  Clone ID: 700762420H1
agttcaatatcctagtataccttaataaataatttaagatactatgatgagagcacggttcccattactgttgctgggacttgttttcctggcttcagtttctgtctcatttggcattgcttactgggaaaaaggaaccccaaacacaacaagtgtctccagagttgcaatagcgagagagactcgtacaggaaccaagcatgccacgctcgttgcaacctccttaaggtggagaaagaagatgtg

SEQ ID NO: 62484 - DNA, 255 bp, Glycine max
  Clone ID: 700762421H1
gatgaagatgaagatcaacctcgcaagagccgcgaatggagatcgaaaaagacacaacccagaagacctagacaagaagaaccacgtgaaagaggatgcgagacaagaaacggggttgaggaaaatatctgcacttgaagcttcacgagaacattgctcgcccttcacgcgctgacttctacaaccctaaagctggtcgcattagtaccctcaacagcctcaccctcccagccctccgccaattccaactcagtg

SEQ ID NO: 62485 - DNA, 252 bp, Glycine max
  Clone ID: 700762422H1
tctcgagcgaatcggctcgggaatatgccaaatgctgttcgttcaatgtggagatattttgttggagatctcgtatttgaagtttctaagatgacttctccctacattaaatgtacagtctctttcttcatacatttggaaatttggctgatgacaccatcaattttgaggcttttccccacaagctggtgcagtttggagagattcaggaaaaagttgtattgaaattttcacaagaggaatttcttacag

SEQ ID NO: 62486 - DNA, 247 bp, Glycine max
  Clone ID: 700762423H1
caaaactacccttttgcttttgctctttgttctttgccatggagtggccacaacaacaatggccttccatgatgatgagggtggtgataaaaagtcaccaaaaagtttgtttttgatgagcaactccacgaggttttcaagactgatgcaggggaaatgcgtgtgctgaaaagccatggtggtaggatattttataggcacatgcacattggcttcatctctatggaaccaaagtccttgtttgttc

SEQ ID NO: 62487 - DNA, 124 bp, Glycine max
  Clone ID: 700762424H1
cttaattattaacacttccttagttcaatatggggaagcccgtcactctctctctttcttccctttgcttgctactcttgtcgagtgcatgctttgctattagctccagcaagctcaacgagtg

SEQ ID NO: 62488 - DNA, 247 bp, Glycine max
  Clone ID: 700762425H1
ccaaaagctgaatgccctcaaaccggataaccgtatagagtcggaaggtgggttcattgagacctggaaccctaacaacaagccattccagtgtgccggtgttgccctctctcgctgcacccttaaccgcatgcccttcgtagaccttcctacaccaacggtccccaggaaatctacatacaacaaggtaatggtatttttggcatgatattcccgggttgtcctagcacttatcaagagccgcaag

SEQ ID NO: 62489 - DNA, 245 bp, Glycine max
  Clone ID: 700762426H1
atctaagctacaaagacatacatatggacataatttcatctggcttcataaacacagcatctttcaaggacagtatggtgtaactttgaaactttcatatttattcaaaatgctcagtgtaatttaaattgtttttcctttctgagcaagtgcatatcgctatgtgcactattataatcacttgtagcctactgaatacattactttatgttttctggttgcaatgtcatggctatgatcatatt

SEQ ID NO: 62490 - DNA, 249 bp, Glycine max
  Clone ID: 700762427H1
cttaattattaacacttccttagttcaatatttgtaagcccttcactctctctctttcttccctttgcttgctactcttgtcgagtgcatgctttgctattagctccagcaagctcacctagtgccatcttacaacctcaatccgttggaacccgaccaccgcgttgagtccgaaggtggtttgattcaaacatggaactctcaacaccctgagctgaaatgcgccggtgtcactgtttccaaactcac

SEQ ID NO: 62491 - DNA, 101 bp, Glycine max
  Clone ID: 700762428H1
aaaggctttagcttgccttttgttcactgtaaaataataatgtaagtactctctataatgagtcacgaaacttttgcgggaataaaaggagaaattccaat

SEQ ID NO: 62492 - DNA, 231 bp, Glycine max
  Clone ID: 700762429H1
ttcaatatcctagtataccttaataaataatttaagatactatgatgagagcacggttcccattactgttgctggtacttgttttcctggcttcagtttctgtctcatttggcattgcttactgggaaaaaagaaccccaaacacaacaagtgtctccagagttgcaatagcgagagagactcgtacaggaaccaagcatgccacgctcgttgcaacctccttaaggtgga

SEQ ID NO: 62493 - DNA, 231 bp, Glycine max
  Clone ID: 700762430H1
attggcctcaggcatcaattcctttctcagatgatgagctcgactatatatatcacctagacccatttcgtgattcagaaatgcttagaatggagcttcccatgattcgagaagcatgcttgcgggttttggtctctgtactatcttcctcaaggaagcagcagcttttggtctttgtctagcagagattggtgacatgatgagtagggaatttcagggtctccatgaaga

SEQ ID NO: 62494 - DNA, 251 bp, Glycine max
  Clone ID: 700762431H1
ctctccattgtctttgaacactcatcaccatggccaagcttgttctttccctttgtttccttcttttcagtggctgcttcgctctgagagagcaggcacagcaaaatgagtgccagatccaaaagctgaatgcctcaaaccggataaccgtatagagtcggaaggtgggttcattgagacctggaaccctaacaacaagccattccagtgtgccggtgttgccctctctcgctgcacccttaaccgcaatg

SEQ ID NO: 62495 - DNA, 250 bp, Glycine max
  Clone ID: 700762432H1
gatcatggatagtagtgttggtgggttgcaaagatgcttgggggtcttctccataggggtcataagataatagggacagtggtgttgatgcgcaagaatgtgttggacgtgaatagcgtaaccagcgttggggaattattggtcaaggtctcgacttagttggctcaacactcgatactcttactgccttcttgggccgatccgtgtctctccagcttattagtgctaccaaagctgatgccaacggaaa

SEQ ID NO: 62496 - DNA, 78 bp, Glycine max
  Clone ID: 700762433H1
ctcgagcgtctcgagccgctcgagcgctcgaggcgcattaaactatgcgcaggtagcaccaccagcagtacttctccg

SEQ ID NO: 62497 - DNA, 146 bp, Glycine max
  unsure (1)..(146): unsure at all n locations
  Clone ID: 700762434H1
cttaattattaacacttccttagttcaatatggggaagcccgtncatgtctctctttcttccctttgcttgctactcttgtcgagtgcatgctttgctatgagctccagcaagctcaaggagtgccagctcaaaacctcaacgcgt

SEQ ID NO: 62498 - DNA, 247 bp, Glycine max
  Clone ID: 700762435H1
agagtttctaaaatatcagcaagagcaaggaggtcatcaaagccagaaaggaaagcatcagcaagaagaagaaaacgaaggaggcagcatattgagtggcttcaccctggaattcttggaacatgcattcagctggacaagcagatagcgaaaaacctacaaggagagaacgaaggggaagacaagggagccattgtgacagtgaaaggaggtctgagcgtgataaaaccacccagggacgagcagc

SEQ ID NO: 62499 - DNA, 124 bp, Glycine max
  Clone ID: 700762436H1
gttggtttccatgttgctggaagcaaaggaagactgggatatgcttcattgataccatatgttgagccagttgtgcaagctcaaagtgctgaagtttactttgacttcttccctgtggaggttg

SEQ ID NO: 62500 - DNA, 117 bp, Glycine max
  Clone ID: 700762437H1
cacacacacacacacactaagaataatggcttctatcctccactactttttagcccgctctctttctttctctttccttttcttcttatccgactccgtccccattccccaacacca

SEQ ID NO: 62501 - DNA, 250 bp, Glycine max
  Clone ID: 700762438H1
cttaattattaacacttccttagttcaatatggggaagcccatcactctctctctttcttccctttgcttgctactcttgtcgagtgcatgctttgctattagctccagcaagctcaacgagtgccaactcacaacctcaacgcgttggaacccgtgcaccgcgttgagtccgaaggtggtttgattcaaacatggaactctcaacaccctgagctgaaatgcgccggtgtcactgtttccaaactcacc

SEQ ID NO: 62502 - DNA, 244 bp, Glycine max
  Clone ID: 700762439H1
attcaaaccttgctctatactacacagtacacacactagaagaataatggcttccatcctccactactttttagccctctctctttcttgctcttttcttgtcttcttatccgactcagtcacccctacaaaccaataaaccttgttgttctacccgttcaaaatgatggttccacagggctccattggtccaacctccaaaaaagaacccctctaatgcaagtaccagtcctggtggacctca

SEQ ID NO: 62503 - DNA, 248 bp, Glycine max
  Clone ID: 700762442H1
taaaattcttccaccaagttatgggtttccttgtgttgcttcttttctccctcttaggtctctcttctagttccagcatatcaactcatcgttccatattggaccttgacctaaccaagtttaccacacgaaacaggtgtcttcactgttccaactatggaagagtgagcatggacgtgtctaccataaccacgaagaagaggcaaagagacttgagattttcaagaataacttgaactatatcaggg

SEQ ID NO: 62504 - DNA, 119 bp, Glycine max
  Clone ID: 700762443H1
ctcgagccatcttcttctcttgcggctagggttttagcgcagctctgctagatttaaggaagatgggtaaggaaaaggttcacatcagtattgtggtcattggccatgtcgactctggg

SEQ ID NO: 62505 - DNA, 247 bp, Glycine max
  Clone ID: 700762444H1
ggcatctgcttctaagttctgggctgagaaagcctcactttgtcaggatgtacagtatgaatcccttgaatcaatgtataatacaaagcattttgttgcaagaagggagtctccctggaaggttgatgtgattctgctggagtttcctctaaacttaaattacttgaacaggacttactaaatctggagaagattggtaagagtgatccatccaaggtgccatccttgattaagaagcaggcaaaga

SEQ ID NO: 62506 - DNA, 248 bp, Glycine max
  unsure (1)..(248): unsure at all n locations
  Clone ID: 700762445H1
ttctctccattggtccttaaacactcatcagtcatcaccatggccaagctagttttttccctttgttttctgcttttcagtggctgctgcttcgctttcagttccagagagcagcctcattanaacgagtccagatccaaaaactcaatgccctcaaaccggataaccgtatagagtcagaaggagggctcattgagacatggaaccctaacaacaagccattccagtgtgccggtgttgccctctct

SEQ ID NO: 62507 - DNA, 73 bp, Glycine max
  Clone ID: 700762446H1
gaaattttgataaaccgcgatcacaggttgccgcaccttaaaaccggaaacaaaagcaatcgttacttgattt

SEQ ID NO: 62508 - DNA, 244 bp, Glycine max
  Clone ID: 700762447H1
acaaaccctcccctcacactctccaaacccgagcggcactacacacgttatctctctctctctctctctctctccctctctccttccccaagatgtcgagcgccgatcccgagcaccgagaagaggaggagcacccgccgtcggcgacgacgaggacaccggagcacacgtcgctcccatcgtcaagctcgaggaggttgctgtcaccaccggcgaggaggacgaagatgcaatcctagatctc

SEQ ID NO: 62509 - DNA, 250 bp, Glycine max
  Clone ID: 700762448H1
tcgagcgattcggctcagaacttattaacactttccttacgttcaatatggggaagcccttcttcactctctcactttcttccctttgcttgctactcttgtcgagtgcatgctttgctattacctccacaagttcaacgagtgccaactcaacaacctcaacgcgttggaacccgaccaccgcgttgagtccgaagtggtcttattgaaacatggaactctcaacaccctgagctgcaatgcgccggtg

SEQ ID NO: 62510 - DNA, 101 bp, Glycine max
  Clone ID: 700762449H1
tgcatgatagttcagtgtctacaataccaggtgattttgtcattggtgttaagttgacaaccataaacaatatgtgtgcatatgggctcaatcctggtatt

SEQ ID NO: 62511 - DNA, 253 bp, Glycine max
  Clone ID: 700762450H1
ctctctctctctctctgcttcacttgcttgaagcaatggccacagccttggcatcagtgctgctgtttctcctcgtagctgtgagtactgtgtttgctgtagagcttgatcttgaaactcttccaccctctaccctcattctcaccctgttcactcccccacaccagcacctcttcacccaccagcaaatgctcctcacgcacaccagcatcaccactaccaccaccctccagcaccagcaccaggaccagcg

SEQ ID NO: 62512 - DNA, 250 bp, Glycine max
  Clone ID: 700762453H1
gatgaggccactcatccagactccatgagggccactttggctgaatttgtttctactttcatctttgtctttgctggagaaggctctggccttgctttggttaaaatttaccaggattcagctttctcagtggtgaattgttggcagttgcaatgacacatggatttgctctatttgctgctgtttctgcaagcatgcatgtatcaggtggccatgtcaacccagctgtgacatttggtgctctcattgg

SEQ ID NO: 62513 - DNA, 247 bp, Glycine max
  Clone ID: 700762454H1
gcagaaagaattaagaaagccaaaaatttggagctgcttttgactgctggcattggttctgatcatgttgatctcaaagctgcagctgctgctggtttaactgtggcagaggtcacaggaagcaacgtttgtcggttgcggaggacgaactcatgagaatcctcattctaatgaggaatttcttgccagggtaccatcaggctgttaatggggaatggaatgttgctggcattgcacatagagctta

SEQ ID NO: 62514 - DNA, 246 bp, Glycine max
  Clone ID: 700762455H1
atggcagccatgttcttaaccagaagcgcgctttttcgcttttcaaagtctctcccttatgccccttcactctcccttaaaccctccatggtcaccttctcctctactcccaattcaggctggagaaagcagcagaaggaggaagaagagacggaagaaccaattggacgtatgattctgccgaggcaagacgcgaggcagatgaaatgtctgagagtgccaaagaaacgatgaatgaaggctatg

SEQ ID NO: 62515 - DNA, 248 bp, Glycine max
  Clone ID: 700762456H1
gacgatccggagccgccacctattcttttgttcatcacatattcaatggcttcctctcttctctctccatcatttacatccttcctccgcaccaaggatctctctctctctgctttcacttctcagcgagcttcaaagcggtgccaaggaaaataatccgttgtgctattgcggcgcctcagcgccaaccttccaccactggatcagttcccgatgcaatgaccatgactgagaagatattggccaga

SEQ ID NO: 62516 - DNA, 234 bp, Glycine max
  Clone ID: 700762457H1
atccggataaaggtgaaaatcatgcccgtcatgttcttggaggaaatgacacctttccttatcctcgtagggggagaactggtagaaaaccaacaaggaaagatcctaatagtgagagtaggagcatgatgtttatcttccaagagatgaggcttttggacacttgaagtcatctgactttcttacttatggactaaaatccgtatctcaaaatgttcttccattattgcaatc

SEQ ID NO: 62517 - DNA, 241 bp, Glycine max
  unsure (1)..(241): unsure at all n locations
  Clone ID: 700762458H1
atagtagtgttggtgggttgcaaagatgcttgggggtcttctccataggggtcataagataatagggacagtggtgttgatgcgcaagaatgtgttggacgtgaatagcgtaaccagcgttgggggaattattggtcaaggtctcgacttagttggctcaacactcgatactcttacntgcttcttgggccgatccgtgtctctccagcttattagggctaccaaagctgatgccatggga

SEQ ID NO: 62518 - DNA, 245 bp, Glycine max
  unsure (1)..(245): unsure at all n locations
  Clone ID: 700762460H1
cttaactttctgtgtgcctgagcgtgtagttcaaggaagtggtgttactataattccgaggatgcgaagtaggatgataatatttgagaaatctgatggtactgtcgctatgcattgtggggagatgaagaagttgattacgtagctgcagaggatcatcttctcnacttacccaatactcattctgcagatttgcttgtacaacagttctgttcagtgatggtacgcgaaggatttgtgaaaga

SEQ ID NO: 62519 - DNA, 242 bp, Glycine max
  Clone ID: 700762461H1
gggaagaagaacaacaagagcagcatgaggaacaagatgaaaatccctacatttttgaggaagataaggattttgagaccagagtcgaaactgaaggtggcagaattcgggttctcaagaagttcactaaaaatccaagcttcttcagggcattgagaacttccgtttggccattttggaagctagagcacacacgttcgtgtctcctcgccaatttgattccgaggttgtttttctcaaca

SEQ ID NO: 62520 - DNA, 205 bp, Glycine max
  Clone ID: 700762462H1
ttctgttccacaggctactgccagatcttctgaaaatgcggaatcctctgcatgatctggaatttgtgttttctttcatttgtccgtttgtttaattcaataaaggaaattaggcatgaccctcttgttgagtatgctctgcctatttgaaaatttccacacctcttttaattgtcgtaatgatgtgtgaagtgtgtgttatttt

SEQ ID NO: 62521 - DNA, 247 bp, Glycine max
  Clone ID: 700762463H1
ataaaattcttccaccaagttatgggtataccttgtgttgcttcttttctccctcttaggtctctcttctagttccagcatatcaactcatcgttccatattggaccttgacctaaccaagtttaccacaagaaacaggtgtcttcactgttccaactatggaagagtgagcatggacgtgtctaccataaccacgaagaagaggcaaagagacttgagattttcaagaataacttgaactatatca

SEQ ID NO: 62522 - DNA, 99 bp, Glycine max
  Clone ID: 700762465H1
ctcgagcgctgaaaatgcggaatcctctgcatgatctggaatttgtgttttctttcgacttgttcgtttgtttaattcaataaaggaaattaggcatga

SEQ ID NO: 62523 - DNA, 243 bp, Glycine max
  Clone ID: 700762466H1
cgcacgcattgcttcgcctcacaacagcagctgcagcagcaatggctcccaaacgaggtggaaaggctccggctcttgccgctaagaagaagcctgagaaggtcacgaatccgttgttcgagaagcgtccaagcagttcggaatcggaggggcgttgcctccgaagagagacttgactaggttcgtgaagtggccaaagaatgttcaaattcagaggaagaagaggattctgaagcagaggtt

SEQ ID NO: 62524 - DNA, 217 bp, Glycine max
  Clone ID: 700762468H1
tgaaaagctttctagctggtcataatatcaccattactgatggtattgacaagactagtgcaactttgcaatttagaaagttagcagattgtgattttctcaagagaaactttaagcagatgtctaatgtttgtgggtagctcctgaggacaaggcgagtttatggtcacaacttcattatgtttcgtgtaataatctggaattgcaagagcttatc

SEQ ID NO: 62525 - DNA, 248 bp, Glycine max
  Clone ID: 700762469H1
tctcgagcgaatcggctcgagttttaagtttctgccgatttcatgtagccgtaactttgaaaactaggttcttgatcggcggtggtcaattttcattgctgtttgtttttgatgagtactgttttttgtttgatggtaagaagagtctgagatatttcgaatttcacaagcagctatagggttttagtccatttcctttgctgctgagggatgttttaagttgcatttaatttataacgaagttttat

SEQ ID NO: 62526 - DNA, 118 bp, Glycine max
  Clone ID: 700762470H1
caccgcacaatattatgagattgcagtagcagtgtttgctttgctcaagtctcagcgatatgatggcagacccagcaagtttcatagcaagctggttaactccttcttacctcttcat

SEQ ID NO: 62527 - DNA, 245 bp, Glycine max
  Clone ID: 700762471H1
attcaaaccttgctctatactacacagtacatacactagaagaataatggcttccatcctccactactttttagccctctctctttcttgctcttttcttttcttcttatccgactcagtcacccctcaaaaccaataaaccttgttgttctacccgttcaaaatgatggttccacagggctccattgtcccaacctccaaaaaagaacccctctaatgcaagtaccagtcctggtggacctcaa

SEQ ID NO: 62528 - DNA, 210 bp, Glycine max
  Clone ID: 700762472H1
tcacacacaactactacaagtacttccttacaatcaaaaccaacaacaactatggcaagttatcaaaagcactacgatgatcagggtcgcaaggttgacgagtatggcaacgttgagaagcaaaccgcgaatacggcaaccctgttcatgctgctagtgtcacctatgtagccaccagaactgctgctggtggttacagtgatgacatta

SEQ ID NO: 62529 - DNA, 244 bp, Glycine max
  Clone ID: 700762475H1
tgaagcaagagcgagagaaacaaatccaagaggaaactcgtgagaagaaagaggaggaaagccgtgaaagggaagaagaacaacaagagcagcatgaggaacaagatgaaaatccctacatttttgaggaagataaggattttgagaccagagtcgaaactgaaggtggcagaattcgggttctcaagaagttcactgaaaaatccaagcttcttcagggcattgagaacttccgtttggccat

SEQ ID NO: 62530 - DNA, 243 bp, Glycine max
  Clone ID: 700762476H1
gaaaaacccaaaaagattgatgccagattgagacaaagaatagatcctcaatacaatgaggttcaggctcagatggaaacaaatttgtttaaattgtctcttgatgatgttgaaactcctaaaggtccatgttggatcttaaaatttctcaatctaaaattgcacttcccaaaaacacagttggaggaaccattctgcgtagtgacctattggcaaattttttgacagagggcaattttagag

SEQ ID NO: 62531 - DNA, 214 bp, Glycine max
  unsure (1)..(214): unsure at all n locations
  Clone ID: 700762477H1
ttgcattctagcattagtattttactcactaaaaaagagatctacatagagagggaagaaaccacgtacggttattatggcgatgaaactcaaatatctgtcttccattgccgaggttctcttgcaagntgttcacagaaactggacacttcggtagagaaattgggtggtggattttgaaggggggtggccccctgtaatggggaaactattg

SEQ ID NO: 62532 - DNA, 118 bp, Glycine max
  Clone ID: 700762478H1
actaacaataattccttcacttgcagaacttagttctctgttgcatcatcatcatcttcattagtgttagccctaaacttcaccttcaaccatgaccacagtgccaccacacagtgtc

SEQ ID NO: 62533 - DNA, 248 bp, Glycine max
  Clone ID: 700762479H1
aaaattcttccaccaagttatgggtctaccttgtgttgcttcttttctccctcttaggtctctcttctagttccagcatatcaactcatcgttccatattggaccttgacctaaccaagtttaccacaagaaacaggtgtcttcactgttccaactatggaagagtgagcatggacgtgtctaccataaccacgaagaagaggcaaagagacttgagattttcaagaataacttgaactatatcaggg

SEQ ID NO: 62534 - DNA, 241 bp, Glycine max
  Clone ID: 700762480H1
atatactatgatgagagtgcggtttcctttgttggtgttgctgggaactgttttcctggcatcagtttgtgtctcattaaaggtgagagaggatgagaataaccctttctacttgagaagctctaacgcttccaaactctctttgagaaccaaaacggtcgcattcgtctcctccagagattcaacaaacgctccccacaacttgagaatcctcgagactaccggattgtccagtttcagt

SEQ ID NO: 62535 - DNA, 95 bp, Glycine max
  Clone ID: 700762481H1
ttgtctttgaacactcatcaccatggccaagcttgttctttccctttgtttccttcttttcagtggctgcttcgctctgagagagcaggcacagc

SEQ ID NO: 62536 - DNA, 246 bp, Glycine max
  Clone ID: 700762482H1
ggaatcctgcttgcacaaaagcaatgactatgtcatttaatccaaacccgtgttctgatgcatggagtttggaatttctgaagcgtactggatttcattgcgatatcatttgtgtcactggatggatgccaccccaatgcaggatgttcaggttacaattgattggtttatttcctctcaggaatgtgttcccaggacctattgtgttttaaatccacaaaatccttttgtgttaaataggtggat

SEQ ID NO: 62537 - DNA, 242 bp, Glycine max
  Clone ID: 700762483H1
gcttgcacaaaagcaatgactatgtcatttaatccaaacccgtgttctgatgcgtggagtttggaatttctgaagcgtaccggatttcattgtgatatcatttgtgtcactggatggactgccactcaatgcaggatgttcaggttacaattgattggtttatttcctctcaggaatgtgttcccaggacctattgtgttttaaatccacaaaatccttttgtgttaaataggtggatgggg

SEQ ID NO: 62538 - DNA, 246 bp, Glycine max
  Clone ID: 700762484H1
tggaaaggctacctttttggaaggtatcattacttcattgccaactttgggagcaggccaatctgcattcaaaattaattttgaatgggatgatgggagtggaattcctggagcattttatatcaaaattttatgcaaactgagtttttccttgtgagtttgactcttgaagacattccaaaccatggaagcaattactgtgtttgcaattcgtggatttacaatgccaaactcttcaaaagtgac

SEQ ID NO: 62539 - DNA, 243 bp, Glycine max
  Clone ID: 700762486H1
cagcactgagtctgagccacgagaatgcaatgttcgtgccacactacaacctgaacgcgaacagcataatatacgcattgaatggacgggcattgatacaagtggtgaattgcaacggtgagagatgtttgatggagagctgcaagagggacgggtgctgatcgtgccacaaaactttgtggtggctgcaagatcacagagtgacaacttcgagtatgtgtcattcaagaccaatgatacacc

SEQ ID NO: 62540 - DNA, 244 bp, Glycine max
  Clone ID: 700762488H1
tgaacactcatcaccatggccaagcttgttctttccctttgtttccttcttttcagtggctgcttcgctctgagagagcaggcacagcaaaatgagtgccagatccaaaagctgaatgccctcaaccggataaccgtatagagtcggaaggtgggttcattgagacctggaaccctaacaacaagccattccagtgtgccggtgttgccctctctcgctgcacccttaaccgcaatgcccttcg

SEQ ID NO: 62541 - DNA, 111 bp, Glycine max
  Clone ID: 700762489H1
gctggtgcaaagaacagcatttggcatattcatgagaatagcattctttgcaccagctcctccccctatagaaagacgcattctctaaacacttcgggaagtgccctgggg

SEQ ID NO: 62542 - DNA, 238 bp, Glycine max
  Clone ID: 700762490H1
tcaatgttgaagaggcttacaacaagctaacagttgaacttgagaaaagtgttcctacattggttggcattgaatgtcccaaggatgaaaaacttcctcgtcgcaaagtttttgataaacctaaacgcgctgcttcactattctccctatggagttaaatcttgtggtccgtcagaagtttttaaattttgtgaggttcattatgaagaaaagggacaagcttagttgtcaagttgga

SEQ ID NO: 62543 - DNA, 242 bp, Glycine max
  Clone ID: 700762491H1
ctttggacttgcgaggatatatgaagctcctctgaagccgttatctgataatggggttgttgtaaccatttggtatcgtgcacccgagttgcttcttggagcaaaacattatactagtgctgtgatatgtgggctgtgggatgcatttttgctgagttgttgaccttgaagccgctatttcaaggggcagaagtcaaagctacatcaaatccctttcagctcgaccaacttgacaagatatt

SEQ ID NO: 62544 - DNA, 245 bp, Glycine max
  Clone ID: 700762492H1
cgactcttttggtgagaaagcaattgccgagattaagaagcaatatgcagtgtttgatgcgaaggtattgagcaagatacccagaggacctctgaaagataaaaagaaagattgaagtgggcacagattctgacaaatatgttgtagtggggtttcaggatggcctatgatgtcatattttatttttttagggtccttttactagagacactgtggaagaaaagtatcttatatatttttcttcc

SEQ ID NO: 62545 - DNA, 62 bp, Glycine max
  Clone ID: 700762493H1
cgagaacaaaaaataaaaaaaaaaaattccgcgtttggctcttctcttggaaaggtgaaacc

SEQ ID NO: 62546 - DNA, 248 bp, Glycine max
  Clone ID: 700762494H1
ctccattggtccttaaacactcatcagtcatcaccatggccaagctagttttttccctttgttttctgcttttcagtggctgctgcttcgctttcagttccagagagcagcctcagtaaaacgaggccagatccaaaaactcaatgccctcaaaccggataaccgtatagagtcagaaggagggctcattgagacatggaaccctaacaacaagccattccagtgtgccggtgttgccctctctcgca

SEQ ID NO: 62547 - DNA, 245 bp, Glycine max
  Clone ID: 700762495H1
aagaggcagagctgcaatcaccagagtggaagcgcgaaacggtcctccccggctttccattttttctcttctgatgaaattttagttcatcccagttgctgattgagattgaatttaaattcgaaaagcgtacttgtgccactgtacttttacagatctgcggctacgggctagcctatcgtatttttgcgtagatctagtgtccgtgaagcgtttacatttccacactcaccactattcatctc

SEQ ID NO: 62548 - DNA, 250 bp, Glycine max
  Clone ID: 700762501H1
aacttcattatgtttcgtgtaataatctggaaatgcaagaagcttatcttgtcaatctcgtaaatgtgttacgagaattgtatttgcacagtccagaggaagctcgccaattgagaaggaaagctctctctcgtattgaatggctgcaaaaagctgatgtgcctaccatagcacagattgaagagttccattcgatgcagaggatgatgaaggctcctgattcaaatgacaatattgatctactgttgag

SEQ ID NO: 62549 - DNA, 231 bp, Glycine max
  Clone ID: 700762502H1
ctttgaacactcatcagcattgtaagacgagttctccctacattaaatgtacagtctctttcttcatagcatttggaaatttggctgatgacaccatcaattttgaggcttttccccacaagctggtgcagtttggagagattcaggaaaaagttgtattgaaattttcacaagaggaattttctacagcttggtcaactcaggtgcgtcctgcaacaactctgttggctg

SEQ ID NO: 62550 - DNA, 264 bp, Glycine max
  Clone ID: 700762503H1
gcatgcacgttcggctcgatcagattttcacaagacgaatttcttacagcttggtcaacccaggtgcgtcgtgcaacaactctgttggctgatcggtcacctatcagaatgctattgtacataatagttcatactctacaataccaggtgattttgtcattggtgttaagttgacaaccataaacaatatgtgtgcatatgggctcaatcctggtatttcaggttctcgtcttttgggcaccttcatcagtccatttcacagca

SEQ ID NO: 62551 - DNA, 241 bp, Glycine max
  Clone ID: 700762504H1
aacctcgtcaagaagaagagcacgagcagacagaggaacaggcatggcctcgcaaggaggaaaaacgcggagaaaagggaagtgaagcacgaagatgaggatgaggatgaggaacaagatgaacgtcaattcccattcccacgcccacctcatcagaaggaagagcgagagcaagaggaagatgaggatgaggagcagcagcgagagagcgaagaaagtgaagattctgagttacgaagac

SEQ ID NO: 62552 - DNA, 245 bp, Glycine max
  Clone ID: 700762505H1
tctcgagccgctcgagccgattctgctcgaggatagttcagtgtctacaataccaggtgcactttgtcactggtgttaagttgacaaccataaacacatatgtgtgcatatgggctcaatcctggtatttcaggttctcgtcttttgggcaccattcctcagtccatttcacagcaaactgtttggaatcaaatggcaacagtgagaacaccattgaattttgattctagcaagcagagcttttg

SEQ ID NO: 62553 - DNA, 244 bp, Glycine max
  Clone ID: 700762507H1
acacttccttagttcaatatggggaagcccttcactctctctctttcttccctttgcttgctactcttgtcgagtgcatgctttgctattagctccagcaagctcaacgagtgccaactcaacaacctcaacgcgttggaacccgaccaccgcgttgagtccgaaggtggtttgattcaaacatggaactctcaacaccctgagctgaaatgcgccggtgtcactgtttccaaactcaccctca

SEQ ID NO: 62554 - DNA, 244 bp, Glycine max
  Clone ID: 700762508H1
agatcctcaatacaatgaggttcaggctcagatggaaacaaatttgtttaaattgtctcttgatgatgttgaaactcctaaaggctccatgttggatctgaaaatttctcaatctaaaattgcacttcccaagaacacagttggaggaaccattctgcgtagtgatctattggcaaattttttgacagagggcaattttagagcaagtgttgatttgcagcgcactcatcgtattagaggaatg

SEQ ID NO: 62555 - DNA, 247 bp, Glycine max
  Clone ID: 700762509H1
ggatcactccgcaagaatgctatgttcgtgccacactacaccctgaacgcgaacagcataatatacgcattgaatgggcgggcattggtacaagtggtgaattgcaatggtgagagagtgtttgatggagagctgcaagagggaggggtgctgatcgttccacaaaactttgcggtggctgcaaaatcccagagcgataactttgagtatgtgtcattcaagaccaatgatagaccctcgatcggaa

SEQ ID NO: 62556 - DNA, 242 bp, Glycine max
  Clone ID: 700762510H1
ctctatctctattaagttgtaactctatttatcactcagatatttgagaaggctttgaaagatggtgcttttgggacttctcatggtgggatttctttctctgggttcatttgtctcagcttctggttatggttggatggatgctcatgcaaccttctatggagggggtgatgcctcaggcaccatgggtggagcatgtggatatgggaacttgtacagccagggctatggaacaaacactg

SEQ ID NO: 62557 - DNA, 245 bp, Glycine max
  Clone ID: 700762511H1
gctagaatggaatttcgatgctcagtcatctcttttaccattctcttctctcttgctcttgcaggagagagccatgtccatgcatcgctacctgaggaagattattgggaagctgtttggccaaacactcccattcccactgcactgcgagagcttctaaagcctcaccctgcaggtgttgaaatcgatgaactccctaagcaaattgatgatacacagtacccaaaaacattcttctataaaga

SEQ ID NO: 62558 - DNA, 231 bp, Glycine max
  Clone ID: 700762512H1
agcgcacaaagcaaagcagtaaatgcttttattgattctgaacattttacaaaacaactgcttttattttattaaagccaaacatgaaagcactcaaacacactagattaccatgtgcaggttggatgaagaaattcgggaagcagctgcaagagatgcaagagttgcaagggaagcagctgcaagatatgcaagggatgcaagggtgcaggcgagagttgtaaagagaac

SEQ ID NO: 62559 - DNA, 232 bp, Glycine max
  Clone ID: 700762513H1
gtctttgaacactcatcaccatggccaagcttgttctttccctttgtttccttcttttcagtggctgcttcgctctgagagagcaggcacagcaaaatgagtgccagatccaaaagctgaatgccctcaaaccggataaccgtatagagtcggaaggtgggttcattgagacctggaaccctaacaacaagccattccagtgtgccggtgttgccctctctcgctgcaccct

SEQ ID NO: 62560 - DNA, 245 bp, Glycine max
  Clone ID: 700762515H1
aaagcaaagtctgatattgtggtcaagattggactcaggaagggttctcgttcctttgctgaagctcgtgcagctgggttttctgaggagaatgggactctaggtgatatatgggaaactgtctctggaagtgatcttgtgatgctgttaatttctgattctgcacaggctgataactatgagaagatattgtctcacatgaagccaaacagtatacttgggctttcccatggttttcttcttgg

SEQ ID NO: 62561 - DNA, 117 bp, Glycine max
  Clone ID: 700762516H1
aagcaaagcaatggctacttcaaagttgaaaacccagaatgtggttgtatctctctccctaaccttaaccttggtactggtgctactgaccagcaaggcaaactcagcggaaactgt

SEQ ID NO: 62562 - DNA, 242 bp, Glycine max
  Clone ID: 700762518H1
tctctcccattctctcgcatctcaatacccttttgatttgtgacaggaaagcaaacatgcttgatcaggtccaacaccctacaatcatggacttggttgctggccagctccatctccgttctggtgtttctggtattaggagttatgaaggagcctactgccaccccacaatgtaccaaagaccctcttttgggaattactcgaatgctgcattccagtatcctgtgatgccctcatgcaaa

SEQ ID NO: 62563 - DNA, 244 bp, Glycine max
  Clone ID: 700762519H1
caagaacaatcaaacagaagtggctcaaggtcgcagaagcagcagctacaggacagtcaccagaagattcgtcacttcaatgaaggagacgtactcgtgattcctcctggtgttccttactggacctataacactggcgatgaaccagttgttgccatcagtcttctcgacatctctaacttcaataaccagcttgatcaaacccctagggtattttaccttgctgggaacccagatatagagt

SEQ ID NO: 62564 - DNA, 90 bp, Glycine max
  Clone ID: 700762520H1
aaattttgataaaccgcgatcacaggttgccgcaccttaaaaccggaaacaaaagcaatcgttacttgatttcaagaatctctcaatttc

SEQ ID NO: 62565 - DNA, 242 bp, Glycine max
  Clone ID: 700762521H1
aacagctttcatggttccattggtggctggtgatggaaccaaaactcaggcacttgctgtttgccactcagatacttctggaatgaatcatcacatgcttcatgaacacatgggagttgatcctggaactaaccctgtttgccatttccttggaagcaaggccattttatgggtacccaatttatctatacacactgcctatcagactaacgttgttgtttaattagtccatgcatctgcat

SEQ ID NO: 62566 - DNA, 229 bp, Glycine max
  Clone ID: 700762522H1
atcctagtacaccgtattaaagaatttaagatatactatgatgagagcgcggttcccattactgttgctggcagttgttttcctggcatcagtttctgtctcatttggcattgcgtattgggaaaagcagaaccccagtcacaacaagtgcctccgaagttgcaatagcgagaaagactcctacaggaaccaagcatgccacgctcgttgcaacctccttaaggtggag

SEQ ID NO: 62567 - DNA, 242 bp, Glycine max
  Clone ID: 700762523H1
attgggccaacctccaaaaaagaacccctctaatgcaagtaccagtcctggtggacctcaatggaaatcacttgtgggttaactgtgagcagcagtactcatccaaaacgtaccaagcacccttctgccactccacccaatgctctagagccaacacccaccaatgcctcagttgccccgcggcatcaaggccagggtgccacaaaaacacgtgtggcctcatgtccactaatcccatcacc

SEQ ID NO: 62568 - DNA, 179 bp, Glycine max
  Clone ID: 700762524H1
tgataaaccgcgatcacaggttgccgcaccttaaaaccggaaacaaaagcaatcgttacttgatttcaagaatttctcaatttctttctacttctttgtgtacgatttcttaagggaaagaaaatcactctctgtgctggccacagacttcgtgaatcattttcttttccactcttagt

SEQ ID NO: 62569 - DNA, 244 bp, Glycine max
  Clone ID: 700762525H1
caaaagtttttaaattttgtgaggttcattatgaagaaaagggacaaacttagttgtcaagttggaatcaacccatactccatggaatggactggtttggccaatagattactgagtaagggcaatgatattctgtgttgccatcttgctcataacttgcttggtaatcaaaccatcaaaactagcataatggcagaaatgataaacagtctttgtggtggtgatgaaaaattgatgcgtgaaa

SEQ ID NO: 62570 - DNA, 242 bp, Glycine max
  Clone ID: 700762526H1
agcgaaggagatataaagactcttggtaatggtaacatgaacatcgtccaatcaccccttgagaggcccttgcttatcagcaactgcaccagtgaggaacgctttcaaaagctctcaagatacaggaataagaggacaaagaggaattttgggaggaaaatcaagtatgcttgcaggaaggctcttgctgacagtcagccaagaatccgtgggagatttgcaaggactgaagagtctgatgt

SEQ ID NO: 62571 - DNA, 232 bp, Glycine max
  Clone ID: 700762527H1
cgccaaagcaaaaggagcagaaatggcattgatgagaccatttgcacaatgagacttcgccaaaacattggtcagaattcatcacctgacatctacaaccctcaagctggtagcatcacaaccgccaccagccttgacttcccagccctctggcttctcaaactcagtgcccagtatggatcactccgcaagaatgctatgttcgtgccacactacaccctgaacgcgaaca

SEQ ID NO: 62572 - DNA, 239 bp, Glycine max
  Clone ID: 700762528H1
gttgcagaccgagctagctagctagcaagcaagcacagagatggaggcaaagcgaggccatgccctcatgtgcttggcacgtgtttcactcttcctctgcgctctaaccctatccgctgctcacggaagcaccacggttcaacacatcgcgagaaagttgaaactcggggacaacgagcttctgcgcacggagaagaagttcaaggttttcatggagaattacgggaggagctactcca

SEQ ID NO: 62573 - DNA, 69 bp, Glycine max
  Clone ID: 700762529H1
ccaaaagctgaatgccctcaaaccggataaccgtatagagtcggaaggtgggttcattgagacctggaa

SEQ ID NO: 62574 - DNA, 246 bp, Glycine max
  Clone ID: 700762530H1
ttcctcgtcgcaaaatttttgacaaacctaagacgcgctgcttcactattctccctatggagtttaatcttgtggtccgtcaaaagtttttaaattttgtgaggttcattatgaagaaaagggacaaacttagttgtcaagttggaatcaacccatactccatggaatggactggtttggccaatagattactgtctaagggcaatgatattctgtgttgcgattatgctagttttgatggtttga

SEQ ID NO: 62575 - DNA, 249 bp, Glycine max
  Clone ID: 700762531H1
aaatgaccaagttcacaatcctcctcatctctcttctcttctgcatcgcccacacttgcagcgcctccaaatggcagcaccagcaagatagctgccgcaagcagctccagggggtgaacctcacgccctgcgagaagcacatcatggagaagatccaaggccgcggcgatgacgatgatgatgatgacgacgtgaatcacattctcaggaccatgcggggaagaatcaactacataaggaggaacgaag

SEQ ID NO: 62576 - DNA, 245 bp, Glycine max
  Clone ID: 700762532H1
agcattccatagttctcagatagggcacgtctctcgcggcctcttctctccctcgcgccgcccacactaaaaggttattgctctattattgtttgacgatggctgatgctcatgggactgataagaacattgaggtgtggaaaatcaagaaattgatcaaagctcttgaggctgccagaggaaatgggacaagtatgatttcccttatcatgcctccacgtgatcaaatatctcgtgtcaccaag

SEQ ID NO: 62577 - DNA, 242 bp, Glycine max
  unsure (1)..(242): unsure at all n locations
  Clone ID: 700762533H1
attcaaaccttgctctatactacacagtacacacactagaagaataatggcttccatcctccactactttttagccctctctctttcttgctcttttcttttcttcttatccgactcagtcacccctacaaaaccaataaaccttgttgttctacccgttcaaaatgatggttccacagggctccattggtttaatctcaaaaaaattanncctctaatgcaagtaccagtcctggtggacc

SEQ ID NO: 62578 - DNA, 107 bp, Glycine max
  Clone ID: 700762535H1
caaatccttcacttgttgctcgtcttagtttctgtgttgtgtcatttttattgctatatcctaattaaacttcaccctcaaaatgagtgatcccacactagcacaac

SEQ ID NO: 62579 - DNA, 240 bp, Glycine max
  Clone ID: 700762536H1
gtgttttaaatccacaaaatccttttgtgttaaataggtggatgggaaaattgactttcccccagggcacttcccgaagtgttaagagaatgcctctttctatagggggaggagctggtgcaaagaatgctattctcatgaatatgccaaatgctgttctttcaatgtggagatattttgttggagatctcgtctttgaagtttctaagatgacttctccctacattaaatgtacagtct

SEQ ID NO: 62580 - DNA, 201 bp, Glycine max
  Clone ID: 700762537H1
tgaattcttgaaagaagcgttcggcgtgaacatgcagatagtgagaaacctacaaggtgagaacgaagaggaggatagtggagccattgtgacagtgaaaggaggtctaagagtcacagctccagccatgaggaagccacagcaagaagaagatgatgatgatgaggaagagcagccacagtgcgtggagacagacaaagg

SEQ ID NO: 62581 - DNA, 241 bp, Glycine max
  Clone ID: 700762538H1
caaaggaaaggttaactaagaagcaatacttcaatggccacccttgttgttcataaccaaacttcttctgctcaagatgctgaggctctccaacaggctttcaaaggatggggggctgatgacaaggccattatagcaatactgggtcacagaaatgttcatcagaggcaagaaatcagagaagcttatgaggagatttaccaagaggatctcatcagacgccttgagtccgagatctctg

SEQ ID NO: 62582 - DNA, 241 bp, Glycine max
  Clone ID: 700762540H1
ttaacacttccttagttcaatatggggaagcccttcactctctctctttcttccctttgcttgctactcttgtcgagtgcatgctttgctattagctccagcaagctcaacgagtgccaactcaacaacctcaacgcgttggaacccgaccaccgcgttgagtccgaaggtggtttgattcaaacatggaactctcaacaccctgagctgaaatgcgccggtgtcactgttgcgaaactca

SEQ ID NO: 62583 - DNA, 244 bp, Glycine max
  Clone ID: 700762541H1
ctccattggtccttaaacactcatcagtcatcaccatggccaagctagttttttccctttgggttctgcttttcagtggctgctgcttcgctttcagttccagagagcagcctcagcaaaacgagtgccagatccaaaaactcattgccctcaaaccggataaccgtatagagtcagaaggagggctcattgagacatggaaccctaacaacaagccattccagtgtgccggtgttgccctctc

SEQ ID NO: 62584 - DNA, 241 bp, Glycine max
  Clone ID: 700762542H1
cgaaggggaagacaagggagccattgtgacagtgaaaggaggtctgagcgtgataaaaccacccacggacgagcagcaacaaagaccccaggaagaggaagaagaagaagaggatgagaagccacagtgcaagggtaaagacaaacactgccaacgcccccgaggaagccaaagcaaaagcagaagaaatggcattgacgagaccatatgcaccatgagacttcgccacaacattggccag

SEQ ID NO: 62585 - DNA, 234 bp, Glycine max
  Clone ID: 700762543H1
gggtttcgtttcgggtttgacgttgtgcacaatcactttctgcgcttcacttactcgcttcgtgcggtattctttcttagtcgaactcgtgcgaaaatgcgtgagattcttcacatacagggagagcaatgcggaaaccagatcggagcgaagttctgggaggtggtgtgctcggagaggggatcgattccacggggaggtaccagtgggagaacgagttgcaactcgagcgag

SEQ ID NO: 62586 - DNA, 236 bp, Glycine max
  Clone ID: 700761936H1
caaaaagattgatgccagattgagacaaagaatagatcctcaatacaatgaggttcaggctcagatggaaacaaatttgtttaaattgtctcttgatgatgttgaaactcctaaaggttccatgttggatcttaaaatttctcaatctaaaattgcacttcccaaaaacacagttggaggaaccattctgcgtagtgacctattggcaaattttttgacagagggcaattttagag

SEQ ID NO: 62587 - DNA, 232 bp, Glycine max
  Clone ID: 700761938H1
gtttttacaatccttcaaaaattttgtttctttgtgtgtgtatggtgatgataacttaattagtgttcatgaatatgtcaagccttactttagtggttctaaattgaaaagctttctagctggtcataatatcaccattactgatggtattgacaaaactagtgcaactttgcaatttagaaagttagcagattgtgattttctcaagagaaactttaagcagatgtctaat

SEQ ID NO: 62588 - DNA, 235 bp, Glycine max
  Clone ID: 700761939H1
tgaacactcatcaccatggccaagcttgttctttccctttgtttccttcttttaagtggctgcttcgctctgagagagcaggcacagcaaaatgagtgccagatccaaaagctgaatgccctcaaaccggataaccgtatagagtcggaaggtgggttcattgagacctggaaccctaacaacaagccattccagtgtgccggtgttgccctctctcgctgcacccttaaccgca

SEQ ID NO: 62589 - DNA, 236 bp, Glycine max
  Clone ID: 700761940H1
cacttggagaaaatgccactatggcaaaaagcaattttgtgtggaatgggacattgtttgtctcggaaaagcaaagaaacatggtattctgggatgaaggaaaaatttgtgcaaatgatgaagagcatctatgaaacagaagttacagattggccagtaccactgaaaatcatttctggaaccattcttgcaacaattttgggaacaaccttctggaaactcttttcctttcttag

SEQ ID NO: 62590 - DNA, 236 bp, Glycine max
  Clone ID: 700761942H1
agcttttctttttcttgttctttaattttctgattttagcaaattacaatagtagtgttattggtaggttttggtaaagatgttttcagttccaggggtgtcgggaattctgaacagaggaggagggcataagataaaagggacagtggtgttgatgaggaagaatgtgttggacttcaacagcgtggctgatcttactaaaggaaatgttgggggactcataggcaccggcctca

SEQ ID NO: 62591 - DNA, 236 bp, Glycine max
  Clone ID: 700761943H1
gtttggttctaggctctgttcttagtttttggctgtaataatgttatgcaattaacttaatcacacatagcaatacaccttttacatatagccgtgaaaggtgaaacttagtagtagtagtattctatgccgaaagtagggacatgagatgtgtaaggccaaagtcagttgctttgtgacttggtggttttcatgctttgtgggagttatgttaaatttaagttaatgttatgaaa

SEQ ID NO: 62592 - DNA, 237 bp, Glycine max
  Clone ID: 700761944H1
ctgctgttagatctgtacccgcctagccattgatttggaaaagtccaacttcaaggatgagtaagcttcagagtgatgctctaagagaagctatctcaggaatcatggctgattccaaggaaaagaacaggaaatttgtggagaccattgaactccaaattgggttgaaaaattatgatccccagaaggacaagcgtttcagtggctctgttaagttgcctcatattcctcgcccca

SEQ ID NO: 62593 - DNA, 237 bp, Glycine max
  Clone ID: 700761945H1
cttaattattaacacttccttagttcaatatggggaagcccttcactctctctctttcttccctttgcttgctactcttgtcgagtgcatgctttgctattagctccagcaagctcaacgagtgccaactcaacaacctcaacgcgttggaacccgaccaccgcgttgagtccgaaggtggtttgattcaaacatggaactctcaacaccctgagctgaaatgcgccggtgtcactg

SEQ ID NO: 62594 - DNA, 239 bp, Glycine max
  Clone ID: 700761947H1
tggcggcaaggcaaatctgcattgcgatggcgcctccgaagctcttcgtctttgcgctttctgtaaccctaattttcgccatcgttggggccgaagccgatatttccatcgaaggaagcactccagagcctgatacctccgccatcaggatccaattagatcaactcaattccaagatccaaattctcgagtctcaaatcagcgaaaagttggaagaagtgaagaagaaggacgaaatt

SEQ ID NO: 62595 - DNA, 236 bp, Glycine max
  Clone ID: 700761948H1
gtttgatagctttgatgaagttcatggactctattcaggcggaattaagctgccaacagatataatcagcaagattagtccactacccggcctaagggaatcttccgaactgatggtggacaaggccctaaagttccttcttccaaaagtatttcaggtgattaagtctgcatggatgactgatgaggaatttgcaggagaaatgcttgctggtgtaaatccaaacttgattcgtt

SEQ ID NO: 62596 - DNA, 223 bp, Glycine max
  Clone ID: 700761949H1
ttgaggccaggcaagccccactcaaccaccacacctctcctcgttcacgctacccctttctgctcttcttctacctttcaagttttaaaagtataaagatggcagagacattcctatttacctcagagtcggtgaacgagggacaccctgacaagctctgcgaccaaatctccgatgctgtcctcgacgcttgcctcgcgggcccaacagcaaagtttgcctg

SEQ ID NO: 62597 - DNA, 122 bp, Glycine max
  Clone ID: 700761950H1
ctagttcaatatcctagtataccttaataaataatttaagctactatgatgagagcacggttcccattactgttgctgggacttgttttcctggcttcagtttctgtctcatttggcattgc

SEQ ID NO: 62598 - DNA, 233 bp, Glycine max
  Clone ID: 700761952H1
gccaaccatacatatgttccaagtgagacaccagcagcacttgtggggtacagagaagaagaattgaagaatttaagaggagatggacaaggagagcgcaaagaacatgataggatctatgattatgatgtctacaatgatttgggcaatccagatcacggtgaaaattttgctcgcccaattcttggagggtctagcactcatccctaccctcgtaggggaagaactggtcg

SEQ ID NO: 62599 - DNA, 235 bp, Glycine max
  Clone ID: 700761959H1
ggctatgaggagagccgagaaggagagactgaaggaaggtgcagcagctgacgaggaacaaaagaaaatgaagaaagagactaagaagaaaagctcgtccacttccaaggatgagaccacaaagttgacctctacaaagaagaaagccagtggctctgatgaagatcatcgatctccagctcacagtcaagttgatgagaaagaagaggctcctgatgaagatgatgatgatggt

SEQ ID NO: 62600 - DNA, 234 bp, Glycine max
  Clone ID: 700761960H1
gcaagttatgagctaaatggcagaaatgataaacagtctttgtggtggtgatgcaaaattgatgcgtgaaaggacacacctgctgttggcttgttgttcaaggatggcaatttgtaagaaagatgtttggagagttgaatgtggaatcccttctggatttccgctcacagttatttgcaatagcatttttaatgagatgctcactatatatagctatgaaaaattactgcgcca

SEQ ID NO: 62601 - DNA, 232 bp, Glycine max
  Clone ID: 700761961H1
tctgctgaaacctattgcttggttcattttccaagtttcatcaggttggccagggaagctggtcttgagtacgtggagattcaaaatttgaccgagttttatgatgacaacaggttagttttgcattctctgtagggcactgatcctcccaaatccttaaaatatattgtttgttattagcagttttggagtttgaaatactatttattgaatttaatttttgtgattgttt

SEQ ID NO: 62602 - DNA, 89 bp, Glycine max
  Clone ID: 700761962H1
agaacagtcgtcggctcctcgctcgcccttcgctgctgcgccatcaccgtgcccttctcaaagcgattttaaactaaccgcgttctttt

SEQ ID NO: 62603 - DNA, 237 bp, Glycine max
  Clone ID: 700761963H1
cttattaacactttccttagttcaatatggggaagcccttcttcactctctctctttcttccctttgcttgctactcttgtcgagtgcatgctttgctattacctccagcaagttcaacgagtgccaactcaacaacctcaacgcgttggaacccgaccaccgcgttgagtccgaaggtggtcttattgaaacatggaactctcaacaccctgagctgcaatgcgccggtgtcactg

SEQ ID NO: 62604 - DNA, 161 bp, Glycine max
  Clone ID: 700761964H1
gaaaaaaggtgtcatcacccaagtaaagtaccaagggggctgtggaagcggttgggcgttttctgccacgggagccatagaagcagcacatgcaatagcaacaggagaccttgttagcctttctgaacaagaactcgtagactgtgtggaagaaagcgaag

SEQ ID NO: 62605 - DNA, 232 bp, Glycine max
  Clone ID: 700761968H1
tgctactcttgtcgagtgcatgctttgctattacctccagcaagttcatcgagtgccaactcaacaacctcaacgcgttggaacccgaccaccgcgttgagtccgaaggtggtcttattgaaacatggaactctcaacaccctgagctgcaatgcgccggtgtcactgtttccaaacgcaccctcaactgcaacggcctccacttgccatcttactcaccttatccccaaat

SEQ ID NO: 62606 - DNA, 232 bp, Glycine max
  Clone ID: 700761974H1
ccgggaaccagtgttgaagaggcttacaacaagctaacagttgaacttgagaaaagtgttcctacattggttggcattgaatgtcccaaggatgaaaaacttcctcgtcgcaaagtttttgataaacctaagacgcgctgcttcactattctccctatggagtttaatcttgtggttcgtcagaagtttttaaattttgtgaggttcattatgaagaaaagggacaagctta

SEQ ID NO: 62607 - DNA, 232 bp, Glycine max
  Clone ID: 700761976H1
ctcgagccgtgaacactcatcaccatggccaagcttgttctttccctttgtatccttcttatcagtgagtgcttcgctctgagagagcaggcacagcacaatgagtgccagatccaaaagctgaatgccctcaaaccggataaccgtatagagtcggaaggtgggttcattgagacctggaaccctaacaacaagccattccagtgtgccggtgttgccctctctcgctgca

SEQ ID NO: 62608 - DNA, 86 bp, Glycine max
  Clone ID: 700761977H1
gtgacaagaccctaatgaaaatgagtttgatttttactgtgctttgtttcttcctaggtatgaatctgctacaatttctctgattc

SEQ ID NO: 62609 - DNA, 189 bp, Glycine max
  Clone ID: 700761980H1
tgaaattttgataaaccgcgatcacaggttgccgcaccttaaaaccggaaacaaaagcaatcgttacttgatttcaagaatctctcaatttcttcctacttctttgtgtacgatttcttaagggaaagagaatcactctctgtgctggccacagacttcgtgaatcattttcttttccacacaacatac

SEQ ID NO: 62610 - DNA, 225 bp, Glycine max
  Clone ID: 700761981H1
attaacacttccttagttcaatatggggaagcccttcactctctctctttcttccctttgcttgctactcttgtcgagtgcatgctttgctattagctccagcaagctcaacgagtgccaactcaacaacctcaacgcgttggaacccgaccaccgcgttgagtccgaaggtggtttgatccaaacatggtctcaacacctgagctgaaatggcggtgtcactgt

SEQ ID NO: 62611 - DNA, 166 bp, Glycine max
  Clone ID: 700761982H1
atacacacacacacacacactaagaataatggcttctatcctccactactttttagccctctctctttctttctctttccttttcttcttatccgactccgtccccattccccaacaccacactaaccctacaaaacctataaaccttctggttctacccgttaaa

SEQ ID NO: 62612 - DNA, 224 bp, Glycine max
  Clone ID: 700761984H1
cggctcgagccgaggttgtcttgttcaacattaaggggagagccgtacttgggttggtgagggacagtgaaacagaaaaaatcaccctagaacctggagacatgatacacataccagcaggcacaccactgtacatcgttaacagagatgagaatgagaagctcctccttgccatgctccatatacctgtctctactcctggaaaatttgaggaatttttcggg

SEQ ID NO: 62613 - DNA, 228 bp, Glycine max
  Clone ID: 700761985H1
atagagctgaattgtctgaacaagatatatttgtaatcccagcaggttatccagttgtggtcaacgctacctcagatctgaatttctttgcttttggtatcaatgccgagaacaaccagaggaacttccttgcaggttcgaaagacaatgtgataagccagatacctagtcaagtgcaggagcttgcgttccctgggtctgcaaaagatattgagaacctaataaaga

SEQ ID NO: 62614 - DNA, 228 bp, Glycine max
  Clone ID: 700761987H1
ctagttcaatatcctagtataccttaataaataatttaagatactatgatgagagcacggttcccattactgttgctgggacttgttttcctggcttcagtttctgtctcatttggcattgcttactgggaaaaagagaaccccaaacacaacaagtgtctccagagttgcaatagcgagagagactcgtacaggaaccaagcatgccacgctcgttgcaacctcctt

SEQ ID NO: 62615 - DNA, 230 bp, Glycine max
  Clone ID: 700761988H1
ccattgtctttgaacactcatcaccatggccaagcttgttctttccctttgtttccttcttttcagtggctgcttcgctctgagagagcaggcacagcaaaatgagtgccagatccaaaagctgaatgccctcaaaccggataaccgtatagagtcggaaggtgggttcattgagacctggaaccctaacaacaagccattccagtgtgccggtgttgccctctctcgct

SEQ ID NO: 62616 - DNA, 228 bp, Glycine max
  Clone ID: 700761990H1
cgtgaacatgcagatagtgagaaacctacaaggtgagaacgaagaggaggatagtggagccattgtgacagtgaaaggaggtctaagagtcacagctccacgcactgtggctgctcttcctcatcatcatcatcttcggaacattttagaggcctcctacgataccaaattcgaggagataaacaaggttctgtttagtagagaggaagggcagcagcaaggggagca

SEQ ID NO: 62617 - DNA, 226 bp, Glycine max
  Clone ID: 700761991H1
agaagtttttaaattttgtgaggttcattatgaagaaaagggacaagcttagttgtcaagttggaatcaacccatattctatggaatggactggtttggccaatagattactgagtaagggcaacgatattctgtgttgcgattatgctagttttgatggtttgattaccaagcaagttatgagcaagatggcagaaatgatcaacagtctttgtggtggtgatga

SEQ ID NO: 62618 - DNA, 201 bp, Glycine max
  Clone ID: 700761992H1
ctcgagccgattcggctcgagtgaaattttgataaaccgcgatcacaggttgccgcaccttaaaaccggaaacaaaagcaatcgttacttgatttcaagaatctctcaatttcttcctacttctttgtgtacgatttcttaagggaaagaaaatcactctctgtgctggccacagacttcgtgaatcattttcttttccac

SEQ ID NO: 62619 - DNA, 232 bp, Glycine max
  Clone ID: 700761993H1
caatagacacgtaatcaaaaccatgcagatacgaacctgccactccatcaccacccaaacccttccacaacttccgtgatacactagaaaagcccaccaccgccaccttcttccgccgttaaacgctgcggtttccgcggcgccgttcaaagcccggaaggcccactcaatgcctccagaaaagaaagaaattttcaagtccttggagggatgggcctcggagtgggtccta

SEQ ID NO: 62620 - DNA, 229 bp, Glycine max
  Clone ID: 700761994H1
gaaacctacaaggtgagaacgaagaggaggatagtggagccattgtgacagtgaaaggaggtctaagagtcacagctccagccatgaggaagccacagcaagaagaagatgatgatgatgaggaagagcagccacagtgcgtggagacagacaaaggttgccaacgccaaagcaaaaggagcagaaatggcattgatgagaccatttgcacaatgagacttcgccaaaa

SEQ ID NO: 62621 - DNA, 230 bp, Glycine max
  Clone ID: 700761995H1
gatgattttcctgaaaaggaagatcaagaaaaacccaaaaagattgatgccagattgagacaaagaatagatcctcaatacaatgaggttcaggctcagatggaaacaaattggttaaaattgcctccttgatgatgttgaaactcctaaaggttccatgttggatcttaaaatttctcagtctaaaattgcacttcccaagaacacagttggaggaactattctgcgta

SEQ ID NO: 62622 - DNA, 90 bp, Glycine max
  Clone ID: 700762002H1
attactcgaagccataccagacattgctggctcaacacttattggacttgtgacatcaagagcagaaattcctgagctacttaagttgga

SEQ ID NO: 62623 - DNA, 276 bp, Glycine max
  Clone ID: 700762003H1
aaacactcatcagtcatcaccatggccaagctagttttttccctttgttttctgcttttcagtggctgctgcttcgctttcagttccagagagcagcctcagcaaaacgagtgccagatccaaaaactcaatgccctcaaaccggataaccgtatagagtcagaaggagggctcattgagacatggaaccctaacaacaagccattccagtgtgccggtgttgccctctctcgctgcaccctcaaccgcaacgcccttcgtagaccttcctacacc

SEQ ID NO: 62624 - DNA, 272 bp, Glycine max
  Clone ID: 700762004H1
gagaagaagatgggtttgaagaacaacatggtggtgctaaaggtgtgtttggtgctacttttccttgtggggggtactactagtgccaacttgaggctgagtaagcttggcctgctcatgaaaagtgatcatcatcaacactcaaatgatgatgagtcttcaaaaccatgctgtgatcaatgcgcatgcacaaagtcaaaccctcctcaatgccgctgttcagatatgaggctgaattcgtgccattcagcttgcaaatcttgtatttgcgc

SEQ ID NO: 62625 - DNA, 272 bp, Glycine max
  Clone ID: 700762005H1
ttgtgggttgattgtagtcccaagagatatagaagggatagtaacagagtaacctcagatggaggagatcggagaaacccaccacatcattctaggcgtgaacccttcgatgctgctcccaagaaatcaaattcaaatgatcatcatgagaatccgccccaacatttgtctcaaccaccaagatctcgctcttatcatcaggtcataccttaaaaagaaattgaatgcttgagctgttacctgtgaaccaagttctgctcctaattgtattc

SEQ ID NO: 62626 - DNA, 91 bp, Glycine max
  Clone ID: 700762006H1
ttgcatttcgttactttcatttgttgtgcaatcttacaagttccaaacttctctattttgttattatttgttctcactgctcaaacataga

SEQ ID NO: 62627 - DNA, 274 bp, Glycine max
  Clone ID: 700762007H1
cgcacgataggaggcactacgctgtcgtttgcggtgttagaagacctagtcgggcgtgatggcgaagaagcgatcagccccgagtggcggtcgtcgggaaaaccgagccgaatcatcttcccgacggctcaactcagcttccggtcgcagaaaactcgttgcgttcttcatcgtatcgtccatcatcgctatcgtcacttatcgttatcgcttcagacaatcttctccttcgcaaggccttgtcacaactcatgctaattgccaacatatactc

SEQ ID NO: 62628 - DNA, 271 bp, Glycine max
  Clone ID: 700762010H1
atttgacattttgataaaccgcgatcacaggttgccgcaccttaaaaccggaaacaaaagcaatcgttacttgatttcaagaatctctcaatttcttcctacttctttgtgtacgatttcttaagggaaagaaaatcactctctgtgctggccacagacttcgtgaatcattttcttttccactcttagtttattctctgaacactctcctatttgatataggacttcgtgtcagatttaaacttcttctgtttctttctcagttctctgc

SEQ ID NO: 62629 - DNA, 269 bp, Glycine max
  Clone ID: 700762011H1
gcacattttgatctctcacatgatataagtatataaatattttagcatgataagaaaaatatataatatattttagccaaactgaataacaatataatatgattactttgaaattattcaaaaaaataaatatcttgttttcttatcggcatgatgaacaactgtataaattgggggatagcaattaattaatcattagttataccatgaaaaatagtatttttatatttttacaatctgtctaattgagttaattagttaagttgaag

SEQ ID NO: 62630 - DNA, 270 bp, Glycine max
  Clone ID: 700762012H1
agacaccatcttctttgctctctttctcttttgtgccttcaccacctcatacctactctcagccatcgctgatttcgtgctcgataatgaaggtaaccctcttgaaaatggtggcacatattatatcttgtcagacataacagcatttggtggaataagagcagccccaacgggaaatgaaagatgccctctcactgtggtgcaatctcgcaatgagctcgacaaagggattggaacaatcatctcgtccccatatcgaatccgttttat

SEQ ID NO: 62631 - DNA, 269 bp, Glycine max
  Clone ID: 700762013H1
cgcctgagaaacggctaccacatccaaggaaggcagcaggcgcgcaaattacccaatcctgacacggggaggtagtgacaataaataacaataccgggctcattgagtctggtaattggaatgagtacaatctaaatcccttaacgaggatccattggagggcaagtctggtgccagcagccgcggtaattccagctccaatagcgtatatttaagttgttgcagttaaaaagctcgtagttggaccttgggttgggtcgatcggtccg

SEQ ID NO: 62632 - DNA, 267 bp, Glycine max
  Clone ID: 700762014H1
taaaattcttccaccaagttatgggtttccttgtgttgcttcttttctccctcttaggtctctcttctagttccagcatatcaactcatcgttccatattggaccttgacctaaccaagtttaccacacagaaacaggtgtcttcactgttccaactatggaagagtgagcatggacgtgtctaccataaccacgaagaagaggcaaagagacttgagattttcaagaataacttgaactatatcagggacatgaatgcaaacagaa

SEQ ID NO: 62633 - DNA, 272 bp, Glycine max
  Clone ID: 700762015H1
aacttattaacactttccttagttcaatatggggaagcccttcttcactctctctctttcttccctttgcttgctactcttgtcgagtgcatgctttgctattacctccagcaagttcaacgagtgccaactcaacaacctcaacgcgttggaacccgaccaccgcgttgagtccgaaggtggtcttattgaaacatggaactctcaacaccctgagctgcaatgcgccggtgtcactgtttccaaacgcaccctcaaccgcaacggcctcc

SEQ ID NO: 62634 - DNA, 274 bp, Glycine max
  Clone ID: 700762016H1
agcgctgcttcactattctccctatggagtttaatcttgtggttcgtcagaagtttttaaattttgtgaggttcattatgaagaaaagggacaagcttagttgtcaagttggaatcaacccatattctatggaatggactggtttggccaatagattactgagtaagggcaacgatattctgtgttgcgattatgctagttttgatggtttgattaccaagcaagttatgagcaagatggcagaaatgatcaacagtctttgtggtggtgatga

SEQ ID NO: 62635 - DNA, 274 bp, Glycine max
  Clone ID: 700762018H1
caaacccctagggtattttaccttgctgggaacccagatatagagtacccagagaccatgcaacaacaacaacagcagacaagtcatggtggacgcaagcaggggcaacaccagcaggaggaagaggtagaaggtggcagcgtgctcagtggcttcagcaaacacttcttggcacaatccttcaacaccaacgaggacatagctgagaaacttcagtctccagacgacgacaggaagcagatcgtgacagtggaaggaggtctcagcgttatca

SEQ ID NO: 62636 - DNA, 274 bp, Glycine max; identical to SEQ ID NO: 55842
  Clone ID: 700762019H1

SEQ ID NO: 62637 - DNA, 272 bp, Glycine max
  Clone ID: 700762020H1
gttgccatcagtcttcttgacacctctaacttcaataaccagcttgatcaaacccctagggtattttaccttgctgggaacccagatatagagtacccagagaccatgcaacaacaacaacagcagaaaagtcatggtggacgcaagcaggggcaacaccagcaggaggaagaggaagaaggtggcagcgtgctcagtggcttcagcaaacacttcttggcacaatccttcaacaccaacgaggactccgctgagaaacttcagtctccaga

SEQ ID NO: 62638 - DNA, 265 bp, Glycine max
  Clone ID: 700762025H1
caaataattaattaaattcctcgtggaatcttgttgaagccatgtctacagctggtcaggtcatcaagtgcagagctgcggtggcatgggaagcagggaagccactatcgatagaaaccatagaagtggcaccaccccagaaaggtgaagtgcgtttgaagatcctcttcaactccctttgccgtacagatgtttactggtgggatgctaagggccagactccgctgtttcctcgtatcttaggccacgaagcttcggggattgt

SEQ ID NO: 62639 - DNA, 176 bp, Glycine max
  Clone ID: 700762026H1
atatgcaggagaatggcatggttcccattgttgagcctgagatccttgttgatggacctcatgacattcacaagtgtgccgccgtcaccgagcgtgtgcttgcagcatgctacaaggctttgaatgatcaccatgtccttcttgagggtaccctattgaagccaaacatggtcacc

SEQ ID NO: 62640 - DNA, 264 bp, Glycine max
  Clone ID: 700762028H1
ggtggaataagagcagccccaacgggaaatgaaagatgccctctcactgtggtgcaatctcgcaatgagctcgacaaagggattggaacaatcatctcgtccccatatcgaatccgttttatcgccgaaggcatcctttgagccttaagttcgattcatttgcagttataatgctgtgtgttggaattcctaccgagtggtctgttgtggaggatctaccagaaggacctgctgttaaaattggtgagaacaaagatgcaatgg

SEQ ID NO: 62641 - DNA, 255 bp, Glycine max
  Clone ID: 700762030H1
gctgatgttcttgcaagcgagctcatgaatttgaaaaacatgttgctcatgaaagcctcaaggatcaaattcctgctgttgacaagttgtattctactaaggttaataagtttgcaaaaattatgaaccttagacaaagtgttgttagtgatcttaaacttcttactgatgggaagttgtatgagggtatacatattcctgtatctaatattagtgcaggggagaatcatgtagttcaaatacgcctaatggcac

SEQ ID NO: 62642 - DNA, 265 bp, Glycine max
  Clone ID: 700762031H1
tctgacgtgagagtgcggtttcctttgttggtgttgctgggaactgttttactggcatcagtttgtgtctcattaaaggtgagagaggatgagaataaccctttctacttgagaagctctaacagcttccaaactctctttgagaaccaaaacggtcgcattcgtctcctccagagattcaacaaacgctccccacaacttgagaaccttcgagactaccggattgtccagtttcagtcaaaacccaacacaatccttctccccc

SEQ ID NO: 62643 - DNA, 268 bp, Glycine max
  Clone ID: 700762032H1
ctcgtattgttataaccctagctcggaagaactaccatctctcgtccattgtctgcgtctcactcatcctcaactcttcctctcttttcttccaaacccgaatctggattctcctctctcccgatttcaattctcacggtcttcaccgatcgccagatctctaagcaccgctcttgttttcatcgattaaataacaaacaaaaattggctcaattttattttaacatcctaaccaaaaacaaacttttcacccgattttaacactcga

SEQ ID NO: 62644 - DNA, 265 bp, Glycine max
  Clone ID: 700762034H1
gcaaatggtctcatcaatgccatttacaaccctcaagctggtagcatcacaaccgccaccagccttgacttcccagccctctggcttctcaaactcagtgcccagtatggatcactccgcaagaatgctatgttcgtgccacactacaccctgaacgcgaacagcataatatacgcattgaatgggcgggcattggtacaagtggtgaattgcaatggtgagagagtgtttgatggagagctgcaagacggatcggtgctgatcg

SEQ ID NO: 62645 - DNA, 154 bp, Glycine max
  Clone ID: 700762036H1
ttcaaacttaattattaacacttccttagttcaatatgggaaagcccttcacactctctctttcttccctttgcttgctactcttgtcgagtgcatgctttgctattagctccagcaagctcaacgagagccaactcaacaacctcaacgcgtt

SEQ ID NO: 62646 - DNA, 262 bp, Glycine max
  Clone ID: 700762038H1
cgcccacctcatcagaaggaagagcgaaacaagaggaagatgaggatgaggagcagcagcgagagagcgaagaaagtgaagattctgagttacgaagacataagaataagaacccttttctcttcggctctaacaggttcgaaactctcttcaaaaaccaatatggtcgcattcgcgtcctccagaggttcaaccaacgctccccacaacttcagaatatccgagactaccgcattttggagttcaactccaaacccaacac

SEQ ID NO: 62647 - DNA, 264 bp, Glycine max
  Clone ID: 700762039H1
gagcgaagagaatggctcccaagggtttaatctttttggctgtgttatgcttctcagcactgtcactgagtcgttgtcttgcggaggataatggacttgttatgaacttctacaaggaatcatgccctcaggctgaagacatcatcaaagaacaagtcaagcttctctacaagcgccacaagaacactgctttctcctggctcagaaacatcttccatgactgtgctgttcagagttgtgatgcttcactgttgctggactcca

SEQ ID NO: 62648 - DNA, 259 bp, Glycine max
  Clone ID: 700762040H1
ctatgatgagagtgcggtttcctttgttggtgttgctgggaactgttttcctggcatcagtttgtgtctcattaaaggtgagagaggatgagaataaccctttctacttgagaagctctaacagcttccaaactctctttgagaaccaaaacggtcgcattcgtctcctccagagattcagcaaacgctcgctataacttgagaaccttcgagactaccggattgtccagtttcagtcacaacgcatcacaatccttct

SEQ ID NO: 62649 - DNA, 262 bp, Glycine max
  Clone ID: 700762042H1
tcctagtataccttaataaataatttaagatactatgatgagagcacggttcccattactgttgctgggacttgttttcctggcttcagtttctgtctcatttggcattgcttactgggaaaaagagaaccccaaacacaacaagtgtctccagagttgcaatagcgagagagactcgtacaggaaccaagcatgccacgctcgttgcaacctccttaaggtggagaaagaagaatgtgaagaaggtgcaattccacgacca

SEQ ID NO: 62650 - DNA, 259 bp, Glycine max
  Clone ID: 700762043H1
agcagtcaaaaggagtgattgggcctcattggtacaagtgtttttaacaaacagcaacagtacagagcatttcgatgcatgtaagtggacaaaatcggaaccacattcctgggaattgatcttcccaatagaggtatgtggtcctaataatggttttgaaatgtggagttctgagtgggcaaatcaaacttcatggcacttgagtttccttattgacaatcccaaacagtctacagtttttgatattctcttgggaatt

SEQ ID NO: 62651 - DNA, 259 bp, Glycine max
  Clone ID: 700762044H1
accttaataaataatttaagatactatgatgagagcacggttcccattactgttgctgggacttgttttcctggcttcagtttctgtctcatttggcattgcttactgggaaaaagagaaccccaaacacaacaagtgtctccagagttgcaatagcgagagagactcgtacaggaaccaagcatgccacgctcgttgcaacctccttaaggtggagaaagaagaatgtgaagaaggtgaaattccacgaccacgacca

SEQ ID NO: 62652 - DNA, 246 bp, Glycine max
  Clone ID: 700762046H1
gttcaatatcctagtacaccgtattaaagaatttaagatatactatgatgagagcgcggttcccattactgttgctggaagttgttgtcctggcatcagtttctgtctcatttggcattgcgtattgggaaaagcagaaccccagtcacaacaagtgcctccgaagttgcaatagcgagaaagactcctacaggtaccaagcatgccacgctcgttgcaacctccttaaggtggaggaagaagaag

SEQ ID NO: 62653 - DNA, 247 bp, Glycine max
  Clone ID: 700762047H1
atccaaacccgtgttctgattaaatgacatagtcatttaatccaaacccgtgttctgatgcgtggagtatggaatttctgaagcgtaccggatttcattgtgatatcacttgtgtcactggatggactgccactccaatgcaggatgttcaggttacgatcgattgggttatttcctctcaggaatgtgttcccaggacctattgtgttttgaatccgcaaaatccttttgtgtcatatcggtggat

SEQ ID NO: 62654 - DNA, 259 bp, Glycine max
  Clone ID: 700762048H1
ctcgagcgattaggctcatgtcattgttgtgactcgtacttcttcgtcgttatcttcttcttttgttgtatgtgtgtttgttttttctctcacctgaaaatgtcttgctgcggtggtaactgtggttgcggaagcgcctgcaagtgcggcaacggctgcggaggctgcaagatgtacccagacttgagctacaccgagtcaaccaccaccgagaccttggtcatgggagtggcaccagttaaggctcaattcgagagtg

SEQ ID NO: 62655 - DNA, 264 bp, Glycine max
  Clone ID: 700762051H1
ggctcgagaagtcttccatagccccccaaaaatgaagagcaccatcttctttgctctctttctcttttgtgccttcaccacctcatacctaccttcagccatcgctgatttcgtgctcgataatgaaggtaaccctcttgaaaatggtggcacatattatatcttgtcagacataacagcatttggtggaataagagcagccccaacgggaaatgaaagatgccctctcactgtggtgcaatctcgcaatgagctcgacaaagg

SEQ ID NO: 62656 - DNA, 234 bp, Glycine max
  Clone ID: 700762052H1
ctttccctttgtttccttcttttcagtggctgcttcgctctgagagagcaggcacagcaaaatgagtgccatatccaaaagctgaatgccctcaaaccggataaccgtatagagtcggaaggtgggttcattgagacctggaaccctaacaacaagccattccagtgtgccggtgttgccctctctcgctgcacccttaaccgcaatgcccttcgtagaccttcctaaaccaac

SEQ ID NO: 62657 - DNA, 258 bp, Glycine max
  Clone ID: 700762053H1
taccaaaataggtggcgtgaagcattagagaggcttcttgagacaaataacttcccagagtttactggtagggtatgcccagcaccttgtgaaggttcttgtgtccttggtattattgagaatccagtatctattaaaagcatagaatgtgctatcatagacaaagcttttgaggaggggtggatggtgccacgacctccagctaggagaactgggaaaagagtggccgttgttggaagtggaccgtctggcctggca

SEQ ID NO: 62658 - DNA, 234 bp, Glycine max
  Clone ID: 700762054H1
ctctaagattaactacaggaatatgcctaccctcatacaacttagcatcagtaagaagtttaagagggtaagcatattcctgtatttaatattagtgcaggggaaaatcatgtagttcaaatacccttaatggcacaggaggaaattctgtcttctagtgcaagtgatttcagagctgcaattgtgagtaaaaatagcaagcctcaagctactgcaatgcatgtgggagctata

SEQ ID NO: 62659 - DNA, 258 bp, Glycine max
  Clone ID: 700762055H1
gccagttctgatatttacaccatctgctctcaagactgtgaattatggaatcctgcttgcacaaaagcaatgactatgtcatttaatccaaacccgtgttctgatgcatggagtttggaatttttgaagcgtaccggatttcactgtgatatcatttgtgtcactggatggactgccaccccaatgcaggatgttcaggttacaattgattggtttatttcctctcaggaatgtgttcccaggacttattgtgtttta

SEQ ID NO: 62660 - DNA, 260 bp, Glycine max
  Clone ID: 700762057H1
tggggaaactgactttcccccagggcacttcccgaagtgtcaaaagaatgcctctttctatagggggaggagctggtgcaaagaatgctattctcatgaatatgccaaatgctgttctttcaatgtggagatattttgttggagatctcgtctttgaagtttctaagatgacttctccctacattaaatgtacagtctctttcttcatagcatttggaaatttggctgatgacaccatcaattttgaggcttttccccac

SEQ ID NO: 62661 - DNA, 70 bp, Glycine max
  Clone ID: 700762061H1
ggagatagtagttctgctgctgagataagagaacaacttgaggccatggactataaggtttccacacaac

SEQ ID NO: 62662 - DNA, 184 bp, Glycine max
  Clone ID: 700762062H1
tttgaaattttgatacaccgcgatcacaggttgccgcaccttaaaaccggaaacaaaagcaatcgttacttgatttcaagaatctctcaatttcttcctacttctttgtgtacgatttcttaagggaaagaaaatcactctctgtgctggccacagacttcgtgaatcattttcttttccacac

SEQ ID NO: 62663 - DNA, 260 bp, Glycine max
  Clone ID: 700762064H1
cgcaactaaataagaaatgaagagtactatcttctttgctctctttctagtttgtgccttcaccatctcatacctgccttcagccaccgctcagttcgtgctcgacactgatgatgatcctcttcaaaacggtggcacatactatatgttgccagttatgagaggaaagggcggtggaatagaagtagattcaactggaaaagaaatatgccctctcactgttgtgcaatcacccaatgagctcgataaggggattggac

SEQ ID NO: 62664 - DNA, 234 bp, Glycine max
  Clone ID: 700762066H1
tgttgcttctattctccctcttaggtctctcgtctagttcaagcatatgcaactcatcgttccatattggaccttgacctaaccaagtttaccacacagaaacaggtgtcttcactgttccaactatggaagagtgagcatggacgtgtctaccataaccacgaagaagaggcaaagagacttgagattttcaagaataacttgaactatatcagggacatgaatgctaacaga

SEQ ID NO: 62665 - DNA, 256 bp, Glycine max
  Clone ID: 700762067H1
gcatggtgcatgcagcggaacatgtagtagaatagaagagaagagaagattgttaattgaagcagaggaagacctaacatgtccgttacggagctgaaggagcgtcacttggcggcgacggaaaccgtcaacagtctcagggagcgcttgaaggagaggcgtctttcattgctcgatacagatattgctggctacgccagtctcaaggtagatcccctgtcacctttggtcccaccgatctcgtttgttgtagaac

SEQ ID NO: 62666 - DNA, 256 bp, Glycine max
  Clone ID: 700762068H1
gtgccaataaagcgcagagcatggtgttgaaggccagatgtctttcgatcagtctgtagtagcaattatgtctaaatgcaaagccagcatgagaatgggaaacactgatgctcaaattttgatggttccagggcgcagattcatagctcatggacattttttcaaaaatctgactcagaaagtgcgagtccaaattgttacatctgaaaagagttactggcatgtgtatgatcctgacaagtttcagatgtttgac

SEQ ID NO: 62667 - DNA, 259 bp, Glycine max
  Clone ID: 700762069H1
gggagaagaggtcgagtttcacagcagcaatggtgtacgtcaaggctcagaaatcaaaagcctacttcaagagatatcaagtcaagttcaagagaagaagagagggaaaaaccgattaccgtgccaggattcggttgattaatcaggacaagaacaaatataacactccgaaataccgatttgttgttcgctttagcaacaaggacattgttgcacaaataatatctgctagcattgctggcgatattgttcttgctgc

SEQ ID NO: 62668 - DNA, 120 bp, Glycine max
  Clone ID: 700762070H1
ttgattagccaagcaagttatgagcaaaatggcagaaatgataaacagtctatgtggtggtgatgcaaaattgatgcgtgcaaggccacacctgctgttggcttgttgttcaaggatggc

SEQ ID NO: 62669 - DNA, 255 bp, Glycine max
  Clone ID: 700762071H1
tctttgaacactcatcaccatggccaagcttgttctttccctttgttaccttcttttcagtggctgcttcgctctgagagagcaggcacagcaaaatgagtgccagatccaaaagctgaatgccctcaaaccggataaccgtatagagtcggaaggtgggttcattgagacctggaaccctaacaacaagccattccagtgtgccggtgttgccctctctcgctgcacccttaaccgcaatgcccttcgtagacc

SEQ ID NO: 62670 - DNA, 254 bp, Glycine max
  Clone ID: 700762072H1
ttgacttacaggataaagacaattaccttcagaagctgtcgttgtaaatgttacatgtggtagtggacgtggtggtttacccaccactgcttggattagttctgcagttaacaatcgctcctcagatatcaacaaaaagattcgcacagcacttgggaaaggtaagaaaattgtttttcttaccagagttgatccttgtccagtagctttactggctgttctttttggcgttaagaatgaaattctgagttcta

SEQ ID NO: 62671 - DNA, 251 bp, Glycine max
  Clone ID: 700762073H1
aaacatgttgctcatgaaagcctcaaggatcagattcctgctgttgacaagttgtattctactaaggttaataaatttgcaaaaattatgaaccttagacaaagtgttgttggtgatcttaaacttcttactgatgggaagttgtatgagggtaagcatattcctgtatctaatattagtgcaggggaaaatcatgtagttcaaatacccttaatggcacaggaggaaattctgtcttctagtgcaagtga

SEQ ID NO: 62672 - DNA, 249 bp, Glycine max
  Clone ID: 700762075H1
ccctcctcgccgaccaagccatggaaagcgtgaacaagacgaggacgaggacgaagatgaagataaacctcgtcctagtcgaccaagccaaggaaagcgtgaacaagaccaggaccaggacgaggacgaagatgaagatgaagatcaacctcgcaagagccgcgactggagatcgaaaaagacacaacccagaagacctagacaagaagaaccacgtgaaagaggatgcgagacaagaaacggggttga

SEQ ID NO: 62673 - DNA, 256 bp, Glycine max
  Clone ID: 700762078H1
cttaattattaacacttccttagttcaatatggggaagcccttcactctctctctttcttccctttgcttgctactcttgtcgagtgcatgctttgctattagctccagcaagctcaacgagtgccaactcaacaacctcaacgcgttggaacccgaccaccgcgttgagtccgaggtggtttgattcaaacatggaactctcaacaccctgagctgaaatgcgccggtgtcactgtttccaaactcaccctcaac

SEQ ID NO: 62674 - DNA, 251 bp, Glycine max
  Clone ID: 700762079H1
acttattaacactttccttagttcaatatggggaagcccttcttcactctctctctttcttccctttgcttgctactcttgtcgagtgcatgctttgctattacctccagcaagttcaacgagtgccaactcaacaacctcaacgcgttggaacccgaccaccgcgttgagtccgaagtggtcttattgaaacatggaactctcaacaccctgagctgcaatgcgccggtgtcactgtttccaaacgcacc

SEQ ID NO: 62675 - DNA, 189 bp, Glycine max
  Clone ID: 700762080H1
cttattaacactttccttagttcaatatggggaagtccttcttcactctctctctttcttccctttgcttgctactcttgtcgagtgcatgctttgctattacctccagcaagttcaacgagtcacaactcaacaacctcaacgcgttggaacccgaccaccgcgttgagtccgaggtggtcttattga

SEQ ID NO: 62676 - DNA, 259 bp, Glycine max
  Clone ID: 700762081H1
ctgaagcaaagcaatggctacttcagagttgaaaacccagaatgcggttgcatctctctccctaaccttaaccttggtactggtgctactgaccagcaaggcaaactcagcggagactgtttctttcagctggaacaagttcgtgccggagcaaccagacatgatcctccgaggagacgctattgtgacatcctcgggaaagttacaactcaataaggttgacgaaaacggcaccccaaaaccctcgtctcttggtcgc

SEQ ID NO: 62677 - DNA, 257 bp, Glycine max
  Clone ID: 700762082H1
gattttccaatcaaatatagatatggcaaatatgacaggagtgggaacttttctatagagagtggtccaaatcgagaagtctatgctaactccccaaggaatgaggcgaaatatatttttctttcagatggcatgatgcgggaaataccttggcgtggtgctggtgtagcagtccccatgttttctgttaggtcagaatctgatctgggtgttggggagtttcttgaccttaagttgctagttgactgggctgtagc

SEQ ID NO: 62678 - DNA, 253 bp, Glycine max
  Clone ID: 700762084H1
ggaatggtttgattgtgttgatgaggaggattcctttgaggaagtctctttgagtgcagcactcaatggtgttgagggtttggactatatggagagaattcctcttgccacatctgagcggatatcctcatgtgctttcacgcaaaaatggtgaaaaaggcaaaaggagatttgtttctggggatggtgaagagatgacattgattccgggaaccagtgttgaagagacttacaacaagctaacagttgaact

SEQ ID NO: 62679 - DNA, 255 bp, Glycine max
  Clone ID: 700762086H1
cttgctctatactacacagtacacacactagaagaataatggcttccatcctccactactttttagccctctctctttcttgctcttttcttttcttcttatccgactcagtcacccctacaaaaccaataaaccttgttgttctacccgttcaaaatgatggttccacagggctccattggtccaacctccaaaaaagaacccctctaatgcaagtaccagtcctggtggacctcaatggaaatcacttgtggg

SEQ ID NO: 62680 - DNA, 254 bp, Glycine max
  Clone ID: 700762088H1
caaaaatgaagagtactatcttctttgctctctttctagtttgtgccttcaccatctcatacctgccttcagccaccgctcagttcgtgctcgacactgatgatgatcctcttcaaaacggtggcacatactatatgttgccagttatgagaggaaagggcggtggaatagaagtagattcaactggaaaagaaatatgccctctcactgttgtgcaatcacccaatgagctcgataaggggattggactagtc

SEQ ID NO: 62681 - DNA, 249 bp, Glycine max
  Clone ID: 700762089H1
tctcgaccgattcggctcaggcacttgggaaaggtaagaaacttgtttttcttactagagttgatccttttccagtagctttactggctgttctttttggcgttaagaatgaaattctgagttctaacgccactaaccctatgctgacgcgacttcttgagaactgtaagagtctcaaatatctggttgatgagtgtccttttgcatttgtgaactagtatgtaatatgttattcacgtaaataaagcg

SEQ ID NO: 62682 - DNA, 252 bp, Glycine max
  Clone ID: 700762090H1
gtggccacagttggtattcctgagaatacaggtatatcattggcctgtgctatgaatagttcttttagggggcgcgccagttctgatatttacaccatctgctctcaagactgtgaattgtggaatcctgcttgcacaaaagcaatgactatgtcatttaatccaaacccgtgttctgatgcatggagtttggaatttctgaagcgtactggatttcattgcgatatcatttgtgtcactggatggactgcc

SEQ ID NO: 62683 - DNA, 253 bp, Glycine max
  Clone ID: 700762091H1
gcggaggaaaagaaactaacaaggattcccttagtaacggcgagcgaaccgggaaaagcccaccatgaaaatcggtcgccctcggcgtccgaattgtagtctggagaagcgtcctcagtggcggaccgggcccaagtcccctggaagggggcgccagagagggtgagagccccgtcgtgcccggaccctgtcgcaccacgaggcgctgtcggcgagtcgggttgtttgggaatgcagccccaatcgggcggta

SEQ ID NO: 62684 - DNA, 249 bp, Glycine max
  Clone ID: 700762092H1
ggaaaaagttgtattgaaattttcacaagaggaatttcttacagcttggtcaactcaggtgcgtcctgcaacaactctgttggctgatgggtgcccatatttgtatgctatggtgcatgatagttcagtgtctacaataccaggtgattttgtcattggtgttaagttgacaaccataaacaatatgtgtgcatatgggctcaatcctggtatttcaggttctcgtcttttgggcaccattcctcagtc

SEQ ID NO: 62685 - DNA, 252 bp, Glycine max
  Clone ID: 700762094H1
aattcttccaccaagttatgggtttccttgtgttgcttcttttctccctcttaggtctctcttctagttccagcatatcaactcatcgttccatattggaccttgacctaaccaagtttaccacacagaaacaggtgtcttcactgttccaactatggaagagtgagcatggacgtgtctaccataaccacgaagaagaggcaaagagacttgagattttcaagaataacttgaactatatcagggacatga

SEQ ID NO: 62686 - DNA, 252 bp, Glycine max
  Clone ID: 700762095H1
ctaaaggttccatgttggatctgaaaatttctcaatctaaaattgcacttcccaagaacacagttggaggaaccattctgcgtagtgatctattggcaaattttttgacagagggcaattttagagcaagtgttgatttgcagcgcactcatcgtattagaggaatgattaaaatggtggccacagttggtattcctgagaatacaggtatatcattggcctgtgctatgaatagttcttttagggggcgcg

SEQ ID NO: 62687 - DNA, 241 bp, Glycine max; identical to SEQ ID NO: 55968
  Clone ID: 700762101H1

SEQ ID NO: 62688 - DNA, 245 bp, Glycine max
  Clone ID: 700762102H1
tgggaaccaagagcaagagtttctaaaatatcagcagcagcagcaaggaggttcccaaagccagaaaggaaagcaacaagaagaagaaaacgaaggaagcaacatattgagtggcttcgcccctgaattcttgaaagaagcgttcggcgtgaacatgcagatagtgagaaacctacaaggtgagaacgaagaggaggatagtggagccattgtgacagtgacaggaggtctaagagtcacagctc

SEQ ID NO: 62689 - DNA, 215 bp, Glycine max
  Clone ID: 700762104H1
acttaagacacataaaaatgaacacactcttgttgtaccttgaagcctttaaataaaattttcatctttcttctcttccaactcctccaccatgctctgctggcttgaatctttggtgggattgttggcttttcttggaatacagcttcctgtcataatggctgattgccctttgaattttactggttcaaacttcacactggcttcctccctat

SEQ ID NO: 62690 - DNA, 241 bp, Glycine max
  Clone ID: 700762105H1
atctaaagctagtaagtagtaagtagtaagccactatcgtgtctctctaacagcaaaaaaagttctaacctcaccaaacccacactaccatgggtaatgagaatcgcgagcttcacgtattattcttccccttcccagctaatgggcacataataccaagcattgacttagccagagtctttgcttcaagaggaatcaaaaccaccgtagtcaccactcccctcaacgttccactcatttc

SEQ ID NO: 62691 - DNA, 236 bp, Glycine max
  Clone ID: 700762107H1
ctttcttcttttttagctatccctctcttgaaaaatctagatctcgttcttccttgatctacgttacgcttttagtgaccggatctgtatggatctgaaccagatctacacgccgatggtggttttggcctggtctttcatagatctgatgcatggaggctcagatctactgtacagagatactgtagataatcgatgagaagaacgcagatccagccgcttccgcttgttcgatc

SEQ ID NO: 62692 - DNA, 241 bp, Glycine max
  Clone ID: 700762108H1
agcagaaggagcaaaagcaatggcgccgaagaagccgagaaccacgacaaggaaccctgatttggttagggggattggcaagtattcgaggtcgcagatgtaccacaagaggggcatctgggccatcaaggccaaaaactgtggcgttttgccccgccacgatcccaagcccaagcccgaggccccggcccagaagccgcccaagttctaccccgcggacgatgttaagaagcccctcgtc

SEQ ID NO: 62693 - DNA, 229 bp, Glycine max
  Clone ID: 700762109H1
ctgaatctaacaacaaacatccctcaggcaacaatcatcactattaataagagttccttccttcactctcacccaagccaaagaaaggaacaagaacaagaacaacaaagtaacgtgaaagagagagagatggaggcgattgttccagtggtggatttccagaggctttcagaggaagaggagcgcaagaagctgagaaaaacatgtgagaaaccagggtgtttcagaa

SEQ ID NO: 62694 - DNA, 232 bp, Glycine max
  Clone ID: 700762110H1
gaaagcatcagcaagaagaagaaaacgaaggaggcagcatattgagtggcttcaccctggaattcttggaacatgcattcagcgtggacaagcagatagcgaaaaacctacaaggagagaacgaaggggaagacaagggagccattgtgacagtgaaaggaggtctgagcgtgataaaaccacccacggacgagcagcaacaaagaccccaggaagaggaagaagaagaaga

SEQ ID NO: 62695 - DNA, 233 bp, Glycine max
  Clone ID: 700762111H1
cttaaacactcatcagtcatcaccatggccaagctagtttttaccctttgttttctgcttttcagtggctgctgcttcgctttcagttccagagagcagcctcagcaaaacgagtgccagatccaaaaactcaatgccctcaaaccggataaccgtatagagtcagaaggagggctcattgagacatggaaccctaacaacaagccatgccagtgtgccggtgttgccctctc

SEQ ID NO: 62696 - DNA, 235 bp, Glycine max
  Clone ID: 700762112H1
cgcgtgcatagcagagtcagagacagagacgcagccatggggcggagacctgcgaggtgttataggcaaattaagaacaagccataccccaagtcacgtttctgccgtggtgttcctgatcccaagatcaggatttatgatgttggtatgaagaagaagggtgttgatgagtttcctttctgtgtccatctggttagttgggagaaggaaaatgtttcaagtgaggccctggaag

SEQ ID NO: 62697 - DNA, 108 bp, Glycine max
  Clone ID: 700762113H1
gggatgtaaagagaacaacagtgacagcaacaacccttgcctccacctttgcatcccttgcagcagcttcccttgcatcccttgcagctgcctcccttgcatcccttg

SEQ ID NO: 62698 - DNA, 232 bp, Glycine max
  Clone ID: 700762114H1
cggctcgagcaaaaccccagagtattttaccttgctgggaacccagatatagagcacccagacaccatgcaacaacagcagcagcagaagagtcatggtggacgcaagcaggggcaacaccagcagcaggaggaagaaggtggcagtgtgctcagtggcttcagcaaacatttcttagcacaatccttcaacaccaacgaggacacagctgagaaacttcggtctccagatg

SEQ ID NO: 62699 - DNA, 233 bp, Glycine max
  Clone ID: 700762115H1
ataaaattcttccaccaagttatgggtttccttgtgttgcttcttttctccctcttaggtctctcttctagttccagcatatcaactcatcgttccatattggaccttgacctaaccaagtttaccacacagaaacaggtgtcttcactgttccaactatggaagagtgagcatggacgtgtctaccataaccacgaagaagaggcaaagagacttgagattttcaagaataa

SEQ ID NO: 62700 - DNA, 242 bp, Glycine max
  Clone ID: 700762117H1
atatcctagtacaccgtattaaagaatttaagatatactatgatgagagcgcggttcccattactgttgctgggagttgttttcctggcatcagtttctgtctcatttggcattgcgtattgggaaaagcagaaccccagtcacaacaagtgcctccgaagttgcaatagcgagaaagactcctacaggaaccaagcatgccacgctcgttgcaacctccttaaggtggaggaagaagaaga

SEQ ID NO: 62701 - DNA, 124 bp, Glycine max
  Clone ID: 700762118H1
gtacgtaattcggctcgacgaaggtgctaaagaaggcgatgaagaagatagcgttctgctccacggagatctgcgcgtggacatgcctgggctcggcaaggaagacgtgaagatctccgtggag

SEQ ID NO: 62702 - DNA, 241 bp, Glycine max
  Clone ID: 700762119H1
cgagaattgtatttgcacagtccagaggaagctcgccaattgagaaggaaagctctctctcgtattgaatggctgcaaaaagctgatgtgcctaccatagcacagattgcagagttcgattcgatgcagaggatgctgaatgctcctgattcaaatgataatattgatctactgttgagcattgatttgttgggtttacaaggagcaggtatagcttttccaaacaagattgtctttgatg

SEQ ID NO: 62703 - DNA, 238 bp, Glycine max
  Clone ID: 700762120H1
cctacattggttggcattgaatgtcccaaggatgagaaacttcctcgtcgcaaaatttttgacaaacctaagacgcgctgcttcactattctccctatggagtttaatcttgtggttcgtcagaagtttttaaattttgtgaggttcattatgaagaaaagggacaagcttagttgtcaagttggaatcaacccataatccatggaatggactggtttggccaatagattactgagta

SEQ ID NO: 62704 - DNA, 236 bp, Glycine max
  Clone ID: 700762121H1
gtgcggtttcctttgttggtgttgctgggaactgttttcctggcatcagtttgtgtctcattaaaggtgagagaggatgagaataaccctttctacttgagaagctctaacagcttccaaactctctttgagaaccaaaacggtcgcattcgtctcctccagagattcaacaaacgctccccacaacttgagaaccttcgagactaccggattgtccagtttcagtcaaaacccaa

SEQ ID NO: 62705 - DNA, 235 bp, Glycine max
  Clone ID: 700762122H1
gtcttgagccatcgactgatgcaatggaagtgaaaagcatggttacaaactcgtcaagtttgtcctctagataacagtgagtgggagtttcagaaatatggccactagaattatgatgtggttgagctcctcggacatttggaccatctatcctagattatgaatatttactgttctatctgttattttcgtttgcttgtgtactgaatttattatgttcaagaaatcagcttgt

SEQ ID NO: 62706 - DNA, 234 bp, Glycine max
  Clone ID: 700762123H1
agttcaatatcctagtataccttaataaataatttaagatactatgatgagagcacggttcccattactgttgctgggacttgttttcctggcttcagtttctgtctcatttggcattgcttactgggaaaaagagaaccccaaacacaacaagtgtctccagagttgcaatagcgagagagactcgtacaggaaccaagcatgccacgctcgttgcaacctccttaaggtgga

SEQ ID NO: 62707 - DNA, 235 bp, Glycine max
  Clone ID: 700762124H1
ttctctccattggtccttaaacactcatcagtcatcaccatggccaagctagttttttccctttgttttctgcttttcagtggctgctgcttcgctttcagttccagagagcagcctcagcaaaacgagtgccagatccaaaaactcaatgccctcaaaccggataaccgtatagagtcagaaggagggctcattgagacatggaaccctaacaacaagccattccagtgtgccg

SEQ ID NO: 62708 - DNA, 228 bp, Glycine max
  Clone ID: 700762125H1
cgccactcgatgtttccatttgcctgcatgcctttggtattgtggggtgtggttcgtttagtggtgtcaagtcttgcgaacgtgagggtgcatgagtggtaatcgggatgtttttgttgcacggctccatgcttgcgcatgcaacgtgtgacatgcatccttttcattgtcaccttagccttcgtggcttaggtgctgacgattggttcctgtgttgcctacctacca

SEQ ID NO: 62709 - DNA, 232 bp, Glycine max
  Clone ID: 700762126H1
gtatcatcagccaaatttgaggcttttccccacaagctggtgcagtttggagagattcaggaaaaagttgtattgaaattttcacaagaggaatttcttacagcttggtcaactcaggtgcgtcctgcaacaactctgttggctgatgggtgtccatatttgtatgcaatggtgcatgatagttcagtgtctacaataccaggtgattttgtcattggtgtcaagttgacaa

SEQ ID NO: 62710 - DNA, 223 bp, Glycine max
  Clone ID: 700762127H1
caaaaatatgccactcccatgatgcccctagatgaagaaattctttctaaggttgcacaagatatggttgaggaatggtttgattgtgttgatgaggaggattcctttgaggaagtttctttaagtgcagcactcaatggtgttgagggtttagactatatggaaagaattcctcttgccacatctgagggttttcctcatgtgctttcacgcaaaaatggtg

SEQ ID NO: 62711 - DNA, 231 bp, Glycine max
  unsure (1)..(231): unsure at all n locations
  Clone ID: 700762128H1
ggagaaagcagaatgtgaagaaggtgaaattccacacaacatacgacacacacaacanncggagacggnncctcagcaacccggtgagaaggcgcaagacgacgatgagcaaccacgtccaatcccattcccacgcccacaaccccgacaagaagaagagcccgagcagagagaggaacaggaatggcctcgcaagggcgnnngacgcggagaaacgggaagtgaagagga

SEQ ID NO: 62712 - DNA, 231 bp, Glycine max
  Clone ID: 700762129H1
aggtatcattctgcgtagtgacctattggcaaattttttgacagagggcaattttagagcaagtgctgatttgcagcgcactcatacgtatcaaaggaatgattaaaatggtggccacagttagtattcctgagactacaggtatagcattagcctgtgctatgaatagttctgttagggggcgtgccagttctgatatgtacaccatctggtctcaagactgtgaattat

SEQ ID NO: 62713 - DNA, 231 bp, Glycine max
  Clone ID: 700762130H1
ccagggttatcaaactgaaacgttaatacggtttctcaaagctagggactggaatattgccaaagcccataaaatgttaattgattgtttgaactggagggtggaaaatgagattgacaatgttttaaggaagcctatccccatggatttgtacagagccatacgggattctcaactcataggaatgtctggttactcaaaggagggtctacctgtcattgctgttggtgt

SEQ ID NO: 62714 - DNA, 231 bp, Glycine max
  Clone ID: 700762131H1
gcagcagcagcaaggaggttcccaaagccagaaaggaaagcaacaagaagaagaaaacgaaggaagcaacatattgagtggcttcgcccctgaattcttgaaagaagcgttcggcgtgaacatgcagatagtgagaaacctacaaggtgagaacgaagaggaggatagtggagccattgtgacagtgaaaggaggtctaagagtcacagctccagccatgaggaagccaca

SEQ ID NO: 62715 - DNA, 230 bp, Glycine max
  Clone ID: 700762132H1
cctaaaggttccatgttggatcttaaaatttctcagtctaaaattgcacttcccaagaacacagttggaggaactattctgcgtagtgatctattggcaaattttctgacagagggcaattttagagcaagtgttgatttgcagcgcactcatcgtattaaaggaatgattaaaatggtggccacagttggtattcctgagaatacaggtatatcattggcctgtgctat

SEQ ID NO: 62716 - DNA, 240 bp, Glycine max
  Clone ID: 700762134H1
gaagatattgacatggggtacgaagatgaaccgccagagcccgagattgaggaaggtgcagaggaagatgtggagaacaaaaacgatgaaataactggagagcctattgacaccgaggataaggaagaggaacaaccagtgaagcggcctcgaaagacatcgaaatatatgactaagtatgagcgtgctagaattttgggcacccgtgctcttcaaaatcagtatgaatgcacctgtcat

SEQ ID NO: 62717 - DNA, 234 bp, Glycine max
  Clone ID: 700762138H1
tgggtgtccatatttgtatgcaatggtgcataatagttcagtgtctacaataccaggtgattttgtcattggtgtcaagttgacaaccataaacaatatgtgtgcatatgggctcaatcctggtatttcaggttctcgtcttttgggcaccattcctcagtccatttcacagcaaactgtttggaatcaaatggcaacagtgagaacaccattgaattttgattctagcaagca

SEQ ID NO: 62718 - DNA, 229 bp, Glycine max
  Clone ID: 700762141H1
tggatacctaggcacccagagacgaggaagggcgtagtaagcgacgaaatgcttcggggagttcaaagcgaagaaagattcgaaacgaagaaagaaagcgttgtgaagaatggcggaagagggacaagtgatcggtgtccacagcgtagaggagtggaaggaacatctcaagaagggagaagagtccaagaaattgattgtggtggattttactgcttcttggtgcggt

SEQ ID NO: 62719 - DNA, 227 bp, Glycine max
  Clone ID: 700762142H1
cacacacaactactacaagtacttccttacaatcaaaaccaacaacaactatggcaagttatcaaaagcactacgatgatcagggtcgcaaggttgacgagtatggcaacgttgagaagcaaaccgacgaatacggcaaccctgttcatgctgctagtgtcacctatgtagccaccagaactgctgctggtggttacagtgatgacattaataagcaacatgatacc

SEQ ID NO: 62720 - DNA, 226 bp, Glycine max
  Clone ID: 700762143H1
gttcaatatcctagtataccttaataaataatttaagatactatgatgagagcacggttcccattactgttgctgggacttgttttcctggcttcagtttctgtctcatttggcattgcttactgggaaaaagagaaccccaaacacaacaagtgtctccagagttgcaatagcgagagagactcgtacaggaaccaagcatgccacgctcgttgcaacctcctta

SEQ ID NO: 62721 - DNA, 228 bp, Glycine max
  Clone ID: 700762144H1
gtttacaaggagcaggtaaagcttttccaaacaagattgtttttgatgataaacttgtgctggctaacacacaagaattctttgctggaaattttccagtggattcttggttaccaattttgtgaattgtctttatcctgtaagtcaattaccttcagaagctgtcgttgtaaatgttacatgtggtagtggacgtggtggtttacctaccactgcttggattagttc

SEQ ID NO: 62722 - DNA, 224 bp, Glycine max
  Clone ID: 700762145H1
ggctgcaaaaaagggtggagagagacaattcaatggtctcgttgatgtctacaggaagacattggcatctgatggtgttgccgggctctaccgtggtttcaacatctcatgtgttggaatcatcgtgtatcgtggtctgtactttggattgtatgattctgttaaaccagttgtcctcacagggtcattgcaggatagcttttttgccagctttgcccttggat

SEQ ID NO: 62723 - DNA, 228 bp, Glycine max
  Clone ID: 700762146H1
gcgaggcaatcccattctcatcttccatttccaccatcaatactattttcttgtcgttgagaagcttcgcgaacgaaagcaaagaaccctagaccgtcacagaaccattccatagccatgtctggtgttggccctctttctcaggattgggaacctgtcgtcctccgcaagaaggctcccaccgccgccgccaagaaggacgagaaagccgtcaacgccgcccgccgc

SEQ ID NO: 62724 - DNA, 228 bp, Glycine max
  Clone ID: 700762147H1
tataaattgcggtttgggttctctctctctcctcactcacaacaatatctgcacataaaaaaccactctacaaaactctccagtaattctgaaaattttattttcttttggtgaaattaacagctctgtgattgatcaatggcgacaaaggaaggcaaagccataggcatcgatctcggcacgacctacagctgcgtgggcgtgtggcaaaacgaccgcgtcgagatc

SEQ ID NO: 62725 - DNA, 232 bp, Glycine max
  Clone ID: 700762149H1
cccaatttggtgccatgagtaattaaataatctgctggaaataatatctaccaatataaataaagcatccagccactgtaatctgcaatgctgataataatgccatgaagtagcactgcctaaacatctacaaagtactctcgtgtactttttatgtgtgtattcctatcacgaagttaataaactattttatcaaaaaataaaaaaaggggggcccccggtctagtaacct

SEQ ID NO: 62726 - DNA, 98 bp, Glycine max
  Clone ID: 700762150H1
gcacttcccaagaacacagttggcggcactattctgcgtagtgatctattggcaaattttctgacagacggcaattttagaccaagtgatcgactgca

SEQ ID NO: 62727 - DNA, 234 bp, Glycine max
  Clone ID: 700762151H1
tgctattggtattaatgccgagaacaaccagaggaacttcctcgcaggttcgcaagacaatgtgataagccagatacctagtcaagtgcaggagcttgcattccctgggtctgcacaagctgttgagaagctattaaagaaccaaagagaatcctactttgtggatgctcagcctaagaagaaagaggaggggaataagggaagaaagggtcctttgtcttcaattttgagggc

SEQ ID NO: 62728 - DNA, 228 bp, Glycine max
  Clone ID: 700762153H1
ggcacccatcagccaacagagttgttgcaggacgcatgatagttcagtgtctacaataccaggtgattttgtcattggtgttaagttgacaaccataaacaatatgtgtgcatatgggctcaatcctggtatttcaggttctcgtcttttgggcaccattcctcagtccatttcacagcaaactgtttggcatcaaatggcaacagtgagaacaccattgaattttga

SEQ ID NO: 62729 - DNA, 231 bp, Glycine max
  Clone ID: 700762154H1
cttaattattaacacttccttagttcaatatggccaagcccttcactctctctctttcttccctttgcttgctactcttgtcgagtgcatgctttgctatcagctccagcaagctcaacgagcgccaacccaacaacctcaacgcgttggaacccgaccaccgcgttgagtccgaaggtggtttgcttcaaacatggaactctcaacaccctgagctgaaatgcgccggtg

SEQ ID NO: 62730 - DNA, 229 bp, Glycine max
  unsure (1)..(229): unsure at all n locations
  Clone ID: 700762155H1
cgttcttgtaagggattaattcttcgttaccaactttgggagcaggagagtctgcattcaatattcattttgaatgggacggaagcatgggaatccccggtgcgttttacataanaaactacatgcaagttgagttcttcctcaagagtttgactcttgatgccatttcaaaccaaggaaccatccgctttgtttgcaactcatgggtttataacactaaactttacaa

SEQ ID NO: 62731 - DNA, 231 bp, Glycine max
  Clone ID: 700762156H1
agaacattcaagtactttcaagttcctttgtcaataagcaagagcaatacactgtggaaggagtgcagaatcttggagacaaagcagtgatgtgtcatgggctaaatttcagaactgcagtattttactgccataaagtccgtgaaacaacagctttcatggttccattggtggctggtgatggaaccaaaactcaggcacttgctgtttgccactcagatacttctggaa

SEQ ID NO: 62732 - DNA, 226 bp, Glycine max
  Clone ID: 700762157H1
gtcattggttaacccgtcgcgagggagaagtagccgataataaaaacactcgtgccgcaccttcgtcttccccaatgcttctttccacacgcatctcggattcccctttcttcatcgcatagatactttcgctagcccaccaagtaacccttattccaattcaccctcgccactccttagatcgaaatcattttttgtcgcccggcacaagttgggttttttttta

SEQ ID NO: 62733 - DNA, 226 bp, Glycine max
  Clone ID: 700762160H1
tgttgagcttttttgcgagtccatttggcaaaagggttgaattagcattgaaactgaagggtgtggagtatgagtacatagaacaagatatcttcaacaagactagtctccttctccagttgaacccggttcacaagaaggttccggttcttgttcatgcccacaaacccatcgctgagtcattcgtcattctcgaatacgttgatgaaacatggaagcagtatcc

SEQ ID NO: 62734 - DNA, 229 bp, Glycine max
  Clone ID: 700762161H1
tctcgagccgattcggctcgagtgaaattttcacaagaggaatttacttacagcttggtcaactcaggtgcgtcctgcaacaactctgttggctgatgggtgcccatatttgtatgctatggtgcatgatagttcagtgtctacaataccaggtgattttgtcattggtgttaagttgacaaccataaacaatatgtgtgcatatgggctcaatcctggtatttcaggt

SEQ ID NO: 62735 - DNA, 222 bp, Glycine max
  Clone ID: 700762162H1
ggctcgagaatcaatgtgatagcatgtgagggggcagagagggttgaaaggccagaaacctacaagcagtggcaagtcaggaaccagagagcagggttcaagcaacttccattggcccaagagcatgtgaatagagtgaaggaaatggtgaagaaggaataccataaagattttgtagttggtgaggatggcaagtgggttttgcaaggatggaaagggcga

SEQ ID NO: 62736 - DNA, 228 bp, Glycine max
  Clone ID: 700762164H1
ccttagtccaatatggggaagcccttcactctctctctttcctccctttgcttgctactcttgtcgagtgcatgctttgctattagctccagcaagctcaacgagtgccaactcaacaacctcaacgcgttggaacccgaccaccgcgttgagtccgaaggtggtttgattcaaacatggaactctcaacaccctgagctgaaatgcgccggtgtcactgtttccaaa

SEQ ID NO: 62737 - DNA, 235 bp, Glycine max
  Clone ID: 700762165H1
tgaccacaactgatgagagattggtaggcacagaacatgagggatatgatccttttcttggtggaattcaataatatgcgactcccatgatgcccctagatgacgaaattctttctaaggttgcacaagatatagttgaggaatggtttgattgtgttgatgacgaggattcctttgaggaagtttctttgactgcagcactcaatggtgttgagggtttggactatatggaaag

SEQ ID NO: 62738 - DNA, 232 bp, Glycine max
  Clone ID: 700762167H1
cgagagatgctggcgcgagtttcattaatgtatccatgtctaccatcacctctaaatggtttggtgaagatgagcagaatgttcgcgctttattcacgctggccgccaaggtctccccaactattatatttgttgatgaggttgatagtatgctgggacagcggaccagagttggagagcatgaagccatgcgcaagataaagaatgagtttatgactcattgggatggact

SEQ ID NO: 62739 - DNA, 184 bp, Glycine max
  Clone ID: 700762168H1
aaattttgattaaccgcgatcacaggttgccgcaccttaaaaccggaaacaaaagcaatcgttacttgatttcaagaatctctcaatttcttcctacttctttgtgtacgatttcttaagggaaagaaaatcactctctgtgctggccacagacttcgtgaatcattttcttttccacacaaca

SEQ ID NO: 62740 - DNA, 229 bp, Glycine max
  Clone ID: 700762169H1
tctaaaagtagttagaaacacacttggttcgcaaggttgggatgttcttgttccaggaactgctttagggtaacttgttcaggttgaaaaaattgttcctggttcactaccatcatcagttgaaggacctattatccttgttgttaacaaagcggatggtgatgaagaggtaacagctgctgggaggaacatagtgggagttatacttcagcaagagctgcctcactta

SEQ ID NO: 62741 - DNA, 230 bp, Glycine max
  Clone ID: 700762171H1
taaaattcttccaccaagttatggagttccttgtgttgcttcttttctccctcttaggtctctcttctagttccagcatatcaactcatcgttccatattggaccttgacctaaccaagtttaccacacagaaacaggtgtcttcactgttccaactatggaagagtgagcatggacgtgtctaccataaccacgaagaagaggcatagagacttgagattttcaagaat

SEQ ID NO: 62742 - DNA, 230 bp, Glycine max
  Clone ID: 700762172H1
gtctttgaacactcatcaccatggccaagcttgttctttccgcttgtttccttcttttcagtggctgcttcgctctgagagagcaggcacagcaaaatgagtgccagatccaaaagctgaatgccctcaaaccggataaccgtatagagtcggaaggtgggttcattgagacctggaaccctaacaacaagccattccagtgtgccggtgttgcactctctcgctgcacc

SEQ ID NO: 62743 - DNA, 222 bp, Glycine max
  Clone ID: 700762175H1
attccatatcataattcaatttcaaagaagcagttgtagaatgcaaatgcaatgtgctataatcatttgccatatgtaaattatatgtttctcatgaaaggttgtcttgaaagtattgaatgagccattattttttctattcttcaacatttatttcttattcttcatttttaatgtgatttatacactgaagatgaatgttccttgtctctttgtttgtac

SEQ ID NO: 62744 - DNA, 225 bp, Glycine max
  Clone ID: 700762176H1
tccaaattctcgtgtcacggtggcgctggatgtaagaatgttcaaatcgacgcttcactcaggtcgcaaccagcgacgacgaggacgatgcgccgccggcgcggcgcctcctcccaagcagcaatcgtccgtcagtgccttcgaagaaaactgttcgaagcagcagcagcagcagcagcgcaagaggaagatgatgaagctccaagaagaagaggaagaggagaa

SEQ ID NO: 62745 - DNA, 224 bp, Glycine max
  Clone ID: 700762177H1
cgtttcgggaatttctcatttccttcaataatgaccgaattgcactctcatgacaatgccgcggttgctactgattccaagccggaggtttcttcgacggaagaatttagggttagtgtttgctccgacgctaacacatcatcatccaccgtcgataccgataagtttcacggtttcgatagcaaatcgctgttaccggaatttgacgagtacgtggctgctga

SEQ ID NO: 62746 - DNA, 225 bp, Glycine max
  Clone ID: 700762178H1
ataaaattcttccaccaagttatgggtacacttgtgttgcttcttttctccctcttaggtctctcttctagatccagcatatcaactcatacgttccatattggaccttgacctaaccaagtttaccacacagaaacaggtgacttcactgttccaactatggaagagtgagcatggacgtgtctaccataaccacgaagaagaggcaaagagacttgagatttt

SEQ ID NO: 62747 - DNA, 220 bp, Glycine max
  Clone ID: 700762180H1
ggttcagccgcctgaaccggatgctgcccgtgaaaggctgagagaactactaccttgcatagtaggttcttgactgcgcgagggatgcgtagagagcatcagaatctagtggcaccccccgaggatgtaatgggattggcacagaacaatgttaatacttctgaggcaggggatccacggagtagggtgcagtcccatttgcttcgaagaacacaatcac

SEQ ID NO: 62748 - DNA, 227 bp, Glycine max
  Clone ID: 700762182H1
cagagatctatgagtgatgttggtaaaggtaagcatgagattgagtctttgaagccaactcttttcatcatcgtcaggaccaacatcacccagagatctatgagtactattcactacgactcacatgcaacgaagatagcactggtgatcgatggcagagggcatcttcagatatcatgtccacacatgtcatcaaggtcgtcacactcgaagcatgataagagtag

SEQ ID NO: 62749 - DNA, 230 bp, Glycine max
  Clone ID: 700762183H1
tgtctaagaacataacctaaaagctcaaggtgagtgaaaagaagatgtcaggtgtgtctctagcagtgtctcatccaccggcatcagtgggagaacaaaacgtgcctcaagcaggcacaaagcctaaaccgcgaacagaacaggcaccaattggtggcatgatgggttcacttcgcgtgatagagcttcagcttgtcgctttcatcttggtgttctcagcaagtggcctt

SEQ ID NO: 62750 - DNA, 227 bp, Glycine max
  Clone ID: 700762184H1
gttcaatatcctagtataccttaataaataatttaagatactatgatgagagcacggttcccattactgttgctgggacttgttttcctggcttcagtttctgtctcatttggcattgcttactgggaaaaagagaaccccaaacacaacaagtgtctccagagttgcaatagcgagagagactcgtacaggaaccaagcatgccacgctcgttgcaacctccttaa

SEQ ID NO: 62751 - DNA, 229 bp, Glycine max
  Clone ID: 700762185H1
tcacccatcaataccaaaatgaccaagcttacaattctcctcatcgctcttctcttcatcgcccacacctgctgcgcctccaaatggcaacagcaccagcaagagagctgccgcgagcagctcaaggggatcaacctcaacccctgtgagcacatcatggagaagatccaagctggccgccgcggcgaggacggcagcgacgaagatcacattctcatcaggaccatgc

SEQ ID NO: 62752 - DNA, 227 bp, Glycine max
  Clone ID: 700762186H1
attcctgagaatacaggtatatcattggcctgtgctatgaatagttcttttagggggcgcgccagttctgatatttacaccatctgctctcaagactgtgaattgtggaatcctgcttgcacaaaagcaatgactatgtcatttaatccaaacccgtgttctgatgcatggagtttggaatttctgaagcgtactggatttcattgcgatatcatttgtgtcactgg

SEQ ID NO: 62753 - DNA, 227 bp, Glycine max
  Clone ID: 700762188H1
gtttcctcgtatcttaggccacgaagcttcggggattgtggagagcgtgggcaagggtgtgacacatctgaaaccaggtgaccatgctctcccaatattcactggggagtgtggtgaatgcacctattgcaagtctgaagagagcaacctgtgtgagcttctcaggatcaacactgacagaggagtgatgctcagtgatggcaaaacaaggttctccaaaaatggac

SEQ ID NO: 62754 - DNA, 224 bp, Glycine max
  Clone ID: 700762189H1
aaacactcatcagtcatcaccatggccaagctagtttgttccctttgtgttctgcgtttcagtggctgctgcttcgctttcagttccagagagcaggctcagcaaaacgagtgccagatccaaaaactcaatgccctcaaaccggataaccgtatagagtcagaaggagggctcattgagacatggaaccctaacgacaagccattccagtgtgccggtgttgc

SEQ ID NO: 62755 - DNA, 220 bp, Glycine max
  Clone ID: 700762191H1
gttcaatatcctagtacaccgtattaaagaatttaagatatactatgatgagagcgcggttcccattactgttgctgggagttgttttcctggcatcagtttctgtctcatttggcattgcgtattgggaaaagcagaaccccagtcacaacaagtgcctccgaagttgcaatagcgagaaagactcctacaggaaccaagcatgccacgctcgttgcaa

SEQ ID NO: 62756 - DNA, 219 bp, Glycine max
  Clone ID: 700762192H1
caatcccaaacagtctacagtttttgacattctcttgggaatttctcaagattttgaaattgctggtaatactcttatgccagctttttctgttccacaggctactgccagatcttctgaaaatgcggaatcctctgcatgatctggaatttgtgttttctttcatttgtccgtttgtttaattcaataaaggaaattaggcatgaccctcttgttgag

SEQ ID NO: 62757 - DNA, 222 bp, Glycine max
  Clone ID: 700762193H1
cgactcttttggtgagaaagcaattgccgagattaagaagcaatatgcagtgtttgatgcgaaggtattgagcaagatacccagaggacctctgaaagataaaaagaaagattgaagtgggcactagattctgacaaatatgttgtagtggggtttcaggaaccctatgatgtcatattttatttttttagggtccttttactagagacactgtggaagaaa

SEQ ID NO: 62758 - DNA, 219 bp, Glycine max
  Clone ID: 700762194H1
caagctggtgcagtttggagagattcaggaaaaagttgtattgaaatttatggtgtcatcagccaaatttccaaatgctaagatgacttctccctacattaaatgtacagtctctttcttcatagcatttggaaatttggctgatgacaccatcaattttgagacttttccccacaagctggtgcagtttggagagattcaggaaaaagttgtattgaa

SEQ ID NO: 62759 - DNA, 223 bp, Glycine max
  Clone ID: 700762195H1
aacttattaacactttccttagttcaatatggggaagcccttcttcactctctctctttcttccctttgcttgctactcttgtcgagtgcatgctttgctattacctccagcaagttcaacgagtgccaactcaacaacctcaacgcgttggaacccgaccaccgcgttgagtccgaaggtggtcttattgaaacatggaactctcaacaccctgagctgcaa

SEQ ID NO: 62760 - DNA, 224 bp, Glycine max
  Clone ID: 700762196H1
caatattcaaaccttgctctatagtacacagtacacacactagaagaataatggcttccatcctctactacttgttagccctctctctgtcttgctctagtcttttcttcttatccgactcagtcacccctacaagaccaataaaccttgttgttctacccgttcaacatgatggatccacagggctccattgggccatcctccaaaaaagaacccctctaatg

SEQ ID NO: 62761 - DNA, 250 bp, Glycine max
  Clone ID: 700762202H1
aacaataattccttcacttgcagaacttagttctctgttgcatcatcatcatcttcattagtgttagccctaaacttcaccttcaaccatgaccacagtgccaccacacagtgtccaagtgcacacaacaacacaccgctacgaagccggctcgtcccgccggctcgttttgaggcgccgcgttacgaagccggcatcaaggcgacctcttccatttaccattccgagagaggtccgacgacctctcagg

SEQ ID NO: 62762 - DNA, 237 bp, Glycine max
  Clone ID: 700762203H1
tctcgagccgaatcggctcgagccttcttcactctctctctttcatccctttgcttgctaatcttgtcgagtgcatgctatgctattacctccagcaagttcaacgagtgccaactcaacaacctcaacgcgttggaacccgaccaccgcgtgagtccgaagggtcttattgaaacatggaactctcaacaccctgagctgcaatgcgccggtgtcactgtttccagacgcaccctc

SEQ ID NO: 62763 - DNA, 239 bp, Glycine max
  Clone ID: 700762204H1
cttaattattaacacttccttagttcaatatggggaagcccttcactctctctctttcttccctttgcttgctactcttgtcgagtgcatgctttgctattagctccagcaagctcaacgagtgccaactcaacaacctcaacgcgttgaacccgaccaccgcgttgagtccgaaggtggtttgattcaaacatggaactctcaacaccctgagctgaaatgcgccggtgtcactgttt

SEQ ID NO: 62764 - DNA, 118 bp, Glycine max
  Clone ID: 700762205H1
aaaggctttagcttgccttttgttcactgtaaaataataatgtaagtactctctataatgagtcacgaaacttttgcgggaataaaaggagaaattccaatgagttttctgtcaaaaa

SEQ ID NO: 62765 - DNA, 239 bp, Glycine max
  Clone ID: 700762206H1
atactatgatgagagtgcggtttcctttgttggtgttgctgggaactgttttcctggcatcagtttgtgtctcattaaaggtgagagaggatgagaataaccctttctacttgagaagctctaacagcttccaaactctctttgagaccaaaacggtcgcattcgtctcctccagagattcaacaaacgctccccacaacttgagaaccttcgagactaccggattgtccagtttcagt

SEQ ID NO: 62766 - DNA, 245 bp, Glycine max
  Clone ID: 700762207H1
gaaagagatagtgtggtagagagagaggagcggaggagagaaaatgacgacgaggttcaagaagaacaggaagaagagaggccacgtcagcgccggtcacggtcgtatcgggaagcaccgcaagcatcccggtggtcggggtaacgccgtggcatgcaccaccaccgcatcctcttcgacaagtaccatcccggtttcttcggaaaggtgggtatgcgctacttccacaaactccgcaacaaatt

SEQ ID NO: 62767 - DNA, 83 bp, Glycine max
  Clone ID: 700762208H1
ggagctggtgcaaagaatgctattctcatgaatatgccaaatgctgttctttcaatgtggagataaaccaatcaattgtaacc

SEQ ID NO: 62768 - DNA, 245 bp, Glycine max
  Clone ID: 700762209H1
tagtagtgttggtgggttgcaaagatgcttgggggtcttctccataggggtcataagataaaagggacagtggtgttgatgcgcaagaatgtgttggacgtgaatagcgtaaccagcgttgggggaattattggtcaaggtctcgactagttggctcaacactcgatactcttactgccttcttgggccgatccgtgtctctccagcttattagtgctaccaaagctgatgctaacggaaaaggg

SEQ ID NO: 62769 - DNA, 245 bp, Glycine max
  Clone ID: 700762210H1
gtgctcagtggcttcagcaaacacttcttggcacaatccttcaacaccaacgaggacatagctgagaaacttcagtctccagacgacgaaaggaagcagatcgtgacagtggaaggaggcatctgcgttatcagccccaagtggcaagacaacaagatgaagatgaagatgaagacgaagatgatgaagatgaacaaattccctctcaccctcctcgccgaccaagccatggatagcgtgaacaa

SEQ ID NO: 62770 - DNA, 242 bp, Glycine max
  Clone ID: 700762212H1
aagaatggaatttactctccacattggaatctgaatgcaaacagtgtgatctatgtgactcgaggacaaggaaaggttagagttgtgaactgccaagggaatgcattgttcgacggtgagcttaggaggggacaattgctggtggtacacagaacttcgtggtggcggacaagccggagaacaaggattcgaatacatagtattcaagacacaccacaacgcagtcactagctacttgaagg

SEQ ID NO: 62771 - DNA, 241 bp, Glycine max
  Clone ID: 700762215H1
ctcatcaccatggccaagcttgttctttccctttgtttccttcttttcagtggctgcttcgctctgagagagcaggcacagcaaaatgagtgccagatccaaaagctgaatgccctcaaaccggataaccgtatagagtcggaaggtggttcattgagacctggaaccctaacaacaagccattccagtgtgccggtgttgccctctctcgctgcacccttaaccgcaatgcccttcgtag

SEQ ID NO: 62772 - DNA, 242 bp, Glycine max
  Clone ID: 700762216H1
ccagattattacacgaaacataatgaagttgtgaccataaactggaaatgcaagaagcttatcttgtcaatctcgtaaatgtgttacgagaattgtatttgcacagtccagaggaagctcgccaattgagaaggaaagctctctctgtattgaatggctgcaaaaagctgatgtgcctaccatagcacagattgaagagttccattcgatgcagaggatgatgaatgctcctgattcaaatg

SEQ ID NO: 62773 - DNA, 243 bp, Glycine max
  Clone ID: 700762217H1
ggtgaactagggttctgatggtggtgttgcacatggatttgagtcaataaggagatccattctagctctgaaaacagatcctctcaagcctcggttggaccagattcgtaagcaagccgatgatcatcgctctttggctcttgtttatcttcctatgcacgcaagctcaagcttgagagctcaaagcttgttaggatttttgcggactatcgcgcaacttctcagatctaatgaacaaaccac

SEQ ID NO: 62774 - DNA, 245 bp, Glycine max
  Clone ID: 700762218H1
ctatgatgagagtgcggtttcctttgttggtgttgctgggaactgttttcctggcatcagtttgtgtctcattaaaggtgagagaggatgagaataaccctttctacttgagaagctctaacagcttccaaactctctttgagaaccaaacggtcgcattcgtctcctccagagattcaacaaacgctccccacaacttgagaactttcgagactaccggattgtccagtttcagtcaaaaccca

SEQ ID NO: 62775 - DNA, 244 bp, Glycine max
  Clone ID: 700762219H1
cggctcgagaatgcatgcagctgcggtggcatgggaagcagggaagccactatcgatagaaaccatagaagtggcaccaccccagaaaggtgaagtgcgtttgaagatcctcttcaactccctttgccgtacagatgtttactggtggatgctaagggccagactccgctgtttcctcgtatcttaggccacgaagcttcggggattgtggagagcgtgggcaagggtgtgacacatctgaaac

SEQ ID NO: 62776 - DNA, 244 bp, Glycine max
  Clone ID: 700762220H1
cgaggacatagctgagaaacttcagtctccagacgacgaaaggactcagatcgtgacagtggaaggaggtctcagcgttatcagccccaagtggcaagaacaacaagatgaagatgaagatgaagacgaagatgatgaagatgaacaattccctctcaccctcctcgccgaccaagccatggaaagcgtgaacaagacgaggacgaggacgaagatgaagataaacctcgtcctagtcgaccaa

SEQ ID NO: 62777 - DNA, 103 bp, Glycine max
  Clone ID: 700762221H1
tgggaaggtaagaaaattgtttttcttactagagttgatccttttccagtagctctactggctgttctttttggcgttactaatgacattctgaattccacgc

SEQ ID NO: 62778 - DNA, 242 bp, Glycine max
  Clone ID: 700762222H1
atatatactatgatgagagtgcggtttcctttgttggtgttgctgggaactgttttcctggcatcagtttgtgtctcattaaaggtgagagaggatgagaataaccctttctacttgagaagctctaacagcttccaaactctcttgagaaccaaaacggtcgcattcgtctcctccagagattcaacaaacgctccccacaacttgagacttttcgagactaccggattgtccagtttcag

SEQ ID NO: 62779 - DNA, 229 bp, Glycine max
  Clone ID: 700762223H1
ggctcgagtgcaaaattgatgcgtgaaaggttacacctgctgttgacttgttgttcaaggatggcaatttgtaagaaagatgtttggagagttgaatgtggaatcccttctggatttccgctcacagttattgcaatagcatttttaatgagatgctcattagatatagctatgaaaaattactgcgccaggctagagctccaaagcatgttttacaatgcttcaaaaa

SEQ ID NO: 62780 - DNA, 236 bp, Glycine max
  Clone ID: 700762224H1
gaaattatgtcagaaagcaagatgtcagcattgaatatgatgcatgtacaattccaaatgattgtggttcattggttgttgccaaggttggaaatcacaaacaaattgttggtttccatgttgctggaagcaaaggaagactgggaatgcttcattgataccatatgttgagccagttgtgcaagctcaaagtgctgaagtttactttgacttcttccctgtggaggttgatagtc

SEQ ID NO: 62781 - DNA, 244 bp, Glycine max
  Clone ID: 700762225H1
aactaatataacgtgttcctccttggaagaagccatagccataacatagccaccagaaaacaaaacccaccttagttattaaaagaaaagaaaactacataaaattaagctttgttcggtggtgaccatggggagcaccgactcatcagcggttcacaacaaccgaacctgccacctgggtttcggttccaccccaccgatgaagagcttgtggttcactacctcaagaaaaaaacagcttctg

SEQ ID NO: 62782 - DNA, 239 bp, Glycine max
  Clone ID: 700762226H1
acaaaattccttttggaaattccttttcctcgtgaacgatcggctcactctcgctctccctagatccttcactttcgctctccctcgtcgcgtgctcgttctcgctatcgtgctctcgcgctctctcggatctaactctgtctgtatcatgtcaggcaagtatatcgtttctgctattcttggatcatttggagttgcatgggtttgtgattattatgtttcagaaaaaaagctatttg

SEQ ID NO: 62783 - DNA, 149 bp, Glycine max
  Clone ID: 700762228H1
gaaattttgataaaccgcgatcacaggttgccgcaccacaaaaccggaaacaaaagcaatcgttacttgatttcaagaatttctcaatttctttctacttctttgtgtacgatttcttaagggaaagaaaatcactctctgtgctgcca

SEQ ID NO: 62784 - DNA, 241 bp, Glycine max
  Clone ID: 700762230H1
tctcagtgaatgtgttcccaggacttattgtgttttaaatccacaaaatccttttgtgttaaataggtggatggggaaactgactttcccccagggcacttcccgaaatgttaagagaatgcctctttctatagggggaggagctgtgcaaagaatgctattctcatgaatatgccaaatgctgttctttcaatgtggagatatcttgttggagatctcgtctttgaagtttctaagatga

SEQ ID NO: 62785 - DNA, 244 bp, Glycine max
  Clone ID: 700762233H1
tctcgagccgaatcggctctagacatagtagtgttggtgggttgcttagatgcttgggggtactcctcataggggtcataagatagaagggacagtggtgttgatgcgcaagaatgtgttggacgtgaatagcgtaaccagcgttggggaattattgagtcatgtctcgacttagttggctcaacactcgatactcttactgccttcttgggccgatccgtgtctctccagcttattagtgcta

SEQ ID NO: 62786 - DNA, 148 bp, Glycine max
  Clone ID: 700762234H1
taagatttgaaattttgataactcgcgatcacaggttgccgcaccttaaaaccggaaacaaaagcaatcgttacttgatttcaagaatttctcaatttctttctacttctttgtgtacgatttcttaagggaaagaaaatcactcctg

SEQ ID NO: 62787 - DNA, 236 bp, Glycine max
  Clone ID: 700762236H1
cttaccaggtccagacatagtaaggattgacagactgagagctctttcttgattctatgggtggtggtgcatggccgttcttagttggtggagcgatttgtctggttaattccgttaacgaacgagacctcagcctgctaaatgctatgtggaggtaaccctccacggccagcttcttagagggactatggccgcttaggccacggaagtttgaggcaataacaggtctgtgatgc

SEQ ID NO: 62788 - DNA, 240 bp, Glycine max
  Clone ID: 700762237H1
gttcaatatcctagtataccttaataaataatttaagatactatgatgagagcacggttcccattactgttgctgggacttgttttcctggcttcagtttctgtctcatttggcattgcttactgggaaaaagagaaccccaacacaacaagtgtctccagagttgcaatagcgagagagactcgtacaggaaccaagcatgccacgctcgttgcaacctccttaaggtggagaaagaag

SEQ ID NO: 62789 - DNA, 241 bp, Glycine max
  Clone ID: 700762238H1
cacaaaacttccacttgagagaaaagctgtgtattaagactacaaattttcaatttttcaatggcgtcgaggcaacaaaaagaggatcgagctgaggcagctgcgaaagttgctgcgaaagaactcgaacaactcaaccgagaaaagaccgtgatttcagtgttggtgttgcagaccaacaccaacaagaagaacatcagttagatcaacaaaagcgtggtgtaatcggatccatgttcaa

SEQ ID NO: 62790 - DNA, 237 bp, Glycine max
  unsure (1)..(237): unsure at all n locations
  Clone ID: 700762239H1
aaagctttctagctagtcataacatcaccattactgatggtattgacaaaactagtgcaactttgcaatttagaaagttagcagattgtgattttctcaagagaaactttaagcagatgtctaatgttttgtgggtggctcctaggacaaggcgagtttatggtcacaacttcattatgtttcgtgtaataatctgganatgctagaagcttatcttgtcaatctcgtaaatgtgtt

SEQ ID NO: 62791 - DNA, 238 bp, Glycine max
  Clone ID: 700762241H1
cacggaagcaccacggttcaagacatcgcgagatagttgaaactcggggacaacgagcttctgcgcacggagaagaagttcaaggttttcatggagaattacgggaggagctactccacagaggaggagtatttgcgccgtttgggattttcgcccagaacatggtcagagcggcggagcatcaggcgctggaccccaccgccgtccacggcgtcacgcagttctccgatctcaccga

SEQ ID NO: 62792 - DNA, 236 bp, Glycine max
  Clone ID: 700762242H1
aagaaaaaagagaagaagatgggtttgaagaacaacatggtggtgctaaaggtgtgtttggtgccaattttccttgtggggggtactactagtgccaacttgaggctgagtaagcttggcctgctcatgaaaagtgatcatcacaacactcaaatgatgatgagtcttcaaaaccatgctgtgatcaatgcgcatgcacaaagtcaaaccctcctcaatgccgctgttcagatatg

SEQ ID NO: 62793 - DNA, 235 bp, Glycine max
  Clone ID: 700762245H1
agcaacgagattcttattgggatgcacgtccttcctcaaggagcaatgaatatcccctttttatacctcgccaaaattattgctctactgacggagaaaactcatggtctgagagaagctcaagcaattttggagttgcttcgtggaatcacagaggaggcatcgcctagattcatctgggagtactagctttaattattcttaaagttcttcgcattctgttcaaacacacaaa

SEQ ID NO: 62794 - DNA, 239 bp, Glycine max
  Clone ID: 700762247H1
tctcgagccgaatcggctcgagggttaccaatttttgtgaattgattttatcctgtaagtactttaccttcagaagctgtatcgttgtaaatgttacatgtggtagtggacgtggtggtttacctaccactgcttggattagtctgcagttaacaatcgctcctcagatatcaacaaaaagattcgcacagcacttgggaaaggtaagaaaattgtttttcttactagagttgatcctt

SEQ ID NO: 62795 - DNA, 254 bp, Glycine max
  Clone ID: 700762248H1
cgcgagttcggctcgagcaatttgtgacactaaatctaagttactatgactgcgcagacccaagaggagcttcttgcgcaacacctcgaacagcaaaagatccatgatgatgaacctgtcgtcgaggatgatgatgacgaggaagtggatgatgatgatgcgatgaggatgatgaccatgacgaaggactagaaggtgatgcatctggtaggtcgaagcagaccagaagtgaaaagaagagtcgcaaggcaatg

SEQ ID NO: 62796 - DNA, 195 bp, Glycine max
  Clone ID: 700762249H1
cccaatttggtgccatgagtaattaaataatctgctggaaataatatctaccaatataaataaagcatccagccactgtaatctgcaatgctgataataatgccatgaagtagcactgcctaaacatctacaaagtactctcgttactttttatgtgtgtattcctatcacgaagttaataaactattttatcag

SEQ ID NO: 62797 - DNA, 237 bp, Glycine max
  Clone ID: 700762250H1
caaacagatgaggctcaaggtcgcagaagcagcagctacaggacagtcaccagaagattcgtcacttcaatgaaggagacgtactcgtgattcctcctggtgttccttactggacctataacactggcgatgaaccagttgttccatcagtcttcttgacacctctaacttcaataaccagcttgatcaaacccctagggtattttaccttgctgggaacccagatatagagtaccc

SEQ ID NO: 62798 - DNA, 236 bp, Glycine max
  Clone ID: 700762251H1
gtgaagtgagtagtgaaggtgctgaatcgaatcgaatctccgaagatggccgcgagcgatcgcacagtgttgcaattctcttcatcatcttcttcttcgcagagcttgtccgcgaaggtccaccctctggtcatcttcaacactgcgattgctacgttcgacgccctgaccaagccgatcgcgtcatcggaaccctactcggctacgtccttcccgatggaaccgtcgatatccgc

SEQ ID NO: 62799 - DNA, 242 bp, Glycine max
  unsure (1)..(242): unsure at all n locations
  Clone ID: 700762253H1
gctgatttatttattcatagatggagctcaagtcatagttaaatagcccgatacgtttcctcgactcactatcgacaatcntacagcatacattttagtactacatacttattcagtaaaaagcactcaaaattgaagacaaaggccctttcttcccttgttcccctcctctttctgctgaggctgagcatccacaaagtaggactcactttggctctttattaggctctcgatatcttttg

SEQ ID NO: 62800 - DNA, 234 bp, Glycine max
  unsure (1)..(234): unsure at all n locations
  Clone ID: 700762254H1
cggaacagcaacgttgtagagggagacttttgggggagagtgagtgagagtaaaaagatgtttctgcgtgcggtggcgcggccgttgatggcgaaggtgaaggcttcgacggggatcgtggggctggacgtggtgccgaagcgagggaggtgctgattgggctgtacagcaagacgctgaaagagatccagaaggttcccgaagatganaggtaccgcatagccgtggagagct

SEQ ID NO: 62801 - DNA, 234 bp, Glycine max
  Clone ID: 700762256H1
cttccttagttcaatatggcaaagcccttcactctctctctttcatccctttgcttgctactcttgtcgagtgcatgctttgctattagctccagcaagctcaacgagtgccaacacaacaacctcaacgcgttggaacccgccaccgcgttgagtccgaaggtggtttgattcaaacatggaactctcaacaccctgagctgaaatgcgccggtgtcactgtttccaaactca

SEQ ID NO: 62802 - DNA, 236 bp, Glycine max
  Clone ID: 700762257H1
taaataatgcttttggttcaaatgtctatctgtagtgaggagagtagcgcctattgtagagaagatggtggaaaatagacttaggtggtttgggcatgtcatgagaagaccggtagactctgtagtgaggagagtagaccgatggagagaaggcaaacaattcgaggcagaggaagacccaaaaagactataagagaggttatcaaaaaggatctcgaactagtagatttggatag

SEQ ID NO: 62803 - DNA, 164 bp, Glycine max
  Clone ID: 700762259H1
atttgaaattttgataaaccgcgatcacaggttgccgcaccttaaaacctgaaacaaaagcaatcgttacttgatttcaagtatctctcaatttcttcctacttctttgtgtacgatttcttaagggatagaaaatcacctctgtgctggccacagacttcgtg

SEQ ID NO: 62804 - DNA, 234 bp, Glycine max
  Clone ID: 700762261H1
aggagcaggatgacctctatattgatcacaatctcagcttaaccgaggcactctgtggcttccagtttgctgtcaaacatcttgatggtaggcaactattgatcaaatcaaaccctggggaagtcatcaaaccaggtcaaataaagcaataaatgatgagggaatgccacaacacaataggccattcatgaagggtcgcctttacatccagtttaatgttgatttcccagactc

SEQ ID NO: 62805 - DNA, 234 bp, Glycine max
  Clone ID: 700762262H1
tctcgagccgattcggctcgagagcttttctttttcttgttcttctattttctgattttagcaaattaaaatagtagtgtatttggtaggttttggcaaagatgttttcagttccaggggtgtcgggaactctgaacagggaggagggcataagataaaagggacagtggtgttgatgaggaagaatgtgttggacttcaacagcgtggctgatcttactaaaggaaatgttgg

SEQ ID NO: 62806 - DNA, 239 bp, Glycine max
  Clone ID: 700762265H1
cagcatccaccatgctgctgttgatggaagatcttccaccatgttcatcaactcttgggcttctctgtgccaacaaattattatgaacgatgaaacaacatcacaaagtgtggtggtgccatctttggtgccggagttggaccttcctttgacagaacactcatcaaagacccgggaaattggaaccgcttcttgttagcaaaatggtgccctaatattgctaatgagaacagtgatgg

SEQ ID NO: 62807 - DNA, 265 bp, Glycine max
  Clone ID: 700761641H1
ctcgagccgctcttcttctaccacacttcaattcaaaggcgatagtgatactggtaattaatgaaggagatgcaaacattgaacttgttggcctaaaagaacaacaacaggagcagcaacaggaagagcaacctttggaagtgcggaaatatagagccgaattgtctgaacaagatatatttgtaatcccagcaggttatccagttgtggtcaacgctacctcaaatctgaatttctttgctattggtattaatgccgagaacaa

SEQ ID NO: 62808 - DNA, 264 bp, Glycine max
  Clone ID: 700761642H1
ctcgagccgctcgagccgtcctcactgaccaagccatggcgatgagaaccaaactttctttagctatctacttcttttttcttttagccttattttcaaacctagcctttggcaaatgtaaagaaaccgaggtagaagaagaagaccctgagctcgtaacatgcaaacaccaatgccaacagccacagcaatacactgagggtgacaagcgggtatgcttgcaaagatgtgacaggtatcatcgtatgaagcaagagcgagaga

SEQ ID NO: 62809 - DNA, 107 bp, Glycine max
  Clone ID: 700761643H1
gaaaccgggatcattgtcagcttccagggtaacttagacccgagagcagaggagttcagacccctcaatcttcaatgccaatggtatcctcttcctctttccacaca

SEQ ID NO: 62810 - DNA, 210 bp, Glycine max
  Clone ID: 700761645H1
gaataataataaataaataaatatttctatacaaacaaaggttacgtaatgttgttgttctcgtggatggggatcttatcttcctcctcgctatctttgtttatcgtatttcagtgaaagttgttcaataaaagtcctttgttcaaaaaaaaaaaaaaaaaaaaattaaaaaaaaaaaataaaaacaaaaaaaaagaaaaaaaacggggg

SEQ ID NO: 62811 - DNA, 264 bp, Glycine max
  Clone ID: 700761646H1
cctcgagccgattcggctcgaggcctccacttgccatcttactcagcttatccccggatgatcatcatcgcccaagggaaaggagcacttggagttgcaattccaggatgtcctgagacgtttgaggagccacaagaacaatcaaacagaagaggctcaaggtcgcagaagcagcagctacaggacagtcaccagaagattcgtcacttcaatgaaggagacgtactcgtgattcctcctggtgttccttactggacctataac

SEQ ID NO: 62812 - DNA, 255 bp, Glycine max
  Clone ID: 700761647H1
tgaaagcttatgcgttggtgaagtacaactatgctgccagtttgattgtcaggagccatttggcagaactggtcaatgaagacttttatgatcatgaattcgaatatattggcacaattgggactccaggtggtcatcgacaaattgctgcacacatggctgcaatgccattacggtccacagcaattttgtgtggaatcggacattgcttgtctcgggtaagcaaatagacatggtattctgggatgaacgaaa

SEQ ID NO: 62813 - DNA, 261 bp, Glycine max
  Clone ID: 700761648H1
ctagtacaccgtattaaagaatttaagatatactatgatgagagcgcggttcccattactgttgctgggagtcgttcacctggcatcagtttctgtctcatttggcattgcgtattgggaaaagcagaaccccagtcacaacaagtgcctccgaagttgcaatagcgagaaagactcctacagccaccaagcatgccacgctcgttgcaacctccttaaggtggaggaagaagaagaatgcgaagaaggtcaaattccacg

SEQ ID NO: 62814 - DNA, 264 bp, Glycine max
  Clone ID: 700761649H1
ctcgagccgctcgagccgaatcggctcgagtctgtgttgcgattatgctagttttgatggactgattacacagcaagttatgagcaagatggcagaaatgatcaacagtctttgtggtggtgatgaaaaactgatgcgtgaaaggacacacctgctgttggcttgttgttcaaggatggcaatttgtaagaaagatgtttggagagttgaatgtggaatcccttctggatttccgctcacagttatttgcaatagcatttttaa

SEQ ID NO: 62815 - DNA, 120 bp, Glycine max
  Clone ID: 700761650H1
ttcctatcacactttctagatagctagccaaccagagtaagatctaaagatatttcttatatatcctatggtccgagagtgcccttgttctgcgccaaccctttcttccacacaacatac

SEQ ID NO: 62816 - DNA, 106 bp, Glycine max
  Clone ID: 700761652H1
aattttgataaaccgcgatcacaggttgccgcaccttaaaaccggaaacaagagcaatcgttagcttgatttcaagaatctctcaatttcttcctacttctttgtg

SEQ ID NO: 62817 - DNA, 261 bp, Glycine max
  Clone ID: 700761653H1
caaaacaaccaacctcttcagtgatctttgattagtactaagctaaaccatttcttattccctcaaaatcaaaacctttttctttctagctatttcccttttcaaatcatgccacctaacatcaccaccgttgttgccaatgtcaccaccgagcaattacccaaggctcgtggaggaagtgggcgtgccttcgtgacctttcttgctgggaacggtgattacgtaaagggtgtcgtgggtttggccaaaggactgagaaag

SEQ ID NO: 62818 - DNA, 261 bp, Glycine max
  Clone ID: 700761654H1
atgggagggtccagtggtagcaccatcacgccacaacctcaagctttttgctgataaggagacatatgaagcaatggatgaaatagcaaagcttcaaaacaagaatgctcatcagttggccatggaagttatccgtaattatgttgctaccaaccaaaatggaaagggtgaataattccatttacttagcgaaggaagatgtatgtgatgctgctttatggttgacaggaagggtggataggctactgaacacaactctgt

SEQ ID NO: 62819 - DNA, 265 bp, Glycine max
  Clone ID: 700761656H1
tctcgagctgctcgagccgctcgagcggtccaaggccgtcggctgctcctccaccggcgatacttcctccggtctctccgcctactgcgcttcctccggaatcccctccatcgtcttcctccccgccaacaagatcttcaccgcgcaactaatccaatcggtttcaaacggctctttagtcttaagcatcaacaccgattttgacggctgcatgaagctgattcgtgaaatcaccgccgaattacccatctatttggcgaattcg

SEQ ID NO: 62820 - DNA, 261 bp, Glycine max
  Clone ID: 700761657H1
ctctccattgtctttgaacactcatcaccatggccaagcttgttctttccctttgtatccttcttttcagtggctgcttcgctctgagagagcaggcacagcaaaatgagtgccagatccaaaagctgaatgccctcaaaccggataaccgtatagagacggaaggtgggttcattgagacctggaaccctaacaacaagccattccagtgtgccggtgttgccctctctcgctgcacccttaaccgcaatgcccttcgta

SEQ ID NO: 62821 - DNA, 250 bp, Glycine max
  Clone ID: 700761660H1
attttgataaaccgcgatcacaggttgccgcaccttaaaaccggaaacaaaagcaatcgttacttgatttcaagaatttctcaatttctttctacttctttgtgtacgatttcttaagggaaagaaaatcactctctgtgctggccacagacttcgtgaatcattttcttttccacatgacgtacaaccctagatcactctcctatatgatatatgacttcgtttcagatttatacttcttctgtacctt

SEQ ID NO: 62822 - DNA, 260 bp, Glycine max
  Clone ID: 700761661H1
cttcgagccgattcggctctactagtacaccttattatagaattaaagatatactatgatgagagcgcggttcccattacagttgctgggagttgttttcctggcatcagtttctgtctcatttggcattgcgtattgggaaaagcagaaccccagtcacatcaagtgcctccgaagttgcaatagcgagaaagactcctacaggaaccaagcatgccacgctcgttgcaacctccttaaggtggaggaagaagaagaat

SEQ ID NO: 62823 - DNA, 260 bp, Glycine max
  Clone ID: 700761662H1
gtctgaaggatgcaataacggggcaaatcagagctgcaaacaagagtttgggggaagaggattgctttggtgctaaaattgaagggtctaggctcaaatatgtggatcatcatctaaggcaacagagagctattcaacaattgggaatgatcaatcacaatgcttggagaccccagagaggattgcctgagagatcggtttctgttctgcgtgcttggctctttgaacactttctccacccttatcccaaggactcggac

SEQ ID NO: 62824 - DNA, 259 bp, Glycine max
  Clone ID: 700761663H1
tcgcaaagcgatggggtgtcgattccattacagcagcatatgtgcactcttactccgttacgagttcgaggcctcctctcgctcttctcttctcgtctcttctcttcgtagctaagccataatcctattagaatatggacgagagcttcgttctccagtggagcgatatcagatgtctcttgttcatccttcagtggtgggccttcaatgtcaatgtcatcattgtcaacaagtgggtctttcagaaattcgatttcaa

SEQ ID NO: 62825 - DNA, 260 bp, Glycine max
  Clone ID: 700761664H1
ttccttgtgttgcttcttttctccctcttaggtctctcttctagttccagcatatcaactcatcgttccatattggaccttgacctaaccaagtttaccacacagaaacaggtgtcttcactgttccaactatggaagagtgagcatggacgtgtctaccataaccacgaagaagaggcaaagagacttgagattttcaagaataacttgaactatatcagggacatgaatgcaaacagaaaatcaccccattctcatcg

SEQ ID NO: 62826 - DNA, 77 bp, Glycine max
  Clone ID: 700761666H1
ctgatcattgggatatcgccttttatacccgcagaggtagcgtgactcattatcgggcgtgcttacattaacattgg

SEQ ID NO: 62827 - DNA, 260 bp, Glycine max
  Clone ID: 700761667H1
ctcgagccgccctgtcattctcaagttggctgatgctcttgacatagctgtgaaatctgtgacggtacactcgtggaagcttcattttccctggggcacagtcttttcctcaccgcagtttttccgaggaggtttctgttcttgacagctatttcagcaaccttggttctggtagcaaagcatatgttacgggtgacccttcaaagtcacagatttggcacatctactctgcaagtgcacagaccaaaggatcatctgaa

SEQ ID NO: 62828 - DNA, 89 bp, Glycine max
  Clone ID: 700761668H1
gtgttattttaaaaaaaaatacagacttgacagatgattacgagaattaaaagaggtgtggaaatgatgtgtgaagtgtgtgtcgtatt

SEQ ID NO: 62829 - DNA, 258 bp, Glycine max
  Clone ID: 700761669H1
ctcgagccgctgccatggggttttcaatgctgattctttttcacctctaaaaccacttcctctcttattttcttcaacttttgggcattcacaactcatcttctttgtggtgtttctaggtaaacgagacccttgttcttcttgcattcacttgacatgatctccgagcttgttacctgaatctctggagcgagcttctgggctgtagatcctcttctttcttctttgcgtttgggttaaagatctaatttttccatc

SEQ ID NO: 62830 - DNA, 258 bp, Glycine max
  Clone ID: 700761670H1
gagccgcaagaatctcagcaacgaggacgaagccagaggccccaagaccgtcaccaaaaggtacatcgcttcagagagggtgatttgatcgcagtgcctactggtgttgcatggtggatgtacaacaatgaagacactcctgttgttgccgtttctattattgacaccaacagcttggagaaccagctcgaccagatgcctaggagattctatcttgctgggaaccaagagcaagagtttctaaaatatcagcagcag

SEQ ID NO: 62831 - DNA, 259 bp, Glycine max
  Clone ID: 700761671H1
gtggcatctgtataccttgttgatctacattctcccatcttttctcactgctgaaattaaatataagcggaatctgagtaatattcatatttccggcttattttacgacggcagatacaaattctggactaaacacgagaaaaatcttgctttgacagacgaggaaaagatggaagtgattagaaatagaggcattcctgctgatgttcttgcaaagcgagctcatgaatttgaaaaacatgttgctcatgacagcctc

SEQ ID NO: 62832 - DNA, 103 bp, Glycine max
  Clone ID: 700761673H1
ctccattggtccttaaacattcatcagtcatcaccatggccaagctagttttttccctttgttatctgcttatcagtggctgctgcttcgctttcagttccag

SEQ ID NO: 62833 - DNA, 257 bp, Glycine max
  Clone ID: 700761674H1
aaattatgaaccttagacatagtgttgttggtgatcttgaacttcttactgatgggaagttgtatgagggtaagcatattcctgtatctaatataagtgcaggggagaatcatgtagttcaaatacccctaatggcacaggaggaaattctgtcttctagtgcaagtgatttcagaactgcaatggtgagtagaaatagcaagcctcaagctactgcaatgcatgtgggagctatagatattatcattgatagtttc

SEQ ID NO: 62834 - DNA, 255 bp, Glycine max
  Clone ID: 700761675H1
aggaaactagctagttctataaaatatatgttttaaagataagtggacatgcattataaggggtacaagagtctccactgatagtttaacacttcctacaacaccatgataaacatacccctaagataaagactacctaaggttccttaacctaaaatacctaccattcctaacaaacagtagctctaaagctttaatcagagtaatattcagatttccggcttattttacgacggcagatacaaattctggact

SEQ ID NO: 62835 - DNA, 102 bp, Glycine max
  Clone ID: 700761676H1
ctcgagccgttgaaattttgataaaccgcgatcacaggttgccgcaccttaaaaccggaaacaaaagcaatcgttacttgatttcaagaatctctcaatttg

SEQ ID NO: 62836 - DNA, 252 bp, Glycine max
  Clone ID: 700761677H1
cagatatagagcacccagagaccatgcaacaacagcagccggagaagagtcatggtggacgcaagcaggggcaacaccagcagcaggaggaagaaggtggcagtgtgctcagtggcttcagcaaacatttcttagcacaatccttcaacaccaacgaggattgtgctgagaaacttcggtctccagatgacgaaaggaagcagatcgtgacagtggagggaggcctcagcgttatcagccccaagtggcaag

SEQ ID NO: 62837 - DNA, 258 bp, Glycine max
  Clone ID: 700761678H1
aagccttactttagtggttctaaattgaaaagctttctagctggtcataatatcaccattactgatggtattgacaagactagtgcaactttgcaatttagaaagttagcagattgtgattttctcaagagaaactttaagcagatgtctaatgttttgtgggtagctcctgaggacaaggcgagtttatggtcacaacttcattatgtttcgtgtaataatctggaaatgcaagaagcttatcttgtcaatctcgta

SEQ ID NO: 62838 - DNA, 257 bp, Glycine max
  Clone ID: 700761679H1
caggtttactgagaaaacaatttttacttgcagagatttggacatcttggttgtttattatacaatagcaactcgatttagaaaatttctaccgcattacattaggtggcatctgtataccttgttgatctacattctcccatcttttctcactgctgaaattaaatataagcggaatcagagtaatattcagatttccggcttattttacgacggcagatacaaattctggactaaacacgagataaatcttgctt

SEQ ID NO: 62839 - DNA, 258 bp, Glycine max
  Clone ID: 700761680H1
gaacggaatcccacttaaaagtcgttctccttcctcttcgcagctgttatatagtactattttcatttcatatgtttatgcacctctatatatacatagacacatgtaaatggttgcaaaggaagataagataggtaccagctatcacatagtttatttaatccgttatatgccacctgatatataggcatattagctagttaggtaggtatagtagtttaagttaattcaaccatggaagacagggatcactgttgt

SEQ ID NO: 62840 - DNA, 256 bp, Glycine max
  Clone ID: 700761681H1
cttaattattaacacttcctgagttcaatatggggaagcccttcactctctctcaatcttccctttgcttgctactcttgtcgagtgcatgctttgctattagctccagcaagctcaacgagtgccaactcaacaacctcaacgcgttggaacccgaccaccgcgttgagtccgaaggtggtttgattcaaacatggaactctcaacaccctgagctgaaatgcgccggtgtcactgtttccagactcaccctcaa

SEQ ID NO: 62841 - DNA, 259 bp, Glycine max
  Clone ID: 700761682H1
cacacaactactacaagtacttccttacaatcaaaaccaacaacaactatggcaagttatcaaaagcactacgatgatcagggtcgcaaggttgacgagtatggcaacgttgagaagcaacccgacgaatacggcaaccctgttcatgctgctagtgtcacctatgtagccaccagaactgctgctggtggttacagtgatgacattaataagcaacatgataccaccaatgcctacggcgtagacactggtagacagc

SEQ ID NO: 62842 - DNA, 251 bp, Glycine max
  Clone ID: 700761683H1
ttgcagaccgagctagctagctagcaagcaagcacagagatggaggcaaagcgaggccatgccctcatgtgcttggcacgtgtttcactcttcctctgcgctctaaccctatccgctgctcacggaagcaccacggttcaatacttcgcgagaaatttgaaactcggggacaacgagcttctgcgcacggagaagaagttcaaggttttcatggagaattacgggaggagctactccacagaggaggagta

SEQ ID NO: 62843 - DNA, 256 bp, Glycine max
  Clone ID: 700761684H1
ctcactcactgtcccacctgagcttgttaccaaactagttaccgtcgtcggagccatccactgggtgggcaatcacttattcaaacttcacatctcatctcatctctctcgcatccactgaaccaagatccctattccaaaatggccgcttctgcttcttccagtccgtggctggctccaaaccccagcaaaagatggggcgaactcttcttccttctctacacccctttctggctcaccctttgtctcggcattg

SEQ ID NO: 62844 - DNA, 100 bp, Glycine max
  Clone ID: 700761685H1
cagaagtttttaaattttgtgaggttcattatgaagaaaagggacaagcttagttgtcaagttggaatcaacccatattctatggaatggactggtttgg

SEQ ID NO: 62845 - DNA, 70 bp, Glycine max
  Clone ID: 700761686H1
ctcgagccgctcgagccgcacaatgcatcatctcaaagaaattaagagagttttttttgttccacacaac

SEQ ID NO: 62846 - DNA, 256 bp, Glycine max
  Clone ID: 700761687H1
tctctccattgtctttgaacactcatcaccatggccaagcttgttctttccctttgtttccttcttttcagtggctgcttcgctctgagagagcaggcacagcaaaatgagtgccagatccaaaagctgaatgccctcaaaccggataaccgtatagagtcggaaggtgggttcattgagacctggaaccctaacaacaagccattccagtgtgccggtgttgccctctctcgctgcacccttaaccgcaatgccc

SEQ ID NO: 62847 - DNA, 259 bp, Glycine max
  Clone ID: 700761688H1
agcaaaatgaccaagttcacaatcctcctcatctctcttctcttctgcatcgcccacacttgcagcgcctccaaatggcagcaccagcaagatagctgccgcaagcagctccagggggtgaacctcacgccctgcgagaagcacatcatggagaagatccaaggccgcggcgatgacgatgatgatgatgacgacgacaatcacattctcaggaccatgcggggaagaatcaactacataaggaggaacgaaggaaaag

SEQ ID NO: 62848 - DNA, 257 bp, Glycine max
  Clone ID: 700761690H1
atcaatagcaaaatgaccaagttcacaatcctcctcatctctcttctcttctgcatcgcccacacttgcagcgcctccaaatggcagcaccagcaagatagctgccgcaagcagctccagggggtgaacctcacgccctgcgagaagcacatcatggagaagatccaaggccgcggcgatgacgatgatgatgatgacgacgacaatcacattctcaggaccatgcggggaagaatcaactacataaggaggaacga

SEQ ID NO: 62849 - DNA, 256 bp, Glycine max
  Clone ID: 700761691H1
gacatagaaaccggtagcgtagccagcttcgccgcttccttcaacttcaccttctatgcccctgacacaaaaaggcttgcagatgggcttgccttctttctcgcaccaattgacactaagccactaacacatgcaggttatcttggtcttttcaacgcaaacgagtctggtgatcaagtcgtcgctgatgagtttgacactttccggaaatcttgggatccaccacatccacacatcggaattaacgtgaattcta

SEQ ID NO: 62850 - DNA, 256 bp, Glycine max
  Clone ID: 700761693H1
ctttcttctccactctctcaaatggcccaaaatgattccaaccctactccgcctccggaaccccatgtagcggcggaacccattactgaggatttggtccaagacaaagaagaagaggatgatagtagtaagattgttattccagtcccagagagcgcctccttgtcattgaaggatgatagcaatagggtttctgattccgagaaaaatgccattgatgagctgaagaagctcctgaaagaggatttagaggacg

SEQ ID NO: 62851 - DNA, 253 bp, Glycine max
  Clone ID: 700761695H1
ggaaagaagggttgtaattatcggggcaggaatcagcggccttgttgcctgcaaatacgttatagagtttggatttaatccaattgtctttgaagttgatgatggcgttggaggactatggagacataccatggagtccaccaagctccaaaacaataaacaaatgttccagttcatggattttccatggccgccttctgtgaaagaagataatccaagtcacaagcaagtgctagattatgttaactcctat

SEQ ID NO: 62852 - DNA, 256 bp, Glycine max
  Clone ID: 700761696H1
ctcgagccgctcgagccgcgagcagagagaggaacaggaatggcctcgcaaggaggaaaaaagcggagaaaagggaagtgaagaggaagatgaggatgaggatgaggaacaagatgaacgtcaattcccattcccacgcccacctcatcagaaggaagagcgaaagcaagaggaagatgaggatgaggagcagcagcgagagagcgaagaaagtgaagattctgagttacgaagacataagaataagaaccctttt

SEQ ID NO: 62853 - DNA, 237 bp, Glycine max
  Clone ID: 700761701H1
cttaattattaacacttccttagttcaatatggggaagcccttcagtctctctctttcttcgctttgcttgctactcttgtcgagtgcatgcttcactattagctccaacaagctcaacgagtgccaactcaaccacctcaacgcgttgcaacccgaccaccgcgttgagtccgaagtgcgtttgattcaaacatgcagctctacaacaccctgagctgaaatgcgctggagtcact

SEQ ID NO: 62854 - DNA, 246 bp, Glycine max
  Clone ID: 700761702H1
gaaagatttgttggagggaaatttttcctttgatattaaatctcgctctagattggaaaaagtttcctctacaaaagcacaatttgttagtggaaaaaccttcaaatatgatataattggtgctggttcacattcttcagatgattttcctgaaaaggaagatcaagaaaaacccaaaaagattgatgccagattgagacaaagaatagatcctcaatacaatgaggttcaggctcagatggaaac

SEQ ID NO: 62855 - DNA, 283 bp, Glycine max
  Clone ID: 700761704H1
ctgggaatgcagcagtcaaaaggagtgattgggcctcattggtacaagtgtttttaacaaacagcaacagtacagagcattttgatgcatgtaagtggacaaaatcggaaccacattcctgggaattgatcttcccaatagaggtatgtggtcctaataatggttttgaaatgtggagttctgagtgggcaaatcaaacttcatggcatttgagtttccttattgacaatcccaaacagtctacagtttttgatattctcttgggaatttctcaagattttga

SEQ ID NO: 62856 - DNA, 289 bp, Glycine max
  Clone ID: 700761705H1
gttgaaactcctaaaggctccatgttggatctgaaaatttctcaatctaaaattgcacttcccaagaacacagttggaggaaccattctgcgtagtgatctattggcaaattttttgacagagggcaattttagagcaagtgttgatttgcagcgcactcatcgtattagaggaatgattaaaatggtggccacagttggtattcctgagaatacaggtatatcattggcctgtgctatgaatagttcttttagggggcgcgccagttctgatatttacaccatctgct

SEQ ID NO: 62857 - DNA, 190 bp, Glycine max
  Clone ID: 700761706H1
atttgaaattttgataaaccgcgatcacaggttgccgcaccttaaaaccggaaacaaaagcaatcgttacttgatttcaagaatctctcaatttcttcctacttctttgtgtacaatttcttaagggaaagaaaatcactctctgtgctggccacagacttcgtgaatcattttcttttccacacaacat

SEQ ID NO: 62858 - DNA, 290 bp, Glycine max
  Clone ID: 700761707H1
acacgtccaatcccattcccacgcccacaacctcgtccagaagaagagcacgagcagagagaggaacaggaatggcctcgcaaggaggaaaaacgcggagaaaagggaagtgaagaggaagatgaggatgaggatgaggaacaagatgaacgtcaattcccattcccacgcccacctcatcagaaggaagagcgaaagcaagaggaagatgaggatgaggagcagcagcgagagagcgaagaaagtgaagattctgagttacgaagacataagaataagaacccttttct

SEQ ID NO: 62859 - DNA, 127 bp, Glycine max
  Clone ID: 700761708H1
acttaattagtgttcatggctatgtcaagccttactttagtggttcacattgaaaagctttctagctggtcataatatcaccattactgatggtattgacggaactagtgcaactttgcactttaga

SEQ ID NO: 62860 - DNA, 286 bp, Glycine max
  Clone ID: 700761709H1
gtgaatcgcgtaactctctcaactcaactggatccgggtcacaaccgtcttgaaattaagaccaactgggtcattgatcacaatctcaattggtagcacaacatcaagggaaagtgaaaaagaaaggtatatttgatcagggatatggcaactcgaagatatgagtttggaaggatgaatgaggctagccacccagactccatcagagctgccttggctgaattcctctccacttgcatctttgtctttgctggagaaggctctgcccttgctttgcgacaaattt

SEQ ID NO: 62861 - DNA, 285 bp, Glycine max
  Clone ID: 700761710H1
tctctccattggtccttaaacactcatcagtcatcaccatggccaagctagttttttccctttgttttctgcttttcagtggctgctgcttcgctttcagttccagagagcagcctcagcaaaacgagtgccagatccaaaaactcaatgccctcaaaccggataaccgtatagagtcagaaggagggctcattgagacatggaaccctaacaacaagccattccagtgtgccggtgttgccctctctcgctgcaccctcaaccgcaacgcccttcgtagacctt

SEQ ID NO: 62862 - DNA, 287 bp, Glycine max
  Clone ID: 700761711H1
accaaggctgatgcacatggaaaaggaaaagttggaaaggatacgttcttggaagggattaatacttcgttaccaactttgggagcaggagagtctgcattcaatattcattttgaatgggacggaagcatgggaatccccggtgcgttttacataaagaactacatgcaagttgagttcttcctcaagagtttgactcttgaagccatttcaaaccaaggaaccatccgctttgtttgcaactcatgggtttataacactaaacttacaaaagcgtgcgcattttc

SEQ ID NO: 62863 - DNA, 283 bp, Glycine max
  Clone ID: 700761712H1
gatccatctacacggtcaaaaagaaaatcgttttccttgagaaaatacggacacagagacagagagagggagagagagaaggaaatgggaagcacaaagtttctattgttggtgatggtgtttctcgcagtgtgcgtggggacatgcaggccttggggtgatgatgtagttgaagatggagaggaggccaaacattttgcagcaaaagccgtgcatgatgtcgaggaagagacccgctcttgggctgattgggctcaagacaagttctccaatttcggggccg

SEQ ID NO: 62864 - DNA, 283 bp, Glycine max
  Clone ID: 700761713H1
caagtcctgactgcaacatagttggtgcaatgcttttggttgatacttatcataccaatcctgaaaatgcagttcgtagtatttttgtcgcgcctttcagaggcggaaggcctattcgggtggttacatttccgaataccattgtgcagattgaaccagacatgaattcaaggtttcagcttttgagtaccactaccaatggtgattttgttcaaggaaaagatctcgcaatggttaaagttaatgtagcatgtgctgctgttggcttgacatcaagttacac

SEQ ID NO: 62865 - DNA, 286 bp, Glycine max
  Clone ID: 700761714H1
ccttaccttattccaatccaatagcaaggaggtaccaaaatagtgtgattcatggctgcaacgaatgcgtcaatctttgcatcttccacgcaaccatgcttggctgtgcctcctaccattccaaacacgcttgctactccttttctcaatgtttcgtcaccaagaagttaccttgtgaagaaaaagctcgtgaaatttagcaaaaaaatcagtgctgctgctgttgcaacaacaacaacaactgaggaaattcaagagtacaagcttccatcatgggctaagtttg

SEQ ID NO: 62866 - DNA, 283 bp, Glycine max
  Clone ID: 700761716H1
gttagggaggacaaataccgcccctttatgcgcgaagacagtgagaagaacatcagatggagatatggtgctcctccatattatgacgttgtcaacaaattatttgatgaaggcagaaccaaggtatggcctccgggttcacttcgaagaaaaggtgcagactttagtgcagaattgggagatggaaatgttccacaaggaggatttcaaggataacagatcagtggacccagagaaatacactttcagcctaaacggaaggaagtctattagtttggaagag

SEQ ID NO: 62867 - DNA, 221 bp, Glycine max
  Clone ID: 700761717H1
aagatcatacatagtagtgatggtgggttgcaaagatgcttgggggtcttctccataggggtcataagataaaagggacagtggtgttgatgcgcaagaatgtgttggacgtgaatagcgtaaccagcgttgggggaattattggtcaaggtctacgattagttggctcaacactcgatactcttactgccttcttgggccgatccgtgtctctccagctt

SEQ ID NO: 62868 - DNA, 186 bp, Glycine max
  Clone ID: 700761719H1
aattttgataaaccgcgatcacaggttgccgcaccttaaaaccggaaacaacagctatcgttacttgatttcaagaatctctcaatttcttcctacttctttgtgtacgatttcttaagggaaagaaaatcactctctgtgctggccacagacttcgtgaatcattttcttttccactcttagttt

SEQ ID NO: 62869 - DNA, 283 bp, Glycine max
  Clone ID: 700761720H1
gggtacagctcacgctcgagccgaagttattatcaaataattaattaaattacgcgtggaatcttgttgaagccatgtctacagctggtcaggtcatcaagtgcagagctgcggtggcatgggaagcagggaagccactatcgatagaaaccatagaagtggcaccaccccagaaaggtgaagtgcgtttgaagatcctcttcaactccctttgccgtacagatgtttactggtgggatgctaagggccagactccgctgtttcctcgtatcttaggccacga

SEQ ID NO: 62870 - DNA, 287 bp, Glycine max
  Clone ID: 700761722H1
gagtctttgtggtggtgatgaaaaattgatgcgtgaaaggacacacctgctgttggcttgttgttcaaggatggcaatttgtaagaaagatatttggagagttgaatgtggaatcccttctggatttccgctcacagttatttgtaatagcatttttaatgagatgctcattagatatagctatgaaaaattactgcgccaggctaaagctccaagtatgtttttacaatccttcaaaaattttgtttctttgtgtgtgtatggtgatgataacttaattagtgttc

SEQ ID NO: 62871 - DNA, 287 bp, Glycine max
  Clone ID: 700761723H1
cttgcaacgattaacaatggcttcaaccgacaagtcaccggacccaacgccggcgaagggtccggatccaactccggggaagccgatgagtgttggtcagcacgtgatcgacaagagtgcaatgatggtgcagtcgctggaccccattaagcagatgagtcagcacgtgtgctccttcgctatctacagccatgacatgtctcgccagatagagacacatcactactgctccagactccaccagaacttcatacaatgtgctgtctatgattccgatgaatccaaag

SEQ ID NO: 62872 - DNA, 287 bp, Glycine max
  Clone ID: 700761724H1
atttcagtgagtgatcggtgttcacttgatctcatcataatcgtcagcgtcaattgaagaagatgccgatcagaaacatcgccgtcggaaggcctgaagaggcgactcaccccgacacgttgaaggcggctttggctgagttcatctcaaccttcatcttcgtgttcgccggctcaggctccggcatcgcctacaacaagctcaccgacaacggcgctgccacccctgccggcctcatctccgcctccatcgcccatgcattcgccctcttcgtcgccgtctccgtc

SEQ ID NO: 62873 - DNA, 283 bp, Glycine max
  Clone ID: 700761726H1
gaaagatttgttggagggaaatttttcctttgatattaaatctcgctctagattggaaaaagtttcctctacaaaagcacaatttgttagtggaaaaaccttcaaatatgatataattggtgctggttcacattcttcagaagattttcctgaaaaggaagatcaagaaaaacccaaaaagattgatgccagattgagacaaagaatagatcctcaatacaatgaggttcaggctcagatggaaacaaatttgtttaaattgtctcttgatgatgttgaaact

SEQ ID NO: 62874 - DNA, 281 bp, Glycine max
  Clone ID: 700761727H1
ggatggccttcggcgataaaacggattcgatatggggacgagatgattgttggaattcctaccgagtggtctgttgtggaggatctaccagaaggacctgctgttaaaattggtgagaacaaagatgcaatggatggttggtttagacttgagagagtttctgatgatgaattcaataactataagcttgtgttctgtccacagcaagctgaggatgacaaatgtggggatattgggattagtattgatcatgatgatggaaccaggcgtttggtggtgtc

SEQ ID NO: 62875 - DNA, 278 bp, Glycine max
  Clone ID: 700761728H1
ggtggaataagagcagccccaacgggaaatgaaagatgccctctcactgtggtgcaatctcgcaatgagctcgacaaagggattggaacaatcatctcgtccccatatcgaatccgttttatcgccgaaggcatcctttgagccttaagttcgattcatttgcagttataatgctgttcgttggaattcctaccgagtggtctgttgtggaggatctaccagaaggacctgctgttaaaattggtgagaacaaagatgcaatggatggttggtttaga

SEQ ID NO: 62876 - DNA, 272 bp, Glycine max
  Clone ID: 700761729H1
caatatcctagtataccttaatagataatttaagatactatgatgagagcacggttcccattactgttgctgggacttgttttcctggcttcagtttctgtctcatttggcattgcttactgggaaaaagagaaccccaaacacaacaagtgtctccagagttgcaatagcgagagagactcgtacaggaaccaagcatgccacgctcgttgcaacctccttaaggtggagaaagaagaatgtgaagaaggtgaaattccacgaccacgacc

SEQ ID NO: 62877 - DNA, 273 bp, Glycine max
  Clone ID: 700761730H1
aggcattcctgctgatgttcttgcaaagcgagctcatgaatttgaaaaacatgttgctcatgaaagcctcaaggatcaaattcctgctgttgacaagttgtattctactaaggttaataagtttgcaaaaattatgaaccttagacaaagtgttgttggtgatcttaaacttcttactgatgggaagttgtatgagggtaagcatattcctgtatctaatattagtgcaggggagaatcatgtagttcaaatacccctaatggcacaggagga

SEQ ID NO: 62878 - DNA, 279 bp, Glycine max
  Clone ID: 700761731H1
atcgatttggttacataaaaagagctatgcatggcaccaaaatgttatctactcgagctgttagtgagatgtatgggagagaactggtggacctgcgaaaggagagtcgatgggagtttctcaatacactgttttctgtgtctgaagctgtggcctacatgcagatggttgacagattggatgatgaaactataccagcagatcttgctcttgattataaagggctatataaggctgttggaaaagctctcttctgggcacatgttgaaggtcgtctta

SEQ ID NO: 62879 - DNA, 274 bp, Glycine max
  unsure (1)..(274): unsure at all n locations
  Clone ID: 700761732H1
aggaaccaagcatgccacgctcgttgcaacctccttaaggtggaggaagaagaagaatgcgaagaaggtcaaattccacgaccacgaccacaacacccggagagggaacgtcagcaacacggtgagaaggaggaagacgaaggtgagcagccacgtccattcccattcccacgcccacgccaacctcatcaagaggaagagcacgagcagaaggaggaacacgaatggcatcgcaaggaggaaaaacacggagganagggaagtgaagaggaac

SEQ ID NO: 62880 - DNA, 246 bp, Glycine max
  Clone ID: 700761733H1
caatatgttgtcctctacaggaatggaatttactctccacattggaacttgaacgcgaacagtgtgatctatgtgactcgagggaaaggaagagttagagtggtgaactgccaagggaatgcagtgttcgacggtgagctaaggaggggacaattgctagtggtgccgcagaactttgtggtggctgagcaagggggagaacaaggattggaatacgtatgttcaagacacaccacaacccgtgag

SEQ ID NO: 62881 - DNA, 283 bp, Glycine max
  Clone ID: 700761734H1
aaaaaataccaaccatggcaaccatttctactgatcaaccaagaggatcctactcctatggaacctcctatggagcaccctatggaaccacctatgagaccaacagcagcattaacaaccctccttcacgccaaaccgtgaagttcataactgctgcaactattggcatcacactcttactcctgtctgggttgaccctcacaggcactgtcataggtttgatcattgcaacccctcttcttgttatcttcagccccatccttgtcgctgctgcgtttgtgct

SEQ ID NO: 62882 - DNA, 262 bp, Glycine max
  Clone ID: 700761735H1
ggtgaatgcacctattgcaagtctgaagagagcaacctgtgtgagcttctcaagatcaacactgacagaggagtgatgctcagtgatggcaaaacaaggttctccaaaaatggacaacctatttaccacttcgttggaacctccactttcagtgaatacactgttctccatgaaggatgtgtcgccaagatcaaccctgctgcccctcttgacaaagttgctgttgtcagttgtgggatctgcacaggtttggggctactgt

SEQ ID NO: 62883 - DNA, 283 bp, Glycine max
  Clone ID: 700761737H1
ctcgaccgcacttatacaaaattctccaattagtaacttgttgagagttgctgcttggaagaaaggctgtttaatggttaagattgtgatgtctgggaatgcagcagtcaaaaggagtgattgggcctcattggtacaagtgtttttaacaaacagcaacagtacagagcattttgatgcatgtaagtggacaaaatcggaaccacattcctgggaattgatcttcccaatagaggtatgtggtcctaataatggttttgaaatgtggagttctgagtgggca

SEQ ID NO: 62884 - DNA, 284 bp, Glycine max
  Clone ID: 700761738H1
ctaacctaactcctctcgtcgtcacaaaaagtcttcttctccgatcgttacgatgttggaactccgtctcgtgcaaggttcccttctgaagaaggttctggaatcgatcaaggagctcgtaaacgacgcgaacttcgactgctcctccaccgggttctccctccaggccatggattccagccacgtcgccatcgttgcgctcctcctccggtccgagggctttgagcactaccgctgcgaccgcaatacctccatgggcatgaacctcaacaacatggccaaga

SEQ ID NO: 62885 - DNA, 264 bp, Glycine max
  Clone ID: 700761740H1
gagaaactttaagcagatgtctaatgttttgtgggtagctcctgaggacaaggcgagtttatggtcacaacttcattatgtttcgtgtaataatctggacatgcaagaagcttatcttgtcaatctcgtaaatgtgttacgagaattgtatttgcacagtccagaggaagctcgccaattgaggaggaaagctctctctcgtattgaatggctgcaaaaagctgatgtgcctaccatagcacagattgaagagttccattcgat

SEQ ID NO: 62886 - DNA, 282 bp, Glycine max
  Clone ID: 700761741H1
ataaaattcttccaccaagttatgggtttccttgtgttgcttcttttctccctcttatgtctctcttctagttccagcatatcaactcatcgttccatatcggaccttgacctaaccaagtttaccacacagaaacaggtgtcttcactgttccaactatggaagagtgagcatggacgtgtctaccataaccacgaagaagaggcaaagagacttgtagattttcaagaataacttgaactatatcagggacatgaatgccaacagaaaatcaccccattc

SEQ ID NO: 62887 - DNA, 272 bp, Glycine max
  Clone ID: 700761742H1
cggctcgaggtgcgatcacacagtatggccagggattttaggagcaccacagctaggaagcacaggttttgaacttgtgaagggaggttctaaaagcttccaggctccgaccggttggtccggtagattctggggcagaaccggttgccaattcgacggttcgggaaaaggaacgtgcgccaccgccgactgctgctccggcgaggtcaactgcaacggtgccggagcctctccgccggccacgctcgccgagttcacgcttggcaacggct

SEQ ID NO: 62888 - DNA, 244 bp, Glycine max
  Clone ID: 700761743H1
tgccctcaggctgaagacatcatcaaagaacaagtcaagcttctctacaagcgccacaagaacactgctttctcctggctcagaaacatcttccatgactgtgctgttcagagttgtgatgcttcactgttgctggactccacaagaaggagcttgtctgagaaggaaacagatagaagctttgggttgagaaatttcaggtacattgagaccatcaaagaagctttggaaagggaatgcccag

SEQ ID NO: 62889 - DNA, 263 bp, Glycine max
  Clone ID: 700761744H1
actgccaaaggatgtttggagtgatagaattcctgattttcatcttctggatcaagctgaacaatctgctaaaaggcaaaagctgaaaatctgggagaattttgttgaaggagaggaagtatctaatggtgcagcagttgagaacaaacagcaagaagtacttaaggtaattgttacggaagtcttgggtggtggtacattccatgttcagacagttggagatccaaagattgcatccatcagcaacagcttgcttctttgaa

SEQ ID NO: 62890 - DNA, 276 bp, Glycine max
  Clone ID: 700761745H1
cccttttattgaaatcctgagcttccattgtgctcactcatctcttacaacgaaaccctcttcatcttgttctatctgtgacgagcatcatggcctcaagagcagtgttattgttggctatgtgtgtgcttccggcgatggttgtggccattcgcccagcaaagaaccctttttgcgtgaagggtcgtgtctactgtgacccttgccgtgctggttttgagtactcagctaccacctacattgctggtgctgagattatgttgcaatgcaagagca

SEQ ID NO: 62891 - DNA, 233 bp, Glycine max
  Clone ID: 700761747H1
acttattaacactttccttagttcaatatggggaagcccttcttcactctctctctttcttccctttgcttgctactcttgtcgagtgcatgctttgctattacctccagcaagttcaacgagtgccaactcaacaacctcaacgcgttggaacccgaccaccgcgttgagtccgaagtggtcttattgaaacatggaactctcaacaccctgagctgcaatgcgccggtgtc

SEQ ID NO: 62892 - DNA, 285 bp, Glycine max
  Clone ID: 700761748H1
aggctcgagggcaaaaggagatttgtttctggggatggtgaagagatgacattgattccgggaaccagtgttgaagaggcttacaacaagctaatagttgaacttgagaaaagtgttcctacattggttggcattgaatgtcccaaggatgagaaacttcctcgtcgcaaaatttttgacaaacctaagacgcgctgcttcactattctccctatggagtttaatcttgtggttcgtcagaatttttaaattttgtgaggttcattatgaagaaaagggacaagc

SEQ ID NO: 62893 - DNA, 275 bp, Glycine max
  Clone ID: 700761749H1
atgatatagttggtgctggttcacattcttcagaagatttttctgaaaaggaagatcaagaaaaacccaaaaagattgatgccagattgagacaaagaatagatcctcaatacaatgaggttcaggctcagatggaaacaaatttgtttaaattgtctcttgatgatgttgaaactcctaaaggttccatgttggatcttaaaatttctcaatctaaaattgcacttcccaaaaacacagttggaaagaaccattctgcgtagtgacctattggc

SEQ ID NO: 62894 - DNA, 279 bp, Glycine max
  Clone ID: 700761750H1
aggggagagtccatgttaggaacaaaagttcatgaatatggagcgttgacgctaccggcaccacccaatattattcccgaggaagaagaaaacattgccattgccatgggtgcccctcttatcccttcctttaaatccatgcttgaacaacaccctcaacaacttgactcttactttaactcttcaattagttctactactatcccttttgttcctaacatggactcttttctctctcttgaccctttctcaccttctttcttcaacaacagcagcagc

SEQ ID NO: 62895 - DNA, 249 bp, Glycine max
  Clone ID: 700761751H1
taacactttccttagttcaatatggggaagcccttcttcactctctctctttcttccctttgcttgctactcttgtcgagtgcatgctttgctattacctccagcaagttcaacgagagccaactcaacaacctcaacgcgttggaacccgaccaccgcgttgagtccgaaggtggtcttattgaaacatggaactctcaacaccctgagctgcaatgcgccggtgtcactgtttccaaacgcaccctc

SEQ ID NO: 62896 - DNA, 280 bp, Glycine max
  Clone ID: 700761752H1
agtttgttgttcctcactgacctcaccaaggcgaccagagccaagctttctttagctatcttccatttctaacttttagccttgatttcaaacctagccttgggcaaacttaaagaaaccgaggtcgaagaagatcccgagctcgtaacatgcaaacaccagtgccaacagcaacggcaatacactgagagtgacaagcgaacatgcttgcaacaatgtgacagtatgaagcaagagcgagagaaacaagtcgaagaggaaactcgcgagaaggaagaag

SEQ ID NO: 62897 - DNA, 280 bp, Glycine max
  Clone ID: 700761753H1
gaaccagtgttgaagaggcttacaacaagctaacagttgaacttgagaaaagtgttcctacattggttgtcactgaatgtcccaaggatgaaaaacttcctcgtcgcaaagtttttgataaacctaagacgcgctgcttcactattctccctatggagtttaatcttgtggttcgtcagaagtttttaaattttgtgaggttcattctgaagaaaagggacaagcttagttgtcaagttggaatcaacccatattctatggaatggactggtttggccaa

SEQ ID NO: 62898 - DNA, 277 bp, Glycine max
  Clone ID: 700761754H1
atcaaaaccccagagtattttaccttgctgggaacccagatatagagcacccagagaccatgcaacaacagcagcagcagaagagtcatggtggacgcaagcaggggcaacaccagcagcaggaggaagaaggtggcagtgtgctcagtggcttcagcaaacatttcttagcacaatccttcaacaccaacgaggacaaagctgagaaacttcggtctccagatgacgaaaggaagcagatcgtgacagtggagggaggcctcagcgttatcagccc

SEQ ID NO: 62899 - DNA, 269 bp, Glycine max
  Clone ID: 700761755H1
cactcatcaccatggccaagcttgttctttccgtttgtttccttcttttcagtggctgcttcgctctgagagagcaggcacagcaaaatgagtgccagatccaaaagctgaatgccctcaaaccggataaccgtatagagtcggaaggtgggttcattgagacctggaaccctaacaacaagccattccagtgtgccggtgttgcactctctcgctgcacccttaaccgcaatgcccttcgtagaccttcctacaccaacggtcccagg

SEQ ID NO: 62900 - DNA, 280 bp, Glycine max
  Clone ID: 700761756H1
ctcgagccgcttattaacactttccttagttcaatatggggaagcccttcttcactctctctctttcttccctttgcttgctactcttgtcgagtgcatgctttgctattacctccagcaagttcaacgagtgccaactcaacaacctcaacgcgttggaacccgaccaccgcgttgagtccgaaggtggtcttattgaaacatggaactctcaacaccctgagctgcaatgcgccggtgtcactgtttccaaacgcaccctcaactgcaacggcctcca

SEQ ID NO: 62901 - DNA, 279 bp, Glycine max
  Clone ID: 700761757H1
attttgataaaccgcgatcacaggttgccgcaccttaaaaccggaaacaaaagcaatcgttacttgatttcaagaatttctcaatttctttctacttctttgtgtacgatttcttaagggaaagaaaatcactctctgtgctggccacagacttcgtgaatcattttcttttccacttttagtttatttgctgaacactctcctatttgatataggacttcgtgtcagatttaaacttcttctgtttctttctcagttctctgttcaatttcaagttca

SEQ ID NO: 62902 - DNA, 261 bp, Glycine max
  Clone ID: 700761758H1
gatagaccctcgatcggaaaccttgcaggggcaaactcattgttgaacgcattgccagaggaagtgattcagcacacttttaacctaaagagccagcaggccaggcaggtgaagaacaacaaccctttcagcttcctggttccacctcaggagtctcagaggagagctgtggcttagagagccctttttgcatgtgctaccacacttttgtccttttgggctctagctagtgctggtagcagtacataagaatgaataaaa

SEQ ID NO: 62903 - DNA, 277 bp, Glycine max
  Clone ID: 700761759H1
ctctccattgtctttgaacactcatcaccatggccaagcttgttctttccctttgtttccttcttttcagtggctgcttcgctctgagagagcaggcacagcaaaatgagtgccagatccaaaagctgaatgccctcaaaccggataaccgtatagagtcggaaggtgggttcattgagacctggaaccctaacaacaagccattccagtgtgccggtgttgcactctctcgctgcacccttaaccgcaatgcccttcgtagaccttcctacaccaa

SEQ ID NO: 62904 - DNA, 269 bp, Glycine max
  Clone ID: 700761760H1
agtcgacgattcggtcggttatcaaactaggagtggcaattaaggatacgtcaaccccacatggagttcgtcttctgatagaggactatccttatgccgctgatggactggagatatgggctgcaattaagacatgggttcaagaatatgtgcccttgtactatgcaagagatgatgatgtcaaaaatgattctgaactccaacattggtggaaagaagctgtagagaaaggccatggtgatttgaaagacaagcctggtggcctaagt

SEQ ID NO: 62905 - DNA, 276 bp, Glycine max
  Clone ID: 700761761H1
ctcgagccgtaaaattcttccaccaagttatgggtttccttgtgttgcttcttttctccctcttaggtctctcttctagttccagcatatcaactcatcgttccatattggaccttgacctaaccaagtttaccacacagaaacaggtgtcttcactgttccaactatggaagagtgagcatggacgtgtctaccataaccacgaagaagaggcaaagagacttgagattttcaagaataacttgaactatatcagggacatgaatgcgaacagaa

SEQ ID NO: 62906 - DNA, 261 bp, Glycine max
  Clone ID: 700761763H1
gttaaatcaaaatacttaatagcatggcgatacatttatacaaaacttctaccccaagcacacgcaatggagccgtagacagtcaagtaaaatccaatccacgaaatcatttgatctatggacagcatcgttgtggtaaaggccgtaatgccagaggaatcattaccgcaggcatagagggggaggtcataagcgtctataccgtaaaattgattttcgacggaatgaaaaaaacatatatggtagaatcgtaaccataga

SEQ ID NO: 62907 - DNA, 72 bp, Glycine max
  Clone ID: 700761764H1
tatcactccttctcgatctcaaaacgttgacactcgtcgtacactaaggcccaatcaaaatggtgatgctca

SEQ ID NO: 62908 - DNA, 170 bp, Glycine max
  unsure (1)..(170): unsure at all n locations
  Clone ID: 700761766H1
ctcttcttctcttgcggctanggttttagcgccgtcttctagatttaaggtagatgggtaaggaaaaggttcacatcagtattgtggtcattggccatgtcgactctgggaaatccactacgactggtcacctgatttacaagcttggaggcattgacaagcgtgttatt

SEQ ID NO: 62909 - DNA, 153 bp, Glycine max
  Clone ID: 700761768H1
ggagaaccagctgttggtgtcaataatagaaacggcaacaacaggagtgtcttcaagctgttggtgtcaataatagatcctgcaacaacaggtgtgtcttcattgttgtacatccaccatgaagacactcctgttgttgccgtttctattatt

SEQ ID NO: 62910 - DNA, 277 bp, Glycine max
  Clone ID: 700761769H1
ctcgacgaattcggctcggtctcttaacgtagttcacgacctctcctttcaagatgcagatcttcgtcaagaccctcaccggaaagaccatcacccttgaggtggaaagctctgacaccatcgacaacgtcaaggccaagatccaggacaaggaaggaattcccccggatcagcaacgtctcatcttcgccggaaagcagctcgaggacggccgtaccctcgccgactacaacatccagaaggagtcaacccttcaccttgtccttcgtctccgtgg

SEQ ID NO: 62911 - DNA, 232 bp, Glycine max
  Clone ID: 700761771H1
gaacttcagaatctccgagactaccgcattttggagttcaactccaaacccaacaccctccttctccccaaccatgctgatcctgattacctcatcgttatccttaacgggactgccattctttccttggtgaacaacgacgacagagactcctacagacttcaatctggtgatggcctgagagtcccctcaggaaccacatactatgtggtcaaccctgacaacaacgaaa

SEQ ID NO: 62912 - DNA, 259 bp, Glycine max
  Clone ID: 700761772H1
ttttgtcaattctctattgatcttcttggtggaggattttagtggacaaaactggagattggatcacacttatacaaaattctccaattagtaacttgttgagagttgctgcttggaagaaaggctgtttaatggttaagattgtgatgtctgggaatgcagcagtcaaaaggagtgattgggcctcattggtacaagtgtttttaacaaacagcaacagtacagagcttttgatgcatgtagtggacaaatcggaaca

SEQ ID NO: 62913 - DNA, 276 bp, Glycine max
  unsure (1)..(276): unsure at all n locations
  Clone ID: 700761773H1
gccggctggtcatggtttgagatcccgcaccagagattccttctctcgtcctttcaggaagaagggaaccatcgccctcaccacatacctgagaacctaccacgtcggcgactatgttgacgtcaaggttaacggtgccgttcacaagggaatgccccacaaattctaccatggccgcaccggacgcgtctggaatgtcaccanacgtgctgttggcgtcgaagtcaacaagcaggttggcaacagaattataaggaagaggattcatgtgcgggt

SEQ ID NO: 62914 - DNA, 270 bp, Glycine max
  Clone ID: 700761775H1
cacacaagatgcttgtactgggagggaaagcttatcctcccatttgctgatcaattttggtttaggtatctgtatggctggttgatgccacccaaggtttctctcctcaaggcaactcaaggtgatgctataagaaactattaccatgaaatgcatgtcatccaggacatgcttgttcctttgtacaaggtgggagaggctttagaatgggttcaccgtgagatggaggtataccccatttggctctgcacacacaaattgttcaagctg

SEQ ID NO: 62915 - DNA, 259 bp, Glycine max
  Clone ID: 700761776H1
tcaatatcttagtataccttaataaataatttaagatactatgatgagagcacggttcccattactgttgctgaaacttgttttcctggcttcagtttctgtctcatttggcaatgcttactgggaaaaagagaaccccaaacacaacaagtgtctccagagttgcaatagcgagagagactcgtacaggataccagcatgccacgctcgttgcaacctccttaaggtggagaaagaggatgtgaagaggtgaattcca

SEQ ID NO: 62916 - DNA, 177 bp, Glycine max
  Clone ID: 700761777H1
aaaaggtacatcgcttcagagagggtgatttgatcgcagtgcctactggtgttgcatggtggatgtacaacaatgaagacactcctgttgttgccgtttctattattgacaccaacagcttggagaacccactcgaccagatgcctaggagattctatcttgctgggaaccaagagc

SEQ ID NO: 62917 - DNA, 270 bp, Glycine max
  Clone ID: 700761778H1
cacacaagatgcttgtactgggagggaaagcttatcctcccatttgctgatcaattttggtttaggtatctgtttggctggttgatgccacccaaggtttctctcctcaaggcaactcaaggtgatgctataagaaactattaccatgaaatgcatgtcatccaggacatgcttgttcctttgtacaaggtgggagaggctttagaatgggttcaccgtgagatggaggtataccccatttggctctgcccacacaaattgttcaagctg

SEQ ID NO: 62918 - DNA, 236 bp, Glycine max
  Clone ID: 700761779H1
cacaaaacgtagcaagagcaggtacaaacgttcagtgttgttttttcaattcagattcagaaggagacaatggaagaacccgtgaaggaacagcccctctctgctgggaactctgcgcgacccaagcttcagagatacgcgcttcgttacgtctctaaatccaaggaaaacaagcaagacaccgcacccgatctctccatttcttctgaatctaagagggggttaagtactccaca

SEQ ID NO: 62919 - DNA, 124 bp, Glycine max
  Clone ID: 700761781H1
catttttcttccaatcagaagcaataatgagcacatgactgaggacatgttctgtgatgaattccatcttgttgatctcagggtcatgaataactggctcaaggttacagagggggttgatcat

SEQ ID NO: 62920 - DNA, 274 bp, Glycine max
  Clone ID: 700761782H1
gctggttcacattcttcagaagattattctgaacaggaagatcaagaaaaacccaaaaagattgatgccagattgagacaaagaatagatcctcaatacaatgaggttcaggctcagatggaaacaaatttgtttaaattgtctcttgatgatgttgaaactcctaaaggttccatgttggatcttaaaatttctcaatctaaaattgcacttcccaataggtcactacgcagaatggttcctccaactgtgtttttgggaaattttttgacag

SEQ ID NO: 62921 - DNA, 267 bp, Glycine max
  Clone ID: 700761783H1
cttcaaatatgatataattggtgctggttcacattcttcagaagattttcctgaaaaggaagatcaagataaacccaaaaagattgatgccagattgagacaaagaatagatcctcaatacaatgaggttcaggctcagatggaaacaaatttgtttaaattgtctcttgatgatgttgaaactcctaaaggttccatgttggatctgaaaatttctcaatctaaaattgcacttcccaagaacacagttggaggaaccattctgcg

SEQ ID NO: 62922 - DNA, 275 bp, Glycine max
  Clone ID: 700761784H1
gtggtagtggacgtggtggtttacctaccactgcttggattagttctgcagttaacaatcgctcctcagatatcaacaaaaagattcgcacagcacttgggaaaggtaagaaaattgtttttcttactagagttgatccttttccagtagctctactggctgttctttttggcgttaagaatgaaattctgagttccaacgccactaaccctatgctgacgcgacttcttgagaactgtaagagtctcaaatatctggttgatgagtgtcctttt

SEQ ID NO: 62923 - DNA, 274 bp, Glycine max
  Clone ID: 700761785H1
aaaattcttccaccaagttatgggtttccttgtgttgcttcttttctccctcttaggtctctcttctagttccagcatatcaactcatcgttccatattggaccttgacctaaccaagtttaccacacagaaacaggtgtcttcactgttcgaactatggaagagtgagcatggacgtgtctgccataaccacgaagaagaggcaaagagacttgagattttcaagaataacttgaactatatcagggacatgaatgcaaacagaaaatcaccc

SEQ ID NO: 62924 - DNA, 187 bp, Glycine max
  Clone ID: 700761786H1
ctcatagtgagcgaggaaagtatcgggctatttaactatgacttgacgtccatctatgaataaataaatcagcatatgatgcttatgttttacacaaaacaaaagcatcatatgctgatttatttattcatagatggagctcaagtcatagttaaataaatcagcatatgatgcttttgttttgtgt

SEQ ID NO: 62925 - DNA, 275 bp, Glycine max
  Clone ID: 700761788H1
cacaggttgccgcaccttaaaaccggaaacaaaagcaatcgttacttgatttcaagaatctctcaatttcttcctacttctttgtgtacgatttcttaagggaaagaaaatcactctctgtgctggccacagacttcgtgaatcattttcttttccactcttagtttattagatgaacactctcctatttgatataggacttcgtgtcagatttaaacttcttctgtttctttctcagttctctgtttaatttcaagttcaactgggtgaaatct

SEQ ID NO: 62926 - DNA, 273 bp, Glycine max
  Clone ID: 700761789H1
tgcttcaacttgctccctcagaagcgaagaagaagccacagagaaccagtctcctactctctctcacccacaagaaaaatggcatctcacatcgttggatacccccgcatgggtcccaagagagagctcaagttcgctctcgagtctttctgggatggcaagagcagcgccgaggatttgcagaaggtggctgctgatctcaggtcatccatctggaagcagatggctggtgctgggatcaagtacatccccagcaacactttctcgttctat

SEQ ID NO: 62927 - DNA, 170 bp, Glycine max
  Clone ID: 700761790H1
tgaaatgcaaaatttggtggccatttagcaatgagtccaaatgtattgttagtgtggtgaactagatagtgatgcaccctttcctcccttatttttttcaagttaataataatttttttttgcttattacttccatatttatttattttataataattgttttttgctct

SEQ ID NO: 62928 - DNA, 264 bp, Glycine max
  Clone ID: 700761791H1
gaccaccgcgttgagtccgaagtggtcttattgaaacatggaactctcaacaccctgagctgcaatgcgccggtgtcactgtttccaaacgcaccctcaaccgcaacggcctccacttgccatcttactcaccttatccccaaatgatcattgtcgttcaagggaagggagcaattggatttgcatttccgggatgtcctgagacgtttgagaagccacaacagcaatcaagcagaagaggctcaaagtcgcagcagcaactac

SEQ ID NO: 62929 - DNA, 265 bp, Glycine max
  unsure (1)..(265): unsure at all n locations
  Clone ID: 700761792H1
atcccaaacagtctacagtttttgatattctcttgggaatttctcaagattttgaaattgctggtaacactcttatgccagctttttctgttccacaggctactgccagatcttctgaaaatgcggaatcctctgcatgatctggaatttgtgttttcttttgcttgttcgtttgtttaattcaataaaggaaattaggcatgacgctcttgttgagtatgctctgcctatttgaaaatttccacactcttntaattgtcgtaat

SEQ ID NO: 62930 - DNA, 174 bp, Glycine max
  Clone ID: 700761793H1
gaataagaacccttttctcttcggctctaacaggttcgaaactctcttcaaaaaccaatatggtcgcattcgcgtcctccagaggttcagccaacgctccccacaacttcagaatgcccgagactaccgcattttggagttcaactccaaacccaacaccctccttctccccaa

SEQ ID NO: 62931 - DNA, 170 bp, Glycine max
  Clone ID: 700761794H1
gcaatatgttgcctcaacccgtgaggtaaacctgcaagttatccaaaaatgtttgccctgattgattggctacggcatcaaatccctcttgaagatacttcaggagcaacaggaggtctggttcatggagattttcgcattgacaatcttgtgttccatcccacagagga

SEQ ID NO: 62932 - DNA, 140 bp, Glycine max
  Clone ID: 700761795H1
gtcatgggaaacaaaactacccttttgcttttgctctttgttctttgccatggagtggccacaacaacaatggccttccatgatgatgagggtggtgataaaaagtcaccaaaaagtttgtttttgatgagcaactccac

SEQ ID NO: 62933 - DNA, 261 bp, Glycine max
  Clone ID: 700761809H1
gaacacagttggaggaactattctgcgtagtgcaattttagattgagacaaagaatagatcctcaatacaatgaggttcaggctcagatggaaacaaatttgtttaaattgtctcttgatgatgttgaaactcctaaaggttccatgttggatcttaaaatttctcagtctaaaattgcacttcccaagaacacagttggaggaactattctgcgtagtgatctattggcaaattttctgaccaaggggcaattttagagc

SEQ ID NO: 62934 - DNA, 162 bp, Glycine max
  Clone ID: 700761811H1
acttcgtgtcagatttaaacttcttctgtttctttctcagttctctgcttaatttcaagttcaagctggtgacatcttggattagtgctctcactcttctatctggtataggacttcgtgggtagacttttccatttctctcctttctttcactctcttctt

SEQ ID NO: 62935 - DNA, 235 bp, Glycine max
  Clone ID: 700761812H1
gagcgatttagaagtgagagaagatggggttgtcgttcacgaagctgttcagcaggttgtttgcgaagaaggaaatgaggattctgatggtaggtctcgatgctgctggtaagacaaccatcttgtacaagctcaagcttggagaaatcgtcaccactatccccaccatcggatttaatgttgagactgtggagtacaagaacatcagcttcactgtgtgggatgttggtggtca

SEQ ID NO: 62936 - DNA, 192 bp, Glycine max
  Clone ID: 700761813H1
tctcgagccgaatcggctcgacttattaacactttccttagttacatatggggaagcccagtcttcactctctctctttactccctttgcttgctactcttgtcgagtgcatgctttgctattacctccagcaagttcaacgagtgccaactcaacaacctcaacgcgttggaacccgaccaccgcgttgag

SEQ ID NO: 62937 - DNA, 201 bp, Glycine max
  Clone ID: 700761814H1
ggatgatgaatgctcctgattcaaatgataatattgatctactgttgagcattgatttgttgggtttacaaggagcaggtaaagcttttccaaacaagattgtttttgatgataagcttgtgttggctaacacacaagaattctttgatggaaattttccagtggattcttggttaccaatttttgtgaattgtctttatc

SEQ ID NO: 62938 - DNA, 179 bp, Glycine max
  Clone ID: 700761815H1
gaaattttgataaaccgcgatcacaggttgccgcaccttaaaaccggaaacaaaagcaatcgttacttgatttcaagaatttctcaatttctttctacttctttgtgtacgatttcttaagggaaagacaatcactctctgtgctggccacagacttcgtgaatcattttcttttccac

SEQ ID NO: 62939 - DNA, 198 bp, Glycine max
  Clone ID: 700761816H1
agacttattaacactttccttagttcaatatggggaagcccttcttcactctctctctttctaccctttgcttgatactcttgtcgagtgcatgctttgctattacctccagcaagttcaacgagtgccaagtcaacaacctcaacgcgttgtaacacgaccaccgcgttgagtccgaagtgggtcttattgaaacat

SEQ ID NO: 62940 - DNA, 177 bp, Glycine max
  unsure (1)..(177): unsure at all n locations
  Clone ID: 700761817H1
atttgaaattttgataaaccgctatcacaggttgccgcaccttaaaaccggaaacaaaagcaatcgttacttgatttcaagaatctctcaatttcttcctacttctttgtgtacgatttcttaagggaaaganaatcactctctgtgctggccacagacttcgtgaatcattttctt

SEQ ID NO: 62941 - DNA, 245 bp, Glycine max
  Clone ID: 700761818H1
acaccaacgaggacacagctgagaaacttcggtctccagatgacgaaaggaagcagatcgtgacagtggagggaggcctcagcgttatcagccccaagtggcaagaacaagaagacgaagacgaagatgaagacgaagaatatgaacaaactccctcttatcctccacgacgaccaagccatggaaagcatgaagatgacgaggacgaggacgaagaagaagatcaacctccgtctgatcaccct

SEQ ID NO: 62942 - DNA, 271 bp, Glycine max
  Clone ID: 700761819H1
tagtagtgttggtgggttgcaaagatgcttgggggtcttctccataggggtcataagataaaagggacagtggtgttgatgcgcaagaatgtgttggacgtgaatagcgtaaccagcgttgggggaattattggtcaaggtctcgacttagttggctcaacactcgatactcttactgccttcttgggccgatccgtgtctctccagcttattagtgctaccaaagctgatgccaacggaaaagggaaacttggaaaggctacctttttgg

SEQ ID NO: 62943 - DNA, 205 bp, Glycine max
  Clone ID: 700761820H1
cactcatcaccatggccaagcttgttctttccctttgtttccttcttttcagtggctgcttcgctctgagagagcaggcacagcaaaatgagtgccagatccaaaagctgaatgccctcaaaccggataaccgtatagagtcggaaggtgggttcattgagacctggaaccctaacaacaagcaattccagtgtgccggtgttgc

SEQ ID NO: 62944 - DNA, 220 bp, Glycine max
  Clone ID: 700761821H1
ctcgtctttgaagtttctaagatgacttctccctacattaaatgtacagtctctttcttcatagcatttggaaatttggctgatgacaccatcaattttgaggcttttccccacaagctggtgcagtttggagagattcaggaaaaagttgtattgaaattttcacaagaggaatttcttacagcttggtcaactcaggtgcgtcctggaaacaactctg

SEQ ID NO: 62945 - DNA, 203 bp, Glycine max
  Clone ID: 700761822H1
gtaagggcaacgatattctgtgttgcgattatgctagttttgatggtttgattaccaagcaagttatgagcaagatggcagaaatgataaacagtctttgtggtggtgatgaaaaattgatgcgtgaaaggacacacctgctcttggcttgttgttcaaggatggcaatttgtaagaaagatgtttggagaattgaatgtgga

SEQ ID NO: 62946 - DNA, 201 bp, Glycine max
  Clone ID: 700761823H1
gcatcaagcaaccaacacaaactgatttctcatttcgtagcatcaaccgctaactatccagatactaattttcgctttggtttggttcaattctgtccgcagacatggttttcaggccaatgagtggtaattggttagcactgttaagaaacagttatggaggtaaagccgcgtacgcaacttcaacagcaccaagttgaa

SEQ ID NO: 62947 - DNA, 272 bp, Glycine max
  Clone ID: 700761824H1
gggatgaggcaaggttgtttccagggagaggtagttcacatttttctcttacagagataaaaaagaaattaaagcatgctatgggaaaggagagacatcgaaaccctgaagggatctcaaaaagacaccctgctgctgaatgtcaaaataagtggcctaccagcaaagccattggtaaagacaatgttggaatgagatctcctaataaagaccacttcttcattgaaaaaattgcaagacctaccactggtgctatgcaaggagacaagact

SEQ ID NO: 62948 - DNA, 180 bp, Glycine max
  Clone ID: 700761825H1
gtaattaacctcactcaaactcgggatcacagaaaccaacaacagttcttgcactgaggtttcacgatgttgctggaacttgcacttggtttgtttgtgttagctttgtttctgcacttgcgtcccacaccaagtgcaaaatcaaaagcactgcgcaacctcccaaaccctccagcccaa

SEQ ID NO: 62949 - DNA, 273 bp, Glycine max
  Clone ID: 700761826H1
tgaaaacgtggaagcacaccccagaccccacaccagtccccgtttgttccgctgcaaaacaaaaacaccgcgtcttccccgtgcggggaaaaagaaaagaaaagaaaagaaccctcaattttccgggaaaaccctccccacaatggtttcccgggaaaacaccaattggctcttcgattacggcttgatcgacgatattcccgttccggacgccaccttcggcgtcaattcctccgccttcacatggccccctaacgccttgaacgcttcctc

SEQ ID NO: 62950 - DNA, 236 bp, Glycine max
  Clone ID: 700761827H1
ctccattgtctttgaacactcatcaccatggccaagcttgttctttccctttgtttccttcttttcagtggctgcttcgctctgagagagcaggcacagcaaaatgagtgccagatccaaaagctgaatgccctcaaaccggataaccgtatagagtcggaaggtgggttcattgagacctggaaccctaacaacaagccattccagtgtgcgggtgtggccctctctggctgaac

SEQ ID NO: 62951 - DNA, 270 bp, Glycine max
  Clone ID: 700761830H1
aacttattaacactttccttagttcaatatggggaagcccttcttcactctctctctttcttccctttgcttgctactcttgtcgagtgcatgctttgctattacctccagcaagttcaacgagtgccaactcaacaacctcaacgcgttggaacccgaccaccgcgttgagtccgaaggtggtcttattgaaacatggaactctcaacaccctgagctgcaatgcgccggtgtcactgtttccaaacgcaccctcaaccgcaacggcct

SEQ ID NO: 62952 - DNA, 211 bp, Glycine max
  Clone ID: 700761831H1
gagcaagatggcagaaatgatcaacagtctttgtggtggtgatgaaaaactgatgcgtgaaaggacacacctgctgttggcttgttgttcaaggatggcaatttgtaagaaagatgtttggagagttgaatgtggaatcccttctggatttccgctcacagttatttgcaatagcatttttaatgagatgctcattagatatagctatgaa

SEQ ID NO: 62953 - DNA, 271 bp, Glycine max
  Clone ID: 700761832H1
gctaaacgaagaaaatcattccaatacacatggcttccgaaaggcaagcgttaatgcttattctcttaacaacattcttcttcaccataaagccttcacaggccagtactactggtggcataacaatctactggggccaaaacattgacgacggcaccttgacttccacatgcgacactggaaacttcgagattgtcgacctagctttcctcaatgcgtttggttgcggcataactccatcatggaatttcgctggccactgtggggactg

SEQ ID NO: 62954 - DNA, 215 bp, Glycine max
  Clone ID: 700761834H1
ctttgaacactcatcaccatggccaagcttgttctttccctttgtttccttcttttcagtggctgcttcgctctgagagagcaggcacagcaaaatgagtgccagatccaaaagctgaatgccctcaaaccggataaccgtatagagtcggaaggtgggttcattgagacctggaaccctaacaacaagccattccagtgtgccggtgttgccct

SEQ ID NO: 62955 - DNA, 260 bp, Glycine max
  Clone ID: 700761835H1
ctcgagccggccaaggttctcattacctatgatgcctccaccagcctcttggttgcttcattggtctacccttcacagagaaccagcaatatcctctccgatgtggtcgatttgaagacttctcttcccgagtgggtgaggatagggttctctgctgccacgggactcgacatacctggggaatcgcatgacgtgctttcttggtcttttgcttccaatttgccacacgctagcagtaacattgatcctttggatcttac

SEQ ID NO: 62956 - DNA, 243 bp, Glycine max
  Clone ID: 700761837H1
acaagatctccatatctgttcccaaaagcttgtttgtaagaatggcttccggtgaacagaaattccctcctcaacaacaacaaacacagcctgggaaggagcatgctatgactccagtaccccaattcactagccctgactacaagccttcaaataaacttcaagggaagattgcattagtcactgggggtgattctgggattggacgaccggtgtgtaacttgtttgcctaagaaggtgcta

SEQ ID NO: 62957 - DNA, 195 bp, Glycine max
  Clone ID: 700761839H1
cagctcaattctgtggattgttttgattgccttgttagggagtatctttacatctgcctatattgttgtgcaatttctgaagttgtcatctcaagaatcttcacaggatcctatgtattatgttctgttgcggcatccaaacaagaatggcacagcaccacaaagacagcgttcatctgttgtgactctaagaat

SEQ ID NO: 62958 - DNA, 220 bp, Glycine max
  Clone ID: 700761843H1
tctcgagccgaatcggctcgagcggctcgagtatcaccattactgaaggtattgacaaaactagtgcaactttgcaatttagaaagttagcagattgtgattttctcaagagaaactttaggcagatgtctaatgttttgtgggtggctcctgaggacaaggcgagtttatggtcacaacttcattatgtttcatgtaataatcctggaatgcaagaggc

SEQ ID NO: 62959 - DNA, 96 bp, Glycine max
  Clone ID: 700761844H1
ctgagccgaatcggctcgagattctctccattgtctttgaacactcatcaccatggccaagcatgttctttcccattgtttccttcatttcagtgg

SEQ ID NO: 62960 - DNA, 231 bp, Glycine max
  Clone ID: 700761845H1
gcgttatcagccccaagtggcaagaacaataagatgaagatgaagatgaagacgaagatgatgaagatgaacaaattccctctcaccctcctcgccgaccaagccatggaaagcgtgaacaagacgaggacgaggacgaagatgaagataaacctcgtcctagtcgaccaagccaaggaaagcgtgaacaagaccaggaccaggacgaggacgaagatgaagatgaggatc

SEQ ID NO: 62961 - DNA, 249 bp, Glycine max
  Clone ID: 700761846H1
caagttattatcaaataattaattaaattcctcgtggaatcttgttgaagccatgtctacagctggtcaggtcatcaagtgcagagctgcggtggcatgggaagcagggaagccactatcgatagaaaccatagaagtggcaccaccccagaaaggtgaagtgcgtttgaagatcctcttctactccctttgccgtacagatgtttactggtgggatgctaagggccagactccgctgtttcctcgtat

SEQ ID NO: 62962 - DNA, 207 bp, Glycine max
  Clone ID: 700761847H1
gcagcaaacatctttaccttaaacgacaacaatggccgatgccgaggatattcaacccctcgtttgcgataatggaaccggaatggtcaaggctggttttgccggagatgatgcgccgagggcggtgttccccagcattgtggggcgtccacgtcacacgggagtgatggttgggatggggcagaaggatgcgtatgttggggacga

SEQ ID NO: 62963 - DNA, 109 bp, Glycine max
  Clone ID: 700761849H1
ctcgcaagcaaaaagaaagaatcccaggcgaggagaaagatggaggggaaggagcaggatgtgtcgttgggagcgaacaagttccccgagagacagccgattgggacgg

SEQ ID NO: 62964 - DNA, 269 bp, Glycine max
  Clone ID: 700761850H1
gataatattgatctactgttgagcattgatttgttgggtttacaaggagcaggtaaagcttttccaaacaagattgtttttgatgataaacttgtgctggctaacacacaagaattctttgctggaaattttccagtggattcttggttaccaatttttgtgaattgtctttatcctgtaagtcaattaccttcagaagctgtcgttgtaaatgttacatgtggtagtggacgtggtggtttacctaccactgcttggattagttctgc

SEQ ID NO: 62965 - DNA, 247 bp, Glycine max
  Clone ID: 700761851H1
ggctcgagaagtcttccatagccccccaaaaatgaagagcaccatcttctttgctctctttctcttttgtgccttcaccacctcatacctaccttcagccatcgctgatttcgtgctcgataatgaaggtaaccctcttgaaaatggtggcacatattatatcttgtcagacataacagcatttggtggaataagagcagcaccaacggtaaatgaaagatgccctctcactgtggtgcaatctcgc

SEQ ID NO: 62966 - DNA, 109 bp, Glycine max
  Clone ID: 700761853H1
gttcaatatcctagtacaccgtattaaagaatttaagatatactatgatgagagcgcggttcccattactgttgctgggagttgttttcacggcatcagtttctgtctc

SEQ ID NO: 62967 - DNA, 125 bp, Glycine max
  Clone ID: 700761854H1
attgattctctcattcagccatttgaatcattagctgctggaggttctgaatcatctgcaagataccttcaagccttggggcatagctctagaaatgggcctctggaagattcttcctttccaca

SEQ ID NO: 62968 - DNA, 163 bp, Glycine max
  Clone ID: 700761855H1
aaccttgctctatactacacagtacacacactagaagaataatggcttccatcctccactactttttagccctctctctttcttgctcttttcttttcttcttatccgactcagtcacccctacaaaaccaataaaccttgttgttctacccgttcaaaatga

SEQ ID NO: 62969 - DNA, 229 bp, Glycine max
  Clone ID: 700761856H1
cgtgaaggaagtctcttcttacttgaagaaggttggttacaacccagacaagattccctttgttcccatctctggttttgagggtgacaacatgattgagaggtccaccaaccttgactggtacaagggaccaactctccttgaggctcttgaccaaatcaatgagcccaagaggccctccgacaagcctctaaggctccattgcaggatgcctaaagattggtggtat

SEQ ID NO: 62970 - DNA, 205 bp, Glycine max
  Clone ID: 700761857H1
gagcttgccaacgcaaacgtatcgagccagcctcacaagctagggttcttcaccgcgctccacccttcttccctctaccttcgtcccctccaattggaatgtgtttgtgacttcatatgctggtagttgacattttgaaattgtaactgtggtgggagcaataatatattttgacatcatcatggagatacagacttgtgggagg

SEQ ID NO: 62971 - DNA, 222 bp, Glycine max
  Clone ID: 700761858H1
agtttatggtatttgcatgctcagattcgagagtttgtccatctcatattctggatttccaaccgggtgaggcctttatggtccgaaacattgccaacatggttcccccatatgacaagacgaagtattcaggagcaggggctgccatagaatatgcagtgttgcatttaaaggtggagaatattgtagttattggacacagttgctgtggaggtataaagg

SEQ ID NO: 62972 - DNA, 189 bp, Glycine max
  Clone ID: 700761859H1
tctgcttaatcgaactattcagattctaaaaaatgagttggtggtgggctggagcaatcggtgctgccaagaagaaattcgaggaagaggaaccgccgcgaagcttccagagcgtgggcctggtgatcggcgtgacgggcatcgtgggcaacagcctcgccgagatcctccctctcgccgaaaccccgc

SEQ ID NO: 62973 - DNA, 126 bp, Glycine max
  Clone ID: 700761860H1
atcgagccgaatcggctcgagtgttcaccaattaagctttcaagagtcaaactgctttgaagaatgggatccaaggttgtcgcatccgttgcccttctcctctccatcaacattcttttcatttcc

SEQ ID NO: 62974 - DNA, 161 bp, Glycine max
  Clone ID: 700761862H1
tgaaattttgataaaccgcgatcacaggttgctgcaccttaaaaccggaaacaacatccatcgttatttgatttcaagaatttctcaatttctttctacttctttgtgtacgatttcttcagggaaagcaaatcactctctgtgctggccacagacttcgt

SEQ ID NO: 62975 - DNA, 263 bp, Glycine max
  Clone ID: 700761864H1
gtgaattgtggaatcctgcttgcacaaaagcaatgactatgtcatttaatccaaacccgtgttctgatgcatggagtttggaatttctgaagcgtactggatttcattgcgatatcatttgtgtcactggatggactgccaccccaatgcaggatgttcaggttacaattgattggtttatttcctctcaggaatgtgttcccaggacctattgtggtttaaatccacaaaatccttttgtgttaaataggtggatggggaaa

SEQ ID NO: 62976 - DNA, 187 bp, Glycine max
  Clone ID: 700761865H1
agcatacaagaagtagtgatatgcctggagagaatcgaagtaaaggcaggagctgtgcaggacaagataggtatgaccgagacttggttgaagaagccacgacttctttccactggcgacccgagacaccctcttattattagcattcgcgatggcaccatcaacactgcttccttcaaaacatggc

SEQ ID NO: 62977 - DNA, 199 bp, Glycine max
  Clone ID: 700761868H1
taaacactcatcagtcatcaccatggccaagctagttttttccctttgttttctgcttttcagtggctgctgcttcgacttcagttccagagagcagcctcagtaaaacgagtgccagatccaaaaactcaatgccctcaaaccggataaccgtatagagtcagaaggagggctcattgagacatggaaccctaacaac

SEQ ID NO: 62978 - DNA, 224 bp, Glycine max
  Clone ID: 700761869H1
gctccatccacctttttcaccaacccgcatcacaaccatccaacggcgcaaaaaccttagaaggtgactgcacccttgcactctaccgcaccagaaaactttccatctcccttatcctgtgctcatcgctacggccgccactgtaaccacaatgacggaagagcctgaaaccaatccaccgccgccggaaccttcaatcccatccgaaccggccgccgtggaag

SEQ ID NO: 62979 - DNA, 229 bp, Glycine max
  Clone ID: 700761870H1
ttttaaattttgtgaggttcattatgaagaaaagggacaagcttagttgtcaagttggaatcaacccatattctatggaatggactggtttggccaatagattactgagtaagggcaacgatattctgtgttgcgattatgctagttttgatggtttgattaccaagcaagttatgagcaagatggcagaaatgatcaacagtctttgtggtggtgatgaaaaatgatg

SEQ ID NO: 62980 - DNA, 173 bp, Glycine max
  Clone ID: 700761871H1
tctcgagccgctcgagccgattcggctcgagatttgttgggtttacaaggagcaggtaaagatgttccaaaatagattgtttttgatgataagcttgtgttggctaacacacaagaattctttgatggaaattttccagtggattcttggttaccaatttttgtgaattgtct

SEQ ID NO: 62981 - DNA, 241 bp, Glycine max
  Clone ID: 700761872H1
tagatcctcaatacaatgaggttcaggctcagatggaaacaaatttgtttaaattgtctcttgatgatgttgaaactcctaaaggttccatgttggatctgaaaatttctcaatctaaaattgcacttcccaagaacacagttggaggaaccattctgcgtagtgatctattggcaaattttttgacagagggcaattttagagcaagtgttgatttgcagcgcactcatcgtattagagg

SEQ ID NO: 62982 - DNA, 194 bp, Glycine max
  Clone ID: 700761873H1
tctcgagccgattcggctcgagaaagaattcctcttgccacatctgagggttttcctcatgtagtttcacgcaaaaatggtgctaaaggcaaaaggagatttgtttctggggatggtgaagagatgacattgattccgggaaccagtgttgaagaggcttacaacaagctaatagttgaacttgagaaaagtgt

SEQ ID NO: 62983 - DNA, 231 bp, Glycine max
  Clone ID: 700761874H1
atcggaaaccttgcaggggcaaactcattgttgaacgcattgccagaggaagtgattcagcacacttttaacctaaagagccagcaggccaggcaggtgaagaacaacaaccctttcagcttcctggttccacctcaggagtctcagaggagagctgtggcttagagagccctttttgcatgtgctaccacacttttgtccttttgggctctagctagtgctggtagcagt

SEQ ID NO: 62984 - DNA, 213 bp, Glycine max
  Clone ID: 700761875H1
gtctttgaacactcatcaccatggccaagcttgttctttccctttgtttccttcttttcagtggctgcttcgctctgagagagcaggcacagcaaaatgagtgccagatccaaaagctgaatgccctcaaaccggataaccgtatagagtcggaaggtgggttcattgagacctggaaccctaacaacaagccattccagtgtgccggtgttg

SEQ ID NO: 62985 - DNA, 142 bp, Glycine max
  Clone ID: 700761876H1
ctcgagcgaatcggtcactcgacgcgcggatcaactcaaaccgcaattttcactagctgttttagtgtcacgtaacttttatattttaaagtaagctaattgaagacatgacttgcaagtcgaagcacagcaaatgtgcaac

SEQ ID NO: 62986 - DNA, 148 bp, Glycine max
  Clone ID: 700761877H1
aaaattcttccaccaagttatgggtttccttgtgttgcttcttttctccctcttaggtctctcttctagttccagcatatcaactcatcgttccatattggaccttgacctaaccaagtttaccacacagaaacaggtgtcttcactg

SEQ ID NO: 62987 - DNA, 254 bp, Glycine max; identical to SEQ ID NO: 59499
  Clone ID: 700761878H1

SEQ ID NO: 62988 - DNA, 149 bp, Glycine max
  Clone ID: 700761880H1
ctcttcgagggtttgggattctcttcctcccttggagaaaaagaagagccaccgctgcgacgccgttcgtgcatttttgaggtgccgctgtcatgtttgggcgtggtggaccaaggaggagtgataactccaaatattatgatattctc

SEQ ID NO: 62989 - DNA, 171 bp, Glycine max
  Clone ID: 700761881H1
aaaccgcgatcacaggttgccgcaccttaaaaccggaaacaaaagcaatcgttacttgatttcaagaatctctcaatttcttcctacttctttgtgtacgatttcttaagggaaagaaaatcactctctgtgctggccacagacttcgtgaatcattttcttttccacaca

SEQ ID NO: 62990 - DNA, 189 bp, Glycine max
  Clone ID: 700761883H1
tgctcattagatatagctatgaaaaattactgcgccaggctaaagctccaagtatgtttttacaatctttcaaaaattttgtttctttgtgtgtgtatggtgatgataacttaattagtgttcatgaatatgtcaagccttactttagtggttctaaattgaaaagctttctagctggtcataatatca

SEQ ID NO: 62991 - DNA, 207 bp, Glycine max
  Clone ID: 700761884H1
tgctcagtagatatagctatgacaaattactgcgccaggctaaagctccaagtatgtgttgacaatctttcaaaaattttgtgtctttgtgtgtgtatggtgatgataacttaattagtgttcatgcatatgtcaagccttactttagtggttctaaattgaaaagctttctagctggtcataatatcaccattactgatggtattg

SEQ ID NO: 62992 - DNA, 81 bp, Glycine max
  Clone ID: 700761886H1
ctcgagcctgggaacattttagaggcctcctacgataccaaattcgaggagataaacaaggttctgtttagtagagaggaa

SEQ ID NO: 62993 - DNA, 193 bp, Glycine max
  Clone ID: 700761888H1
ctcattctccatacctcaacgaagaggttaaagagacggcaacactttgctgtccgccttgaccgagcagagcttcgtcttggccctcgattttgccctaaagtactctcagtcacaacagacaccgtcgtcgtcgtcgtcgtcatcaatggcaccgaagcagaccaaggctgagaagaagatcgcttacgat

SEQ ID NO: 62994 - DNA, 192 bp, Glycine max
  Clone ID: 700761889H1
gttcaatatcctagtataccttaataaataatttaagatactatgatgagagcacggttcccattactgttgctgggacttgttttcctggcttcagtttctgtctcatttggcattgcttactgggaaaaagagaaccccaaacacaacaagtgtctccagagttgcaatagcgagagagactcgtacagg

SEQ ID NO: 62995 - DNA, 188 bp, Glycine max
  Clone ID: 700761891H1
attcaaaccttgctctatactacacagtacacacactagaagaataatggcttccatcctccactactttttagccctctctctttcttgctcttttcttttcttcttatccgactcagtcacccctacaaaaccaataaaccttgttgttctacccgttcaaaatgatggttccacagggctccatt

SEQ ID NO: 62996 - DNA, 176 bp, Glycine max
  Clone ID: 700761892H1
gggtttccttgtgttgcttcttttctccctcttaggtctctcttctagttccagcatatcaactcatcgttccatattggaccttgacctaaccaagtttaccacacagaaacaggtgtcttcactgttccaactatggaagagtgagcatggacgtgtctaccataaccacgaag

SEQ ID NO: 62997 - DNA, 103 bp, Glycine max
  Clone ID: 700761893H1
cggctcgagtgagtgactagtgccttaaatgggatgtgtgtgggcagtggttcagctctttatagattgttggcctgccacaaccaaaactgtacctcactca

SEQ ID NO: 62998 - DNA, 239 bp, Glycine max
  Clone ID: 700761894H1
cactcctgttgttgccgtttctattattgacaccaacagcttggagaaccagctcgaccagatgcctaggagattctatcttgctgggaaccaagagcaagagtttctaaaatatcagcaagagcaaggaggtcatcaaagccagaaaggaaagcatcagcaagaagaagaaaacgaaggaggcagcatattgagtggcttcaccctggaattcttggaacatgcattcagcgtggaca

SEQ ID NO: 62999 - DNA, 71 bp, Glycine max
  Clone ID: 700761895H1
cttttacaggctccgatactctctctctctaaactctttctctctcctctgaccccctccataccccgctt

SEQ ID NO: 63000 - DNA, 255 bp, Glycine max
  unsure (1)..(255): unsure at all n locations
  Clone ID: 700761896H1
agagccaaaagtggtggtgagttggagtctgctcaagcaaagaatcaggcactaagggatgctggagctgttgttcccacatcatatgaagcttttgaagtttcaattaaggaaacatttgataaattggttgaagatgggaagatcacaccaatcaaggaaatcacacctccaccaatccctgaggaccttagtactgcaattaagagtggnaaagtccgtgctccaactcatattatttccaccatttctgat

SEQ ID NO: 63001 - DNA, 238 bp, Glycine max
  Clone ID: 700761901H1
tatcgagcgattcggctcgagccaaggatgaaaaacttcctcatcgcaaagtttttgataaacctaagacgcgctgcttcactattctccctatggagtttaatcttgtggttcgtcagaagtttttaaattttgtgaggttcattatgaagaaaagggacaagcttagttgtcaagttggaatcaacccatattctatggaatggactggtttggcaatagattactgagtaagggc

SEQ ID NO: 63002 - DNA, 235 bp, Glycine max
  Clone ID: 700761902H1
attggtccttaaacactcatcagtcatcaccatggccaagctagttttttccctttgttttctgcttttcagtggctgctgcttcgctttcagttccagagagcagcctcagcaaaacgagtgccagatccaaaaactcaatgccctcaaaccggataaccgtatagagtcagaaggagggctcattgagacatgagcctaataaaagccattccagtgttgcccgttgtttgcc

SEQ ID NO: 63003 - DNA, 237 bp, Glycine max
  Clone ID: 700761903H1
gggaaacaaaactacccttttgcttttgctctttgttctttgccatggagtggccacaacaacaatggccttccatgatgatgagggtggtgataaaaagtcaccaaaaagtttgtttttgatgagcaactccacgagggttttcaagactgatgcaggggaaatgcgtgtgctgaaaaccaaggggggtaggatatttataggcactgcacattgggcttcatctctatggaacca

SEQ ID NO: 63004 - DNA, 240 bp, Glycine max
  Clone ID: 700761904H1
ctcgagcgtggaaagcgtgaacaagacgaggacgaggacgaagatgaagataaacctgcgtcctagtcgaccaagccaaggaaagcgtgaacaagaccaggaccaggacgaggacgaagagaaagatgaagatcaacctcgcaagagccgcgaatggagatcgaaaaagacacaacccagaagacctagacaagaagaaccacgtgaaagaggatgcgagacaagaaacggggttgagga

SEQ ID NO: 63005 - DNA, 239 bp, Glycine max
  Clone ID: 700761905H1
atacaagtcatttgtgacagagtatccaattgtttcaattgaggatccttttgaccaggatgactgggagcactatgctaagcttactgctgaggttggaaccaatgtacaaattgttggtgatgatctcttggttaccaaccccaagagggttcagaaggcaattgatacaaaagcatgcaatgctcttctccttaaggtcaaccaaattggttctgtgactgagagtattgaagctg

SEQ ID NO: 63006 - DNA, 236 bp, Glycine max
  Clone ID: 700761907H1
cagaaaggattttgtgtccattgaatttagacgctagcgtactgaaacctagcccggacgtgttcctgttaagaaaatcggattgaatatcggcgacaggtccgaagattaagtgtaggtttcgtttttggctcaaacagaaacgcataccaacgcgcaaattgatcgctgctggaggcggcatgcactagcttccggggccttgcttgcagataggtcttcgtttttctgctgaa

SEQ ID NO: 63007 - DNA, 240 bp, Glycine max
  Clone ID: 700761908H1
gaaaaacccaaaaagattgatgccagattgagacaaagaatagatcctcaatacaatgaggttcaggctcagatggaaacaaatttgtttaaattgtctcttgatgatgttgaaactcctaaaggttccatgttggatcttaaaatttctcagtctaaaattgcacttcccaagaacacagttggaggaactattctgcgtagtgatctattggcaaattttctgacagagggcaatttt

SEQ ID NO: 63008 - DNA, 242 bp, Glycine max
  Clone ID: 700761909H1
gacagcatcaagcaaccaacacaaactgatttctcatttcgtagcatcaactgctaactatccagatactaattttcgctttggtttggttcaattctgtccgcagacatggttttcaggccaatgagtggtaattggttagcactgttaagaaacagttatggaggtaaagccgcgtacgcaacctcaacagcaccaaagatgaaagcgtatgcagctgcggctgattacggacacaagca

SEQ ID NO: 63009 - DNA, 241 bp, Glycine max
  Clone ID: 700761910H1
taccagttcaatatcctagtacaccgtattaaagaatttaagatatactatgatgagagcgcggttcccattactgttgctgggagttgttttcctggcatcagtttctgtctcatttggcattgcgtattgggaaaagcagaaccccagtcacaacaagtgcctccgaagttgcaatagcgagaaagactcctacaggaaccaagcatgccacgctcgttgcaacctccttaaggtggag

SEQ ID NO: 63010 - DNA, 243 bp, Glycine max
  Clone ID: 700761911H1
catggcttcttcactgtcttccgttatcaaccaacctcacttagctcaacgcctcaagcttcaccgtccatcctctcttaccactttcacaatcttccaccacaaacacaaacaccaacaccgacacaatgcttcgtttccacacccttatacctcattgcctcgctcacgccctctcaatctcatcatcgcctccagaaccttctctccttccaatactctccaccttcacttcattcctca

SEQ ID NO: 63011 - DNA, 242 bp, Glycine max
  Clone ID: 700761914H1
cggctcgaggataaaactactctcatcagagagtgcagcagaagcagaagatggagactctgaaagctgcaattccagaaaacctgaagcgaccgataggggatagcgatgtcgatgaccttcgcagcacatgctcttctcttcaccgcttctttctccacttccacccatttcaccagctgatcactgaactcgcagatccaaagtatgctctgtgcgccaagaacaaggacgctgcgttg

SEQ ID NO: 63012 - DNA, 243 bp, Glycine max
  Clone ID: 700761915H1
gctttgctcagggatgtgatggttcaattctgattgagaatggtccacaatcggagagacatgcatttggacatcagggggttagagggtttgaagtgatagaaagagcaaaggcacaattggaaggctcttgccccggcttggtttcttgtgcagacatagtggctttggcagccagagacgctgtagtcatggcaaatgggccagcatatcaagttccaacagggaggagagatgggttgg

SEQ ID NO: 63013 - DNA, 242 bp, Glycine max
  Clone ID: 700761916H1
ggactggtctggccaatagattactgagtaagggcaatgatattctgtgttgcgattatgctagttttgatggtttgattaccaagcaagttatgagcaagatggcagaaatgataaacagtctttgtggtggtgatgaaaaattgatgcgtgaaaggacgcacctgctgttggcttgttgttcaaggatggcaatttgtaagaaagatgtttggagagttgaatgtggaatcccttctgga

SEQ ID NO: 63014 - DNA, 234 bp, Glycine max
  Clone ID: 700761917H1
gccactctatggatatggtagatttacttgccagtgatgatagtaacatgtctgaaatatttactcaaaaacataaagaatataaactttgttcagctaattcatctcaagctgatcctactattcatttggacacttcagtgaattttaaccaagatcggggattcaaaaacagtgatacaactcaaaaaagagaagtgattgatgcattggaagccaacataacaagccaat

SEQ ID NO: 63015 - DNA, 65 bp, Glycine max
  Clone ID: 700761918H1
gcaaattttgagattagcgattgaatgaaaatttgaatcataagctcggcccatagttgcaactt

SEQ ID NO: 63016 - DNA, 237 bp, Glycine max
  Clone ID: 700761920H1
aaaaaagccccagcaaccttttccccttataatattatccttgcgggttgcgaggggatagggatagggatagggatggagaaagtgaaggtgcatcggcgactcctcgagacaccaggggttcaccaggggccagcctgtttcgacgctctgggtgcgaactcatagaatccgctggcttcccctactgcatcaccagtggcttctccatcgccgcttccaggttggctctgcccg

SEQ ID NO: 63017 - DNA, 236 bp, Glycine max
  Clone ID: 700761921H1
tctagacaagatctccatatctgttcccaaaagcttgtttgtaagaatggcttccggtgaacagaaattccctcctcaacaacaacaaacacagcctgggaaggagcatgctatgactccagtaccccaattcactagccctgactacaagccttcaaataaacttcaagggaagattgcattagtcactgggggtgattctgggattggacgagcggtgtgtaacttgtttgcct

SEQ ID NO: 63018 - DNA, 235 bp, Glycine max
  Clone ID: 700761922H1
ccaaatattcttcgtcctcccgctcgctcttctcactcgtcatcttcgaattcgtctgcgccctaacaaaattcatttcaattccaactcctctgatcaaaatcctaggctcgttcttgaatccctaattcgatctcctcctcctcctccgaagaataaaaggaggatcgatgtgggcagtatcttgcctggcgtcgtgctgcgcggcctgcgcatgcgacgcctgcaggaccgt

SEQ ID NO: 63019 - DNA, 238 bp, Glycine max
  Clone ID: 700761924H1
actagttcaatatcctagtataccttaataaataatttaagatactatgatgagagcacggttcccattactgttgctgggacttgttttcctggcttcagtttctgtctcatttggcattgcttactgggaaaaagagaaccccaaacacaacaagtgtctccagagttgcaatagcgagagagactcgtacaggaaccaagcatgccacgctcgttgcaaactccttaaggtggag

SEQ ID NO: 63020 - DNA, 239 bp, Glycine max
  Clone ID: 700761925H1
tctcgagccgaatcggctcgagcttctctctcaacaacttcaccatcttcctcctcgatcatgtctcacttcaagggcaagtaccatgatgagcttatcgccaatgctgcgtacattggcactcctggaaagggtattcttgctgctgatgagtcaacagggacaattggcaagcgtttggccagcatcagtgtagagaacattgaatccaacaggcgagctcttagggagctgctttt

SEQ ID NO: 63021 - DNA, 237 bp, Glycine max
  Clone ID: 700761926H1
taaacttttccctacaccaaaatcatctcttcactaatggaaggtggactaaagggaagctcattacaagatatgaagcttttgtttgttgaaatgggtgttggctatgaccttcatggtcaggacataacagctgccgcaatgagagcatgcagagatgcaatttctgccaattcaattccagctttccgtaaaggtagcatccctggtgttacatctgatcacatgaaattacat

SEQ ID NO: 63022 - DNA, 235 bp, Glycine max
  Clone ID: 700761927H1
tgaacactcatcaccatggccaagcttgttctttccctttgtttccttcttttcagtggctgcttcgctctgagagagcaggcacagcaaaatgagtgccagatccaaaagctgaatgccctcaaaccggataaccgtatagagtcggaaggtgggttcattgagacctggaaccctaacaacaagccattccagtgtgccggtgttgccctctctcgctgcacccttaaccgca

SEQ ID NO: 63023 - DNA, 238 bp, Glycine max
  Clone ID: 700761930H1
ccaggatgtcctgagacgtttgaggagccacaagaacaatcaaacagaagaggctcaaggtcgcagaagcagcagctacaggacagtcaccagaagattcgtcacttcaatgaaggagacgtactcgtgattcctcctggtgttccttactggacctataacactggcgatgaaccagttgttgccatcagtcttcttgacacctctaacttcaataaccagcttgatcaaaccccta

SEQ ID NO: 63024 - DNA, 240 bp, Glycine max
  Clone ID: 700761931H1
ataatttaagatactatgatgagagcacggttcccattactgttgctgggacttgttttcctggcttcagtttctgtctcatttggcattgcttactgggaaaaagagaaccccaaacacaacaagtgtctccagagttgcaatagcgagagagactcgtacaggaaccaagcatgccacgctcgttgcaacctccttaaggtggagaaagaagaatgtgaagaaggtgaaattccacga

SEQ ID NO: 63025 - DNA, 241 bp, Glycine max
  Clone ID: 700761932H1
caagactatggttgaagatgatgacaaggaagtggttgctcaagcttgcactagtgtggctgacatcattagagattatggttatgcaactcttgagccttacttgtcccagcttgttgatgcaacttcattgttgcttcgggagcaatctgcctgtcagcagatagagtcagacagtgaaattgatgatgttgacagtgcacatgatgaagtgcttatggatgcagtttcagatcttctc

SEQ ID NO: 63026 - DNA, 237 bp, Glycine max
  Clone ID: 700761934H1
gcaaatggtctcatcaatgccatttacaaccctcaagctggtagcatcacaaccgccaccagccttgacttcccagccctctggcttctcaaactcagtgcccagtatggatcactccgcaagaatgctatgttcgtgccacactacaccctgaacgcgaacagcataatatacgcattgaatgggcgattagtacagtggtgaattgaccatggttgaaaagagtgtttgatggag

SEQ ID NO: 63027 - DNA, 234 bp, Glycine max
  Clone ID: 700761935H1
tgaccactcatcaccatggacaagcttgtacgtccccattgtttccttcttttcagtggctgcatcgctctgagagagcaggcacagcacaatgagtgacagatccagaagctgaatgccctcacaccggacagccgtatagagtcggaaggtgggttcattgagacctggagccctaacaacaagccattccagtgtgccggtgttgcactctctcgctgcacgcttaaccgc

SEQ ID NO: 63028 - DNA, 262 bp, Glycine max
  Clone ID: 700761305H1
cgcagagcatgggttgaaggccagatgtctttcgatcagtctgtagtagcaattatgtctaaatgcaaagccagcatgagaatgggaaacactgatgctcatattttgatggttccagggcgcagattcatagctcatggacattttttcaaaaatctgactcagaaagtgcgagtccaaattgttacatctgaaaagagttactggcatgtgtatgatcctgacaagtttcagatgtttgacaacagtgaaataggcttta

SEQ ID NO: 63029 - DNA, 262 bp, Glycine max
  Clone ID: 700761306H1
gttaaagttaatgtagcatgtgctgctgttggcttgacatcaagttacactccaactccattgttggaatctggtttgcaaaaagacagagggttaattgtggaatattttggaaggatgtcttacgttgctcataacgttaatcagccccaagagaaagatttgttggagggaaatttttcctttgatattaaatctcgctctagattggaaaaagtttcctctacaaaagcacaatttgttagtggaaaaacctcaaata

SEQ ID NO: 63030 - DNA, 175 bp, Glycine max
  Clone ID: 700761307H1
gaaattttgataaaccgcgatcacaggttgccgcaccttaaaaccggaaacaaaagcaatcgttacttgatttcaagaatctcttaatttcttcctacttctttgtgtacgatttcttaagggaaagaaaatcactctctgtgctggccacagacttcgtgaatcattttctttt

SEQ ID NO: 63031 - DNA, 107 bp, Glycine max
  Clone ID: 700761308H1
tttagatggaaggaagaaagtgtaataagacgactctcactactcgatcgctagtgattgtcattgttatatataataatgttatctttcacaacttatcgtaatgc

SEQ ID NO: 63032 - DNA, 265 bp, Glycine max
  Clone ID: 700761309H1
ggaaccacatactatgtggtcaacctgacaacaacgaaaatctcagattaataacactcgccatacccgttaacaagcctggtagatttgagagtttcttcctatctagcactgaagctcaacaatcctacttgcaaggattcagcaggaacattttagaggcctcctacgataccaaattcgaggagataaacaaggttctgtttagtagagaggaagggcagcagcaaggggagcagaggctgcaagagagcgtgattgtgga

SEQ ID NO: 63033 - DNA, 263 bp, Glycine max
  Clone ID: 700761310H1
attatggtggcgagagttggtatacctgagcatacaggtatatcagtggcctgtgctatgaatagttcttttacaggggcgtgccagttctgatatttacagcatctgctctcaagactgtggattatggaatcctgcttgcacaaaagcaatgactatgtcatgtaatccagacccgtgttctgatgcgtggagtttggtatttctgaagcgtaccggatttcagtgtgatatcatttgtgtcactggatggacgtgactcc

SEQ ID NO: 63034 - DNA, 262 bp, Glycine max
  Clone ID: 700761312H1
acgtttgagggagaagagaagttttgtgcaaaatccttgggaacagtaattggttttgccatttcaaagctgggaaagaacattcaagtactttcaagttcctttgtcaataagcaagagcaatacactgtggaaggagtgcagaatcttggagacaaagcagtgatgtgtcatgggctaaatttcagaactgcagtattttactgccataaagtccgtgaaacaacagctttcatggttccattggtggctggtgaggaac

SEQ ID NO: 63035 - DNA, 267 bp, Glycine max
  Clone ID: 700761313H1
attgtctttgaacactcatcaccatggccaagcttgttctttccctttgtttccttcttttcagtggctgcttcgctctgagagagcaggcacagcaaaatgagtgccagatccaaaagctgaatgccctcaaaccggataaccgtatagagtcggaaggtgggttcattgagacctggaaccctaacaacaagccattccagtgtgccggtgttgccctctctcgctgcacccttaaccgcaatgcccttcgtagacctcctacac

SEQ ID NO: 63036 - DNA, 268 bp, Glycine max
  Clone ID: 700761315H1
cggtgcaagaaattctccactttatctaaaaaaattcggtgagtttgtgaagacaaaaaatcactagctactcaaaaatggccacagtaggaaggaacgttgcagctcctttgctgtttcttaacttgatcatgtattttattgttcttggctttgctagttggtgcctcaacaggttcatcaatggccaaacttaccaccctagttttggtggaaatggtgcaacatgtttttcttaaccttctccatactagcagctgtctgggca

SEQ ID NO: 63037 - DNA, 273 bp, Glycine max
  Clone ID: 700761316H1
tctacgagccgattcggctcgagtatacacacacacacacacactatgaataatggcttctatcctccactactttttagacctctctctttctttctctttccttttcttcttatccgactccgtccccattccccaacaccacactaaccctacaaaacctataaaccttctggttctacccgttcaaaatgatgcttccacagggctccattgggccaacctccaaaaaaggacccctctaatgcaagtaccagtcctggtggcctcaat

SEQ ID NO: 63038 - DNA, 254 bp, Glycine max
  Clone ID: 700761317H1
gcaatggttaaagttaatgtagcatgtgctgctgttggcttgacatcaagttacactccaactccattgttggaatctggtttgcacaaagacagagggctaattgtggaatattttggaaggatgtcttacgttgctcataacgttaatcagccccaagagaaagatttgttggagggaaatttttcctttgatattagatctcgctctagactggtacaagtttcctctacaatagcacaatttgttagtgg

SEQ ID NO: 63039 - DNA, 259 bp, Glycine max
  Clone ID: 700761318H1
acggtttcctttgttggtgttgctgggaactgttctcctggcatcagtttgtgactcattaaaggtgagagaggatgagaataaccctttctacttgagaagctctaacagcttccaaactctctttgagaaccaaaacggtcgcattcgtctcgtccagagattcaacaaacgctgcccacaacttgagaaccttcgagactaccggattgtccagtttcagtcaaaaccgaacagaatccttctcccccaccatgtg

SEQ ID NO: 63040 - DNA, 263 bp, Glycine max
  Clone ID: 700761319H1
aacttattaacactttccttagttcaatatggggaagcccttcttcactctctctctttcttccctttgcttgctactcttgtcgagtgcatgctttgctattacctccagcaagttcaacgagtgccaactcaacaacctcaacgcgttggaacccgaccaccgcgttgagtccgaaggtggtcttattgaaacatggaactctcaacaccctgagctgcaatgcgccggtgtcactgtttccaaacgcaccctaaccgcaa

SEQ ID NO: 63041 - DNA, 264 bp, Glycine max
  Clone ID: 700761320H1
aaaggattctacccgccgctcgatgggaattgcgcttcaaggcgtctcgtagggctaatccgcctcacgagggtcaccaacggcacgtgcctttggggggccgaggccccctactgctggtcggcaaacggacggcgggcgcacgcgtcgcttctagcccggattctgacttagaggcgttcagtcataatccaacgcacggtagcttcgcgccactggcatttcaaccaagcgcgatgaccaattgtgcgaatcaacggttcc

SEQ ID NO: 63042 - DNA, 262 bp, Glycine max
  Clone ID: 700761321H1
tacacacacacacacacactaagaataatggcttctatcctccactactttttagccctctctctttctttctctttccttttcttcttatccgactcattccccattccccaacaccacactaaccctacaaaacctataaaccttctggttctacccgttcaaaatgatgcttccacagggctccattgggccaacctccaaaaaaggacccctctaatgcaagtaccagtcctggtggacctcaatggaaacacttgtg

SEQ ID NO: 63043 - DNA, 256 bp, Glycine max
  Clone ID: 700761322H1
cattaataagcaacatgataccaccaatgcctacggcgtagacactggtagacagcattctagtggtggctacgatggtgacactaataaacatcatggaactactggtggctataatgatgacaccaatagacatcatggaactaccggtgtctatggtatagacaccgataggcaacaacatgggactactggtggctatgccggtgacactggtaggcaacatgggaacatcggtggcccttactatggacca

SEQ ID NO: 63044 - DNA, 263 bp, Glycine max
  Clone ID: 700761323H1
aaagaatttaagatatactatgatgagagcgcggttcccattactgttgctgggagttgttttcctggcatcagtttctgtctcatttggcattgcgtattgggaaaagcagaaccccagtcacaacaagtgcctccgaagttgcaatagcgagaaagactcctacaggaaccaagcatgccacgctcgttgcaacctccttaaggtggaggaagaagaagaatgcgaagaaggtcaaattccacgaccacgacccaacaccc

SEQ ID NO: 63045 - DNA, 260 bp, Glycine max
  Clone ID: 700761325H1
cgaagagaatggctcccaagggtttaatctttttggctgtgttatgcttctcagcactgtcactgagtcgttgtcttgcggaggataatggacttgttatgaacttctacaaggaatcatgccctcaggctgaagacatcatcaaagaacaagtcaagcttctctacaagcgccacaagaacactgctttctcctggctcagaaacatcttccatgactgtgctgttcagagttgtgatgcttcactgttgctggactcc

SEQ ID NO: 63046 - DNA, 162 bp, Glycine max
  Clone ID: 700761326H1
gaaattttgataaaccgcgatcacaggttgccgcaccttataaccggaaacaaaagcaatcgttacttgatttcaagaatctctcaatttcttcctacttctttgtgtacaatttcttaagggaaagaaaatcactctctgtgctggccacagacttcgtga

SEQ ID NO: 63047 - DNA, 260 bp, Glycine max
  unsure (1)..(260): unsure at all n locations
  Clone ID: 700761327H1
atttgaaattttgataaaccgcgatcacaggttgccgcaccttaaaaccggaaacaaaagcaatcgttacttgatttcaagaatctctcaatttcttcctacttctttgtgtacgatttcttaagggaaagaaaatcactctctgtgctggccacagacttcgtgaatcattttcttttccacacaacatacgatttcanaacactcncctanntgatataggacttcgtgtcagatttaaacttcttctgttttttctc

SEQ ID NO: 63048 - DNA, 263 bp, Glycine max
  Clone ID: 700761328H1
agcacttcacaacttgattagagctgcatggtatcattggaaagttgaatgagaaactaggatgagctgaaatgattcaagcccttcagttgctgcttagacttgtatctttccgaatttttgtgactaataatttatataggcatagagataatgttgttggttttggttgtgctagtgagaggctgacgtgaaatgatgaagtgatgcgagaatagtgtattagtaactttggaagagaacataatggacatgtgctagtg

SEQ ID NO: 63049 - DNA, 265 bp, Glycine max
  Clone ID: 700761329H1
gcggtttcctttgttggtgttgctgggaactgttttcctggcatcagtttgtgtctcattaaaggtgagagaggatgagaataaccctttctacttgagaagctctaacagcttccaaactctctttgagaaccaaaacggtcgcattcgtctcctccagagattcaacaaacgctccccacaacttgagaactatcgagactaccggattgtccagtttcagtcaaaacccaacacaatccttctcccccaccatgtgacgccg

SEQ ID NO: 63050 - DNA, 267 bp, Glycine max
  Clone ID: 700761330H1
gtccaatcccattcccacgccacaacctcgtcaagaagaagagcacgagcagagagaggaacaggaatggcctcgcaaggaggaaaaacgcggagaaaagggaagtgaagaggaagatgaggatgaggatgaggaacaagatgaacgtcaattcccattcccacgcccacctcatcagaaggaagagcgaaagcaagaggaagatgaggatgactagcagcagcgagagagcgaagaaagtgaagatactgagttacgaagacataa

SEQ ID NO: 63051 - DNA, 268 bp, Glycine max
  Clone ID: 700761331H1
agaggttcaacaaacgctcccaacagcttcagaatctccgagactaccgcattttggagttcaactccaaacccaacacccttcttctcccccaccatgctgacgctgattacctcatcgttatccttaacgggactgccattcttaccttggtgaacaacgacgaccgagactcatacaaccttcaatctggcgatgccctaagagtccctgcaggaaccacatactatgtggttaaccctgacaacgacgagaatctcgaatgata

SEQ ID NO: 63052 - DNA, 269 bp, Glycine max
  Clone ID: 700761332H1
ctcgagccgtgaagagcgaagagaatggctcccaagggtttaatctttttggctgtgttatgcttctcagcactgtcactgagtcgttgtcttgcggaggataatggacttgttatgaacttctacaaggaatcatgccctcaggctgaagacatcatcaaagaacaagtcaagcttctctacaagcgccacaagactactgctttctcctggctcagaaacatcttccatgactgtgctgttcagagttgtgatgcttcacgttgctg

SEQ ID NO: 63053 - DNA, 264 bp, Glycine max
  Clone ID: 700761333H1
atttctcacactcgcaagtgttaagcaactcacacatgaagcggcaaacaaagcacacagaaagtaaaaagcggaaattaaggagcggtggtgacggtggtagtgaataaataaaagcagcaccataccatggggggagaagaagtagcaagagtcaaagcagagttgttcgacgacaacgaaagcgatcgcaacgacgacgacgttttgagcgagagcaaggactcgggagtgacgacggctcacgcagtgaaagagagatgg

SEQ ID NO: 63054 - DNA, 263 bp, Glycine max
  Clone ID: 700761334H1
gttcaatatcctagtataccttaataaataatttaagatactatgatgagagcacggttcccattactgttgctgggacttgttttcctggcttcagtttctgtctcatttggcattgcttactgggaaaaagagaaccccaaacacaacaagtgtctccagagttgcaatagcgagagagtctcgtacaggaaccaagcatgccacgctcgttgcaacctccttaaggtggagaaagaagaatgtgaagaaggtaaattcca

SEQ ID NO: 63055 - DNA, 260 bp, Glycine max
  Clone ID: 700761335H1
gttcaatatcctagtacacgtattaaagaatttaagatatactatgatgagagcgcggttcccattactgttgctgggagttgttttcctggcatcagtttctgtctcatttggcattgcgtattgggaaaagcagaaccccagtcacaacaagtgcctccgaagttgcaatagcgagaaagactcctacaggaaccaagcatgccacgctcgttgcaacctccttaaggtggaggaagaagaagaatgcgagaaggtca

SEQ ID NO: 63056 - DNA, 114 bp, Glycine max
  Clone ID: 700761338H1
cttaataaataatttaagatactatgatgagagcacggttcccattactgttgcggggacttgttttcctggctgcagtttctgtctcatttggcattgcttactgggaaaaag

SEQ ID NO: 63057 - DNA, 259 bp, Glycine max
  Clone ID: 700761339H1
gttctacatagcatctcctttaccaccattctagatatcagagaactttgcagctctcttaggtttttaaaaaacaccacgcaaacagcaagatggccacttccgacagtaacatgctactaaattatgttccagtttatgtgatgctcccactcggagttgtcaatgttgacaatgtttttgaagatccagatggccttaaagaacagctcttgcagcttcgagctgcgggtgttgacggggttatggttatgtgtgg

SEQ ID NO: 63058 - DNA, 260 bp, Glycine max
  Clone ID: 700761340H1
ctcgagccggaagttttgtggtgtggtttagtgtcaaatggcggcgagtagaagcacttttcctctgatgaaatacttgagagtgcgcgtcgacgctcttccccgcaacactcccttaaccctcgctcccaactttttgattcgccgcttctgtgaagaggttaggggttgttttctcgacaagtctgaggtcacagatcgcgtcatttcctgcgtcaaaaacttccagaaagttgatccttcaaaggttaacctaatgc

SEQ ID NO: 63059 - DNA, 257 bp, Glycine max
  Clone ID: 700761342H1
acttattaacactttccttagttcaatatggggaagcccttcttcactctctctctttcttccctttgcttgctactcttgtcgagtgcatgctttgctattacctccagcaagttcaacgagtgccaactcaacaacctcaacgcgttggaacccgaccaccgcgttgagtccgaaggtggtcttattgaaacatggaactctcaacaccctgagctgcaatgcgccggtgtcactgtttccaaacgcacctcaac

SEQ ID NO: 63060 - DNA, 258 bp, Glycine max
  Clone ID: 700761343H1
gacttcttccctgtggaggttgatagtcaagagggagttgctcacattggtgaattgaaatctggtgtctatgttccactgcctacaaaaactaatttggtggaaactcccaaggaatggcaactggatctaccttgtgacaaaattcctagtgtcttgaccacaactgatgagagattggtaggcacagaacatgagggatatgatccttttcttggtggaattcaaaaatatgccactcccatgatgccctagatg

SEQ ID NO: 63061 - DNA, 261 bp, Glycine max
  Clone ID: 700761344H1
tgtacctgtactgtggcacaaaaccatcactgttcgagaaaaaggaggatcgaactcgaacccgattgtggtcggtgcagaacagagaggagaggacaacacacacaatcacagggttgagttgagttgagccgtgagaaaagaaaaaataaatggccattgctatgaaggccacgcctatcacggcttcggggttcgtttcaacaagaaattccacacttccaccctttaaatcatcatttctcagataccgtcaggagc

SEQ ID NO: 63062 - DNA, 262 bp, Glycine max
  Clone ID: 700761345H1
taaacactcatcagtcatcaccatggctaagctagttttttccctttgttttctgcttttcagtggctgctgcttcgctttcagttccagagagcagcctcagtaaaacgagtgccagatccaaaaactcaatgccctcaaaccggataaccgtatagagtcagaaggagggctcattgagacatggaaccctaacaacaagccattccagtgtgccggtgttgccctctctcgctgcacgctcaaccgcaacgtcttcgta

SEQ ID NO: 63063 - DNA, 261 bp, Glycine max
  Clone ID: 700761346H1
agcaaaatgaccaagttcacaatcctcctcatctctcttctcttctgcatcgcccacacttgcagcgcctccaaatggcagcaccagcaagatagctgccgcaagcagctccagggggtgaacctcacgccctgcgagaagcacatcatggagaagatccaaggccgcggcgatgacgatgatgatgatgacgacgacaatcacattctcaggaccatgcggggaagaatcaactacataaggaggaacgaaggaaagacg

SEQ ID NO: 63064 - DNA, 82 bp, Glycine max
  Clone ID: 700761347H1
ggaaaactagttgttcttcttcctaaaagtttaactggctttccttcttttcctggagttgttgccaatcaaattattccct

SEQ ID NO: 63065 - DNA, 244 bp, Glycine max
  Clone ID: 700761348H1
tgcagagaaagaaaaccctagctcaccgtttcaagatgcaaatcttcgttaagaccctcactggtaagaccatcactctcgaagtcgagagttcagataccatagacaatgtaaaggccaaaattcaagacaaggaagggattccaccagatcagcaacggctcatttttgctggcaagcagcttgaggatggacgtacccttgctgattataacatccaaaaggagtcaaccctcaacttggt

SEQ ID NO: 63066 - DNA, 260 bp, Glycine max
  Clone ID: 700761349H1
ataaaattcttccaccaagttatgggcctccttgtgttgcttcttttctccctcttaggtctctcttctagttccagcatatcaactcatcgttccatattggaccttgacctaaccaagtttaccacacagaaacaggtgtcttcactgttccaactatggaagagtgagcatggacgtgtctaccataaccacgaagaagaggcaaagagacttgagattttcaagaataacttgaactatatcagggactgaatgca

SEQ ID NO: 63067 - DNA, 260 bp, Glycine max
  Clone ID: 700761350H1
taattattaacacttccttagttcaatatggggaagcccttcactctctctctttcttccctttgcttgctactcttgtcgagtgcatgctttgctattagctccagcaagctcaacgagtgccaactcaacaacctcaacgcgttggaacccgaccaccgcgttgagtccgaaggtggtttgattcaaacatggaactctcaatcccctgagctgaaatgcgccggtgtcactgtttccaaactcaccctcaactgcaa

SEQ ID NO: 63068 - DNA, 258 bp, Glycine max
  Clone ID: 700761352H1
ctcgagccggaagttttgtggtgtggtttagtgtcaaatggcggcgagtagaagcacttttcctctgatgaaatacttgagagtgcgcgtcgacgctcttccccgcaacactcccttaaccctcgctcccaactttttgattcgccgcttctgtgaagaggttaggggttgttttctcgacaagtctgtcgtcacagatcgcgtcatttcctgcgtcaaaaacttccagaaagttgatccttcaaaggtaaccctaat

SEQ ID NO: 63069 - DNA, 255 bp, Glycine max
  Clone ID: 700761353H1
ataagaactaagatggattggatcggagcgtaccgcggaggccagagaagcagggactggtgcgacccttcatcaccattcactgatttgtggtaccctcgtcgtgtcggtgacgctgatgatatcacctcctctctcgcccatgctcacgttgactggcgtgagactgataaagctcatatcttccgtgctgatcttccaggggtgaagaaagaggatctgaaggtgcaggtggaggagaataagacctgcaga

SEQ ID NO: 63070 - DNA, 257 bp, Glycine max
  Clone ID: 700761354H1
gttgatggaattcagattaaacaatcatcaaaattcattattattaatgacatacggggtaaagtagttcatatggatgtagtgaaaagaaagggaaaggaacatgagaaattgctgatttctgatgatgatgctccacaagataagtagacagaaagtagctggaattctaacttactgaaatgggcttctggtttcattagtagtaatggaacaacctaaaaatgctgaaaccaattcaccagagaaggaagggg

SEQ ID NO: 63071 - DNA, 257 bp, Glycine max
  Clone ID: 700761355H1
agcagaaacagagtgcattgtgtagcagtagcgggcaatgacggaacctctctcaaacaccgaactctcttcttctaaaaccctagacccaaccaaccgccacgattccacttcggaaccgcatcaaacggctccggaagaggttgaactcaatcgagaagacgatgtcgttccgaccgcgaaacggaagaggaacgacggcgtcgtcgaagaccgtttgctgcatccactgtggaagaccagcctctgtcctactt

SEQ ID NO: 63072 - DNA, 257 bp, Glycine max
  Clone ID: 700761356H1
gcctaccatagcacagattgaagagttccattcgatgcagaggatgatgaatgatcctgattcaaatgataatattgatttactgttgagcattgatttgttgggtttacaaggagcaggtaaagcttttccaaacaaaattgtttttgatgataagcttgtgttggctaacacacaagaattctttgatggaaattttccagtggattcttggttaccaatttttgtgaattgtctttatcctgtaagcaattacc

SEQ ID NO: 63073 - DNA, 257 bp, Glycine max
  Clone ID: 700761357H1
caggttcgaaactctcttcaaaaaccaatatggtcgcattcgcgtcctccagaggttcaaccaacgctccccacaacttcagaatctccgagactaccgcattttggagttcaactccaaacccaacaccctccttctccccaaccatgctgacgctgattacctcatcgttatccttaacgggactgccattctttccttggtgaacaacgacgacagagactcctacagacttcaatctggtgatgcctgagagt

SEQ ID NO: 63074 - DNA, 134 bp, Glycine max
  Clone ID: 700761359H1
ctcaaacaaggggtgtgggagagctcgttgtaggacataactagtttgttgtcaagatttacttttctttttttccctttcaactgaggaagtatcaagtagtacatcgttgttaacatttttgggtttcctct

SEQ ID NO: 63075 - DNA, 255 bp, Glycine max
  Clone ID: 700761360H1
ctttcttcttggacatcgcttttaattttatctgtttatattttaggttaattattaatattgtggaaattgacagaggatgggtggtgaggaattgtgattgattgagaactcagggaaagggaagaggttgtggaagaaggtgaagtaccagctggtggagtaccactccttgcccggttatttgagagacaacgagtacagtctcggtcactatcgatccgaatggcccatcaggcaggttttgttgagcgc

SEQ ID NO: 63076 - DNA, 258 bp, Glycine max
  Clone ID: 700761361H1
atccttttatgttaaataggtggatggggaaactgactttaccccagggcacttcccgaaatgttaagagattgcctctttctatagggggaggagctggtgcaaagaatgctattctcatgaatatgccaaatgctgttctttcaatgtggagatattttgttggagatctcgtctttgaagtttctaagatgacttctccctacattaaatgtacagtctccttcttcacagcacttggacatttggctatgtcac

SEQ ID NO: 63077 - DNA, 258 bp, Glycine max
  Clone ID: 700761365H1
gaaaagctttctagctagtcataacatcaccattactgatggtattgacaaaactagtgcaactttgcaatttagaaagttagcagattgtgattttctcaagagaaactttaagcagatttctaatgttttgtgggtggctcctgaggacaaggcgagtttatggtcacaacttcattatgtttcgtgtaataatctggaaatgcaagaagcttatcttgtcaatctcgtaaatgtgttacgagaattgatttgcac

SEQ ID NO: 63078 - DNA, 166 bp, Glycine max
  Clone ID: 700761366H1
cgcgatcacaggttgccgtactttaaaaccggaaacaaaagcaatcgttacttgatttcaagaatttctcaatttctttctacttctttgtgtacgatttcttaagggaaagaaaatcactctctgtgctggccacagacttcgtgaatcattttcttttccacac

SEQ ID NO: 63079 - DNA, 257 bp, Glycine max
  Clone ID: 700761367H1
attctgctaccataagagatagctaacaatacaagtggccattttattccattagcatccctgcatttagatacacataaactccatctggctaatttaaagaactagtaacatataacacaaaatacagaaaatttaatttaaagagtctctgaagcttaatacattccccgtgatcttcagccacatgcacaccttttcttgattgttctaaacctctcacgcatcagcgcgacgaccacgctccttctcggcaa

SEQ ID NO: 63080 - DNA, 254 bp, Glycine max
  Clone ID: 700761368H1
tctcgagccgaatcggctcgagggaaaaaccttcaaatatgatatacttggtgctggttcaatttcttcagatgattttccagaaaaggaagatcaagaaaaacccaaaaagattgatgccagattgagacaaagaatagatcctcaatacaatgaggttcaggctcagatggaaacaaatttgtttaaattgtctcttgatgatgttgaaactcctaaaggttccatgttggatcttaaaatttctcatctaa

SEQ ID NO: 63081 - DNA, 78 bp, Glycine max
  Clone ID: 700761369H1
gtaacatcgtttactcgtttgtgttttttcctttaaaatggaaaaccacatctacgccgcctcttacagcccttccac

SEQ ID NO: 63082 - DNA, 255 bp, Glycine max
  Clone ID: 700761371H1
aagaaacatggtattctgggatgaaggaaaaatttgtacaaatgatgaagagcatctatgaaacagaagttacagattggccagtaccactgaaaatcatttctggaaccattcttgcaacaattttgggaacaaccttctggaaactcttttcctttcttagagatgctggtaatgggggagtttttgttggcaatgttgcttcagcattcacaacttcaagtgtgcttgaggcccaaagtagaaacccaacag

SEQ ID NO: 63083 - DNA, 253 bp, Glycine max
  Clone ID: 700761372H1
gatccccttcttccccccaccgcatcgtcactcctcttcactggatcaatattcctcccgctttagaagcaatgctatctatgacggacggccaaaattcttccatataaacatgccattgtggcctatggtgccgtcatagcgggccatccttcacaaattgcccatgacatttgttaagctttttgatgattcaaaagatttttccttgagtttggttagagtatctcaagtgcttgaattggaaatcaac

SEQ ID NO: 63084 - DNA, 255 bp, Glycine max
  Clone ID: 700761373H1
atgatatcatagcctaattatgcttccatagaaatggaagactacgaaatgaagaagcaaacaatcaatggagataataagtggaagaatgacaaaggctagtgatttgaaatgaagatgatgccaccacgtgaagtggtaaggtggaggattcttgtacctaaaaatcacaaaaaatgtatagaatgtaggatatttgacgcggatccttgaggtctgttttgctttcctctcctcttgattttgctcgtgatg

SEQ ID NO: 63085 - DNA, 164 bp, Glycine max
  Clone ID: 700761376H1
attttgataaaccgcgatcacaggttgccgcaccttaaaaccggaaacaaaagcaatcgttacttgatttcaagaatttctcaatttctttctacttctttgtgtacgatttcttaagggaaagaaaatcactctctgtgctggccacagacttcgtgaatcat

SEQ ID NO: 63086 - DNA, 256 bp, Glycine max
  Clone ID: 700761377H1
gtttttaacaaacagcaacagtacagagcattttgatgcatgtaagtggacaaaatcggaaccacattcctgggaattgatcttcccaatagaggtatgtggtcctaataatggttttgaaatgtggagttctgagtgggcaaatcaaacttcatggcatttgagtttccttattgacaatcccaaacagtctacagtttttgatattctcttgggaatttctcaagattttgagattgctggtaatatcttatgc

SEQ ID NO: 63087 - DNA, 260 bp, Glycine max
  Clone ID: 700761380H1
caggtttactgagacaacaatttttacttgcagagatttggacatcttggttgtttattatacaatagcaactcgatttagaaaatttctaccgcattacattaggtggcatctgtataccttgttgatctacattctcccatcttttctcactgctgaaattaaatataagcggaatcagagtaatattcagatttccggcttattttacgacggcagatacaaattctggactaaacacgagataaatcttctttgac

SEQ ID NO: 63088 - DNA, 255 bp, Glycine max
  Clone ID: 700761381H1
aaaattcttccaccaagttatggagctccttgtgttgcttcttttctccctcttaggtctctcttctagttccagcatatcaactcatcgttccatattggaccttgacctaaccaagtttaccacacagaaacaggtgtcttcactgttccaactatggaagagtgagcatggacgtgtctaccataaccacgaagaagaggcaaagagacttgagattttcaagaataacttgaactatatcagggacatgaa

SEQ ID NO: 63089 - DNA, 187 bp, Glycine max
  Clone ID: 700761382H1
taagatttgacattttgataaaccgcgatcacaggttgccgcaccttaaaaccggaaacaaaagcaatcgttacttgatttcaagaatctctcaatttcttcctacttctttgtgtacgatttcttaagggaaagaaaatcactctctgtgctggccacagacttcgtgaatcattttcttttccac

SEQ ID NO: 63090 - DNA, 253 bp, Glycine max
  Clone ID: 700761383H1
ataaaattctgccaccaagttatgggtttcttgtgttgcttcttttctccctcttatgtctctcttctagttctcagcatatcatctcatcgttccatattggaccttgacctaaccaagtttaccacacagaaacaggtctcttcactgttccaactatggaagagtgagcatggacgtgtctaccataaccacgaagaagaggcaaagagacttgagattttcaagaataacttgaactatatcagggaca

SEQ ID NO: 63091 - DNA, 253 bp, Glycine max
  Clone ID: 700761384H1
cttaattattaacacttcctgagttcaatatggcaaagcccttcactctctctctttcttcccattgcttgctactcttgtcgagtgcatgctttgctattagctccagcaagctcaacgagtgccaactcaacaacctcaacgcgttggaacccgaccaccgcgttgagtccgaaggtggtttgattcaaacatggaactctcaacaccctgagctgaaatgcgccggtgtcactgtttccaaatcaccctc

SEQ ID NO: 63092 - DNA, 252 bp, Glycine max
  Clone ID: 700761385H1
gtctctgcaagatcaagaagtgatgagaggagaaagttgaagacttttctcctttactattgttacaacaatctccttctctctcttcttggagtaattctttgaagaacaagaaaaccactctctcgttgtgggggagtaagagggactctgaagagacatgtttgggtgcaagagtgtatgctgggattctgtccctgaattcactgaccctgatccacttcccttttctctagcttctaccctcctcaa

SEQ ID NO: 63093 - DNA, 250 bp, Glycine max
  Clone ID: 700761388H1
acggtcacagttatggttttgttgcggtcggtctttgatgttgcaggaaactacagacaaatgcagtcgatgttgttggaattgaggtcgtggtggtgactccaaaaacattgattttgtggccaaaattgtgatcgttttttaaaatcttggggtagagtgttgtcggttttcaagttggggaggactggaaaatatgtacaggcaaaaatgcacaaaattgttattatatcttgtggtgaaactaaaa

SEQ ID NO: 63094 - DNA, 253 bp, Glycine max
  unsure (1)..(253): unsure at all n locations
  Clone ID: 700761391H1
aatcaaacacttatcatattactaacaaaaatggaactaacattccctcatcaagacgaagatgattccgttgtttctgattgcgagagcggtgtttcgggcagtggagtcgtggtggcaccaccaccaccaccaccacaacaacaacaacgtggttttttcgttaggcttggagaaggtgacgtggttcacgatcttatcaagacaaggtttattcgtggcctcggcatgctcgggcctanaacgaggttgt

SEQ ID NO: 63095 - DNA, 254 bp, Glycine max
  Clone ID: 700761392H1
gaatttcattgcagagtgttattttgagtatcagcatcaatggctccaattgcagtgggaaacgtgattccagacggcattttggcttacttggatgaagaaaacaaaccccaaactgtctccattcactctctcgccaccggcaagaaagtcatcatctttggggttcccggtgccttcactcctacttgcagcttgaagcacgttcctggcttcattgagagagcagaagagctgaaagggaaggtgtggac

SEQ ID NO: 63096 - DNA, 253 bp, Glycine max
  Clone ID: 700761393H1
tcaaatctccgttgcttccttactctccagcgcctactcatatcacagatcatggataattcatagtactactatttcgtacaagtattcacgaaccattccattccaatttccattcagcagcaaccatctcaccatcttcttttgcatcattagttttttagttagattaccctcttccgtttcaccttcctttcatgcttacgtcaccaccactcactctttttctaccctaaaccattgaatgacctaa

SEQ ID NO: 63097 - DNA, 258 bp, Glycine max
  Clone ID: 700761394H1
taaaattcttccaccaagttatgggcctccttgtgttgcttcttttctccctcttaggtctctcttctagtaccagcatatcatctcatcgttccatattggaccttgacctaaccaagtttaccacacagaaacaggtctcttcactgttccaactatggaagagtgagcatggacgtgtctaccataaccacgaagaagaggcaaagagacttgagattttcaagaataacttggaactatatcagggcatgaatg

SEQ ID NO: 63098 - DNA, 258 bp, Glycine max
  Clone ID: 700761395H1
atggtaaccattgtgggttcttacaatgtcactcctaatcaaccaactccaaaggatccttcatggctatccgatagtgaccaaatcggtgtcctaggtcatgtagccattgtctacatatacgaagcaaatgccaacagcaacaccattgagagattgaggaactctcttagcaagcttctcctgtactactatccattcgctggcagattcagcttgacaaaaagtggtcgcatagaagtggattgtacgcaaagg

SEQ ID NO: 63099 - DNA, 261 bp, Glycine max
  Clone ID: 700761396H1
accttcaaatatgatataattggtgctggttcacattcttcagatgattttcctgaaaaggaagatcaagaaaaacccaaaaagattgatgccagattgagacaaagaatagatcctcaatacaatgaggttcaggctcagatggaaacaaatttgtttaaattgtctcttgatgatgttgaaactcttcaaggttccatgttggatcttaaaatttctcagtctaaaattgcacttcccaagaacacagttggaggaact

SEQ ID NO: 63100 - DNA, 254 bp, Glycine max
  Clone ID: 700761401H1
cttaattattaacacttccttagttcaatatggggaagcccttcactctctctctttcttccctttgcttgctactcttgtcgagtgcatgctttgctattagctccagcaagctcaacgagtgccaactcaacaacctcaacgcgttggaacccgaccaccgcgttgagtccgaaggtggtttgattcaaacatggaactctaaaaaccctgagctgaaatgcgccggtgtcactgtttccaaactcaccctc

SEQ ID NO: 63101 - DNA, 163 bp, Glycine max
  Clone ID: 700761402H1
ctttgaacactcatcaccatggccaagcttgtactatcgctttgattccttcttatcagtggctgcttcgctctgagagagcaggcacagcacaatgagtgcgagatccaaaagctgaatgccctcataccggataaccgtatagagtcggaaggtgggttca

SEQ ID NO: 63102 - DNA, 244 bp, Glycine max
  Clone ID: 700761403H1
agggttttctgcctaagatgcttatatcttttggtttttgttcgggtttatccttctctaagcctttttttttctctctttttattttacttgtttggtcgtttcctgtcttgtaaattcagatctactttgttgcagagcagcttactttgttacgttcaacaggggtagaagcaaggtgggaaatactgagatatagttggcttttaagtttttgagttttcgttttaattaagtctgttta

SEQ ID NO: 63103 - DNA, 232 bp, Glycine max
  Clone ID: 700761405H1
gatgggaaagccatctcttctcccatcaaaggaggaacctttagttttcaacccaaaaaacaaggtccttgccctctatgtgtttgaaggggccatcattggactttatgccccaatagcttatattttagagggaatatttgagggtgacaaagaagggatcaaagcagctgcaccccaggtttttctcttgtccagcaaagttttcatggaaggtgtggcattctctggc

SEQ ID NO: 63104 - DNA, 79 bp, Glycine max
  Clone ID: 700761407H1
aaagaagcactcttgtgttttgtctctctacctctctcactactctatagtattctctcaatttctgttcacattcgac

SEQ ID NO: 63105 - DNA, 116 bp, Glycine max
  Clone ID: 700761408H1
taccaacaagaaaagatcaaaagaagagttgagattccctttgaagaaaagatggcatcccataggcaaagctatgaagctggtcaaactaagggccgaactgaggaaaagacgaa

SEQ ID NO: 63106 - DNA, 200 bp, Glycine max
  Clone ID: 700761409H1
aaaattcttccaccaagttatgggtttccttgtgttgcttcttttctccctcttaggtctctcttctagttccagcatatcaactcatcgttccatattggaccttgacctaaccaagtttaccacacagaaacaggtgtcttcactgttccaactatggaagagtgagcatggacgtgtctaccatacccacgagaaga

SEQ ID NO: 63107 - DNA, 129 bp, Glycine max
  Clone ID: 700761410H1
tacatagtagtgttggtgggttgcaaagatgcttgggggtcttctccataggggtcataagataaaagggacagtggtgttgatgcgcaagaatgtgttggacgtgaatagcgtaaccagcgttggggg

SEQ ID NO: 63108 - DNA, 260 bp, Glycine max
  Clone ID: 700761411H1
aggcaactcaaggtgatgctataagaaactattaccatgaaatgcatgtcatccaggacatgcttgttcctttgtacaaggtgggagatgctttagaatgggttcaccgtgagatggaggtataccccatttggctctgcccacacaaattgttcaagctgcctgtcaaaactatgatttaccccgagccaggattcgaactacaccgcaggcaaggagacacccaaactgctcaaatgtacacagatgttggagtttat

SEQ ID NO: 63109 - DNA, 167 bp, Glycine max
  Clone ID: 700761412H1
cactcactcactcactcactcgcaagcaaaaagaaagaatcccaggcgaggagaaagatggaggggaaggagcaggatgtgtcgttgggagcgaacaagttccccgagagacagccgattgggacggcggcgcagagccaagacgacggcaaggactacaaggagcc

SEQ ID NO: 63110 - DNA, 259 bp, Glycine max
  Clone ID: 700761413H1
cgagaccaccgcagtcatcactcgcgacgtgagacggcgagacctccacctcctcaccgctgccttgctgcgccgccgcgacgcgagagtgaaagacggcgagacctccgcaccgctgcgccgccactagagctcctcgccctcaccctcgcgagaccccctcattcctcattcagtctcagactctcagcacctcaccggcgccgttagagacagttctcgttggacctcaccctctcatcctcacggacctcgccgc

SEQ ID NO: 63111 - DNA, 251 bp, Glycine max
  Clone ID: 700761414H1
aattggaaggaactacactactcaaatataagatcccaacccgtggccttcttggattgcggaattcaattttaactgcctcccgagggactgctattctcaacactgtttttgatagctatgggccttgggctggtgaaattagtactcgggatcaaggctcattggttgcttttgaggatggaacaagtacttcttatgcaatctctagttcacaggagaggggacaagatgtttattggtcctggagt

SEQ ID NO: 63112 - DNA, 138 bp, Glycine max
  Clone ID: 700761415H1
aaaacacagttggaggaaccattctgcgtagtgacctattggcaaattttttgacagagggcaattttagagcaagtgttgatttgcagcgcactcatcgtatcaaaggaatgattaaaatggtggccacagttggta

SEQ ID NO: 63113 - DNA, 262 bp, Glycine max
  Clone ID: 700761416H1
gccgtgtaagataagagggcagccaacaagaagcaaaacactgaaacaaaagcaaaaaagagctgtgagacagtgatggctcacggtgcttacagcaagcggcgcgtgagcgcaacacgtcgatccaactccaagcctctgggcatcgccaagaagcccaagcccaagcccaagccctccgtttccctcaaaaaccagattcgatcccttgagcgcatgctccgcaagaatctgcctcccgaggtgcgagacgcgcaggaac

SEQ ID NO: 63114 - DNA, 225 bp, Glycine max
  Clone ID: 700761422H1
gttactattcatgcttctctaagtgacgatgccctgatccactcactaaatgagactgaagtatctactctgatctgtgactccaagcagtcaaagaagttggatgcaataagatcaagactaacatctttacaaaatgttatttactttgaagatgataacgaagaagatcggttctctggaagctcaagcggctggacaattgcatcttttagtgaagttgag

SEQ ID NO: 63115 - DNA, 243 bp, Glycine max
  Clone ID: 700761423H1
tagaagataaaaatcataagtgccaaaaatcttgcttagttacatgttctgaaaatcggatactataatgtatcgtttagttatcacaatgatttttttatatccataaaaagatcaaagttttaaaaaaaaatcaaagttgaatatcaaaaaatttataataattcacttatactatacaattgattgattgaagtactagaccccttaatcattgtgacaattcttaaggggtctagtact

SEQ ID NO: 63116 - DNA, 255 bp, Glycine max
  Clone ID: 700761424H1
gtctacaatgatttgggcaacccagataagagtgaaaagttagctcgtccagttcttggagggtctagcacctttccctaccctcgtaggggaagaactggtcgaggtccaacagttacagacccgaatactgagaaacaaggcgaagtattttatgttccaagagatgaaaatttaggtcacttgaagtctaaggatgctcttgagattggaacaaaatctttatctcaaattgtccagcgggcgttcgaatct

SEQ ID NO: 63117 - DNA, 116 bp, Glycine max
  Clone ID: 700761425H1
caaggaactggtatgaaggtttctataagacatcttggcccatccatgattcagcagatgcagcatgcctgcaatgaatgtaagggtactggagaaactatcaatgacagagatcg

SEQ ID NO: 63118 - DNA, 225 bp, Glycine max
  Clone ID: 700761430H1
agaaaacaagaagtagtgagaagaagggagagaatggaggaaaaggcaaaagctgagcagaagaagataggtatgaccgagacttggttgaagaagcaccgtcttctttacaatggagccactagacaccctcttattattagcattcgcgatggcaccatcaacactgcttccttcaaaacatggctcgcacaggattacttgttcgttcgggcgttgtcccat

SEQ ID NO: 63119 - DNA, 171 bp, Glycine max
  Clone ID: 700761431H1
ctcacacaccctttctctccctagactctctctcttgtggtttctgcaatggcaacccttgcagacattggggtctcagctgccatcaacattctctcagcctttgccttcttgctggcttttgctcttctgagaatccaacccatcattgatagaatctactttccaagg

SEQ ID NO: 63120 - DNA, 114 bp, Glycine max
  Clone ID: 700761432H1
tctctccattggtccttaaacactcatcagtcatcaccatggccaagctagttttttccctttgtgttctgcttttcagtggctgctgcttcgctttcagttccagagagcagc

SEQ ID NO: 63121 - DNA, 257 bp, Glycine max
  Clone ID: 700761433H1
tgctgctgttgctgttggtactaatcagcgtaaaagtggttatccttgtccaccatttaagattattgttctagacgaggcagattcaatgactgaagatgctcagaatgccctgaggcgtacaatggaaacttactctaaagttacgtggttcttttttatatgcaactatgttagcaggattatagaaccacttgcttcaaggtgtgcaaaattcaggttcaaaccattatcagaagaaatcatgagcagccgga

SEQ ID NO: 63122 - DNA, 252 bp, Glycine max
  Clone ID: 700761440H1
aaaggattctaaccgccgctcgatcgggcttgcgcttcaaggcgtctcgtaaggtcaatccagtccaagagggtcagcaacgaaatttgcctctgaagggccgaagctcctactgctggtcggcaaacggacggcgggcgcacgcgtcgcttctagcccggattctgacttagaggcgttcagtcataatccaacgcacggtagcttcgcgccactggcttttcaaccaagcgcgatggccaattgtgcgaa

SEQ ID NO: 63123 - DNA, 143 bp, Glycine max
  Clone ID: 700761441H1
ggagattggtttagcattaaagaagttatttgaagagggtgtagtcaagcgagaagatttatggatcacctctaaactctggtgtacagatcatgctccagaagatgtaccagaagctctggacagaacattgagagacttgc

SEQ ID NO: 63124 - DNA, 148 bp, Glycine max
  Clone ID: 700761442H1
atcgagccgcaatatcctagtataccttaataaataatttaagatactatgatgagaacacggttcccattactgttgctgggacttgttttcctggcttcagtttctgtctcatttggcattgcttactgggaaaaagagaacccca

SEQ ID NO: 63125 - DNA, 244 bp, Glycine max
  Clone ID: 700761443H1
tctagttcaatatcctagtataccttaataaataatttaagatactatgatgagagcacggttcccattactgttgctgggacttgttttcctggcttcagtttctgtctcatttggcattgcttactgggaaaaagagaaccccaaacacaacaagtgtctccagagttgcaatagcgagaggagactcgtacaggaacaaggcatgcaacgtccgttgaacctccttaaggtggagaaagag

SEQ ID NO: 63126 - DNA, 157 bp, Glycine max
  Clone ID: 700761444H1
cggctcgagggctacttcaaagttgaaaacccagaatgtggttgtatctctctccctaaccttaaccttggtactggtgctactgaccagcaaggcaaactcagcggaaactgtttctttcagctggaacaagttcgtgccgaagcaaccaaacatg

SEQ ID NO: 63127 - DNA, 258 bp, Glycine max
  Clone ID: 700761445H1
tgagtagttcttcatcatagtcttaaacattaaaccttagcaaaactcaacaatgctagacatcaaaggctacctcgtactcttcttcctatggttcatatcaaccattctgatacgttccatcttcaagaaaccacagcgtctaagactcccaccgggtcctccaatttcaatacccttgctgggacacgcgccatatctccgttcactgctccaccaagcattgtacaagctatcactgcgctatggacccttgat

SEQ ID NO: 63128 - DNA, 114 bp, Glycine max
  Clone ID: 700761447H1
gccaactcaacaacctcaacgcgttggaacccgaccaccgcgttgagtccgaacgtggtcttattgaaacatggaactctcaacaccctgagctgcaatgcgccggtgtcactg

SEQ ID NO: 63129 - DNA, 249 bp, Glycine max
  Clone ID: 700761448H1
gcatttgctggtgagaggtgaccccatctctcttttatctctctcttccaaaaagcaccgatttttgcgcacgccaacgcgaatcgcgaagagggtctcaccgagaacaaaaaatgggtgtttgtgggtcgaggcccaaagtgaacgaagaagacctctcatcaaagaagaagaacaacaacaacaacaatcatcgaagaagaagaaggagaatcctcagaagacgcgtatcttctagaaagatcgaag

SEQ ID NO: 63130 - DNA, 138 bp, Glycine max
  Clone ID: 700761450H1
aacttattaacactttccttagttcaatatggggaagcccttcttcactctctctctttcttccctttgcttgctactcttgtcgagtgcatgctttgctattacctccagcaagttcaacgagtgccaaatcaacaa

SEQ ID NO: 63131 - DNA, 257 bp, Glycine max
  Clone ID: 700761451H1
aagataaaccttttaacttgagaagccgcgaccccatctactccaacaagcttggcaagttctttgagatcaccccagagaaaaacccccagcttcgggacttggatatcttcctcagtattgtggatatgaacgagggagctcttcttctaccacacttcaattcaaaggcgatagtgatactggtaattaatgaaggagatgcaaacattgaacttgttggcctaaaagaacaacaacaggagcagcaacaggaa

SEQ ID NO: 63132 - DNA, 182 bp, Glycine max
  Clone ID: 700761452H1
acacagtactgtgagtttagactatactagaagagcatcatatacccttttgcacacaaactaaaagctaagaataatcatcattcatcaccaccaccaagtaaaagctttcactgaactgaaccatggcggattcaacctcatctaatcctgataaggatcaatcctctacggaaccgaaa

SEQ ID NO: 63133 - DNA, 249 bp, Glycine max
  Clone ID: 700761453H1
cttccttagttcaatatggggaagcccttcactctctctctgtcttccctttgcttgctactcttgtcgagtgcatgctttgctattagctccagcaagctcaacgagtgccaactcaacaacctcaacgcgttggaacccgaccaccgcgttgagtccgaaggtggtttgattcaaacatggaactctcaacaccctgagctgaaatgcgccggtgtcactgtttccaaactcaccctcaaccgcaat

SEQ ID NO: 63134 - DNA, 216 bp, Glycine max
  Clone ID: 700761454H1
gttactatttatgcttctctaggtgaggatgccctgatccactcactaaatgagactgaagtatctactctgatctgtgactccaagcagtcaaagaagttggatgcaataagatcaagactaacatctttacaaaatgttatttactttgaagatgataacgaagaagatgctttctctggaagctcaagcggctggacaattgcatcttttagt

SEQ ID NO: 63135 - DNA, 210 bp, Glycine max
  Clone ID: 700761455H1
agaagataaaaatcagaggtgccaaaaatcttgcttagttacatgttctgaaaatcggatactataatgtatcgtttagttatcacaatgatttttttatatccataaaagaatcaaagttttaaaaaaaaatcaaagttgaatatcaaaaaatttataataattcacttatactatacaattgattgattgaagtactagaccccttaa

SEQ ID NO: 63136 - DNA, 176 bp, Glycine max
  Clone ID: 700761457H1
attcaaaccttgctctatactacacagtacatacactagaagaataatggcttccatcctccactactttttagccctatctctttcttgctcttttctattcttcttatccgactcagtcacccctacaaaaccaataaaccttgttgttctacccgttcagaatgatggttcca

SEQ ID NO: 63137 - DNA, 105 bp, Glycine max
  Clone ID: 700761458H1
caacaactcttacaccaaacacacatccgtctttttaagttcttcatatctcaacctctggttctggttctccaccatgaaccaataagtacaacctcgtaattg

SEQ ID NO: 63138 - DNA, 197 bp, Glycine max
  Clone ID: 700761459H1
ccttcgttcactcttcttctcttgcggctagggttttagcgcagttcttctagatttaaggtagatgggtaaggaaaaggttcacatcagtattgtggttattggccatgttgactctgggaagtccactaccactggccatgtgatctacaagtttggaggcattgacaagcgtgttattgagagattggagaagg

SEQ ID NO: 63139 - DNA, 199 bp, Glycine max
  Clone ID: 700761461H1
ctccaattagtaacttgttgagagttgctgcttggaagaaaggctgtttaatggttaagattgtgatgtctgggaatgcagcagtcaaaaggagtgattgggcctcattggtacaagtgtttttaacaaacagcaacagtacagagcattttgatgcatgtaagtggacaaaatcggaaccacattcctgggaattgat

SEQ ID NO: 63140 - DNA, 252 bp, Glycine max
  Clone ID: 700761462H1
gttcaatatcctagtacaccgtattagagaatttaagatatactatgatgagagcgcggttcccattactgtggctgggagttgttttcctggcatcagtttctgtctcatttggcattgcgtattgggaaaagcagaaccccagtcacaacaagtgcctccgaagttgcaatagcgagaaagactcctacaggaaccaagcatgccacgctcgttgcaacctccttaaggtggaggaagaagaagattgcg

SEQ ID NO: 63141 - DNA, 162 bp, Glycine max
  Clone ID: 700761463H1
gtttccttgacaatctaattctgcaaaaatggcaagcaataaggagtctaagttcccagcacagagccagaaaactcagccaggaaaagaacatgtaatgaatccactcccacaagccacaaatcctgatcacaaggccgccaataaactccagggaaaggt

SEQ ID NO: 63142 - DNA, 131 bp, Glycine max
  Clone ID: 700761466H1
cagaataatcaaacttgccatacccgtcaacaaacctggcagatatgatgatttcttcttatctagcactcaagcccaacagtcctacttgcaaggcttcagccataatattctagagacctccttccata

SEQ ID NO: 63143 - DNA, 212 bp, Glycine max
  Clone ID: 700761467H1
gcgaatcggctcagcttattaacactttccttagagcaatatggggaagcgcttcttcactctctctctagcttccctttgcttgctactcttgtcgagtgcatgctttgctattacctccagcaagttcaacgagtgccaactcaacaacctcacggcgttggaacccgaccaccgcgttgagtccgaaggtggtcttattgaaacatgga

SEQ ID NO: 63144 - DNA, 236 bp, Glycine max
  Clone ID: 700761468H1
ggaggcaacaactaacagaaaagtcagatgtgtattcatttggggtagttctgtttgaagttctttgcgcaaggcccgtcatagatccaacacttcctagagaaatggtaaacttggcggaatgggcgttgaaatggcagaagaaaggacagttggagcaaatcatagatcaaacacttgcaggacgaatcagaccagattctctgaggaagtttggagaaactgctgagaaatgc

SEQ ID NO: 63145 - DNA, 252 bp, Glycine max
  Clone ID: 700761469H1
gtcgttcaagggaagggagcaattggatttgcatttccgggaagacctgagacgtttgagaagccacgacagccatcaagcagaagaggctcaaggtagcagcagcaactacaagacagtcaccacaagattcgtcgcttcaatgaaggagacgtactagtgatacctcctggcgttccttaatggaactataacactggcgatgaaccagttgtagccatcagacttcttgaaaccacccgcttcaacaat

SEQ ID NO: 63146 - DNA, 83 bp, Glycine max
  Clone ID: 700761470H1
gtcgacgcgatgttccgaataccattgtgcagattgacaccagacatgagttcaaggtatcggctttagagtaccactaccaa

SEQ ID NO: 63147 - DNA, 167 bp, Glycine max
  Clone ID: 700761473H1
atttgggattctgagacgggaaaactgcttaaagagtcagacaaggaatctggccataaaaagaccgtgacatcacttgctaagtctgcggatggttcgcatttccttactggctcccttgacaagtctgctaggctttgggatactagaacattgactcttatcag

SEQ ID NO: 63148 - DNA, 204 bp, Glycine max
  Clone ID: 700761475H1
tcacaaacaaattgttggtttccatgttgctggaagcaaaggaagactgggatatgcttcattgataccatatgttgagccagttgtgcaagctcaaagtgctgaagtttactttgacttcttccctgtggaggttgatagtcaagagggagttgctcacattggtgaattgaaatctggtgtctatgttccactgcctacaaa

SEQ ID NO: 63149 - DNA, 223 bp, Glycine max
  Clone ID: 700761476H1
tctctccattgtctttgaacactcatcaccatggccaagcttgttctttccctttgtgtccttcttttcaagtggctgcttcgctctgagagagcaggcacagcaaaatgagtgccagatccaaaagctgaatgccctcaaaccggataaccgtatagagacggaaggtgggttcattgagacctggaatgctaacaacaagccattccagtgtgccggtgtt

SEQ ID NO: 63150 - DNA, 228 bp, Glycine max
  Clone ID: 700761477H1
ctttcttctccactctctcaaatggcccaaaatgattccaaccgtactccgcctccggaaccccatgtagcggcggaacccattactgaggatttggtccaagacaaagaagaagaggatgatagtagtaagattgttattccagtcccagagagcgagtccttgtcattgaaggaggatagcaatagggtttctgattccgagaaaaatgccattgatgagctgaag

SEQ ID NO: 63151 - DNA, 170 bp, Glycine max
  Clone ID: 700761478H1
agacaacgtcacagagagagaagggaaggaaaagtggtgttggtggttgtcctcctcattggtatggcaaccctttcctccatcctctcctcctctcttcctcttttccatcgctaccctaaccctaacccttcgctctttcgcccctccctttctctctctttctctcg

SEQ ID NO: 63152 - DNA, 125 bp, Glycine max
  Clone ID: 700761480H1
cttccatagccccccaaaaatgaagagcaccatcttctttgctgtctttctcttttgtgccttcaccacctcatacctaccttcagccatcgctgatttcgtgctcgataatgaaggtaaccctc

SEQ ID NO: 63153 - DNA, 76 bp, Glycine max
  Clone ID: 700761481H1
attcaaaccgtgctctatactacacagtacagacgctagaagagtaatggcctccatcctccgctactgcttagcc

SEQ ID NO: 63154 - DNA, 236 bp, Glycine max
  Clone ID: 700761488H1
ctctcttgcaaattggatactgttactggccagtattatcctgagtgggctccaattaattgtcgagttcatcgacaaccaattcacatcactgaaggaaattatgtcagaaagcaagatgtcagcattgaatatgatgcatgtacaattccaaatggattgtggttcattggttgttgccaaggttggaaatcacaaacaaattgttggtttccatgttgctggaaccaaaggaa

SEQ ID NO: 63155 - DNA, 147 bp, Glycine max
  Clone ID: 700761489H1
aaaagatcatacatagtagtgttggtgggttgcaaagatgcttgggggtcttctccataggggtcataagataaaagggacagtggtgttgatgcgcaagaatgtgttggacgtgaatagcgtaaccagcgttggggggaattattg

SEQ ID NO: 63156 - DNA, 223 bp, Glycine max
  Clone ID: 700761491H1
ttgtctttgaacactcatcaccatggccaagcttgttctttccctttgtttccttcttttcagtggctgcttcgctctgagagagcaggcacagcaaaatgagtgccagatccaaaagctgaatgccctcaaaccggataaccgtatagagtcggaaggtgggttcattgagacctggaaccctaacaacaagccattccagtgtgccggtgttgccctctct

SEQ ID NO: 63157 - DNA, 244 bp, Glycine max
  Clone ID: 700761492H1
caattagtaacttgttgagagttgctgcttggaagaaaggctgtttaatggttaagattgtgatgtctgggaatgcagcagtcaaaaggagtgattgggcctcattggtacaagtgtttttaacaaacagcaacagtacagagcattttgatgcatgtaagtggacaaaatcggaaccacattcctgggaattgatcttcccaatagaggtatgtggtcctaataatggttttgaaatgtggag

SEQ ID NO: 63158 - DNA, 181 bp, Glycine max
  Clone ID: 700761495H1
gttcaatatcctagtataccttaataaataatttaagatactatgatgagagcacggttcccattactgttgctgggacttgttttcctggcttcagtttctgtctcatttggcattgcttactgggaaaaagagaaccccaaacacaacaagtgtctccagagttgcaatagcgagagag

SEQ ID NO: 63159 - DNA, 237 bp, Glycine max
  Clone ID: 700761501H1
cttaatttaacacttccttagttcaatatggggaagcccttcactctctctctttcttccctttgcttgctactcttgtcgagtgcatgctttgctattagctccagcaagctcaacgagtgccaactcaacaacctcaacgcgttggaacccgaccaccgcgttgagtccgaaggtggtgtgattcaaacatggaactctcaacaccctgagctgaaatgcgccggcgtcactgtt

SEQ ID NO: 63160 - DNA, 185 bp, Glycine max
  Clone ID: 700761502H1
gaaatttgtaaaccgcgatcacaggttgccgcaccttaaaaccggaaacaaaagcaatcgttacttgatttcaagaatttctcaatttctttctacttctttgtgtacgatttcttaagggaaagaaaatcactctctgtgctggccacagacttcgtgaatcattttcttttccacttttagtt

SEQ ID NO: 63161 - DNA, 274 bp, Glycine max
  Clone ID: 700761503H1
cttaattaaacacttccttagttcaatatggggaagcccttcactctctctctttcttccctttgcttgctactcttgtcgagtgcatgctttgctattagctccagcaagctcaatgagtgccaactcaacaacctcaacgcgttggaacccgaccaccgcgttgagtccgaaggtggtttgattcaaacatggaactcttcaacaccctgagctgaaatgcgccggtgtcactgcttccaaactcaccctcaaccgcaatggcctccacttg

SEQ ID NO: 63162 - DNA, 274 bp, Glycine max
  Clone ID: 700761504H1
caagaaggaaaacgaaggaagcaacatattgagtggcttcgcccctgaattcttgaaagaagcgttcggcgtgaacatgcagatagtgagaaacctacaaggtgagaacgaagaggaggatagtggagccattgtgacagtgaaaggaggtctaagagtcacagctccagccatgaggaagccacagcaagaagaagatgatgatgatgaggaagagcagccacagtgcgtggagacagacaaaggttgccaacgccaaagcaaaaggagcaga

SEQ ID NO: 63163 - DNA, 272 bp, Glycine max
  Clone ID: 700761505H1
ctcacggtgtgatagctttgatgaagttcatggactctattcaggcggaattaagctgccaacagatataatcagcaagattagtccactacccgtgcttaaggaaatcttccgaactgatggtgaacaggcccttaagtttcctcctcctaaagtaattcaagtgagtaagtctgcatggatgactgatgaagaatttgcaagagaaatgcttgctggtgtaaatccaaacttgattcgttgtcttaaggatttccctccacgaagcaagc

SEQ ID NO: 63164 - DNA, 271 bp, Glycine max
  Clone ID: 700761506H1
cagaagtttaaattttgtgaggttcattatgaagaaaagggacaagcttagttgtcaagttggaatcaacccatactccatggaatggactggtttggccaatagattactgagtaagggcaacgatattctgtgttgcgattatgctagttttgatggtttgattaccaagcaagttatgagcaagatggcagaaatgataaacagtctttgtggtggtgatgaaaaattgatgcgtgacaagacacacctgcggttggcttgttgttca

SEQ ID NO: 63165 - DNA, 267 bp, Glycine max
  unsure (1)..(267): unsure at all n locations
  Clone ID: 700761508H1
cagatagaaaaacctacaaggagagaacgaaggggaagacaagggagccattgtgacagtgaaaggaggtctgagcgtgataaaaccacccacggacgagcagcaacaaagaccccaggaagaggaagaagaagaagaggatgagaagccacagtgcaagggtanagacaacactgccaacgcccccgaggaagccaaagcaaaagcagaagaaatggcattgacgagaccatatgcaccatgagacttcgccacaacattggccag

SEQ ID NO: 63166 - DNA, 271 bp, Glycine max
  Clone ID: 700761509H1
gtgaaaaggtctaagagtcacagctccagccatgaggaagccacagcaagaagaagatgatgatgatgaggaagagcagccacagtgcgtggagacagacaaaggttgccaacgccaaagcaaaaggagcagaaatggcattgatgagaccatttgcacaatgagacttcgccaaaacattggtcagaattcatcacctgacatctacaaccctcaagctggtagcatcacaaccgccaccagccttgacttcccagccctctggcttctc

SEQ ID NO: 63167 - DNA, 268 bp, Glycine max
  Clone ID: 700761510H1
gttcaatcctagtataccttaataaataatttaagatactatgatgagagcacggttcccattactgttgctgggacttgttttcctggcttcagtttctgtctcatttggcattgcttactgggaaaaagagaaccccaaacacaacaagtgtctccagagttgcaatagcgagagagactcgtacaggaaccaagcatgccacgctcgttgcaacctccttaaggtggagaaagaagaatgtgaagaaggtgaaattccacgacca

SEQ ID NO: 63168 - DNA, 270 bp, Glycine max
  Clone ID: 700761511H1
ttctgactcaaagagaaccacgaagacataagaataagaacccttttcacttcaactctaaaaggttccaaactctcttcaaaaaccaatatggccacgttcgcgtcctccagaggttcaacaaacgctcccaacagcttcagaatctccgagactaccgcattttggagttcaactccaaacccaacacccttcttctcccccaccatgctgacgctgattacctcatcgttatccttaacgggactgccattcttaccttggtgaaca

SEQ ID NO: 63169 - DNA, 269 bp, Glycine max
  Clone ID: 700761512H1
caattctcacttgcagcactgttgcatcatcatcttcattgcaaaaccctaaacttcaccttcaaccatgaccacacaagtaccaccacacagtgtccaagtccacacaacaacacacctctacgaagctggcgtcgtcccccccggagcccgtttcgaaccgccgcgttatgaagccggcgtcaaagcgccctccatttaccattccgagagaggtccaacgacttcccaggtcctcgccgtcctcgccggcctcccggtcggtggca

SEQ ID NO: 63170 - DNA, 269 bp, Glycine max
  Clone ID: 700761515H1
gacaaccaaacaatatgtgtgcatatgggctcaatcctggtatttcaggttctcgtcttttcgggcaccattcctcagtccatttcacagcaaactgtttggaatcaaatggcaacagtgagaacaccattgaattttgattctagcaagcagagcttttgtcaattctctattgatcttcttggtggaggaattttagtggacaaaactggagattggatcacacttatacaaaattctccaattagtaacttgttgagagttgctgc

SEQ ID NO: 63171 - DNA, 272 bp, Glycine max
  Clone ID: 700761516H1
acacaatctacaagtacttccttacaatcaaaaccaacaacaactatggcaagttatcaaaagcactacgatgatcagggtcgcaaggttgacgagtatggcaacgttgagaagcaaaccgacgaatacggcaaccctgttcatgctgctagtgtcacctatgtagccaccagaactgctgctggtggttacagtgatgacattaataagcaacatgataccaccaatgcctacggcgtagacactggtagacagcattctagtggtggcta

SEQ ID NO: 63172 - DNA, 240 bp, Glycine max
  Clone ID: 700761517H1
agcgtcctagtacaccgtattaaagaatttaagatatactatgatgagagcgcggctcccattactgttgctgggagttgttttcctggcatcagtttctgtctcatttggcattgcgtattgggaaaagcagaaccccagtcacaacaagtgcctccgaagttgcaatagcgagaaagactcctacaggaaccaagcatgccacgctcgttgcaacctccttaaggtggaggaagaaga

SEQ ID NO: 63173 - DNA, 271 bp, Glycine max
  Clone ID: 700761518H1
gctatgcttgctgcatacagagtcgttgaagttcagttctgcaatatcaactcttcttgctgtggcatttgttacaatatgtaccgtgttagcaatagttgctattgttgaaggaagaacacagtcccctagactgattccttgtttggaccaacatacctcttttttttgatctgtttactgcagtgccggtcgtagtcacagcctacacatttcattttaatgtgcatccaattgggtttgagcttgccaagccatcagaaatggcaac

SEQ ID NO: 63174 - DNA, 262 bp, Glycine max
  Clone ID: 700761519H1
gtatcttaataaataatttaagatactatgatgagagcacggttcccattactgttgctgggacttgttttcctggcttcagtttctgtctcatttggcattgcttactgggaaaaagagaaccccaaacacaacaagtgtctccagagttgcaatagcgagagagactcgtacaggaaccaagcatgccacgctcgttgcaacctccttaaggtggagaaagaagaatgtgaagaaggtgaaattccacgaccacgaccac

SEQ ID NO: 63175 - DNA, 231 bp, Glycine max
  Clone ID: 700761521H1
gttcatatcctagtataccttaataaataatttaagatactatgatgagagcacggttcccattactgttgctgggacttgttttcctggcttcagtttctgtctcatttggcattgcttactgggaaaaagagaaccccaaacacaacaagtgtctccagagttgcaatagcgagagagactcgtacaggaaccaagcatgccacgctcgttgcaacctccttaaggtgg

SEQ ID NO: 63176 - DNA, 265 bp, Glycine max
  Clone ID: 700761522H1
ctgctcatatatatcagtttttattgtaccctcgccccatcatatattacacttacactacatacatagtcaacaccaccaataacagaaagttttgatggaacagaaaagcattctgatatcggctttgggtgttggggtgggagtgggagtggggattggattggcctctggacaaagcgttggaaaatggggagccaacactttctcctcgaacgctattactgctgagaagatggagcaggaaatgctcagacaattgttg

SEQ ID NO: 63177 - DNA, 269 bp, Glycine max
  Clone ID: 700761523H1
gaaaggcattctcttaacatttcgggggaggagctggtgcaaagaatgctattctcatgaatatgccaaatgctcgttctttcaatgtggagatattttgttggagatctcgtctttgaagtttctaagatgacttctccctacattaaatgtacagtctctttcttcatagcatttggaaatttggctgatgacaccatcaattttgaggcttttccccacaagctggtacagtttggagagattcaggaaaaagttgtattgaaatt

SEQ ID NO: 63178 - DNA, 268 bp, Glycine max
  Clone ID: 700761525H1
cgcagttgacgagtatggcaacgttgagaagcaaaccgacgactacggcaaccctgttcatgctgctagtgtcacctatgtagccaccagaactgctgctggtggttacagtgatgacattaataagcaacatgataccaccaatgcctacggcgtagacactggtagacagcattctagtggtggctacgatggtgacactaataaacatcatggaactactggtggctataacgatgacaccaatagacatcatggaactaccggt

SEQ ID NO: 63179 - DNA, 266 bp, Glycine max
  Clone ID: 700761526H1
atactgtggttaaccctgacaacgacgagaatctcagaatgataacactcgccatacccgttaacaaacccggtagatttgagagtttcttcctatctagcactcaagctcaacagtcctacttgcaagggttcagcaagaatattctagaggcctcatacgacaccaaattcgaggagataaacaaggttctgtttggtagagaggaggggcagcaacaaggggaggagaggctgcaagagagtgtgattgtggaatctcaaaga

SEQ ID NO: 63180 - DNA, 266 bp, Glycine max
  Clone ID: 700761527H1
cgtagaggaagggcagctgctgtacattttcaagacttcaatgctgaggtcctacgtttcctcacaattcctaatttaaatgctaatctttctagagatactcaactatcgtcattcaactccacaatttgtgacaaggcagaagtttgcttttttgctggtgactggagtggaattgataaactgctccctcatgtcagtacagatgcaaaaaataatcaaggtgatggttatgactttattcttatggctgagacagtttactc

SEQ ID NO: 63181 - DNA, 264 bp, Glycine max
  Clone ID: 700761529H1
ggattctctgctgggagttcctcagcaagtctcaagtcgttcttctctccctccttggagattcgaggtttatgagttatctaccttctgtattggcaactgctatgatgatgcacgttgtgaaaagcgtggagcctggtctagaagctgaatacaagagccagctctttggtattctcagaatcgtcaaggagaagcctgagaaggtgaattcttgttgcaagctgttgttggaggtgtggtcatggtacgaggaggatgagc

SEQ ID NO: 63182 - DNA, 264 bp, Glycine max
  Clone ID: 700761530H1
cggacagtgcccaatatgttgtcctctacaggaatggaatttactctccacattggaacttgaacgcgaacagtgtgatctatgtgactcgagggaaaggaagagttagagtggtgaactgccaagggaatgcagtgttcgacggtgagctaaggaggggacaattgctagtggtgccgcagaactttgtggtggctgagcaagggggagaacaaggattggaatacgtagtgttcaagacacaccacaacgccgtgagcagct

SEQ ID NO: 63183 - DNA, 267 bp, Glycine max
  Clone ID: 700761531H1
tctctcattgtctttgaacactcatcaccatggccaagcttgttctttccctttgtttccttcttttcagtggctgcttcgctctgagagagcaggcacagcaaaatgagtgccagatccaaaagctgaatgccctcaaaccggataaccgtatagagtcggaaggtgggttcattgagacctggaaccctaacaacaagccattccagtgtgccggtgttgccctctctcgctgcacccttaaccgcaatgcccttcgtagacctt

SEQ ID NO: 63184 - DNA, 267 bp, Glycine max
  Clone ID: 700761532H1
aaatactgaaattgttatagtaaaattaaatttgcttagaaattcgtatacactgtacaaaaccattgagcctttatctagtagctatgggcatatttgattttttaaaatatttttgtttgcattttttgtttttataaataattacaaagatggcattatttttattttatctcctattttaaagacttgtatagaaactggtgaacatatgtagtttatcaaaatgggagtttaccattgacaccaacaaagcttagtttattt

SEQ ID NO: 63185 - DNA, 222 bp, Glycine max
  Clone ID: 700761533H1
acgttcaatatcctagtacaccgtattaaagaatttaagatatactatgatgagagcgcggttcccattactgttgctgggagttgttttcctggcatcagtttctgtctcatttggcattgcgtattgggaaaagcagaaccccagtcacaacaagtgcctccgaagttgcaatagcgagaaagactcctacaggaaccaagcatgccacgctcgttgcaa

SEQ ID NO: 63186 - DNA, 258 bp, Glycine max
  Clone ID: 700761538H1
agtacttgagtacaacactacggttgttttgttctgtcatctaaaagcaagatatgagttcatcaggaattagagtattcaaagattgccaaattttgataaatgatagtgttgagcattgccaaattatatttgtgctctttagtttttttcttcccacttccatatatatgcttatttaattcttcttgtgacggtagaaaatcagttattaaaatttgtctgcacaatttgatttccagaagggggaaattaagg

SEQ ID NO: 63187 - DNA, 259 bp, Glycine max
  Clone ID: 700761541H1
ctagttcaatatggggaagcccttcttcactctctctctttcttccctttgcttgctactcttgtcgagtgcatgctttgctattacctccagcaagttcaacgagtgccaactcaacaacctcaacgcgttggaacccgaccaccgcgttgagtccgaaggtggtcttattgaaacatggaactctcaacaccctgagctgcaatgcgccggtgtcactgtttccaaacgcaccctcaaccgcaacggcctccacttg

SEQ ID NO: 63188 - DNA, 261 bp, Glycine max
  Clone ID: 700761542H1
tagaaatgaagagtactatcttctttgctctctttctagtttgtgccttcaccatctcatacctgccttcagccaccgctcagttcgtgctcgacactgatgatgatcctcttcaaaacggtggcacatactatatgttgccagttatgagaggaaagggcggtggaatagaagtagattcaactggaaaagaaatatgccctctcactgttgtgcaatcacccaatgagctcgataaggggattggactagtctttacat

SEQ ID NO: 63189 - DNA, 259 bp, Glycine max
  Clone ID: 700761545H1
ttgttgttcctcactgacctcaccatggcgaccagagccaagctttctttagctatcttccttttctttcttttagccttgatttcaaacctagccttgggcaaacttaaagaaaccgaggtcgaagaagatcccgagctcgtaacatgcaaacaccagtgccaacagcaacggcaatacactgagagtgacaagcgaacatgcttgcaacaatgtgacagtatgaagcaagagcgagagaaacaagtcgaagaggaaa

SEQ ID NO: 63190 - DNA, 266 bp, Glycine max
  Clone ID: 700761547H1
gaacgcccccaacaacacttacttccacaaagccatgaacttccggttccaaaacctcttgggcgccccctacagagggggcaacgtggtcatttccagcaacaccgtgctactctccccggtcggtaaccgcgtagcgtcaccgacctcctcaagtccgaaaccaccacgctccccctccagtcctcctctaacgtcacccgcatcaccgtctcccccgacgccaccttcctcctcgccatcgacgaccgcaaccgctgcctctt

SEQ ID NO: 63191 - DNA, 253 bp, Glycine max
  Clone ID: 700761548H1
ctaattattaacacttccttagttcaatatgggtaagcccttcactctctctctttcttccctttgcttgctactcttgtcgagtgcatgctttgctattagctccagcaagctcaacgagtgccaactcaacaacctcaacgcgttggaacccgaccaccgcgttgagtccgaaggtggtttgattcaaacatggaactctcaacaccctgagctgaaatgcgccggtgtcactgtttccaaactcaccctc

SEQ ID NO: 63192 - DNA, 255 bp, Glycine max
  Clone ID: 700761549H1
ttatattcttcattcctctggggtgctgcacaacgaaactcacagaagaaagaagaaaaagaagcgaaactaaagtcagtattcgaaaaagatgagtagcatcggtacaggttacgatctatcggtcaccatttctcccctgatggccgcgttttccagatcgagtatgccgctaaagccgtcgacaacagcgggactgttattgggatcaagtgcaaagatggggttgtgttgggcgttgagaagcttattccg

SEQ ID NO: 63193 - DNA, 268 bp, Glycine max
  Clone ID: 700761550H1
tgcttcagcattcacaacttcaagtgtgcttgaggcccaaagtagaaagcccaacagatatgaagtttcccaatacagatatcgcaatgtgccaataaagcgcagagcatgggttgaaggccagatgtctttcgatcagtctgtagtagcaattatgtctaaatgcaaagccagcatgagaatggggaaacactgatgctcaaattttgatggttccagggcgcagattcatagctcatggacattttttcaaaaatctgactcagaa

SEQ ID NO: 63194 - DNA, 110 bp, Glycine max
  Clone ID: 700761551H1
ttattcagtaatagctcatagtgagcgaggaaagtatcgggctcatttaactatgacttgagctccatctatgaataaataaatcagcatatgatgcttttgttttgtgt

SEQ ID NO: 63195 - DNA, 260 bp, Glycine max
  Clone ID: 700761553H1
ttcctcactgacctcaccatggcgaccagatccaagctgtgttagacctatcatccgtatctatcttctagccgtgagttcaaacctagccttgggcaaacttaaagaaaccgaggtcgaagaagatcccgagctcgtaacatgcaaacaccagtgccaacagcaacggcaatacactgagagtgacaagcgaacatgcttgcaacaatgtgacagtatgaagcatagcgagagaaacaagtcgaagaggaaactcgcga

SEQ ID NO: 63196 - DNA, 263 bp, Glycine max
  Clone ID: 700761555H1
aaggtggcagcgtgctcagtggcttcagcaaacacttcttggcacaatccttcaacaccaacgaggacatagctgagaaacttcagtctccagacgacgaaaggaagcagatcgtgacagtggaaggaggtctcagcgttatcagccccaagtggcaagaacaacaagatgaagatgaagatgaagacgaagatgatgaagatgaacaaattccctctcaccctcctcgccgaccaagccatgcgaaagcgtgaacaagacga

SEQ ID NO: 63197 - DNA, 259 bp, Glycine max
  Clone ID: 700761557H1
tggtgatgaaaaattgatgcgtgaaaggacacacctgctgttggcttgttgttcaaggatggcaatttgtaagaaagatgtttggagagttgaatgtggaatcccttctggatttccgctcacagttatttgcaatagcatttttaatgagatgctcattagatatagctatgaaaaattactgcgccaggctaaagctccaagtatgtttttacaatctttcaaaaattttgtttctttgtgtgtgtatggtgatgat

SEQ ID NO: 63198 - DNA, 260 bp, Glycine max
  Clone ID: 700761559H1
tcggaaccacattcctgggaattgatcttcccaatagaggtatgtggtcctaataatggttttgaaatgtggagttctgagtgggcaaatcaaacttcatggcatttgagtatccttattgacaatcccaaacagtctacagtttttgatattctcttgggaatttctcaagattttgagattgctggtaatactcttatgccagctttttctgttccacaggctactgccagatcttctgaaaatgcggaatcctctgc

SEQ ID NO: 63199 - DNA, 261 bp, Glycine max
  Clone ID: 700761561H1
atacaatgaggttcaggctcagatggaaacaaatttgtttaaattgtctcttgatgatgttgaaactcctaaaggttccatgttggatcttaaaatttctcaatctaaaattgcacttcccaaaaacacagttggaggaaccattctgcgtagtgacctattggcaaattttttgacagaggcaaattttagagcaagtgttgatttgcagcgcactcatcgtatcaaaggaatgattaaaatggtggccacagttggtat

SEQ ID NO: 63200 - DNA, 260 bp, Glycine max
  Clone ID: 700761562H1
agaaagtcttccatagccccccaaaaatgaagagcaccatcttctttgctctctttctcttttgtgccttcaccacctcatacctaccttcagccatcgctgatttcgtgctcgataatgaaggtaaccctcttgaaaatggtggcacatatcatatcttgtcagacataacagcatttggtggaataagagcagccccaacgggaaatgcaagatgccctctcactgtggtgcaatctcgcaatgagctcgacaaaggg

SEQ ID NO: 63201 - DNA, 256 bp, Glycine max
  Clone ID: 700761564H1
tctggtcatcgttgggatctccatacgccggatctgctaaaatacgcttgatccatatgggcctcctcgaccacttgtgggacgacaccgtcgccggcccaaggccggaaaacggtctcggcaagctccgaaaacaccacaccttcactttccgacctagctccggcaaggaaacggagggcgttagcgtgagatcgtacggagacgaatcgtcggaggaagcgacgagagtgacgcgtagtatcatgatcgtgaa

SEQ ID NO: 63202 - DNA, 191 bp, Glycine max
  Clone ID: 700761565H1
gagaaaggattctacccgccgctcgatgggaattgcgcttcaaggcgtctcgtagggctaatccgcctcacgagggtcaccaacggcacgtgcctttggggggccgaggccccctactgctggtcggcaaacggacggcgggcgcacgcgtcgcttctagcccggattctgacttagaggcgttcagtcat

SEQ ID NO: 63203 - DNA, 236 bp, Glycine max
  Clone ID: 700761566H1
gagctgaagcaaagcaatggctacttcaaagttgaaaacccagaatgtggttgtatctctctccctaaccttaaccttggtactggtgctactgaccagcaaggcaaactcagcggaaactgtttctttcagctggaacaagttcgtgccgaagcaaccaaacatgatcctccaaggagacgctattgtgacctcctcgggaaagttacaactcaataaggttgacgaaaacggaa

SEQ ID NO: 63204 - DNA, 259 bp, Glycine max
  Clone ID: 700761568H1
gagggagagctgtggcttagagagccctttttgcatgtgctaccacacttttgtccttttgggctctagctagtgctggtagcagtaaataagaatgaataaaagaaacaaaggcttagatgccctttgttaagtgtagaataacgggtatagtaactatgtacccttgtgtaatgagtcactcaagtacctatgcgggaaaagcataaataaaagaagaaattccaataaaaaaaaaaaaaaaaaaagggcggccgcc

SEQ ID NO: 63205 - DNA, 264 bp, Glycine max
  Clone ID: 700761569H1
gaggtttttaacaaacagcaacagtacagagcattttgatgcatgtaagtggacaaaatcggaaccacattcctgggaattgatcttcccaatagaggtatgtggtcctaataatggttttgaaatgtggagttctgagtgggcaaatcaaacttcatggcatttgagtttccttattgacaatcccaaacagtctacagtttttgatattctcttgggaatttctcaagattttgagattgctggtaatactcttatgccagc

SEQ ID NO: 63206 - DNA, 266 bp, Glycine max
  Clone ID: 700761570H1
tgagtggagatattttgttggagatctcgtctttgaagtttctaagatgacttctccctacattaaatgtacagtctctttcttcatagcatttggaaatttggctgatgacaccatcaattttgaggcttttccccacaagctggtgcatcttggagagattcaggaaaaagttgtattgaaattttcacaagaggaatttcttacagcttggtcaactcaggtgcgtcctgcaacaactctgttggctgatgggtgcccatatt

SEQ ID NO: 63207 - DNA, 263 bp, Glycine max
  Clone ID: 700761571H1
gagcaccaattaagctttcaagagacaaactgctttgaaaaatgggatccaaggttgttgcatccgttgcccttctcctctccatcaacattcttttcatttccatggttagctccagcagccactacgatccacagccccaaccttctcacgtcactgctcttattacacgacctagttgtccggatctgagtatttgccccatattttaggcgggtctctaggaaccgtggatgattgttgtgccctcatcggtggtcttg

SEQ ID NO: 63208 - DNA, 261 bp, Glycine max
  Clone ID: 700761573H1
agctcgagccgcgtcaccagaagatctataacttcagagagggtgatttgatcgcagtgcctactggtgttgcatggtggatgtacaacaatgaagacactcctgttgttgccgtttctattattgacaccaacagcttggagaaccagctcgaccagatgcctaggagattctatcttgctgggaaccaagagcaagagtttctaaaatatcagcaagagcaaggaggtcatcaaagccagaaaggaaagcatcagcaag

SEQ ID NO: 63209 - DNA, 263 bp, Glycine max
  Clone ID: 700761576H1
gagtttctggggatggtgaagagatgacattgattccgggaaccagtgttgaagaggcttacaacaagctaatagttgaacttgagaaaagtgttcctacattggttggcattgaatgtcccaaggatgagaaacttcctcgtcgcaaaatttttgacaaacctaagacgcgctgcttcactattctccctatggagtttaatcttgtggttcgtcagaagtttttaaattttgtgaggttcattatgaagaaaagggacaag

SEQ ID NO: 63210 - DNA, 261 bp, Glycine max
  Clone ID: 700761579H1
gagtggagatattttgttggagatctcgtctttgaagtttctaagatgacttctccctacattaaatgtacagtctctttcttcatagcatttggaaatttggctgatgacaccatcaattttgaggcttttccccacaagctggtgcagtttggagagattcaggaaaaagttgtattgaaattttcacaagaggaatttcttacagcttggtcaactcaggtgcgtcctgcaacaactctgttggctgatgggtgccca

SEQ ID NO: 63211 - DNA, 261 bp, Glycine max
  Clone ID: 700761580H1
gagggcttttccccacaagctggtgcattttggagagattcaggaaaaagttgtattgaaattttcacaagaggaatttcttccagcttggtcaactcaggtgcgtcctgcaacaactctgttggctgatgggtgcccatatttgtatgctatggtgcatgatagttcagtgtctacaataccaggtgattttgtcattggtgttaagttgacaaccataaacaatatgtgtgcatatgggctcaatcctggtatttcagg

SEQ ID NO: 63212 - DNA, 260 bp, Glycine max
  Clone ID: 700761582H1
gggagcattggttcttttcaatgtttggcaagtaggaagggaccccaaatactgggacagaccatcagaattccgtcccgagaggttcttagaaactggtgctgaaggggaagcagggcctcttgatcttaggggccagcatttccaactcctcccatttgggtctgggaggagaatgtgccctggtgtcaatttggctacttcaggaatggcaacacttcttgcatctcttatccaatgctttgacctgcaagtgctgg

SEQ ID NO: 63213 - DNA, 249 bp, Glycine max
  Clone ID: 700761583H1
gtcgagctgagaataccagttgctccagtagccggcactaaacaacatggcggacaatgcagtcagcatccgaaccaggaagtttatgacaaacaggcttctctccagaaagcagttcgtcgttgatgtccttcatccagggagggctaatgtttccaaggctgaactgaaggagaagctgggaagaatgtatgacgtgaaagacaccaacactgtatgtgtcttcaagttccgaactcatttgggtgg

SEQ ID NO: 63214 - DNA, 259 bp, Glycine max
  Clone ID: 700761584H1
ccaaaattgcgttcctaaatcgccgctaccgaacacagccgtagacttttaattcattccgctgcgtttctttctctgcacttcaaagttcaaaccctagcgaagatccactgtcgccgtcgcacactcgcacgccgctcacaggtttatgggctacgctgatgtcctgaatttgttgttggccgtggtggtttggtgcactgcttacgttactgttgtagttctcgcttcctttcgagccgtttgcactttctgaaac

SEQ ID NO: 63215 - DNA, 257 bp, Glycine max
  Clone ID: 700761588H1
agcaaaatgaccaagttcacaatcctcctcatctctcttctcttctgcatcgcccacacttgcagcgcctccaaatggcagcaccagcaagatagctgccgcaagcagctccagggggtgaacctcacgccctgcgagaagcacatcatggagaagatccaaggccgcggcgatgacgatgatgatgacgccgacgacaatcacattctcaggaccatgcggggaagaatcaactacataaggaggaacgaaggaaa

SEQ ID NO: 63216 - DNA, 256 bp, Glycine max
  Clone ID: 700761590H1
tctcgagccgaatcggctcgagtacaaaagcacaatttgttagtggtaaaaccttcaaataacatataattggtgctggttcacattcttcagatgattttcctgaaaaggaagatcaagaaaaacccaaaaagattgatgccagattgagacaaagaatagatcctcaatacaatgaggttcaggctcagatggaaacaaatttgtttaaattgtctcttgatgatgttgaaactcctaaaggttccatgttgga

SEQ ID NO: 63217 - DNA, 80 bp, Glycine max
  Clone ID: 700761592H1
gtccttttgcatttgtgaactagtatgtaatattttattcacttaaataaagcgcattactatgtgcaatgagtgtgttt

SEQ ID NO: 63218 - DNA, 252 bp, Glycine max
  unsure (1)..(252): unsure at all n locations
  Clone ID: 700761593H1
ggaagcaaaggaagactgggttatgcttcattgataccatatgttgagccagttgtgcaagctcaaagtgctgaagtttactttgacttcttccctgtggaggttgatagtcaagagggagttgctcacattggtgaattgaaatctggtgtctatgttccactgactatacgaattagannggtggaaactcccaaggaatggcaactggatctaccttgtgacaaaattcctagtgtcttgaccacaact

SEQ ID NO: 63219 - DNA, 254 bp, Glycine max
  Clone ID: 700761594H1
ggctcgaggaagaggaaaagatggaagtgattagaaatagaggcattcctgctgatgttcttgcaaagcgagctcatgaatttgaaaaacatgttgctcatgaaagcctcaaggatcaaattcctgctgttgacaagttgtattctactaaggttaataagtttgcaaaaattatgaaccttagacaaagtgttgttggtgatcttaaacttcttactgatgggaagttgtatgagggtaagcatattcctgta

SEQ ID NO: 63220 - DNA, 275 bp, Glycine max
  Clone ID: 700761601H1
gaacaatttccactcgaagcaaagcgaatcagagatccaaactcagttctccaactctctgatctcaacttccacttcagcttcacgacccatggccaacgacgattgctgcgccacgcaactcatcgacggcgacggcgagttcaacgtcgccggcctcgacaactttatcagaaccgtcaatctcgcctcctgcggcctctcctatgccgtcgtcgcaatcatgggacctcagagtagcgggaagagcacgttaatgaatcatcttttccaca

SEQ ID NO: 63221 - DNA, 282 bp, Glycine max
  Clone ID: 700761602H1
ttcggctcgagcagattgagacaaagaatagatcctcaatacaatgaggttcaggctcagatggaaacaaatttgtttaaattgtctcttgatgatgttgaaactcctaaaggttccatgttggatcttaaaatttctcaatctaaaattgcacttcccaaaaacacagttggaggaaccattctgcgtagtgacctattggcaaattttttgacagagggcaattttagagcaagtgttgatttgcagcgcactcatcgtatcaaaggaatgattaaaatg

SEQ ID NO: 63222 - DNA, 271 bp, Glycine max
  Clone ID: 700761603H1
gggaagttgtatgagggtaagcatattcctgtatctaatattagtgcaggggaaaatcatgtagttcaaatacccctaatggcacaggaggaaattctgtcttctagtgcaagtgatttcagaactgcaatggtgagtaaaaatagcaagcctcaagctactgcaatgcatgtgggagctatagaaattatcattgatcgtttcgcaagtcctgactgcaacatagttggtgcaatgcttttggttgatacttatcataccaatcctgaaa

SEQ ID NO: 63223 - DNA, 269 bp, Glycine max
  Clone ID: 700761604H1
aactactggaacactcacccaggaatcatttggggattgctaggctggtggggaaccttaggccatgcatttggtgtctctagtatgccaggatttggtgccagtctcagcttgccacaagcactttccaacactagaactgatgggctaggagcactctacagagaagggacagcttcctttcttaactccttggtgaacaacaggttcccttatacaacccagcaagtcagagacagatttatagcatctcttgcctcaaataaggc

SEQ ID NO: 63224 - DNA, 258 bp, Glycine max
  Clone ID: 700761605H1
tcctagtacaccgtattaaagaatttaagatatactatgatgatagcgcggttcccattactgttgctggtagttgttttcctggcatcagtttctgtctcatttggcattgcgtattgggaaaagcagaaccccagtcacaacaagtgcctccgaagttgcaatagcgagaaagactcctacaggaaccaagcatgccacgctcgttgcaacctccttaaggtggaggaagaagaagaatgcggaaaaggtcaaatt

SEQ ID NO: 63225 - DNA, 269 bp, Glycine max
  Clone ID: 700761606H1
aaaattatcatagcttgcaagagcagccagcaaattttgggcgggaagcccgaatgcaaccatattgtacacgtccacttgtcattttgttctgtccatcagcagtcttaagaggtcaattattccaacattgttttatgtaatgattatataaggatgttaatgtcgtttagaggttaacatccctttcttttttccaactgatactaatgcaatatgtctgtttatgttaaccttttaaaaaccaaaaaaaaaaaagggcggccgcc

SEQ ID NO: 63226 - DNA, 271 bp, Glycine max
  Clone ID: 700761607H1
aagaaagtgaaggttctgagtctcaaagagaaccacgaagacataagaataagaacccttttcacttcaactctaaaaggttccaaactctcttcaaaaaccaatatggccacgttcgcgtcctccagaggttcaacaaacgctcccaacagcttcagaatctccgagactaccgcattttggagttcaactccaaacccaacacccttcttctcccccaccatgctgacgctgattacctcatcgttatccttaacgggactgccattct

SEQ ID NO: 63227 - DNA, 271 bp, Glycine max
  Clone ID: 700761608H1
aagatttgaaattttgataaaccgcgatcacaggttgccgcaccttaaaaccggaaacaaaagcaatcgttacttgatttcaagaatttctcaatttctttctacttctttgtgtacgatttcttaagggaaagaaaatcactctctgtgctggccacagacttcgtgaatcattttcttttccacttttagtttatttactgaacactctcctatttgatataggacttcgtgtcagatttaaacttcttctgtttctttctcagttctc

SEQ ID NO: 63228 - DNA, 270 bp, Glycine max
  Clone ID: 700761609H1
ccttaataaataatttaagatactatgatgagagcacggttcccattactgttgctgggacttgttttcctggcttcagtttctgtctcatttggcattgcttactgggaaaaagagaaccccaaacacaacaagtgtctccagagttgcaatagcgagagagactcgtacaggaaccaagcatgccacgctcgttgcaacctccttaaggtggagaaagaagaatgtgaagaaggtgaaattccacgaccacgaccactaacacaacac

SEQ ID NO: 63229 - DNA, 265 bp, Glycine max
  Clone ID: 700761610H1
cttgagaagccgcgaccccatctattccaacaagcttggcaagttgtttgagattaccccagagaaaaaccctcagcttcgggacttggatgtcttcctcagtgttgtggatatgaacgagggagctctttttctgccacacttcaattcaaaggccatagtggtactagtgattaatgaaggagaagcaaacattgaacttgttggcattaaagaacaacaacagaggcagcaacaggaagagcaacctttggaagtgcggaaa

SEQ ID NO: 63230 - DNA, 268 bp, Glycine max
  Clone ID: 700761611H1
tgataacttaattagtgttcatgaatacgtcaagccttactttagtggttctaaattgaaaagctttctagctggtcataatatcaccattactgatggtattgacaagactagtgcaactttgcaatttagaaagttagcagattgtgattttctcaagagaaactttaagcagatgtctaatgttttgtgggtagctcctgaggacaaggcgagtttatggtcacaacttcattatgtttcgtgtaataatctggaaatgcaagaa

SEQ ID NO: 63231 - DNA, 267 bp, Glycine max
  Clone ID: 700761613H1
taaaccaggagagaaccctaggcctaggcctaaagatcgccaaatgattcaagatcgtgtgaaagagttgcgggaaattgtgccaaatggagcaaaatgtagcatagatgcacttctggaaaagaccatcaagcatatgcttttcctgcaaagtgtaacaaagcatgctgacaagctgaaacagacaggggaatctaagattgtcagtaaagaaggtggattgctattaaaagataactttgagggaggggctacatgggcatatga

SEQ ID NO: 63232 - DNA, 267 bp, Glycine max
  Clone ID: 700761614H1
atacccccaactaacaataattccttcacttgcagaacttagttctctgttgcatcatcatcatcttcattagtgttagccctaaacttcaccttcaaccatgaccacagtgccaccacacagtgtccaagtgcacacaacaacacaccgctacgaagccggcgtcgtcccgccggctcgttttgaggcgccgcgttacgaagccggcatcaaggcgccctcttccatttaccattccgagagaggtccgacgacctctcaggttct

SEQ ID NO: 63233 - DNA, 268 bp, Glycine max
  unsure (1)..(268): unsure at all n locations
  Clone ID: 700761616H1
aattttgataaaccgcgatcacaggttgccgcaccttaaaaccggaaacaaaagcaatcgttacttgatttcaagaatctctcaatttcttcctacttctttgtgtacgatttcttaagggaaagaaaatcactctctgtgctggccacagacttcgtgaatcattttcttttccactcttcgtacaaccctagnanactctgctatttgatataggacttcgtgtcagatttaaacttcttctgtttctttctcagttctctgctta

SEQ ID NO: 63234 - DNA, 268 bp, Glycine max
  Clone ID: 700761618H1
gtcactcttctgatttctttttctcatctctcagagacccttttgagtcatgaagcaaaaaacgccttcttcaccaaccactgcaacaaatgcgtcgaagatgcaaggtgacaagtccctgcagagtccaccaccaccaccaccaccacgcctcagagcttcttctaaggctccgaagtcaccgccagagattgtaaatagggaatccatttcatgaaccagagctaagtcagtgcctccagacttgaagaacgtttcaagggccaaa

SEQ ID NO: 63235 - DNA, 266 bp, Glycine max
  Clone ID: 700761620H1
aatttttgaagcgtaccggatttcactgtgatatcatttgtgtcactggatggactgccaccccaatgcaggatgttcaggttacaattgattggtttatttcctctcaggaatgtgttcccaggacttattgtgttttaaatccacaaaatccttttgtgttaaataggtggatggggaaactgactttccccaagggcacttcccgaaatgttaagagaatgcctctttctatagggggaggagctggtgcaaagaatgctatt

SEQ ID NO: 63236 - DNA, 266 bp, Glycine max
  Clone ID: 700761622H1
tacagattggccagtaccactgaaaatcatttctggaaccattcttgcaacaattttgcggaacaaccttctggaaactcttttcctttcttagagatgctggtaatgggggtgtttttgttggtaatgttgcttcagcattcacaacttcaagtgtgcttgaggcccaaagtagaaagcccaacagatatgaagtttcccaatacagatatcgcaatgtgccaataaagcgcagagcatgggttgaaggccagatgtctttcgat

SEQ ID NO: 63237 - DNA, 265 bp, Glycine max
  Clone ID: 700761625H1
acgcgagggacacgttggaaatgatcaagagggctaagacttcggatgctaaagatccaatggcggtaccagctgatttgggttacgacgagaattgcaagagagtggttgatgaggtcgtgaatgcttatggttgtattgacattctggtcaacaatgcagctgagcaatacgagtgtggaacagtggaggacattgatgagcctaggcttgagagggtctttcgtacaaatatcttctcctatttcttcatgaccaggcatgc

SEQ ID NO: 63238 - DNA, 266 bp, Glycine max
  Clone ID: 700761626H1
aaccaaagaacacctagagcccaacttagaagggctcactgtagatgaggcaattcaaaacaagagattgttcctactagatcatcatgacccaatcatgccatatttgaggcgaataaatgcaacctccacaaaggcttatgctaccagaaccatccttttcctgaaaaatgacggaactttaaggccacttgccactgagttgagtttgccacatcctcagggagatcaatctggtgcttttagtcaagtttttctgcctgcag

SEQ ID NO: 63239 - DNA, 265 bp, Glycine max
  Clone ID: 700761627H1
ctccattggtccttaaacactcatcagtcatcaccatggccaagctagttttttccctttgttttctgcttttcagtggctgctgcttcgctttcagttccagagagcagcctcagtaaaacgagtgccagatccaaaaactcaatgccctcaaaccggataaccgtatagagtcagaaggagggctcattgagacatggaaccctaacaacaagccattccagtgtgccggtgttgccctctctcgctgcaccctcaaccgcaa

SEQ ID NO: 63240 - DNA, 264 bp, Glycine max
  Clone ID: 700761628H1
gagaaacaaaaaagaaaacgagaagcatcaccgccatgatcgcattttgctgaggctagaaagataagcaacaatctaagcatgtcgaatcgcaaaatatcagatcacaatcaacagtgactacgtttcgttcctctccttcgtttcgttttcgatcttcggtttcattctgcgtttgttcacatcatggccactgcttcagtggcatttacgtccagggaggaccaccgcaagcagattgagttggaggaggcgcgtaaagca

SEQ ID NO: 63241 - DNA, 262 bp, Glycine max
  Clone ID: 700761629H1
attcttccaccaagttatgggttaccttgtgttgcttcttttctctctcttaggtctctcttctagttccagcatatcaactcatcgttccatattggaccttgacctaaccaagtttaccacacagaaacaggtgtcttcactgttccaactatggaagagtgagcacggacgtgtctaccataaccacgaagaagaggcaaagagacttgagattttcaagaataacttgaactatatcagggacatgaatgcaaacaga

SEQ ID NO: 63242 - DNA, 265 bp, Glycine max
  unsure (1)..(265): unsure at all n locations
  Clone ID: 700761630H1
gggatggtgaagagatgacattgattccgggaaccagtgttgaagaggcttacaacaagctaacagttgaacttgagaaaagtgttcctacattggttggcattgaatgtcccaaggatgaaaaacttcctcgtcgcaaagtttttgataaacctaagacgcgctgcttcactattctccctatggagtttaatcttgtggttcgtcagaagtttttaaattttgtgaggttcattatgnatgaaagggacaagcttagttgtca

SEQ ID NO: 63243 - DNA, 268 bp, Glycine max
  Clone ID: 700761633H1
ttcttccaccaagttatgggtttccttgtgttgcttcttttctccctcttaggtctctcttctagttccagcatatcaactcatcgttccatattggaccttgacctaaccaagtttaccacacagaaacaggtgtcttcactgttccaactatggaagagtgagcatggacgtgtctaccataaccacgaagaagaggcaaagagacttgagattttcaagaataacttgaactatatcagggacatgaatgcaaacagaaaatcac

SEQ ID NO: 63244 - DNA, 267 bp, Glycine max
  Clone ID: 700761634H1
caaacaaccagctcctggcgattggttcctccaactccaccgcgtcctcctggatcgaccgaaacgtcgtcgcttactacccccaaaccctcgtcagcggaatctccgtcggcgacgaggttctgaccagcgtcccctcctccgcccccctcattctccctgccctcgagtccctctacaacgccctcgtcgcctccaacctccaccaacaaatcaaggtctcaacccctcacgctgcttccatcattctcgaccctatccctccct

SEQ ID NO: 63245 - DNA, 264 bp, Glycine max
  Clone ID: 700761635H1
tgaaattttgataaaccgcgatcacaggttgccgcaccttaaaaccgtaaacataagcaatcgttacttgatttcaagaatttctcaatttctttctacttctttgtgtacgttttcttaagggatagagaatcactctctgtgctggccacagacttcgtgaatcattttcttttccacatctcgtacgattcttgcacacgctcttatttgatattggactgcgcgatagatttagactacatctgtcacactctcagtgct

SEQ ID NO: 63246 - DNA, 261 bp, Glycine max
  Clone ID: 700761636H1
caacaatgaagacactcctgttgttgccgtttctattattgacaccaacagcttggagaaccagctcgaccagatgcctaggagattctatcttgctgggaaccaagagcaagagtttctaaaatatcagcagcagcagcaaggaggttcccaaagccagaaaggaaagcaacaagaagaagaaaacgaaggaagcaacatattgagtggcttcgcccctgaattcttgaaagaagcgttcggcgtgaacatgcagatagt

SEQ ID NO: 63247 - DNA, 262 bp, Glycine max
  Clone ID: 700761637H1
ttcgtattgtcgcagagatagataaccctagctcaccgattcaatatgcaaatcgtcgttaagaccctcactggtaagaccatcactctcgatgtcgagatgtcatacaccgtagtcaatgtagaggccaaaattcaatactaggaagggattccactatatcagcatcggctcatatatgctggcaagcagcttgaggatggacgtacccttgatgattataacatccaaaaggagtccactctccactttgtttttcgtc

SEQ ID NO: 63248 - DNA, 254 bp, Glycine max
  Clone ID: 700761640H1
ggccgatccgtgtctctccagcttattagtgtcaccaaagctgatgccaacggaaaagggaaacttggaaaggctacctttttggaaggtatcattacttcattgccaactttgggagcaggccaatctgcattcaaaattaattttgaatgggatgatgggagtggaattcctggagcattttatatcgagaactttatgcaaactgagtttttccttgtgagtttgactcttgaagacattccaaaccatgg

SEQ ID NO: 63249 - DNA, 240 bp, Glycine max
  Clone ID: 700760984H1
ggcaacagtgagaacaccattgaattttgattctagcaagcagagcttttgtcaattctctattgatcttcttggtggaggaattttagtggacaaaactggagattggatcacacttatacaaaattctccaattagtaacttgttgagagttgctgcttggaagaaaggctgtttaatggttaagattgtgatgtctgggaatgcagcagtcaaaaggagtgattgggcctcattggt

SEQ ID NO: 63250 - DNA, 235 bp, Glycine max
  unsure (1)..(235): unsure at all n locations
  Clone ID: 700760985H1
tgagagtgcggtttcctttgttggtgttgctgggaactgttttcctggcatcagtttgtgtctcattaaaggtgagagaggatgagaataaccctttctacttgagaagctctaacagcttccaaactctctttgagaaccaaaacggtcgcattcgtctcctccagagattcaacaaacgctccaaacaacttagaaacaatcaagactancggantgnccagtttcagtcaaa

SEQ ID NO: 63251 - DNA, 141 bp, Glycine max
  Clone ID: 700760986H1
agcattttcagaggaacaatggcgggtagggtttcgacgtgcttcttcttcgtgtttgctctttctctccttcttccttttcagatctccgctgaggaatcatcggagaaagagttcgtactcacattggatcactctaac

SEQ ID NO: 63252 - DNA, 203 bp, Glycine max
  Clone ID: 700760989H1
gctcagcctaagaagaaagaggaggggaataagggaagaaagggtcctttgtcttcaattttgagggctttttactgaataagtatgtactaaaatgtatgctgtaatagctcatagtgagcgaggaaagtatcgggctatgtaactatgactagagcttcaactatgaataaataaatcgacagcatatgatgcttttgttt

SEQ ID NO: 63253 - DNA, 227 bp, Glycine max
  Clone ID: 700760990H1
gctcagcctaagaagaaagaggaggggaataagggaagaaagggtcctttgtcttcaattttgagggctttttactgaataagtatgtactaaaatgtatgctgtaatagctcatagtgagcgaggaaagtatcgggctatgtaactatgactagagcttcaactatgaataaataaatcgacagcatatgatgcttttgtttaaaaaaaaaaagaaagggcggccg

SEQ ID NO: 63254 - DNA, 241 bp, Glycine max
  Clone ID: 700760992H1
gcaaaatgaccaagttcacaatcctcctcatctctcttctcttctgcatcgcccacacttgcagcgcctccaaatggcagcaccagcaagatagctgccgcaagcagctccagggggtgaacctcacgccctgcgagaagcacatcatggagaagatccaaggccgcggcgatgacgatgatgatgatgacgacgacaatcacattctcaggaccatgcggggaagaatcaactacataag

SEQ ID NO: 63255 - DNA, 231 bp, Glycine max
  Clone ID: 700760993H1
ccaaagctcgtctcctcggtctcctttttttctctctttctgtttcaattgctttcactagtctcaattgttttgcttctaaatattattttagttgtgttgtgggtgtgtgataggggtggagtacatcgttcctgctgatgtctttgaagcctttcctccggaggagcagaaactttggcattctcatgcttatgagattaaatcaggcctgttggtgaatcctagagt

SEQ ID NO: 63256 - DNA, 184 bp, Glycine max
  Clone ID: 700760994H1
gccttatccttcatagttcagatcctttcttgctctgtattttgtttttcttttaaatttttctttaaatttctcaattgatcaaagatcttcagcaaaccggtcaagtttgtgtagtttggccagatgggaggtgggtttagagtgctacacttagttagaccttttctctcgttcctacctg

SEQ ID NO: 63257 - DNA, 165 bp, Glycine max
  Clone ID: 700760995H1
aaacttaattatgaacacttccttagttcaatatggggaagtcttcactcactctctgtcttcccgtgcttagtatcttgtcgagtgcatgttgctattagctcagcaagtcacgagtggcactaacaactcgagcgtgaacgacacgcgtagtcgaagtggtga

SEQ ID NO: 63258 - DNA, 246 bp, Glycine max
  Clone ID: 700760996H1
gttctcgtgtcaatttctaaatccaccaccacaccctctcttctattctctattattattatctccacacccttcactctctctcactcttctctcaatccttcaaccgcaatggccaccgctgccgagaaactctccgctctcaaatccgccgtcgccggattgaacgaaatccgtgagaatgagaagaacggattcatcagcctcgtcggccgctatctcagtggcgaacgcagcatgtggaat

SEQ ID NO: 63259 - DNA, 255 bp, Glycine max
  Clone ID: 700761001H1
gttcagtgtctacaataccaggtgattttgtcattggtgtcaagttgacaaccataaacaatatgtgtgcatatgggctcaatcctggtatttcaggttctcgtcttttgggcaccattcctcagtccatttcacagcaaactgtttggaatcaaatggcaacagtgagaacaccattgaattttgattctagcaagcagagcttttgtcagttttctattgaccttctcggtggaggaatttagtggacaaact

SEQ ID NO: 63260 - DNA, 268 bp, Glycine max
  Clone ID: 700761002H1
tcttacttgagtacaacactacggttgttttgttctgtcatcttaaagcaagatatgagttcatcaggaattagagcatggagtggtggaggccttgaaagaccagggcatatgcaggtggaaccatgctttaagatcagctcaacaccatctcaaaacccattttggctcattctctcaggctaacaggctttctgcttctgctatgctctccacaacactaaaacatgagaagccaaagcaatcagaggagtccttcagaaatgtc

SEQ ID NO: 63261 - DNA, 266 bp, Glycine max
  Clone ID: 700761003H1
cattgtctttgaacactcatcaccatggccaagcttgttctttccctttgtttccttcttttcagtggctgcttcgctctgagagagcaggcacagcaaaatgagtgccagatccaaaagctgaatgccctcaaaccggataaccgtatagagtcggaaggtgggttcattgagacctggaaccctaacaacaagccattccagtgtgccggtgttgccctctctcgctgcacccttaaccgcaatgcccttcgtagaccttccta

SEQ ID NO: 63262 - DNA, 266 bp, Glycine max
  Clone ID: 700761004H1
caaactttctttagctatctttttcttttttcttttagccttattttcaaacctagcctttggcaaatgtaaagaaaccgaggtagaagaagaagaccctgagctcgtaacatgcaaacaccaatgccaacagccacagcaatacactgagggtgacaagcgggtatgcttgcaaagatgtgacaggtatcatcgtatgaagcaggaccgagagaaacaaatccaagaggaaactcgtgagaagaaagaggaggaaagccgtgaaa

SEQ ID NO: 63263 - DNA, 156 bp, Glycine max
  Clone ID: 700761005H1
ctcgagccgcaacagtgaaataggtcttgattctaatcccactttggaggatatgccacattcagcttgggaccttttttgctgggacagtgagaagcatttgccaaataatgtttctggagaattactctcttgcaaattggatactgttactgg

SEQ ID NO: 63264 - DNA, 211 bp, Glycine max
  Clone ID: 700761006H1
aaattccataaaatggagcctcgcaaagcttcaccattatcgtgggtctcgatcttcttccttaccatttccttgtggggagttaaggtatcaagtgaagagcaccaccaccatggcaaatctaaagagggacctgtggtggaaagggatcaaaggaggacattacttgtcactgaatttcgagagatcactgccattgacatcaaggaag

SEQ ID NO: 63265 - DNA, 265 bp, Glycine max
  Clone ID: 700761007H1
ttctctccattggtccttaaacactcatcagtcatcaccatggccaagctagtttctcccctttgtcttctggctgatcagtggctgctgcttcgctttcagttccagagagcggcctcagcaaaacgagtgccagatccaggaactcaatgccctcagaccggataaccgtatagagtcagaaggagggctcattcagtacatggaaccctaacgacaagccattccagggtgccggtattgacctctctcgctgcaccctcaa

SEQ ID NO: 63266 - DNA, 264 bp, Glycine max
  Clone ID: 700761008H1
ctgagggttttccccatgtgctttcacgcaaaaatggtgaaaaaggcaaaaggagatgtgtttctggggatggtgaagagatgacattgattccgggaaccagtgttgaagaggcttacaataagctaatagttgaacttgagaaaagtgttcctacattggttggcattgaatgtcccaaggatgagaaacttcctcgtcgcaaaatttttgacaaacctaagacgcgctgcttcactattctccctatgggatttaatcttg

SEQ ID NO: 63267 - DNA, 267 bp, Glycine max
  Clone ID: 700761009H1
gagctccttcaaacttaattattaacacttccttagtgcaatatggggaagcccttcactctctctctttcttccctttgcttgctactcttgtcgagtgcatgctttgctattagctccagcaagctcaacgagtgccaactcaacaacctcaacgcgttggaacccgaccaccgcgttgagtccgaaggtggtttgattcaaacatggaactctcaacaccctgagctgaaatgcgccggtgtcactgtttccaaactcaccctc

SEQ ID NO: 63268 - DNA, 261 bp, Glycine max
  Clone ID: 700761011H1
gttgaagaggcttacaacaagctaacagttgaacttgagaaaagtgttcctacattggttggcattgaatgtcccaaggatgaaaaacttcctcgtcgcaaagtttttgataaacctaagacgcgctgcttcactattctccctatggagtttaatcttgtggttcgtcagaagtttttaaattttgtgaggttcattatgaagaaaagggacaagcttagttgtcaagttggaatcaacccatattctatggaatggact

SEQ ID NO: 63269 - DNA, 262 bp, Glycine max
  Clone ID: 700761013H1
cctcgagccgaatcggctcgagggagaatcatgtagttcaaatacccctaatggcacaggaggaaattctgtcttctagtgcaagtgatttcagaactgcaatggtgagtagaaatagcaagcctcaagctactgcaatgcatgtgggagctatagaaattatcattgatagtttcgcaagtcctgactgcaacatagttggtgcaatgcttttggttgatacttatcataccaatcctgaaaatgcagttcgtagtatttt

SEQ ID NO: 63270 - DNA, 250 bp, Glycine max
  Clone ID: 700761014H1
gttcctcactgaccaagccatggcgatgagaaccaaactttctttagctatctttttcttttttcttttagccttattttcaaacctagcctttggcaaatgtaaagaaaccgaggtagaagaagaagaccctgagctcgtaacatgcaaacaccaatgccaacagccacagcaatacactgagggtgacaagcgggtatgcttgcaaagatgtgacaggtatcatcgtatgaagcaagagcgagagaaa

SEQ ID NO: 63271 - DNA, 166 bp, Glycine max
  Clone ID: 700761016H1
taaaatggtggccacagttggtattcctgagaatacaggaataccaactgtggccaccatttgaatcattactttaatacgatgactgcgctgcaaatcaacacttgctctagacattgcacactatcagataatttgccaatagaacactacgcagaatagttcc

SEQ ID NO: 63272 - DNA, 219 bp, Glycine max
  Clone ID: 700761017H1
gaactgagcagcacggttgtgtttgagaggccacatgatgaggaatttatacgcaagtggcagttagcatgcaaagggaatatcgcacatgtggtggtgatgccaaacatcactattgagaagcttgatgattttctgaacgagcttctggacaagcgtgctacctggtttcaagatggaaaggatcaaccttactgtatatcatcagatgtaggtgaa

SEQ ID NO: 63273 - DNA, 235 bp, Glycine max
  Clone ID: 700761018H1
aacggtctttgatttttcctaactcaattgtgtgcacaaccttatccaatgggtcggaggaacaatgaaccaaactccattctctcacaccgtttgatccttcccttggtgtgtttcgcttcgtgcggtttggtctacgcgttcctctctgcggtgctcacaaacagcagaaacagagtttcagagtttgggaggctagttgaagatggtgtggcggcggagaatgatagagggt

SEQ ID NO: 63274 - DNA, 264 bp, Glycine max
  Clone ID: 700761019H1
gattaatgaaggagatgcaaacattgaacttgttggcattaaagaacaacaacagaagcagaaacaggaagaggaacctttggaagtgcaaaggtacagagctgaattgtactgaagacgatgtatttgtaattccagcagcttatccatttgtcgtcaacgctacctcaaacctcaatttccttgcttttggtatcaatgctgagaacaaccagaggaacttccttgcaggcgagaaagacatgtggtaaggcagatagaaac

SEQ ID NO: 63275 - DNA, 263 bp, Glycine max
  unsure (1)..(263): unsure at all n locations
  Clone ID: 700761020H1
atccttcacttgttgctcgtcttagtttctgtgttgtgtcatttttattgctatatcctaattaaacttcaccctcaaaatgagtgatcccacactagcacaaccacacctagtcgaagtccacacaacactcgaaagagtggtgaccacacacaaccataaccatagaccctcaataaatgcctcaggtgaaaagaagaaaattgtgggggtgtattacaaagggaatgngtatgctaaattgaaccccaatttcgtggggt

SEQ ID NO: 63276 - DNA, 83 bp, Glycine max
  Clone ID: 700761021H1
cttatttgagaaacacttgggcgttggtgcaaatgtgtgcttcgttaatttgctctggagacgacaggctcactgagaaaatt

SEQ ID NO: 63277 - DNA, 262 bp, Glycine max
  Clone ID: 700761022H1
gacaaaactggagattggatcacacttatacaaaattctccaattagtaacttgttgagagttgctgcttggaagaaaggctgtttaatggtcaagattgtgatgtctgggaatgcagcagtcaaaaggagtgattgggcctcattggtacaagtgtttttaacaaacagcaacagtacagagcattttgatgcatgtaagtggacaaaatcagaaccacattcctgggaattgatcttcccaatagaggtatgtggtccta

SEQ ID NO: 63278 - DNA, 260 bp, Glycine max
  Clone ID: 700761023H1
gttgaagcttggactgatcattgacgaggatgcaggtgaagctgatgctgaaatgcacccactggaggaggccgaggctgatgctgagggcagcaagatggaggaggttgattaaaattaaatatgatgcgtatcttgttagtagcgtctctaatgcctcagacggctatgtgtaggtctcctatgatgatctgggattgatgaaagtgttcattggatgtatggctaattagctataatttcgcgggtctatttttgag

SEQ ID NO: 63279 - DNA, 174 bp, Glycine max
  Clone ID: 700761024H1
ctcagttctctgcttaatttcaagttcaagctggtgaaattaagaatagaactgagaaagaaacagaagaagtttaaatctgacacgaagtcctatatcaaataggagagtgttcaacaaatagactaagcgtggaaaagaaaatgattcacgaagtctgtggccagcacagag

SEQ ID NO: 63280 - DNA, 251 bp, Glycine max
  Clone ID: 700761025H1
gttggaggaaccattctgcgtagtgatctattggcaaattttttgacagagggcaattttagagcaagtgttgatttgcagcgcactcatcgtattagaggaatgattaaaatggtggccacagttggtattcctgagaatacaggtatatcattggcctgtgctatgaatagttcttttagggggcgcgccagttacgatatttacaccatctgctctcaagactgtgaattgtggaatcctgcttgcac

SEQ ID NO: 63281 - DNA, 258 bp, Glycine max
  Clone ID: 700761026H1
ctttggaagtgcggaaatatagagccgaattgtctgaacaagatatatttgtaatcccagcaggttatccagttgtggtcaacgctacctcaaatctgaatttctttgctattggtattaatgccgagaacaaccagaggaacttcctcgcaggttcgcaagacaatgtgataagccagatacctagtcaagtgcaggagcttgcattccctgggtctgcacaagctgttgagaagctattaaagaaccaaagagaat

SEQ ID NO: 63282 - DNA, 164 bp, Glycine max
  Clone ID: 700761027H1
gtctcatttggcattgcttactgggaaaaagagaaccccaaacacaacaagtgtgctcagagttgcaatagcgagagagactcgtacaggaaccaagcatgccacgctcgttgcaacctccttaaggtggagaaagaagaatgtgaagaaggtgaaattccacg

SEQ ID NO: 63283 - DNA, 262 bp, Glycine max
  Clone ID: 700761030H1
ggaatggcaactggatctaccttgtgacaaaattcctagtgtcttgactacaactgatgaaagattggtaggcacagaacatgagggatatgatccttttcttggtggaattcaaaaatatgccactcccatgatgcccctagatgaagaaattctttctaaggttgcacaagatatggttgaggaatggtttgattgtgttgatgaggaggattcctttgaggaagtttctttgagtgcagcactcaatggtgttgagggt

SEQ ID NO: 63284 - DNA, 187 bp, Glycine max
  Clone ID: 700761031H1
gcggtttcctttgttggtgttgctgggaactgttttcctggcatcagtttgtgtctcattaaaggtgagagaggatgagaataaccctttctacttgagaagctctaacagcttccaaactctctttgagaaccaaaacggtcgcattcgtctcctccagagattcaacaaacgctccacacaacat

SEQ ID NO: 63285 - DNA, 213 bp, Glycine max
  Clone ID: 700761032H1
gagaccgctacgaagctggcgtcgtctccctcggaggacgtgtagaaccggcgcgttgatgaagccggcgtcaaagcgccctccatttaccattccgagacatgtccaacgacttcccaggtcctcgcagtactcgccggcctcccggtcggtggcatcctgctcctcctggcgggattgctcctggcaggaacccgtacaggactggcagtt

SEQ ID NO: 63286 - DNA, 260 bp, Glycine max
  Clone ID: 700761033H1
gtttgtgtggctgatccagatcagttctgaagagtgggtgttttcttggaaatagagtatttcaaaatatcggggctcaggaatataaggttttgaattttctaatctcattgttttctcggtaataaagactatctgatcttataataatatactttttacctcatctttctttgctttatgcctttatggccgttaccaaaattttatatttcatgggttttcagaataaagagtctaatcttgtttttctgatttga

SEQ ID NO: 63287 - DNA, 259 bp, Glycine max
  Clone ID: 700761035H1
gtggcgttttgacttgaaacagtcgctgctgcgtcttcttcttcttcatccgtggcgttagggttttggtcggagtagccgttccccatggacgccgaagctgaccctcctcaaaaccctatcacaagacacaaatgcttggcatgctataagcaatataagaagaaagagcatcttattgagcacatgaaaacttcgtatcattctgttcatcagccaagatgcggggtctgtcaaaagcactgcaaatcttttgagt

SEQ ID NO: 63288 - DNA, 247 bp, Glycine max
  Clone ID: 700761039H1
tttccttagttcaatatggggaagcccttcttcactctctctctttcttccctttgcttgctactcttgtcgagtgcatgctttgctattacctccagcaagttcaacgagtgccaactcaacaacctcaacgcgttggaacccgaccaccgcgttgagtccgaaggtggtcttattgaaacatggaactctcaacaccctgagctgcatgcggcggtgtactgttccaaaggcccctcaaccgaaa

SEQ ID NO: 63289 - DNA, 260 bp, Glycine max
  Clone ID: 700761040H1
gaagaaagaatatagtcttcagctggacaaggatcatttattttgaaagacaagtttgtgtgacaatcttatagttctaagaagggtgcaagtgagagctttgctgtgatggcaacccgtagatattcttttggaagggctgatgaggccactcatccagactccatgagggccactttggctgaatttgcatccactttcatctttgtctttgctggagaaggctctagccttgctttggttaagatttaccaggattc

SEQ ID NO: 63290 - DNA, 259 bp, Glycine max
  Clone ID: 700761041H1
ctcgagccgtctctccattggtccttaaacactcatcagtcatcaccatggccaagctagtactttccctttgttttctgcttttcagtggctgctgcttcgctttcagttccagagagcagcctcagcaaaacgagtgccagatccaaaaactcaatgccctcaaaccggataaccgtatagagtcagaaggaggcgtcattgagacatggaaccctaacaacaagccattccagtgtgccggtgttgccctctctcg

SEQ ID NO: 63291 - DNA, 257 bp, Glycine max
  Clone ID: 700761042H1
ctcgagccgtcttcttctcttgcggctagggttttagcgcacttcttctagatttaaggaagatgggtaaggaaaaggttcacatcagtattgtggtcattggccatgtcgactctgggaaatccactaccactggtcacctgatttacaagcttggaggcattgacaagcgtgttattgagaggtttgagaaggaagctgctgagatgaacaagaggtctttcaagtatgcctgggtgctggacaaacttaaggct

SEQ ID NO: 63292 - DNA, 254 bp, Glycine max
  Clone ID: 700761043H1
ggcacagattgaagagttccattcgatgcagaggatgatgaatgctcctgattcaaatgataatattgatctactgttgagcattgatttgttgggtttacaaggagcaggtaaagcttttccaaacaagattgtttttgatgataaacttgtgctggctaacacacaagaattctttgctggaaattttccagtggattcttggttaccaatttttgtgaattgtctttatcctgtaagtcaatgaccttcag

SEQ ID NO: 63293 - DNA, 256 bp, Glycine max
  Clone ID: 700761045H1
agaagccgcgaccccatctattccaacaagcttggcaagttgtttgagattaccccagagaaaaaccctcagcttcgggacttggatgtcttcctcagtgttgtggatatgaacgagggagctctttttctgccacacttcaattcaaaggccatagtggtactagtgattaatgaaggagaagcaaacattgaacttgttggcattaaagaacaacaacagaggcagcaacaggaatagcaacctttggaagtgc

SEQ ID NO: 63294 - DNA, 259 bp, Glycine max
  Clone ID: 700761047H1
gaagaaaagggacaagcttagttgtcaagttggaatcaacccatatactatggaatggactggtttggccaatagattactgagtaagggcaacgatattctgtgttgcgattatgctagttttgatggtttgattaccaagcaagttatgagcaagatggcagaaatgatcaacagtctttgtggtggtgatgaaaaactgatgcgtgaaaggacacacctgctgttggcttgttgttcaaggatggcaatttgtaag

SEQ ID NO: 63295 - DNA, 265 bp, Glycine max
  Clone ID: 700761048H1
gctattctcatgaatatgccaaatgctgttctttcaatgtggagatattttgttggagatctcgtctttgaagtttctaagatgacttctccctacattaaatgtacagtctctttcttcatagcatttggaaatttggctgatgataccatcaattttgaggcttttccccacaagctggtgcagtttgcagagattcaggaaaaagttgtattgaaattttcacaagaggaatttcttacagcttggtcaactcaggtgcgtc

SEQ ID NO: 63296 - DNA, 190 bp, Glycine max
  Clone ID: 700761049H1
ctcgagccgatttcaattccttccctcacccaaaccgcactatcgttcttcgatacgctccatctttgaataggtcctgtttattgagcggttgtggattaagagtaaaagtgtaaaatggccttcgtagcaaatcaacctcagggtttgtgtgtgacatcttcctcaaggcatttgccatggagcaaaa

SEQ ID NO: 63297 - DNA, 262 bp, Glycine max
  Clone ID: 700761050H1
cattgtctttgaacactcatcaccatggccaagcttgttctttccctttgtgtccttgcttttcagtggctgcttcgctctgagagagcaggcacagcaaaatgagtgccagatccaaaagctgaatgccctcaaaccggataaccgtatagagtcggaaggtgggttcattgagacctggaaccctaacaacaagccattccagtgtgccggtgttgccctctctcgctgcacccttaaccgcaatgcccttcgtagacct

SEQ ID NO: 63298 - DNA, 237 bp, Glycine max
  Clone ID: 700761053H1
tatcgagccgattcggctcgagctaaccactctgtttctcttgctatacttttaccctgtttaccagtggaacaaatcttcataccaaattaggttttgttttggagaaatgtatgcagagactggtcttttcttcccatatttgcacaacgtctctcacggccttcatcagcttgaggagtactgcaaaacccagaagtccaatgcttcaatggatgaccttgttcaagtctgctg

SEQ ID NO: 63299 - DNA, 247 bp, Glycine max
  Clone ID: 700761054H1
attttagctttctcttccttcataatttctcacctttcaaatctccattcagcttcattttctgcatagaaaaaacccttttctggagaaagaatatagtcttcagctggacaaggatcattcatcttgaaagaagagtttgtgtgtgacaatctttatagttctaaggagggtgcaagagagaactgaatttgctgtgatggcaactcgtagatatgcttttggaagagctgatgaggcaactcat

SEQ ID NO: 63300 - DNA, 210 bp, Glycine max
  Clone ID: 700761055H1
ctggcgatgaaccagttgttgccatcagtcttcttgacacctctaccttcaataaccagcttgatcaaacccctagggtattttaccttgctgggaacccagatatagagtacccatagaccatgcaacaacaacaacagcagaaaagtcatggtggacgcaagcaggggcaacaccagcaggaggaagaggaaaaaggtggcgagcgtg

SEQ ID NO: 63301 - DNA, 263 bp, Glycine max
  Clone ID: 700761056H1
catcaccatggccaagcttgttctttccctttgtttccttcttttcagtggctgcttcgctctgagagagcaggcacagcaaaatgagtgccagatccaaaagctgaatgccctcaaaccggataaccgtatagagtcggaaggtgggttcattgagacctggaaccctaacaacaagccattccagtgtgccggtgttgccctctctcgctgcacccttaaccgcaatgcccttcgtagaccttcctacaccaacggtcccc

SEQ ID NO: 63302 - DNA, 256 bp, Glycine max
  Clone ID: 700761057H1
ggacaagcttagttgtcaagttggaatcaacccatactccatggaatggactggtttggccaatagattactgagtaagggcaacgatattctgtgttgcgattatgctagttttgatggtttgattaccaagcaagttatgagcaagatggcagaattgttaaccagtcttggtggtggtgatgaaaaattgatgcgtgaaaggacacacctgctgttggcttgttgttcaaggatggcaatttgtaagaaagat

SEQ ID NO: 63303 - DNA, 255 bp, Glycine max
  Clone ID: 700761058H1
attttctgattttagcaaattaaaatagtagtgttattggtaggttttggcaaagatgttttcagttccaggggtgtcgggaatactgaacagaggaggagggcataagataaaagggacagtggtgttgatgaggaagaatgtgttggacttcaacagcgtggctgatcttactaaaggaaatgttgggggactcataggcaccggcctcaacgttgttggctcaacacttgataacctcactgctttcttggg

SEQ ID NO: 63304 - DNA, 250 bp, Glycine max
  Clone ID: 700761059H1
tcaccattactgatggtattgacaaaactagtgcaactttgcaatttagaaagttagcagattgtgattttctcaagagaaactttaagcagatgtctaatgttttgtgggtggctccttaggacaaggcgagtttatggtcacaacttcattatgtttcgtgtaataatctggaaatgcaagaagcttatcttgtcaatctcgtaaatgtgttacgagaattgtatttgcacagtccagaggaagctcg

SEQ ID NO: 63305 - DNA, 256 bp, Glycine max
  Clone ID: 700761060H1
cactgaactatcatgcaccattgcatacaaatatggacacccatcatccaacagagttgttgcaggacgcacctgagttgaccaagctgtaagaaattccaggtgattttgtcattggtgtcaagttgacaaccataaacaatatgtgtgcatatgggctcaatcctggtatttcaggttctcgtcttttgggcacaattcctcagtccatttcacagcaaactgtttggaatcaaatggcaacagtgagaacacc

SEQ ID NO: 63306 - DNA, 263 bp, Glycine max
  Clone ID: 700761063H1
tgataatattgatctactgttgagcattgatttgttgggtttacaaggagcaggtaatgcctttccaaacaagattgtttttgataataaacttgtgctggctaacacacaagaattctttgctggaaattttccagtggattcttggttaccaatttttgtgaattgtcttgatcctgtaagtcaattagatgcagaagctgtcggtgtaaatgttacatgtggtagtggacgtggtggtttacctaccactgcttggatta

SEQ ID NO: 63307 - DNA, 263 bp, Glycine max
  Clone ID: 700761064H1
ctacaataccaggtgattttgtcattggtgttaagttgacaaccataaacaatatgtgtgcatatgggctcaatcctggtatttcaggttctcgtcttttgggcaccattcctcagtccatttcacagcaaactgtttggaatgaaatggcaacagtgagaacaccattgaattttgattctagcaagcagagcttttgtcaatttgctattgaccttctcggtggaggaatttagtggacaaaactggagttggatcacact

SEQ ID NO: 63308 - DNA, 263 bp, Glycine max
  Clone ID: 700761065H1
gtgagtagaaggcagagagactagagcggagatagcaatctcatctcattcatttcaatggcaactcaaggtcaagtcattacctgcaaagctgcggtggcctgggaacccaacaagcccttaactgtccaagacgttcaggtggctccgcctcaggccggcgaggtccgtgtccaaatcctcttcaccgctctctgccacaccgatgcttacacttggggcggcaaggatcccgaaggtctcttcccctgtattcttggcca

SEQ ID NO: 63309 - DNA, 175 bp, Glycine max; identical to SEQ ID NO: 61295
  Clone ID: 700761068H1

SEQ ID NO: 63310 - DNA, 236 bp, Glycine max
  Clone ID: 700761069H1
cttccacagtgtattgctcttgcttattgacaaaggaacttgaaaggagtgcagaatcttggagacaaagcagttctgaaatttagcccatgacacatcactgctttgtctccaagattctgcactccttccacagtgtattgctcttgctaattgacaaaggaacgttgagacaaagcagtgatgtgtcatgggctaaatttcagaactgcagtatttcactgccatagagtccg

SEQ ID NO: 63311 - DNA, 256 bp, Glycine max
  Clone ID: 700761070H1
ccaaagtttcagacccttattgacctttctgttatagaaatcttgtcaaggcatgcatctgatgaggtgtaccttggggagagggacaatccaaattggacatctgatacaagagcattagaggcttttaaaaggtttggaaataaactggcacaaattgagaataaactctcagagagaaacaacgatgagaaactgagaaaccgttgtggaccagttcaaatgccttatactctgcttttgccttctagtaagg

SEQ ID NO: 63312 - DNA, 149 bp, Glycine max
  Clone ID: 700761071H1
acatatggcagccatgttcttaaccagaaccgcgctttttcgcttttcaaagtctctcccttatgggccttgactctcccttaaaccctccatggtcaccttctcctctagtcccaattcaggctggagaaatgcaccagaaggaggaa

SEQ ID NO: 63313 - DNA, 258 bp, Glycine max
  Clone ID: 700761072H1
cactgaaagcactcagtagggtttgcggtttcagagtttgtgacgcacgcatccatggccaccaccaccaacgccgccgcagccccgccgcgccagctctcccagaaggaagccgacatccagatgatgttagccgccgacgtccacctcggcaccaaaaactgcgacttccaaatggaacgttacatcttcaagcgccgcaacgacgggatttacattattaaccttgggaagacatgggagaagcttcagttagca

SEQ ID NO: 63314 - DNA, 256 bp, Glycine max
  Clone ID: 700761074H1
cttcccgaagtgttaagagaatgcctctttctatagggggaggagctggtgcaaagaatgctattctcatgaatatgccaaatgctgttctttcaatgtggagatattttgttggagatctcgtctttgaagtttctaagatgacttctccctacattaaatgtacagtctcttccttcatagcatttggaaatttggctgatgataccatcaattttgaggcttttccccacaagctggtgcaatttggagagat

SEQ ID NO: 63315 - DNA, 117 bp, Glycine max
  Clone ID: 700761075H1
tctctccattggtccttaaacactcatcagtcatcaccatggccaagctagttttttccctttgttttctgcttttcagtggctgctgcttcgctttcagttccagagagcagcctc

SEQ ID NO: 63316 - DNA, 257 bp, Glycine max
  Clone ID: 700761076H1
ggcaacagtgagaacaccattgaattttgattctagcaagcagagcttttgtcaattctctattgatcttcttggtggaggaattttagtggacaaaactggagattggatcacacttatacaaaattctccaattagtaacttgttgagagttgctgcttggaagaaaggctgtttaatggttaagattgtgatgtctgggaatgcagcagtcaaaaggagtgattgggcctcattggtacaagtgtttttaacaa

SEQ ID NO: 63317 - DNA, 256 bp, Glycine max
  Clone ID: 700761077H1
gtactatcttctttgctctctttctagtttgtgccttcaccatctcatacctgccttcagccaccgctcagttcgtgctcgacactgatgatgatcctcttcaaaacggtggcacatactatatgttgccagttatgagaggaaagggcggtggaatagaagtagattcaactggaaaagaaatatgccctctcactgttgtgcaatcacccaatgagctcgataaggggattggactagtctttacatctccatt

SEQ ID NO: 63318 - DNA, 189 bp, Glycine max
  Clone ID: 700761078H1
gattttgaaattgctggtaatactcttatgccagctttttctgttccacaggctactgccagatcttctgaaaatgcggaatcctctgcatgatctggaatttgtgttttctttcatttgtcagtttgtttaattcaataaaggaaattaggcatgaccctcttgttgagtatgctctgcctatttgaa

SEQ ID NO: 63319 - DNA, 263 bp, Glycine max
  Clone ID: 700761079H1
ggaagctaaacaaactcaagtaccctactctttccaagatggctcgggatatattgtctgttccggtttcaagtgttcctcctgaatctgtctttgatacaaaagtcaaagagatggatcagtatagaagttccttgcggccagagacagtagaggccattgtatgtgcaaaagactggatgcagtatggagcagccgaagcttccaatgcgatcgtgaaaatggagttctagattttattcatgtaatttttgtttaggaga

SEQ ID NO: 63320 - DNA, 241 bp, Glycine max
  Clone ID: 700761081H1
ctgaggtaaaatcagctggggaaaacaccgttgcagatgaatcaaaaagtaatgatacagctaaggattctgagaaagcaggagatggggaagctaagcagcctgagagcaaaactaatgaggcagaggataaacttactgaaagtaaggatgctgctgaagaaagcaatgcagacaaggagcatactgcagaaaaggaaagtactgatgatgaatcgaaggtaggataggaacaaaataa

SEQ ID NO: 63321 - DNA, 243 bp, Glycine max
  Clone ID: 700761082H1
ctcgagcctctcgagccgattcggctcgatgaagtttgcaaaaattatgagtcttagacaaagtgttgttggtgatcttaaacttcttactgatgggaagttatatgagggtaagcagattcctgtatctgatattagtgcaggggtgaatcatgtagttcaaatacccctaatggcacatgaggagattctgtcttctagtgcaagtgatttcagaactgcaatgttgagtagaagtggcaa

SEQ ID NO: 63322 - DNA, 162 bp, Glycine max
  Clone ID: 700761083H1
cgagggtttgggtttctcttcctcccttggagaaaaagaagagccaccgctgcgacgccgttcgtgcatttttgaggtgccgctgtcatgtttgggcgtggtggtccaaggaggagtgataactccaaatattatgatattctcgggatttccaaaaatgcc

SEQ ID NO: 63323 - DNA, 257 bp, Glycine max
  Clone ID: 700761087H1
gtttggagagattcaggaaaaagttgtattgaaattttcacaagaggaatttcttacagcttggtcaactcaggtgcgtcctgcaacaactctgttggctgatgggtgcccatatttgtatgctatggtgcatgatagttcagtgtctacaataccaggtgattttgtcattggtgttaagttgacaaccataaacaatatgtgtgcatatgggctcaatcctggtatttcaggttctcgtcttttgggcaccattc

SEQ ID NO: 63324 - DNA, 259 bp, Glycine max
  Clone ID: 700761088H1
atggagacaaatttgtttaaattgtctcttgatgatgttgaaactcctaaaggttccatgttggatcttaaaatttctcagtctaaaattgcacttcccaagaacacagttggaggaactattctgcgtagtgatctattggcaaattttctgacagagggcaattttagagcaagtgttgatttgcagcgcactcatcgtattaaaggaatgattaaaatggtggccacagttggtattcctgagaatacaggtatat

SEQ ID NO: 63325 - DNA, 254 bp, Glycine max
  Clone ID: 700761089H1
gcgtgcgaagggagagggggtcagtcaaggtcagcatagaaagactccctctcagttccgacgaggcggcgactctgcattcccacccacctaacttctctctctttctctctctagggtttcgccatttatccctaattaagctaatttcaatttcatttttaaggctgtgtttgaaagtgtgttcaatgggtactccggaattcccagatctgggaaagcactgtgctgtctcggattgcaagctcatcgat

SEQ ID NO: 63326 - DNA, 256 bp, Glycine max
  Clone ID: 700761090H1
taaagatgagtttgaagaacaacatggtggtgctaaaggtgtgtttgttgcttcttttccttgtgggggttacagctgcacgcatggaactgagcttcttcaaaagtgatcagtcatcaagttatgatgatgatgagtattcaaaaccatgctgtgatctctgcatgtgcacacgctcaatgcctcctcaatgcagctgtgaagatattacgctgaattcatgccactcagattgtaagagctgtatgtgcacacg

SEQ ID NO: 63327 - DNA, 249 bp, Glycine max
  Clone ID: 700761091H1
gcggtttcctttgttggtgttgctgggaactgttttcctggcatcagtttgtgtctcattaaaggtgagagaggatgagaataaccctttctacttgagaagctctaacagcttccaaactctctttgagaaccaaaacggtcgcattcgtctcctccagagattcaacaaacgctccccacaacttgagaaccttcgagactaccggattgtccagtttcagtcaaaacccaacacaatccttctccc

SEQ ID NO: 63328 - DNA, 180 bp, Glycine max
  Clone ID: 700761094H1
gtataccttaatagataatttaagatactatgatgagagcacggttcccattactgttgctgggacttgtgttcctggcttcagtttctgtctcatttggcattgcttactgggaaaaagagaaccccaaacacaacaagtgtctccagagttgcaatagcgagagagactcgtacagga

SEQ ID NO: 63329 - DNA, 176 bp, Glycine max
  Clone ID: 700761095H1
caactgagccatcgcagggcaactcatttgctctcaaacactctttattacaaacggttctttccttattatgctttcaatgttttgggtggccttgacaatgaaggaaagggatgtgtcttcacatatgatgctgttggttcttatgagatggttggatatagctctcagggttc

SEQ ID NO: 63330 - DNA, 259 bp, Glycine max
  Clone ID: 700761096H1
tgtgaagaggttttcttgtgtggttttgctggctctggaaggaacatggcatgaaagaacacacgttatattcaggttgacttttctgtgagaggaacttggtaagatagagcacatgatgtataaaatgagagaaaagcgagagcatgagcgttcgtgatcacacacagaagatcgatctggtagaaacgatgaaggaactatgggcacaaatggggtcactaatggccactattgtgttcatgtgcacaatctttga

SEQ ID NO: 63331 - DNA, 115 bp, Glycine max
  Clone ID: 700761101H1
aattccttcacttgcagcactgttgcatcatcatcttcattgcaaaaccctaaacttcaccttcaaccatgaccacacaagtaccaccacacagtgtccaagtccacacaacaaa

SEQ ID NO: 63332 - DNA, 246 bp, Glycine max
  Clone ID: 700761102H1
ggtccttaaacactcatcagtcatcaccatggccaagctagttttttccctttgttttctgcttttcagtggctgctgcttcgctttcagttccagagagcagcctcagcaaaacgagtgccagatccaaaaactcaatgccctcaaaccggataaccgtatagagtcagaaggagggctcattgagacatggaaccctacaaacaagccattccattgtgccggtgttgccctctctggttgaac

SEQ ID NO: 63333 - DNA, 263 bp, Glycine max
  Clone ID: 700761103H1
atgtctttgaacactcatcaccatggccaagcttgttctttccctttgtttccttcttttcagtggctgcttcgctctgagagagcaggcacagcaaaatgagtgccagatccaaaagctgaatgccctcaaaccggataaccgtatagagtcggaaggtgggttcattgagacctggaaccctaacaacaagccattccagtgtgccggtgttgccctctctcgctgcacccttaaccgcaatgcgcttcgtagacttccta

SEQ ID NO: 63334 - DNA, 265 bp, Glycine max
  Clone ID: 700761104H1
taacacctcacgactggagaccgttgggttgttcttcgagaccctctctgactcgcctggttgactcgctcgagtttaggggtttctgattcgcccgcggacggatctcaattttgtctcagttaccatctttagctgcattcgtgtcacactcctttgaacacccgtcacctcaggaaaagcaaagggcatcatatcaccatgaaggcactaattcttgttggagggtttggaacaaggttgaggccattgacactcagtgttc

SEQ ID NO: 63335 - DNA, 262 bp, Glycine max
  Clone ID: 700761105H1
tgggaaacaaaactacccttttgcttttgctctttgttctttgccatggagtggccacaacaacaatggccttccatgatgatgagggtggtgataaaaagtcaccaaaaagtttgtttttgatgagcaactccacgagggttttcaagactgatgcaggggaaatgcgtgtgctgaaaagccatggtggtaggatattttataggcacatgcacattggcttcatctctatggaaccaaagtccttgtttgttcctcagta

SEQ ID NO: 63336 - DNA, 264 bp, Glycine max
  Clone ID: 700761106H1
ctcgagcgcttattaacactttccttagttcaatatggggaagcccttcttcagtctcactctttcttccctttgcttgctactcttgtcgagtgcatgctttgctattacctccagcaagttcaacgagtgccaactcaacaacctcaacgcgttggaacccgaccaccgcgttgagtccgaaggtggtcttattgaaacatggaactctcaacaccctgagctgcaatgcgccggtgtcactgtttccaaacgcaccctcaa

SEQ ID NO: 63337 - DNA, 263 bp, Glycine max
  Clone ID: 700761107H1
gaggcttttccccacaagctggtacagtttggagagattcaggaaaaagttgtattgaaattttcacaagaggaatttcttacagcttggtcaacccaggtgcgtcctgcaacaactctgttggctgatgggtgtccatatttgtatgctatggtgcatgatagttcagtgtctacaataccaggtgattttgtcattggtgttaagttgacaaccataaacaatatgtgtgcatatgggctcaatcctggtatttcaggttc

SEQ ID NO: 63338 - DNA, 172 bp, Glycine max
  Clone ID: 700761108H1
taaatcgcgatcacaggttgccggaccttaaaaccggaaacaaaagcaatcgttacttgatttcaagaatctctcaatttcttcctacttctttgtgtacgatttcttaagggaaagaaaatcactctctgtgctggccacagacttcgtgaatcattttcttttccactct

SEQ ID NO: 63339 - DNA, 261 bp, Glycine max
  Clone ID: 700761109H1
cggctcgagtccgagaatgacaagagcggaatctccgtcgatgccgccgcgcacggggtgaaaagacggtgtccaacgctgaaccttccggtagcgatcctcagaagtctctggagttggcgaacgagctgatggaaaaaggaaacaaggcaattaaggagaacgattttggagaagcagctgataacttcagccgtgctctcgaaatcagagtggcacattatggtgaacttgctcctgagtgtgtgcacacatattaca

SEQ ID NO: 63340 - DNA, 259 bp, Glycine max
  Clone ID: 700761110H1
gaaattttgataaaccgcgatcacaggttgccgtaccttaaaaccggaaacaaaagcaatcgttacttgatttcaagaatttctcaatttctttctacttctttgtgtacgatttcttaagggaaagaaaatcactctctgtgctggccacagacttcgtgaatcattttcttttccacttttagtttattccctgaacactctcctatttgatataggacttcgtgtcagatttaaacttcttctgtttctttctcag

SEQ ID NO: 63341 - DNA, 262 bp, Glycine max
  Clone ID: 700761112H1
gttcaatatcctagtataccttaataaataatttaagatactatgatgagagcacggttcccattactgttgctgggacttgttttcctggcttcagtttctgtctcatttggcattgcttactgggaaaaagagaaccccaaacacaacaagtgtctccagagttgcaatagcgagagagactcgtacaggaaccaagcatgccacgctcgttgcaacctccttaaggtggagaaagaagaatgtgaagaagtgaaattcc

SEQ ID NO: 63342 - DNA, 265 bp, Glycine max
  Clone ID: 700761113H1
aatttaagatactatgatgatagcacggttcccattactgttgctgggacttgttttcctggcttcagtttctgtctcatttggcattgcttactgggaaaaagagaaccccaaacacaacaagtgtctccagagttgcaatagcgagagagactcgtacaggaaccaagcatgccacgctcgttgcaacctccttaaggtggagaaagaagaatgtgaagaaggtgaaattccacgaccacgaccatttgcgaaacacccggag

SEQ ID NO: 63343 - DNA, 262 bp, Glycine max
  Clone ID: 700761114H1
gctgctcttgccatattatctctcaatggaaggcatctatttgggcagcctatcaaagttaattgggcatatgctagtggtcagagagaggatacgtcaggtcactacaatatatttgttggcgatctaagtcctgaggttactgatgctacgttgtttgcatgcttttctgtctatcccagttgttcagatgcaaaggttatgtgggatcagaagactgggcgttcaaggggatttggctttgtttcattccgtaaccaac

SEQ ID NO: 63344 - DNA, 263 bp, Glycine max
  Clone ID: 700761115H1
cttaaggtggagaaagaagaatgtgaagaaggtgaaattccacacacacgaccacgagcacaacacacggagagggaacctcagcaacccggtgcgaaggaggaagacgaggataagcaaccacgtcgaatcccattcccacgcccacaacctcgtcaagacgaagagcacgagcagagagaggaacaggagtggcctcgcaagggagaaaaaagcggagaaaagggacgtgaagaggaagatgaggatgaggatgaggacaa

SEQ ID NO: 63345 - DNA, 268 bp, Glycine max
  Clone ID: 700761117H1
cccatctattccaacaactttggaaagttctttgagatcacccctgagaaaaacccacagcttcgggacttggatatcttcctcagttctgtggatatcaacgaaggagctcttcttctaccacacttcaattcaaaggccatagtgatactagtgattaatgaaggagatgcaaacattgaacttgttggcattaaagaacaacaacagaagcagaaacaggaagaggaacctttggaagtgcaaaggtacagagctgaattgtctg

SEQ ID NO: 63346 - DNA, 266 bp, Glycine max
  Clone ID: 700761118H1
gttcaatatcctagtacaccgtattaaagaatttaagatatactatgatgagagcgcggttcccattactgttgctgggagttgttttcctggcatcagtttctgtctcatttggcattgcgtattgggaaaagcagaaccccagtcacaacaagtgcctccgaagttgcaatagcgagaaagactcctacaggaaccaagcatgccacgctcgttgcaacctccttaaggtggaggaagaagaagaatgcgaagaggtcaaattc

SEQ ID NO: 63347 - DNA, 266 bp, Glycine max
  Clone ID: 700761119H1
ttcaatatcctagtataccttaataaataatttaagatactatgatgagagcacggttcccattactgttgctgggacttgttttcctggcttcagtttctgtctcatttggcattgcttactgggaaaaagagaaccccaaacacaacaagtgtctccagagttgcaatagcgagagagactcgtacaggaaccaagcatgccacgctcgttgcaacctccttaaggtggagaaagaagaatgtgaagaaggtgaaattccacga

SEQ ID NO: 63348 - DNA, 264 bp, Glycine max
  Clone ID: 700761120H1
gttatgggtttccttgtgttgcttcttttctccctcttaggtctctcttctagttccagcatatcaactcatcgttccatattggaccttgacctaaccaagtttaccacacagaaacaggtgtcttcactgttccaactatggaagagtgagcatggacgtgtctaccataaccacgaagaagaggcaaagagacttgagattttcaagaataacttgaactatatcagggacatgaatgcttacagagaatcccccattctc

SEQ ID NO: 63349 - DNA, 183 bp, Glycine max
  Clone ID: 700761121H1
aattttgataaaccgcgatcacaggttgccggaccttaaaaccggaaacaacagcaatcgttacttgatttcaagaatgtctcaatttcttcctacttctttgtgtacgatttcttaaggggaagagaatcactctctgtgctggccacagacttcgtgaatcattgtcttttccacacaaca

SEQ ID NO: 63350 - DNA, 269 bp, Glycine max
  Clone ID: 700761122H1
agcaactaacaataattccttcacttgcagaacttagttctctgttgcatcatcatcatcttcattagtgttagccctaaacttcaccttcaaccatgaccacagtgccaccacacagtgtccaagtgcacacaacaacacaccgctacgaagccggcgtcgtcccgccggctcgttttgaggcgccgcgttacgaagccggcatcaaggcgccctcttccatttaccattccgagagaggtccgacgacctctcaggttctcgcagtt

SEQ ID NO: 63351 - DNA, 265 bp, Glycine max
  Clone ID: 700761123H1
caacaaaccgacaccttagtgctcttcacccaatttataagcttctaactcctcactaccgtgacaccatgaacatcaacgcacttgctaggcaatctctcattaatgctgatggcataatagagaaatcttttttgccctcaaagcattccgttgagatgtcttcagcggtttataagaattgggttttcactgatcaagcactacctgcagatcttatcaagagaggagtggcaattaaggatccatctgccccacatggact

SEQ ID NO: 63352 - DNA, 265 bp, Glycine max
  Clone ID: 700761124H1
cactcatcaccatggccaagcttgttctttccctttgtttccttcttttcagtggctgcttcgctctgagagagcaggcacagcaaaatgagtgccagatccaaaagctgaatgccctcaaaccggataaccgtatagagtcggaaggtgggttcattgagacctggaaccctaacaacaagccattccagtgtgccggtgttgccctctctcgctgcacccttaaccgcaatgcccttcgtagaccttcctacaccaacggtcc

SEQ ID NO: 63353 - DNA, 263 bp, Glycine max
  Clone ID: 700761125H1
gtccacagcaagctgaggatgacaaatgtggggatattgggattagtattgatcatgatgatggaaccaggcgtttggaggtgtctaagaacaaaccgttagtggttcagtttcaaaaacttgataaagaatcactggccaagaaaaatcatggcctttctcgcagtgagtgagacacaagtgtgagagtactaaataaatgctttggttgtacgaaatcattacactaaataaaataatcaaagcttatatatgccttccgc

SEQ ID NO: 63354 - DNA, 264 bp, Glycine max
  Clone ID: 700761126H1
cattgttggaatctggtttgcaaaaagacagagggttaattgtggagtattttggaaggatgtcttacgttgctcataacgttaatcagccccaagagaaagatttgttggagggaaatttttcctttgatattaaatctcgctctagattggaaaaagtttcctctacaaaagcacaatttgttagtggaaaaaccttcaaatatgatataattggtgctggttcacattcttcagaagattttcctgaaaaggaagatcaag

SEQ ID NO: 63355 - DNA, 263 bp, Glycine max
  Clone ID: 700761127H1
attgtctttgaacactcatcaccatggccaagcttgttctttccctttgtatccttcttatcagtggctgcttcgctctgagagagcaggcacagcaaaatgagtgccagatccaaaagctgaatgccctcaaaccggataaccgtatagagccggaaggtgggttcattgagacttggaaccctaacaacaagccattccagtgtgccggtgttgccctctctcgctgcacccttaaccgcaatgcccttcgtagaccttcc

SEQ ID NO: 63356 - DNA, 265 bp, Glycine max
  Clone ID: 700761129H1
actcgagccgaatcggctcgaggcacaagtgagagaggttgaagacggcgtgagaatgttgcacatcaacctattcagagaggagaagggccacaaccctgaactcatacgcgaatcccaacgccgtcgtttcgccagcgtcgaaatcgtcgacgaggtcatcaatctcgacaaagaatggcgagaacgtcaattcgagttggaaaatctccgcaaggaattcaacaagatcaacaaggaagtctccaaactcaagcgtgctggg

SEQ ID NO: 63357 - DNA, 266 bp, Glycine max
  Clone ID: 700761130H1
tccatttgtccttgaatataatactcagcatggctaagcttgttctttccctttgttttctgcttttcagtggctgctgcttcgctttcagtttcagagagcagccacagcaaaacgagtgccagatccaacgcctcaatgccctcaaaccggataaccgtatagagtcagaaggtggcttcattgagacatggaaccctaacaacaagccattcacatgtgccggtgttgccctctctcgctgcaccctcaaccgcaacgccctt

SEQ ID NO: 63358 - DNA, 267 bp, Glycine max
  Clone ID: 700761131H1
gtctttgaacactcatcaccatggccaagcttgttctttccctttgtttccttcttttcagtggctgcttcgctctgagagagcaggcacagcaaaatgagtgccagatccaaaagctgaatgccctcaaaccggataaccgtatagagtcggaaggtgggttcattgagacctggaaccctaacaacaagccattccagtgtgccggtgttgccctctctcgctgcacccttaaccgcaatgcccttcgtagactacctacaccaa

SEQ ID NO: 63359 - DNA, 270 bp, Glycine max
  Clone ID: 700761132H1
cacacaactactacaagtacttccttacaatcaaaaccaacaacaactatggcaagttatcaaaagcactacgatgatcagggtcgcaaggttgacgagtatggcaacgttgagaagcaaaccgacgaatacggcaaccctgttcatgctgctagtgtcacctatgtagccaccagaactgctgctggtggttacagtgatgacattaataagcaacatgataccaccaatgcctacggcgtagacactggtagacagcatctagtggtg

SEQ ID NO: 63360 - DNA, 263 bp, Glycine max
  Clone ID: 700761134H1
tgcggtgattcactcgtactttgcttaatatggcggttgagaagttgagcattgcaaaagatgtgactgaattaattggcaaaactccattggtatatctcaaccgcatcgtggatggctgtgttgccaaagttgctgcgaactagaaatgatggaaccttgctccagtgtcaaagacaggatagggtatagcatgattgtagatgctgaggagaaaggactcatcacaccgggtgaaagtgtcctcattgagcctactagtg

SEQ ID NO: 63361 - DNA, 171 bp, Glycine max
  Clone ID: 700761135H1
ggcacagattgaagagttccattcggtgcagaggatgatgaatgctcctgattcaaatgataatattgatctactgttgagcattgatttgttgggtttacaaggagcaggtatagcttttccaaacaagattgtttttgatgataaacttgtactggctaacacacaaga

SEQ ID NO: 63362 - DNA, 261 bp, Glycine max
  Clone ID: 700761136H1
gatgccgccaacaactttgcccgtggccattataccattgggaaagagattgttgatctgtgcttggaccgcatcagaaagcttgctgacaattgcactggactccaagggtttttggtcttcaatgccgttggtggaggaactggttctggacttggttcccttctcttggagcgtctctccgttgattatggcaagaaatcaaagcttggtttcacagtctacccctctcctcaggtgtccacctctgttgttgagcca

SEQ ID NO: 63363 - DNA, 212 bp, Glycine max
  Clone ID: 700761137H1
gtccagacaaagctcgccaattgagaaggaaagctctctctcgtattgaatggctgcaaaaagctgatgtgcctaccatagcacagattgaagagttccattcgatgcagaggatgatgaatgctcctgattcaaatgataatattgatctactgttgagcattgatttgttgggtttacaagggagcagtaaagcttttccaaacaagatt

SEQ ID NO: 63364 - DNA, 124 bp, Glycine max
  Clone ID: 700761139H1
cccaaccacaaggtgggggaatcctggtgccaccatgttggcaccaggattcagcatttgtgatgatgattcatcctcatcttggtacaaaggagggttgaaatgctgattctgataagggttg

SEQ ID NO: 63365 - DNA, 262 bp, Glycine max
  Clone ID: 700761140H1
cttgcaacgattaacaatggcttcaaccgacaagtcaccggacccaacgccggcgaagggtccggatccaactccggggaagccgatgagtgttggtcagcacgtgatcgacaagagtgcaatgatggtgcagtcgctggaccccattaagcagatgagtcagcacgtgtgctccttcgacatctacagccatgacatgtctcgccagatagagacacatcactactgctccagactccaccagaacttcatacaatgtgct

SEQ ID NO: 63366 - DNA, 262 bp, Glycine max
  Clone ID: 700761143H1
ggcagaaatgatcaacagtctttgtggtggtgatgaaaaactgatgcgtgaaaggacacacctgctgttggcttgttgttcaaggatggcatcttgctcataacttgcttggtaatcaaaccatcaaaactagcataatcgcaacacagaatatcgttgcccttactcagtaatctattgccgaattaagagcaatgcaggagaggatggaatcttctcagctcaaaacttacaatctcacagaaagtgacttggtgaaaga

SEQ ID NO: 63367 - DNA, 188 bp, Glycine max
  Clone ID: 700761146H1
agaaattttgataaaccgcgatcacaggttgccgcaccttaaaaccggaaacaaaagcaatgcgttacttgatttcaagaatctctcaatttcttcctacttctttgtgtacgatttcttaagggatagaaaatcactctctgtgctggccacagacttcgtgaatcattttcttttccacacaacat

SEQ ID NO: 63368 - DNA, 249 bp, Glycine max
  Clone ID: 700761147H1
gaaaagaggggtcttcgaagaaaccatgagtatcctctctctctaaactctctcagattcgatcctctcttctcttctttcaattccgcttccctcgcactatctgactgggtttcctggccctcgccgcgatcacgcttcttcttcctcctcctcgcacaattccaactgcagtggtagcttcgtatttaatttgcttgctaggagggagatctcaccccgatcaagatatgttggcaaatggcattg

SEQ ID NO: 63369 - DNA, 266 bp, Glycine max
  Clone ID: 700761149H1
attgattccgggaaccagtgttgaagaggcttacaacaagctaacagttgaacttgagaaaagtgttcctacattggttggcattgaatgtcccaaggatgaaaaacttcctcgtcgcaaagtttttgataaacctaagacgcgctgcttcactattctccctatggagtttaatcttgtggttcgtcagaagtttttaaattttgtgaggttcattatgaagaaaagggacaagcttagttgtcaagttggaatcaacccatatt

SEQ ID NO: 63370 - DNA, 264 bp, Glycine max
  Clone ID: 700761150H1
tggatgcaataagatcaagactaacatctttacaaaatgttatttactttgaagatgataacgaagaagatgctttctctggaagttcaagcggctggacaattgcatcttttagtgaagttgagaaacttgggaaagaaagtcctgttgagccaagcctgccttccaagaatgctattgcagttatcatgtacacaagtggcagtacaggtcttccaaagggtgtcatgattactcacgggaacattgtagcgactacagcag

SEQ ID NO: 63371 - DNA, 204 bp, Glycine max
  Clone ID: 700761151H1
caaagccataaaggaaagcatcagcaagaagaagaaaacgaaggaggcagcatattgagtggcttcaccctgggattcttggaacatgcattcagcgtggacaagcagatagcgaaaaacctacaaggagagaacgaaggggaagacaagggagccattgtgacagtgaaaggaggtctgagcgtgataaaaccacccacggac

SEQ ID NO: 63372 - DNA, 137 bp, Glycine max
  Clone ID: 700761152H1
aaaattcttccaccaagttatggggcaccttgtgttgcttcttttctccctcttaggtctctcttctagttccagcatatcaactcatcgttccatattggaccttgacctaaccaagtttaccacacagaaacagg

SEQ ID NO: 63373 - DNA, 261 bp, Glycine max
  Clone ID: 700761153H1
gaggctacagtgcttgattttgggttttgtacacaagagctttaaagcccggttgatgatgtaatatttctctattgcattctgcctactggtttctgctgcttgtgtcaaattttctctaaactagagtagcccaatagcatacgtgttatgtgcattggtcatgtatacaagtgtaatactaaaaccttctacataatataagattagttagtttacttgtctctattttcttaaactccgctccttcaaatcaagaag

SEQ ID NO: 63374 - DNA, 262 bp, Glycine max
  Clone ID: 700761154H1
ctttgaacactcatcaccatggccaagcttgttctttccctttgattccttcttttcagtggctgcttcgctctgagagagcaggcacagcaaaatgagtgccagatccaaaagctgaatgccctcaaaccggataaccgtatagagtcggaaggtgggttcattgagacctggaaccctaacaacaagccattccagtgtgccggtgttgccctctctcgctgcacccttaaccgcaatgcccttcgtagaccttcctaca

SEQ ID NO: 63375 - DNA, 258 bp, Glycine max
  Clone ID: 700761162H1
cagcgaccaagcaggcccgaacaacaagaactctgtggaagatgatgtcagactagaaatggggttgaggaaaatatttgcaccatgaagcttcacgagaacattgctcgcccttcacgtgctgacttctacaacccaaaagctggtcgcattagcaccctcaacagtctcaccctcccagccctccgccaattcggactcagtgcccaatatgttgtcctctacaggaatggaatttactctccacattggaacttg

SEQ ID NO: 63376 - DNA, 266 bp, Glycine max
  Clone ID: 700761163H1
aaaaaagtatctcttgaactcggcggcaatgcaccttgcatagtttttgatgatgctgacctggatgttgcagtaaaaggaactcttgcagcaaagttccgtaacagtggacaaacatgtgtttgtgcaaatagaattattgtgcaagaaggtatatatgagaagtttgcaaatgctttacgtgatactgttcagaatatgaaagttggggatggtttcagtgaaggtgtggcacagggtcctctaatcaatgaagctgctgtcaa

SEQ ID NO: 63377 - DNA, 265 bp, Glycine max
  Clone ID: 700761164H1
tcaactacaagaaagaacttccttataaccaaaaccaacaacaactatggcaagttatcagaagcactacgatgatcagggtcgcaaggtcgacgagtatggcaatgttgagaggcaaactgacgaatatggcaacccggttcatgccactagtgtcacttatgtagccaccaaaagtgttggtggctacaatgatgacgctaataagcaacatgatattactggtgtctatcccgagaaagacaccggtagacatcatttggtc

SEQ ID NO: 63378 - DNA, 147 bp, Glycine max
  Clone ID: 700761165H1
attgattccgggtaccagtgttgaagaggcttacaacaagctaacagttgaacttgagaaaagtgttcctacattggttggcattgaatgtcccaaggatgaaaaacttcctcgtcgcaaagtttttgataaacctaagacgcgctg

SEQ ID NO: 63379 - DNA, 103 bp, Glycine max
  Clone ID: 700761167H1
gtctgtgatgtgtcatgtttattgctgtgtgctaattaaagtacaccctgatgatgagtggtcccgcactagcacaaccacacctagtcgacgtccagagaac

SEQ ID NO: 63380 - DNA, 135 bp, Glycine max
  Clone ID: 700761168H1
ggaagaaagggtcctttgtcttcaattttgagggccttttactgaatcagtatgtagtactaaaatgtatgctgtaatagctcatagtgagcgaggaaagtatcgggctatttaactatgacttgagctccatct

SEQ ID NO: 63381 - DNA, 258 bp, Glycine max
  Clone ID: 700761169H1
gcaaaagctgctgtattaaggcatggggtgcgtggacttgtaattgatccttacaatgagcttgatcatcaacggcctcctaaccagactgaaacagaatatgtgagccagatgcttaccttaatcaaacgttttgctcaacatcatggatgccatgtttggtttgtagcgcatcctaggcagctgcataattgggttgggggtcctcccaatctctatgatataagtggaagtgcacacttcataaataagtgtgac

SEQ ID NO: 63382 - DNA, 179 bp, Glycine max
  Clone ID: 700761171H1
tgataaaccgcgatcacaggttgccgcaccttaaaaccggaaacaaaagcaatcgttacttgatttcaagaatttctcaatttctttctacttctttgtgtacgatttcttaagggaaagaaaatcactctctgtgctggccacagacttcgtgaatcattttcttttccacttttagt

SEQ ID NO: 63383 - DNA, 258 bp, Glycine max
  Clone ID: 700761173H1
cttggatatcttcctcagtattgtggatatgaacgagggagctcttcttctaccacacttcaattcaaaggcgatagtgatactggtaattaatgaaggagatgcaaacattgaacttgttggcctaaaagaacaacaacaggagcagcaacaggaagagcaacctttggaagtgcggaaatatagagccgaattgtctgaacaagatatatttgtaatcccagcaggttatccagttgtggtcaacgtacctcaaat

SEQ ID NO: 63384 - DNA, 260 bp, Glycine max
  Clone ID: 700761178H1
caaagtttgtgataactaataactggagtgtggaggttgtgagcaactttcactggtgtcgtctggtctccatgcaccttctcaaatttcctcgctctccatcttccttcgggaatgcgttctttctggtgggtcatcatgttttggacataagagtgttccgtaagaaccagagatgtttcagagcgtccatatcgtgttcggctgttaggaacggttctattgagcaactaagtgatgcacggcttatatactccgtc

SEQ ID NO: 63385 - DNA, 258 bp, Glycine max
  Clone ID: 700761179H1
cagaaaacagcatcgaacccgtcgtagcagaaaaacttgtcaccatggtttcttccgacaaggatccacgagaggatgtccttcaagcctggtacatggatgatagtgatgaagatcaaagactcccccaccacaaagaacccaaggagtttgtctcgttggaccaacttgctgaacttggagtccttagctggaaactagatgctgataaccatgaaaatgatccagagctgaagaagattcgtgaagagctggtta

SEQ ID NO: 63386 - DNA, 158 bp, Glycine max
  Clone ID: 700761180H1
gacaaaacaaaatccgaagctccagaattcctcctaagtgcagtaaccgggacccaatgacccacctagccatggtttggcttcaaacatggctccctgaaccctagcgtttctccctcttcgtcaacaactgcggtccgatcccgatctggttctga

SEQ ID NO: 63387 - DNA, 262 bp, Glycine max
  Clone ID: 700761181H1
aatcagagtaatattcagatttccggcttattttacgacggcagatacaaattctggactaaacacgagaaaaatcttgctttgacagaagaggaaaagatggaagtgattagaaatagaggcattcctgctgatgttcttgcaaagcgagctcatgaatttgaaaaacatgttgctcatgaaagcctcaaggatcaaattcctgctgttgacaagttgtattctactaaggttaataagtttgcaaaaattatgaacctta

SEQ ID NO: 63388 - DNA, 263 bp, Glycine max
  Clone ID: 700761182H1
cgcattcgtctcctccagagattcaacaaacgctccccacaacttgagaactttcgagactaccggattgtccagtttcagtcaaaacccaacacaatccttctcctcccaccatgctgacgccgatttcctcctctttgtccttagcgggagatccatacttaccttggtgaacaacgacgacagagactcctacaaccttcaccctggcgatgcccagagaatcccagctggaaccacttactatctggataacctcacga

SEQ ID NO: 63389 - DNA, 255 bp, Glycine max
  Clone ID: 700761183H1
tgggttttagaacatggtgggatttccatccattgtaacaaccttcgttttctgccacgggagccatagaagcagcacatgcaatagcaacaggagaccttgttagcctttctgaacaagaactcgtagactgtgtggaagaaagcgaaggttgttacaatggatggcactatcaatcgttcgaatgggttttagaacatggtgggattgccactgatgatgattatccttacagagctaaagagggtagatgca

SEQ ID NO: 63390 - DNA, 258 bp, Glycine max
  Clone ID: 700761184H1
tccatctttctctcactactctctttactcttctgtacaagcagcaaagctaaagcgcttaacatagcaaaaaagtttctgcaatccaaagcgatctgttcttaccttttctgcttggctttttaaccgcttcatctttgtttgttactttctgagaatttccatctgggggcctctctttggcactttccatacttgtgatcttgctttcgtgtcaccgattcaccctttgcgttctaaccaaacttcttcactgtg

SEQ ID NO: 63391 - DNA, 258 bp, Glycine max
  Clone ID: 700761187H1
cttaattattaacacttccttagttcaatatggggaagcccttcactctctctctttcttccctttgcttgctactcttgtcgagtgcatgctttgctattagctccagcaagctcaacgagtgccaactcaacaacctcaacgcgttggaacccgaccaccgcgttgagtccgaagctggtttgattcaaacatggaactctcaacaccctgagctgaaatgcgccggtgtcactgtttccaaactcaccctcaacc

SEQ ID NO: 63392 - DNA, 260 bp, Glycine max
  Clone ID: 700761188H1
ctagttcaatatcctagtataccttaataaataatttaagatactatgatgagagcacggttcccattactgttgctgggacttgttttcctggcttcagtttctgtctcatttggcattgcttactgggaaaaagagaaccccaaacacaacaagtgtctccagagttgcaatagcgagagagactcgtacaggaaccaagcatgccacgctcgttgcaacctccttaaggtggagaaagaagaatgtgaagaaggtga

SEQ ID NO: 63393 - DNA, 259 bp, Glycine max
  Clone ID: 700761191H1
gtataccttaataaataatttaagatactatgatgagagcacggttcccattactgttgctgggacttgttttcctggcttcagtttctgtctcatttggcattgcttactgggaaaaagagaaccccaaacacaacaagtgtctccagagttgcaatagcgagagagactcgtacaggaaccaagcatgccacgctcgttgcaacctccttaaggtggagaaagaagaatgtgaagaaggtgaaattccacgaccacg

SEQ ID NO: 63394 - DNA, 259 bp, Glycine max
  Clone ID: 700761192H1
aacactttccttagttcaatatggggaagcccttcttcactctctctctttcttccctttgcttgctactcttgtcgagtgcatgctttgctattacctccagcaagttcaacgagtgccaactcaacaacctcaacgcgttggaacccgaccaccgcgttgagtccgaaggtggtcttattgaaacatggaactctcaacaccctgagctgcaatgcgccggtgtcactgtttccaaacgcaccctcaacctcaacgg

SEQ ID NO: 63395 - DNA, 187 bp, Glycine max
  Clone ID: 700761193H1
gaaattttgataaaccgcgatcacaggttgccgcaccttaaaaccggaaacaaaagcaatcgttacttgatttcaagaatctctcaatttcttcctacttctttgtgtacgatttcttaagggaaagaaaatcactctctgtgctggccacagacttcgtgaatcattttcttttccacacaacata

SEQ ID NO: 63396 - DNA, 260 bp, Glycine max
  Clone ID: 700761194H1
cacattctactttccccacccagcccaacttaggtgctaaaacagtctttctgtccatattataatctgattattatatacacccacaccctccattttgttgcttcatatcttttatttacactctattaattctagtcaacttacatatatttggattccttttttttttaatttaattgtttggtacgaatttaggagggatataaaattcattgattccaaatttccaatcaccttctgaataaaaaacttgtttt

SEQ ID NO: 63397 - DNA, 263 bp, Glycine max
  Clone ID: 700761195H1
gcattcacaggggtgaagcctcccaatggcataagcttctttggaagcctctcaggaagggcctctgatggtcgtctcatcatagattttatgactgaagagttgaagctgccatacctgaatgcatatttggactcggttggatcgaattacaggcatggtgcaaactttgcagtaggtcgctcctccattcggcctggtggttttagtccattccctcttggccttcaagtagctcagttcctactgttcagtttcacaca

SEQ ID NO: 63398 - DNA, 264 bp, Glycine max
  Clone ID: 700761196H1
gttctttcaatgtggagatattttgttggagatctcgtctttgaagtttctaagatgacttctccctacattaaatgtacagtctctttcttcatagcatttggacatttggctgatgacaccatcaattttgaggcttttccccacaagctggtacattttggagagattcaggaagaagttgtattgaaattttcacaagaggaatttcttacagcttggtcaaaccaggtgcgtcctgcaacaactctggttgctgatggg

SEQ ID NO: 63399 - DNA, 261 bp, Glycine max
  Clone ID: 700761202H1
ctttaattttctgattttagcaaattaaaatagtagtgttattggtaggttttggcaaagatgttttcagttccaggggtgtcgggaatgcctgaacagaggaggagggcataagataaaagggacagtggtgttgatgaggaagaatgtgttggacttcaacagcgtggctgatcttactaaaggaaatgttgggggactcataggcaccggcctcaacgttgttggctcaacacttgataacctcactgctttcttggg

SEQ ID NO: 63400 - DNA, 256 bp, Glycine max
  Clone ID: 700761205H1
gaaactcctaaaggttccatgttggatcttaaaatttctcaatctaaaattgcacttcccaaaaacacagttggaggaaccattctgcgtagtgatctattggcaaattttttgacagagggcaattttagagcaagtgttgatttgcagcgcactcatcgtattaaaggaatgattaaaatggtggccacagttggtattcctgagaatacaggtatagcattggcctgtgctatgacaagttcttttagggggc

SEQ ID NO: 63401 - DNA, 255 bp, Glycine max
  Clone ID: 700761206H1
ggccagatgtctttcgatcagtctgtagtagcaattatgtctaaatgcaaagctagcatgagaatgggaaacactgatgctcaaattttgatggttccagggcgtagattcatagctcatggacattttttcaaaaatctgactcagaaagtgcgagtccaaattgttacatctgaaaagagttactggcatgtgtatgatcctgacaagtttcagatgtttgacaacagtgagataggtctttattctaatccc

SEQ ID NO: 63402 - DNA, 255 bp, Glycine max
  Clone ID: 700761207H1
tcaaatatgatatagttggtgctggttcacattcttcagaagatttttctgaaaaggaagatcaagaaaaacccaaaaagattgatgccagattgagacaaagaatagatcctcaatacaatgaggttcaggctcagatggaaacaaatttgtttaaattgtctcttgatgatgttgaaactcctaaaggttccatgttggatcttaaaatttctcaatctaaaattgcacttcccaaaaacacagttggaggaa

SEQ ID NO: 63403 - DNA, 70 bp, Glycine max
  Clone ID: 700761208H1
atcatcgcccaagggaaaggagcacttggagttgcaattctaggatgtcctgagacgtttgaagagccac

SEQ ID NO: 63404 - DNA, 246 bp, Glycine max
  Clone ID: 700761209H1
cacattctactttccccacccagcccaacttaggtgctaaaacagtctttctgtccatattataatctgattattatatacacccacaccctccattttgttgcttcatatcttttatttacactctattaattctagtcaacttacatatatttggattccttttttttttaatttaattgtttggtacgaatttaggagggatataaaattcattgattccaaatttccaatcaccttctgaat

SEQ ID NO: 63405 - DNA, 252 bp, Glycine max
  Clone ID: 700761210H1
agaagattcgtcacttcaatgaaggagacgtactagtgattcctcctggtgttccttactggacctataacactggcgatgaaccagttgttgccatcagtcttcttgacacctccaacttcaacaatcagtttgatcaaaaccccagagtattttaccttgctgggaacccagatatagagcacccagagaccatgcaacaacagcagcagcagaagagtcatggtggacgcaagcaggggcaacaccagc

SEQ ID NO: 63406 - DNA, 247 bp, Glycine max
  Clone ID: 700761211H1
cgatgcagaggatgatgaatgctcctgattcaaatgataatattgatctactgttgagcattgatttgttgggtttacaaggagcaggtaaagcttttccaaacaagattgtttttgatgataaacttgtgctggctaacacacaagaattctttgctggaaattttccagtggattcttggttaccaatttttgtgaattgtctttatcctgtaagtcaattaccttcagaagctgtcgttgtaaa

SEQ ID NO: 63407 - DNA, 247 bp, Glycine max
  Clone ID: 700761212H1
gctggtgcaaagaatgctattctcatgaatatgccaaatgctgttctttcaatgtggagatattttgttggagatctcgtctttgaagtttctaagatgacttctccctacattaaatgtacagtctctttcttcatagcatttggaaatttggctgatgataccatcaattttgaggcttttccccacaagctggtgcagtttggagagattcaggaaaaagttgtattgaaattttcacaagagg

SEQ ID NO: 63408 - DNA, 248 bp, Glycine max
  Clone ID: 700761213H1
atttcctctcttctcactccgggatcgatattttcaagaacagatcgaaaagccgttcatcgatttgttggatctgtgagtgagaagatggttactaagacagaggagactcaattgaacaggctcgaaaaccaggtcgataacggcggcggcggcgcgtgggagtacctctgcctcgtgcggaagctcaaagttcggcggtcggagaaagttctgaagcacggtctctccatcttgaacgacctcaa

SEQ ID NO: 63409 - DNA, 250 bp, Glycine max
  Clone ID: 700761214H1
gacatcttggttgtttattatacaatagcaactcgatttagaaaatttctaccgcattacattaggtggcatctgtataccttgttgatctacattctcccatcttttctcactgctgaaattaaatataagcggaatcagagtaatattcagatttccggcttattttacgacggcagatacaaattctggactaaacacgagaaaaatcttgctttgacagaagaggaaaagatggaagtgattagaa

SEQ ID NO: 63410 - DNA, 256 bp, Glycine max
  Clone ID: 700761216H1
gacgccgcagagtcagagagagagattcactgatacagagcgcagaagaaaatacataaactaatccagaaaatgagcagcggcgctggaaaggtggtgtgtgtcaccggcgcttccggttacattgcttcctggatagtcaaattcctcctcaatcgcggctacaccgttaaggccaccgttcgcgacacaagtgatccgaaaaaaataaaccacttggttggcctcgacggtgctaaggagaggctgcacctct

SEQ ID NO: 63411 - DNA, 260 bp, Glycine max
  Clone ID: 700761217H1
aaacactcatcagtcatcaccatggccaagctagttttttccctttgttttctgcttttcagtggctgctgcttcgctttcagttccagagagcagcctcagcaaaacgagtgccagatccaaaaactcaatgccctcaaaccggataaccgtatagagtcagaaggagggctcattgagacatggaaccctaacaacaagccattccagtgtgccggtgttgccctctctcgctgcaccctcaaccgcaacgcccttcg

SEQ ID NO: 63412 - DNA, 254 bp, Glycine max
  Clone ID: 700761219H1
caccattgtgttgagacacactctctttctttcttgttattctctttctctttcatcatttggcttaaaacacacacacaaaaggtggccaaaatgagcagtgtctgtgccaagcagcacaagttttacccctctcaccaactcctttctccaaagaaaaccctcagagaaattgacatccctccaaggaagctcctcactcgccgtgccgccgcatgcgtcggcggcaccgacgtgtactcctccgaggagac

SEQ ID NO: 63413 - DNA, 254 bp, Glycine max
  Clone ID: 700761220H1
ccattgtctttgaacactcatcaccatggccaagcttgttctttccctttgtttccttcttttcagtggctgcttcgctctgagagagcaggcacagcaaaatgagtgccagatccaaaagctgtatgccctcaaaccggataaccgtatagagtcggaaggtgggttcattgagacctggaaccctaacaacaagccattccagtgtgccggtgttgccctctctcgctgcacccttaaccgcaatgcccttc

SEQ ID NO: 63414 - DNA, 253 bp, Glycine max
  Clone ID: 700761221H1
agagattcaggaaaaagttgtattgaaattgatggtgtcatcagctaaatttccaaatgctaagatgacttctccctacattaaatgtacagtctctttcttcatagcatttggaaatttggctgatgaattcatcaattttgaggcttttccccacaagctggtgcagtttggagagattcaggaaaaagttgtattgaaattttcacaagaggaatttcttacagcttgagcaactcaggtgcgtcctgca

SEQ ID NO: 63415 - DNA, 118 bp, Glycine max
  Clone ID: 700761223H1
attgtgttttaaatccacaacgcgtccggggaccccatcccgggggggagttaacccattcaattgtaacctgaacatcctgcattggagtggcagtccatccagtgacacaaatgat

SEQ ID NO: 63416 - DNA, 248 bp, Glycine max
  Clone ID: 700761224H1
aacactttccttagttcaatatggggaagcccttcttcactctctctctttcttccctttgcttgctactcttgtcgagtgcatgctttgctattacctccagcaagttcaacgagtgccaactcaacaacctcaacgcgttggaacccgaccaccgcgttgagtccgaaggtggtcttattgaaacatggaactctcaacaccctgagctgcaatgcgccggtgtcactgtttccaaacgcaccctc

SEQ ID NO: 63417 - DNA, 248 bp, Glycine max
  Clone ID: 700761226H1
attgtctttgaacactcatcaccatggccaagcttgttctttccctttgtttccttcttatcagtggctgcttcgctctgagagagcaggcacagcaaaatgagtgccagatccaaaagctgaatgccctcaaaccggataaccgtatagagacggaaggtgggttcattgagacctggaaccctaacaacacgccattccagtgtgccggtgttgccctctctcgctgcacccttaaccgcaatgcc

SEQ ID NO: 63418 - DNA, 249 bp, Glycine max
  Clone ID: 700761227H1
cagcttcgctgatttcttcgtttggaggataccctcaaaggtgttctactgtgaaagttagccaattttgaagatgaattgttataatcttcagaagaatgccttctcagcctgtgaagagatgagaggctctcttcccattgctgattagaatggacctgtcttttgccctaagccacgccgagctggggttttaatgaacttgcctattcgaccagtaaaatggcatttaggtcaacaagctgaggg

SEQ ID NO: 63419 - DNA, 122 bp, Glycine max
  Clone ID: 700761229H1
cgaagtcgacgcttgccaagtgcatttcttctcatttcttgctgcttccgcgaatggccagaaaaatagcaggattactggcgctgcttctcgctgtttcgatctgcggagccgtcacgatt

SEQ ID NO: 63420 - DNA, 100 bp, Glycine max
  Clone ID: 700761230H1
caaatatctggttgatgagtgtccttttgcatttgtgaactagtatgtaatattttattcacttaaataaagcgcattactatgtgcaatgagtgtgttt

SEQ ID NO: 63421 - DNA, 235 bp, Glycine max
  Clone ID: 700761232H1
aattgtttttcttactagagttgatccttttccagtagctctactggctgttctttttggcgttaagaatgaaattctgagttccaacgccactaaccctatgctgacgcgacttcttgagaactgtaagagtctcaaatatctggttgatgagtgtccttttgcatttgtgaactagtatgtaatattttattcacttaaataaagcgcattactatgtgcaatgagtgtgttt

SEQ ID NO: 63422 - DNA, 249 bp, Glycine max
  Clone ID: 700761233H1
aagggagccattgtgacagtgaaaggaggtctgagcgtgataaaaccacccacggacgagcagcaacaaagaccccaggaagaggaagaagaagaagaggatgagaagccacagtgcaagggtaaagacaaacactgccaacgcccccgaggtagccaaagcaaaagcagaagaaatggcattgacgagaccatatgcaccatgagacttcgccacaacattggccagacttcatcacctgacatctac

SEQ ID NO: 63423 - DNA, 255 bp, Glycine max
  Clone ID: 700761235H1
gctcattagatatagctatgaaaacatacttggacgtttagcctggagcagtaatttcacattgctatatctaatgagcatctcattaaatatagctatgaaaaattactgcgccaggctaaagctccaagtatgtcttaccaaatcttcaaaaattttgtttctttcgtgtgtgtatggtgatgataacttaattagtgttcatgaatgacgtcacgccttacttcagtggttctaaattgaaaagctttctag

SEQ ID NO: 63424 - DNA, 251 bp, Glycine max
  Clone ID: 700761237H1
gtccagaggaagctcgccaattgagaaggaaagctctctctcgtattgaatggctgcaaaaagctgatgtgcctaccatagcacagattgaagagttccattcgatgcagaggatgatgaatgctcctgattcaaatgataatattgatctactgttgagcattgatttgttgggtttacaaggagcaggtaaagcttttccaaacaagattgtttttgatgataaacttgtgctggctaacacacaagaa

SEQ ID NO: 63425 - DNA, 250 bp, Glycine max
  Clone ID: 700761238H1
ctcgagccgcttaagcttgctactgagtttccacactgcataccttatgtcttccgaattcgaagttaatttgcaagatggctaaggaaaaggctcagatcaacattgtggtggttggtcatgtggaccctgaggaggcaaccaccattaacgagctgaagaagcctgttgtggagaaagaagctccagggcatgccatatgagggcatgcacgtacggcctcggaggggaaccagaaaattatgttaac

SEQ ID NO: 63426 - DNA, 242 bp, Glycine max
  Clone ID: 700761239H1
cttccttagttcaatatggggaagcccttcactctctctctttcatccctttgcttgctactcttgtcgagtgcatgctttgctattagctccagcaagctcaacgagtgccaactcaacaacctcaacgcgttggaacccgaccaccgcgttgagtccgaaggtggtttgattcaaacatggaactctcaacaccctgagctgaaatgcgccggtgtcactgtttccaaactcaccctcaa

SEQ ID NO: 63427 - DNA, 242 bp, Glycine max
  Clone ID: 700761240H1
gttctaaggagggtgcaagagagaactataaagattgtgacacacaaactcttctttcaagatgaatgatccttgtccagctgaagactatattctttcatcttgaaagaagagtttgtgtgtgacaatctttatagttctaaggagggtgcaagagagaactgaatttgctgtgatggcaactcgtagatatgcttttggaagagctgatgaggccactcatccagagtccatgagggcca

SEQ ID NO: 63428 - DNA, 248 bp, Glycine max
  Clone ID: 700761241H1
aagcaaagcaatggctacttcaaagttgaaaacccagaatgtggttgtatctctctccctaaccttaaccttggtactggtgctactgaccagcaaggcaaactcagcggaaactgtttctttcagctggaacaagttcgtgccgaagcaaccaaacatgatcctccaaggagacgctattgtgacctcctcgggaaagttacaactcaataaggttgacgaaaacggcaccccaaaaccctcgtctc

SEQ ID NO: 63429 - DNA, 244 bp, Glycine max
  Clone ID: 700761242H1
tgcggtgattcactcgtactttgcttaatatggcggttgagaagttgagcattgcaaaagatgtgactgaattaattggcaaaactccattggtatatctcaaccgcatcgtggatggctgtgttgccaaagttgctgcgaagctagaaatgatggaaccttgctccagtgtcaaagacaggatagggtatagcatgattgtagatgctgaggagaaaggactcatcacaccgggtgaaagtgt

SEQ ID NO: 63430 - DNA, 70 bp, Glycine max
  Clone ID: 700761244H1
gttcaatatcctagtacaccgtattaaagaatttaagatatactatgatgagagcgcggttcccattact

SEQ ID NO: 63431 - DNA, 245 bp, Glycine max
  Clone ID: 700761245H1
gtccagaggaagctcgccaattgagaaggaaagctctctctcgtattgaatggctgcaaaaagctgatgtgcctaccatagcacagattgaagagttccattcgatgcagaggatgatgaatgctcctgattcaaatgataatattgatctactgttgagcattgatttgttgggtttacaaggagcaggtaaagcttttccaaacaagattgtttttgatgataaacttgtgctggctaacaca

SEQ ID NO: 63432 - DNA, 244 bp, Glycine max
  Clone ID: 700761246H1
cttccttagttcaatatgggtaagcccttcactctctctctttcttcccattgcttgctactcttgtcgagtgcatgctttgctattagctccagcaagctcaacgagtgccaactcaacaacctcaacgcgttggaacccgaccaccgcgatgagtccgaagtagtttgattcaaacatgggactctcaacaccctgagctgaaatgcgccggtgtcactgtttccaaactcacgctcaaccg

SEQ ID NO: 63433 - DNA, 252 bp, Glycine max
  Clone ID: 700761248H1
caacaaacgctccccacaacttgagactcctcgagactaccggattgtccagtttcagtcaaaacccaacacaatcgctctcccccaccatgctgatgccgatttcctcctctttgtccttagcgggagagccatacttaccttggtgaacaacgacgacagagactcctacaaccttcaccctggcgatgcccagagaatcccagctggaaccacttactatttggttaaccctcacgaccaccagaatct

SEQ ID NO: 63434 - DNA, 253 bp, Glycine max
  Clone ID: 700761249H1
gaatgattaaaatggtggccacagttggtattcctgagaatacaggtatagcattggcctgtgctatgaatagttcttttagggggcgtgccagttctgatatttacaccatctgctctcaagactgtgaattatggaatcctgcttgcacaaaagcaatgactatgtcatttaatccaaacccgtgttctgatgcatggagtttggaatttctgaagcgtaccggatttcattgtgatatcatttgtgtcac

SEQ ID NO: 63435 - DNA, 178 bp, Glycine max
  Clone ID: 700761250H1
tggaaataatatctaccaatataaataaagcatccagccactgtaatctgcaatgctgataataatgccatgaagtagcactgcctaaacatctacaaagtactctcgtgtactttttatgtgtgtattcctatcacgaagttaataaactattttatcaaatgaatatcgcaatacc

SEQ ID NO: 63436 - DNA, 247 bp, Glycine max
  Clone ID: 700761251H1
agttcaatatcctagtacactgtattaaagaatttaagatatactatgatgagagcgcggttcccattactgttgctgggagttgttttcctggcatcagtttctgtctcatttggcattgcgtattgggaaaagcagaaccccagtcacaacaagtgcatccgaagttgcaatagcgagaaagactcctacacgaaccaagcatgcctcgctcgttgcaacctccttaaggtggaggaagaagaag

SEQ ID NO: 63437 - DNA, 247 bp, Glycine max
  Clone ID: 700761253H1
gttttgtgggtagctcctgaggacaaggcgagtttatggtcacaacttcattatgtttcgtgtaataatctggaaatgcaagaagcttatcttgtcaatctcgtaaatgtgttacgagaattgtatttgcacagtccagaggaagctcgccaattgagaaggaaagctctctctcgtattgaatggctgcaaaaagctgatgtgcctaccatagcacagattgaagagttccattcgatgcagagga

SEQ ID NO: 63438 - DNA, 245 bp, Glycine max
  Clone ID: 700761254H1
tcatcttttgaggattgaagaaactgaactgcaactttgggaaatgttctcagctcagtggttaggaaagaaagacaccaggtgtacaggctccgtaactatcttctgtattaatgcttgagtgctctttatggctgcgtcatattatactacatttctcttgtaaaaaggatgaaaagcagatggaaaagtacgtattcaaaattcaccatactgaacttctttcactgccgtagtgaaaattg

SEQ ID NO: 63439 - DNA, 236 bp, Glycine max
  Clone ID: 700761255H1
caaagaatcaaagaaaggggtggtggctgcttcgaaagcttaataattggttaatttccagaacatcatagttttcgcagcagcaaactaacaaattactcatatcatataataagatggcccgttctctctcgcaagccaaacgtattggtgtccttgttgctcaatctatctccctaattcccgttcatcggcgaggttacgcagtggcatccgatgtatcggtaagagttgga

SEQ ID NO: 63440 - DNA, 248 bp, Glycine max
  Clone ID: 700761256H1
cccaactaacaataattccttcacttgcagaacttagttctctgttgcatcatcatcatcttcattagtgttagccctaaacttcaccttcaaccatgaccacagtgccaccacacagtgtccaagtgcacacaacaacacaccgctacgaagccggcgtcgtcccgccggctcgttttgaggcgccgcgttacgaagccggcatcaaggcgccctcttccatttaccattccgagagaggtccgacg

SEQ ID NO: 63441 - DNA, 76 bp, Glycine max
  Clone ID: 700761257H1
gacaattccttcacttgcagcactgttgcatcatcatcttcattgcaaaaccctaaacttcaccgtcaaccatgac

SEQ ID NO: 63442 - DNA, 174 bp, Glycine max
  Clone ID: 700761258H1
attttgataaaccgcgatcacaggttgccgcaccttaaaaccggaaacaaaagcaatcgttacttgatttcaagaatctctcaatttcttcctacttctttgtgtacgatttcttaagggaaagaaaatcactctctgtgctggccacagacttcgtgaataattttcttttcc

SEQ ID NO: 63443 - DNA, 241 bp, Glycine max
  Clone ID: 700761260H1
gaggctacagtgcttgattttgcggcttgtactcaaaagctttaaagcccggttgatgatgtaatatttctctattgcattctgcctactggtttctgctgcttgtgtcaaattttctctaaactagagtagcccaatgtcatacgtgttatgtgcattggtcatgtatacaagtgtaatactaaaaccttctacataatataagattagttagtttacttgtctctatttcccccccccc

SEQ ID NO: 63444 - DNA, 240 bp, Glycine max
  Clone ID: 700761261H1
gaggctacagtgcttgattttgggttttgtacacaaaagctttaaagcccggttgatgatgtaatatttctctattgcattctgcctactggtttctgctgcttgtgtcaaattttctctaaactagagtagcccaatagcatacgtgttatgtgcattggtcatgtatacaagtgtaatactaaaaccttctacataatataagattagttagtttacttgtctctattttcttaaact

SEQ ID NO: 63445 - DNA, 244 bp, Glycine max
  Clone ID: 700761262H1
caaagaatcaaagaaaggggtggtggctgcttcgaaagcttaataatttgtttatttccagaacatcatagttttcgcagcagcaaactaacaaattactcatatcatataataagatggcccgttctctctcgcaagccaaacgtattggtgtccttgttgctcaatctatctccctaattcccgttcatcggcgaggttacgcagtggcatccgatgtatcggtaagagttggattgggtaa

SEQ ID NO: 63446 - DNA, 235 bp, Glycine max
  Clone ID: 700761264H1
cattgtctttgaacactcatcaccatggccaagcttgttctttccctttgtttccttcttttcagtggctgcttcgctctgagagagcaggcacagcaaaatgagtgccagatccaaaagctgaatgccctcaaaccggataaccgtatagagtcggaaggtgggttcattgagacctggaaccctaacaacaagccattccagtgtgccggtgttgcctctctcgctgaaccct

SEQ ID NO: 63447 - DNA, 248 bp, Glycine max
  Clone ID: 700761265H1
gtcttattgaaacatggaactctcaacaccctgagctgcaatgcgccggtgtcactgtttccaaacgcaccctcaactgcaacggcctccacttgccatcttactcaccttatccccaaatgatcattgtcgttcaagggaagggagcaattggatttgcatttccgggatgtcctgagacgtttgagaagccacaacagcaatcaagcagaagaggctcaaggtcgcagcagcaactacaagacagt

SEQ ID NO: 63448 - DNA, 248 bp, Glycine max
  Clone ID: 700761267H1
gtcctgcaacaactctgttggctgatgggtgtccatatttgtatgctatggtgcatgatagttcagtgtctacaataccaggtgattttgtcattggtgttaagttgacaaccataaacaatatgtgtgcatatgggctcaatcctggtatttcaggttctcgtcttttgggcaccattcctcagtccatttcacagcaaactgtttggaatcaaatggcaacagtgagaacaccattgaattttgat

SEQ ID NO: 63449 - DNA, 62 bp, Glycine max
  Clone ID: 700761271H1
gttcaatatcctagtataccttgatacgtaatttaagatactatgatgagagcacggttccc

SEQ ID NO: 63450 - DNA, 239 bp, Glycine max
  Clone ID: 700761273H1
tacatagtagtgttggtgggttgcaaagatgcttgggggtcttctccataggggtcataagataaaagggacagtggtgttgatgcgcaagaatgtgttggacgtgaatagcgtaaccagcgttgggggaattattggtcaaggtctcgacttagttggctcaacactcgatactcttactgccttcttgggccgatccgtgtctctccagcttattagtgctaccaaagctgatgcca

SEQ ID NO: 63451 - DNA, 244 bp, Glycine max
  Clone ID: 700761274H1
ggagactgaaggaagcagattgtgacagtggaaggaggtctcagcgttatcagccccaagtggcaagaacaacaagatgaagatgaagatgaagacgaagatgatgaagatgaacaaattccctctcaccctcctcgccgaccaagccatggaaagcgtgaacaagacgaggacgaggacgaagatgaagataaacctcgtcctagtcgaccaagccaaggaaagcgtgaacaagaccaggacc

SEQ ID NO: 63452 - DNA, 94 bp, Glycine max
  Clone ID: 700761275H1
gtcgggagtctttgggctcacggcgctgtcgtccttctcctggatcctgaactacatccgggagacccaaccggcgttcggagaatctggccgc

SEQ ID NO: 63453 - DNA, 230 bp, Glycine max
  Clone ID: 700761276H1
caaactccctcttatcctccacgacgaccaagccatggaaagcatgaagatgacgaggacgaggacgaagaagaagatcaacctcgtcctgatcaccctccacagcgaccaagcaggcccgaacaacaagaaccacgtggaagaggatgtcagactagaaatggggttgaggaaaatatttgcaccatgaagcttcacgagaacattgctcgcccttcacgtgctgactt

SEQ ID NO: 63454 - DNA, 245 bp, Glycine max
  Clone ID: 700761279H1
gtttccaccaccgttgatgagattcttgagaaacaatgcctcaagcagaagcagaggaaggtcaagaaccaccaccgccatgtttctgagaaagaagaacaccaacaatattgaaacacaagaaccctcttcccccaaagtcacttgcatggggcaagtccgcgttaaacgctccgcctccaaaagggtgccctccgccggcgccggaactccgaccaagtttcggtgctgctcatgggtcccac

SEQ ID NO: 63455 - DNA, 245 bp, Glycine max
  Clone ID: 700761280H1
caaataatttttctgcagaattgctctcttgcaaattggatactgttactggccaatattatcctgagtgggctccaattaattgtcgagttcatcgacaaccaattcacatcactgaaggaaattatgtcagaaagcaagatgtcagcattgaatatgatgcatgtacaattccaaatgattgtggttcattggttgttgccaaggttggaaatcacaaacaaattgttggtttccatgttgct

SEQ ID NO: 63456 - DNA, 249 bp, Glycine max
  Clone ID: 700761281H1
ctcgagccggtggtttgattcaaacatggaactctcaacaccctgagctgaaatgcgccggcgtcactgtttccaaactcaccctcaactgcaatggcctccacttgccatcttactcaccttatccccggatgatcatcatcgcccaagggaaaggagcacttggagttgcaattccaggatgtcctgagacgtttgaggagccacaagaacaatcaaacagaagaggctcaaggtcgcagaagcagc

SEQ ID NO: 63457 - DNA, 246 bp, Glycine max
  Clone ID: 700761282H1
catttaatccaaacccgtgttctgatgcatggagtttggaatttttgaagcgtaccggatttcactgtgatatcatttgtgtcactggatggactgccaccccaatgcaggatgttcaggttacaattgattggtttatttcctctcaggaatgtgttcctcaggacttattgtgttttaaatccacaaaatccttttgtcttaaataggtggatggggaaactgactttcccccagggcacttcc

SEQ ID NO: 63458 - DNA, 244 bp, Glycine max
  Clone ID: 700761284H1
gagaatataggaatataagaactaagatggattggatcggagcgtaccgcggaggccagagaagcagggactggtgcgacccttcatcaccattcactgatttgtgggaccctcgtcgtgtcggtgacgctgatgatatcacctcctctctcgcccatgctcacgttgactggcgtgagactgataaagctcatatcttccgtgctgatcttccaggggtgaagaaagaggatctgaaggtgca

SEQ ID NO: 63459 - DNA, 244 bp, Glycine max
  Clone ID: 700761286H1
ctaagctttctagaatcttcacttcagaaccgaagccatggcggatcggttcttccccaacccgatgcccgagttcgtacccgaaacgacgccgtccactcctcaggaagaataagaagccctcacagtgggcgactcgctcccgaagctcctcgccatgccccacgcgccactcttggagcgtctcaaacgcgccgctctcgacctcaaagaaaccatagtgatagaaacgtgggggctgtcc

SEQ ID NO: 63460 - DNA, 192 bp, Glycine max
  Clone ID: 700761287H1
ggaaaaacaaccctggcactacgattccaaccctgcggatgaaccgggtcaataatggttggcgatgatgactcataaatcacaatcatgatgagtagttgaaatcgaaaagagaaaaaaagttcaaaagaagaagaaggagaagaagcgctataccagcagcagcattttcttttccatttccaacatcac

SEQ ID NO: 63461 - DNA, 242 bp, Glycine max
  Clone ID: 700761288H1
aatttggtggaaactcccaaggaatggcaactggatctaccttgtgacaaaattcctagtgtcttgaccacaactgatgagagattggtaggcacagaacatgagggatatgatccttttcttggtggaattcaaaaatatgccactcccatgatgcccctagatgaagaaattctttctaaggttgcacaagatatagttgaggaatggtttgattgtgttgatgaggaggattcctttga

SEQ ID NO: 63462 - DNA, 240 bp, Glycine max
  Clone ID: 700761289H1
ggtatatcattggcctgtgctatgaatagttcttttagggggcgcgccagttctgatatttacaccatctgctctcaagactgtgaattgtggaatcctgcttgcacaaaagcaatgtctatgtcatttaatccaaacccgtgttctgatgcatggagtttggaatttctgaagcgtactggatttcattgcgatatcatttgtgtcactggatggactgccaccccaatgcaggatgtt

SEQ ID NO: 63463 - DNA, 238 bp, Glycine max
  Clone ID: 700761290H1
cattggactccaagattggcaagcgaaggatacctatttttttaaatatgctttcttggagtattatattagggaatcacgttccaaaagaaagaaaaaattcttggagaatcacaatttttttttttttttgctttctatagttcttaattaagagctagggaattaagggtcgcttttaaatgaaaggtacttgtcctagtgaatgtagatacgtgcatgttcactaacatatttg

SEQ ID NO: 63464 - DNA, 235 bp, Glycine max
  Clone ID: 700761293H1
gtgtctacaataccaggtgattttgtcattggtgttaagttgacaaccataaacaatatgtgtgcatatgggctcaatcctggtatttcaggttctcgtcttttgggcaccattcctcagtccatttcacagcaaactgtttggaatcaaatggcaacagtgagaacaccattgaattttgattctagcaatcagagcttttgtcaattttctattgaccttctcggtggaggaa

SEQ ID NO: 63465 - DNA, 240 bp, Glycine max
  Clone ID: 700761294H1
ctcgagccgtttaaattttgtgaggttcattatgaagaaaagggacaagcttagttgtcaagttggaatcaacccatactccatggaatggactggtttggccaatagattactgagtaagggcaacgatattctgtgttgcgattatgctagttttgatggtttgattaccaagcaagttatgagcaagatggcagaaatgataaacagtctttgtggtggtgatgaaaaattgatgcg

SEQ ID NO: 63466 - DNA, 242 bp, Glycine max
  Clone ID: 700761295H1
caactgagccatcgcagggcaactcatttgctctcaaacactctttattacaaacggttctttccttattatgctttcaatgttttgggtggacttgacaatgaaggaaagggatgtgtcttcacatatgatgctgttggttcttatgagagggttggatatagctctcagggttctggatccacacttattatgccatttcttgataaccagctgaagtctcctagcccactcctgttacc

SEQ ID NO: 63467 - DNA, 268 bp, Glycine max
  Clone ID: 700761301H1
cggctcgagctcgagccgaatcggctcgacggctcgaggcaagagggacgggtgctgatcatctcaataaactttgtggtggctgcaagatcacagagtgacaacttcgagtatgtgtcattcaagaccaatgatacacccatgatcggcactcttgcaggggcaaactcattgttgaacgcattaccagaggaagtgattcagcacactttcaacctaaaaagccagcaggccaggcagataaagaacaacaaccctttcagttcct

SEQ ID NO: 63468 - DNA, 267 bp, Glycine max
  Clone ID: 700761303H1
caaaggccatagtgatactagtgattaatgaaggagatgcaaacattgatatccacagatctgatgaagatatccaagctccgattctgtgggtttttctcaggagtgatcgtggaactctcataggaacatattcggcaactgagcagacgtgccaaatctagttcaaggataaccatttcctccgaagatgaaccattcaacttgagactccgcaaccccatctattccaacaactttggaaagttctttgagatcaccctgaga

SEQ ID NO: 63469 - DNA, 263 bp, Glycine max
  Clone ID: 700761304H1
ggctcccaagggcttaatctttttggctgtgttatgcttcttagcactgtcactgagtcgttgtcttgcggaggataatggacttgttatgaacttctacaaggaatcatgccctcaggctgaagacatcatcaaagaacaagtcaagcttctctacaagcgccacaagaacactgctttctcctggctcagaaacatcttccatgactgtgctgttcagagttgtgatgcttcactgttgctggactccacaagaagagctt

SEQ ID NO: 63470 - DNA, 216 bp, Glycine max
  Clone ID: 700760634H1
aggttctaccacctctctctcccaaactctctttgttgtgctgcttcagcgtctgcaggtagcaaagatggcgacattgactgcttcaagtaacttagtctctagaaattctcatgtccaccatggacgaacaactgcttcatatgagtctaaagcagtagcaatgggacttagatctctgaagcagacaaatactcataatggactaggaatttt

SEQ ID NO: 63471 - DNA, 269 bp, Glycine max
  Clone ID: 700760637H1
gtctctccgcagcagccacacttcttcgccgtttcagctgaagagccatccgcaggtaagcaatggttaagcataataatgttatccctcatgggcacttccggaaacactggcaaaactatgtgaagacttggtttaatcaaccagcccgaaagaccagaagacggttggctcggcagaagaaggctgtcaagattttccccaggcctactgctggatctctcaggcctattgttcatggccagactctgaaatacaacatgaaagtc

SEQ ID NO: 63472 - DNA, 271 bp, Glycine max
  Clone ID: 700760639H1
tgctcttagagaagctatctcatgaatcatgactgattccaaggtaaagaacaggaaatttgtggagaccattggagactccaaattcgtgctgaaaaactatgatctccagaaggacaagcgatttagtggctctgttaagttgcctcacattcctcgtcccaagatgaagatttgtatgcttggagatgcccaacacgttgaagcaggctcagaagataggatttgactacatggatgttgagtccttggagagtcttattacaaacaa

SEQ ID NO: 63473 - DNA, 274 bp, Glycine max
  Clone ID: 700760640H1
tgcgattatgctagttttgatggtttgattaccaagcaagttatgagcaagatggcagaaatgatcaacagtcttcgtggtggtgatgcaaaactgatgcgtgaaaggacacacctgctgttggctctgttgttcaaggatggcaatttgtaagaaagatgtttggagagctgcatgtggaatcccttctggatttccgctcacagttatttgcaatagcatttttcatgagatgctcattagctatagctatgaaaacttactgcgccaggcc

SEQ ID NO: 63474 - DNA, 272 bp, Glycine max
  Clone ID: 700760641H1
ggagacaacaggtttactgagaaaacaatttttacttgcagagatttggtcatcttggttgtttattatacaatagcaactcgatttagaaaatttctaccgcattacattaggtggcatctgtataccttgttgatctacattctcccatcttttctcactgctgaaattaaatataagcggaatcagagtaatattcagatttccggcttattttacgacggcagatacaaattctggactaaacacgagaaaaatcttgctttgacaga

SEQ ID NO: 63475 - DNA, 270 bp, Glycine max
  Clone ID: 700760642H1
aaataatttaagatactatgatgagagcacggttcccattactgttgctgggacttgttttcctggcttcagtttctgtctcatttggcattgcttactgggaaaaagagaaccccaaacacaacaagtgtctccagagttgcaatagcgagagagactcgtacaggaaccaagcatgccacgctcgttgcaacctccttaaggtgaagaaagaagaatgtgaagaaggtgaaattccacgaccacgaccattcccacaacacccggaga

SEQ ID NO: 63476 - DNA, 273 bp, Glycine max
  Clone ID: 700760645H1
aaaattcttccaccaagttatgggtttccttgtgttgcttcttttctccctcttaggtctctcttctagttccagcatatcaactcatcgttccatattggaccttgacctaaccaagtttaccacacagaaacaggtgtcttcactgttccaactatggaagagtgagcatggacgtgtctaccataaccacgaagaagaggcaaagagacttgagattttcaagaataacttgaactatatcagggacatgaatgcaaacagaaaatcacc

SEQ ID NO: 63477 - DNA, 283 bp, Glycine max
  Clone ID: 700760646H1
ttcaggttctcgtcttttgggcaccattcctcagtccatttcacagcaaactgtttggaatcaaatggcaacagtgagaacaccattgaattttgattctagcaagcagagcttttgtcaattctctattgatcttcttggtggaggaattttagtggacaaaactggagattggatcacacttatacaaaattctccaattagtaacttgttgagagttgctgcttggaagaaaggctgtttaatggttaagattgtgatgtctgggaatgcagcagtcaaa

SEQ ID NO: 63478 - DNA, 267 bp, Glycine max
  Clone ID: 700760649H1
tcgccccaccaccaccatgtccataaatctacgcacccacgccttcgcgggtaacccgctccgatcccccaaccgggtcgacccgttttcgcccgcctccgcgctcgagaccctcacgacccgaatcctcgacgccgcgcacgtgtcctcaccgtccgtggattttaacgtcttgccttttagaaatgggagggtgctggcttcttcggagagtggtgacacgtggcgcctcgggtcgatcgcgctggaggaagtgaagggtctatt

SEQ ID NO: 63479 - DNA, 263 bp, Glycine max
  Clone ID: 700760651H1
gtttatggttgtcaacttaacaccaatgacaatatgcacacatattgtttatggttgtcaacttaacaccaatgacaatatgtgtgcatatgggctcaatcctggtatttcaggttctcgtcttttgggcaccattcctcagtctatttcacagctaactgttttggatcaaatggcaatagtgagtactccattgaattttgattctagctagcagtgcttttgtcaatatgctattgaccttctcggtggatgaatcttag

SEQ ID NO: 63480 - DNA, 269 bp, Glycine max
  Clone ID: 700760655H1
gttcaatatcctagtacaccgtattaaagaatttaagatatactatgatgagagcgcggttcccattactgttgctgggagttgttttcctggcatcattttctgtctcatttggcattgcgtattgggaaaagcagaaccccagtcacaacaagtgcctccgaagttgcaatagcgagaatgactcctacaggaaccaagcatgccacgctcgttgcaacctccttaaggtggaggaagaagaagaatgcgaagaaggtcaaattcca

SEQ ID NO: 63481 - DNA, 268 bp, Glycine max
  Clone ID: 700760656H1
atcgagcgaatcggctcagtggatctaccttgtgacacaattcctagtgtcttgactacaactgatgagagattacgtaggcacagaacatgagggatatgatccttttcttggtggaattcaaaaatatgccactcccatgatgcccctagatgaagaaattctttctaaggttgcacaagatatggttgaggaatggttcgattgtgttgatgaggaggattcctttgaggaagtttctttaagtgcagcacttaatggtgttgag

SEQ ID NO: 63482 - DNA, 269 bp, Glycine max
  Clone ID: 700760657H1
cattggtgtcaagttgacaaccataaacaatatgtgtgcatatgggctcaatcctggtatttcaggttctcgtcttttgggcaccattcctcagtccatttcacagcaaactgtttggaatcaaatggcaacagtgagaacaccattgaattttgattctagcaagcagagcttttgtcagttttctattgaccttctcggtggaggaatcttagtggacaaaactggagattggatcacacttatacaaaattctccaattagtaact

SEQ ID NO: 63483 - DNA, 269 bp, Glycine max
  Clone ID: 700760659H1
ggcaatctttcactggataaagtgatgactgaatttatgctccgccttgatgccacaccggcttgtataaagaatatgcctctagatgacgatgatccagccagaggactgaccttcgtaatgacaaaacttaaatatgaactgtgttacagtaggggcaagcaaaagtatacttttgaaagtaagcgtgacattcttgatcttgtttaccaaggtcttgatcttcatatgatcaaggctttcctaaataaaaaagaatgtgccagtgt

SEQ ID NO: 63484 - DNA, 201 bp, Glycine max
  Clone ID: 700760661H1
aaaccctaatccctatttttcttcctcagtagtgtcatttacgcttctcttctctgcagcaactatgcctaaccctaaggtcttcttcgacatgaccatcggcggtcaatctgctggccgcatcgtgatggagctctacgccgacgtcactccccgcaccgccgagaacttccgcgcgctttgcaccggcgagaagggcgt

SEQ ID NO: 63485 - DNA, 269 bp, Glycine max
  unsure (1)..(269): unsure at all n locations
  Clone ID: 700760663H1
tataataataataatcctctcattctgcctcagccttattgcactacacaaaccctcaaaccngtagctacctatccaccatgatcaagaccctgaatcctgacccaaatccagcaaaaactgctgagatcatgtcaaggtacaggccaatagcaccaaagcctgaaacctctccaaactcgtccatgagtgagggctcttgttcctctctctcccagaagagcaatcaatctgctaaccttaggaatgtatggccacagcttcaagcc

SEQ ID NO: 63486 - DNA, 267 bp, Glycine max
  Clone ID: 700760664H1
gcttttccaaacaagattgtttttgatgataagcttgtgttggctaacacacaagaattctttgatggaaattttccagtggattcttggttaccaatttttgtgaattgtctttatcctgtaagtcaattaccttcagaagctgtcgttgtaaatgttacatgtggtagtggacgtggtggtttacccaccactgcttggattagttctgcagttaacaatcgctcctcagatatcaacaaaaagattcgcacagcacttgggaaa

SEQ ID NO: 63487 - DNA, 264 bp, Glycine max
  Clone ID: 700760665H1
caataaccagcttgatcaaacccctagggtattttaccttgctgggaacccagatatagagtacccagagaccatgcaacaacaacaacagcagaaaagtcatggtggacgcaagcaggggcaacaccagcaggaggaagaggaagaaggtggcagcgtgctcagtggcttcagcaaacacttcttggcacaatccttcaacaccaacgaggacatagctgagaaacttcagtctccagacgacgaaaggaagcagatcgtgac

SEQ ID NO: 63488 - DNA, 253 bp, Glycine max
  Clone ID: 700760670H1
gcgtcgtcccccccggagcccgtttcgaaccgacgcgttatgtagccggcgtcaaagcgccctccatttaccattccgagagaggtccaacgacttcccaggtcctcgccgtcctcgccggcctcccggtcggtggcatcctgctcctcctggcgggattgaccctggcaggaaccctcaccggtctcgcagttgccacgccgctcttcgtcctcttcagcccggtgctggttccagccacggtcgccatcgg

SEQ ID NO: 63489 - DNA, 265 bp, Glycine max
  Clone ID: 700760671H1
tcaatatcctagtataccttaataaataatttaagatactatgatgagagcacggttcccattactgttgctgggacttgtgttcctggcttcagtttctgtctcatttggcattgcttactgggaaaaagagaaccccaaacacaataagtgtctccagagttgcaatagcgatagagattcgtacagggaccaagcatgccaggctcgttgcaacctccttaaggtggagaaagaagaatgtgaggttggtgaaattccacga

SEQ ID NO: 63490 - DNA, 268 bp, Glycine max
  Clone ID: 700760672H1
ctccgcactccgtcttcatcaatcagcatcaccaccgctccaacacaggggaaaatgagggagatccttcacgttcagggagggcaatgcgggaaccagatcggttcgaagttctgggaagtggtgtgcgacgagcacggcatagatccgacggggaagtacgtcggaaactcagatctacaactcgagcgcgtgaacgtgtactacaacgaagcttcctgcgggcggtttgtcccacgcgcagtgctgatggacctggagcccggaa

SEQ ID NO: 63491 - DNA, 93 bp, Glycine max
  Clone ID: 700760673H1
ctggttgatgagtgtccttttgcatttgtgaactagtatgtaatattttattcacttaaataaagcgcattactatgtgcaatgagtgtgttt

SEQ ID NO: 63492 - DNA, 263 bp, Glycine max
  Clone ID: 700760674H1
ctcgagccttcctagtacatcgtattaaagaatttaagatatactatgatgagagcgcggttcccattactgttgctgggagttgttttcctggcatcagtttctgtctcatttggcattgcgtattgggaaaagcagaaccccagtcacaacaagtgcttccgaagttgcaatagcgagaaagactcctacaggaaccaagcatgccacgctcgttgcaacctccttaaggtggaggaagaagaagtgtgcgaagaaggtca

SEQ ID NO: 63493 - DNA, 265 bp, Glycine max
  Clone ID: 700760675H1
tttcataattcccacacattatggctgagcttcactaccaaccacaacaccaataccccctccgctaccctaacgatccacaccaacaaacccgttcctccacccaccaggtcgtcaaggccgccaccgccgtcacagcgggcggctccctcttgatcctcgcctcgttgatcctcgccgccaccgtcattgccctcaccatcgtcaccccgctgttcgtcattttcagtccggttctcgtccccgccgtaatcaccgttgcgct

SEQ ID NO: 63494 - DNA, 266 bp, Glycine max
  Clone ID: 700760676H1
gtgtggtgaatgcacctattgcaagtctgaagagagcaacctgtgtgagcttctcaggatcaacactgacagaggagtgatgctcagtgatggcaaaacaaggttctccaaaaatggacaacctatttaccacttcgttggaacctccactttcagtgaatacactgttctccatgaaggatgtgtcgccaagatcaaccctgctgcccctcttgacaaagttgctgttgtcagttgtggattctgcacaggttttggggctactg

SEQ ID NO: 63495 - DNA, 260 bp, Glycine max
  Clone ID: 700760681H1
ggctcccaagggtttaacctttctggctgtgttaatatgcgtttcagcactgtcactgagtccttctgttgcgggggaagggcaaaataatggccttggtatgaacttctacaaggaatcatgccctcaggctggagacatcatcacaggacaagtcaagcttctctacaagcgccacaagaacactgctttctcctggctcaggaacatcttccatgactgtgctgttcagagttgtgatgcttcactgttgctggact

SEQ ID NO: 63496 - DNA, 260 bp, Glycine max
  Clone ID: 700760682H1
gcttttctttttcttgctctttaattttctgattttagcaaattaaaatagtagtgttattggtaggttctcggcaagaacttttcagttccaggggtgtcgggaaccctgaacagaggaggagggcataagataaaagggacagtggtgttgatgaggaagaatgtgttggacttcaacagcgtggctgatcttactaaaggaaatgttgggggactcataggcaccggcctcaacggtcttggctcaacacttgataa

SEQ ID NO: 63497 - DNA, 89 bp, Glycine max
  Clone ID: 700760683H1
cagcattctagtggtggctaccagtctctaccccgtagcagtaggtggtatcatgctgcacactaatgtcatcaccaatgcctacggcg

SEQ ID NO: 63498 - DNA, 262 bp, Glycine max
  Clone ID: 700760685H1
gccaaatgctgttctttcaatgtggagatattttgttggagatctcgtctttgaagtttctaagatgacttctccctacattaaatgtacagtctctttcttcatagcatttggaaatttggctgatgataccatcaattttgaggcttttccccacaagctggtgcagtttggagagatttacttgccagaagaatacgttagttccaagaggacttaaatggagcaaatcagttggaagaacttggagctagcttcccaa

SEQ ID NO: 63499 - DNA, 263 bp, Glycine max
  Clone ID: 700760686H1
ctcttcctcaccgattgctagaatggaatttcgatgctcagtcatctcttttaccattctcttctctcctgctcttgcaggagagagccatgtccatgcatcgctacctgaggaagattattgggaagctgtttggccaaacactcccattcccactgcactgcgagagcttctaaagcctctccctgcaggtgttgaactcgatgaactccctaagcaaattgatgatacacagtacccaaaaacattcttctataaagaag

SEQ ID NO: 63500 - DNA, 265 bp, Glycine max
  Clone ID: 700760688H1
ctcgagcgaacaagatgaacgtgaacacccacgcccacaccaacctcatcaaaaggaagcggaaaagcacgaatggcaacacaagcaggaaaagcaccaaggaaaggaaagtgaagaagaagaagaagaccaagacgaggatgaggagcaagacaaagagagccaagaaagtgaaggttctgagtctcaaagagaaccacgaagacataagaataagaacccttttcacttcaactctaaaaggttccaaactctcttcaaaaac

SEQ ID NO: 63501 - DNA, 263 bp, Glycine max
  Clone ID: 700760689H1
taaacactcatcagtcatcaccatggccaagctagttttttccctttgttttctgcttttcagtggctgctgcttcgctttcagttccagagagcagcctcagcaaaacgagtgccagatccaaaaactcaatgccctcaaaccggataaccgtatagagtcagaaggagggctcattgagacatggaaccctaacaacaagccattccagtgtgccggtgttgccctctctcgctgcaccctcaaccgcaacgcccttcgta

SEQ ID NO: 63502 - DNA, 263 bp, Glycine max
  Clone ID: 700760692H1
cgatttcttaagggaaagaaaatcactctctgtgctggccacagacttcgtgaatcattttcctttccactcttagtttatcatatgaacactctcctatttgatataggacttcgtgtcagattttaaacttcttctgtttctttctcagttctctgtttaatttcaagttcaagctggtgaaatcttggattagtgctcccactttcctatctggtataggacttcgtgggtagacttttctatttctctcctttctttca

SEQ ID NO: 63503 - DNA, 258 bp, Glycine max
  Clone ID: 700760693H1
tgagagtgcggtttcctttgttggtgttgctgggaactgttttcctggcatcagtttgtgtctcattaaaggtgagagaggatgagaataaccctttctacttgagaagctctaacagcttccaaactctctttgagaaccaaaacggtcgcattcgtctcctccagagattcaacaaacgctccccacaacttgagaaatatcgagactaccggattgtccagtttcagtcaaaacccatcataatccttctatccc

SEQ ID NO: 63504 - DNA, 265 bp, Glycine max
  Clone ID: 700760695H1
aaaaaataccaaccatggcaaccatttctactgatcaaccaagaggatcctactcctatggaacctcctatggagcaccctatggaaccacctatgagaccaacagcagcattaacaaccctccttcacgccaaaccgtgaagttcataactgctgcaactattggcatcacactcttactcctgtctgggttgaccctcacaggcactgtcataggtttgatcattgcaacccctcttcttgttatcttcagccccatccttgt

SEQ ID NO: 63505 - DNA, 264 bp, Glycine max
  Clone ID: 700760696H1
tggaaagaattcctcttgccacatctgagggttttccccatgtgctttcacgcaaaaatggtgaaaaaggcaaaaggagatttgtttctggggatggtgaagagatgacattgattccgggaaccagtgttgaagaggcttacaataagctaatagttgaacttgagaaaagtgttcctacattggttgattctgaatgtcccaaggatgagaaacttcctcgtcgcaaaatttttgacaaacctaagacgcgctgcttcacta

SEQ ID NO: 63506 - DNA, 285 bp, Glycine max
  Clone ID: 700760701H1
tgatttgaggccaggcaagccccactcaaccaccacacctctcctcgttcacgctacccctttctgctcttcttctacctttcaagttttaaaagtataaagatggcagagacattcctatttacctcagagtcggtgaacgagggacaccctgacaagctctgcgaccaaatctccgatgctgtcctcgacgcttgcctcgagcaggacccagacagcaaagttgcctgcgaaacatgcaccagaaccaacttggtcatggtcttcggagaaatcacgaccaag

SEQ ID NO: 63507 - DNA, 281 bp, Glycine max
  Clone ID: 700760702H1
cttcctccaacccggtctctctctctctgcatttttgctgcttagagtgtgtgttgttctgtgctttttgtggaccgaattgcccctactcaggtaaagagaatgattctcacaaagcagtatcgatgcgtacattcagctagctgtcaatgcaccaagggtcatttaagtgaagatgtgatattcttggtgtttcagcatttgaattggaacccgaagctaattgctgctctgtcatgtgtgtgcaaatggtttgacgatctttcaaagcaagttctatg

SEQ ID NO: 63508 - DNA, 281 bp, Glycine max
  Clone ID: 700760703H1
cttcagatgattctcctgaaaaggaagatcaagaaaaacccaaaaagattgatgccagattgagacaaagaatagatcctcaatacaatgaggttcaggctcagatggaaacaaatttgtttaaattgtctcttgatgatgttgaaactcctaaaggttccatgttggatcttaaaatttctcagtctaaaattgcacttctagagaacacagttggaggaactattctgcgtagtgatctattggcaaattttctgacagagggcaattttagagcaagt

SEQ ID NO: 63509 - DNA, 200 bp, Glycine max
  Clone ID: 700760704H1
tagtgctgctccttgcagctctaattctatcccctcaagttcttgcaaactatgagaatcccccagtgtacaagcctcccactgagaaaccaccagtttataagcccccagttgagaagcctcctgtttacaaacctccagttgaaaagcctccagtttataagcctccagtagagaagccaccagtgtacaagccccca

SEQ ID NO: 63510 - DNA, 278 bp, Glycine max
  Clone ID: 700760705H1
cccagatatagagtacccagagaccatgcgacaacaacaacagcagaaaagtcatggtggacgcaagcaggggcaacaccagcaggaggaagaggaagaaggtggcagcgtgctcagtggcttcagcaaacacttcttggcgaaatccttcaacaccaacgaggacatagctgagaaacttcagtctccagacgacgaaaggaagcagatcgtgacagtggaaggaggtctcagcgttatcagccccaagtggcaagaacaacaagatgaagatgaag

SEQ ID NO: 63511 - DNA, 278 bp, Glycine max
  Clone ID: 700760706H1
ataaaattcttccaccaagttatgggtttccttgtgttgcttcttttctccctcttaggtctctcttctagttccagcatatcaactcatcgttccatattggaccttgacctaaccaagtttaccacacagaaacaggtgtcttcactgttccaactatggaagagtgagcatggacgtgtctaccagcaccacgaagaagaggcaaagagacttgagattttcaagaataacttgaactatatcagggacatgaatgcaaacagaaaatcacccca

SEQ ID NO: 63512 - DNA, 221 bp, Glycine max
  Clone ID: 700760707H1
gtggcttcagcaaacacttcttggcacaatccttcaacaccaacgacgacaaagctgagaaacttcagtctccagacgacgaaaggaagcagatcgtgacagtggaaggaggtctcagcgttatcagccccaagtggcaagaacaacaagatgaagatgctgatgaagacgaagatgatgaagatgaaccaattacctctcaccctcctcgccgaccaagc

SEQ ID NO: 63513 - DNA, 209 bp, Glycine max
  unsure (1)..(209): unsure at all n locations
  Clone ID: 700760709H1
cacacacactaagaataatggcttctatcctccactactttttagtcctctctctttctttctctttccttttcttcttatccgactccgtccccattccccaacaccacactaatcctacattacctataaaccttctggttctacccgttcaaaatgatgcttccacacggctccattgtgtcaanctccanaaaaggacccctcta

SEQ ID NO: 63514 - DNA, 184 bp, Glycine max
  unsure (1)..(184): unsure at all n locations
  Clone ID: 700760710H1
caagaacacagttggaggaatcattctgcgtagtgatcttgggaagtgcaattttagattgagaaattttcagatccaacatggagcctttaggagtttccacatcatctacggctttgctngaggtaccattctgcgtagtgatctattggcaaattttttgacagagggcaattttagagca

SEQ ID NO: 63515 - DNA, 276 bp, Glycine max
  unsure (1)..(276): unsure at all n locations
  Clone ID: 700760714H1
cttaattattaacacttccttagttcaatatnggggaagcccttcactctctctctttcttccctttgcttgctactcttgtcgagtgcatgctttgctattagctccagcaagctcaacgagtgccaactcaacaacctcaacgcgttggaacccgaccaccgcgttgagtccgaaggtggtttgattcaaacatggaactctcaacaccctgagctgaaatgcgccggtgtcactgtttccaaactcaccctcaaccgcaatggcctccacttg

SEQ ID NO: 63516 - DNA, 273 bp, Glycine max
  Clone ID: 700760716H1
aacttattaacactttccttagttcaatatggggaagccttcttcactctctctctttcttccctttgcttgctactcttgtcgagtgcatgctttgctattacctccagcaagttcaacgagtgccaactcaacaacctcaacgcgttggaacccgaccaccgcgttgagtccgaaggtggtacaattgaaacatggaactctcaacaccctgagctgcaatgcgccggtgtcactgtttccaaacgcaccctcaaccgcaacggcctccac

SEQ ID NO: 63517 - DNA, 280 bp, Glycine max
  Clone ID: 700760717H1
ttttcctgaaaaggaagatcaagaaaaacccaaaaagattgatgccagattgagacaaagaatagatcctcaatacaatgaggttcaggctcagatggaaacaaatttgtttaaattgtctcttgatgatgttgaaactcctaaaggttccatgttggatcttaaaatttctcagtctaaaattgcacttcccaagaacacagttggaggaactattctgcgtagtgatctattggcaaattttctgacagagggcaattttagagcaagtgttgatttg

SEQ ID NO: 63518 - DNA, 273 bp, Glycine max
  Clone ID: 700760718H1
aatatcctagtacaccgtattaaagaatttaagatatactatgatgagagcgcggttcccattactgttgctgggagttgttttcctggcatcagtttctgtctcatttggcattgcgtattgggaaaagcagaaccccagtcacaacaagtgcctccgaagttgcaatagcgagaaagactcctacaggaaccaagcatgccacgctcgttgcaacctccttaaggtggaggaagaagaagaatgcgaagaagtcaaattccacgaccacga

SEQ ID NO: 63519 - DNA, 277 bp, Glycine max
  Clone ID: 700760719H1
agctctaacagcttccaaactctctttgagaaccaaaacggtcgcattcgtctcctccagagattcaacaaacgctccccacaacttgagaactctcgagactaccggattgtccagtttcagtcaaaacccaacacaatccttctcccccaccatgctgacgccgatttcctcctctttgtccttagcgggagagccatacttaccttggtgaacaacgacgacagagactcctacaaccttcaccctggcgatgcccagagaatcccagctggaa

SEQ ID NO: 63520 - DNA, 276 bp, Glycine max
  Clone ID: 700760720H1
aaaaagtttcctctacaaaagcacaatttgttagtggaaaaaccttcaaatatgatataattggtgctggttcacattcttcagatgattttcctgaaaaggaagatcaagaaaaacccaaaaagattgatgccagattgagacaaagaatagatcctcaatacaatgaggttcaggctcagatggaaacaaatttgtttaaattgtctcttgatgatgttgaaactcctaaaggttccatgttggatcttaaaatttctcagtctaaaattgcac

SEQ ID NO: 63521 - DNA, 275 bp, Glycine max
  Clone ID: 700760721H1
tctcgagccgattcggctcgagggaaaatcttgtattgaaattttcacaagaggaatttcttacagcttggtcaactcagatgcgtcctgcaacaactctgttggctgatgggtgtccatatttgtatgcaatggtgcatgatagttcagtgtctacaataccaggtgattttgtcattggtgtcaagttgacaaccataaacaatatgtgtgcatatgggctcaatcctggtatttcaggttctcgtcttttgggcaccattcctcagtccatt

SEQ ID NO: 63522 - DNA, 274 bp, Glycine max
  Clone ID: 700760722H1
cacacttttaacctaaagagccagcaggccaggcaggtgaagaacaacaaccctttcagcttcctggttccacctcaggagtctcagaggagagctgtggcttagagagccctttttgcatgtgctaccacacttttgtccttttgggctctagctagtgctggtagcagtaaataagaatgaataagagaaacaaaggcttagatgccctttgttaagtgtagaataacgggtatagtaactatgtacccttgtgtaatgagtcactcaagta

SEQ ID NO: 63523 - DNA, 277 bp, Glycine max
  Clone ID: 700760723H1
cacagtgccaccacacagtggtcatggttgaaggtgaagtttagggctaacactaatgaagatgatgatgatgcaaccatgaccacagtgccaccacacagtgtccaagtgcacacaacaacacaccgctacgaagccggcgtcgtcccgccggctcgttttgaggcgccgcgttacgaagccggcatcaaggcgccctcttccatttaccattccgagagaggtccgacgacctctcaggttctcgcagttgtcgccggccttccggtcggcggca

SEQ ID NO: 63524 - DNA, 277 bp, Glycine max
  Clone ID: 700760724H1
ctgatggtaagaaaggtggacatacagcaactcctcaccctgcaaagaaaggcggaaagactcccaacagcgaagccaaagccaagactcccaacagtgaagccaaagccaagactcctaagtctggtggactctcttgcaaaacctgcagcaagtctttcaccaatgaaagtggtctgcaacaacataacaaggcaaagcatggtggtcagtgatatttttgctgttggttatgactcattcatgtattatttttggcttatgtaatagagtgagt

SEQ ID NO: 63525 - DNA, 276 bp, Glycine max
  Clone ID: 700760725H1
aacgtgaacacccacgcccacaccaacctcaacgtagaggaagaggaaaagcacgaatggcaacacaagcaggaaaatcaacaaggaaaggaaagtgaagaagaagaagaagaccaagacgaggatgaggagcaagacaaagagagccaagaaagtgaaggttctgagtctcaaagagaaccacgaagacataagaataagaacccttttcacttcaactctaaaaggttccaaactctcttcaaaaaccaatatggccacgttcgcgtcctccag

SEQ ID NO: 63526 - DNA, 274 bp, Glycine max
  Clone ID: 700760728H1
tctcgagccgattcggctcgagttcagagtatttaattattggcataagaactggatgctactttttactttgattaacagcaatctgtccaaatatctgtcactgattatgtccggttgacaagcactaatggtatattttctgttaatcaaagtaaaaattagcatccagttcttatgccaataaagagaattcagagtatttaattatttttatttgatgaagctcttcggtaaggatgccaaaagtattactgatttttttatttttatt

SEQ ID NO: 63527 - DNA, 265 bp, Glycine max
  Clone ID: 700760730H1
ctcgagcgattcggctcactcaccggtttggagcttctctttctttcccaccaaatttcctaggaatcaaacaccatggactcgttggaactctgctttgagctttgaagaagaaaatgttcgggttctctcgcaggcacatgaaacttggcagtagattgaaggttcaactttctgacaccaccctgggaactagaagtaccatcaggcaccataagcgaaatgtaaactccaatggtgatagagttacagggacaagtggtca

SEQ ID NO: 63528 - DNA, 277 bp, Glycine max
  Clone ID: 700760732H1
cgagttcatcgacaaccaattcacatcactgaaggaaattatgtcagaaagcaagatgtcagcattgaatatgatgcatgtacaattccaaatgattgtggttcattggttgttgccaaggttggaaatcacaaacaaattgttggtttccatgttgctggaagcaaaggaagactgggatatgcttcattgataccatatgttgagccagttgtgcaagctcaaagtgctgaagtttacttcgacttcttccctgtggaggttgatagtcaagagg

SEQ ID NO: 63529 - DNA, 279 bp, Glycine max
  Clone ID: 700760733H1
tgttctagatcgcgatctagaactagtcagttcaatatcctagtataccttaataaataatttaagatactatgatgagagcacggttcccattactgttgctgggacttgttttcctggcttcagtttctgtctcatttggcattgcttactgggaaaaagagaaccccaaacacaacaagtgtctccagagttgcaatagcgagagagactcgtacaggaaccaagcatgccacgctcgttgcaacctccttaaggtggagaaaaagaatgtgaaga

SEQ ID NO: 63530 - DNA, 246 bp, Glycine max
  Clone ID: 700760734H1
ggctcgagcatcagtcatcaccatggccaagctagtgtactccctttgttttctgcttttcagtggctgctgctacgctttcagttccagagagcagcctcaggtaaacgagtgccagatccaaaaactcaatgcccttaaaccggataaccgtatagagtcagaaggagggctcattgagacatggaaccctaacaacaagccattgcagtgtgccggtgttggcctctctcgctgcaccctcaa

SEQ ID NO: 63531 - DNA, 140 bp, Glycine max
  Clone ID: 700760735H1
ctcgagccgtgcagacaagaaatgttatgtttccagcctaggatgtttctttggactacttgatgccaacttcctcgaggataaacagattggagagattgccgagggtgaaaatgaattcaatattccacacatcatac

SEQ ID NO: 63532 - DNA, 274 bp, Glycine max
  Clone ID: 700760736H1
acttattaacactttccttagttcaatatggggaagccctcttcactctctctctttcttccctttgcttgctactcttgtcgagtgcatgctttgctattacctccagcaagttcaacgagtgccaactcaacaacctcaacgcgttggaacccgaccaccgcgttgagtccgaaggtggtcttattgaaacatggaactctcaacaccctgagctgcaatgcgccggtgtcactgtttccaaacgcaccctcaaccgcaacggcctccactt

SEQ ID NO: 63533 - DNA, 150 bp, Glycine max
  Clone ID: 700760738H1
tgataaaccgcgatcacaggttgccgcaccttaaaaccggaaacaaaagcaatcgttacttgatttcaagaatttctcaatttctttctacttctttgtgtacgatttcttaagggaaagaaaatcactctctgtgctggccacagactt

SEQ ID NO: 63534 - DNA, 274 bp, Glycine max; identical to SEQ ID NO: 62003
  Clone ID: 700760739H1

SEQ ID NO: 63535 - DNA, 272 bp, Glycine max
  Clone ID: 700760741H1
gagcttaaccaattgtatgagaaatacaaagggaaaggacttgaaattctggcattcccatgcaatcagtttggggctcaggagccaggaactaatgaagagattgtggagtttgcttgtactcgcttcaaagctgagtttcccattttcgacaaggtggatgtgaatggtgacaatgctgctccactgtacaagtttctgaaatcaagcaaaggtggactctttggggatagtatcaaatggaacttctccaaattccttgttgataagga

SEQ ID NO: 63536 - DNA, 197 bp, Glycine max
  Clone ID: 700760742H1
taagatttgaaattttgataaaccgcgatcacaggttgccgcaccttaaaaccggaaacaaaagcaatcgttacttgatttcaagaatctctcaatttcttcctacttctttgtgtacgatttcttaagggaaagaaaatcactctctgtgctggccacagacttcgtgaatgattttcttttccacacaacatacg

SEQ ID NO: 63537 - DNA, 270 bp, Glycine max
  Clone ID: 700760743H1
gaagtgttgatgatgttgtccttgttggtggttctaccagaattcccaaggttcaacaacttgtgcaggacttctttaatggaaaggagctgtgcaagagcatcaatcctgatgaagctgttgcatatggtgctgctgttcaggctgcaattttaagtggtgagggcaatgagaaggttcaggatcttctcctccttgatgtcacccctctatctcttggtttggagactgctggcggtgtgatgactgtcttgatccctaggaacacta

SEQ ID NO: 63538 - DNA, 269 bp, Glycine max
  Clone ID: 700760744H1
gtgagaacaccattgaattttgattctagcaagcagagcttttgtcaattctctattgatcttcttggtggaggaattttagtggacaaaactggagattggatcacacttatacaaaattctccaattagtaacttgttgagagttgctgcttggaagaaaggctgtttaatggttaagattgtgatgtctgggaatgcagcagtcaaaaggagtgattgggcctcattggtacaagtgtttttaacaaacagcaacagtacagagca

SEQ ID NO: 63539 - DNA, 272 bp, Glycine max
  Clone ID: 700760747H1
gttcaatatcctagtataccttaataaataatttaagatactatgatgagagcacggttcccattactgttgctgggacttgttttcctggcttcagtttctgtctcatttggcattgcttactgggaaaaagagaaccccaaacacaacaagtgtctccagagttgcaatagcgagagagactcgttcaggaaccaagcatgccacgctcgttgcaacctccttaaggtggagaaagaagaatgtgaagaaggtgaaattccacgaccacg

SEQ ID NO: 63540 - DNA, 273 bp, Glycine max
  Clone ID: 700760749H1
caagaacacagttggaggaactattctgcgtagtgatcttgggaagtgcgattttagactgagaaattttaagatccaacatggaacctttaggagtttctcagtctaaaattgcacttcccaagaacacagttggaggaactattctgcgtagtgatctattggcaaattttctgacagagggcaattttagagcaagtgttgatttgcagcgcactcatcgtattaaaggaatgattaaaatggtggccacagttggtattcctgagaata

SEQ ID NO: 63541 - DNA, 273 bp, Glycine max
  Clone ID: 700760751H1
attgtctttgaacactcatcaccatggccaagcttgtactttccctttgtgtccttcttttcagtggctgcttcgctctgagagagcaggcacagcaaaatgagtgccagatccaaaagctgaatgccctcaaaccggataaccgtatagagtcggaaggtgggttcattgagacctggaaccctaacaacaagccattccagtgtgccggtgttgccctctctcgctgcacccttaaccgcaatgcccttcgtagaccttcctacaccaacg

SEQ ID NO: 63542 - DNA, 272 bp, Glycine max
  Clone ID: 700760752H1
cggctcgagattctctccattgtctttgaacactcatcaccatggccaagcttgttctttccctatgtttccttcttttcagtggctgcttcgctctgagagagcaggcacagcaaaatgagtgccagatccaaaagctgaatgccctcaaaccggataaccgtatagagtcggaaggtgggttcattgagacctggaaccctaacaacaagccattccagtgtgccggtgttgccctctctcgctgcacccttaaccgcaatgcccttcgt

SEQ ID NO: 63543 - DNA, 272 bp, Glycine max
  Clone ID: 700760753H1
ctcttatcctccacgacgaccaagccatggaaagcatgaagatgacgaggacgaggacgaagaagaagatcaacctcgtcctgatcaccctccacagcgaccaagcaggcccgaacaacaagaaccacgtggaagaggatgtcagactagaaatggggttgaggaaaatatttgcaccatgaagcttcacgagaacattgctcgcccttcacgtgctgacttctacaacccaaaagctggtcgcattagcaccctcaacagtctcaccctcc

SEQ ID NO: 63544 - DNA, 271 bp, Glycine max
  Clone ID: 700760756H1
ggaactgcagaggagggtgctgctgctgttgctgtggaagaagccaaaaagagtaatcatctgcagagaaaattggagaagcgccagaaagatcgtaagcttgatgctcacattgaggagcagtttggtggtgggcgtttgcttgcttgcatttcctctcggcctggtcaatgtggcagagctgacggctacattttggaaggtaaggagttggagttttacatgaaaaaactccagaaaaagaagggaaagggtgctgcttgattttagt

SEQ ID NO: 63545 - DNA, 269 bp, Glycine max
  Clone ID: 700760759H1
gtcttggctcgctccctctcggatcagatctgcgctctccgttttcagatcgcgttttgtttcaattcgacactttcctcgcttcaaagattaagcgaacaatatggttgtccttgctgcatccattgtgagcaaatctggcaaagtgctagtttctagacagtttgtggatatgactcgcataagaattgagggtcttctagcagcatttcccaagttggtagggactggaaaacagcacacgtatgttgaaactgagaatgtgcgct

SEQ ID NO: 63546 - DNA, 267 bp, Glycine max
  Clone ID: 700760762H1
gaggttcaacaaacgctcccaacagcttcagaatctccgagactaccgcattttggagttcaactccaaacccaacacccttcttctcccccaccatgctgacgatgattacctcatcgttatccttaacgggactgccattcttaccttggtgaacaacgacgaccgagactcttacaaccttcaatctggcgatgccctaagagtccctgcaggaaccacatactatgtggttaaccctgacaacgacgagatcctcagaatgat

SEQ ID NO: 63547 - DNA, 266 bp, Glycine max
  Clone ID: 700760763H1
ggaagtttgtctgaaaaacataaatcttaatctaagattaagctgcacaggtgaatttgtcaggcttcatatttatgttacaatggtgccttgtttatttactgtaacccttttatgcaggggaaggaggtcaagatccagatcacctgttcggcggcagaaatgaatggatggggacagagatggttgactttgcatttaaggggttcgttcaagaggacataaattcggaggcgtagggcgaacttgtgatggtctgcataggg

SEQ ID NO: 63548 - DNA, 186 bp, Glycine max
  Clone ID: 700760764H1
gaattttgataaaccgcgatcacaggttgccgcaccttaaaaccggaaacaaaagcaatcgttacttgatttcaagaatctctcaatttcttcctacttctttgtgtacgatttcttaagggaaagaaaatcactctctgtgctggccacagacttcgtgaatcattttcttttccacacaacata

SEQ ID NO: 63549 - DNA, 274 bp, Glycine max
  Clone ID: 700760765H1
tggtgatattatgaccagctagtgcaactttgcaatttagaaagttagcagattgtgattttctcaagagaaactttaagcagatgtctaatgttttgtgggtagctcctgaggacaaggcgagtttatggtcacaacttcattatgtttcgtgtaataatctggaaatgcaagaagcttatcttgtcaatctcgtaaatgtgttacgagaattgtatttgcacagtccagaggaagctcgccaattgagaaggaaagctctctctcgtattga

SEQ ID NO: 63550 - DNA, 254 bp, Glycine max
  Clone ID: 700760766H1
ggctcgagctgtaccacttgcagcacaaatgactgatgtgagaagatatcaaaaacttcaaataattgacgaattaagaactgagaggggacgatttgagcttgaggttgagattggtaaatctccacctctttctgatgatgaggtttggtgggaattaaggcataaagcattagagttgagagaagagtggagactggaaaatcgcagagcatttgccaacatatggtcagatacagtttacgggatctctt

SEQ ID NO: 63551 - DNA, 269 bp, Glycine max
  Clone ID: 700760767H1
gggagctctgccgcctccaacaaaacagagttcagaacacaaaccctcgaaccgaacgtttctgagggttgatagagcacgatggttcagtacaattttaagaagattaccgtggtgccaaatgggaaggatgtggtcgagattatcctctctcgcacccagcgtcagacaccaaccgttgtgcacaaaggatatgcgatttcacggctgcgccaattctacatgcgcaaagtgaagtatactcagcagaattttcacgacaagctctc

SEQ ID NO: 63552 - DNA, 268 bp, Glycine max
  Clone ID: 700760769H1
acttcctcgtcgcaaaattcttgacaaacctaagacgcgctgcttcactattctccctatggagtttaatcttgtggttcgtcagaagtttttaaattttgtgaggttcattatgaagaaaagggacaagcttagttgtcaagttggaatcaacccatactccatggaatggactggtttggccaatagattactgagtaagggcaacgatattctgtgttgcgattatgctagttttgatggtttgattaccaagcaagttatgagc

SEQ ID NO: 63553 - DNA, 270 bp, Glycine max
  Clone ID: 700760770H1
attttctcacttctcagcactcagcagcgatatcagttgaagaaacagaaacaaacaaaagaggcagaagatgttgtgggtggacaaatatcgtcccaaaaccctcgaccaggttatggtccacaccgacatcgctcacaatctcaagaaattggtaacggaacaggattgcccccatttaaccttctatggcccatctggctccggcaagaaaaccctaatcatggctctgctccgccaaatgttcggacctggtgccgaaaaggtgaa

SEQ ID NO: 63554 - DNA, 269 bp, Glycine max
  Clone ID: 700760771H1
ctggtgtagctactgccctagaagaggagcttcatagtgcaagatctacatttgagcaagctcggtttaatctggttactgccttgtcaaatgttgaagcaaagaagagatttgaatttttggaagcagtcagtgggaccatggatgcacatcttcgttacttcaaacaggggtatgaattgttgcaccaaatggagccatatattaaccaggtcttgacttatgctcagcaatcaagagaaaggtccaattatgagcaggcagcccta

SEQ ID NO: 63555 - DNA, 120 bp, Glycine max
  Clone ID: 700760772H1
ttcaaacttaattattaacacttccttagttcaatatagggtgatagccttcactctctctacatcgtcccgttgctagcgactcttgtcgattgtatgctttgctataatctccagcaa

SEQ ID NO: 63556 - DNA, 265 bp, Glycine max
  Clone ID: 700760774H1
cgatcgaaaagtttccttgacaatctaattctgcaaaaatggcaagcaataaggagtctaagttcccagcacagagccagaaaactcagccaggaaaagaacatgtaatgaatccactcccacaagccacaaatcctgatcacaaggccgccaataaactccagggaaaggtggcgttggtgacaggaggtgactcaagaattggcagagcggtttgcctgtgtttcgcaaaagagggtgcaaccgtggcctttacatacgtaaa

SEQ ID NO: 63557 - DNA, 265 bp, Glycine max
  Clone ID: 700760775H1
cgttacagttttcgttctccattctctccattccttcgccatgtccgatctcggctccgatcttcctgctgccgccgccgctcttagtgctgaggatcgtgctggtctcgtgaatgcactcaaggacaagctccagctcctcgctgggcaacatgtggacatcctggagacactgccacccaaagtcaggcaacgcgtggaaattctcagagatctgcagagtcaacatgatgaggtggaggctaaatttttagaggagcgatca

SEQ ID NO: 63558 - DNA, 267 bp, Glycine max
  Clone ID: 700760776H1
ttcgtattgtcgcagagaaagaaaaccctagctcaccgtttcaagatgcaaatcttcgttaagaccctcactggtaagaccatcactctcgaagtcgagagttcagataccatagacaatgtaaaggccaaaattcaagacaaggaagggatcccaccagatcagcaacggctcatttttgctggcaagcagcttgaggatggacgtacccttgctgattataacatccaaaaggagtccactctccacttggttcttcgtctccgt

SEQ ID NO: 63559 - DNA, 269 bp, Glycine max
  Clone ID: 700760777H1
tgaggattagagggtcgccacgtttagcaataaccaaaccctctctactcttttttcttctccttctcttcgctagggttttagcttcttcctcttcacttcgttctttttcgcctctacaatgagcaacgacaaggacaacattcaacgtcgccgatctcacttctgctctcaacgaggacaatagagcagaccttgtcaatgctcttaagagcaagatacagagtttggctggacaacactcggatattctagagtctctgtcgccc

SEQ ID NO: 63560 - DNA, 265 bp, Glycine max
  Clone ID: 700760778H1
taaaattcttccaccaagttatgggtcaccttgtgttgcttcttttctccctcttaggtctctcttctagttacagcatatcaactcatcgttccatattggaccttgacctaaccaagtttaccacacagaaacaggtgtcttcactgttccaactatggaagagtgagcatggacgtgtctaccataaccacgaagaagaggcaaagagacttgagattttcaagaataacttgaactatatcagggacatgaatgcaaacag

SEQ ID NO: 63561 - DNA, 270 bp, Glycine max
  Clone ID: 700760780H1
ttcctagtgtcttgaccacaactgatgagagattggtaggcacagaacatgagggatatgatccttttcttggtggaattcaaaaatatgccactcccatgatgcccctagatgaagaaattctttctaaggttgcacaagatatagttgaggaatggtttgattgtgttgatgagtcggattcctttgaggaagtttctttgagtgcagcactcaatggtgttgagggtttggactatatggaaagaattcctcttgccacatctgagg

SEQ ID NO: 63562 - DNA, 264 bp, Glycine max
  Clone ID: 700760783H1
aagggcttggagactcatctgaatcagcccctattgcctttcctcaagacatacaaatggaggaaaggcctgaacctgttaggaacaacccacctcacggtactcggcgctaccaggatcagatggtcccaagtattacttcttcccatgtgagagtggaagaggaagaaacatcttcagaccttcgaaactcggctgcagacagcagagccgaagtgcctataaatgtaaccacacaacaaaatgcaagagagacagtgaatc

SEQ ID NO: 63563 - DNA, 268 bp, Glycine max
  unsure (1)..(268): unsure at all n locations
  Clone ID: 700760784H1
accaaaatgaccaagnccacaattctcctcatcgctcttctcttcatcgcccacacctgctgcgcctccaaatggcaacagcaccagcaagagagctgccgcgagcagctcaaggggatcaacctcaacccctgtgagcacatcatggagaagatccaagctggccgccgcggcgaggacggcagcgacgaagatcacattctcatcaggaccatgccgggaagaatcaactacatcaggaagaaggaaggaaaagaagaagaagaag

SEQ ID NO: 63564 - DNA, 266 bp, Glycine max
  Clone ID: 700760785H1
tgatgaacttgtaattattcacctatgcgactgcttgtggtatgaaagatgtgtgatagcgcaagactcagtctatatttgagcagatcactggaaatgtcctcgaacttattctagtccagaggctatccagatgaccgagttatatgtatattcataggtggttggatactctcagttaactttgcatccatttcagccatattagcttatatatgcatttatgctagtctgaagtggggatggattcagactcactgtagtac

SEQ ID NO: 63565 - DNA, 269 bp, Glycine max
  Clone ID: 700760788H1
aatcagaaaattcttccaccaagttatgggtttccttgtgttgctatcttttctccctcttaggtctctcttctagttccagcatatcaactcatcgttccatattggaccttgacctaaccaagtttaccacacagaaacaggtgtcttcactgttccaactatggaagagtgagcatggacgtgtctaccataaccacgaagaagaggcaaagagacttgagattttcaagactaacttgaactatatcagggacatgaatgcgaac

SEQ ID NO: 63566 - DNA, 265 bp, Glycine max
  Clone ID: 700760791H1
ctccattggtccttaaacactcatcagtcatcaccatggccaagctagttttttccctttgttttctgcttttcagtggctgctgcttcgctttcagttccagagagcagcctcagcaaaacgagtgccagatccaaaaactcaatgccctcaaaccggataaccgtatagagtcagaaggagggctcattgagacatggaaccctaacaacaagccattccagtgtgccggtgttgccctctctcgctgcaccctcaaccgcaa

SEQ ID NO: 63567 - DNA, 262 bp, Glycine max
  Clone ID: 700760792H1
actcgagccgaatcggctcgagcggctcgagcggctcgagaaactacagccatcgaattccctgcaattaacataagcataacccctttccaacctttctcctcttcagatcggatcagatcagatccaccgccatggatttcatgaaggtcttcgatcaaaccgttcgagaaataaagagagaggtgaatctgaaggtgctcaagattccggaaatcgaacagaaggtgctggatgctactgataatgaaccttggggtcc

SEQ ID NO: 63568 - DNA, 264 bp, Glycine max
  Clone ID: 700760793H1
tctctccattgtctttgaacactcatcaccatggccaagcttgttctttccctttgtttcctacttttcagtggctgcttcgctctgagagagcaggcacagcaaaatgagtgccagatccaaaagctgaatgccctcaaaccggataaccgtatagagtcggaaggtgggttcattgagacctcgaatcctaacatcatcccattccagtgtgccggtgttgccctctctcgctgcacccttaaccgcaatgcccttcgtaga

SEQ ID NO: 63569 - DNA, 264 bp, Glycine max
  Clone ID: 700760794H1
taaacactcatcagtcatcaccatggccaagctagttttttccctttgttttctgcttttcagtggctgctgcttcgctttcagttccagagagcagcctcagcaaaacgagtgccagatccaaaaactcaatgccctcaaaccggataaccgtatagagtcagaaggagggctcattgaacaatggaaccctaacaacaagccattccagtgtgccggtgttgccctctctcgctgcaccctcaaccgcaacgcccttcgtag

SEQ ID NO: 63570 - DNA, 104 bp, Glycine max
  Clone ID: 700760796H1
aatcagataaaccgcgaacacaggtagcagcaacctaaaaccggatacaaaagcaatcgtagctagagctcaaaaatcgcgcatatgcggccaacgtcccagag

SEQ ID NO: 63571 - DNA, 177 bp, Glycine max
  Clone ID: 700760802H1
tcgcacgctcgcgaagcggctcgagcactcatcaccatggccaagcttgttctttccctttgtttccttcttttcagtggctgcttcgctctgagagagcaggcacagcaaaatgagtgccagatccaaaagctgaatgccctcaaaccggataaccgtatagagtcggaaggtggg

SEQ ID NO: 63572 - DNA, 150 bp, Glycine max
  Clone ID: 700760804H1
attcttgttgagtggctcttgatagctgataaaggtgacttttctggtaaaaatctctcccagatgtcaaatgttgcgaactcgacaaatattatgtggcatgactgtccaattcagaaacaagatagacagcagctgcttcagcaaaaa

SEQ ID NO: 63573 - DNA, 150 bp, Glycine max
  Clone ID: 700760805H1
gcttgatttcaaatttcacatcactttggcttgatcttttatctatggcacctacagcagcaatgcttttgctctctcacaatggcaaaacacacgcaccctcatcatcatcatcatctgcaacaacttattattctagtttgaaagcct

SEQ ID NO: 63574 - DNA, 147 bp, Glycine max
  Clone ID: 700760807H1
ctcgagccgattcggctcgagaaacttaattattaacacttccttagttcaatatggggaagcccttcactctctctctatcttccctttgcttgctactcttgtcgagtgcatgctttgctattagctccagcaagctcaacgagt

SEQ ID NO: 63575 - DNA, 157 bp, Glycine max
  Clone ID: 700760810H1
agctcgagaagctagctagctagcaagcaagcacagagatggaggcaaagcgaggccatgccctcatgtgcttggcacgtgtttcactcttcctctgcgctctaaccctatccgctgctcacggaagcaccacggttcaagacatcgcgagaaagtt

SEQ ID NO: 63576 - DNA, 103 bp, Glycine max
  Clone ID: 700760811H1
ggacaaaagaaacaaaggcttagatgccctttgttaagtgtagaataacgggtatagtaactatgtacccttgtgtaatgagtcactcaagtacctatgcggg

SEQ ID NO: 63577 - DNA, 148 bp, Glycine max
  Clone ID: 700760812H1
atcggccagcaccaacagcatcggcggcgacagtcactctccgacaacaacacttccgcggcgaaaaatgtctctggtggcgaacgaggatttccagcacattctgcgtgtgctgaacaccaacgtggatgggaagcagaagataatg

SEQ ID NO: 63578 - DNA, 148 bp, Glycine max
  Clone ID: 700760813H1
cagagattgattgacaagtttgcccagttttataccccaggcgttgtaatcatatcagctcttgtagcggtgattccacttgcgctaaaacaacataaccataaactttggcttcagttttcgctggttgttttagtaagtgcatgtc

SEQ ID NO: 63579 - DNA, 148 bp, Glycine max
  Clone ID: 700760814H1
gggcaacgatattctgtgttgcgattatgctagttttgatggtttgattaccaagcaagttatgagcaagatggcagaaatgataaacagtctttgtggtggtgatgaaaaattgatgcgtgaaaggacacacctgctgttggcttgt

SEQ ID NO: 63580 - DNA, 146 bp, Glycine max
  Clone ID: 700760815H1
aatattgtcagcaatgtttattctagggcaactaagaactgcccttgggttggagaactttgggttcgatatatgctttcgttggagcgtggtcatgcttcggagaaacacttgtctgaaatctttgagaagtccctgctgtgtac

SEQ ID NO: 63581 - DNA, 149 bp, Glycine max
  Clone ID: 700760818H1
ccttcttcttcttcttcatctacattagtagttcttgttattcattattcttcatactcacacagcttcttctgggggcaaaaggggtcatttttcagatccgaggttgagctcctctacccatcatgatggagctcggatacctgaat

SEQ ID NO: 63582 - DNA, 150 bp, Glycine max
  Clone ID: 700760819H1
ctcggccgaatcggctcgaggataatattgatctactgttgagcacttgatttgttgggttacacaaggagcaggtaaagcttttccaaacaagattgtttttgatgataagcttgtgttggctaacacacaagaattctttgatggaaa

SEQ ID NO: 63583 - DNA, 147 bp, Glycine max
  Clone ID: 700760820H1
aggacttcgtgggtagacttttccatttctctcctttctttcactctcttcttctcactgatccgcattgccgttcaaagtggtcttatttgaaaaacacttgggcgttggtgcaaatgtttgcttcgttaattttctctggagacg

SEQ ID NO: 63584 - DNA, 142 bp, Glycine max
  Clone ID: 700760821H1
ctctgatgcggtggggagtggggacagggagggtacgtcatttctcaagcattcaacccttccttttctccttgcctctgtcctgacccgttcttttcttctccatgcattcccagaaagttgtagagatggaagacaagac

SEQ ID NO: 63585 - DNA, 146 bp, Glycine max
  Clone ID: 700760823H1
accggatttcattgtgatatcatttgtgtcactggatggactgccactccaatgcaggatgttcaggttacaattgattggtttatttcctctcaggaatgtgttcccaggacctattgtgttttaaatccacaaaatccttttgt

SEQ ID NO: 63586 - DNA, 148 bp, Glycine max
  Clone ID: 700760825H1
aggcgacgtcaccatcacgaacgatggagccacgatccttgaccagatggacgtggacaaccaaatcgcgaactggatggtggagctctcgcggagtcaggactacgaaatcggcgacggaaccaccggcgtcgtcgtcatggccggc

SEQ ID NO: 63587 - DNA, 143 bp, Glycine max
  Clone ID: 700760826H1
agtacaccgtattacagaatttaagatatactatgatgagagcgcggttgccattactgttgctgggagttgttttcctggcatcagtttctgtctcatttggcattgcgtattgggagaagcagaaccccagtcacaacaag

SEQ ID NO: 63588 - DNA, 143 bp, Glycine max
  Clone ID: 700760828H1
gtgctgcacttaatggggttgagggtgtggactatatggaaagaattcctcttgccacatctgagggatttcctcatgtgctttcacgcaaaaatggtgaagaaggcaaaaggagatttgtctctggggatggtgaagagatg

SEQ ID NO: 63589 - DNA, 144 bp, Glycine max
  Clone ID: 700760829H1
caaatcagatgacacacttagagaagatcctgaagtccaagcctgctggaaagaactcgtagaggtgggtcatggagacaagaaaaatgagccatggtggcctaagatgcaaactcgtgaagagctagttgaagcttgcgctat

SEQ ID NO: 63590 - DNA, 146 bp, Glycine max
  Clone ID: 700760830H1
tatcgagcgaatcggctcgaggatttcgtttctcctccgaaaaagcctaatttccccttcagtcttccccatgaccacggcgtagctcatttcccccactccgaaaatgtcgctccagggcagcgccagcggaaacggcaccgtgg

SEQ ID NO: 63591 - DNA, 149 bp, Glycine max
  Clone ID: 700760832H1
caatgaccaagcttacaattctcctcatcgctcttctcttcatcgcccacacctgctgcgcctccaaatggcaacagcaccagcaagagagctgccgcgagcagctcaaggggatcaacctcaacccctgtgagcacatcctggggaga

SEQ ID NO: 63592 - DNA, 80 bp, Glycine max
  Clone ID: 700760833H1
caagaatcaagagagagaggtgttactacgttagtctatgaacagtcaccccgagagactgaaatttccagaccctcaaa

SEQ ID NO: 63593 - DNA, 147 bp, Glycine max
  Clone ID: 700760834H1
ggaagcccttcttcactctctctctttcttccctttgcttgctactcttgtcgagtgcatgctttgctattacctccagcaagttcaacgagtgccaactcaacaacctcaacgcgttggaacccgaccaccgcgttgagtccgaag

SEQ ID NO: 63594 - DNA, 144 bp, Glycine max
  Clone ID: 700760835H1
gttcaatatcctagtacaccgtattaaagaatttaagatatactatgatgagagcgcggttcccattactgttgctggtagttgttttcctggcatcagtttctgtcgcatttagcattgcgtagtgggaaaagcagaacccca

SEQ ID NO: 63595 - DNA, 145 bp, Glycine max
  Clone ID: 700760837H1
ggtggccacagttggtattcctgagaatacaggtatatcattggcctgtgctatgaatagttcttttagggggcgtgccagttctgatatttacaccatctgctctcaagactgtgaattatggaatcctgcttgcacaaaagca

SEQ ID NO: 63596 - DNA, 145 bp, Glycine max
  Clone ID: 700760838H1
taagatttgaaattttgataaaccgcgatcacaggttgccgcaccttaaaaccggaaacaaaagcaatcgttacttgatttcaagaatctctcaatttcttcctacttctttgtgtacgatttcttaagggaaagaaaatcactc

SEQ ID NO: 63597 - DNA, 145 bp, Glycine max
  Clone ID: 700760840H1
aaattcttccaccaagttatggggtaccttgtgttgcttcttttctccctcttaggtctctcttctagttccagcatatcaactcatcgttccatattggaccttgacctaaccaagtttaccacacagaaacaggtggcttcac

SEQ ID NO: 63598 - DNA, 145 bp, Glycine max
  Clone ID: 700760841H1
gttcaatatcctagtataccttaataaataatttaagatactatgatgagagcacggttcccattactgttgctgggacttgttttcctggcttcagtttctgtctcatttggcattgcttactgggaaaaagagaaccccaaac

SEQ ID NO: 63599 - DNA, 143 bp, Glycine max
  Clone ID: 700760842H1
agctcatcagtgagtttgtgagttcctgagtgtgtgcaagtgtgctttctgtgtgtctcaagcttactagatggaggatcaaaatgcatcatctagtggattgggcaaggtgttccgcaaggttaagccctaccttgctatga

SEQ ID NO: 63600 - DNA, 145 bp, Glycine max
  Clone ID: 700760846H1
attccttcacttgcagcactgttgcatcatcatcttcattgcaaaaccctaaacttcaccttcaaccatgaccacacaagtaccaccacacagtgtccaagtccacacaacaacacaccgctacgaagctggcgtcgtccccccc

SEQ ID NO: 63601 - DNA, 145 bp, Glycine max
  Clone ID: 700760849H1
attttgataaaccgcgatcacaggttgccgcaccttaaaaccggaaacaaaagcaatcgttacttgatttcaagaatctctcaatttcttcctacttctttgtgtacgatttcttaagggaaagaaaatcactctctgtgctggc

SEQ ID NO: 63602 - DNA, 145 bp, Glycine max
  Clone ID: 700760850H1
ctcgagccgctcgagccgtccattggtccttaaacactcatcagtcatcaccatggccaagctagttttcaccctttgttttctgcttttcagtggctgctgcttcgctttcagttccagagagcagcctcagcaaaacgagtgc

SEQ ID NO: 63603 - DNA, 145 bp, Glycine max
  Clone ID: 700760851H1
cgccaacgccaacgccaacgccaattccattcagatcacagtctcttcaattcctgctgcagcatactgtgtgcaacaaagccctaaaatggaggggactgtcttcactcctgcactgcaagaaattgagcatgtaaagtctgat

SEQ ID NO: 63604 - DNA, 143 bp, Glycine max
  Clone ID: 700760852H1
tgggaccgtgaaccggggtagtgaagtaatagcggctggaatgacagttaatgattggaccgcattttgtggttccgacaccaccgcaacggagctatctgtgattgagagtgttttcaagctgagagaagcacagcctagtg

SEQ ID NO: 63605 - DNA, 143 bp, Glycine max
  Clone ID: 700760854H1
gtggaaccgcagcctaaggtggtggatgtacttagagatagtgagcaaaaaaaggcaccgtgatggctatgaagatggagacacaactttgaggaagctgtcttcagctgcaaatttcatttggtcaaattctcctctggaga

SEQ ID NO: 63606 - DNA, 141 bp, Glycine max
  Clone ID: 700760855H1
cttaattattaacacttccttagttcaatatggggaagcccttcactctctctctttcttccctttgcttgctactcttgtcgagtgcatgctttgctattagctccagcaagctcaacgagtgccaactcaacaacctca

SEQ ID NO: 63607 - DNA, 143 bp, Glycine max
  Clone ID: 700760862H1
gtgacctcatataggtatgagggtgatgagatcaatgtaaaattttcacaaactgaagctaatgttcttcatgaatctgtcaaggagaagaaaggcaacagtgaagaagtcatcaggatccttactacaagaagcaaaactca

SEQ ID NO: 63608 - DNA, 143 bp, Glycine max
  Clone ID: 700760863H1
ctctcgtctgtctttttttctctttctctctctagattttctttcttcttcttctttatgagccctaactcggggccccatagtcgtcgctgctagctagccatgtcgctgaggaaggtcttccgctcccgcaagttctccaa

SEQ ID NO: 63609 - DNA, 145 bp, Glycine max
  Clone ID: 700760864H1
gttctgctgagtatgaggagctgaggaagaatccccagaaggcttacttgaagactattacaccaaagtttcagacccttattgacctttctgttatagaaatcttgtcaaggcatgcatctgatgaggtgtaccttggggagag

SEQ ID NO: 63610 - DNA, 143 bp, Glycine max
  Clone ID: 700760865H1
cacacacaactactacaagtacttccttacaatcaaaaccaacaacaactatggcaagttatcaaaagcactacgatgatcagggtcgcaaggttgacgagtatggcaacgttgagaagcaaaccgacgaatacggcaaccct

SEQ ID NO: 63611 - DNA, 140 bp, Glycine max
  Clone ID: 700760866H1
caacagtgagaacaccattgaattttgattctagcaagcagagcttttgtcagttttctattgaccttctcggtggaggaatcttagtggacacaactggagattggatcacacttatacaaaattctccaattagtaac

SEQ ID NO: 63612 - DNA, 139 bp, Glycine max
  Clone ID: 700760867H1
ctcgagccgattcggctcgagcaacaatgcctcctttgactttgtgcctggtgctgccttttctcgtgttgctagcggcggcaacaacgtctccaacacgcgccacgacggtcgcctcgtcgttccacggtcaacgaga

SEQ ID NO: 63613 - DNA, 141 bp, Glycine max
  Clone ID: 700760870H1
gtagtagcaattatgtctaaatgcaaagccagcatgacgatgggaaacactgatgctcaaattttgatggtttcagggcgcagattcatagctcatggacattttttcaaaaatctgactcagaaagtgcgagtccaaatt

SEQ ID NO: 63614 - DNA, 138 bp, Glycine max
  Clone ID: 700760871H1
catatttgtatgctatggtgcatgatagttcagtgtctacaataccaggtgattttgtcattggtgttaagttgacaaccataaacaatatgtgtgcatatgggctcaatcctggtatttcaggttctcgtcttttgg

SEQ ID NO: 63615 - DNA, 140 bp, Glycine max
  Clone ID: 700760872H1
aattttctgattttagcaaattaaaatagtagtgttattggtaggttttggcaaagatgttttcagttccaggggtgtcgggaatactgaacagaggaggagggcataagataaaagggacagtggtgttgatgaggaag

SEQ ID NO: 63616 - DNA, 139 bp, Glycine max
  Clone ID: 700760874H1
ctcgagccgaatcggctcgagccacaagctggtgcagtttggagagcttcaggaaaaagttgtattgaaattttcacaagaggaatttcttacagcttggtcaactcaggtgcgtcctgcaacaactctgttggctgat

SEQ ID NO: 63617 - DNA, 138 bp, Glycine max
  unsure (1)..(138): unsure at all n locations
  Clone ID: 700760878H1
gagttttgctaccacagtactgtaggtaaaganacagagaccaccttgtttcggaattctgttgcaaaattaagaagatagaaacatactccattaatgggtggtgttagatgggctcaagagtcatcttcatccatg

SEQ ID NO: 63618 - DNA, 141 bp, Glycine max
  Clone ID: 700760879H1
taacttttattcccttttcattaatctctgcaactttttttgggttgcgcttcaaagaaaaatcggttttttaattttcctcgccgtgatttttttgccgaaatgtggaaaattgacgtgttgatttgcacgtgaattgcc

SEQ ID NO: 63619 - DNA, 143 bp, Glycine max
  Clone ID: 700760881H1
tctcgagccgctcgagcggctcgagcggctcgagaaaaaaaaagccacaatcaagtgtcatttatctcccttctcattctatttattcaagggtgggagtagtggttttttgtgtgttttctttcctttgtgcaacaacaaca

SEQ ID NO: 63620 - DNA, 141 bp, Glycine max
  Clone ID: 700760882H1
acttacagaagcctcttttaatttccaccccctctagattttctctctaactggttttccttagatctctcacaatgacctttaatcttatgcttttgttctgtttggttgcagtgatcaacaatgttgttgttccaacta

SEQ ID NO: 63621 - DNA, 139 bp, Glycine max
  Clone ID: 700760884H1
gccaatttggtctctactatggctgagcaacatgagcttgttcgcgatgagttcatcagggccaatgtgactaggccccttgtgtccttgttgtccatggatatgggtactgtccttgctgaccccatggccggtcgcg

SEQ ID NO: 63622 - DNA, 133 bp, Glycine max
  Clone ID: 700760885H1
ggttaaagttaatgtagcatgtgctgctgttggcttgacatcaagttacactccaactccattgttggaatctggtttgcaaaaagacagagggttaattgtggagtattttggaaggatgtcttacgttgct

SEQ ID NO: 63623 - DNA, 139 bp, Glycine max
  Clone ID: 700760886H1
taaaattcttccatcaagttatgggtctccttgtgttgcgtcttctctccctcttaggtctctcttctaggtctagcatttcaactcatcgtgccatattggaccttgaccttaccaagtttaccacacagatacaggt

SEQ ID NO: 63624 - DNA, 139 bp, Glycine max
  Clone ID: 700760887H1
agcaaaccaatggctacttcaaagttgaaaacccagaatgtggttgtatctctctccctaaccttaaccttggtactggtgctactgaccagcaaggcaaactcagcggaaactgtttctttcagctggaacaagttcg

SEQ ID NO: 63625 - DNA, 151 bp, Glycine max
  unsure (1)..(151): unsure at all n locations
  Clone ID: 700760889H1
gaattggggtngagtggactctcagggtcgctaagaacgtggagaatgtcactgaatatagcaaggaagggtgagagtcgaataccaccagcgactaatataagattttgattctgtactgtgttagggaggggaaacctgtcaaatgaga

SEQ ID NO: 63626 - DNA, 137 bp, Glycine max
  Clone ID: 700760891H1
cttactggacctataacactggcgatgaaccagttgttgccatcagtcttcttgacacctccaacttcaacaatcagcttgatcaaaaccccagagtattttaccttgctgggaacccagatatagagcacccagag

SEQ ID NO: 63627 - DNA, 138 bp, Glycine max
  Clone ID: 700760893H1
taagatttgaaattttgataaaccgcgatcacaggttgccgcaccttataacctgaaacaaaagcaatcgttacttgatttcaagaatctctcaatttcttcctacttctttgtgtacgatttcttaagggaaagaaa

SEQ ID NO: 63628 - DNA, 139 bp, Glycine max
  Clone ID: 700760894H1
ctcgagccgattcggctcgagtcaaaagtgaccgcattttctttgccaaccagacatatcttcgaagtgagacaccagcgccactagtcaaatatagggaagaagagttgcataatttaagaggagatggaactggaga

SEQ ID NO: 63629 - DNA, 140 bp, Glycine max
  Clone ID: 700760895H1
cggctcgagcttgctctatactacacagtacacacactagaagaataatggcttccatcctccactactttttagccctctctctttcttgctcttttcttttcttcttatccgactcagtcacccctacaaaaccaata

SEQ ID NO: 63630 - DNA, 140 bp, Glycine max
  Clone ID: 700760896H1
caaagttgaaaacccagaatgtggttgtatctctctccctaaccttaaccttggtactggtgctactgaccagcaaggcaaactcagcggaaactgtttctttcagctggaacaagttcgtgccgaagcaaccaaacatg

SEQ ID NO: 63631 - DNA, 260 bp, Glycine max
  Clone ID: 700760901H1
caaaaatgaagagcaccatcttctttgctctctttctcttttgtgccttcaccacctcatacctaccttcagccatcgctgatttcgtgctcgataatgaaggtaaccctcttgaaaatggtggcacatattatatcttgtcagacataacagcatttggtggaataagagcagccccaacgggaaatgaaagatgccctctcactgtggtgcaatctcgcaatgagctcgacaaagggattggaacaatcatctcgtcc

SEQ ID NO: 63632 - DNA, 256 bp, Glycine max
  Clone ID: 700760902H1
cgaactcgagcgacaaccaatatggtcgcattcgcgtcctccagaggttcaaccaacgctccccacaacttcagaatctccgagactaccgcattttggagttcaactccaaacccaacaccctccttctccccaaccatgctgacgctgattacctcatccttatccttaacgggactgccattctttccttggtgaacaacgacgacagagactcctacagacttcaatctggtgatgccctgagagtccctca

SEQ ID NO: 63633 - DNA, 252 bp, Glycine max; identical to SEQ ID NO: 55883
  Clone ID: 700760903H1

SEQ ID NO: 63634 - DNA, 251 bp, Glycine max
  Clone ID: 700760904H1
cacagtacacacactagaagaataatggcttccatcctccactactttttagccctctctctttcttgctcttttcttttcttcttatccgactcagtcacccctacaaaaccaataaaccttgttgttctacccgttcaaaatgatggttccacagggctccattgggccaacctccaaaaaagaacccctctaatgcaagtaccagtcctggtggacctcaatggaaatcacttgtgggttaactgtga

SEQ ID NO: 63635 - DNA, 251 bp, Glycine max
  Clone ID: 700760906H1
ctctcttccatctcctcggttaaactgaaccaattcaatattcccagctagttcttcattgaagaagctatggactttcttaactttatgcttaacttgttggtccctccaggcagtatgctcaccttggctttctcatggccagcactttgcttcctcaatgtttgtgagtggctttataatagtatatatggtgaggatctcgataataatgtcgtcataatcactggggcatcttcaggcataggaga

SEQ ID NO: 63636 - DNA, 181 bp, Glycine max
  Clone ID: 700760907H1
tgaaattttgataaaccgcgatcacaggttgccgcaccttaaaaccggaaacaaaagcaatcgttacttgatttcaagaatctctcaatttcttcctacttctttgtgtacgatttcttaagggaaagaaaatcactctctgtgctggccacagacttcgcgaatcattttcttttccaca

SEQ ID NO: 63637 - DNA, 245 bp, Glycine max
  Clone ID: 700760909H1
cgatttagaaaatttctaccgcattacattaggtgccatctgtataccttgttgatctacattctcccatcttttctcactgctgaaattaaatataagcggaatcacagtaatattcagatttccggcttattttacgaccgcagatacaaattctggactacacacgatttccaatcttgctttgacagaagaggaaaagatggaagtgattagaaatagaggcattcctgctgatgttcttg

SEQ ID NO: 63638 - DNA, 250 bp, Glycine max
  Clone ID: 700760910H1
taaaattcttccaccaagttatgggtttccttgtgttgcttcttttctccctcttaggtctctcttctagttccagcatatcaactcatcgttccatattggaccttgacctaaccaagtttaccacacagaaacaggtgtcttcactgttccaactatggaagagtgagcatggacgtgtctaccataaccacgaagaagaggcaaagagacttgagattttcaagaataacttgaactatatcaggga

SEQ ID NO: 63639 - DNA, 105 bp, Glycine max
  unsure (1)..(105): unsure at all n locations
  Clone ID: 700760911H1
gggaaaaagttgtattgaaatgttcctgaatcgctccaaactggantaggtttcggggaaaagcctcaaaattgatggtgtcaacggccaaatttgaggcttttc

SEQ ID NO: 63640 - DNA, 252 bp, Glycine max
  Clone ID: 700760912H1
attaaggagaaagaagaagctgttcgcaaccaagactttgaaaaggctggagagctacgtgatagagagatggatcttaaggcacagatctcaacacttgtagagaaaggcaaggagatgagcaaggcagagactgaggcaggggatgaaggtcctattgtgactgaagctgacatacagcatattgtctcatcctggactggtattcctgttgagaaagtctcaacagatgaatctgatcgcctcctgaag

SEQ ID NO: 63641 - DNA, 90 bp, Glycine max
  Clone ID: 700760913H1
ttgaaattttgagaaaccgcgatcacaggttgccgcaccttaaaaccggaaacaaaagcaatcgttacttgatttcaagaatctctcaat

SEQ ID NO: 63642 - DNA, 256 bp, Glycine max
  Clone ID: 700760914H1
ctacactccactccatctccatggaggaacacaaaaaagaagggttttttttgcccacaccagttgcaaaactaatatcctttcaaacggatttgatctataatggcctggtttctctcttttcccctatccactctcttttctccgtggcttctaagtcctaccaccgtgctgaggagaccaaagacagtgttgaatcagcagtgcaacgtgctctttctcatcaatcatcattggcagcgcactcttgctgagg

SEQ ID NO: 63643 - DNA, 243 bp, Glycine max
  Clone ID: 700760915H1
attcggggatgcacctaacaacatgcgacagtttcaaaaccaagatattttccacgatttggccttcaccccattaaccatcaccctgcagggagagtacaacgtgagagtcaactcaataagaatcaaccagcacagtgtgttcccactgaacaagatatcatccaccatcgtagggtcgacctctggaggaaccatgattagcacctcaactcctcacatggttctccagcaatccgtgta

SEQ ID NO: 63644 - DNA, 260 bp, Glycine max
  Clone ID: 700760916H1
cgacaaacaaacccatttccctacacctttcttcttcttcttcttcttccttcgcaactctctctctcatcttgcgtgtttaagatcgtcactcaaacggcgccgtctcctctccgattcctcagcacgtttatcaggtttcttggtgctgtttgagtgtttgtgcattgtacattattatctctacatgttctggacttattagcatgatatgccacaattatggagtgttttgttagccaactttcatataggaagaa

SEQ ID NO: 63645 - DNA, 248 bp, Glycine max
  Clone ID: 700760918H1
agacaacaggctcacttagaaaacaatctttacttgcagagatttggacatcttggttgtttattatacaatagcaactcaatttagaaaatttctaccgcattacattaggtggcatctgtataccttgttgatctacattctcccatcttttctcactgctgaaattaaatataagcggaatctgagtaatattcatatttccggcttattctacgacggcagatacaaattctggactaaacacg

SEQ ID NO: 63646 - DNA, 250 bp, Glycine max
  Clone ID: 700760920H1
cttattaacactttccttagttcaatatggggaagcccttcttcactctctctctttcttccctttgcttgctactcttgtcgagtgcatgctttgctattacctccagcaagttcaacgagcgccaactcaacaacctcaacgcgttggaacccgaccaccgcgttgagtccgaaggtggtcttattgaaacatggaactctcaacaccctgagctgcaatgcgccggtgtcactgtttccaaacgcac

SEQ ID NO: 63647 - DNA, 248 bp, Glycine max
  Clone ID: 700760921H1
taggaatataagaactaagatggattggatccgagcgtaccgcggaggccagagaagcagggactggtgcgacccttcatcaccattcactgatttgtgggaccctcgtcgtgtcggtgacgctgatgatatcacctcctctctcgcccatgctcacgttgactggcgtgagactgataaagctcatatcttccgtactgatcttccaggggtgaagaaagaggatctgaaggtgcaggtggaggaga

SEQ ID NO: 63648 - DNA, 225 bp, Glycine max
  unsure (1)..(225): unsure at all n locations
  Clone ID: 700760922H1
gtacaccgtattaaagaatttaagatatactatgatgagagcgcggttcccattgctgttgctgggagtcgtgttcctagcatcagtttctgtctcatttggcattgcgtattgggcaaagcagaaccccagtcagaacaagtgtgtccgaagttgtacntagcgagaaagattcctacaggaagcaagcatggcacgctcgtctgcaactcccttaaggtggag

SEQ ID NO: 63649 - DNA, 247 bp, Glycine max
  Clone ID: 700760923H1
cgatatcctagtataccttaatcagtcattcaagagactatgctgagagcacggttcccattactgttgctgggacttgtcttcctggcttcagtttctgtctcatttggcattgcttactgggaacgagagaaccccaaacacaacacgtgtctccagagttgcaatagcgagagagaatcgtacaggaagcaagcatgccatgctcgttgggacctccttaaggtggagagagtcgaatgtgaag

SEQ ID NO: 63650 - DNA, 247 bp, Glycine max
  Clone ID: 700760924H1
gaagagcacgagcagagagaggaacaggaatggcctcgcaaggaggaaaaacgcggagaaaagggaagtgaagaggaagatgaggatgaggatgaggaacaagatgaacgtcaattcccattcccacgcccacctcatcagaaggaagagcgaaagccagaggaagatgaggatgaggagcagcagcgagagagcgaagaaagtgaagattctgagttacgaagacataagaataagaaccttttct

SEQ ID NO: 63651 - DNA, 249 bp, Glycine max
  Clone ID: 700760926H1
actagttcaatatcctagtataccttaataaataatttaagatactatgatgagagcacggttcccattactgttgctgggacttgttttcctggcttcagtttctgtctcatttggcattgcttactgggaaaaagagaaccccaaacacaacaagtgtctccagagttgcaatagcgagagagactcgtacaggaaccaagcatgccacgctcgttgcaacctccttaaggtggagaaagaagaatg

SEQ ID NO: 63652 - DNA, 248 bp, Glycine max
  Clone ID: 700760927H1
aagagttctcccttccatgaacttcctggtgttgtggagaagtacctcaacaaggagctggagctggacaaatttatcactcactctgtcccattctcagagatcaacactgcatttgatcttatgctgaaaggggagggaataaggtgcctcatctgcatggaagagtaaatcaatgatgttctctgctgaacagtgtttgcgtgtaatgtgaaaagagaattgaataaatttggcatgtaattcgg

SEQ ID NO: 63653 - DNA, 255 bp, Glycine max
  Clone ID: 700760930H1
aacaataattccttcacttgcagaacttagttctctgttgcatcatcatcatcttcattagtgttagccctaaacttcaccttcaaccatgaccacagtgccaccacacagtgtccaagtgcacacaacaacacaccgctacgaagccggcgtcgtcccgccggctcgttttgaggcgccgctttacgaagccggcatcaaggcgccctcttccatttaccattccgagagaggtccgacgacctctcaggttct

SEQ ID NO: 63654 - DNA, 256 bp, Glycine max
  Clone ID: 700760931H1
acgaggacatagctgagaaacttcagtctccagacgacgaaaggaagcagatcgtgacagtggaaggaggtctcagcgttatcagccccaagtggcttggtcgactaggacgaggtttatcttcatcttcgtcctcgtcctcgtcttgttcacgctttccatggcttggtcggcgaggagggtgagagggaatctgttcatcttcatcatcttcgtcttcatcttcatcttcatcttgttgttcttgccctcgagc

SEQ ID NO: 63655 - DNA, 201 bp, Glycine max
  Clone ID: 700760933H1
gaacagattcgggcactgagcaaacgtgccaaatctagttcaaggaaaaccatttcttctgaagataaaccttttaacttgagaagccgcgaccccatctactccaacaagcttggcaagttctttgagatcaccccagagaaaaacccccagcttcgggacttggatatcttcctcagtattgtggatatgcacgaggga

SEQ ID NO: 63656 - DNA, 143 bp, Glycine max
  Clone ID: 700760934H1
ctccattggtccttaaacactcatcagtcatcaccatggccaagctagttttttccctttgtgtgctgcttttcagtggctgctgcttcgctttcagttccagagcgcagcctcagcaaaacgagtgccagatccaaaaactc

SEQ ID NO: 63657 - DNA, 248 bp, Glycine max
  Clone ID: 700760935H1
ggcacagattgacgagttccattcgatgcagaggatgatgaatgctcctgatgtaaatgttaatattgatctactgttgagcattgatttgttgggattacaaggagcaggtatagcttttccaaacaagattgttttagatgataaacttgtgctggctaacacacaagacttctttgctggaaattttccagtggatgtcttggttaccaattcttgtgaattgtctttatcgtgtaagtcaatta

SEQ ID NO: 63658 - DNA, 243 bp, Glycine max
  Clone ID: 700760939H1
gtggtccgtcaaaagtttttaaattttgtgaggttcattatgaagaaaagggacaaacttagttgtcaagttggaatcaacccatactccatggaatggactggtttggccaatagattactgagtaagggcaatgatattctgtgttgcgattatgctagttttgatggtttgattaccaagcaattgctgagcaagatggcagatctgataaacagtctttgtggtggtgatgaaaaattg

SEQ ID NO: 63659 - DNA, 245 bp, Glycine max
  Clone ID: 700760940H1
cagaattgcaatagcgagagagactcgtacaggaaccaagcatgccacgctcgttgcaacctccttaaggtggagaaacgaagaatgtgaagaaggtcaaattccacgaccacgaccacgaccacaacacccggagagggcacctcagcaacccggtgagaacgaagtcgacgaagatgagcaaccacgtccaatcccattcccacgcccacaatctcgtccagaagatgagcacgagcagagcc

SEQ ID NO: 63660 - DNA, 143 bp, Glycine max
  Clone ID: 700760941H1
tgtgaccataaacttgccttgttctcaggagctacccacaaaactttaagcagatgtctaatgttttgtgagtagctcctgaggacaaggcgagtttatggtacaacttcattatgtttcgtgtaataatctggaaatgcaag

SEQ ID NO: 63661 - DNA, 246 bp, Glycine max
  Clone ID: 700760942H1
atttctctctccctctcccacgcgccaccgccagccagaggattttccatttctgccctccgattgcatgccgctcatccatggatcagtcttctggcctgaatctggaagatctgaaatgggaccattccttcgtcagagaattgcccggcgatccccgccgcgactcctttccccgtgaggttctgcatgcttgttacacccaagtctctccttctgttcaagtacacaatccccaacttgtag

SEQ ID NO: 63662 - DNA, 244 bp, Glycine max
  Clone ID: 700760943H1
ggcacagattgaagagttccattcgatgcagaggatgatgaatgctcctgattcaaatgataatattgatctactgttgagcattgatttgttgggtttacaaggagcaggtaaagcttttccaaacaagattgtttttgatgataaacttgtgctggctaacacacaagaattctttgctggaaattttccagtggattcttggttaccaatttttgtgaattgtctttatcctgtaagtcaa

SEQ ID NO: 63663 - DNA, 247 bp, Glycine max
  Clone ID: 700760945H1
caagtacttccttacaatcaaaaccaccaacaactatggcaagttatcaaaagcactacgatgatcagggtcgcaaggttgacgagtatggcaacgttgagaagcaaaccgacgaatacggcaaccctgttcatgctgctagtgtcacctatgtagccaccagaactgctgctggtggttacagtgatgacattaataagcaacatgataccaccaatgcctacggcgtagacactggtagacagca

SEQ ID NO: 63664 - DNA, 250 bp, Glycine max
  unsure (1)..(250): unsure at all n locations
  Clone ID: 700760946H1
ccccttttccctcattgcatggccaatctattgggttctccaaggttgcattcttactggcgtgtgggtgattgctcacgagtgtggtcaccatgccttcagcaagtacccatgggttgatgatgttatgggtttgaccgttcactcagcacttttagtcccttatttctcatggaaaataagccatcgccgccaccactccaacacgggttcccttgaccgtgatgaagtgtnntgtcccaaaaccaaa

SEQ ID NO: 63665 - DNA, 251 bp, Glycine max
  Clone ID: 700760947H1
aataaacatatttgattgtggggaccagaattctatgttcatttgctgggttaaccatgatcttggtaacaaaacattttgtggtgctaatccgatgaatcaagaatagtaaatgtagatagaggttagaagtttctatagggaggcttgtgcatgtctgagaatttcattattcttttaacttttaattcacattttgtaacatgtgttttttgtaaaagcataaacagatccatctgtatatattagtt

SEQ ID NO: 63666 - DNA, 241 bp, Glycine max
  Clone ID: 700760949H1
cgcatgaccctcttgttgagtatgctctgcctatttgaaaatttccacacctcttttaattgtcgtaatgatgtgtgaagtgtgtgttattttaaaaaaacaaaaaaaaaaaaaaaaaaaaaaaaaaaacaaaaaaaaaaaacaaaaaaaaaaaaaaaacgcacaccccccgtaaaggcccccgaccccccggaaaaatttccccggagagtttcacaaggggaaccacttcccccctagt

SEQ ID NO: 63667 - DNA, 245 bp, Glycine max
  Clone ID: 700760952H1
gttcaatatcctagtataccttactaaataatttaagatactatgatgagagcactgttcccattactgttgcggggacttgttgtcctggcttcagtttctgtctcatttggcattcgcttactgggaaaaagagaaccctaaacactagaagtgtgttgattgttggaatagcgagagagactcgtacaggaaccaaacatgccacgctcgttgcaacctccttaatgtggagaaagaagaat

SEQ ID NO: 63668 - DNA, 242 bp, Glycine max
  Clone ID: 700760954H1
tgaggccaggcaagccccactcaaccaccacacctctcctcgttcacgctacccctttctgctcttcttctacctttcaagttttaaaagtataaagatggcagagacattcctatttacctcagagtcggtgaacgagggacaccctgacacgctctgcgaccaaatctccgatgctgtcctcgacgcttgcctcgagcaggacccagacagcaaagttgcctgcgaaacatgcaccaaaa

SEQ ID NO: 63669 - DNA, 244 bp, Glycine max
  Clone ID: 700760955H1
aacaagcctcaggtaagccaaaaccatggttaagcataacaatgttatcccaaacggacacttccgtaagcactggcagaactatgtgaagacttggttcaatcagccagcacggaagacaaggagacgattggctcgtcagaagaaagctgtgaagatattccccagacctacggctggacctctcaggcccattgtacatggtcaaactttgaaatacaacatgaaagtgagaggtggaagg

SEQ ID NO: 63670 - DNA, 245 bp, Glycine max
  Clone ID: 700760956H1
ctcactcatcaatctcgtttgttctcactaactattacttcatcatgtcgtcgagcacagttggtcaagtcatcaaatgcaaagctgcggtttcatgggaggcagggaagccacttgtgattgaagaagtagaggtggcaccaccacaagctggtgaagtgcgtttgaagatcctctacacctctctttgccacactgatgtttacttctgggaagccaagggccaaactccattgtttcctcgt

SEQ ID NO: 63671 - DNA, 242 bp, Glycine max
  Clone ID: 700760957H1
aaacgaaggtacaatgtgaggctttggaaagtgttcacggaatgtttcaactgcttgccagtggcagctctaattgatgaaaagatactttgtatgcatggtggactctctcctgagttacacaatctgaatcagataaagagtttgccgcgtcctattgaagtgcctgaaactggtctactatgtgacctcctttggtctgatcctagtagtgacattcggggttggggagagaatgaccg

SEQ ID NO: 63672 - DNA, 243 bp, Glycine max
  Clone ID: 700760958H1
taaacactcatcagtcatcaccatggcgaagctagtttttttcctttgttgttctgcttctcaatggctgctgcttcgctttcagttccagagatcagcctcagtaaaacgagtgccagatccaaaaactcaatgccctcaaaccggataaccgtatagagtcagaaggatggctcattgagacatggaagcctaacaacaagccagggagtgtgccggtgtagccctctctcgctggcacct

SEQ ID NO: 63673 - DNA, 117 bp, Glycine max
  Clone ID: 700760959H1
atatcctactacaccgtattaaagaacttaagatagactatcatgagaacgcggtccccattactgttacgaggaagtgattacctggcatcagttgctctcgcatccagcattccg

SEQ ID NO: 63674 - DNA, 186 bp, Glycine max
  Clone ID: 700760960H1
gggcacttcccgaaatgttaagagaatgcctctttctatagggggaggagctggtgcaaagaatgctattctcatgaatatgccaaatgctgttctttcaatgtggagatattttgttggagatctcgtctttgaagtttctaagatgacttctccctacattaaatgtacagtcaccttcttcat

SEQ ID NO: 63675 - DNA, 191 bp, Glycine max
  Clone ID: 700760963H1
tgataatattgatctactgttgagcattgatttgttgggtttaccaggagcaggtaaagcttttccaaacaagattgtttttgatgataaacttgtgctggctaacacacaagaattctttgctggaaattttccagtggattcttggttaccaatttttgtgaattgtctttatcctgtaagtcaattac

SEQ ID NO: 63676 - DNA, 234 bp, Glycine max
  Clone ID: 700760964H1
ggctcgaggtttagactatatggaaagaactcctcttgccacatcagagggttttcctcatgtgcattcacgcaaaaattgtgacaaaggcaaaaggagatttgtttctggggatggtgaagagatgacattgattccggaaccatgtttgaagaggcttacaacaagctaatagttgaacttgagaaaagtgttcctacattggttggcattgaatgtcccaaggatgagaaa

SEQ ID NO: 63677 - DNA, 246 bp, Glycine max
  Clone ID: 700760965H1
agagaatggctcccaagggtttaacctttctggctgtgttaatatgcgtttcagcactgtcactgagtccttctgttgcgggggaagggcaaaataatggccttgttatgaacttctacaaggaatcatgccctcaggctgaagacatcatcacagaacaagtcaagcttctctacaagcgccacaagaacactgctttctcctggctcaggaacatcttccatgactgtgctgttcagagttgtg

SEQ ID NO: 63678 - DNA, 241 bp, Glycine max
  Clone ID: 700760966H1
caaaggtggtggtggtggtggtggttctcagggaaggcactggtgatggtgattactattatgatgatgcatgtttttccattgttggtgccattttgcgtgtaaaaaagccttgtgggaggggtgcggatataagtcaagtccctaaccctgttcatcatccctgtggaatttttctccataaaccttttttttttccttgtggtttttatttaaattaataaataagcgaagaaaagaa

SEQ ID NO: 63679 - DNA, 242 bp, Glycine max
  Clone ID: 700760967H1
ttggtccttaaacactcatcagtcatcaccatggccaagctagttttttccctttgttttctgcttttcagtggctgctgcttcgctttcagttccagagagcagcctcagcaaaacgagtgccagatccaaaaactcaatgccctcaaaccggataaccgtatagagtcagaaggagggctcattgagacatggaaccctaacaacaagccattccagtgtgccggtgttgccctctctcg

SEQ ID NO: 63680 - DNA, 242 bp, Glycine max
  Clone ID: 700760972H1
attggtccttaaacactcatcagtcatcaccatggccaagctagttttttccctttgttttctgcttttcagtggctgctgcttcgctttcagttccagagagcagcctcagcaaaacgagtgccagatccaaaaactcaatgccctcaaaccggataaccgtatagagtcagacggagggctcattgagacatggaaccctaacaacaagccattccagtgtgccggtgttgccctctctc

SEQ ID NO: 63681 - DNA, 183 bp, Glycine max
  Clone ID: 700760973H1
cactgtcttatatgtgaagaagaagcctgaagctagtgctaaggatgtagcaaaggttactcttggagttgcgaatcctgaagagactcaccctaagagatagataatatattattagctttatcatatagtagtatacaacttttgagttcaagggcagggtcaatgactactctttgttct

SEQ ID NO: 63682 - DNA, 186 bp, Glycine max
  Clone ID: 700760974H1
caggaatgtgttcccaggacctattgtgttttaaatccacaaaatccttttgttttaaataggtggatgggaaaattgactttcccccagggcacttcccgaagtgttaagagaatgcctctttctatagggggaggagctggtgcaaagaatgctattctcatgaatatgccaaatgctgttctt

SEQ ID NO: 63683 - DNA, 216 bp, Glycine max
  Clone ID: 700760975H1
ttcggtcagtcgcgctcgagccgctagaatggaatttcgatgcccagtcatctcttttaccagtctcttctctcttgctcttgcaggagagagccatgtccatgcatcgctacctgcggaagattattgggaagctgtttggccaaacactcccattcccactgcactgcgagagcttctaaagcctctccctgcaggtgttgaaatcgatgaact

SEQ ID NO: 63684 - DNA, 243 bp, Glycine max
  Clone ID: 700760977H1
gtactatcttctttgctctctttctagtttgtgccttcaccatctcatacctgccttcagccaccgctcagttcgtgctcgacactgatgatgatcctcttcaaaacggtggcacatactatatgttgccagttatgagaggaaagggcggtggaatagaagtagattcaactggaaaagaaatatgccctctcactgttgtgcaatcacccaatgagctcgataaggggattcgactagtct

SEQ ID NO: 63685 - DNA, 244 bp, Glycine max
  Clone ID: 700760978H1
cggctcgaggatgcaaactcgtgaagagctagttgaagcttgcgctatcatcatatggactgcttcagcacttcatgcagctgttaattttggacagtatccctatggaggtttaatcttaaaccgtccaactcttagtaggcgattcatgcctgagaaaggttctgctgagtatgaggagctgaggaagaatccccagaaggcttacttgaagactattacaccaaagtttcagaccttattg

SEQ ID NO: 63686 - DNA, 247 bp, Glycine max
  Clone ID: 700760979H1
ctccattgtctttgaacactcatcaccatggccaagcttgttctttccctttgtttccttcttttcagtggctgcttcgctctgagagagcaggcacagcaaaatgagtgccagatccaaaagctgaatgccctcaaaccggataaccgtatagagtcggaaggtgggttcattgagacctggaaccctaacaacaagccattccagtgtgccggtgttgccctctctcgctgcacccttaaccgca

SEQ ID NO: 63687 - DNA, 251 bp, Glycine max
  Clone ID: 700760980H1
aattattaacacttccttagttcaatatggggaagccccgcactctctctctttcttccctttgcttgctactcttgtcgagtgcatgctttgccattagctccagcaagctcaacgagtgccaactcacaagcttcaacgcgttgcgaacccgaacaaccgcgttgagtccgaagtggtttgattcaaacatggaactctcaacaccctgagctgaaatgcgccggtgtcactgtttccaaactcaccct

SEQ ID NO: 63688 - DNA, 241 bp, Glycine max
  Clone ID: 700760981H1
tgccaaatgctgttctttcaatgtggagatattttgttggagatctcgtctttgaagtttctaagatgacttctccctacattaaatgtacagtctctttcttcatagcatttggaaatttggctgatgacaccatcaattttgaggcttttccccacaagctggtgcagtttggagagattcaggaaaaagttgtattgaaattttcacaagaggaatttcttacagcttggtcaactca

SEQ ID NO: 63689 - DNA, 240 bp, Glycine max
  unsure (1)..(240): unsure at all n locations
  Clone ID: 700760982H1
cttacaccaagttatgggtatccttgtgttgcttcttatctccactcttagtctnctctctagttccagcatatcaactcatcgtgccatattggaccttgacctaaccaagtttaccacacagaaacaggtgtcttcactgtcccaactatggacagagtgagcatagaccaaatancataaccacgaagaagaggcaaagagacttgagattttcaagaataacttgaactatatcag

SEQ ID NO: 63690 - DNA, 237 bp, Glycine max
  unsure (1)..(237): unsure at all n locations
  Clone ID: 700760983H1
tctctccattggtccttanacactcatcagtcatcaccatggccaagctagttttttccctttgttttctgctcttcagtggctgctgcttcgctttcagttccagagagcagcctcagctaaacgagtgccagatccaaaaactcaatgccctcaaaccggataaccgtataaattcagaaggagggctcattgagacatggaaccctaacaacaagccattccagtgtgccggtg

SEQ ID NO: 63691 - DNA, 273 bp, Glycine max
  unsure (1)..(273): unsure at all n locations
  Clone ID: 700760304H1
ctcgagtcgctccattggtccttaaacactcattcgtcattaccatggccaagctagtgtattccctttgttttctgcttttcagtggctgctgcttcgctccaagttccagagagcagcctcccaaaaacgagtgccagatccaaaaactcaatgccctcaaaccggataaccgtatagagtcagaaggagggctgcttgagacatggaaccctaacaacaagcgactagnatgtgccggtgttgccctctctggctgcaccctcaatgcaa

SEQ ID NO: 63692 - DNA, 275 bp, Glycine max
  Clone ID: 700760305H1
gtgtgaagtgaagaataatcttgtgaatccgtaagtctctcaactcaactggatccgggtcacaaccgtcttgaaattaagaccaactgggtcattgatcacaatctcaattggtagcacaacatcaagggaaagtgaaaaagaaaggtatatttgatcagggatatggcaactcgaagatatgagtttggaaggatgaatgaggctagccacccagactccatcagagctgccttggctgaattcctctccacttgcatctttgtcttgctgga

SEQ ID NO: 63693 - DNA, 261 bp, Glycine max
  Clone ID: 700760306H1
tacacacacttatcctcgaaggtcatgagaggagactggcatccaaaaaattggttctaaaactaatgcttcgggccatagagcacgaaagccgctgtcaatatttgctgtgcttggtctttgctgtttcttttatcttttgggagcatggcaaagaagtggatctgggaagggctttaaccttgcattgaaagttaataacctgatgactgactgcactgttttacccaatttgagttttgaatctcatcacaatgatgt

SEQ ID NO: 63694 - DNA, 271 bp, Glycine max
  Clone ID: 700760307H1
aattaagaaatccttctccggagctatggcagatctcaagtccacattcttgaacgtctattctgttctcaaatctgaactcctccacgaccctgcttttgagttctccgatgatgctcgtaattgggtcgaccggatgctggactacaatgtgccgggaggaaagttgaaccggggactgtcagtaattgatagctacagattgttaaaagaaggacaggcattaaatgatgacgaaatttttcatgccagtgctcttggttggttattg

SEQ ID NO: 63695 - DNA, 273 bp, Glycine max
  Clone ID: 700760309H1
gacaagatctccatatctgttcccaaaagcttgtttgtaagaatggcttccggtgaacagaaattccctcctcaacaacaacaaactcagcctgggaaggagcatgctatgactccagtaccccaattcactagccctgactacaagccttcaaataaacttcaagggaagattgcattagtcactgggggtgattctgggattggacgagcggtgtgtaacttgtttgccttagaaggtgctaccgtggccttcacgtatgtgaagggcatg

SEQ ID NO: 63696 - DNA, 275 bp, Glycine max
  Clone ID: 700760310H1
caacgagtgccaactcaacaacctcaacgcgttggaacccgaccaccgcgttgagtccgaaggtggtcttattgaaacatggaactctcaacaccctgagctgcaatgcgccggtgtcactgtttccaaacgcaagtctcaaccgcaacggcctccacttgccatcttactcaccttatccccaaatgatcattgtcgttcaagggaagggagcaattggatttgcatttccgggatgtcctgagacgtttgagaagccacaacagcatcaagca

SEQ ID NO: 63697 - DNA, 270 bp, Glycine max
  Clone ID: 700760311H1
cataaacaatatgtgtgcatatgggctcaatcctggtatttcaggttctcgtcttttgggcaccattcctcagtccatttcacagcaaactgtttggaatcaaatggcaacagtgagaacaccattgaattttgattctagcaagcagagcttttgtcaattttctattgaccttctcggtggaggaattttagtggacaaaactggagattggatcacacttatacaaaatctccaattagtaacttgttgagagttgctgctggaaga

SEQ ID NO: 63698 - DNA, 273 bp, Glycine max
  unsure (1)..(273): unsure at all n locations
  Clone ID: 700760313H1
aatctttatctcaatatgtcttaccggcgttcgaatctgttttcgatttgaacttcacgccaaatgagtttgatagcttccaagatgtgcgtgacctccacgacggtggaattaagcttcccacagaagtaattagcacaattatgcccttaccggtggtcaaagaactctttcgtacagatggtgaacaagtcctcaagtttccaccacctcagcaatcgctcgtgagtacgtctgcatggatgnacgatgaagaatttgcaagaagatggt

SEQ ID NO: 63699 - DNA, 273 bp, Glycine max
  Clone ID: 700760314H1
ctcctaaaggttccatgttggatctgaaatttctcaatctaaaattgcacttcccaagaacacagttggaggaaccattctgcgtagtgatctattggcaaattttttgacagagggcaattttagagcaagtgttgatttgcagcgcactcatcgtattagaggaatgattaaaatggtggccacagttggtattcctgagtctacaggtatctacttggcctgtgctatgaatagttcttttagggggcgcgccagttctgattttacacc

SEQ ID NO: 63700 - DNA, 269 bp, Glycine max
  Clone ID: 700760317H1
actgatgctcaaattttgatggtccagggcgcagattcatagctcatggacattttttcaaaaatctgactcagaaagtgcgagtccaaattgttacatctgaaaagagttactggcatgtgtatgatcctgacaagtttcagatgtttgacaacagtgaaataggtctttattctaatcccactttggaagatatcccacattcagcttgggaccttttttgctgggacagtgagaaaatttgccaaataatttttctgcagatgctc

SEQ ID NO: 63701 - DNA, 284 bp, Glycine max
  Clone ID: 700760318H1
tcggctcgaggcaatttagaaagttagcagattgtgcatttctcaagagaaactttaagcagatgtctaatgttttgtgggtagctcctgaggacaaggcgagtttatggtcacaacttcattatgtttcgtgtaataatctggaaatgcaagaagcttatcttgtcaatctcgtaaatgtgttacgagaattgtatttgcacagtccagaggaagctcgtacattgagaaggaaagctctctctcgtattgaatggctgcaaaaagctgatgtgcctccatag

SEQ ID NO: 63702 - DNA, 266 bp, Glycine max
  Clone ID: 700760320H1
gaacgttcttctatcataaaggaattgcaggcaagatagttcaaatgagtcaacggaagtttgcctccaatgttgtggagaaatgtttgacctttggtggtccttctgagcgccaattactagtgtgtgagatgcttggcaccacagatgaaattgatctttcatcatcgcctgcacaagctacttttcatctgtggtgccaagcatctgacacactagtaattggcaccacagatgaaaatgagcctcttcaggcgatgatgaag

SEQ ID NO: 63703 - DNA, 274 bp, Glycine max
  Clone ID: 700760321H1
actcgagccgattcggctcgagctggcagcttcttctcagcatccgacaacacacagttgctactgctattgccgcacaaaagctgaactaacaaaagatccaagatgaattaataattgctcgagaaattgtcataaatgatgcagagtcttctgttcgctacaagttgacaaaacgccagacacaagaggagatccagaggtgcactggtgccatagttataactagggggaagtatcggctacctaatgcgccacatgatggaggaaccgc

SEQ ID NO: 63704 - DNA, 269 bp, Glycine max
  Clone ID: 700760322H1
atttgagcttaaaccctagccgctcatctcttcattcttcactttggaaacaatcataatggcgttctgtaataaggttgcacatgtcttgaggcagggtgctgctcgcagcacacatgcccctgttgcgtccatgcttaattacatccgctgcatgtcttcaagcaagcttttcattggaggcctttcatatggagttgatgaccagtctcttaaggatgcattttctggctttggagatgtggttgatgcaaagttataacgataga

SEQ ID NO: 63705 - DNA, 245 bp, Glycine max
  Clone ID: 700760323H1
attctctccattggtccttaaacatcatcagtcatcaccatggccaagctagttttttccctttgttttctgcttttcagtggctgctgcttcgcttccagttccagagagcagcctccccaaaacgagtgccagatccaaaaactcaatgccctcaaaccggataaccgtatagagtcagaaggagggctcattgagacatggaaccctaacaacaagccacgccagtgtgccggtgttgccct

SEQ ID NO: 63706 - DNA, 256 bp, Glycine max
  Clone ID: 700760324H1
ggctcgagctaaattctcaaaggcaccaatcatattgctcagagttcggaaattctccccaagagataaaatgtctctaatcccaaacttcttcggtggccggagaaacaatgtgttcgatcctttctcactggacgtgtgggatcccttcaaggattttcctttcccaaatacgctttcttcagcttccttccctgaattttctcgggaaaattcagcatttgtgagcaccgtgtggactggaaggaaccccaca

SEQ ID NO: 63707 - DNA, 240 bp, Glycine max
  Clone ID: 700760325H1
gtcaaagaaacaaattcgggaacgagcaaacatgccaaatctagttcaaggaaaaccatttcttctgaagataaacctttcaacttgagaagccgcgaccccatctattccaacaagcttggcaagttgtttgagattaccccagagaaaaaccctcagcttcgggacttggatgtcctcctcagtgttgtggatatgaacgagagagctccttttctgccacacttcaattcaaaggcc

SEQ ID NO: 63708 - DNA, 268 bp, Glycine max
  Clone ID: 700760326H1
atccattccatttctttccaacacacactttctctctctatctttgggtgtctttctttttgttcattgttgatgatgtcacgcgccgccgtgctattacacgcgccggaggaagatgcggcggcggaggagtgctgtacctcgacttcgtcgtcgtcgatcgggaggaacagcgacgtgtcgtcggagagatcaatggaggaaggagaaaacgaggtggaaagtgcttaccatggacctttgcatgccatggaaactttggaagagg

SEQ ID NO: 63709 - DNA, 278 bp, Glycine max
  unsure (1)..(278): unsure at all n locations
  Clone ID: 700760327H1
attcgagccagcaaagcactggctacttcagagttgaaaacccagcatgtggttatatctctttcctaaccttaaccttggtactgatgctactgacaatcagggcaactcagcggaaactgtttcttttcagctaggaacaagtttcgtgaccgaagccaaccagaccatgantcctccaaggaagacgcctattgtgcactccctcgggaacaattaccaactcaataaggttgacgacaacggcaccccaaaacctcgtctcttggtcggcctct

SEQ ID NO: 63710 - DNA, 248 bp, Glycine max
  Clone ID: 700760329H1
ggattaatagccaacaacattctcatctgtcgggtcagattggtatgcaccaagtgaatcacactggttgaatgacttcagaggggtgatgaagaatgtttgtggaccatttacagctgcaaaaactgtttatgaggacgaacaaggtttcttgatcattatcagtctgccattcgtggatcttcctagtgtgaaagtttcatggcggaacactgttactcatggtatcataaaggtttcttgtgtga

SEQ ID NO: 63711 - DNA, 260 bp, Glycine max
  Clone ID: 700760331H1
tagtcaatggatcctctgtatctgtgtaaatgaggtcctttggctttgacacgtgttggaagtagagggtgtctaatacctagcggatttatgattttcttttcaattcttggacaatttggagcagtttttgcctctatcccacctcccattattgctgccttgtactgcttgttctttgcttatgttggtgctggtggtcttagttttcttcagttctgcaacctcaacagttttagaacaaagttcttttaggctct

SEQ ID NO: 63712 - DNA, 260 bp, Glycine max
  Clone ID: 700760333H1
tgataatattgccaagtgcaatgcagaatgcttgacagtgaatgtcccacagtcttctagttcttcaggtttagacacagacagtattatgtcagaagataattgtagcagttcaaatttggctttaagggaggttttgcttgcatatgttactaaaggggatgatgtacaagttttgggctctttgagtgttcttgccactctactgcaaactaaagaacttgatgaatcaatgctagataggcttggaattcttccac

SEQ ID NO: 63713 - DNA, 272 bp, Glycine max
  Clone ID: 700760334H1
gaggaggaaagattgggttgtttggtggtgctggtgtaggaaaaactgtgcttattatggaacttattaacaatgttgcaaaagctcatggtggtttctctgtgtttgctggtgttggagagcgaacccgagagggtaatgacttgtacagagaaatgattgagagtggtgtcattaagcttggtgataagcagagtgaaagcaaatgtgctcttgtgtatggtcaaatgaatgagccccctggtgctcgtgcccgtgttggtctactgggc

SEQ ID NO: 63714 - DNA, 272 bp, Glycine max
  Clone ID: 700760335H1
atcaatccaatcctctcccaactcacaaagccatgtctccaggtcccgttgtcgacgcttcccctgatgttgatgcagagcaacaacttccctccgtcgatgacgccactcagaagaagataccccaaccacaggaggacgatgctccccttgtcgaggacttgaaggatgatgacaaagacgacgacgatgaagacgacgacgacgacgacgaagatgacaaggaagacgatgctcaaggtggtgctgagggttcaaagcagacagaagtg

SEQ ID NO: 63715 - DNA, 268 bp, Glycine max
  Clone ID: 700760336H1
cggctcgaggcggatacagtcggtgccgctcgtcattggccagttcatggagctggttgaccaatacaacggcatcgtcggatccaccaccggatccaactactacgtcaagatcctcagtaccatcaaccgcgagcttctcaagccctccgcctccgtcgcactccaccgccactccaacgcgctcgtcgacgttcttccgccggaggcgactccagcatctcgctcctcagccagtccgagaagcctgacgtcacttatatgacat

SEQ ID NO: 63716 - DNA, 265 bp, Glycine max
  Clone ID: 700760337H1
aattttgtttctttgtgtgtgatggtgatgataacttaattagtgttcatgaatatgtcatagcctactttagtggttctaaattgaaaagctttctagctggtcataatatcaccattactgatggtattgacaaaactagtgcaactttgcaatttagaaagttagcagattgtgattttctcaagagaaactttaagcagatgtctaatgttttgtgggtggctcctgaggacaaggcgagtttatggtcacaactcatatg

SEQ ID NO: 63717 - DNA, 263 bp, Glycine max
  Clone ID: 700760339H1
ataaattctgagcggctccatatccgccacttatctcaccaaccataaaatatactcatggccgagcacggttttgatggacatgatgtaggatatgtgcctgaggaccctaattttcctcagaatcattctgatgaacatgatgtagggactgtgattgatagctccggatttcctcacctgctacctgatgaagatgatgcaggcaatttgatggaggacgccaattttcctgaaaatgattttgttgggcatgaatgatg

SEQ ID NO: 63718 - DNA, 268 bp, Glycine max
  Clone ID: 700760340H1
gaatatgtcttgctgcggtggaactgtggttgcggaagcgcctgcaagtgcggcaacggctgcggaggctgcaagatgtacccagacttgagctacaccgagtcaaccaccaccgagaccttggtcatgggagtggcaccagttaaggctcaattcgagagtgctgaaatgggtgttcccgctgagaacgatggctgcaaatgttcctctaactgcacctgcaacccctgcactatgcaagtgaggtgttggagagctaagcttcaag

SEQ ID NO: 63719 - DNA, 268 bp, Glycine max
  Clone ID: 700760341H1
atccttttgtgttaaataggtggatgggcaaattgactttcccccagggcacttcccgaagtgttaagagaatgcctctttctatagggggaggagctggtgcaaagaatgctattctcatgaatatgccaaatgctgttctttcaatgtggagatattttgttggagatctcgtctttgaagtttctaagatgacttctctctacattaaatgtacagtctctttcttcatagcatttggaaatttggctgatgatacctcaatttg

SEQ ID NO: 63720 - DNA, 266 bp, Glycine max
  Clone ID: 700760342H1
atcggaatcgatctcggaacacgtactcgtgcgtcggtgtctggcaacacgatcgcgtcgagatcttcgccatcgaccaaggtaacagaacgacgccgtcttacgtcgggttcaccgacaccgagcgtctcattggtgatgccgcaaaaaatcaggtcgccatgaaccccatcaacaccgtctttgatgccaagagattgattggtcgtagattcagtgatgcctctgttcagagtgatattaaactgtggccttttaagttttgt

SEQ ID NO: 63721 - DNA, 268 bp, Glycine max
  Clone ID: 700760344H1
tacacacacacacactaagaataatggcttctatcctccactactttttagccctctctctttctttctctttccttttcttcttatccgactccgtccccattccccaacaccacactaaccctacaaaacctataaaccttctggttctacccgttcaaaatgatgcttccacagggctccattcacccaacctccaaaaaaggacccctctaatgcaagtaccagtcctggtggacctcaatggaaaccacttgtggttaactgt

SEQ ID NO: 63722 - DNA, 267 bp, Glycine max
  Clone ID: 700760347H1
cattcggctcgtcttgcaacacggactaaggagtctgacatgtgtgcgagtcaacgggcgagtaaacccgtaaggcgcaaggaagctgattggtgggatccccctgtgggttgcaccgccgaccgaccctgatcttctgtgaagggttcgagtgagagcatacctgtcgggacccgaaagatggtgaactatgcctgagcggggcgaagcagaggaaactctggtggaggcccgcagcgatactgacgtgcaaatcgttgtctgact

SEQ ID NO: 63723 - DNA, 267 bp, Glycine max
  Clone ID: 700760348H1
ataaaattcttccaccaagttacgggcgaaattgtgttgcttcttttctccctcttaggtctctcttctagtatcagcatatcaactcatcgttccatattggaccttgacttaaccaagtttaccacacagaaacaggccacttcactgttccaactatggaagagtgagcatggacgtgtctaccataaccacgaagaagaggcaaagagacttgagattttcaagaataattggaactatatcagggacatgaatgcaacagaa

SEQ ID NO: 63724 - DNA, 85 bp, Glycine max
  Clone ID: 700760349H1
agcaagctcaacgagtgccaatcaacaacctcaacgcgttggaacccgaccaccgcgttgagtccgaaggtggtttgattcaaac

SEQ ID NO: 63725 - DNA, 266 bp, Glycine max
  Clone ID: 700760352H1
cccatttttgtactaagaagcatttgttacatttatgtaaccaaaggaaaatcaaaagtacgcaggaggtgaagctcggtggcgaaatcaacatgcaacgcagtgcaagcatgcgactaaaggagaagaaggtgaaggatttgatggttgacaagaagaggctagtggaggtgccgtacatggcgtccctggcccacacaatgactacatcggtggcgaacaagttgtggcggtgccggtggctgcgccgccggggcatggatcgg

SEQ ID NO: 63726 - DNA, 264 bp, Glycine max
  Clone ID: 700760353H1
tctcgagccgaatcggctcgggcaaaggattctacccgccgctcgatgggaattgcgcttcattgcgtctcgtagggctaaaccgcctcacgagggtcaccaacggcacgtgcctttggtgggccgaggccccctactgctggtcggcaaacggacggcgggcgcacgcgtcgcttctagcccggattctgacttagaggcgttcagtcataatccaacgcacggtagcttcgcgccactggcttttcaaccaagcgcgtgacc

SEQ ID NO: 63727 - DNA, 264 bp, Glycine max
  Clone ID: 700760354H1
ctgattgctagaatggaattcgatgctcagtcatctcttttaccattctcttctctcttgctcttgcaggagagagccatgtccatgcatcgctacctgaggaagattattgggaagctgtttggccaaacactcccattcccactgcactgcgagagcttctaaagcctctccctgcaggtgtagtaatcgatgaactccctaagcaaattgatgatacacagtacccaaaaacattcttctataaagaagacctcatccagg

SEQ ID NO: 63728 - DNA, 290 bp, Glycine max
  Clone ID: 700760356H1
gctcgcacggtactcgggaattgggctcgagttttcacaattttccccaacagattcagcacccgaattatgcggatccgagataagcagaaggaaaagattaaaagtttggtgttttcatcgatctctggggaaagatgtgttgtgggcttagaatttgcatgctttgcacgtgtctggttctggtggtgatcgccatcgggttggtattcgggttcggagtgttcaagcatggattccacaagatcaaagacactgttagtttctgtgaatcttgcggcggcggagaa

SEQ ID NO: 63729 - DNA, 266 bp, Glycine max
  unsure (1)..(266): unsure at all n locations
  Clone ID: 700760357H1
gagagtgcggtttcctttgttggtgttgctgggaactgttttcctggcatcagtttgtgtctcattaaaggtgagagaggatgagaataaccctttctacttgagaagctctaacagcttccaaactctctttgagaaccaaaacggtcgcattcgtctcctccagagattcaacaaacgctccccacaacttggccgagtccgngactaccggattgtccagattcagtcaaaacccaacacaatccttctcccccacatgctga

SEQ ID NO: 63730 - DNA, 262 bp, Glycine max
  Clone ID: 700760361H1
ggggaagcccttcactcttctctttcttccctttgcttgctactcttgtcgagtgcatgctttgctattagctccagcaagctcaacgagtgccaactcaacaacctcaacgcgttggaacccgaccaccgcgttgagtccgaaggtggtttgattcaaacatggaactctcaacaccctgagctgaaatgcgctggtgtcactcgttccaaactcaccctcaaccgcaatggcctccacttgccatcttactcacgtatcc

SEQ ID NO: 63731 - DNA, 265 bp, Glycine max
  Clone ID: 700760364H1
aggagacgtactagtgattctcctggtgttagttactggacctataatactggcgatgaaccagttgttggcatcagtcttcttgacacctccaacttcaacaatccctttgatcaaaaccccagagtattttaccttgctgggaacccagatatagagcacccagagaccatgcaacaacagccacagcagaagagtcatggtggacgcaagcaggggcaacacagcagcaggaggaagaaggtggcagtgtgctcatggcttc

SEQ ID NO: 63732 - DNA, 264 bp, Glycine max
  unsure (1)..(264): unsure at all n locations
  Clone ID: 700760366H1
ataattgngttctgtgtcgcatatttttgaggaggagaattggtgccaaaaaatgggggaggagagccactcctaaggtgagttttcctatgacttcctagcgcagaacaagaccgattcctcctcatcggtcgccagtggaattacacatgaatcagatgaacatgaagagagcagtagctccaacaccttcccttatactattagaagaaaacttaacaaccttccttaaaatttaagttcattactattgttgttttaatg

SEQ ID NO: 63733 - DNA, 263 bp, Glycine max
  Clone ID: 700760367H1
taaacactcatcagtcacatcatggccaagctagttttttccccttgttttctgcttttcagtggctgctgcttcggtttcagttccagagagcagcctcacttaaacgagtgccagatccaaaaactcaatgccctcaaaccggataaccgtatagagtcagaaggagggctcattgagacatggaaccctaacaacaagccatttcagtgtgccggtgttgccctctctcgctgcaccctcaaccgcaacgccctcgtaga

SEQ ID NO: 63734 - DNA, 68 bp, Glycine max
  Clone ID: 700760370H1
gtgaaatttagcccatgacacatcactgctttgtctccaagattctgcactccttccacacaacatac

SEQ ID NO: 63735 - DNA, 259 bp, Glycine max
  Clone ID: 700760372H1
taactgatgagagatggtaggcacagaacatgagggatatgatccttttcttggtggaattcaaaaatatgccactcccatgatgcccctagatgaagaaattctttctaaggttgcacaagatatagttgaggaatggtttgattgtgttgatgaggaggattcctttgaggaagtttctttgagtgcagcactcaatggtgttgagggcttggactatatggaaagaattcctcttgccacatctgagggtttcctc

SEQ ID NO: 63736 - DNA, 261 bp, Glycine max
  Clone ID: 700760374H1
atatcgaggaatccggaaagggaaggagagagtggtttcgttcttcccttttcgactcctttcaaattgttcctttttcatttcaattcgcatagaattcttttccttctgatttgattagattagtgaagatgggaatgaaacaagtcattaaaaacctcgacgcctttcctcgcgccgaggatcacttgttgcagaaaacccaatctggggctctcgtatccgtaattggtttgattataatggccacattgttgtgca

SEQ ID NO: 63737 - DNA, 154 bp, Glycine max
  Clone ID: 700760375H1
atttgaaattttgataaaccgcgatcacaggttgccgcaccttaaaaccggaaacaaaagcaatcgttacttgatttcaagaatttctcaatttctttctacttctttgtgtacgatttcttaagggaaagaaaatcactctctgtgctggcca

SEQ ID NO: 63738 - DNA, 260 bp, Glycine max
  Clone ID: 700760376H1
ctcaagttaacccctttccatttttctcgaaccaaaagacacgattcctcacgacataaactcaatccagaagcagaagaagcctctccctaacccctgcacgcgccgcagcacccaccctcaactgttgcagccgatcaatcatacccggagaccgaaaataacgaaactgaggaagagtttaacgatgaaagctcttattctaaattcacttacagggatcactggtaccctgtttcgttgatcgaagattgaccctc

SEQ ID NO: 63739 - DNA, 263 bp, Glycine max
  Clone ID: 700760377H1
cattattctatatcattttggttaagagtcttgaaaaagcaagagaaaaaaaaataccaaccatggcaaccatttctgatcaacctagagggtcctactctctatggaacctcatatggagcaccctatggaaccacgtatgagaccaacaccagcattaacaacccaccttcacgccaaacagtgaagttcataactgctgccactattggcatcacactcttgctcctgtctgggttgaccctcacaggcacttcataggt

SEQ ID NO: 63740 - DNA, 262 bp, Glycine max
  Clone ID: 700760381H1
ggaactctcaacacctgagctgcaatgcgccggtgtcactgtttccaaacgcaccctcaactgcaacggcctccacttgccatcttactcaccttatccccaaatgatcattgtcgttcaagggaagggagcaattggatttgcatttccgggatgtcctgagacgtttgagaagccacaacagcaatcaagcagaagaggctcaaggtcgcagcagcaactacaagacagtcaccagaagattcgtcacttcaatgaggag

SEQ ID NO: 63741 - DNA, 170 bp, Glycine max
  Clone ID: 700760382H1
taagatttgaaattctgataaaccgcgatcacaggttgccgcaccttaaaaccggaaacaaaagcaatcgttacttgatttcaagaatttctcaatttctttctacttctttgtgtacgatttcttaagggaaagaaaatcactctctgtgctggccacagacttcgtga

SEQ ID NO: 63742 - DNA, 261 bp, Glycine max
  Clone ID: 700760383H1
cactttccttagtcaatatggggaagcccttcttcactctctctctttcttccctttgcttgctactcttgtcgagtgcatgctttgctattacctccagcaagttcaacgagtgccaactcaacaatcctcaacgcgttggaacccgaccaccgcgttgagtccgaaggtggtcttattgaaacatggaactctcaacaccctgagctgcaatgcgccggtgtcactgtttccaaacgcaccctcaactgcaacgcctcc

SEQ ID NO: 63743 - DNA, 260 bp, Glycine max
  Clone ID: 700760384H1
ggcgtcacagtcaagaaactaaagtccctggaagacgcattataaccgaggctgttggtggccaggttgtggagcagtatgtggaggcaactccggttgaggcagggcgaacagtgcaattaaggagaatgccataacaataggagaggcattggaggcgacggcacagactgtgggtcagaaagcggtggatcagagtgacgcctccgcgattcaggcggcggaggtgagagcaacgggaagtaacgttatacgccggg

SEQ ID NO: 63744 - DNA, 261 bp, Glycine max
  Clone ID: 700760385H1
atttggcgttgtcatagggggcagtttcgggaaatacacggtggagaagcccgcaccggattccgaagcgcgtgtttcaaattcggatagtcgcgatggaatgcgcgtggtgatggagccgcgcgagaagcgcgagattcaggcgtttcggagaatggaggcgaggaagaagagggagcgcttgagggaaccgtccgagcccgaatcgcaattacgggattttaagagggagaaaacggaatgcggtaacgggttagtggc

SEQ ID NO: 63745 - DNA, 263 bp, Glycine max
  Clone ID: 700760386H1
agaacggctaccataacttatctgcagcctctctatgggattccttatggattgaaggacataatatcagtagacaaatacaaaacgacctggggatcaaaatcattcaaaaatcaagttattgacgtagaagcttgggtctataaaaggctgaagtccgctggggcagttcttgttgcaaagcttgtttctggatcattggcataatatgatatttggtttggtggtagaatcacgaacccatggaatattgaggattttct

SEQ ID NO: 63746 - DNA, 77 bp, Glycine max
  Clone ID: 700760387H1
ctcgagccgtgaattttgataaaccgcgatcacaggttgccgcaccttaaaacctgaaacaaaagcaatcgttactt

SEQ ID NO: 63747 - DNA, 259 bp, Glycine max
  Clone ID: 700760388H1
cttcacttgcagactgttgcatcatcatcttcattgcaaaaccctaaacttcaccttcaaccatgaccacacaagtaccaccatacagtgtccaagtccacacaacaacacacccatacgaagctggcgtcgtcccccccggagcccgtttcgaaccgccgcgttatgaagccggcgtcaaagcgccctccatttaccatccgaagaggttccaacgacttcccaggtcctcgccgtcctcgccggcctcccgtcggtg

SEQ ID NO: 63748 - DNA, 259 bp, Glycine max
  Clone ID: 700760390H1
caaggtagacgtgaagatctccgtggagcagaacactctcattatcaaaggtgaaggtgctaaagaaggcgatgaagaagagagcgctcgtcgctacactagcaggattgacttgccggacaagctctacaagattgaccagatcagagctgagatgaagaacggtgtgctcaaggtcgttgtgccgaaaatgaaggaggaagagaggaaagacgtgatcagtgttaaggttgagtagaacaacccaagctatttggcc

SEQ ID NO: 63749 - DNA, 259 bp, Glycine max
  Clone ID: 700760391H1
cggctcgagcttatttgcttcttcgagtttcacagccaagtcgtaaaagggtttcaagggatggaaaacatgcagagcttctggcaattgggtgatgaactccgtgggcactcaaaagcatcggaggatcacaagtggttaatggttgcctcgaaactggccgaacagacaatcttgaagggggagcgtgtgaacaaccttgatctttcaaagggacccattgaaacaaggtcaagggataaatttgggttcaggaaga

SEQ ID NO: 63750 - DNA, 260 bp, Glycine max
  Clone ID: 700760392H1
acaaaagcacaattgttagtggaaaaaccttcaaatatgatataattggtgctggttcacattcttcagaagatttttgtgaaaaggcagatcaagataaaactcaaaaagattgataccagattgagacaaagaatagatcctcaatacaatgaggttcaggctcagatggaaacaaatttgtttaaattgtctcttgatgatgctgaaactcctacaggttccatgttggatcttacaatttctcaatctaaattgca

SEQ ID NO: 63751 - DNA, 262 bp, Glycine max
  Clone ID: 700760394H1
taaacagcaacagtacagagcattttgatgcatgtaagtggacaaaatcagaaccacattcctgggaattgatcttcccaatagtggtatgtggtcctaataatggttttgaaatgtggagttctgagtgggcaaatcaaacttcatggcatttgagtttccttattgacaatcccaaacagtctacagtttttgatattctcttgggaatctctcaagattttgaaattgctggtaatactcttatgccagcttttctgtt

SEQ ID NO: 63752 - DNA, 254 bp, Glycine max
  Clone ID: 700760395H1
gttcaatatcctagtatactttaataaataatttaagatactatgatgagagcacggttcccattcatgctactgctacttgttttcctggcttcagtttctgtctcatttggcattgcttactgggaaaaagagaaccccaaacacaacaagtgtctccagagttgcaatagcgagagagactcgtacaggaaccaagcatgccacgctcgttgcaacctccttaaggtggagaaagaagaatgtgaagaagt

SEQ ID NO: 63753 - DNA, 270 bp, Glycine max
  Clone ID: 700760401H1
caaagatgcaatggatggttggtttagacttgagagagtttctgatgatgaattcaataactataagcttgtgttctgtccacagcaagctgaggatgacaaatgtggggatattgggattagtattgatcatgatgatggaaccaggcgtttggtggtgtctaagaacaaaccgttagtggttcagtttcaaaaacttgataaagaatcactggccaagaaaaatcgggtcctttctcgcagtgagtgagacacaagtgtgatagtact

SEQ ID NO: 63754 - DNA, 253 bp, Glycine max
  Clone ID: 700760402H1
tttactcactaaaaaagagagaaacatagagagggaagaaaccacgtacggttattatggcgatgaaactcaaatatctgtcttccattgccgaggatgtcatcaagagatgttcacagaaactggacacttcggtagagaaattggtggtggattttgaaggggggtggcaccctgaaatgggaaactattgcagaaaattagttgaattttgcagtgggaaggctgtgagtgaattgtgccacaacataga

SEQ ID NO: 63755 - DNA, 211 bp, Glycine max
  Clone ID: 700760403H1
cttaattattaacacttccttagttcaatatggggaagccctacactctctctctttcttccctttgcttgctactcttgtcgagtgcatgctttgctattagctccagcaagctcaacgagtgccaactcaacaacctcaacgcgttggaacccgaccaccgcgttgagtccgaaggtggtttgattcaaacatggaactctcaccacct

SEQ ID NO: 63756 - DNA, 259 bp, Glycine max
  Clone ID: 700760405H1
ggatgagaagccacagtgcaagggtaaagacaaacactgccaacgcccccgaggaagccaaagcaaaagcagaagaaatggcattgacgagaccatatgcaccatgagacttcgccacaacattggccagacttcatcacctgacatctacaaccctcaagccggtagcgtcacaaccgccaccagccttgacttcccagccctctcgtggctcagactcagtgctgagtttggatctctccgcaagaatgcaatgttc

SEQ ID NO: 63757 - DNA, 268 bp, Glycine max
  Clone ID: 700760406H1
aaaagaataaataaaagcggaagagagggtaggctgttacggtttggtttggtggttatttgattggtgtgcatccatgttaagctagtggcgatcggatccagctacagcctacaacctacagttttggtttggtttgcttgattgaagatcaaggaaggaagatgttgggtgttataaggcacaagagtattcgccccgccttctccgcaatcagacacttctcttctgcagctaaagagattactgtcagggatgctctcaactc

SEQ ID NO: 63758 - DNA, 271 bp, Glycine max
  Clone ID: 700760407H1
cttaattattaacacttccttagttcaatatggggaagcccttacactctctctctttcttccctttgcttgctactcttgtcgagtgcatgctttgctattagctccagcaagctcaacgagtgccaactcaacaacctcaacgcgttggaacccgaccaccgcgttgagtccgaaggtggtttgattcaaacatggaactctcaacaccctgagctgaaatgcgccggtgtcactgtttccaaactcaccctcaaccgcaatggcctcc

SEQ ID NO: 63759 - DNA, 270 bp, Glycine max
  Clone ID: 700760408H1
ggcggaaggcccattcgggtggttacatttccgaataccattgtgcagattgaaccagacatgaattcaaggtttcagcttttgagtaccactaccaatggtgattttgttcaaggaaaagatctcgcaatggttagggttaatgtagcatgtgctgctgttggcttgacatcaagctatactccgactccattgttggaatctggtttgcaaaaagacagagggttaattgtggagtattttggaaggatgtcttacgttgctcataac

SEQ ID NO: 63760 - DNA, 258 bp, Glycine max
  Clone ID: 700760409H1
taaattcctcgtggaatcttgttgaagccatgtctacagctggtcaggtcatcaagtgcagagctgcggtggcatgggaagcagggaagccactatcgatagaaaccatagaagtggcaccaccccagaaaggtgaagtgcgtttgaagatcctcttcaactccctttgccgtacagatgtttactggtgggatgctaagggccagactccgctgtttcctcgtatcttaggccacgaagcttcggggattgtggaga

SEQ ID NO: 63761 - DNA, 230 bp, Glycine max
  Clone ID: 700760410H1
aatccaactcgtgcatttgaagaaagaaaaaaaaaaagggttggtttttggttttggtttggttaactccttccacttccacccatggtctccgaatccgaactcatcggccgcctccgcgagttcctccggagctccgacctcaacaccaccaccaccgccaccgtccgccgccagttggaggccgatttcggaatcgacttatccgaccgcaaggcattcattaggga

SEQ ID NO: 63762 - DNA, 269 bp, Glycine max
  Clone ID: 700760411H1
cttaattattaacacttccttagttcaatatggggaagcccttcactctctctctttcttccctttgcttgctactcttgtcgagtgcatgctttgctattagctccagcaagctcaacgagtgccaactcaacaacctcaacgcgttggaacccgaccaccgcgttgagtccgaaggtggtttgattcaaacatggaactctcaacaccctgagctgaaatgcgccggtgtcactgtttccaaactcaccctcaaccgcaatggcctc

SEQ ID NO: 63763 - DNA, 268 bp, Glycine max
  unsure (1)..(268): unsure at all n locations
  Clone ID: 700760413H1
ccctcactttctcgctcgccaaacgcccctctctctcctccaatggccgaccagctcaccgacgaccagatcgccgagttcaaggaggccttcagcctcttcgacaaggacggcgatggttgtattactactaaggaacttgggactgtgatgcggtcactagggcaaaacccaactgaggcagaactgcaggatatgattaatgaggttgatgctgatggcatggcccancancgacttcccagagttcctcaacctgatggctcgc

SEQ ID NO: 63764 - DNA, 182 bp, Glycine max
  Clone ID: 700760414H1
gaaattttgataaaccgcgatcacaggttgccgcaccttaaaaccggaaacaaaagcaatcgttacttgatttcaagaatctctcaatttcttcctacttctttgtgtacgatttcttaagggaaagaaaatcactctctgtgctggccacagacttcgtgaatcattttcttttccacaca

SEQ ID NO: 63765 - DNA, 266 bp, Glycine max
  Clone ID: 700760415H1
ttccttagttcaatatggggaagcccttcactctctctctttcttccctttgcttgctactcttgtcgagtgcatgctttgctattagctccagcaagctcaacgagtgccaactcaacaacctcaacgcgttggaaccggcacaccgcgttgagtccgaagtggtttgattcaaacatgacactctcaacaccctgagctgaaatgcgccggtgtcactgtttccaaactcaccctcaaccgcaatggcctccacttgccatctt

SEQ ID NO: 63766 - DNA, 269 bp, Glycine max
  Clone ID: 700760416H1
gaatgcatcaccgcgttgtgttgtgattgaaaatggagagcgatgttgaagaatctatgcggaagaggcccagaaaatatcctttctccgccgattcatcctctcgcaagcaatttgaacaatattctggacggacatttgcaattatgggggaagtgaattttatgcaagatgatgataatcgtttggagattacccgaactaaatttggaagtttgcttaaaagacatggagatttgacagagcggcttgctagggattctgacaag

SEQ ID NO: 63767 - DNA, 210 bp, Glycine max
  Clone ID: 700760417H1
ctagttcaatatcctagtataccttaataaataatttaagatactatgatgagagcacggttcccattactgttgctgggacttgttttcctggcttcagtttctgtctcatttggcattgcttactgggaaaaagagaaccccaaacacaacaagtgtctccagagttgcaatagcgagagagactcgtacaggaaccaagcttgcaac

SEQ ID NO: 63768 - DNA, 207 bp, Glycine max
  Clone ID: 700760418H1
gattcaggtaaaagttgtattgaaattttcacaagaggaatttcttacagcttggtcaactcaggtgcgtcctgcaacaactctgtttgctgatgggtgctcatatttgtatgctatggtgcatgttagttcagtgtctacaataccaggtgattttgtcattggtgttaagttgacaaccataaacaatatgtgtgcatatgggct

SEQ ID NO: 63769 - DNA, 218 bp, Glycine max
  Clone ID: 700760419H1
gccaaatgctgttctttcaatgtggagatattttgttggagatctcgtctttgaagtttctaagatgacttctccctacattaaatgtacagtctctttcttcatagcatttggaaatttggctgatgacaccatcaattttgaggctttttcccacaagctggtacagtttggagagattcaggaaaaagttgtattgaaattttcacatgaggaat

SEQ ID NO: 63770 - DNA, 267 bp, Glycine max
  Clone ID: 700760420H1
atttgatcgcagtgcctactggtgttgcatggtggatgtacaacaatgaagacactcctgttgttgccgtttctattattgacaccaacagcttcgagaaccagctcgaccagatgcctaggagattctatcttgctgggaaccaagagcaagagtttctaaaatatcagcaagagcaaggaggtcatcaaagccagagaggatagcatcagcaagaagaagaaaacgaaggaggcagcatattgagtggcttcaccctggaattct

SEQ ID NO: 63771 - DNA, 267 bp, Glycine max
  Clone ID: 700760423H1
gacgacagagtgcagcattgctttgcttcgctgttgatccattctggagagagaaacactttttcagttctctctctctctctctaagatggccgacgatccaatgcccacgcgctggtctttccaggacttcaaattgtgttatgatgctaagtttggtagaaagaaagtcgcggagaacggagatgatgctgccggtaaagcggtcagcaatggaaatggaaattcagtgacagtagccattgtgtccaatggcaacaaaagggc

SEQ ID NO: 63772 - DNA, 266 bp, Glycine max
  Clone ID: 700760426H1
aggagctagggtttatcgagggtttcgttccttcctctctgcaacaacaatggcgaaacctgggcgaggtcgtcgctctccctccggttccgtttccggctcctcctctcgctcctcttccccctccgactctcgttcctcctctcgctcgcgctccctttctcggtcccgttctctctcgcgctccagatcctcttccccctcctcctcctcttcctcccgaagctcccgcagccgcagccctcccccgcagaggcgccgaagtc

SEQ ID NO: 63773 - DNA, 264 bp, Glycine max
  Clone ID: 700760430H1
cagaattgcccggtatctagatatgcatagataaagaggaattggatttcactggcgaacgttatgaatacttgcactattattatgaattccatgccagttccttctcctttgttgataaagtcctttaaaacatttccatcgttcaaatgctgcagcaagagctcagatgagaagggaagtgaagatgtgaaggacacattatctggggtggtggacgagcaagttgaagagttcttgagtagaaaagagaacaaggttttg

SEQ ID NO: 63774 - DNA, 198 bp, Glycine max
  Clone ID: 700760431H1
accgggtgaagagtgtgacaaagtgttcactgctttgtgccaagggaagatcatcgatccacttttggaatgccttggggagtggaatggggcacctcttccaatatgttagttttccttattttctgttttcttgaagagtggtttcttttctgtacacgtgtttgtgttgatattaagcatttggttgtctatata

SEQ ID NO: 63775 - DNA, 279 bp, Glycine max
  Clone ID: 700760432H1
attcggctcgagctcgagccgcattgtctttgaacactcatcaccatggccaagcttgtgctatccctttgattccttctattcagtggctgcttcgctctgagagagcaggcacagcaaaatgagtgccagatccaaaagctgaatgccctcaaaccggataaccgtatagagtcggaaggtgggttcattgagacctggaaccctaacaacaagccattccagtgtgccggtgttgccctctctcgctgcacccttaaccgcaatgcccttcgtaga

SEQ ID NO: 63776 - DNA, 207 bp, Glycine max
  Clone ID: 700760433H1
accatttctactgatcaaccaagaggatcctactcctatggaacctcctatggagcaccctatggaaccacctatgagaccaacagcagcattaacaaccctccttcacgccaaaccgtgaagttcataactgctgcaactattggcatcacactcttactcctgtctgggttgaccctcacaggcactgtcataggtttgatcatt

SEQ ID NO: 63777 - DNA, 203 bp, Glycine max
  Clone ID: 700760435H1
agtatctaaaatatcagcagcagcagcaaggaggttcccaaagtcagaaaggatagtaacaagaagaagacaacgaaggaagctacatattgagtggcttcgcccctgaattcttgaaagaagcgttcggcgtgaacatgcagatagtgagaaacctacaaggtgagaacgaagaggaggatagtggagccattgtgacagtg

SEQ ID NO: 63778 - DNA, 255 bp, Glycine max
  Clone ID: 700760436H1
atgatgaggccatgtcaaaacacaataggccatccatgaacggtcgccttaacatccagtttaatgttgatttcccagactcagggtttccaaccctgaccaatgccagttactggaaaaggtgttacctcaaaagagcagcaagcatgtgtcagacatggagctggatgattgtgaggagaccactttgcatgatgtcaactttaaggaggagatgagacgaaagccccaacagcaatatcgcgaggcatatga

SEQ ID NO: 63779 - DNA, 264 bp, Glycine max
  Clone ID: 700760438H1
cacacaactacaagaaagaacttccttataaccaaaaccaacaacaactatggcaagttatcagaagcactacgatgatcagggtcgcaaggtcgacgagtatggcaatgttgagaggcaaactgacgaatatggcaacccggttcatgccactagtgtcacttatgtagccaccaaaagtgttggtggctacaatgatgacgctaataagcaacatgatattactggtgtctatcccgagaaagacaccggtagacatcattt

SEQ ID NO: 63780 - DNA, 260 bp, Glycine max
  Clone ID: 700760440H1
cacacctgctgttggcttgttgttcaagaatggcaatttgtaagaaagatgtttggagagttgaatgtggaatcccttctggattcccgctcacagttatttgtaatagcatttttaatgagatgctcattagatatagctatgaaaaattactgcgccaggctaaagctccaagtatgtttttacaatccttcaaaaattttgtttctttgtgtgtgtatggtgatgataacttaattagtgttcatgaatatgtcaag

SEQ ID NO: 63781 - DNA, 85 bp, Glycine max
  Clone ID: 700760442H1
acaattccttcacttgcagcactgttgcatcatcatcttcattgcaaaaccctaaacttcaccgtcaaccatgaccacacaagta

SEQ ID NO: 63782 - DNA, 263 bp, Glycine max
  Clone ID: 700760443H1
gctcaatcctggtatttcaggttctcgtcttttgggcaccattcctcagtccatttcacagcaaactgtttggaatcaaatggcaacagtgagaacaccattgaattttgattctagcaagcagagcttttgtcagttttctattgaccttctcggtggaggaatcttagtggacaaaactggagattggatcacacttatacaaaattctccaattagtaacttgttgagagttgctgcttggaagaaaggctgtttaatgg

SEQ ID NO: 63783 - DNA, 262 bp, Glycine max
  Clone ID: 700760444H1
aaataaccaaagaacacctagagcccaacttagaagggctcactgtagatgaggcaattcaaaacaagaaattgttcctactagatcatcatgacccaatcatgccatatttgaggcgaataaatgcaacctccacaaaggcttatgctaccagaaccatccttttcctgaaaaatgacggaactttaaggccacttgccatagagttgagtttgccacatcctcagggagatcaatctggtgcttttagtcaagtttttct

SEQ ID NO: 63784 - DNA, 168 bp, Glycine max
  Clone ID: 700760446H1
acaaggtgagaacgaagaggaggatagtggagccattgtgacagtgaaaggaggtctaagagtcacagctccagccatgaggaagccacagcaagaagaagatgatgatgatgaggaagagcagccacagtgcgtggagacagacaaaggttgccaacgccaaagcaa

SEQ ID NO: 63785 - DNA, 262 bp, Glycine max
  Clone ID: 700760447H1
gaagctaacaatagccttgccaggaatgagccactactcaaaaggcagcaaacacttggggaaatgactttggaggatttcctagtaaaagctggggtggtacaagaatcatcatcactattcaagtcttcattactatatcaaaatcagatgtggtatcattgcaagtaatgggccattgagtgcaagttataggttcaggcatgtaatagggacaggatctagtgtgtcttgtaatgggcttgaaacacaaaacatgttg

SEQ ID NO: 63786 - DNA, 292 bp, Glycine max
  Clone ID: 700760448H1
gctcggaatccggctattcggctcgatgaagctaacaatagccttgccaggaatgagccactactcaaaaggcagcaaacacttggggaaatgactttggaggatttcctagtaaaagctggggtggtacaagaatcatcatcactattcaagtcttcattactatatcaaaatcagattggtaacattgcaagtaatgggccattgagtgcaagttataggttcaggcatgtaatagggacaggatctagtgtgtcttgtaatgggcttgaaacacaaaacatgttggcac

SEQ ID NO: 63787 - DNA, 208 bp, Glycine max
  Clone ID: 700760449H1
cccacattcagcttgggaccttttttgctgggacagtgagaaaactttgccaaataatttttctgcagaattgctctcttgcaaattggatactgttactggccaatattatcctgagtgggctccaattaattgtcgagttcatcgacaaccaattcacatcactgaaggaaattatgtcagaaagcaagatgtcagcattgattat

SEQ ID NO: 63788 - DNA, 256 bp, Glycine max
  Clone ID: 700760450H1
actttccttagttcaatatggggaagcccttcttcactctctctctttcttccctttgcttgctactcttgtcgagtgcatgctttgctattacctccagcaagttcaacgagtgccaactcaacaacctcaacgcgttggaacccgaccaccgcgttgagtccgaaggtggtcttattgaaacatggaactctcaacacctgagctgtatgtgcgggggatgtttgaaaggtctctcagcctcaaccgcaacggc

SEQ ID NO: 63789 - DNA, 260 bp, Glycine max
  Clone ID: 700760452H1
ctagttcaatatcctagtataccttaataaataatttaagatactatgatgagagcacggttcccattactgttgctggtacttgttttcctggcttcagtttctgtctcatttggcattgcttactgggaaaaagagaaccccaaacacaacaagtgtcttcagagttgcaatagcgagagagactcgtacaggaaccaagcatgccacgctcgttgcaacctccttaaggtggagaaagaagtatgtgaagaaggtga

SEQ ID NO: 63790 - DNA, 259 bp, Glycine max
  Clone ID: 700760454H1
aaaaggcaaaaggagatttgtctctggggatggtgaagagatgacactgattccgggaaccagtgttgaagaggcttacaacaagctaatagttgaacttgagaaaagtgttcctacattggttggcattgaatgtcccaaggatgagaaacttcctcgtcgcaaaatttttgacaaacctaagacgcgctgcttcactattctccctatggagtttaatcttgtggtccgtcaaaagtttttaaattttgtgaggttc

SEQ ID NO: 63791 - DNA, 260 bp, Glycine max
  Clone ID: 700760455H1
gagaaactttaagcagatgtctaatgttttgtgggtagctcctgaggacaaggcgagtttatggtcacaacttcattatgtttcgtgtaataatctggaaatgcaagaagcttatcttgtcaatctcgtaaatgtgttacgagaattgtatttgcacagtccagaggaagctcgccaattgagaaggaaagctctctctcgtattgaatggctgcaaaaagctgatgtgcctaccatagcacagattgaagagttccatt

SEQ ID NO: 63792 - DNA, 263 bp, Glycine max
  Clone ID: 700760456H1
attcaaaccttgctctatactacacagtacatacactagaagaatactggcttccatcctccactactttttagccctctctctttcttgctcttttctttacttcttatccgactcagtcacccctacaaaaccaataaaccttgttgttctacccgttcaaaatgatggttccacagggctccattttcgcaacctccaaaaaagaacccctctaatgcaagtaccagtcctggtggacctcaatggaaatcacttgtggg

SEQ ID NO: 63793 - DNA, 205 bp, Glycine max
  Clone ID: 700760460H1
tctcgagcgattcggctcgagcttaattattaacacttccttagctcaatatggggaagactttcactctctctctttcgtccctttgcttgctactcttgtcgagtgcatgctttgctattagctccagcaagctcaacgagtgccaactcaacaacctcaacgcgttggaacccgaccaccgcgttgagtccgaagtggtttg

SEQ ID NO: 63794 - DNA, 260 bp, Glycine max
  Clone ID: 700760464H1
gcgaagagaatggctcccaagggtttaatctttttggctgtgttatgcttctcagcactgtcactgagtcgttgtcttgcggaggataatggacttgttatgaacttctacaaggaatcatgccctcaggctgaagacatcatcaaagaacaagtcaagcttctctacaagcgccacaagaacactgctttctcctgactcagaaacatcttccatgactgtgctgttcagagttgtgatgcttcactgttgctggactc

SEQ ID NO: 63795 - DNA, 114 bp, Glycine max
  Clone ID: 700760466H1
cttaattactaacacttccgtagtgcaatatggggaagcccttcactcactctcgtgcatcccggtgcttgctactcttgtcgagtgcatgctttgctagtagctccagcaagc

SEQ ID NO: 63796 - DNA, 66 bp, Glycine max
  Clone ID: 700760469H1
gaactagtatgtaatattttattcacttaaataaagcgcattactatgtgcaatgagtgtgtttaa

SEQ ID NO: 63797 - DNA, 195 bp, Glycine max
  Clone ID: 700760470H1
gatgagagtgcggtttcctttgttggtgttgctgggaactgttttcctggcatcagtttgtgtctcattaatggtgagagaggatgagaataaccctttctacttgagaagctctaacagcttccaaactctctttgagaaccaaaacggtcgcattcgtctcctccagagattcaacaaacgctccacacaaca

SEQ ID NO: 63798 - DNA, 250 bp, Glycine max
  Clone ID: 700760471H1
gttcaatatcctagtataccttaataaataatttaagatactatgatgagatcacggttcccattactgttgctggtacttgttttcctggcttcagtttctgtctcatttggcattgcttactgggaaaaagagaaccccaaacacaacaagtgttctcagagttgcaatagcgagagagactcgtacaggaaccaagcatgccacgctcgttgcaacctccttaaggtggagaaagaagatgtgagaa

SEQ ID NO: 63799 - DNA, 254 bp, Glycine max
  Clone ID: 700760473H1
cggctcgagctttccgcataacataagaactgaaacaactgaaaataaggggtagaagagatcttactattggtgggaatcggcatgaatggcgaggggagtgaagcaatgcaagtggagaaggagagcttggtgtacatgtggggttacctgcccggagctctgccgcagaggacgcctctgttgacgccgcttcttgttagggttccgccctctggttacttttggaaggatgtctgcggcggtggttgtgg

SEQ ID NO: 63800 - DNA, 258 bp, Glycine max
  Clone ID: 700760474H1
ttttgacagagggcaattttagagcaagtgttgatttgcagcgcactcatcgtattaaaggaatgattaaaatggtggccacagttggtattcctgagaatacaggtatagcattgtcctgtgctatgaatagttcttttagggggcgtgccagttctgatatttacaccatctgctctcaagactgtgaattatggaatcttgcttgcacaaaagcaatgactatgtcatttaatccaaacccgtgttctgatgcat

SEQ ID NO: 63801 - DNA, 252 bp, Glycine max
  Clone ID: 700760475H1
gcaagacttagggttaggttggttttgttaatactacaacatcaacacttctacagattcttttcttttcttttctttctcttcttggtttggttgctggaatactatggaatctaatccaacaaccatggatcgcaaaacgcgaactcgaagtggaagactgggaactgctccacccaaacgacgacgattcaatcgtgttcggtgggcccccactcgactctatcctccccgatcacttctcccttaatc

SEQ ID NO: 63802 - DNA, 96 bp, Glycine max
  Clone ID: 700760478H1
aaacactcatcagtcatcacgatggccaagctagttagttccctttgtgttctgcatttcagtggctgctgcttcgctaggagttccagagagcag

SEQ ID NO: 63803 - DNA, 178 bp, Glycine max
  Clone ID: 700760479H1
acattctcttgggattgtcaataactgtagactgtttgggattgtcaataaggaaactcaaatgccatgaagtttgatattccttattgacaatcccaaacagtctacagtttttgacattctcttgggaatttctcaagatttggaaattgctggtaatactctaatgcagtttttc

SEQ ID NO: 63804 - DNA, 65 bp, Glycine max
  Clone ID: 700760482H1
ccaggacctatagtgtgggaaatccacaaaatccgtgtgtgtgcaacaggtggatgggaaaattg

SEQ ID NO: 63805 - DNA, 263 bp, Glycine max
  Clone ID: 700760483H1
caataaatgatgagggaatgccacaacacaataggccattcatgaagggtcgcctttacatccagtttaatgttgatttcccagactcagggtttctttcccctgaccaatgccagttactggaaaaggtgttacctcaaaagagcagcaagcattcgtcagacatggagctggatgattgtgaggagaccactttgcatgatgtcaactttaatgaggagatgagacgaaagcagcaacagcaatatcgcgaggcatatgat

SEQ ID NO: 63806 - DNA, 256 bp, Glycine max
  Clone ID: 700760485H1
tacatgtggtagtggacgtggtggtttacccaccactgtatggattagttctgcagttaataatcgctcctcagatatcaacaaaaagattcgcacagcacttgggaaaggtaagaaaattgtttttcttactagagttgatccttttccagtagctttactggctgttctttttggcgttaagaatgaaattctgagttctaacgccactaaccctatgctgacgcgacttcttgagaactgtaagagtctcaaa

SEQ ID NO: 63807 - DNA, 139 bp, Glycine max
  Clone ID: 700760486H1
tgggttgagcagttcttcatcatagtcttaaacattaaaccttagctaaactcaacaatgtcgagtcagcagagtgcacctcgtactcttcttcctatgggtcatatcaaccattctgatacgttccatcttgaagaaa

SEQ ID NO: 63808 - DNA, 258 bp, Glycine max
  Clone ID: 700760488H1
cacctaagtactggcttgcatttacagtttctgtaccgccacttggttttagcacatacactgtctcaactgccaaaaggacagggtccacaagatcatcagtaaatatatatatgagtagtgaaaagtctaaatttgatgttggtcaaggaaatttgaagcttacattttctatggatcaagataagtgtaccaattatgttaatataagaaacctggtcgaggaacaggttgaactaagttacctatactattctg

SEQ ID NO: 63809 - DNA, 253 bp, Glycine max
  Clone ID: 700760489H1
agcatttggaaatttggctgatgacaccatcaattttgaggctttttcctgaatctctccaaactgcaccaggttgtcgggaaaagcctcaaaattggatggtgtcatcagccaaatttgaggcttttccccacaagctggtgcagtttggagagattcaggaaaaagttgtattgaaattttcacaagaggactttcttacagcttggtcaactcaggtgcgtcctgcaacaactctgttggctgatgggtg

SEQ ID NO: 63810 - DNA, 223 bp, Glycine max
  Clone ID: 700760490H1
cgacgaaaggaagcagatcgtgacagtggaaggagactgaagtttctcagctatgtactcgttggtgttgaaggattgtgccaagaagtgtttgctgaagccactgagcacgctgccaccttcaacaccaacgaggacaaagctgagaaacttcagtctccagacgacgacaggaagcagatcgtgacagtggaaggaggtctcagcgttatcagccccaagt

SEQ ID NO: 63811 - DNA, 244 bp, Glycine max
  Clone ID: 700760491H1
caatatcctagtataccttaataaataatttaagatactatgatgagagtactgttcccattactgttgctgggacttgttttcctggcttcagtttctgtctcatttggcattgcttactgggaaaaagagaaccccaaacacaacaagtgtctccagagttgcaatagcgagagagactcgtacaggaaccaagcatgccacgctcgttgcaacctccttaaggtggagaaagaagaatgtg

SEQ ID NO: 63812 - DNA, 256 bp, Glycine max
  Clone ID: 700760492H1
ggtggccacagttggtattcctgagaatacaggtatatcattggcctgtgctatgaatagttcttttagggggcgtgccagttctgatatttacaccatctgctctcaagactgtgaattatggaatcctgcttgcacaaaagcaatgactatgtcatttaatccaaacccgtgttctgatgcgtggagtttggaatttctgaagcgtaacggatttcactgggtgacatcatttgtgtcactggatggactgcca

SEQ ID NO: 63813 - DNA, 175 bp, Glycine max
  unsure (1)..(175): unsure at all n locations
  Clone ID: 700760493H1
ctcgagccgaaagatattgagaacctaataaagagccaaagtgagtcctactttgtggatactcagcctcagcagaaagaggaggggaacaagggaagaaagggtcctttgtcttcaattttgagggctttttactgaataagtatgtagtactanaatgtatgctgtaatagct

SEQ ID NO: 63814 - DNA, 257 bp, Glycine max
  Clone ID: 700760495H1
cttattaacactttccttagttcaatatggggaagcccttctttcatctctctctttcttccctttgcttgctactcttgtcgagtgcatgctttgctattacctccagcaagttcaacgagtgccaactcaacaacctcaacgcgttggaacccgaccaccgcgttgagtccgaagtggtcttattgaaacatggaactctcaacaccctgagctgcaatgcgccggtgtcactgtttccaaacgcaccctcaacc

SEQ ID NO: 63815 - DNA, 211 bp, Glycine max
  Clone ID: 700760496H1
attttaagcttggcaggtctagtatgtgttatatacataataataataatatataataaaaacttgcatgttacccattaaaatattatttagttctactgggcctacaggattacatgtgaagaaaataatattttaagcttggcaggtctagtatgtgttatatacataataataataatatataataaaaacttgcatgttacccatt

SEQ ID NO: 63816 - DNA, 287 bp, Glycine max
  Clone ID: 700760501H1
aaataatttaagatactatgatgagagcacggttcccattactgttgctgggacttgttttcctggcttcagtttctgtctcatttggcattgcttactgggaaaaagagaaccccaaacacaacaagtgtctccagagttgcaatagcgagagagactcgtacaggaaccaagcatgccacgctcgttgcaacctccttaaggtggagacagaagaatgtgaagaaggtgaaattccacgaccacgaccacgtacacaacacccggagagggaactcagcaaccgg

SEQ ID NO: 63817 - DNA, 206 bp, Glycine max
  Clone ID: 700760502H1
tgaagctcaacaatcctacttgcaaggattcagcaggaacattttagaggcctcctacgataccaaattcgaggagataaacaaggttctgtttagtagagaggaagggcagcagcaaggggagcagaggctgcaagagagcgtgattgtggaaatctcgaaggaacagattcgggcactgagcaaacgtgccatatctagttcaa

SEQ ID NO: 63818 - DNA, 152 bp, Glycine max
  Clone ID: 700760503H1
ggctcgagcacaacaagaacgatcagcagatattctctcacgggcattgaaaagctgccatgataacctggtgaaaggagagagtattattcttcatggagacgcaagggaaatgatttgtgaagccgcagagcaaatgcaaattaatctcc

SEQ ID NO: 63819 - DNA, 274 bp, Glycine max
  Clone ID: 700760504H1
gcagaagggtgcttggtatgttttggatgagtagtgttgctcacagttaacccaatgctccagagccaacactcaccaatgcctcagttgcccagcggcatcaaggccagggtgccacaaaaacacgtgtggcctcatgtccaccaaccccatcacccaacaaaccggtttgggtgaactaggccaagatgtgcttgcaatccacgctactcaaggctccacccaacaacttggtccattggtcacagtccctcagttcctcttttcttgtgca

SEQ ID NO: 63820 - DNA, 281 bp, Glycine max
  Clone ID: 700760505H1
gcgatgcggatgaggcgccactcgatgtttccatttgcctgcatgcctttggtattgtggggtgtggttcgtttagtggtgtcaagtcttgcgaacgtgagggtgcatgagtggtaatcgggatgtttttgttgcacggctccatgcttgcgcatgcaacgtgtgacatgcatccttttcattgtcaccttagccttcgtggcttaggtgctgacgattggttgctgtgttgcctacctaccaaacggtattcgtgtggctagtcagacccattccatcca

SEQ ID NO: 63821 - DNA, 187 bp, Glycine max
  Clone ID: 700760506H1
gaataagaatgaactatttttgcatatgggttcttgtacaaaaactacagattgggttcaaatggaatcctatatgttgtagcttgtgttgtgttcagaaggaactgaatatatagtggaaaagtgtgacaccatggtggttcattacagtgttatttatacatgatacatgtgtgcttttaacaag

SEQ ID NO: 63822 - DNA, 107 bp, Glycine max
  Clone ID: 700760507H1
tgttcttggaggaaatgacacctttccttatcctcgtagggggagaactggtagaaaaccaacaaggaaagatcctaatagtgagtctaggagcaatgatgtttatc

SEQ ID NO: 63823 - DNA, 284 bp, Glycine max
  Clone ID: 700760509H1
cataaaattcttccaccaagttatgggtttccttgtgttgcttcttttctccctcttaggtctctcttctagttccagcatatcaactcatcgttccatattggaccttgacctaaccaagtttaccacacagaaacaggtgtcttcactgttccaactatggaagagtgagcatggacgtgtctaccataaccacgaagaagaggcaaagagacttgagattttcaagaataacttgaactatatcagggacatgaatgctaacagaaaatcaccccattctc

SEQ ID NO: 63824 - DNA, 261 bp, Glycine max
  Clone ID: 700760510H1
aagaaaatcctcacccattttcttcgtagccaaacactctgaaattctcagttatgtcgtggcaagcgtatgtggatgatcacctactgtgtgaaatcgaaggtaaccacctcactcacgccgctatcatcggccaagacggaagcgtttgggctcagagcaccaacttccctcagttcaaacctgaggaaataactgccatcaataatgactttaatgagcctggatcacttgctccaactggattgtatatgggtggca

SEQ ID NO: 63825 - DNA, 67 bp, Glycine max
  Clone ID: 700760511H1
ggctcgaggaaagaattcctcttgccacatctgagggttttcctcatgtgcttccacacaacatacg

SEQ ID NO: 63826 - DNA, 134 bp, Glycine max
  Clone ID: 700760512H1
gcaatcatcactacagcagatcccccatgttcaaactcagagttcttctttaacttctgcctctactgtctcaaaaacaaatcttcaaggagttcactctgatggtagaagttttgcctctcattcttttcctg

SEQ ID NO: 63827 - DNA, 261 bp, Glycine max
  Clone ID: 700760513H1
ggaagatatcccacattcagcttgggaccttttttgctgggacagtgagaaaactttgccaaataattttactgcagaattgctctcttgcaaattggatactgttactggccaatattatcctgagtgggctccaattaattgtcgagttcatcgacaaccaattcacatcactgaaggagattatgtcagatagcaagatgtcagcattgaatatgatgcatgtacaattccaaatgattgtggttcattggttgttgc

SEQ ID NO: 63828 - DNA, 216 bp, Glycine max
  Clone ID: 700760515H1
tcaatatcctagtacaccgtattaaagaatttaagatgtactatgatgagagcgcggttcccattactgttgctgggagttgttttcctggcatcagtttctgtctcatttggcattgcgtattgggaaaagcagaaccccagtcacaacaagtgcctccgaagttgcaatagcgagatagactcctacaggaaccaagcatgccacggtcgttgc

SEQ ID NO: 63829 - DNA, 280 bp, Glycine max
  Clone ID: 700760516H1
tatcctagtacaccgtattaaagaatttaagatatactatgatgagagcgcggttcccattactgttgctgggagttgttttcctggcatcagtttctgtctcatttggcattgcgtattgggaaaagcagaaccccagtcacaacaagtgcctccgaagttgcaatagcgagaaagactcctacaggaaccaagcatgccacgctcgttgcaacctccttaaggtggaggaagaagaagaatgcgaagaaggtcaaattcgacgactacgaccacaaca

SEQ ID NO: 63830 - DNA, 138 bp, Glycine max
  Clone ID: 700760518H1
aatatttcactagctactactcttcttagtttctctgttgtatcatttttattgctatatcctaatcaaacttcactctcaaaatgagtgatcccacactagcacaacagcatctagtcaaagtccacacaacaacac

SEQ ID NO: 63831 - DNA, 276 bp, Glycine max
  Clone ID: 700760519H1
gggaaaaggatgttcaggtgatgaatgaaggacctggacacatcccaatgcacaagattcctgatcacatgcagaaacagttagaatggtgtagtgaagcgcctttttacactcttggtcctttaacaactgatattgcccccggctatgatcacatcacctctgcaattggtgctgccaatattggggcacttggtactgctcttctctgttatgtgactccaaaggaacatcttgggttgccaaaccgggatgacgtgaaggctggagttatag

SEQ ID NO: 63832 - DNA, 277 bp, Glycine max
  Clone ID: 700760521H1
gagaatgcttattattattattatggtcctccaacacccatgacaaaatacaaatgagttttgaggtctcaccaccctccacttcctaatcccccattccctctaattcccctctaatagactatttataatttcttaactaatagttagttatcctagctatcctaactaactgacaactaacatacacctttccccatctatcactatgtctgcactgtccaattctaatgcttcatagttcatatcatgagtagttcattcgcaaatattacat

SEQ ID NO: 63833 - DNA, 274 bp, Glycine max
  Clone ID: 700760522H1
ctcgagccgtccttttgtgttaaataggtggatggggaaactgactttccttcagggcacttcccgaagtgtcaaaagaatgcctctttctatagggggaggagctggtgcaaagaatgctattctcatgaatatgccaaatgctgttctttcaatgtggagatattttgttggagatctcgttcttgaagtttctaagatgacttgcccctacattaaatgtacagtctctttcttcatagcatttggaaatttggctgatgacaccatcaat

SEQ ID NO: 63834 - DNA, 280 bp, Glycine max
  Clone ID: 700760523H1
tgaaaaattactgcgccaggctaaagctccaagtatgtttttacaatccttcaaaaattttgtttctatgtgtgtgtatggtgatgataacttaattagtgttcatgaatacgtcaagccttactttagtggttctaaattgaaaagctctctagctggtcataatatcaccattactgatgggtatgacaagaccaattccatctttgcaatttagaaagttagcagattgtgattttctcaagagaaactttaagcagatgtctaatgttttgtgggt

SEQ ID NO: 63835 - DNA, 281 bp, Glycine max
  Clone ID: 700760524H1
cagaggttcaacaaacgctcccaacagcttcagaatctccgagactaccgcattttggagttcaactccaaacccaacacccttcttctcccccaccatgctgacgctgattacctcatcgttatccttaacgggactgccattcttaccttggtgaacaacgacgaccgagactcttacaaccttcaatctggcgatgccctaagagtccctgcaggaaccacatactatgtggttaaccctgacaacgacgagaatctcagaatgataacactcgccat

SEQ ID NO: 63836 - DNA, 147 bp, Glycine max
  Clone ID: 700760525H1
ggagaagcaaacattgaacttgttggcattaaagaacaacaacagaggcagcaacaggaagagcaacctttggaagtgcggaaatatagagctgaattgtctgaacaagatatatttgtaatcccagcaggttatccagttgtggtc

SEQ ID NO: 63837 - DNA, 188 bp, Glycine max
  Clone ID: 700760526H1
ctcgagccgttcaaatcaaatccaattgaaatcaaaaataaaaaggaaaaaagacaaagtacagacctctcaacacatggctgcttcaatcccatttacaggtatcaactcctcaagggatcttcccattcctagagaatcaaacaacccatttcccaattggtcctcaaacatgtcaaagtttgcat

SEQ ID NO: 63838 - DNA, 133 bp, Glycine max
  Clone ID: 700760527H1
cgctgctccgtagtttcgatcgacgcattcttcacttcaagatatcacaatgtctataacgcacagcctcactactccactctcttcttcttcctctgctttcttagctccttcttccttcaattgcagggga

SEQ ID NO: 63839 - DNA, 218 bp, Glycine max
  Clone ID: 700760528H1
ctccattggtccttaaacactcatcagtcatcaccatggccaagctagtcttttccctttgttttctgcttttcagtggctgctgcttcgctttcagttccagactgcagcctcagcaaaacgagtgccagatccaaaaactcaatgccctcaaaccggatacccgtatagagtcagaaggagggctcattgacccatggaaccctaacaacaagcca

SEQ ID NO: 63840 - DNA, 286 bp, Glycine max
  Clone ID: 700760529H1
tgtgccaataaagcgcagagcatgggttgaaggccagatgtctttcgatcagtctgtagtagcaattatgtctaaatgcaaagccagcatgagaatgggaaacactgatgctcaaattttgatggttccagggcgcagattcatagctcatggacattttttcaaaaatctggactcagaaagtgcgagtccaaattgttacatctgaaaagagttactggcatgtgtatgatcctgacaagtttcagatgtttgacaacagtgaaatagggctttattctaatcc

SEQ ID NO: 63841 - DNA, 285 bp, Glycine max
  unsure (1)..(285): unsure at all n locations
  Clone ID: 700760530H1
atatactatgatgagagtgcggtttcctttgttggtgttgctgggaactgttttcctggcatcagtttgtgtctcattaaaggtgagagaggatgagaataaccctttctacttgagaagctctaacagcttccaaactctctttgagaaccaaaacggtcgcattcgtctcctccagagattcaacaaacgctccccacaacttcaattgtgacgagnataccggattgtccagtttcagtcaaaacccaacacaatccttctcccccaccatgctgacgccga

SEQ ID NO: 63842 - DNA, 207 bp, Glycine max
  Clone ID: 700760531H1
gcggctttcaatttttcgaaccctcaaaaccctagtgtcagttcgatttatactctaataattacactcgcgcatagttttacgcgacttaccattgatgatcctattaatttatttggtttgaaagaaattacgtaagacaaagtgggttgtgactgggtggggtaagagagacaagtaataatggaggaatcgatagggcagaaa

SEQ ID NO: 63843 - DNA, 206 bp, Glycine max
  Clone ID: 700760532H1
ggctcgagtgatctactttttgccatcataaatagtgtttctcgtggtaaagggcaggatctatttcttcgctccttttatgaaagtttgcaactcattcaggagaagaaactccagttgccatttttgcatgctgtgatagtagggagtgatatgaatgctcagacaaagtttgaaatggaacttcgcaaatttgttgttgagaa

SEQ ID NO: 63844 - DNA, 281 bp, Glycine max
  Clone ID: 700760533H1
gctgatgttcttgcaaagcgagctcatgaatttgaaaaacatgttgctcatgaaagcctcaaggatcaaattcctgctgttgacaagttgtatactactaaggttaataagtttgcaaaaattatgaaccttagacaaagtgttgttggtgatcttaaacttcttactgatgggaagttgtatgagggtaagcatattcctgtatctaatattagtgcaggggagaatcatgtagttcaaatacccctaatggcacaggaggaaattctgtcttctagtgc

SEQ ID NO: 63845 - DNA, 103 bp, Glycine max
  Clone ID: 700760534H1
ttttctctaactcaataaaaggcaaatacgttattgagtattgacaccgaacgaaagatacgcaacagcgtctatctgtgagctatggcggaggaggaggaag

SEQ ID NO: 63846 - DNA, 120 bp, Glycine max
  Clone ID: 700760537H1
cacaggttgccgcaccttaaaaccggaaacagaagccatacgttactggatttcaagaatgtctcaatttctttctacttctttgtgtacgatgtcttaagggaaagaaaatcactctct

SEQ ID NO: 63847 - DNA, 99 bp, Glycine max
  Clone ID: 700760539H1
ctcgagccgctcgagccgctacaagtgaagtgaccatatcttaatttcaaatcataaaatacttccaccacgttatggagacccttgtgttgcttcttt

SEQ ID NO: 63848 - DNA, 255 bp, Glycine max
  Clone ID: 700760540H1
ggctcgagacttattaacactttccttagtacaatatggggaagccattcttcactctctctctttcatccctttgcttgctactcttgtcgagtgcatgctttgctattacctccagcaagttcaacgagtgccaactcaacaacctcaacgcgttggaacccgaccaacgcgttgagtccgaaggtgggtctaatgaaacaatggactctccaaaacctgagctgcaatgcgccggtgtcactgtttccaaac

SEQ ID NO: 63849 - DNA, 278 bp, Glycine max
  Clone ID: 700760541H1
atttgaatcaggagcattcatcatcctctgcatcgaatggaactcttcaatgcagaggatgatgaatgcacctgattcaaatgataatattgatctactgttgagcattgatttgttgggtctacaaggagcaggtaaagactttccaaacaagatcgtttttgatgataagcttgtgttggctaacacacaagaattctttgatggaaattgtccagtggattcttggttaccaatttttgtgaatcgtctatatcctgtaagtcaattacctgcag

SEQ ID NO: 63850 - DNA, 262 bp, Glycine max
  Clone ID: 700760542H1
gtacaatagccacgtaatccaaaccatgcagctacgaaccctgcaattcctcaactaccaaaccctttcgaaacttccgtgttctcctagaaaagcccaacaacggcaccttcttccggcgataaacggtgcggattcccgggcgccgttccaagcccggaagggccactcaatgcctccagaagagatagctgatttcaagtcctaggagggatgggcctcggagtgggtcctaccgctgctgaagctcgttgagcaatgc

SEQ ID NO: 63851 - DNA, 276 bp, Glycine max
  Clone ID: 700760545H1
ctagttcaatatcctagtataccttaataaataatttaagatactatgatgagagcacggttcccattactgttgctgggacttgttttcctggcttcagtttctgtctcatttggcattgcttactgggaaaaagagaaccccaaacacaacaagtgtctccagagttgcaatagcgagagagactcgtacaggaaccaagcatgccacgctcgttgcaacctccttaaggtggagatagaagaatgtgaagaaggtgagattccacgaccacga

SEQ ID NO: 63852 - DNA, 276 bp, Glycine max
  Clone ID: 700760546H1
atcttgctgggaaccaagagcaagagtttctaaaatatcagcagcagcagcaaggaggttcccaaagccagaaaggaaagcaacaagaagaagaaaacgaaggaagcaacatattgagtggcttcgcccctgaattcttgaaagaagcgttcggcgtgaacatgcagatagtgagaaacctacaaggtgagaacgaagaggaggatagtggagccattgtgacagtgaaaggaggtctaagagtcacagctccagccatgaggaagccacagcaag

SEQ ID NO: 63853 - DNA, 272 bp, Glycine max
  Clone ID: 700760548H1
atcctagtacaccgtattaaagaatttaagatatactatgatgagagcgcggttcccattactgttgctgggagttgttttcctggcatcagtttctgtctcatttggcattgcgtattgggacaagcagaaccccagtcacaacaagtgcctccgaagttgcaatagcgagaaagactcctacaggaaccaagcatgccacgcacgttgcaacctccttaaggtggaggaagaagaagatgcgaagaaggtcaaattccacgaccacgacc

SEQ ID NO: 63854 - DNA, 271 bp, Glycine max
  Clone ID: 700760549H1
gtttcgcaagtcctgattgcaacatagttggtgcaatgcttttggttgatacttatcataccaatcctgaaaatgcagttcgtagtatttttgttgcgcctttcagaggcgtaaggcccattcgggtggttacatttccgaataccattgtgcagattgaaccagacatgaattcaaggtttcagcttttgagtaccactaccaatggtgattttgttcaagggaaagatctcgcaatggttaaagttaatgtagcatgtgctgctgttgg

SEQ ID NO: 63855 - DNA, 275 bp, Glycine max
  Clone ID: 700760550H1
gcgatgcggatgaggcgccactcgatgtttccatttgcctgcatgcctttggtattgtggggtgtggttcgtttagtggtgtcaagtcttgcgaacgtgagggtgcatgagtggtaatcgggatgtttttgttgtcacggctccatgcttgcgcatgcaacgtgtgacatgcatccttttcattgtcaccttagccttcgtggcttaggtgctgacgattggttcctgtgttgcctacctaccaaacggtattcgtgtggctagtcagacccatt

SEQ ID NO: 63856 - DNA, 193 bp, Glycine max
  Clone ID: 700760551H1
gttgttattaagtatgtgccttacgtaggggacagcaacatggtctggatgttcaccaggctcatagtggatggcattgctgttgaccatatcatcaacaatgccatcctctatgagcctggtgaacatccagaccatgtcgtggtgcttaagtatgtgacttacgtaggggacagcaagagagccatggatg

SEQ ID NO: 63857 - DNA, 143 bp, Glycine max
  Clone ID: 700760552H1
tcctgattcaaatgataatattgatctactgttgagcattgatttgttgggtttacaaggagcaggtaaagcttttccaaacaagattgtttttgatgataaacttgtgctggctaacacacaagaattctttgctggaaatt

SEQ ID NO: 63858 - DNA, 275 bp, Glycine max
  Clone ID: 700760556H1
ctagtcctcatctctctgaaactacactccactccatctccatggtggaacacaaaaaagaagggtttttttttttgcccacaccagttgcaaaactaatatcctttcaaacggatttgatctataatggcctggtttctctcttttcccctatccactctcttttctccgtggcttctaagtcctaccaccgtgctgaggagaccaaagacagtgttgaatcagcagtgcaacgtgctctttctcatcaaatcactcatggcagcgcactcttg

SEQ ID NO: 63859 - DNA, 128 bp, Glycine max
  Clone ID: 700760557H1
caaatcctgtgaatctaatgactaccagcctgcgttctgccagtatgatgagacctggtgttcggatgtcggcatgtacgtcgatcgtcaatgcaacaggcgcttggtgcttgactgttactggtgaa

SEQ ID NO: 63860 - DNA, 134 bp, Glycine max
  Clone ID: 700760559H1
gaagagcaccaaagaaggggaaatttaagaataaataaataaaaatctgcggatttatccgttcgcaggactatagaacaagggcctgatagagaatgggagtatggctctcagatatttctgcactacaaata

SEQ ID NO: 63861 - DNA, 276 bp, Glycine max
  Clone ID: 700760560H1
gctttgcaagagcattaacccagatgaagctgttgcctatggtgcagcagtgcaggttgccattctcagtggcgatggtaatgagaaagtgcaggatctattgttgttggatgttactcctctctcccttgggttggagaccgcgggaggagtcatgactgtgttgattcccagaaacacaaccattcccaccaagaaggagcaggtattttcgacctattccgacaaccagcctggtgtgttgattcaggtctatgaaggtgaacgtacgaggtt

SEQ ID NO: 63862 - DNA, 181 bp, Glycine max
  Clone ID: 700760561H1
atcacacacaactactacaagtacttccttacaatcaaaaccaacaacaactatggcaagttatcaaaagcactacgatgatcagggtcgcaaggttgacgagtatggcaacgttgagaagcaaaccgacgaatacggcaaaccttgtccatgtgctagtgtccacttatgtagccaccag

SEQ ID NO: 63863 - DNA, 272 bp, Glycine max
  Clone ID: 700760562H1
gaaattgctggtaatactcttatgccagctttttctgttccacaggctactgccagatcttctgaaaatgcggaatcctctgcatgatctggaatttgtgttttctttcatttgtccgtttgtttaattcaataaaggaaattaggcatgaccctcttgttgagtatgctctgcctatttgaaaatttccacacctcttttaattatcgtaatgatgtgtgaagtgtgtgttattttaaaaaaaaaaaaaaaaaaaaaaaggggggccgccg

SEQ ID NO: 63864 - DNA, 282 bp, Glycine max
  Clone ID: 700760563H1
agaaaagaaggcttttttttgccaacaccagttgcaaaactaatatcctttcaaacggatttgatctacaatggcctggtttctctcttttcctctatccactctcttttttccgtggctacagagtcctaccaccgtgctgaggagaccaaagacagtgttgaatcagcagtgcaacgtgctccttctcaaagcactcatggcagcgcactcttgctgaagaaactgggactttgcttcctgagtgttgcgtatgtgtgcatggttatgattttggctctc

SEQ ID NO: 63865 - DNA, 284 bp, Glycine max
  Clone ID: 700760564H1
ctccattggtccttaaacactcatcagtcatcaccatggccaagctagttttttccctttgttttctgcttttcagtggctgctgcttcgctttcagttccagagagcagcctcagcaaaacgagtgccagatccaaaaactcaatgccctcaaaccggtaaccgtatagagtcagaaggagggctcattgagacatggaaccctaacaacaagccattccagtgtgccggtgttgccctctctcgctgcaccctcaaccgcaacgcccttcgtagaccttcct

SEQ ID NO: 63866 - DNA, 276 bp, Glycine max
  Clone ID: 700760565H1
atggtgatgataacttaattagtgttcatgaatacgtcaagccttactttagtggttctaaattgaaaagctttctagctggtcataatatcaccattactgatggtattgacaagactagtgcaactttgcaatttagaaagttagcagattgtgattttctcaagagaaactttaagcagatgtctaatgttttgtgggtagctcctgaggacaaggcgagtttatggtcacaacttcattatgtttcgtgtaataattcggaaatgcaagaag

SEQ ID NO: 63867 - DNA, 129 bp, Glycine max
  Clone ID: 700760566H1
tttctttctcgtaatctttcatttttttccctctacccttttttcgatagacacggacagcttcgtttccttcgatcatgtttcgccggaggattcccacgaggttcatgtcttggccgttgatgacag

SEQ ID NO: 63868 - DNA, 97 bp, Glycine max
  Clone ID: 700760567H1
ggaataggagagtaagtactgtttgtgaatgtctttggtttaagaactccgtcttaggtcaacttgtattctgttatacagttctcagcaataaact

SEQ ID NO: 63869 - DNA, 272 bp, Glycine max
  Clone ID: 700760568H1
atcctggtctctgtctactcttcaattattcccaacctctcacctcttcatcttcttcttccttacctttgaccagagacagagcagcactcacattcacaacgaaggtttcctattcatcagacatggtgaaggcaatcagagttcacgaactcggtggccctcaagttctgaagtgggaggatgtggaaattggagatccaaaagaaggcgaggtccgtgtgaggaacaaagccattggggttaatttcattgatgtctactttcgcaaa

SEQ ID NO: 63870 - DNA, 141 bp, Glycine max
  Clone ID: 700760569H1
tatatatactatgatgagagtgcggtttcctttgttggtgttgctgggaactgttttcctggcatcagtttgtgtctcattaaaggtgagagaggatgagaataaccctttctacttgagaagctctaacagcttccaaat

SEQ ID NO: 63871 - DNA, 186 bp, Glycine max
  Clone ID: 700760572H1
gttcaatatcctagtataccttaataaataatttaagatactatgatgagagcacggttcccattactgttgctgggacttgttttcctggcttcagtttctgtctcatttggcattgcttactgggaaaaagagaaccccaaacacaacaagtgtctccagagttgcaatagcgagagagactcg

SEQ ID NO: 63872 - DNA, 258 bp, Glycine max
  Clone ID: 700760573H1
tttagctttctcttccttcataatttctcacctttcaaatctccattcagcttcattttctgcatagaaaaaacccttttctggagaaagaatatagtcttcagctggacaaggatcattcatcttgaaagaagagtttgtgtgtgacaatctttatagttctaaggagggtgcaagagagaactgaatttgctgtgatggcaactcgtagatatgcttttggaagagctgatgaggccactcatccagactccatga

SEQ ID NO: 63873 - DNA, 237 bp, Glycine max
  Clone ID: 700760574H1
aacttattaacactttccttagttcaatatggggaagcccttcttcactctctctctttcttccctttgcttgctactcttgtcgagtgcatgctttgctattacctccagcaagttcaacgagggagaactcaacaacctcaacgcgttgaaacccgaccaccgcgttgagtccgaaggtggtcttattgaaacatggaactctcaacagcctgagcttcaattctacggtgtcac

SEQ ID NO: 63874 - DNA, 92 bp, Glycine max
  Clone ID: 700760576H1
acttctttgtgtacgatttcttaagggaaagaaaatcactctctgtgctggccacagacttcgtgaatgcttttcttttccacacaacatac

SEQ ID NO: 63875 - DNA, 228 bp, Glycine max
  unsure (1)..(228): unsure at all n locations
  Clone ID: 700760577H1
agnatagtcatgctagttgaggagatccgagtggtgggctgggatgtcagctacggtgctgaatttgttccggcgctgatgatggttacactgtcatagttcagaagaacaggaaaattggtcccgctgatgagaccgttattaccaacgcgttcacaattggtgaacctggcaagattgtactcaccatagataacctaacatccaagaagaagaaactcctctaca

SEQ ID NO: 63876 - DNA, 281 bp, Glycine max
  Clone ID: 700760579H1
ctaaacaattcaattcaatctgcctggatcatggagaggaaaacatttggggttttagtcctgcctcctccttgccttagcttctgatgtgacggtgaagagagcagaggcgaaagattgctttgacaggaggcacgggttccagggtaaatgcttattcgacaggcaatgtgcacaatgtttcaagaacgatgggttccaccgtgggcaattccgaaggccttctcggcaattcctttgcagcaggccatgttgatcgaaattactactgccaaagaggc

SEQ ID NO: 63877 - DNA, 279 bp, Glycine max
  Clone ID: 700760580H1
cgctggctttgtttgttttcttttctctcttccaactttactcaattaccattaattctcgatctcggtgtttctcaaaaggatctcatcttatcgatggaatttagcacgatgaagaagaagaagaagaagcatttgcacgatggaagaacaattgctctcaaccccgaaactgaaactttcctcgttatcaggattcccgatgcgcttgttttgcgcattgtgtctcgctcgttgatcgtgggcatggttctcgcagccttgcctttcttgggaact

SEQ ID NO: 63878 - DNA, 169 bp, Glycine max
  Clone ID: 700760582H1
cccacatttagcttgggatcttttctgctgggacagtgagaaaactttgccaaataatttttctgcagaattgctctcttgcaaattggatactgttactggccaatattatcctgagtgggctccaattaattgtcgagttcatcgacaaccaattcacatcactgaa

SEQ ID NO: 63879 - DNA, 143 bp, Glycine max
  Clone ID: 700760584H1
gaggaagaggagcagaggcagcaagatggagtgatcgttgaactctcaaagggacaaattcggcaactgagcagacgtgcaaatctaggtccagggaaaccatttccttcgaagatgaaccattcaacttgagaagccgcaac

SEQ ID NO: 63880 - DNA, 187 bp, Glycine max
  Clone ID: 700760586H1
ctcgagccgttttgataaaccgcgatcacaggttgccgcaccttaaaacctgaaacaaaagcaatcgttactttatttcaagaatctctcaatttcttcctacttctttgtgtacgatttcttaatggaaagaaaatcactctctgtgctggccacagacgtcgtgaatcatgttcttctccacaca

SEQ ID NO: 63881 - DNA, 268 bp, Glycine max
  Clone ID: 700760587H1
gacagagcaagcgttcttaagcgccatccttgagctaccaattagtgtctccattgatgcaaaagattttcatttatacaccgggggaatttatgatggagataactgtacaagtccgtatgggattaatcactttgttttacttgtgggttatggttcagcggatggtgtagattactggatagcgataaattcatggggagaagattggggagaagatggttacatttggatccaaagaaacacgggtaatttattaggagtgtgt

SEQ ID NO: 63882 - DNA, 167 bp, Glycine max
  Clone ID: 700760588H1
cttcccaaaaacacagttggaggaaccattctgcgtagtgacctattggcaaattttttgacagagggcaattttagagcaagtgttgatttgcagcgcactcatcgtatcaaaggaatgattaaaatggtggccacagttggtattcctgagaatacaggtatagc

SEQ ID NO: 63883 - DNA, 269 bp, Glycine max
  Clone ID: 700760589H1
caatctcgtaaatgtgttacgagaattgtatttgcacagtccagaggaagctcgccaattgagaaggaaagctctctctcgtattgaatggctgcaaaaagctgatgtgcctaccatagcacagattgaagagttccattcgatgcagaggatgatgaatgctcctgattcaaatgataatatcgatctactgttgagcattgatttgttgggtttacaaggagcaggtaaagcttttccaaacaagattgtttttgatgataagcttg

SEQ ID NO: 63884 - DNA, 273 bp, Glycine max
  Clone ID: 700760592H1
catggtgtcttcctcccaacacattctgttcaccggtggtgccggtttcattggcacccacaccgtcgttcagcttctcaaagctggcttcagcgtttcaataatcgacaatttcgataactccgtcatggaagcagtggaccgcgtccgccaagtggttggccctctgctttctcagaacctccaattcacccagggcgatctccggaatagggatgacttggagaaactcttctccaaaacaacatttgatgccgtgatccactttgctgg

SEQ ID NO: 63885 - DNA, 274 bp, Glycine max
  Clone ID: 700760593H1
aacttattaacactttccttagttcaatatggggaagcccttcttcactctctctctttcttccctttgcttgctactcttgtcgagtgcatgctttgctattacctccagcaagttcaacgagtgccaactcaacaacctcaacgcgttggaacccgaccaccgcgttgagtccgaaggtggtcttattgaaacatggaactctcaacaccctgagctgcaatgcgccggtgtcactgtttccaaacgcaccctcaaccgcaacggcctccat

SEQ ID NO: 63886 - DNA, 265 bp, Glycine max
  Clone ID: 700760594H1
ggaaaagcatttcttctgaagataaacctttcaacttgagaagccgcgaccccatctattccaacaagcttggcaagttgtttgagattaccccagagaaaaaccctcagcttcgggactggatgcctcctcaatggtgtggatatgaacgaaggagctctttttctgcaaacttcaattcaaaggcatagtggtactcatgataatgaaggaggagaaacattgaattgttggcattaagaaaacaacagggcagcaacagaag

SEQ ID NO: 63887 - DNA, 275 bp, Glycine max
  Clone ID: 700760595H1
agttatttgcaatagcatttttaatgagatgctcattagatatagctatgaaaaattactgcgctaggctaaagctccaagtatgtttttacaatctttcaaaaattttgtttctttgtgtgtgtatggtgatgataacttaattagtgttcatgaatatgtcaagccttactttagtggttctaaattgaaaagctttctagctggtcataatatcaccattactgatggtattgacaaaactagtgcaactttgcaatttagaaagttagcag

SEQ ID NO: 63888 - DNA, 179 bp, Glycine max
  Clone ID: 700760596H1
gaaattttgataaaccgcgatcacaggttgccgcaccttaaaaccggaaacaagagcaatcgttacttgatttcaagaatctctcaatttcttcctacttctttgtgtacgatttcttaagggaaagaaaatcactctctgtgctggccaagacttcgtgaatcattttcttttccaca

SEQ ID NO: 63889 - DNA, 272 bp, Glycine max
  Clone ID: 700760602H1
cgcaaaatgagtgccagatccaaaagctgaatgccctcaaaccggataaccgtatagagtcggaaggtgggttcattgagacctggaaccctaacaacaagccattccagtgtgtcggtgttgccctctctcgctgcatccttaaccgcaatgcccttcgtagaccttcctacaccaacggtccccaggaaatctacatacaacaaggtaatggtatttttggcatgatattcccgggatgtcctagcacttatcatgagccgcaagaatct

SEQ ID NO: 63890 - DNA, 103 bp, Glycine max
  Clone ID: 700760604H1
ggacaaaagatacaaaggcttagatgccctttgttaagtgtagaataacgggtatagtaactatgtacccttctgtaatgagtcactcaagtacctatgcggg

SEQ ID NO: 63891 - DNA, 272 bp, Glycine max
  Clone ID: 700760605H1
ctgatgctgaaatccctaacctaaaattcccctccctgatggctttaccagaggttgggttgagactgctcctttcacccgttacttccaaccttcttctccgcacagcatgtgatattgggttacttgttatagctgttcaatagggcttgcgcttcccgtgtattccacgtttaaagctattgagaacaatgacccatatgagcaacaaaggtgcctattgtattgggcagcttatggatcttttagtgctgcagaaatgtatgctgata

SEQ ID NO: 63892 - DNA, 274 bp, Glycine max
  Clone ID: 700760606H1
gttatatgctatctgaagatagagacgatgatgtagctgttgaattgcattctaagcttctaaaggagttcccaagagatctgctttctctaaagagagcacaagtcttatgcttctacatgggtctgcctggtctttctttatctcttattcagcagattctgcctcacaatgaaggagaaaattatatataacgcatgcttgcttttcctttgttggagcttggacggatggaggaagctgaggaagctgccaaaaggggatttgaaatcaa

SEQ ID NO: 63893 - DNA, 269 bp, Glycine max
  Clone ID: 700760607H1
ctagttcaatatcctagtataccttaataaataatttaagatactatgatgagagcacggttcccattactgttgctgggacttgttttcctggcttcagtttctgtctcatttggcattgcttactgggaaaaagagaaccccagacacaacaagtgtctccagagttgcaatagcgagagagactcgtacaggaaccaagcatgccacgctcgttgcaacctccttaaggtggagatagacgaatgtgaagaaggcgtaattccacg

SEQ ID NO: 63894 - DNA, 230 bp, Glycine max
  Clone ID: 700760608H1
atacggtttcaataatgttgacactggttaagcagtgatgaccactagctacctttttttaatcaaatagcttgatttcatctgcatagtcatactgtttatatactgctttgttatgttatgggtgttctcacttgattatgatcagggtttggtagaggtatgagtagctatcaatcagaggtatagatagggcgttttggtccaaagatctttggcatggtaagttg

SEQ ID NO: 63895 - DNA, 276 bp, Glycine max
  Clone ID: 700760611H1
cttgtctttgaacactcatcaccatggccaagcttgttctatccctgtgtttccttcttatcagtggctgcttcgctctgagagagcaggcacagcaaaatgagtgccagatccaaaagctgaatgccctcaaaccggataaccgtatagagtcggaaggtgggttcattgagacctggaaccctaacaacaagccattccagtgtgccggtgttgccctctctcgctgcacccttaaccgcaatgcccttcgtagaccttcctacaccaacggtc

SEQ ID NO: 63896 - DNA, 265 bp, Glycine max
  Clone ID: 700760613H1
atcctagtacaccgtattaaagaatttaagatatactatgatgagagcgcggttcccattactgttgctgggagttgttttcctggcatcagtttctgtctcatttggcattgcgtattgggaaaagcagaaccccagtcacaacaagtgcctccgaagttgcaatagcgagaaagactcctacaggaaccaagcatgccacgctcgttgcaacctccttaaggtggaggaagaagaagaatgcgaagaaggtcaaattccacga

SEQ ID NO: 63897 - DNA, 276 bp, Glycine max
  Clone ID: 700760614H1
caaaggctcaagttcacaacctggcattagttcagcttctacagataataccaagttgcatcctcaagcaacagcggtggtacctgttgtggcttcaggggttgacatcaaaatggcaggtgcaaatatgcaaaaccaggttgtgagtagccagaactctcatgctgaagctcaagggtggggttctgctggggttccaaagccagaaccactggcctggggaggtgcatcttctcaaaggatagaaccaaataatcctgctaccatgccttccca

SEQ ID NO: 63898 - DNA, 280 bp, Glycine max
  Clone ID: 700760615H1
cagaaggtgaaattccacgaccacgaccacgaccacaacacccggagagggaacctcagcaacccggtgagaaggaggaagacgaagatgagcaaccacgtccaatcccattcccacgcccacaacctcgtcaagaagaagagcacgagcagagagaggaacaggaatggcctcgcaaggaggaaaaacgcggagaaaagggaagtgaagaggaagatgaggatgaggatgaggaacaagatgaacgtcaattcccattcccacgcccacctcatcagaa

SEQ ID NO: 63899 - DNA, 278 bp, Glycine max
  Clone ID: 700760616H1
agattacacgctttttgtcatccaatttctctctcccgtgtcgtgtcgtgtcttcttctctaaaataaaaaaccctaacttctgaacctttcaccgcatcgccaccgattccctatctccactaatcaaagaaaagaaaatgagtagacgctcgagcagaactgtctacgttgggaatctacccggtgatatccgtgaaagagaagttgaagatctgtttctgaagtacggacacataacacacatcgacctaaaggttcccccaagaccacctggtt

SEQ ID NO: 63900 - DNA, 250 bp, Glycine max
  Clone ID: 700760617H1
cgaaggcactctcctgggcatgggtaaccctctcctcgacatctccgccgtcgtcgatgaagacttcttaaaaaaatatgatatcacctcgaacaatgcgattcttgcggaggacaagcacaagcctatgtatcaagaattggctgagaaatataatgtggagtacattgctggaggtgccactcagaattcaatcaaggttgctcaatggatgctccaagttcctggtgcaacaggttacatgggtggc

SEQ ID NO: 63901 - DNA, 269 bp, Glycine max
  Clone ID: 700760620H1
aaagtgcaccaatatgagccctcataacaacaacaacaacaccaacaattgttgtttggtttgccattgctcttcttctactcgttcaccaacttcaaccttgttcggcatgtctcatttttctcctccattgtcaccaccttctccttcttccccttctaggtttgagaccaaccatcatcatggtgttgtgaaatataattcggatgtgctctctgagcttatgtgttccatggagggtttgaattttggtgaggcttcacttttgt

SEQ ID NO: 63902 - DNA, 272 bp, Glycine max
  Clone ID: 700760621H1
aagagttgcagctattcttggtgaaattgcagctgagatggtctcagatagacagaagaaagaatctgcccctccagtaggtatttctgatcatggcacagagaaaacaatgtacttcttggctgaagcaacgcatcccttcagtggtgaatcagaaaaggaactgagcttttctaagggtgattttgtcgttgtgcgaaaggtgagccaatcaggatggtcagaaggcgaatgcaatggcaaagcaggatggtttccttctgcatatgtgg

SEQ ID NO: 63903 - DNA, 271 bp, Glycine max
  Clone ID: 700760622H1
tatcgagcgaatcggctcgaggtgggtagctcctgaggacacggcgagtttatggtcacaacttcattatgtttcgtgaaataatctggaaatgcaagaagcttatcttgccaatctcgtaaatgtgttacgagaattgtatttgcacagtccagaggaagctcgccaattgagaacgaaagctctctctcgtattgaatggctgcaaaaagctgatgtgcctaccatagcacagattgaagagttccattcgatgcagaggatgatgaat

SEQ ID NO: 63904 - DNA, 266 bp, Glycine max
  Clone ID: 700760623H1
caatatcctagtacaccgtattacagaatttaagatgtactaggatgagagcgcggttcccattactgttgctgggagtctgtgtcctggcatcagtttctgtctcatttggcattgcgtattgcgaaaaggagaaccccagtcacaagaagtgcctccgaagttgcaatagcgagaaagactcctacaggaaccaagcatgccacgctcgttgcaacctccttaaggttgaggaagaagaagaatgcggagatggtcaaattcca

SEQ ID NO: 63905 - DNA, 272 bp, Glycine max
  Clone ID: 700760626H1
ttcgagcgaatcggctcgagcaatatcctagtataccttactaaataatttaagatcctatgatgagagcacggatcccattactgttgctgggacttgttttcctggcttcagtttctgtctcatttggcattgcttactgggaaaaagagaaccccaaacacaacaagtgtctccagagttgcaatagcgagagagactcgtacaggaaccaagcatgccacgctcgttgcaacctccttaaggtggagaaagaagaatgtgaagaaggt

SEQ ID NO: 63906 - DNA, 273 bp, Glycine max
  Clone ID: 700760627H1
gaatgctcctgattcaaatgataatattgatttactgttgagcattgatttgttgggtttacaaggagcaggtaaagcttttccaaacaaaattgtttttgatgataagcttgtgttggctaacacacaagaattctttgatggaaattttccagtggattcttggttaccaatttttgtgaattgtctttatcctgtaagtcaattaccttcagaagctgtcgttgtaaatgttacatgtggtagtggacgtggtggtttacccaccactgc

SEQ ID NO: 63907 - DNA, 272 bp, Glycine max
  Clone ID: 700760628H1
agatcatggacaaggcgcgtgagatcaaggactacggacagcaacaaatcagcggggtccaggcttcttaattctgcactcgcacgcacatgatcgtatccatctcgtggaatatttctctctttgtctagttagtttatatttaccatttatgaatgaatgaatgcatgattgagcgttaaagttgaatttgaatctctcttttctttgtattttcgtttattgtgggtgttcgctcatcatcacttgttgtaatgtcttaattttgtgtg

SEQ ID NO: 63908 - DNA, 276 bp, Glycine max
  Clone ID: 700760629H1
aagcaaagcaatggctacttcaaagttgaaaacccagaatgtggttgtatctctctccctaaccttaaccttggtactggtgctactgaccagcaaggcaaactcagcggaaactgtttctttcagctggaacaagttcgtgccgaagcaaccaaacatgatcctccaaggagacgctattgtgacctcctcgggaaagttacaactcaataaggttgacgaaaacggcaccccaaaaccctcgtctcttggtcgcgccctctactccacccccat

SEQ ID NO: 63909 - DNA, 271 bp, Glycine max
  Clone ID: 700760631H1
aagattttgaaattgctggtaatactcttatgccagctttttctgttccacaggctactgccagatcttctgaaaatgcggaatcctctgcatgatctggaatttgtgttttctttcatttgtccgtttgtttaattcaataaaggaaattaggcatgaccctcttgttgagtatgctctgcctatttgaaaatttccacacctcttttaattgtcgtaatgatgtgtgaagtgtgtgttattttaaaaaaaaaaaaaaaagggcggccgc

SEQ ID NO: 63910 - DNA, 286 bp, Glycine max
  Clone ID: 700760632H1
tcgagttcggctctatcttttccaaacaagattgtcaatatggggaagcccttcactctctctctttcttccctttgcttgctactcttgtcgagtgcatgctttgctattagctccagcaagctcaacgagtgccaactcaacaacctcaacgcgttggaacccgaccaccgcgttgagtccgaaggtggtttgattcaaacatggaactctcaacaccctgagctgaaatgcgccggtgtcactgtttccaaactcaccctcaaccgcaatggcctccacttgg

SEQ ID NO: 63911 - DNA, 269 bp, Glycine max
  Clone ID: 700760633H1
ctgcgttctcaaacgttgttgcttgctgctgctgcatagttgatcgaaagcatgacaacatcattgtccagcatccttttcaagggaattgcagctcgttctttcaccgcccctctaactaggtcctgttatcatggaatgagatactttgctactgtatcaaatgatcctgacacacatgatgacttcaagccagctaataaacttgagaattccaacatttctttggctgatgttattgagcaggatgtcaaggataatcctgttat

SEQ ID NO: 63912 - DNA, 265 bp, Glycine max
  Clone ID: 700759945H1
tgatgtttcagcatttcttgaaagctataagggaacatcatccagaaaatgtttatgcatccatggaaacaattatgagccttgttcttgaggaaagtgaagatatatccttagacctgctgtctccactcctgggaagcactaagatagacaatgaggtagtttttccaatagtcctagtattgggggagagggtccttgaaagctgtgcaaccaagctgataccctacttggttcaagcagtgaaatcctttggtatatctgt

SEQ ID NO: 63913 - DNA, 282 bp, Glycine max
  Clone ID: 700759948H1
atttcggctcgatggagttctgagtgggcaaatcaaacttcatggcatttaagtttccttattgacaatcccaaacagtctacagtttttgatattctacttgggaatttctcaagattttgagattgctggtaatactcttatgccagctttttctgttccacaggctactgccagatcttctgaaaatgcggaatcctctgcatgatctggaatttgtgttttcttttgcttgttcgtttgtctaattcaataaaggaaattaggcatgaccctcttgtt

SEQ ID NO: 63914 - DNA, 261 bp, Glycine max
  Clone ID: 700759951H1
tgatcttctgaaaatgcggaatcctctgcatgatctggaatttgtgttttctttcgcttgttacgttgtttaattcaataaaggaaattaggcatgaccctcttgttgagtatgctctgcctatttgaaaatttccacacctcttttaattgtcgtaatgatgtgtgaagtgtgtgttattttaaaaaaaagagaagtattacaagttgaatgtatctaaatgtgtcagaaatcaagaatcaggggggcgctgcacaaatt

SEQ ID NO: 63915 - DNA, 260 bp, Glycine max
  Clone ID: 700759952H1
cccaaaaatgaagagcaccatcttctttgctctctttctcttttgtgccttcaccacctcatacctaccttcagccatcgctgatttcgtgctcgataatgaaggtaaccctcttgaaaatggtggcacatattatatcttgtcagacataacagcatttggtggaataagagcagccccaacgggaaatgaaagatgccctctcactgtggtgcaatctcgcaatgagctcgacaaagggattggaacaatcatctcgt

SEQ ID NO: 63916 - DNA, 262 bp, Glycine max
  Clone ID: 700759956H1
cactcttcactcaaaactcttgtctttcattttgctaattcccacactatggctgatacacagtaccaacaacaacaccaataccctcaccgataccctaatgatccatacgaacaacaaactagctactccactcaggtcgtcaaggcggccaccgccgtcaccgcgggcggctccctcttgatcctcgcctcgttgatccttgccggcaccatcatcgccctcaccatcgtcacaccaccgctcgtcatcttcagtccgg

SEQ ID NO: 63917 - DNA, 264 bp, Glycine max
  Clone ID: 700759957H1
gcagcattcactgaaagcactcagtagggtttgcgcgtttcagagtttgtgacgcacgcatccatggccaccaccaccaacgccgccgcagccccgccgcgccagctctcccagaaggaagccgacatccagatgatgttagccgccgacgtccacctcggcaccaaaaactgcgacttccaaatggaacgttacatcttcaagcgccgcaacgacgggatttacattattaaccttgggaagacatgggagaagcttcagtta

SEQ ID NO: 63918 - DNA, 175 bp, Glycine max
  Clone ID: 700759965H1
aaaccgcgatcacaggttatagcaccttaaaaccggaaacaaaagcaatcgttacttgatttcaagaatctctcaatttcttcctacttctttgtgtacgatttcttaagggatagaaaatcactctctgtgctggccacagacttcgtgaatcattttcttttccacacaacat

SEQ ID NO: 63919 - DNA, 257 bp, Glycine max
  Clone ID: 700759966H1
gcaatggctacttcaaagttgaaaacccagaatgtggttgtatctctcaccctaaccttaaccttggtactggtgctactgaccagcaaggcaaactcagcggaaactgtttctttcagctggaacaagttcgtgccgaagcaaccaaacatgatcctccaaggagacgctattgtgacctcctcgggaaagttacaactcaataaggttgacgaaaacggcaccccaaaaccctcgtctcttggtcgcgccctcta

SEQ ID NO: 63920 - DNA, 111 bp, Glycine max
  Clone ID: 700759967H1
caaaggtaaaagaatgagagagcaaatgctggaaggagaggttaaagtgtctcctagtgtctgtaatcctcgagccgaatcggctcgagctgcactcttcatcaagctccg

SEQ ID NO: 63921 - DNA, 260 bp, Glycine max
  Clone ID: 700759972H1
cggatgcaaagagcaacagctgaagaaaatgaagcgagaccaagaggaggatgaggaggagaagcaaacaagtaggtcatggaggaagctcttggaaaccgtatttgggaaggtgaatgagaagatagagaacaaagacactgctggttcccctgcctcttacaagctctacgatgacaaaaaagccgatttcaaaaacgcttatggttggagcaaggcactgcatggaggcgagtatcctccactcagcgaaccggata

SEQ ID NO: 63922 - DNA, 90 bp, Glycine max
  Clone ID: 700759976H1
acactttccttagttcaatatggggaagcccttcttcactctctctctttcttccctttgcttgctactcttgtcgagtgcatgctttgc

SEQ ID NO: 63923 - DNA, 263 bp, Glycine max
  Clone ID: 700759977H1
gtaaaatactgcagttctgaaatttagcccatgacacatcacatgcttcatgaactcatgggagttgatcctggaactaaccctgtttgccatttccttggaagcaaggccattttatgggtacccaatttatctatggacactgcctatcagactaacgttgttgtttaattagtccatgcatctgcatcttgggcaccataagattgtatataaaataaattatggtgtgttgtgtatgttgtgcaagacctggaacttca

SEQ ID NO: 63924 - DNA, 260 bp, Glycine max
  unsure (1)..(260): unsure at all n locations
  Clone ID: 700759978H1
ctccattggtccttaaacattcatcagtcatcaccatggccaagctagttttttccctttattttctgcttttcagtggctgctgcttcgcttttagttccagagagcagcctcaatanaacgagtgccagatccaaaaactcaatgccctcaaaccggataaccgtatagagtcataaggagggctcattgagacatggaaccctaacaacaagccattaagtgtgncggtgttgcctctctcgctgcacctcaacgca

SEQ ID NO: 63925 - DNA, 165 bp, Glycine max
  Clone ID: 700759979H1
gaaattctgagttccaacgccactaaccctatgctgacgcgacttcttgagaactgtaagagtctcaaatatctggttgatgagtgtccttttgcatttgtgaactagtatgtaatattttattcacttaaataaagcgcattactatgtgcaatgagtgtgttt

SEQ ID NO: 63926 - DNA, 254 bp, Glycine max
  Clone ID: 700759981H1
cttacattactagcacttccttagttcaatatggggaagcccttcactctctcgctgtcttccctttgcttgctactcttgtcgagtgcatgctttgctatgagctccagcaagctcaacgagcgccaacccaacaacctcaacgcgttggtccccgaccaccgcgttgagtccgaagccggtttgattcaaacatggaactctctaacaccctgagctgaaatgcgccggtgtcactgtttccaaactcaccc

SEQ ID NO: 63927 - DNA, 198 bp, Glycine max
  Clone ID: 700759983H1
cacaactgtatggaatgtcagaggcactttcctttggtttgagcaatgcagggtttcaagttagcaagtatatgccatttgggccggtagatatggttatgccttaccttctgagaagggctgaagaaaatagagggcttttggctgcatcaggttttgataggcaattgatgagaaaggagttgggaagaagattaa

SEQ ID NO: 63928 - DNA, 258 bp, Glycine max
  Clone ID: 700759985H1
ccgtgctgaggtttgttgttgtgtttgtggcctctctcagccgtctcagtctctgcctaacactcgctcatcctaaaatatgatcatttcttcgccgtaaattcgccggcaacccgagacctcaacttctcactgccgttttctcctccctcaaaaaaacaacgttagggttttcatagcttcggagacgaaggtcgtgaatctggctgaggaagccaagctcgccagagaaggtgtcacggctccctcctatgcttt

SEQ ID NO: 63929 - DNA, 239 bp, Glycine max
  Clone ID: 700759987H1
cactcagattcgcataatggtgtctctaatttcaacatctccatcttcttcatctttcaacattcatcccttcttctctccaatgggcgtccaattcagacacaactgcgtaacctacaaacggacaacggtacggtgcgccgtcaccagcgccgacgcatcttctccgccgtcaacgtcgtttgccaaggaacctcacaaatacttcgaccacgtcatcatcaccgttcgcgccggtg

SEQ ID NO: 63930 - DNA, 258 bp, Glycine max
  Clone ID: 700759988H1
cttgaccaagattgacaggcgatctggtaaggagcttgagaaggagcccaaattattgaagaatggtgatgcaggtatggttaagatgattccaaccaagcccatggtggttgaaactttctctgagtatcctccccttggtcgttttgctgtgagggacatgcgtcaaactgtggctgtcggagtcatcaagagtgttgagaagaaagaccccaccggagccaaggtcaccaaggccgctgccaagaagaagtgatt

SEQ ID NO: 63931 - DNA, 257 bp, Glycine max
  Clone ID: 700759989H1
gtagaatactgcagttctgaaatttagcccatgacacatcacatgcttcatgaactcatgggagttgatcctggaactaaccctggtttgccatttccttggaagcaaggccattttatgggtacccaatttatctatggacactgcctatcagactaacgttgttgtttaattagtccatgcatctgcatcttgggcaccataagattgtatatacaataaattatggtgtgttctgtatgttgtgcaagacctgg

SEQ ID NO: 63932 - DNA, 251 bp, Glycine max
  Clone ID: 700759990H1
catttctatcgacaaattgtaccttgttgtgcatattttgctacaaagtctcgattttgagcttgtgtggtcatctgggtacgtgtctgtgtcatctcacacccacgcagctgtacttgtacagatcccatggctgccttgtcgcgaattgtagaaattagggcttaggtcaaagcctcaagcttatctttgtatgttacattcccttaatcaacattgaaacatgtcgtctgctggtgtcacactcttag

SEQ ID NO: 63933 - DNA, 260 bp, Glycine max
  Clone ID: 700759992H1
atcggatgcaactttggtggttgcaataataaactattttaggaagctttaaaacctgccaatctcataattcttccctcgatcaatcatcaatattcattattattctccttgattcctttctggttttttcatttcttttatcttttaatattttgtttttaaatcatatccctgaaagtacacttttcaaatcccaactctctaagcaatttttctctaagaataggaagaagaaaaataacaaaagggttgggctg

SEQ ID NO: 63934 - DNA, 261 bp, Glycine max
  Clone ID: 700759994H1
atgagagtgcggtttcctttgttggtgttgctgggaactgttttcctggcatcagtttgtgtctcattaaaggtgagagaggatgagaataaccctttctacttgagaagctctaacagcttccaaactctctttgagaaccaaaacggtcgcattcgtctcctccagagattcaacaaacgctccccacaacttgagttacttcgagactaccggattgtccagtttcagtcaaaacccaacacaatccttctcccccac

SEQ ID NO: 63935 - DNA, 261 bp, Glycine max
  Clone ID: 700759996H1
tggaagatatcgcacattcagcttgggacctaatttgctgggacagtgagaaaaccttgccagataatttttctgcagaattgctctcttgcaaattagatactgttactggccaatattatcctgagtgggctccaattaattgtcgagttcatcgacaaccaattcacatcactgaaggaaattatgtcagaaagcaagatgtcagcattgaatatgatgcatgtaccattccaaatgattgtgggtcacatggtgttg

SEQ ID NO: 63936 - DNA, 272 bp, Glycine max
  Clone ID: 700760001H1
cgacgggaacttcatgaatggactaacaacacttgttgggaaggcaatgcccagtttagtgacacaaataatttagcttctccactagtcgtctgtagctctgtggatcagagaatggaactccatctgcggtcaacttgatccctggctccataggggtttcacatggtttggctcccatcaaacctgtctcattcaacaagtccaaaacatacttcctttgtgataggaagatccccttctttgagtacataacctcaatacccaagaag

SEQ ID NO: 63937 - DNA, 279 bp, Glycine max
  Clone ID: 700760002H1
attcggctcgagcttaattattaacacttccttagttcaatatggggaagcccctcactctctctctttcttccctttgcttgctactcttgtcgagtgcatgctttgctattagctccagcaagaccaacgagtgccaactcaacaacctcaacgcgttggaacccgaccaccgcgttgagtccgaaggtggtttgattcaaacatggaactctcaacaccctgagctgaaatgcgccggtgtcactgtttccaaactcaccctcaaccgcaatggcc

SEQ ID NO: 63938 - DNA, 267 bp, Glycine max; identical to SEQ ID NO: 60857
  Clone ID: 700760003H1

SEQ ID NO: 63939 - DNA, 264 bp, Glycine max
  Clone ID: 700760005H1
ctcgagcgtgctgagttggaaccaagaaaaagtcaaaggtctgctgcagagatgacatctagctttagtgaggatgaaacggctgaaaccagttcctcagcggattaagtgttgttgtcagatatgatatttgtagggtttctctatgccattggttttgtacagtctatagagacagatccattttgcacagtaacatgtagaaagacacactaacatgactaacttgatttgctgttgtgcttgcttatttgcttctgtaac

SEQ ID NO: 63940 - DNA, 264 bp, Glycine max
  Clone ID: 700760006H1
actcgagcgaatcggctcgagaagcagaagaggctcaaggaccgcagcagcaactacaagacagtcaccagaagactcgtcacttcaatgaaggagacgtactagtgattcctcctggtgttccttactggacctataacactggcgatgaaccagttgttgccatcagtcttcttgacacctctaacttcaacaatcatcttgatcaaaaccccagagtattttaccttgctgggaacccagatatagagcacccagagacca

SEQ ID NO: 63941 - DNA, 146 bp, Glycine max
  Clone ID: 700760007H1
caggttgccgcaccttaaaaccggaaacaaaagcaatcgttacttgatttcaagaatctctcaatttcttcctacttctttgtgaacgatttcttaagggaaagaaaatcactctctgtgctggccacagacttcgtgaatcattt

SEQ ID NO: 63942 - DNA, 266 bp, Glycine max
  Clone ID: 700760008H1
agatgtttgacagcagtgagataggtctttattctaatcccactttggaagatatcccacattcagcttgggaccttttttgctgggacagtgagaaaactttgccaaataattttgctgcagaattgctctcttgcaaattggatactgtcactggccaatattatcctgagtgggctccaattaattgtcgagttcatcgacaaccagttcacatcactgaaggaaattatgtcagaaagcaagatgtcagcattgaatatgat

SEQ ID NO: 63943 - DNA, 267 bp, Glycine max
  Clone ID: 700760009H1
agcgtgaaaggacacacctgctgttggcttgttgttcaaggatggcaatttgtaagaaagatgtttggagagttgaatgtggaatcccttctggatttccgctcacagttatttgcaatagcatttttaatgagatgctcattagatatagctatgaaaaattactgcgccaggctaaagctccaagtatgtttttacaatccttcaaaaattttgtttctttgtgtgtgtatggtgatgataacttaattagtgttcatgaatacg

SEQ ID NO: 63944 - DNA, 227 bp, Glycine max
  Clone ID: 700760010H1
cagatggaaacaaatttgtttaaatgtccctgatgatgttgaaactctaaaggttccatgttgggatcttaagatttctcaatctaaaattgcacttcccaaaaacacagttggtaagaaccattctgcgtagtgacctattggcaaatttttgacagagggcaattttagagcaggtgttgatttgcagcgcattcatcgtatcaaaggaatgattaaaatggtgg

SEQ ID NO: 63945 - DNA, 265 bp, Glycine max
  Clone ID: 700760011H1
actctccgcaagaatgcaatgttcgtgccacactacaacctgaacgcgaacagcataatatacgcattgaatggacgggcattgatacaagtggtgaattgcaacggtgagagagtgtttgatggagagctgcaagagggacgggtgctgatcgtgccacaaaactttgtggtggctgcaagatcacagagtgacaacttcgagtatgtgtcattcaagaccaatgatacacccatgatcggcactcttgcaggggcaaactcat

SEQ ID NO: 63946 - DNA, 104 bp, Glycine max
  Clone ID: 700760012H1
agcgaggaaagtatcgggctatgtaactatgactagagcttcaactatgaataaataaatcgacagcatatgatgcttttgtttacaaaaaaaaaacaaagaaa

SEQ ID NO: 63947 - DNA, 266 bp, Glycine max
  Clone ID: 700760013H1
cattgtctttgaacactcatcaccatggccaagcttgttctttccctttgtttccttcttttcagtggctgcttcgctctgagagagcaggcacagcaaaatgagtgccagatccaaaagctgaatgccctcaaaccggataaccgtatagagtcggaaggtgggttcattgagacctggaaccctaacaaacagccattccagtgtgccggtgttgccctctctcgctgcacccttaaccgcaatgcccttcgtagaccttccta

SEQ ID NO: 63948 - DNA, 265 bp, Glycine max
  unsure (1)..(265): unsure at all n locations
  Clone ID: 700760014H1
atctcgagcgattcggctcgagaaagaaagagaaagagaaacctnaaagatatccgaaagaccttgatccaactcatcatcgtgttcgtcttcttcttcttcttcttccttcaactcgcttttcttccaaccaggacatggcagcagatgaagatatgtcagctttgaagtctaagctgagccaatcaaattaaacttggaagaaggagatggaaagaagccaatctcaagtggatgtattgcaggcaaggataatggaggtaaa

SEQ ID NO: 63949 - DNA, 210 bp, Glycine max
  unsure (1)..(210): unsure at all n locations
  Clone ID: 700760015H1
aaaatggccaacaagaaaatgaagaaggaacaatattnctgtgaccatccacctgcatcatgggattggaggaaaaaaggtgtcatcacccaagtaaagtaccaagggggctgtggaagcggttgggcgttttctgccacgggagccatagaagcagcacatgcaatagcaacaggagaccttgttagcctttctgaacaagaactcgta

SEQ ID NO: 63950 - DNA, 264 bp, Glycine max
  Clone ID: 700760016H1
cctcaggaaccacatactatgtggtcaaccctgacaacaacgaaaatctcagattaataacactcgccatacccgttaacaagcctggtagatttgagagtttcttcctatctagcactgaagctcaacaatcctacttgcaaggattcagcaggaacattttagaggcctcctacgataccaaattcgaggagataaacaaggttctgtttagtagagaggaagggcagcagcaaggggagcagaggctgcaagagagcgtga

SEQ ID NO: 63951 - DNA, 156 bp, Glycine max
  Clone ID: 700760018H1
cgaacagcataatatacgcattgaatggacgggcattgatacaagtggtgaattgcaacggtgagagagtgtttgatggagagctgcaagagggacgggtgctgatcgtgccacgaaactcttgtggtggctgcaagatgcacagagtgcacaact

SEQ ID NO: 63952 - DNA, 264 bp, Glycine max
  Clone ID: 700760019H1
attgctggtaatactcttatgccagctttttctgttccacaggctactgccagatcttctgaaaatgcggaatcctctgcatgatctggaatttgtgttttctttcatttgtccgtttgtttaattcaataaaggaaattaggcatgaccctcttgttgagtatgctctgcctatttgaaaatttccacacctcttttaattgtcgtaatgatgtgtgaagtgtgtgttattttaaaaaaaaaaaaaaaaaagggcggccgccg

SEQ ID NO: 63953 - DNA, 241 bp, Glycine max
  Clone ID: 700760020H1
tgcttctctctctgtgttcttttcctcattcatttgttctaactgtagtgctcacgaagcacttcaagatcgaatgcccaccaaagcaaaaccaaatatttctccaaaggccgaatcttttcgccctttataaccaaatcaagaaaccccagatctcgggtatagcttgtgatcttgaattttttgtattttgttcttgtttaatttcttctcttgtctttgaacattacattcccggaaa

SEQ ID NO: 63954 - DNA, 143 bp, Glycine max
  Clone ID: 700760021H1
ctcgagcgtctcgagccgcttccagcaagttatgggtttccttgtgttgcttcttttctccctcataggtctctcttctagttccagcatatcaactcattgttccatattggaccttgacttaaccaagtttaccacacagc

SEQ ID NO: 63955 - DNA, 265 bp, Glycine max
  Clone ID: 700760022H1
aaagttgaacaaaactcattttccaactacatttcttccaccaactcatagaatcctcatatctgttcccaaaagcttgtttgtgagaatggcttcgggtgaaaagaaattgccacctcaacaacaacaaacacagcctgggaaggagcatgctatgaatccagtaccacaattcactagacctgactacaagccttcaaataaacttcaaggaaagatagcattagtgactgggggtgactctgggaattggacgagcggtgtg

SEQ ID NO: 63956 - DNA, 264 bp, Glycine max
  Clone ID: 700760023H1
attctctccattggtccttaaacactcatcagtcatcaccatggccaagctagttttttccctttgttttctgcttttcagtggctgctgcttcgctttcagttccagcgagcagcctcagcaaaacgagtgccagatccaaaaactcaatggcctcaaaccggataagcgtatagagtcagaaggagggctcactgagacatggaaccctaacaacaagccattccagtgtgccggtgttgccctctctcgctgcaccctcaa

SEQ ID NO: 63957 - DNA, 261 bp, Glycine max
  Clone ID: 700760024H1
gcaacagtgagaacaccattgaattttgattctagcaagcagagcttttgtcaattttctattgaccttctcggtggaggaattttagtggacaaaactggagattggatcacacttatacaaaattctccaattagtaacttgttgagagttgctgcttggaagaaaggctgtttaatggttaagattgtgatgtctgggaatgcagcagtcaaaaggagtgattgggcctcattggtacaagtgtttttaacaaacagc

SEQ ID NO: 63958 - DNA, 257 bp, Glycine max
  Clone ID: 700760025H1
gttcaatatcctagtataccttaataaatagtttaagatactatgatgagagcacggttcccattactgttgctgggacttgttttcctggcttcagtttctgtctcatttggcattgcttactgggaaaaagagaaccccaaacacaacaagtgtacccagagttgcaatatcgagagagactcgtacaggaaccaagcatgccacgctcgttgcaacctccttaaggtggagaaagaagaatgtgaagaaggtga

SEQ ID NO: 63959 - DNA, 115 bp, Glycine max
  Clone ID: 700760029H1
cacacacacacacactgagaataatggcttctatcctccactacttgtgagcgcggtctctttgtgtgtgtttgcttttgctcttatgcgactgcgtccccattccccaacacca

SEQ ID NO: 63960 - DNA, 112 bp, Glycine max
  Clone ID: 700760031H1
caacctccaaaacacaacaccacaaggaaccatacaacccttgagagcttcaaatctcatgtatatacatatattaacctttcctggtgctaacaagtctggtattcatgag

SEQ ID NO: 63961 - DNA, 205 bp, Glycine max
  Clone ID: 700760032H1
ctctccgcaagaatgcaatgttcgtggcacactacaacctgcacgggaacagcttatatacgcattgaatcgacgggcattgataccagtggtgaattgcaacggtgacagaatgtttgatagagagctgcagagggacgggtgctgatcgtgccacaaaactttgtggtggctgcaagatcacagagtgacaacttcgagtatg

SEQ ID NO: 63962 - DNA, 264 bp, Glycine max
  Clone ID: 700760033H1
ataaagatgagtttgaagaacaacatggtggtgctaaaggtgtgtttgttgcttcttttccttgtgggggttacagctgcacgcatggaactgagcttcttcaaaagtgatcagtcatcaagttatgatgatgatgagtattcaaaaccatgctgtgatctctgcatgtgcacacgctcaatgcctcctcaatgcagctgtgaagatattaggctgaattcatgccactcagattgtaagagctgtatgtgcacacgctcacag

SEQ ID NO: 63963 - DNA, 115 bp, Glycine max
  Clone ID: 700760037H1
ccatggccaagctagttttgacccggtgttttctgcttttcagtggctgctgcatcgctttaagttccagagagcagcctcagacaaacgagtgccagatccaaaaactcaatgc

SEQ ID NO: 63964 - DNA, 148 bp, Glycine max
  Clone ID: 700760039H1
acacatacccccaactaacaataattccttcacttgcagaacttagttctctgttgcatcatcatcatcttcattagtgttagccctaaacttcaccttcaaccattaccacagtgccaccacacagtgtccaagtgcacacaacaac

SEQ ID NO: 63965 - DNA, 262 bp, Glycine max
  Clone ID: 700760040H1
gaaatggcgtacctaaacgctcggcgcaccttagcatataggctggcaggagctctgtcttcgtcatccgcaagcgcgtctcgctgtcgcttcgcattggcgttgcaccacgccaaacaaaccgtacccattcctcacccggcgagttctgcggttcggactcaatcttcgggttcgggttactcgcccctgaacgacccctccccgaactggagcaaccgtcccccgaaggagaccattcttctcgatggctgcgactacg

SEQ ID NO: 63966 - DNA, 255 bp, Glycine max
  unsure (1)..(255): unsure at all n locations
  Clone ID: 700760041H1
gttccacactgcatacgattctccgntgagaaccaaactttctttagctatctttttctttattcttttagctntattttcaaacctagcctttggcaaatgtaaagaaaccgaggtagaagaagaagaccctgagctcgtaacatgcaaacaccaatgccaacagccacagcaatacactgagggtgacaagcgggtatgcttgcaaagatgtgacaggtatcatcgtatgaagcaagagcgagagaaacaaat

SEQ ID NO: 63967 - DNA, 263 bp, Glycine max
  Clone ID: 700760042H1
ctgacgctgattacctcatcgttatccttaacgggactgccattcttaccttggcgaacaacgacgaccgagactcttacaaccttcaatctggcgatgccctaagagtccctgcaggaaccacatactatgtggttaaccctgacaacgacgagatcctcagaatgataacactcgccatacccgttaacaaacccggtagatttgagagtttcttcctatctagcactcaagctcaacagtcctacttgcaagggttcagc

SEQ ID NO: 63968 - DNA, 181 bp, Glycine max
  Clone ID: 700760045H1
tattttgataaaccgcgatcacaggttgccgcaccttaaaaccggaaacaaaagcaatcgttacttgatttcaagaatctctcaatttcttcctacttctttgtgtacggtttcttaagggaaagaaattcactctctgtgctggccacagacttcgtgaattatcatctattccacacaa

SEQ ID NO: 63969 - DNA, 206 bp, Glycine max
  Clone ID: 700760049H1
agtggaagtagtagcaagtacgtcgtatatgtggttgatctttttgctggttgattgttttggtccctccaattgtcagatctgaatcaccggactcactcttcacactcactcacactgaatggcttctgaaggcgaccatcaccaccaccaccaccaccatcaagatcacgatcatcatcatcatgatcatgatcagcatcatc

SEQ ID NO: 63970 - DNA, 260 bp, Glycine max
  Clone ID: 700760056H1
ggagttctgagtgggcaaatcaaacttcatggcatttgagtttccttattgacaatcccaaacagtctacagtttttgatattctcttgggaatttctcaagattttgagattgctggtaatactcttatgccagctttttctgttccacaggctactgccagatcttctgaaaatgcggaatcctctgcatgatctggaatttgtgttttcttttgcttgttcgtttgtttaattcaataaaggaaattaggcatgacc

SEQ ID NO: 63971 - DNA, 261 bp, Glycine max
  Clone ID: 700760057H1
ccttagttcaatatggggaatcccttcattctctctctttcttccctttgcttgctactcttgtacagtgcatgctttgctattagctccagcaagctcaacgagtgccaactcaacaacctcaacgcgttggaacccgaccaccgcgttgagttcgaaggtggtttgattcaaacatggaactctcaacaccctgagctgaaatgcgccggtgtcactgtttccaaactcaccctcactctcaatggcctccacttgcca

SEQ ID NO: 63972 - DNA, 257 bp, Glycine max
  unsure (1)..(257): unsure at all n locations
  Clone ID: 700760058H1
gcagtagttctagttctctttctttcactcactctctgacctatgnnataacannaaacaaaaccagctcgtgctggaaccttacgttgtgatactcgtttgaagagtagagaaacttcaaactttcaactttcaaagccacattattttctccatgaacacactctgttttgtctgttgttgttccaatgaaggcatgtgagaaggtattggatccgcagctatggcacgcgtgtgcaggtggcatggttcagatg

SEQ ID NO: 63973 - DNA, 262 bp, Glycine max
  Clone ID: 700760060H1
cttcagagagggtgatttgatcgcagtgcctactggtgttgcatggtggatagataacaaagaagacactcctgatgttgccgtttctattattgacaccaacagcttggtgaaccagctcgaccagatgcctaggaagattctatcttgctgggtaccaagagcaagagtttctagaatatcagcagcagcagcaaggaggttcccaaagccagagaggagagcaacaagaagaagataacgaaggaagctacatattgag

SEQ ID NO: 63974 - DNA, 263 bp, Glycine max
  Clone ID: 700760063H1
ggcaacagtgagaacaccattggattttgattacagcaagcagagcttttgtcaattttctattgaccttctcggtggaagaattttagtggacaaaactggagattggatcacacttatacaaaattcttccatttagtaacttgttgagagttgctgcttggaagaaaggctgtttaatggttaagattgtgatgtctgggaatgcagcagtcaataggagtgattgggcctcattggtacaagtgtttttaacaaacagc

SEQ ID NO: 63975 - DNA, 258 bp, Glycine max
  Clone ID: 700760064H1
cattctgacaaccatctatggtgctccatcaatcgctgtacacgcacatcagtgccaccacaacttaagagcaatcaaccaatggggatttcaccatttcaattttcaggctccattcttccaaattcactgcgctccttcttgtttgacccagaaacaagcaatgatctagttgtggaggagaaggtggtaagcattgaggaaaacatggtagaaagcagcaaggaagagatagtgaatagagccaactgggtagag

SEQ ID NO: 63976 - DNA, 261 bp, Glycine max
  Clone ID: 700760065H1
ggcaacagttagaacaccattgaattttgattctagcaagcagagcttttgtcaattctctattgatcttcttggtggaggaattttagtggacaaaactggagattggatcacacttatacaaaattctccaattagtaacttgttgagagttgctgcttggaagaaaggctgtttaattgttaaccgtgagatgtctgggaatgcagcagtcaaaaggagtgattgggcctcattggtacaagtgtttttaacaaacag

SEQ ID NO: 63977 - DNA, 260 bp, Glycine max
  Clone ID: 700760066H1
ggcaacagtgagaacaccattgaattttgattctagcaagcagagcttttgtcaattctctattgatcttcttggtggaggaattttagtggacaaaactggagattggatcacacttatacaaaattctccaattagtaacttgttgagagttgctgcttggaagaaaggctgtttaatggttaagattgtgatgtctgggaatgcagcagtcaaaaggagtgattgggcctcattggtacaagtgtttttaacaaaca

SEQ ID NO: 63978 - DNA, 260 bp, Glycine max
  Clone ID: 700760069H1
cttgaatacaatactcagcatggctaagcttgttctttccctttgttttctgcttttcagtggctgctgcttcgcttccagtttcagagagcagccacagcaaaacgagtgccagatccaacgcctcaatgccctcaaaccggatatacgtatagagtcagaaggtggcttcattgagacatgtaaccctaccaacaagccattccagtgtgccggtgttgccctctctcgctgcaccctcaaccgcaacgcccttcgca

SEQ ID NO: 63979 - DNA, 163 bp, Glycine max
  Clone ID: 700760072H1
actagttcaatatcctagtatgccttaatgcataatttgagatactatgatgatagcacggatcccattactgttgctgggacttgtttgcctggctgcagtttctgtctcatttggcattgcttactgggcaaaagaggaccccttacactacaagtgtctc

SEQ ID NO: 63980 - DNA, 262 bp, Glycine max
  Clone ID: 700760074H1
ctgaaacaaagaagtgagaatatcagcaaaaagtagcatgtgatgcagctcccccgaagcttatctcagcagcagatactcaaccctgtttgagtagccgagaataacaccaatgggagaggatgaaaagaaaccagaggaacaacccaaggcataggagaaaaaaccagaggaagagaagaagaaagaagaagcagcagcagcggaaaaaccaagcgaagagaaaaaaccggaacaagagtcgaaagaggaagttgctgct

SEQ ID NO: 63981 - DNA, 166 bp, Glycine max
  Clone ID: 700760075H1
gcgggatggtctggtgccgttggcccatctggggcccaagacactcggaaaactgggtttaacatcatgtctggaactttcatgtcctgtccccaaaaaagtggtttgcgtgcggttatgaaagctgcgaatccagatcggagtccaagtgctatcaaatctgcac

SEQ ID NO: 63982 - DNA, 165 bp, Glycine max
  Clone ID: 700760078H1
tatacactcatcagtcatcaccatggccaatctagttgtgtcccaatgttgtctgcttatcagtggctgctgcatcgctttcagttccagagagtattcgcagtaagacgagtgacaggatccaagtactcaatgccctcaaaccggataaccgtatagagtcag

SEQ ID NO: 63983 - DNA, 168 bp, Glycine max
  Clone ID: 700760079H1
gaaattctgagttccaacgccactaactttatgctgacgcgacttcttgagaactgtaagagtctcaaatatctggttgatgagtgtccttttgcatttgtgaactagtatgtaatactttattcacttaaataaagcgcattactatgtgcaatgagtgtgtttaaa

SEQ ID NO: 63984 - DNA, 261 bp, Glycine max
  unsure (1)..(261): unsure at all n locations
  Clone ID: 700760080H1
canagtcgtgcattctcgcatctttcggggaagccatgggcggatgatttataagccatggatgcgtatgggatctgtgaagatttttctctcttctctgttattcccaattgtgtttacctgttcgcatgggttcttagttggggtttcagcccttttgctcatcataaacaaataagcaactactgggtgtagcttttggtgtgtcttaagtagcgctgaaatagagacaatcggtatgggttcgtagtcttgcgttcg

SEQ ID NO: 63985 - DNA, 260 bp, Glycine max
  Clone ID: 700760081H1
tgtttttgatattctcttgagagattcccaagagaatatcaaaaactgtagactgtttgggaatctctcaagattttgaaattgctggtaatactcttatgccacctttttctgttccacaggctactgccagatcttctgaaaatgcggaatcctctgcatgatctggaatttgtgttttctttcgcttgttcgtttgtttaattcaataaaggaaattaggcatgaccctcttgttgagtatgctctgcctatttgaa

SEQ ID NO: 63986 - DNA, 246 bp, Glycine max
  Clone ID: 700760082H1
ctttccttagttcaatatggggaagcccttcttcactctctctctttcttccctttgcttgctactcttgtcgagtgcatgctttgctattacctccagcaagttcaacgagtcccaactcaacaacctcaacgcgttggaacccgaccaccgcgttgagtccgaaggtggtcttattgaaacatggaactctcaacaccctgagctgcaatgcgccggtgtcactgtttccaaacgcactctcaa

SEQ ID NO: 63987 - DNA, 113 bp, Glycine max
  Clone ID: 700760083H1
gtgctggtggcttctttctcaacggacacgatttctgccatttccattttcttcagattccgtctctgtctgcccatctcatctcatctcattttgttttggtccaccctcat

SEQ ID NO: 63988 - DNA, 174 bp, Glycine max
  Clone ID: 700760087H1
gaaattctgagttccaacgccactaaccctatgctgacgcgacttcttgagaactgtaagagtctcaaatatctggttgatgagtgtccttttgcatttgtgaactagtatgtaatattttattcacttaaataaagcgcattactatgtgcaatgagtgtgtttaaatataaa

SEQ ID NO: 63989 - DNA, 259 bp, Glycine max
  Clone ID: 700760089H1
agaaaagggaagtgaagaggaagatgaggatgaggatgaggaacaagatgaacgtcaattcccattcccacgcccacctcatcagaaggaagagcgaaagctagaggaagatgaggatgaggagcagcagcgagagagcgaagaaagtgaagattctgagttacgaagacataagaataagaacccttttctcttcggctctaacaggttcgaaactctcttcaaaaaccaatatggtcgcattcgcgtcctccagagg

SEQ ID NO: 63990 - DNA, 253 bp, Glycine max
  Clone ID: 700760090H1
cactaataatgacacttccttagttcaatatgggggaacccttcactctctctctttcttccctttgggtgctaactcctgtcgagtggcatgccttggtagtaactccagcaagctcaacgatcggcaactcaacaacctcaacgcgttggaacccgaccagcggcgtgagtccgaagtggttttgattcaacatggaactctcaacaccctgagctgaaatgcgccggtgtcaatgttgcaaactcacctc

SEQ ID NO: 63991 - DNA, 259 bp, Glycine max
  Clone ID: 700760091H1
ccatggcggaccaatacccaagcccggcccaagcccacagagccactgccccacccccctccctctcagccgcgtttctccaaaaactccaggaccgggcccccaactcaacccagctcgccggcatcttacccctcctcgtaaccgcctccgtcttcctcctcctgacgggcctaactgtcgcaggggccgtcctgggcctcatatttttcctccccttaatcatcgtatcaagcccagtgtgggtcccagccggcac

SEQ ID NO: 63992 - DNA, 243 bp, Glycine max
  Clone ID: 700760092H1
gtcctacttgctgggcttcagccataatattctagagacctccttccatagcgaattcgaagagataaacagggttttgtatggagaggaagaggagcagaggcagcaagagggagtgatcgtggaactctcaaaggaacaaattcggcaactgagcagacgtgcccaaatctagttcaagggaaaccatttcctccgaagatgaaccattcaacttgagaagcgcaacccatctattccaac

SEQ ID NO: 63993 - DNA, 257 bp, Glycine max
  Clone ID: 700760094H1
ccattggtccttaaacactcatcagttctcaccatggccaagctagttttttccctttgttttctgcttttcagtggctgctgcttcgctttcagttccagagagcagcctcagttaaacgagtgccagatccaaaaactcaatgccctcaaaccggataaccgtatagagtcagaaggagggctcattgagacatggaaccctaacaacaagccattccagtgtgccggtgttgccctctctcgctgcaccctcaa

SEQ ID NO: 63994 - DNA, 245 bp, Glycine max
  Clone ID: 700760095H1
ataaaattcttccaccaagttatgggtcttcttgtgttgcttcttttctccctcttaggtctctcttctagttccagcatatcaactcatcgttccatattggaccttgacctaaccaagtttaccacacagaaacaggtgtcttcactgttccaactatggaagagtgagcatggacgtgtctaccataaccacgaagaagaggcaaagagacttgagattttcaagaataattggactatatc

SEQ ID NO: 63995 - DNA, 260 bp, Glycine max
  Clone ID: 700760096H1
tagttcaatatcctagtataccttaataaataatttaagatactatgatgagagcacggttcccattactgttgctggtacttgttttcctggcttcagtttctgtctcattttgcattgcttactgggaaaaagagaaccccaaacacaacaagtgtctccagagttgcaatagcgagagagactcgtacaggaaccaagcatgccacgctcgttgcaacctccttaatgtgtagagagaagaatgtgaagaaggtgat

SEQ ID NO: 63996 - DNA, 261 bp, Glycine max
  Clone ID: 700760101H1
tgaccaagttcacaatcctcctcatctctcgtctcttctgcatcgcccacacttgcagcgcctccaaatggcagcaccagcaagatagctgccgcaagcagctccagggggtgaacctcacgccctgcgagaagcacatcatggagaagatccaaggccgcggcgatgacgatgatgatgatgacgacgacaatcacattctcaggaccatgcggggaagaatcaactacataaggaggaacgaaggaaaagacgaggacg

SEQ ID NO: 63997 - DNA, 285 bp, Glycine max
  Clone ID: 700760102H1
tgaccaagttcacaatcctcctcatctctcttctcttctgcatcgcccacacttgcagcgcctccaaatggcagcaccagcaagatagctgccgcaagcagctccagggggtgaacctcacgccctgcgagaagcacatcatggagaagatccaaggccgcggcgatgacgatgatgatgatgacgacgacaatcacattctcaggaccatgcggggaagaatcaactacataaggaggaacgaaggaaaagacgaagacgaagaagaagaaggacacatgcaga

SEQ ID NO: 63998 - DNA, 281 bp, Glycine max
  Clone ID: 700760103H1
cggctcgaggttgggctgtgtccctatcatttgccttcttctcttcttcttcttcctccctccgcgcattctctttcttccttttaatctttcaatttcttttcccctttttctcttttctgactaactcaatcaatttagtgtggcttccgggaacaattcaggaatcatggctagggttttagctcagtctactggtatgcctggcctactgagtgggcgaaggcatgggccgcataaaggatcaggaaaaacgaaaagatctgttaaaatgatgagta

SEQ ID NO: 63999 - DNA, 282 bp, Glycine max
  Clone ID: 700760104H1
tgtcagcttgggatgtcccagtaatcatattcttaatgaaatccctatgtccaggcgcatcaataagaatatgattactgggacatcccaagctgactgtgctgttcttatcattgattcgaccactggtggttttgaagctgctatttccaaggatggacacactcgtgaacatgctctgctttcattcacccttggtgtgaaacagatgatttgctgctgtaacaaaatggatgctactacacccaagtattccaaggccaggtatgatgaaattgtgaa

SEQ ID NO: 64000 - DNA, 281 bp, Glycine max
  Clone ID: 700760105H1
atcgttttctttgaaacgcacagcttcaatcaccgaccacaccacccatcaacgacatgcttcctctttcccttctcaagactgcccaaggccaccctatggcaactcacttttcattctcttctcttttatttctaacttattattattatgatggtgatggtgatgttgatgatgatgtaacagttggtggaactgaaaaatggggagacatataacgggcatttggttaattgcgacacatggatgaacatccatctgcgagaagtcatttgtacatc

SEQ ID NO: 64001 - DNA, 281 bp, Glycine max
  Clone ID: 700760106H1
tgaagcgctacactaatgcaacacccttgaatgttgtatcttctcctggtagcatgaatgacagtatcaagcagttaactgctgaggcttctgatttggattcaactgcaacatctagattcaagatgccaaggattgaggctaatcattcccttttggaagaaattagggaggttaatcagcgacttattgacacggtagtagacataagtaatgaagaagttgatccaacagcagctgctgctgctgctgaagggacagaagggaccattgtcaaatgc

SEQ ID NO: 64002 - DNA, 276 bp, Glycine max
  Clone ID: 700760107H1
gtggcctctctgcaaaaccccttatcatctctctctttatctctttgtctccaaaaatggcttctatcataggcgtttcctccatttaccaaacaccttctctcgaactataccagaggccaaatactgctgcctccacttcctccgttaggttgcaatgtttagactccaagtctcacttcaacaacgtcctccgagcccaccaacgccactccactgggccgggcctcaagcccacaccgactactttcgtcccctccgccgtcgccacgccca

SEQ ID NO: 64003 - DNA, 285 bp, Glycine max
  Clone ID: 700760108H1
gccaggaggaaaaacacggaggaaagggaagtgaagaggaacaagatgaacgtgaacacccacgcccacaccaacctcatcaaaaggaagaggaaaagcacgaatggcaacacaagcaggaaaagcaccaaggaaaggaaagtgaagaagaagaagaagaccaagacgaggatgaggagcaagacaaagagagccaagaaagtgaaggttctgagtctcaaagagaaccacgaagacataagaataagaacccttttcacttcaactctaaaaggttccaaactc

SEQ ID NO: 64004 - DNA, 283 bp, Glycine max
  Clone ID: 700760110H1
aaacttattaacacttgccttagttcaatatggggaagcccttcttcactctctctctttcttccctttgcttgctactcttgtcgagtgcatgctttgctattacctccagcaagttcaacgagtgccaactcaacaacctcaacgcgttggaacccgaccaccgcgttgagtccgaaggtggtcttattgaaacatggaactctcaacaccctgagctgcaatgcgccggtgtcactgtttccaaacgcaccctcaactgcaacggcctccacttgccatc

SEQ ID NO: 64005 - DNA, 263 bp, Glycine max
  Clone ID: 700760111H1
attttcttttccttcactttcccgagaaaaaaataacacttttcactttcttcactacgttctcacttcgatatggctcgtacgaagcaaaccgctcgcaagtccaccggtggcaaggcgccacgtaagcagctcgccaccaaggccgctcggaagtccgctccggcgaccggaggagtgaagaagccccaccgcttcaggccgggaaccgtggcgctgagggaaatcagaaagtaccagaagagcaccgagcttctcatcag

SEQ ID NO: 64006 - DNA, 285 bp, Glycine max
  Clone ID: 700760113H1
aaaattcttccaccaagttatgggtttccttgtgttgcttcttttctccctcttaggtctctcttctagttccagcatatcaactcatcgttccatattggaccttgacctaaccaagtttaccacacagaaacaggtgtcttcactgttccaactatggaagagtgagcatggacgtgtctaccataaccacgaagaagaggcaaagagacttgagattttcaagaataacttgaactatatcagggacatgaatgcaaacagaaaatcaccccattctcatcg

SEQ ID NO: 64007 - DNA, 175 bp, Glycine max
  Clone ID: 700760115H1
taaacctcgatcacaggttgccgcaccttaaaaccggaaacaaaagcaatcggtacttgatttcaagaatctctcaatttcttcctacttctttgtgtacgatttcttaagggagagaaaatcactctctgtgctggccacagacttcgtgaatcattttctgttccactcttag

SEQ ID NO: 64008 - DNA, 291 bp, Glycine max
  Clone ID: 700760116H1
ttgtctttgagcactcatcaccatggccaagcttgttctttccctttgtttccttcttttcagtggctggcttcgctctgagagagcaggcacagcaaaatgagtgccagatccaaaagctgaatgccctcaaaccggataaccgtatagagtcggaaggtgggttcattgagacctggaaccctaacaacaagccattccagtgtgccggtgttgccctctctcgctgcacccttaaccgcaatggccttcgtagaccttcctacaccaacggtcccaaggaaatctaca

SEQ ID NO: 64009 - DNA, 283 bp, Glycine max
  Clone ID: 700760117H1
gacagttaggcagttggaggcattaatcagactgtcagaggccattgcacggtgtcatttggacaatgaggtacaacctcgtcatgttcgtctagcagtaaaactgctgaaaacttccataataagtgtggaatccagtgagattgatctgtctgagtttcaagaacaaaaccacaatgatggtgcaggtggtggcaatgaaaatgataataatagagatgctaattatcaagaggggaatgatacagcgcacaagctgccggaaatggtaatgatcaagtgg

SEQ ID NO: 64010 - DNA, 289 bp, Glycine max
  Clone ID: 700760119H1
tctctgaattcggctcaaggtctttgaacactcatcaccatagccaagcttattctctccctttgtttcctgctttgcagtggctgcttcgctgctgagatagcaggcacagcaaaatgagtgccagatccaaaagctgaatgccctcaaaccggataaccgtatagagtcggaaggtgggttcagtgagacctggaaccctaacaacaatccattccagtgtgccggtggttgccctctctcgctgcacgcttaaccgcaatgcccttcgtagaccttcctacaccaa

SEQ ID NO: 64011 - DNA, 278 bp, Glycine max
  Clone ID: 700760120H1
attttatatcaagaattttatgcaaactgagtttttccttgtgagtttgactcttgaagacattccaaaccatggaagcattgtatttgtttgcaatttctggatttacaatgccaaactcttcaaaagtgaccgcattttctttgccaaccagacatatcttccaagtgagacaccagctccactagtcaaatatacagaagaagagttgcataatttaagaggagatggaactggagaacgcaaagagtgggaaaggatctatgattatgatgtct

SEQ ID NO: 64012 - DNA, 276 bp, Glycine max; identical to SEQ ID NO: 60324
  Clone ID: 700760122H1

SEQ ID NO: 64013 - DNA, 88 bp, Glycine max
  Clone ID: 700760123H1
atactcgatcgctagtgattgtcattgttatatataataatgttatctttcacaacttatcgtaatgcatgtgaaactataacacatt

SEQ ID NO: 64014 - DNA, 280 bp, Glycine max
  Clone ID: 700760124H1
ctcaggatagctggagcccgcgggcgagttctatcgggtaaaaccaatgattagaggcatcgggggcgcaacgccctcgacctattctcaaactttaaataggtaggacggtgcggctgctctgttgagccgcgccatggaatcgagagctccaagtgggccatttttggtaagcagaactggcgatgcgggatgagccggaagctgggttacggtgcccaactgcgcgctaacctagaccccacaaagggtgttggtcgattaagacagcaggacggtg

SEQ ID NO: 64015 - DNA, 183 bp, Glycine max
  Clone ID: 700760125H1
attttgataaaccgcgatcacaggttgccgcaccttaaaaccggaaacaatagcaatcgttacttgatttcaagaatttctcaatttctttctacttctttgtgtacgatttcttaagggaaagaaaatcactctctgtgctggccacagacttcgtgaatcattgtcttttccacattaagt

SEQ ID NO: 64016 - DNA, 280 bp, Glycine max
  Clone ID: 700760127H1
acgagattatgatgctctgtctggctcaaaacgttcttatgctgctatagatgatgttcctccacgatatgctgatactggtgctcgccaatcaagagctcgactggactatgactatggcggtagtgcttcacagtatggagatgcttatggtgatagacttggaagatctagtatgggatatggtggtggcagcagaagttctatttccagtcaagattcacatgggttgtatagcagtcggcagggcatgagttatggaggaggttcttttggtagt

SEQ ID NO: 64017 - DNA, 285 bp, Glycine max
  Clone ID: 700760130H1
aaaagagagaatggggaacgaggaagaagaagaagaagtggtggctgaagttgaagcagtggaagccgtgtatggaaccgattgcgtccttctccgttcattccctccccatttccacatctctctcaaacccagaaccgctgatgtttcatcccaacagtttgtggaagctgttctggagatacaagcaagctcacagtatccaaaagaaccaccttctgttgatcttgtggattgcaagggtctggatgaacaaagaaagaagtatctattaaattgcataca

SEQ ID NO: 64018 - DNA, 232 bp, Glycine max
  Clone ID: 700760131H1
aacaattccttcacttgcagcactgttgcatcatcatcttcattgcaaaaccctaaacttcaccttcaaccatgaccacacaagtaccaccacacagtgtccaagtccacacaacaacacacccctacgaagctggcgtcgtcccccccggagcccgtttcgaaccgccgcgttatgaagccggcgtcaaagcgccctccatttaccattccgagagaggtccaacgacttc

SEQ ID NO: 64019 - DNA, 277 bp, Glycine max
  Clone ID: 700760133H1
ggctgtttctttttcttcttcttcttcttctttattttctcattttgccaaactaaaatagttgtgttggtagctttggcaaagatgttttcagcaggccataagatcaaagggacagtggtgttgatgcccaagaatgagttggaagttaaccctgatggctcagcagttgacaaccttaatgctttcttgggccgtagtgtctcccttcagctcattagtgctaccaatgctgatggttaattaatttcttcatcgtgtcacttttttccatcat

SEQ ID NO: 64020 - DNA, 280 bp, Glycine max
  Clone ID: 700760134H1
tctccattgtctttgaacactcatcaccatggccaagcttgttctttccctttgtttccttcttttcagtggctgcttcgctctgagagagcaggcacagcaaaatgagtgccagatccaaaagctgaatgccctcaaaccggataaccgtatagagtcggaaggtgggttcattgagacctggaaccctaacaacaagccattccagtgtgccggtgttgccctctctcgctgcacccttaaccgcaatgcccttcgtagaccttcctacaccaacggt

SEQ ID NO: 64021 - DNA, 278 bp, Glycine max
  Clone ID: 700760135H1
gattcaaccacacaggctacgaacttctcggatagtatctttattaataaggtagaaagtattcgtgtcttatgtaagagtgtaactttgttcttgtttgtactttaaatgatatagcttgttcagttcactaaaactagaatgaagatgttattatcaactaatatttttactgtccatgaaggattgttgccttaataaattgtaaggttggttctcttgctactagcctagatctgtgtcattttgagtgtgctgtaatagtatatattgcctta

SEQ ID NO: 64022 - DNA, 275 bp, Glycine max
  Clone ID: 700760137H1
gcgcgttctacacgtgttgccgatctcggatgttgtaaaattagtttatgatgtgaagctatggagtggaaaatatgtggatgtaggagatttcgggatgaatggcctcaaaacgctttgtcgtttgtggttattgagtcctgagtgatcttgtcatccgacctttgccatgacaggtgcgcttgcatggcaggtcaaaaaatgttaataaaaaaagttttattggtttggggagagatcgcacgggggttgcccgggtctcttcctcttgtgtg

SEQ ID NO: 64023 - DNA, 278 bp, Glycine max
  Clone ID: 700760140H1
gtatgtacattctctccggaggcaccgtcgtgagcttttctctctggtccgtgttgctgaaacctttttgacctttccaataaagcatttgtttcaccctatcaatgagaggaaccattggaataaggattccaaaccccaatatttccaatgccaccagaaaaaccctagttccattttctacatcttccggttttggtggtggcggacgtggtcgtggtcgtggagggtctcttcctggttcagggctgttcaataacaatgaaagagctccagtt

SEQ ID NO: 64024 - DNA, 180 bp, Glycine max
  Clone ID: 700760141H1
tgataaaccgcgatcacaggttgccgcaccttaaaaccggaaacaaaagcaatcgttacttgatttcaagaatctctcaatttcttcctacttctttgtgtacgatttcttaagggaaagaaaatcactctctgtgctggccacagacttcgtgaatcattttcttttccacacaacata

SEQ ID NO: 64025 - DNA, 277 bp, Glycine max
  Clone ID: 700760142H1
caacgaagatctcagattaataacactctccatagccgttaacaaacctggtcagattgtgagagtttcttcctgtcgagcactgaagctcaacaatcctacttgcaaggattcagcaggaacattttagaggcctcctacgataccaaattcgaggagataaacaaggttctgtttagtagagaggaagggcagcagcaaggggagcagaggctgcaagagagcgtgattgtggaaatctcgaaggaacagattcgggcactgagcaaacgtgcca

SEQ ID NO: 64026 - DNA, 191 bp, Glycine max
  Clone ID: 700760143H1
gtgaaaagtatttgatcgccaaaatgaattggaataaagctatttctaactatgcctttgcatatcaatacaattgcaaacaattacgaagtgcgtccttggcagtgatcttggacaacatggacctgctcactcaaaatgaatgttatgcggactggtggacactaatcctgctcttgttgtggaaatat

SEQ ID NO: 64027 - DNA, 257 bp, Glycine max
  Clone ID: 700760145H1
cttattaacactttccgtactgcaatatggtggaagcccttcttcactctctctcttgcttccctttgcttgctactcttgtcgagtgcatgctgtgctatgacctccagcgagttcaacgagtgccaactcaacaacctcaactcgttggaacccgaccaccgcgttgagtccgatagtggtcttattgagacatggaactctcaacaccctgagctgcaatgcgccggtgtcactgtttccaaacgcaccctcaa

SEQ ID NO: 64028 - DNA, 200 bp, Glycine max
  Clone ID: 700760148H1
atgacattgattccgggaaccagtgttgaagatggtgacaacaagctaacagttgaacttgagaagagtgttcctacattggttggcattgaatgtcccaaggatgaaaaacttcctcgtcgcaaagtttttgataaacctaagacgcgctggttcacaattctccctatggagttcatcttgggggtccgccagaagtt

SEQ ID NO: 64029 - DNA, 139 bp, Glycine max
  Clone ID: 700760149H1
attgttgtctgagtgtcgagactcgagagttttcaaatcgtaaaacctaaataaatacatcactgccttcagagaacgactgcgcctagcttctagccaccctttaatcttcgtcaacgttacttttccacacaacata

SEQ ID NO: 64030 - DNA, 277 bp, Glycine max
  Clone ID: 700760150H1
agacgacgaaaggaagcagatcgtgacagtggaaggaggtctcagcgttatcagccccaagtggcaagaacaacaagatgaagatgaagatgaagacgaagatgatgaagatgaacaaattccctctcaccctcctcgccgaccaagccatggaaagcgtgaacaagacgaggacgaggacgaagatgaagataaacctcgtcctagtcgaccaagccaaggaaagcgtgaacaagaccaggaccaggacgaggacgaagatgaagatgaagatcaa

SEQ ID NO: 64031 - DNA, 265 bp, Glycine max
  Clone ID: 700760153H1
gtgtatgtaaaatctttgtttttatcagaggtggtgcagagagttgtgtctcagatccctatatacaccgaaaacgatacaactgtgtgctgtgtacagtgtgcaccgtgcttctctctctctctctctctctcaatattatcattttacatatgactactacacctagctattaccgaatagagtggtcctcaacctcaacctagagcctcactctttttttttgccttttcctttgctctttaccctatattattcagcccaa

SEQ ID NO: 64032 - DNA, 184 bp, Glycine max
  Clone ID: 700760156H1
gaaattttgataaaccgcgatcacaggttgccgcaccttaaaaccggaaacaaaagcaatcgttacttgatttcaagaatctctcaatttcttcctacttctttgtgtacgatttcttaagggaaagaaaatcactctctgtgctggccacagacttcgtgaatcattttcttttccacacaac

SEQ ID NO: 64033 - DNA, 276 bp, Glycine max
  Clone ID: 700760157H1
gaaaacctatggattcctgacaccagaattctggaaggagactcgcttctccaaatctccattccaagagtacacagatctactggcaaaaccaacaggaaagactctaatcttggaggaggaaagggtggatgcttgatttgctagttttgctttatggatgttttaggaactttattactttacatactttgttggttctgtgctttacttttggttttgatagacggtatgtctctgtatgcattttgattgtttccaagttttaattgactg

SEQ ID NO: 64034 - DNA, 90 bp, Glycine max
  Clone ID: 700760159H1
ggctcgaggtgcaagatcctagtatacctgaagatataagcggagatactatgatgagagcacggttcccgttagtgttgctgggacttg

SEQ ID NO: 64035 - DNA, 274 bp, Glycine max
  Clone ID: 700760160H1
aaaccccacaacaacggctatttttgcactcttgtcgttttcgaaggtataaagatgaatctgaagaacatgaaggttccgaacgttccaggtggcggggggaaatctgcgctgctgaagcttgggattgttggtggaattggtttgtatgcagctggtaacagtctctacaatgttgatggaggtcaccgagccattgtgttcaaccgtctagttggtgtcaaagacaaggtctatcctgaaggaactcacttcataattccgtggtttgaga

SEQ ID NO: 64036 - DNA, 270 bp, Glycine max
  Clone ID: 700760161H1
tgccagttctgatatttacaccatctgctctcaagactgtgaattatggaatcctgcttacacaaaagcaatgactatgtcatttagtccaaacccgtgttctgatgcgtggagtttggaatttctgaagcgtaccggatttcattgtgatatcatttgtgtcactggatggactgccactccaatgcattatgtgcaggttacaattgattggtttatttcctctcaggaatgtgttcccaggacctattgtgtttgaaatccacaaaa

SEQ ID NO: 64037 - DNA, 107 bp, Glycine max
  Clone ID: 700760162H1
attctgccgtcgacgaagctgaaacttgtttcttctgttccttgcgcgaaccgtttctactaaccccaatcggttctctcccactccaattccccattcctcatcta

SEQ ID NO: 64038 - DNA, 91 bp, Glycine max
  Clone ID: 700760164H1
gcaagaatctcagcaacgaggacgaagccagaggccccaagacggtcaccataaggtacatcgcttcagagagtgtgatttgatcgcagtg

SEQ ID NO: 64039 - DNA, 276 bp, Glycine max
  Clone ID: 700760165H1
gtagacggggaatagaattgtgttcatctatgaaagaaaagaacgacacaaactataagatcatgaaacggggaatttagtttttggagaaaaggaagtaaagacacactccctcctcctcctcctcctgctctgtctccggcttcaatttcggattccaaattgagttgatttcggagattataaattttcttttacttttttatttttgcgaaaaaatggaagaggcaaaggcattgcaccagcaacaacaacaacaacagcagcagcaacaac

SEQ ID NO: 64040 - DNA, 276 bp, Glycine max
  Clone ID: 700760166H1
caacggagttacggttggaagcgttttctccttggtatcttgagcctggattctctagcgtgcgtcccacaatagtgtttcctgcgtcccaaacaaaactcaagtacggtcagacgttgaggcttcggtttgaggtgatgagcgcgactttggttggggattcggtgtcggttacgatgctgtcgccgccatttaacacgcactcgttctccatgaatcagaggatgctggtgctggagccacacgatttgagtaaggttggggaatcgacgtacg

SEQ ID NO: 64041 - DNA, 275 bp, Glycine max
  Clone ID: 700760167H1
ctcgagccgcttctcttcttcaattcattctagttctggattccgactcgccgcattgactaggtccgggttggggtcgactcagttcggtttttcattctctcgcgaatctaatctataggaaaagctaagggcacatcacaatgaaggcattgattctggttggggggtttggaacaaggctgaggccactgacactcagttttcctaagcctcttgttgattttgctaacaaacctatgattctgcatcagatagaggcccttaaggccatt

SEQ ID NO: 64042 - DNA, 75 bp, Glycine max
  Clone ID: 700760171H1
ttagttcattacacagtcgaattctgttttcgctttgaagttcgaagcttgttgtacccttattgcaggttccac

SEQ ID NO: 64043 - DNA, 271 bp, Glycine max
  Clone ID: 700760173H1
atagtcgataaactaagtcttgaaatagagactttccttaaagctaaacaaaatagtaggagtacagaaaatattgcagtaaggaattgccgtaattccttggaatctgtaccactgaatgatgccgtcagtgcaccacaagaggttggtgatgacgatgattctgtgggcagtgattcaaattgttttgagttgaacaagccaagcaacaagggatctaaggtacatgaagaagagcctgtcggcaaaatttttgaggagacatcaaaaa

SEQ ID NO: 64044 - DNA, 275 bp, Glycine max
  Clone ID: 700760174H1
gcgagaagcacatcatggagaagatccaaggccgcggcgatgacgatgatgatgatgacgacgacaatcacattctcaggaccatgcggggaagaatcaactacataaggaggaacgaaggaaaagacgaagacgaagaagaagaaggacacatgcagaagtgctgcacagagatgagcgagctgagaagccccaaatgccagtgcaaagcgctgcagaagataatggagaaccagagcgaggaactggaggagaagcagaagaagaaaatggag

SEQ ID NO: 64045 - DNA, 271 bp, Glycine max
  Clone ID: 700760176H1
agcagatgtctaatgttttgtgggtagctcctgaggacaaggcgagtttatggtcacaacttcattatgtgtcgtgtaataatctggaaatgcaagaagcttatcttgtcaatctcgtaaatgtgttacgagaattgtatttgcacagtccagaggaagctcgccaattgagaaggaaagctctctctcgtattgaatggctgcaaaaagctgatgtgcctaccatagcacagattgaagagttccattcgatgcagaggatgatgaatgc

SEQ ID NO: 64046 - DNA, 275 bp, Glycine max
  Clone ID: 700760177H1
tactgtaacatgcctatatttattatgtacctggttcacatgcgtacatcatgaccagagtggcacctatgcttcctagctttatttcaaaacacaaatctaattatccttggggaaatgtatcaacaaccaaaaccttttaccgaggtcaggccttgataattggacaccattgtattctgtctaaatccaactcttcagagagactgtttagatctaaatcctttttaacgatttcacttaatttttcttgatctatctctaattctgtagct

SEQ ID NO: 64047 - DNA, 58 bp, Glycine max
  Clone ID: 700760180H1
acaagatctccatatctgttcccagaagcttggttgtaggaatgggttccggtgaaca

SEQ ID NO: 64048 - DNA, 273 bp, Glycine max
  Clone ID: 700760181H1
cattggtccttaaacactcatcagtcatcaccatggccaagctagttttttccctttgttttctgcttttcagtggctgctgcttcgctttcagttccagagagcagcctcagtaaaacgagtgccagatccaaaaacttaatgccctcaaaccggataaccgtatagagtcagaaggagggctcattgagacatggaaccctaacaacaagccattccagtgtgccggtgttgccctctctcgctgcaccctcaaccgcaacgcccttcgta

SEQ ID NO: 64049 - DNA, 265 bp, Glycine max
  Clone ID: 700760183H1
gggaagaggttgcggagaaaaagatgggtgggtgtgacagtgggggacggagcaatggtaaggccaatgcagctggtgaagatgacgccaatacccctcaggttcctcagaagattcaagtaggtaattctccttcctatagagtagaagaaagacttggcaagggtggatttggtcaagtatacgtcgggcgacgtactggtggaaatttggagtgaagaactgggacctggagctgtaggaggtgcattaagaactcgagcat

SEQ ID NO: 64050 - DNA, 266 bp, Glycine max
  Clone ID: 700760184H1
gtggtttgatgatgatggagcatcatgaggacttgtaatgtttgaatgagttttgtgttatgtgtgtgtgcgcaactgtgcatattactgtacaagttaataactacgtgtctgccatatgaatcaatgtaagtttgatatgaatgggaggaaactttgtttgcatagtttgggaattttttttctttttcttttctttgttttcatcttattaattaaggtgggagttgtgcactgtcttgatgcttgttctcttcaataaatgg

SEQ ID NO: 64051 - DNA, 268 bp, Glycine max
  Clone ID: 700760185H1
cttcctcagtattgtggatatgaacgagggagctcttcttctaccacacttcaattcaaaggcgatagtgatactggtaattaatgaaggagatgcaaacattgaacttgttggcctaaaagaacaacaacaggagcagcaacaggaagagcaacctttggaagtgcggaaatatagagccgaattgtctgaacaagatatatttgtaatcccagcaggttatccagttgtggtcaacgctacctcaaatctgaatttctttgctatt

SEQ ID NO: 64052 - DNA, 267 bp, Glycine max
  Clone ID: 700760186H1
gcaaaaagctgatgtgcctaccatagcacagattgaagagttccattcgatgcagaggatgatgaatgctcctgattcaaatgataatattgatctactgttgagcattgatttgttgggtttacaaggagcaggtaaagcttttccaaacaagattgtttttgatgataaacttgtgctggctaacacacaagaattctttgctggaaattttccagtggattcttggttaccaatttttgtgaattgtctttatcctgtaagtca

SEQ ID NO: 64053 - DNA, 267 bp, Glycine max
  Clone ID: 700760187H1
gttctttaattttctgattttagcaaattaaaatagtagtgttattggtaggttttggcaaagatgttttcagttccaggggtgtcgggtatcctgaacagaggaggagggcataagataaaagggacagtggtgttgatgaggaagaatgtgttggacttcaacagcgtggctgatcttactaaaggaaatgttgggggactcataggcaccggcctcaacgttgttggctcaacacgtgataacctcactgctttcttgggccga

SEQ ID NO: 64054 - DNA, 150 bp, Glycine max
  Clone ID: 700760188H1
gctgatgccgaggtcatgcaagagcgggaaattgagctgcaaaaccacaataattatctgcgagctaagatagctgaacatgagagagctcaacaacagcaatcaaatatgatgtcaggaacactgtgcgagtcccttccttcaaaatca

SEQ ID NO: 64055 - DNA, 262 bp, Glycine max
  Clone ID: 700760189H1
cccacattttcaaaatggcttgtgaaaatgacaacatcaacaaaggcctattacttgccctagggctagtactttgtgtcaccctgtccttcttcccaagggtcacagtagggagtgtgccctttgcatgcgaccctaggaacggtctcacgaggggtttcaagttttgcaacacgcacgtgccaatccacgtgatggtgcaggacctcattgcgatgctcacattgccggagaagatcaggctcgtggtcaacaatgccat

SEQ ID NO: 64056 - DNA, 84 bp, Glycine max
  Clone ID: 700760190H1
ctcaagtacttctggctagattctgacaggaactgctcctcggaaagtcatcagagaggagaggatcaggttctacccggaggt

SEQ ID NO: 64057 - DNA, 273 bp, Glycine max
  Clone ID: 700760193H1
ataatgactgggataaacttaagaattcaattattgaaattgtataagtaaacaatttaattggattggtcgaatggtatcataaaaatggagtactaactcccatttcttatttattattgaattaaccgatcaacttgctttgttatcgaacatttctttttgatttcaaaaattttccggataaaatttgaatctatgtttatatgcgaatcaatcctactacttctggtccctaggtttctgcgcttgaaaaaaagaatctgggacgtt

SEQ ID NO: 64058 - DNA, 269 bp, Glycine max
  Clone ID: 700760195H1
ctcgagccgaatcggctcgagatatactatgatgagagtgcggtttactttgttggtgttgctgggaactgttttcctggcatcagtttgtgtctcattaaaggtgagagaggatgagaataaccctttctacttgagaagctctaacagcttccaaactctctttgagaaccaaaacggtcgcattcgtctcctccagagattcaacaaacgctccccacaacttgagattcatcgagactaccggattgtccagtttcagtcaaaac

SEQ ID NO: 64059 - DNA, 101 bp, Glycine max
  Clone ID: 700760196H1
atcagatcacaccaccgcaaaaccctaaatgcaattgtctccatttccgatcttgcccccggactgcaaatggtgagcaggatggacgaggcgccctccat

SEQ ID NO: 64060 - DNA, 82 bp, Glycine max
  Clone ID: 700760201H1
cttaattattaacacttccttagttcaatatggggaagcccttcactctctctcattcgtccctttggctgctactcttgtc

SEQ ID NO: 64061 - DNA, 185 bp, Glycine max
  Clone ID: 700760202H1
cagtgagaatacaggtatagcattggcctgtgctatgaatagttcttttagggaggcgtgccagttctgatatttacaccatctgctctcaagactgtgaattatggaatcctgcttgcacaaaagcaatgactatgtcatttaatccaaacccgtgttccgatgcatggagttgggaattttgg

SEQ ID NO: 64062 - DNA, 197 bp, Glycine max
  Clone ID: 700760203H1
caaagagtggcttgcagagttagacattctcggtgaccttgtccatccaaatctggtcaaattggttggtttctgtattgaagatgaccaaagattattggtttatgaatgtatgccccgtggaagtttggagaaccacctcttcagaaaagggtcgttgcctcttccttggtctatcagaatgaaaatggcacttg

SEQ ID NO: 64063 - DNA, 281 bp, Glycine max
  Clone ID: 700760206H1
tttttctgccacacttcaattcaaaggccatagtggtactagtgattaatgaaggaggagcaaacattgaacttgttggcattaaagaacaacaacagaggcagcaacaggaagagcaacctttggaagtgcggaaatatagagctgaattgtctgaacaagatatatttgtaatcccagcaggttatccagttgtggtcaacgctacctcagatctgaatttctttgcttttggtatcaatgccgagaacaacagaggaacttcttgcaggttcgaaaga

SEQ ID NO: 64064 - DNA, 268 bp, Glycine max
  Clone ID: 700760209H1
caaatatgatataattggtgctggttcacattcttcagatgattttcctgaaaaggaagatcaagaaaaacccaaaaagattgatgccagattgagacaaagaatagatcctcaatacaatgaggttcaggctcagatggaaacaaatttgtttaaattgtctcttgatgatgttgaaactcctaaaggttccatgttggatcttaaattttctcagtctaaaattgcacttcccaggaacacagttggtggaactattctgcgtagt

SEQ ID NO: 64065 - DNA, 164 bp, Glycine max
  Clone ID: 700760210H1
ggtaaagcttttccaaacaagattgtttttgatgataaacttgtgctggctaacacacaagaattctttgctggaaattttccagtggattcttggttaccaatttttgtgaattgtctttatcctgtaagtcaattaccttcagaagctgccgttgaagatga

SEQ ID NO: 64066 - DNA, 249 bp, Glycine max
  Clone ID: 700760211H1
gcaaagcaatggctacttcaaagttgaaaacccagaatgtggttgtatctctctccctaaccttaaccttggtactggtgctactgaccagcaaggcaaactcagcggaaactgtttctttcagctggaacaagttcgtgccgaagcaaccaaacatgatcctccaaggagacgctattgtgacctcctcgggaaagttacaactcaataaggttgacgaaagcggcacccaaaaaccctcgtctcttg

SEQ ID NO: 64067 - DNA, 83 bp, Glycine max
  Clone ID: 700760212H1
ctctccataggtccttaaacactcataagtcataaccatggccaagcaagttttttcccattgttttctgcttttcagtggct

SEQ ID NO: 64068 - DNA, 289 bp, Glycine max
  Clone ID: 700760213H1
tggttaccaatttttgtgaattgtctttatcctgtaagtcaattaccttcagaagctgtcgttgtaaatgttacatgtggtagtggacgtggtggtttacctaccactgcttggattagttctgcagttaacaatcgctcctcagatatcaacaaaaagattcgcacagcacttgggaaaggtaagaaaattgtttttcttactagagttgatccttttccagtagctctactggctgttctttttggcgttaagaatgaaattctgagttccaacgccactaacccta

SEQ ID NO: 64069 - DNA, 284 bp, Glycine max
  Clone ID: 700760214H1
gtgcggtttcctttgttggtgttgctgggaactgttttcctggcatcagtttgtgtctcattaaaggtgagagaggatgagaataaccctttctacttgagaagctctaacagcttccaaactctctttgagaaccaaaacggtcgcattcgtctcctccagagattcaacaaacgctccccacaacttgagaatcttcgagactaccggattgtccagtttcagtcaaaacccaacaaaatccttctcccccaccatgctgacgcggatttcctcctctttgt

SEQ ID NO: 64070 - DNA, 257 bp, Glycine max
  Clone ID: 700760215H1
tagcaagagaaaaaataccaaccatggcaaccatttctactgatcaaccaagaggatcctactcctatggaacctcctatggagcaccctatggaaccacctatgagaccaacagcagcattaacaaccctccttcacgccaaatcgtgaagttcataactgctgcaactattggcatcacactcttactctcgtctgggttgaccctcacaggcactgtcataggtttgatcattgcaacccctcttcttgtaatc

SEQ ID NO: 64071 - DNA, 192 bp, Glycine max
  Clone ID: 700760216H1
aaaatgagtgatcccacactagcacaacagcatctagtcaaagtccacacaacaacacacgatacagttgttaccacacacaatcataaccaaacaccctcaataaatgcctcaggtgaaaagaagaagattgtgggggtgttctacaaagggaatgaatatgccaaattgaatccaattttgttggatgtg

SEQ ID NO: 64072 - DNA, 91 bp, Glycine max
  Clone ID: 700760217H1
actcactcttctattttccaactttacaatttcatttcagatagcttcttgactcgttactgactcactcaatggctgaccgagttcaccc

SEQ ID NO: 64073 - DNA, 284 bp, Glycine max
  Clone ID: 700760218H1
gatccggataaaggtgaaaatcatgcccgtcctgttcttggaggaaatgacacctttccttatcctcgtagggggagaactggtagaaaaccaacaaggaaagatcctaatagtgagagtaggagcaatgatgtttatcttccaagagatgaggcttttggacacttgaagtcatctgactttcttacttatggactaaaatccgtatctcaaaatgttcttccattattgcaatctgcttttgatttgaatttcacaccccgtgagtttgatagctttgatga

SEQ ID NO: 64074 - DNA, 127 bp, Glycine max
  Clone ID: 700760219H1
acttattaacactttccttagttcaatatggggaagcccttcttcactctctctctttcttccctttgcttgctactcttgtcgagtgcatgctttgctattacctccagcaagttcaacgagtgcc

SEQ ID NO: 64075 - DNA, 98 bp, Glycine max
  Clone ID: 700760220H1
cggctcgagctagtcaagtacaatagacacgtaatcaaaaccaagcagatacgaacctgccactccatcaccacccaaacccttccacacaacatacg

SEQ ID NO: 64076 - DNA, 178 bp, Glycine max
  Clone ID: 700760222H1
cctttgttcactcttcttctcttgcggctagggttttagcgcacttccatctagatttaaggaagatgggtaaggaaaaggttcacatcagtattgtggtcattggccatgtcgactctgggaaatccactaccactggtcacttgatttacaagctggaagccttgacaaacgtgtt

SEQ ID NO: 64077 - DNA, 247 bp, Glycine max
  Clone ID: 700760223H1
tttgatttttgagtcaaagaccttgtttgccccatccatctcacattccccgatttccctctttcactgctagcaccggttcgtgttgagcagagagagagagagagatgaacctgctaacactagtgaagcgcactcagaacatctatgccagagaagctgcactcggcatcggcgagcaagcctcgtggcacaccaggtacaaggattccgcttaggtctgcgcgggtggcatccccttcgatct

SEQ ID NO: 64078 - DNA, 284 bp, Glycine max
  Clone ID: 700760224H1
gctcctactctcactattaggatcaatgatgtttatcttccaagagatgaggcttttggacacttgaagtcatctgactttcttacttatggactaaaatccgtatctcaaaatgttcttccaagtcctgcaatctgcttttgatttgaatttcacaccccgtgagtttgatagctttgatgaagttcatggactctattcaggcggaattaagctgccaacagatataatcagcaagattagtccactacccgtgcttaaggaaatcttccgaactgatggtg

SEQ ID NO: 64079 - DNA, 271 bp, Glycine max
  Clone ID: 700760225H1
aaacccaatttggaagctgatcacattccaacctggttgaaggcatacaaggatggtcatgttgcaccatttgttaagtctgaacccattcccgagactaacgatgaacctgttaaagtggtagttggggccagtcttgaggacattgttttcaaatctgggaagaatgttctgctggagttttatgctccctggtgtggtcattgcaaacagttggctccaatattggatgaagttgctatctcatatcaaaatgaagctgatgttgtta

SEQ ID NO: 64080 - DNA, 162 bp, Glycine max
  Clone ID: 700760228H1
ggttgccgcaccttaaaaccggaaacaaaagcaatcgttacttgatttcaagaatctctcaatttcttcctacttctttgtgtacggtttcttaagggaaagaaaatcactctctgtgctggccacagacttcgtgaatcattttcttttccacacaacata

SEQ ID NO: 64081 - DNA, 137 bp, Glycine max
  unsure (1)..(137): unsure at all n locations
  Clone ID: 700760230H1
accatgcaacaacaacaaccccagnaaagtcatggtggacgcaagcaggggcaacaccagcaggaggaagaggaagaaggtggcagcgtgctcagtggcttcagcaaacacttcttggcacaatccttcaacacaac

SEQ ID NO: 64082 - DNA, 215 bp, Glycine max
  Clone ID: 700760231H1
gaattctccagagagaagaagaaacttaatcgatcatcacttcacttcactaatacatcatggcagacgagacccagaacaagtatgagagctctgaggttgaggtccaggatcgtggtgtttttgactttctcggtaagaaaaaggataaagaagacaagcctcatcctcaggaggaggtcatcgcccaccgagtttcaaaaagtcactgtctc

SEQ ID NO: 64083 - DNA, 293 bp, Glycine max
  unsure (1)..(293): unsure at all n locations
  Clone ID: 700760232H1
aaaagccataactgaagctcgaggaagataactacgatgaaacaagaggaatggatgattacgacagcgttgctatcgttgctgtttgtttcatcttttccgccgttgagttacggagttgttcctcctcgtactctgctcaataagctgtcggagggcaaatatctcaacactcaggagctcttgntcgaccatttcctcgatcacttctctccctatgatcaccgacaattccggcaacgttactatttggttctagactatttccggattcccgatggaccaattttttt

SEQ ID NO: 64084 - DNA, 123 bp, Glycine max
  Clone ID: 700760234H1
ctcgagccgcttaattattaacacttccttagttcaatatggggaagcccttcactctcactctttcttcactttgcttgctactcttgtcgagtgcatgctttgctattagctccagcaagc

SEQ ID NO: 64085 - DNA, 89 bp, Glycine max
  Clone ID: 700760235H1
gcatggccttgcctctgttttgagacttttgtaatgttttcgagtttaaatctttgcctttgcgaaaaaaaaaaaaaaaaagggcggcc

SEQ ID NO: 64086 - DNA, 90 bp, Glycine max
  Clone ID: 700760237H1
cttattaacactttccttagttcagtatggggaagcccttcttcagtgtctctctttcttgcctttgcgtgctactcttgtcgagtgcat

SEQ ID NO: 64087 - DNA, 274 bp, Glycine max
  Clone ID: 700760239H1
ctttccttagttcaatatggtgaagcccttcttcactctctctctttcttccctttgcttgctactcttgtcgagtgcatgctttgctattacctccagcaagttcaacgagtgccaactcaacaacctcaacgcgttggaacccgaccaccgcgttgagtccgaaggtggtcttattgagacatggaactctcaacaccctgagctgcaatgcgccggtgtcactgtttccaaacgcaccctgaatcccaacggcctcctattgccatcttac

SEQ ID NO: 64088 - DNA, 231 bp, Glycine max
  Clone ID: 700760240H1
aagaatggacaagtagtgggtcgctattatcccaccacttctcctctcagccttgagcgagacatccatagcttctgggaatttcctgaaggcaaaaagataatttcttcctgagctcattatgctgctcccttatgtggtggcaatgtaatgcaatatgcacaaactaatgcttaatcttacggacatcatatataccatgtcccatgacttcgtccataaaattaagca

SEQ ID NO: 64089 - DNA, 281 bp, Glycine max
  Clone ID: 700760241H1
gcaatggctacttcaaagttgaaaacccagaatgtggttgtatctctctccctaaccttaaccttggtactggtgctactgaccagcaaggcaaactcagcggaaactgtttctttcagctggaacaagttcgtgccgaagcaaccaaacatgatcctccaaggagacgctattgtgacctcctcgggaaagttacaactcaataaggttgacgaaaacggcaccccaaaaccctcgtctcttggtcgcgccctctactccacccccatccacatttggga

SEQ ID NO: 64090 - DNA, 252 bp, Glycine max
  Clone ID: 700760242H1
ctcaaggtaaccgtcttgataaacatgagttttcagaactggtaaagcgggggtctacagcagaggacttaggtgcaggtcatgctgaagctgcaagggttcaaggtcttggttttgcaagagaaccacgcccttgggaagaatccggttcttctaagctttcacttagtgacacaccagctgaggtggaaaatgtatctatgccaatcaaccggccaaaatttgaagatgttcagagatgaagtagagaaa

SEQ ID NO: 64091 - DNA, 202 bp, Glycine max
  Clone ID: 700760243H1
aggtagaaggttttcctagtggcagtgtgaaggatttttcaacaaaatcttccattttgggcaagtctactcaaatatgtgcaaacaatgaatctgacagacagaatgaccaggaaaaatgcgatcaagttgtctctgtcaatgatcaggagcatgaaaaggttccttctgattctagccagaagcattgtgatgtcgataa

SEQ ID NO: 64092 - DNA, 280 bp, Glycine max
  Clone ID: 700760244H1
aaagaagcgttcggcgtgaacatgcagatagtgagaaacctacaaggtgagaacgaagaggaggatagtggagccattgtgacagtgaaaggaggtctaagagtcacagctcgagccatgaggaagccacagcaagaagaagatgatgatgatgaggaagagcagccacagtgcgtggagacagacaaaggttgccaacgccaaagcaaaaggagcagaaatggcattgatgagaccatttgcacaatgagacttcgccaaaacattggtcagaattcat

SEQ ID NO: 64093 - DNA, 127 bp, Glycine max
  Clone ID: 700760245H1
gtttccttgtgttgcttcttttctccctcttaggtctctcttctagttccagcatatcaactcattgttccatattggaccttgacctaaccaagtttaccacacagcatcaggttccgtcactgtt

SEQ ID NO: 64094 - DNA, 239 bp, Glycine max
  Clone ID: 700760248H1
tgcaattgcgattgtaagaagctccataaaaatgccagagttagggtttcaggaacgaacgtcgtggaggcggagaggcggcgacaccagccccgactccgtcatcttcactctcgaatccaacttgagcctcttctcctccgcctccgccagcgtcgaccgctgctccttcgcctccgacgcccacgaccacgactccttagcctctgaaatctcactcaattgggcagtgcaggatc

SEQ ID NO: 64095 - DNA, 133 bp, Glycine max
  Clone ID: 700760249H1
atcatacatagtagtgttggtgggttgtaaagatgcttgggggtcttctccataggggtcataagatagaagggacagtggtgttgatgcgcaagaatgtgttggacgtgaatagcgtaaccagcgttggggg

SEQ ID NO: 64096 - DNA, 124 bp, Glycine max
  Clone ID: 700760251H1
caacaacaccagaaaagtcatggtggacgcaagcaggggcaacaccagcaggaggaagaggaagaaggtggcagcgtgctcagtggcttcagcaaacacttcttggcacaatccttccacacaa

SEQ ID NO: 64097 - DNA, 233 bp, Glycine max
  Clone ID: 700760253H1
aaagaaacatcatgaagtcaagttgaaagaggggttgaaggacttggctgctaaaagtatggaactgcaaaattctttatcttcgtcatggtcaaagcaagatgcggctgtggcaaaaacaaaagagctgaaaaaactatgtgagagtacactttcatccatgtttgatgggagaccagttaatataattggtctcccatcaaacatggatgaaagtgctagttctagatcgc

SEQ ID NO: 64098 - DNA, 274 bp, Glycine max
  Clone ID: 700760254H1
ctcgagcgttttgtttctcgtttaagccatcatagggaggaggggcttgtcgggtcaaatcagtgcaacagagcgagatctgagtcgtaattcggagtcccttttgaaaaaagaggtcttttttgctgtaattcacttggttctccatttgggttacttggattttgtgaggttgtcttggagttggagtcatggcagttgaggttgtgggatttgagatggttcaaggaccagtggagaatggtactggaggaaaacctgttttaaatgagag

SEQ ID NO: 64099 - DNA, 274 bp, Glycine max
  Clone ID: 700760257H1
atcagtcatcaccatggccaagctagttttttccctttgttttctgcttttcagtggctgctgcttcgctttcagttccagagagcagcctcagcaaaacgagtgccagatccaaaaactcaatgccctcaaaccggataaccgtatagagtcagaaggagggctcattgagacatggaaccctaacaacaagccattccagtgtgccggtgttgccctctctcgctgcaccctcaaccgcaacgcccttcgtagaccttcctacaccaacggt

SEQ ID NO: 64100 - DNA, 240 bp, Glycine max
  Clone ID: 700760258H1
agagaatcgatcgacgctgctagagaagtagaagaagatggcgggtggtgctcccaaacaattgttcggattcggagttgtggcgttgcttgccactctcattcttcctctctttatgcccgccgctgttcatgctcaatccgcagcccctgcacctgcccctgctagcgacgggtcctcccttgatcaagggatagcttatgtgttgatgttgctggctctggtactcacatacatcat

SEQ ID NO: 64101 - DNA, 214 bp, Glycine max
  Clone ID: 700760259H1
gaaattttgataaaccgcgatcacaggttgccgcaccttaaaaccggaaacaaaagcaatcgttacttgatttcaagaatttctcaatttctttctacttctttgtgtacgatttcttaagggaaagaaaatcactctctgtgctggccacagacttcgtgaattattttcttttccacacaacatacgagtcttcgacacgcggatgtgctat

SEQ ID NO: 64102 - DNA, 107 bp, Glycine max
  Clone ID: 700760261H1
ggtccttaaacactcatcagtcatcaccatggccaagctagttttttcccattgttttctgcttttcagtggctgctgcttcgctttcagttccagagagcagcctc

SEQ ID NO: 64103 - DNA, 127 bp, Glycine max
  Clone ID: 700760263H1
caacttggcccattggtcacagtcccacaattcctcttttcatgtgcacaatccttccttgttcaaaagggtcttcctagaaacactcaaggtgtggctgggttaggccatgcaccaatttctcttc

SEQ ID NO: 64104 - DNA, 285 bp, Glycine max
  Clone ID: 700760264H1
aatttttgtgaattgtctttatcctgtaagtcaattaccttcagaagctgtcgttgtaaatgttacatgtggtagtggacgtggtggtttacctaccactgcttggattagttctgcagttaacaatcgctcctcagatatcaacaaaaagattcgcacagcacttgggaaaggtatgaaaattgtttttcttactagagttgatccttttccagtagctctactggctgttctttttggcgttaagaatgaaattctgagttccaacgccactaaccctatgct

SEQ ID NO: 64105 - DNA, 53 bp, Glycine max
  Clone ID: 700760265H1
ccgagaacaaaaaaaaaaaaaaaaaaattcggggttttgctcttctcttggaa

SEQ ID NO: 64106 - DNA, 117 bp, Glycine max
  Clone ID: 700760266H1
gcggaatcctctgcatgatctggaatttgtgttttcttttgcttgttcgtttgtttaattcaataaaggaaattaggcatgaccctcttgttgagtatgctctgcctatttgaaaat

SEQ ID NO: 64107 - DNA, 179 bp, Glycine max
  Clone ID: 700760267H1
ctcgagccgatgccatatataaggcggataaatcagacatatgccaaggcttatgcgacaaggactatcctttttctgagagaaaatggaaccttaaagccagtggccatcgaattaagtttgccacatcctgctggggacctgtcaggtgctgtcagtcaagtcatcttacctgcaaa

SEQ ID NO: 64108 - DNA, 72 bp, Glycine max
  Clone ID: 700760268H1
cttaaacactcatcagtcatcaccatggccaagctagttttttccctttgttttctgcttttcagtggctgc

SEQ ID NO: 64109 - DNA, 175 bp, Glycine max
  Clone ID: 700760269H1
gtgatgccctgagagtcccctcaggaaccacatactatgtggtcaaccctgataacaacgaaaatctcagattaataatactcgccatacccgttaacaagcctggtagatttgagagtttcttcctatctagcactgaagctcaacaatcctacttgcaaggattcagcaggaa

SEQ ID NO: 64110 - DNA, 99 bp, Glycine max
  Clone ID: 700760270H1
cttaaacactcatcagtcatcaccatggccaagctagttttttccctttgttttctgcttttcagtggctgctgcttcgctttcagttccagagagcag

SEQ ID NO: 64111 - DNA, 85 bp, Glycine max
  Clone ID: 700760271H1
taatattatggagatctccacctagaacctacctatctatttgttcttcttctctccctcacccttttatgtatgtgttcattct

SEQ ID NO: 64112 - DNA, 214 bp, Glycine max
  Clone ID: 700760272H1
cagaataccatcaagagacattggaaaatttgagagttgctatcaaaagtaccaagaaactctgtgcggttatgctagatactgtgggtcctgaattacagattgagaataagacagatcacccaatcacccttgaagcagacacattagttgtcttaactccagatcaaaccaaagaagctggttcaaatctcttaccagtaaattttaacgg

SEQ ID NO: 64113 - DNA, 272 bp, Glycine max
  Clone ID: 700760273H1
ggagagttgaatgtggaatcccttctggatttccgctcacagttatttgcaatagcatttttaatgagatgctcattagatatagctatgaaaaattactgcgccaggctaaagctccaagtatgtttttacaatccttcaaaaattttgtttctttgtgtgtgtatggtgatgataacttaataagtgtccatgaatacgtcaagccttactttagtggttctaaattgaaaagctttctagctggtcataatatcaccattactgatggt

SEQ ID NO: 64114 - DNA, 270 bp, Glycine max
  Clone ID: 700760274H1
gccaaccatacatatgttccaagtgagacaccagcagcacttgtggggtacagagaagaagaattgaagaatttaagaggagatggaaaaggagagcgcaaagaacatgataggatctatgattatgatgtctacaatgatttgggcaatccagatcacggtgaaaattttgctcgcccaattcttggagggtctagcactcatccctaccctcgtaggggaagaactggtcgatatccaacaaggaaagatcagaattctgagaagcca

SEQ ID NO: 64115 - DNA, 273 bp, Glycine max
  Clone ID: 700760275H1
cttgctctatactacacagtacacacactagaagaataatggcttccatcctccactactttttagccctctctctttcttgctcttttcttttcttcttatccgactcagtcacccctacaaaaccaataaaccttgttgttctacccgttcaaaatgatggttccacagggctccattgggccaacctccaaaaaagaacccctctaatgcaagtaccagtcctggtggacctcaatggaaatcacttgtgggttaactgtgagcagcagt

SEQ ID NO: 64116 - DNA, 274 bp, Glycine max
  Clone ID: 700760276H1
tgggtgcccatatttgtatgctatggtgcatgatagttcagtgtctacaataccaggtgattttgtcattggtgttaagttgacaaccataaacaatatgtgtgcatatgggctcaatcctggtatttcaggttctcgtcttttgggcaccattcctaagtccatttcacagcaaactgtttggaatcaaatggcaacagtgagaacaccattgaattttgattctagcaagcagagcttttgtcaattctctattgatcttcttggtggagga

SEQ ID NO: 64117 - DNA, 272 bp, Glycine max
  Clone ID: 700760277H1
taggggaaacaaaactacccttttgcttttgctctttgttctttgccattcagtggccacaacaacaatggccttccatgatgatgagggtggtgataaaaagtcaccaaaaattttgtttttgatgagtaactccacgagggttttcaagactgatgcaggggacatgcgtgtgctgaaaagccatggtggtaggatattttataggcacatgcacattggcttcatctctatggaaccaaagtccttgtttgttcctcagtacctcgact

SEQ ID NO: 64118 - DNA, 277 bp, Glycine max
  Clone ID: 700760278H1
gtttgaagaacaacatggtggtgctaaaggtgtgtttgttgcttcttttccttgtgggggttacagctgcacgcatggaactgagcttcttcaaaagtgatcagtcatcaagttatgatgatgatgagtattcaataccatgctgtgatctctgcatgtgcacacgctcaatgcctcctcaatgcagctgtgaagatattaggctgaattcatgccactcagattgtaagagctgtatgtgcacacgctcacagccaggacagtgtcgttgtcttga

SEQ ID NO: 64119 - DNA, 196 bp, Glycine max
  Clone ID: 700760279H1
tgtgcaccttccttccttcttcaaaagggtctccctagaaacattcaaggagtggctgggttaggccatgcaccaatttctcttccaaaccaacttgcctcccactttggcctacaacaccaattcaccacttgcctctctcgctaccctacctcaaagggtgctctaatcttcggggatgcaccaaacaacatgc

SEQ ID NO: 64120 - DNA, 144 bp, Glycine max
  Clone ID: 700760281H1
cacacacaactactacaagtacttccttacaatcaaaaccaacaacaactatggcaagttatcaaaagcactacgatgatcagggtcgcaaggttgacgagtatggcaacgttgagaagcaaaccgacgaatacggcaacctgt

SEQ ID NO: 64121 - DNA, 274 bp, Glycine max
  Clone ID: 700760282H1
catttgtccttgaatataatactcagcatggctaagcttgttctttccctttgttttctgcttttcagtggctgctgcttcgctttcagtttcagagagcagccacagcaaaacgagtgccagatccaacgcctcaatgccctcaaaccggataaccgtatagagtcagaaggtggcttcattgagacatggaaccctaacaacaagccattccagtgtgccggtgttgccctctctcgctgcaccctcaaccgcaacgcccttcgcagacctt

SEQ ID NO: 64122 - DNA, 139 bp, Glycine max
  Clone ID: 700760283H1
cggtgattttgtttatcataggaggatctgatgtactcgctcgtggatctcaactatattcacgatcatgatggcccttgaaaattctgaaaatatgcaaataaactgtgaggcatctttaaaatgcttccagggcaag

SEQ ID NO: 64123 - DNA, 162 bp, Glycine max
  Clone ID: 700760284H1
gaagaggggtgccctgctttctctttgatcaacaaggccactggtgaagccttgaagcactccatcggtgccactcatcctgttcggctgataccttacaagcccgactatcttgatgagtctattctatggactgaaagccgtgacttaggagatggccac

SEQ ID NO: 64124 - DNA, 186 bp, Glycine max
  Clone ID: 700760285H1
gtgcatgctttgctattagctccagcaagctcaacgagtgccaactcaacaacctcaacgcgttggaacccgaccaccgcgttgagtccgaaggtggtttgattcaaacatggaactctcaacaccctgagctgaattgcgccggtgtcactgtttccaaactcagcctcatcttcaatggcctcc

SEQ ID NO: 64125 - DNA, 272 bp, Glycine max
  Clone ID: 700760287H1
cacatctgagggttttcctcatatgctttcacgcaaaaatggtgaaaaaggcaaaaggagatttgtttctggggatggtgaagagatgacattgattccgggaaccagtgttgaagaggcttacaacaagctaatagttgaacttgagaaaagtgttcctacattggttggcattgaatgtcccaaggatgagaaacttcctcgtcgcaaaatttttgacaaacctaagacgcgctgcttcactattctccctatggagtttaatcttgtgg

SEQ ID NO: 64126 - DNA, 198 bp, Glycine max
  Clone ID: 700760289H1
cggctcgagctaagatacaaaggaactatcactggagaagagtctgtttttcattggaattacttgtatttcaacatctaatccttttaggaggaggatatttgagcccatgggccgcatattgaattttggattagtcctaatttaatgtgcgtaagtgcccccggttgaaaaaaaaaaaaaaaaaaaggggggccc

SEQ ID NO: 64127 - DNA, 269 bp, Glycine max
  Clone ID: 700760291H1
gcaagcagagcttttgtcaattctctattgatcttcttggtggaggaattttagtggacaaaactggagattggatcacacttatacaaaattctccaattagtaacttgttgagagttgctgcttggaagaaaggctgtttaatggttaagattgtgatgtctgggaatgcagcagtcaaaaggagtgattgggcctcattggtacaagtgtttttaacaaacagcaacagtacagagcattttgatgcatgtaagtggacaaaatcg

SEQ ID NO: 64128 - DNA, 273 bp, Glycine max
  Clone ID: 700760292H1
gtttccttgacaatctaattctgcaaaaatggcaagcaataaggagtctaagttcccagcacagagccagaaaactcagccaggaaaagaacatgtaatgaatccactcccacaagccacaaatcctgatcacaaggccgccaataaactccagggaaaggtggcgttggtgacaggaggtgactcaggaattggcagagcggtttgcctgtgtttcgcaaaagagggtgcaccgtggcctttacatacgtaaagggccatgaggacagggat

SEQ ID NO: 64129 - DNA, 273 bp, Glycine max
  Clone ID: 700760293H1
ctacatcaggaagaaggaaggaaaagaagaagaagaagaaggacacatgcagaagtgctgcagcgaaatgagcgagctgaaaagccccatatgccagtgcaaagcgctacagaagataatggataaccagagcgagcaactggaggggaaggagaagaagcagatggagagagagctcatgaacttggctattaggtgcaggttgggacccatgatagggtgcgacttgtcctccgatgactgaaaaaaaagtactactaacacatatatgtg

SEQ ID NO: 64130 - DNA, 208 bp, Glycine max
  Clone ID: 700760294H1
ctcgagccgctaaaaataagcagcttccaacctgaggtggaagattcaggagttggggcagagcttctggacatgctcctccccaaggaaaattgctatctggaaagatccggaggccaagaggtagcatcatcaccaccatttttctctggatctcctcctagcagggcctctaaccctctaatccaagatgagcagtttggtaatg

SEQ ID NO: 64131 - DNA, 273 bp, Glycine max
  Clone ID: 700760301H1
ccgaaagggaatcgggttaaaattcctgaatccggacgtggcggctgacggcaacgttagggagtccggagacgtcggcgggggccccggaaagagttatcttttctgtttaacagcctgcccaccctggaaacggctcagccggaggtagggtccagcggctggaagagcaccgcacgtcgcgtggtgtccggtgcgcccccggcggcccttgaaaatccggaggaccgagtgcctcccacgcccggtcgtactcataaccgcatcaggtct

SEQ ID NO: 64132 - DNA, 271 bp, Glycine max
  Clone ID: 700760302H1
acagatttgtgtaaattgtctcttgatgatgttgaaactcctaaaggttccatgttggatcttaaaatttctcagtctaaaattgcactatgcagaatagtatctccaactgtgttccctggaagtgcaattttagactgagaacacagttggaggaactattctgcgtagtgatctattggcaaattttctgacagagggcaattttagagcaagtgttgatttgcagcgcactcatcgtattaaaggaatgattacaatggtggcacag

SEQ ID NO: 64133 - DNA, 270 bp, Glycine max
  unsure (1)..(270): unsure at all n locations
  Clone ID: 700759555H1
caactttgtttaaattgtctcttgatgatgttgaaactcctaaaggttccatgttggatcttaaactttctcagtctaaaattgcacttcccaagaacacagttggacggaactattctgcgtagnntgatctattggcaaattttgcctgacagagggcaatgtcttagagcaagtgcttgatcttgcagcgcactccatncgtnattaacaggaatgatctaaacatggtggccacagnttggtattcctgcagaatacaggtatatc

SEQ ID NO: 64134 - DNA, 251 bp, Glycine max
  Clone ID: 700759556H1
atcatacatagtagtgttggtgggttgcaaagatgcttgggggtcttctccataggggtcataagataaaagggacagtggtgttgatgcgcaagaatgtgttggacgtgaatagcgtaaccagcgttgggggaattattggtcaaggtctcgacttagttggctcaacactcgatactcttactgccttcttgggccgatccgtgtctctccagcttattagtgctaccaaagctgatgccaacggaaaa

SEQ ID NO: 64135 - DNA, 248 bp, Glycine max
  Clone ID: 700759557H1
ggattggatcggagcgtaccgcggaggccagagaagcagggactggtgcgacccttcatcaccattcactgatttgtgggaccctcgtcgtgtcggtgacgctgatgatatcacctcctctctcgcccatgctcacgttgactggcgtgagactgataaagctcatatcttccgtgctgatcttccaggggtgaagaaagaggatctgaaggtgcaggtggaggagaataagatcctgcagataagcg

SEQ ID NO: 64136 - DNA, 252 bp, Glycine max
  Clone ID: 700759558H1
ctagtataccttaataaataatttaagatactatgatgagagcacggttcccattactgttgctgggacttgttttcctggcttcagtttctgtctcatttggcattgcttactgggaaaaagagaaccccaaacacaacaagtgttctgcagagttgcaatagcgagagagactcgtacaggaaccaagcatgccacgctcgttgcaacctccttaaggtggagaaagaagaatgtgaagaaggtgaaatt

SEQ ID NO: 64137 - DNA, 245 bp, Glycine max
  Clone ID: 700759561H1
cacttattaacactttccttaggtcaatatggggaagttttcttcactctctctctttcttccctttgcttgctactcttgtcgagtgcatgctttgctattacctccagcaagttcaacgagtgccaactcaacaacctcaacgcgctggaacccgaccaccgcgccgagtccgaagtggtcttattgaaacatggaactctcaacaccctgagctgcaatgcgccggtgtcactgtttccaaa

SEQ ID NO: 64138 - DNA, 252 bp, Glycine max
  Clone ID: 700759562H1
gaccaagttcacaatcctcctcatctctcttctcttctgcatcgcccaaacttgcagcgccttcaaatggcagcaccagcaagataactgccgcaagcagctccagggggtgaacctcacgccctgcgagaagcacatcatggagaagatccaaggccgcggcgatgacgatgatgatgatgacgacgacaatcacattctcaggaccatgcggggaagaatcaactacataaggaggaacgaaggaaaaga

SEQ ID NO: 64139 - DNA, 251 bp, Glycine max
  Clone ID: 700759563H1
gttcaatatcctagtacaccgtattaaagaatttaagatatactatgatgagagcgcggttcccattactgttgctggaagttgtcttcctggcatcagattctgtctcatttggcattgcgtattgggaaaagcagaaccacagtcacaacaagtgcaaccgaagttgcaatagcgagaaagactcctacaggaaccaagcatgccacgctcgttgcaacctccttaaggtggaggaagaagaagaatgc

SEQ ID NO: 64140 - DNA, 249 bp, Glycine max
  unsure (1)..(249): unsure at all n locations
  Clone ID: 700759565H1
aaaccgcgatcacaggttgccgcaccttaaaaccggaaacaaaagcaatcgttacttgatttcaagaatttctcaatttctttctacttctttgtgtacgatttcttaagggaaagaaaatcactctctgtgctggccacagacttcgtgaatcattttcttttccacttttagtttatttcttgaacnactctccaattgatataggacttcgtgtcagatttaaacttcttctgttctttctcaggt

SEQ ID NO: 64141 - DNA, 250 bp, Glycine max
  Clone ID: 700759566H1
aaaattcttccaccaagttatgggttcccttgtgttgcttcttttctccctcttaggtctctcttctagttccagcatatcaactcatcgttccatattggaccttgacctaaccaagtttaccacacagaaacaggtgtcttcactgttccaactatggaagagtgagcatggacgtgtctaccataaccacgaagaagaggcaaagagacttgagattttcaagaataacttgaactatatcagggac

SEQ ID NO: 64142 - DNA, 232 bp, Glycine max
  Clone ID: 700759568H1
gtggtagtagacaaggcgagcttatggtcacaacttcattatgtttcgtgtaataatctggaaatgcaagaagcttatcttgtcaatttcgtaaatgtgttacgagaattgtatttgcacagtccagaggaagctcgccaattgagaaggaaagctctctctcgtattgaatggctgcaaaaagctgatgtgcctaccatagcacagattgaagagttccattcgatgcaga

SEQ ID NO: 64143 - DNA, 250 bp, Glycine max
  Clone ID: 700759569H1
aattaatgttcgagctatctagatcggatccgatgtgaaacaataatttgcgaggtagacagacagaggcggcagcaaataagaatggcttcaaatcccaaacctttgacttttgaggaggtggctaatcacaacaacaaaaaggattgctggattattatcaatggaaaggtgtatgatatcacgccatttctggatgagcatcctggaggagatgaagttttggtaacgtcaacagggaaggatgcca

SEQ ID NO: 64144 - DNA, 250 bp, Glycine max
  Clone ID: 700759570H1
catcactgaaggaaattatgtcagaaagcaagatgtcagcattgaatatgatgcatgtacaattccaaatgattgtggttcattggttgttgccaaggttggaaatcacaaacaaattgttggtttccatgttgctggaagcaaaggaagactgggatatgcttcattgataccatatgttgagccagttgtgcaagctcaaagtgctgcagtttactttgacttcttccctgtggaggttgatagtcaa

SEQ ID NO: 64145 - DNA, 249 bp, Glycine max
  Clone ID: 700759573H1
caagattttgaaattgctggtaatactcttatgccagctttttctgttccacaggctactgccagatcttctgaaaatgcggaatcctctgcatgatctggaatttgtgttttctttcatttgtccgtttgtttaattcaataaaggaaattaggcatgaccctcttgttgagtatgctctgcctatttgaaaatttccacacctcttttaattgtcgtaatgatgtgtgaagtgtgtgttattttaaa

SEQ ID NO: 64146 - DNA, 244 bp, Glycine max
  Clone ID: 700759574H1
aagaatttaagatatactatgatgagagcgcggttcccattactgttgctgggagttgttttcctggcatcagtttctgtctcatttggcattgcgtattgggaaaagcagaaccccagtcacaacaagtgcctccgaagttgcaatagcgagaaagactcctacaggaaccaagcatgccacgctcgttgcaacctccttaaggtggaggaagaagaagaatgcgaagaaggtcaaattccac

SEQ ID NO: 64147 - DNA, 248 bp, Glycine max
  Clone ID: 700759575H1
aaattcttccaccaagttatgggttcccttgtgttgcttcttttctccctcttaggtctctcttctagttccagcatatcaactcatcgttccatattggaccttgacctaaccaagtttaccacacagaaacaggtgtcttcactgttccaactatggaagagtgagcatggacgtgtctaccataaccacgaagaagaggcaaagagacttgagattttcaagaataacttgaactatatcaggga

SEQ ID NO: 64148 - DNA, 249 bp, Glycine max
  Clone ID: 700759576H1
aaacaaaaaacatagcagcaaagcttcaatttccgcttccttcaatttttgaacaagcttctcgcttccctagcttagcacctacatcacagatctttaacgataaaataaaaatggatccaaacgcggtgaagtccactctctccaatctggcgtttggaaacgtaatggcagcagctgcccgtgattatcagaaggaattgcttgctcaagagaagactcaaggatcaagttcagtacatgaggagg

SEQ ID NO: 64149 - DNA, 248 bp, Glycine max
  Clone ID: 700759577H1
cccaccccacttacatacacactctcccactcctccgagccggtcgagttgaatcggtgagtcagtgaccgagttgaaccatgtcggacgaagagcaccatttcgaatccaaggccgatgccggagcctccaagacctatcctcagcaggccggaaccatccgcaaaaacggctacatcgtcatcaagggtcgtccctgcaaggttgttgaagtttctacttccaagactggtaagcacggccatgct

SEQ ID NO: 64150 - DNA, 212 bp, Glycine max
  unsure (1)..(212): unsure at all n locations
  Clone ID: 700759578H1
cccaaacagtctacagtttttgacattctcttgggaatttctcaagattttgaaattgctggtaatactcttatgccagcattttcagaagatctggcagtagcctgttgaacagaaaaagctggcataagagtattaccagctttttctgttccacaggctactgccagatcttctgaaaatgcggaagtntctgcatgatctggaatttg

SEQ ID NO: 64151 - DNA, 249 bp, Glycine max
  Clone ID: 700759579H1
ggcaaagaggactgcagatgaggtgagagcaactgttcagcctcgtacacattacgaggctgaacagtggcaagactgtataaaaactctactgagagccatacatttggcgccctcaaactataccttaaggtttgatgcaggggttgacatgcaaaagttttcagcatcaacactacaaaaggcaaagaggactgcagatgaggtgagagcaactgttgcagagcttcaaaatgctgttcgtgtatt

SEQ ID NO: 64152 - DNA, 249 bp, Glycine max
  Clone ID: 700759580H1
taagatttgaaattttgataaaccgcgatcacaggttgccgcaccttaaaaccggaaacaaaagcaatcgttacttgatttcaagaatttctcaatttctttctacttctttgtgtacgatttcttaagggaaagaaaatcactctctgtgctggccacagacttcgtgaatcattttcttttccacacaacatacgatttcagaacactctcctatttgatataggacttcgtgtcagatttaaactt

SEQ ID NO: 64153 - DNA, 190 bp, Glycine max
  Clone ID: 700759581H1
ggctgttctttttggcgttaagaatgaaattctgagttctaacgccactaatcctatgctgacgcgacttcttgagaactgtaagagtctcaaatatctggttgatgagtgtccttttgcatttgtgaactagtatgtagtattttattcacttaaataaagcgcattactatgtgcaatgagtgtgttt

SEQ ID NO: 64154 - DNA, 246 bp, Glycine max
  Clone ID: 700759582H1
cgtcgtcccgccggctcgttttgaggcgccgcgttacgaagccggcatcaaggcgccctcttccatttaccattccgagagaggtccgacgacctctcaggttctcgcagttgtcgccggccttccggtcggcggcatcctcctgctcctggcaggactgaccctggctggaactctcaccgggctggtggtggcaacaccgctcttcatcatcttcagcccggtgctgattccggccacggtcgc

SEQ ID NO: 64155 - DNA, 248 bp, Glycine max
  Clone ID: 700759583H1
agaaagtcttccatagccccccaaaaatgaagagcaccatcttctttgctctctttctcttttgtgccttcaccacctcatacctaccttcagccatcgctgatttcgtgctcgataatgaaggtaaccctcttgaaaatggtggcacatattatatcttgtcagacataacagcatttggtggaataagagcagctccaacgggtaatgaaagatgccctctcactgtggtgcaatctcgcaatgag

SEQ ID NO: 64156 - DNA, 176 bp, Glycine max
  Clone ID: 700759584H1
aacactttccttagttcaatatggggaagcccttcttcactctctctctttcttccctttgcttgctactcttgtcgagtgcatgctttgctattacctccagcaagttcaacgagtgccaactcatcaacctcaacgcgttggaacccgaccaccgcgttgagtccgaggtggtc

SEQ ID NO: 64157 - DNA, 158 bp, Glycine max
  Clone ID: 700759585H1
aggctcgaggtggaggcaactccggttgaggcagggcgaacagtgcaattaaggagaatgccataacaataggagaggcattggaggcgacggcacagactgagggtcagaaagcggtggatcagagtgacgcctccgcgattcaggcggcggaggtg

SEQ ID NO: 64158 - DNA, 247 bp, Glycine max
  Clone ID: 700759586H1
gatcaagatggcagaaatgatcaacagtctttgtggtggtgatgaaaaactgatgcgtgaaaggacacacctgctgttggcttgttgttcaaggatggcaatttgtaagaaagatgtttggagagttgaatgtggaatcccttctggatttccgctcacagttatttgcaatagcatttttaatgagatgctcattagatatagctataaaaaattactgcgccaggctaaagctccaagtatgttt

SEQ ID NO: 64159 - DNA, 247 bp, Glycine max
  Clone ID: 700759587H1
tagactagttcaatatcctagtataccttaataaataatttaagatactatgatgagagcacggttcccattactgttgctggtacttgttttcctggcttcagtttctgtctcatttggcattgcttactgggaaaaagagaaccccaaacacaacaagtgtcaccagatctgcaatagcgagagagactcgtacaggaaccaagtctgccacgctcgttgcaacctccttaaggtggagaaagaa

SEQ ID NO: 64160 - DNA, 246 bp, Glycine max
  Clone ID: 700759588H1
aaagaagaaggctaatgatcacccttcaaaagaagggtccaaaccttatagcagatttgaagttgttgctgctcatatatggagatgtgcaactatggctcgtgctgaatctggtgagaattcaaaccaaccaattctagttcggtttagtgttaattttcgcaatagattgaaaccacctctccctcagaattattttgggaatgctttggcaaaagtagcgacacctgaatgttatgagggaga

SEQ ID NO: 64161 - DNA, 245 bp, Glycine max
  Clone ID: 700759589H1
tctagacaagatctccatatctgttcccaaaagcttgtttgtaagaatggcttccggtgaacagaaattccctcctcaacaacaacaaacacagcctgggaaggagcatgctatgactccagtaccccaattcactagccctgactacaagccttcaaataaacttcaagggaagattgcattagtcactgggggtgattctgggattggacgagcggtgtgtaacttgtttgccttagaaggtg

SEQ ID NO: 64162 - DNA, 247 bp, Glycine max
  Clone ID: 700759591H1
ggaaatggcaagtgagaggttttactctgtatcccagaggttgcagtcagatgaagcaaagcaagatatctatttgaaagttaacaaacctcttaccctcaggtttgaagatgttgtgcataaaataaaaattagcaaagggaaaggcttgttatgctacaacaaagaggtaagttctgaggagacactggtcttgaaagggatcagtggtgttatttttccaggtgaattgttagtcattttaggc

SEQ ID NO: 64163 - DNA, 246 bp, Glycine max
  Clone ID: 700759593H1
aacttattaacactttccttagttcaatatggggaagcccttcttcactctctctctttcttccctttgcttgctactcttgtcgagtgcatgctttgctattacctccagcaagttcaacgagtgccaactcaacaacctcaacgcgttggaacccgaccaccgcgttgagtccgaaggtggtcttattgaaacatggaactctcaacaccctgagctgcaatgcgccggtgtcactgtttccaa

SEQ ID NO: 64164 - DNA, 245 bp, Glycine max
  Clone ID: 700759594H1
aacacttccttagttcaatatggggaagcccttcactctctctctttcttccctttgcttgctactcttgtcgagtgcatgctttgctattagctccagcaagctcaacgagtgccaactcaacaacctcaacgcgttggaacccgaccaccgcgttgagtccgaaggtggtttgattcaaacatggaactctcaacaccctgagctgaaatgcgccggtgtcactgtttccaaactcaccctca

SEQ ID NO: 64165 - DNA, 243 bp, Glycine max
  Clone ID: 700759595H1
gtgaaagagaaaatccgagactctgattttgagagtcgagtgagtgagtgctgcttcctctgaatcaaatcattcatcactctctctggttctgagtttctgacaccaaaatggtgaatcctcgaattccacgttcaaggatccatactttcacacctttcacttcttatatctccatcgccctctgcattttctttgttctctctcttctcttcacttcccattctgattcatcccatcaat

SEQ ID NO: 64166 - DNA, 249 bp, Glycine max
  Clone ID: 700759596H1
gaagaaagggtcctttgttcccctcctctttctgtggatgctcagcctcagcagaaagaggaggggaacaagggaagaaagggtcctttgtcttcaattttgagggctttttactgaataagtatgtagtactaaaatgtgtgctgtaatagctcatagtgagcgaggaaagtatcgggctatttaactatgacttgagctccatctatgaataaataaatcagcatatgatgcttttgttttgtgtaa

SEQ ID NO: 64167 - DNA, 180 bp, Glycine max
  Clone ID: 700759601H1
gttggagatctcgtctttgaagtttctaagatgacttctccctacattaaatgtacagtctctttcttcatagcatttggaaatttggctgatgacaccatcaattttgaggcttttccccacaagctggtacagtttggagagattcaggaaaaagttgtattgaaattttcacaagag

SEQ ID NO: 64168 - DNA, 240 bp, Glycine max
  Clone ID: 700759606H1
ctcgagcgttcctctcaggaatgtgttcccaggacctattgtgttttaaatccacaaaatccttttgtgttaaataggtggatggggaaactgactttcccccagggcacttcccgaagtgttaaaagaatgcctctttcaatagggggaggagctggtgcaaagaatgctattctcatgaatatgccaaatgctgttctttcaatgtggagatattttgttggagactcgtctttgaag

SEQ ID NO: 64169 - DNA, 270 bp, Glycine max
  Clone ID: 700759607H1
gggaaagatctcgcaatggttaaagttaatgtagcatgtgctgctgttggcttgacatcaagttacactccaactccattgttggaatctggtttgcaaaaagacagagggttaattgtggagtattttggaaggatgtcttacgttgctcataacgttaatcagccccaagagaaagatttgttggagggaaatttttcctttgatattaaatctcgctctagattggaaaaagtttcctctacaaaagcacaatttgttagtggaaaa

SEQ ID NO: 64170 - DNA, 267 bp, Glycine max
  Clone ID: 700759608H1
gacgactacggcctcgaggtctccgtcggcctcccgcagcccgccgctcacgccgtccctgccagcgaggccgacaaggtcgacgaggacgacttgtctcgccgcctggccgaactcaaggctagaggttaattactctgtaataatactatcatcgtttctcgattctcattgctgacgcagtggaacattatatactatatgtttgtgtatatttaaccgagttcggttggcacttgttatgtggactccccctttgaggggtgt

SEQ ID NO: 64171 - DNA, 219 bp, Glycine max
  Clone ID: 700759611H1
tctctccattggtccttaaacactcatcagtcatcaccatggccaagctagttttttccctttgtgttctgcttttcagtggctgctgcttcgctttcagttccagagagcatcctcagtctgacgagtgccagatccaaaaactcaatgccctcaaaccggataaccgtatggagtcagacggagggctcattgagacatggaaccctatacaacaag

SEQ ID NO: 64172 - DNA, 273 bp, Glycine max
  Clone ID: 700759613H1
ccacaaaatccttttgtgttaaataggtggatggggaaactgactttcccccagggcacttcccgaagtgttaaaagaatgcctctttcaatagggggaggagctggtgcaaagaatgctattctcatgaatatgccaaatgctgttctttcaatgtggagatattttgttggagacctcgtctttgaagtttctaagatgacttctccctacattaaatgtacagtctctttcttcatagcatttggaaatttggctgatgaccttctcaat

SEQ ID NO: 64173 - DNA, 266 bp, Glycine max
  Clone ID: 700759614H1
cggtgctaaatccctagtaagccgtcatggtgaagtactcaagggagcctgacaatccaaccaagtcttgcaaggctagaggcgacgaccttagggttcattttaagaacactagggaaactgcctttgcaatcaggaagttgcccttggttaaagctatcaggtacttggaagatgttcttgcgcacaagcaggccattccgttcagacgtttctgtcgtggtgttggaaggacagctcaagcaaagaatagacactctaatggc

SEQ ID NO: 64174 - DNA, 272 bp, Glycine max
  Clone ID: 700759615H1
agcacttctccttttttttttctctgttgaaattgaaagtgttttccgggaaataaataaaataaattaaaatcttacacactctagccccgctgtcccttttaaactcccgagagagtataaaactgcatcgaatattacaagatgcactcttgtcaaatgaagggggggaaatgatactacaagccactaggcatgggtctagcaaaggaaacactaatgggaggtggaggccgtgtggccaaagttgaaattcagcagaagaagcctct

SEQ ID NO: 64175 - DNA, 155 bp, Glycine max
  Clone ID: 700759617H1
tcaatatggggaagcccttcttcactctctctttcttccctttgcttgctactcttgtcgagtgcatgctttgctattacctccagcaagttcaacgagtgccaactcaacaacctcaacgcgttggaacccgaccaccgcgttgagtccgaagt

SEQ ID NO: 64176 - DNA, 277 bp, Glycine max
  Clone ID: 700759618H1
aaaccttgctctatactacacagtacacacactagaagaataatggcttccatcctccactactttttagccctctctctttcttgctcttttcttttcttcttatccgactcagtcacccctacaaaaccaataaaccttgttgttctacccgttcaaaatgatggttccacagggctccattggtccaacctccaaaaaagaacccctctaatgcaagtaccagtcctggtggacctcaatggaaatcacttgtgggttaactgtgagcagcagt

SEQ ID NO: 64177 - DNA, 214 bp, Glycine max
  Clone ID: 700759622H1
cggtgctaaatccctagtaagctgtcatggctaagtactcaagggcgcctgacaatccagccaagtcttgcaaggctagaggcaccgacctgagggttcattttaagaacactagggaaactgcctttgcaatcaggaagttgcccttggttaaagctaagaggtacttggaagatgttcttgcgcacaagcaggccattccgttcagacgttt

SEQ ID NO: 64178 - DNA, 270 bp, Glycine max
  Clone ID: 700759623H1
gcagaactctgcttcttcggattccgatcgcacgcgccgtcaccatggtgaacgttccgaaaacaaagaagacatactgcaagagtaaggagtgcaggaagcacacgctgcacaaggttacccaatacaagaagggtaaggatagcattgctgcccaaggaaaacgccgttatgatcgcaaacaatccggttatggtggacaaactaagcccgtcttccacaagaaggctaaaaccaccaagaagattgttctgaggttgcaatgccagg

SEQ ID NO: 64179 - DNA, 267 bp, Glycine max
  Clone ID: 700759625H1
cttaattattaacacttccttagttcaatatggggaagcccttcactctctctctttcttccctttgcttgctactcttgtcgagtgcatgctttgctattagctccagcaagctcaacgagtgccaactcaacaacctcaacgcgttggaacccgaccaccgcgttgagtccgaaggtggtttgattcaaacatggaactctcaacaccctgagctgaaatgcgccggtgtcactgtttccaaactcaccctcaaccgcaatggcc

SEQ ID NO: 64180 - DNA, 265 bp, Glycine max
  Clone ID: 700759626H1
cgacactgatgatgatcctcttcaaaacggtggcacatactatatgttgccagttatgagaggaaagggcggtggtatagaagtagattcaactggatcagaaatatgcgctctcactgttgtgcaatcacccaatgagctcgataaggggattggactagtctttacatctccattacatgcccttcttatcgccgaaggctatcctttgagcattaagtgtggatcatttgcagttataacgctgtatgccggcatgcctact

SEQ ID NO: 64181 - DNA, 261 bp, Glycine max
  Clone ID: 700759627H1
gagcagcaagcatgtgtcagacatggagctggatgattgtgaggagaccactttgcatgatgtcaactttaaggaggagatgagacgaaagcagcaacagcaatatcgcgaggcatatgatgaagatgatgatgagccatctggtcaacgagtgcaatgtgctcaacagtagtgcaatttatggtagtagaggttctataatttctgcatggtttttatcttttgtttgcataatgcagttataactgcgtgataaattta

SEQ ID NO: 64182 - DNA, 169 bp, Glycine max
  Clone ID: 700759628H1
aagcctaggccttgagcaaacttaaagaaaccgaggtcgaagaagatcccgagctcgtaacatgcgaacaccagtgccaacagcagcggcaatagcactgagagtggcaagcgaacatgcttgcaacaatgtgacaggataaagcaagagcgagagaaacaagtcgaag

SEQ ID NO: 64183 - DNA, 266 bp, Glycine max
  Clone ID: 700759631H1
aattccttcacttgcagaacttagttctctgttgcatcatcatcatcttcattagtgttagccctaaacttcaccttcaaccatgaccacagtgccaccacacagtgtccaagtgcacacaacaacacaccgctacgaagccggcgtcgtcccgccggctcgttttgaggcgccgcgttacgaagccggcataaggggcccctttccatttaccattccgaagagaggtccgacgacctctcaggttctcgcagttgtcgccggcc

SEQ ID NO: 64184 - DNA, 182 bp, Glycine max
  Clone ID: 700759633H1
aagaaagtgaaggttctgagtctcaaagagaaccacgaagacataagaataagaacccttttcacttcaactctaaaaggttccaaactctcttcaaaaaccaatatggccacgttcgcgtcctccagaggttcaacaaacgctcccaacagcttcagaatctccgagactaccgcattttg

SEQ ID NO: 64185 - DNA, 271 bp, Glycine max
  Clone ID: 700759637H1
gcaaacagccttaaccttcgctgcccccaacgttgtgccattggccccacaaagagtgtctcccatattaccatctttcctaccaaattgaaagccccgcgctcctcacctcgttactctccgattagggttgcaaccgtggagcccgacacttcaactgtcgactacaactctgcgttctcagtgtttcctgcagaagcatgcgaaactgtaggaggggaagcctgcatggcggagatgtaccctgaaacgaagctacagccagaggcta

SEQ ID NO: 64186 - DNA, 220 bp, Glycine max
  Clone ID: 700759638H1
ctgcaaatcaacacttgctctaaagactgtgaattatggaatcctgcttgcacaaaagcaatgactatgtcatttaatccaaacccgtgttctgatgcgtggagtttggaatttctgaagcgtaccggatttcattgtgatatcatttgtgtcactggatggactgccactccaatgcaggatgttcaggttacaattgattggtttatttcctctcagg

SEQ ID NO: 64187 - DNA, 268 bp, Glycine max
  Clone ID: 700759639H1
cactcctgttgttgccgtttctattattgacaccaacagcttggagaaccagctcgaccagatgcctaggagattctatcttgctgggaagcaagagcaagagtttctaaaatatcagcagcagcagcaaggaggttcccaaagccagaaaggaaagcaacaagaagaagaaaacgaaggaagcaacatattgagtggcttcgcccctgaattcttgaaagaagcgttcggcgtgaacatgcagatagtgagaaacctacaaggtgag

SEQ ID NO: 64188 - DNA, 265 bp, Glycine max
  Clone ID: 700759640H1
cagagggcaattttagagcgagtgttgatttgcagcgcactcatcgtattagaggaatgattaaaatggtggccacagttggtattcctgagaatacaggtatatcattggcctgtgctatgaatagttcttttagggggcgcgccagttctgatatttacaccatctgctctcaagactgtgaattgtggaatcctgcttgcacaaaagcaatgactatgtcatttaatccaaacccgtgttctgatgcatggagtttggaatt

SEQ ID NO: 64189 - DNA, 213 bp, Glycine max
  Clone ID: 700759642H1
accagtgttgaagaggcttacaacaagctaacagttgaacttgagaaaagtgttcctacattggttggcattgaatgtcccaaggatgaaaaacttcctcgtcgcaaagtttttgataaacctaagacgcgctgcttcactattctccctatggagtttaatcttgtggttcgtcagaagtttttaaattttgtgaggttcattatgaggaag

SEQ ID NO: 64190 - DNA, 270 bp, Glycine max
  Clone ID: 700759644H1
cctagtacaccgtattaaagaatttaagatatactatgatgagagcgcggttcccattactgttgctgggagttgttttcctggcatcagtttctgtctcatttggcattgcgtattgggaaaagcagaaccccagtcacaacaagtgcctccgaagttgcaatagcgagaaagactcctacaggaaccaagcatgccacgctcgttgcaacctccttaaggtggaggaagaagaagaatgcgaagaaggtcaaattccacgaccacgac

SEQ ID NO: 64191 - DNA, 265 bp, Glycine max
  Clone ID: 700759646H1
cggctcgagcggctcgaggtaacagcccttccgttcgtgcgtggattgacgcgccatcgttcgtcgctgctgccgccgatcatcggcatcatcactatctgtctcccgcggcagcgcagcggcgttggtgtatcagtctgctccttccacggcggcatttacggcggcgcccggtggcttctcgggattccgcgtgccggcacgaattcagggtgaggaggagcacgacggcggctgtccgataagccgtcctctgcttctccga

SEQ ID NO: 64192 - DNA, 224 bp, Glycine max
  Clone ID: 700759648H1
ctgcaacaactctgttggctgatgggtgtccatatttgtatgctatggtgcatgatagttcagtgtctacaataccaggtgattttgtcattggtgttaagttgacaaccataaacaatatgtgtgcatatgggctcaatcctggtatttcaggttctcgtcttttgggcacatccccagtccatttcacagcaaactgtttggaatcaaatggcaacagtgag

SEQ ID NO: 64193 - DNA, 272 bp, Glycine max
  Clone ID: 700759650H1
cgacactgatgatgatcctcttcaaaacggtggcacatactatatgttgccagttatgagaggaaagggcggtggaatagaagtagattcaactggaaaagaaatatgccctctcactgttgtgcaatcacccaatgagctcgataaggggattggactagtctttacatctccattacatgccctttttatcgccgaagctatcctttgagcattaagtttggttcatttgcagttataacgctgtgtgccggcatgcctactgagtgggc

SEQ ID NO: 64194 - DNA, 270 bp, Glycine max
  Clone ID: 700759652H1
gagcagcaagcatgtgtcagacatggagctggatgattgtgaggagaccactttgcatgatgtcaactttaaggaggagatgagacgaaagcagcaacagcaatatcgcgaggcatatgatgaagatgatgatgagccatctggtcaacgagtgcaatgtgctcaacagtagtgcaatttatggtagtagaggttctataatttctgcatggtttttatcttttgtttgcataatgcagttataactgcgtgataaatttaccctttagg

SEQ ID NO: 64195 - DNA, 265 bp, Glycine max
  Clone ID: 700759654H1
tctcgagcgaatcggctcaggcaaaagcagaagacatggacttgacgagaccatctgcaccatgagacttcgccacaacattggccatacttcatcacctgacatctacaaccctcaagccggtagcgtcacaaccgccaccagccttgacttcccagccctctcgtggctcagactcagtgctgagtttggatctctccgcaagaatgcaatgttcgtgccacactacaacctgaacgcgaacagcataatatacgcattgaat

SEQ ID NO: 64196 - DNA, 264 bp, Glycine max
  Clone ID: 700759655H1
aattaactcatcgcacttctttcatcaactcatatttcacttacaaaacaccctctcctaccttctctcttatcacttccagccatgactgcaactgatattgctcgaacagcggtcggcatcataggaaacatcatctcgggcgctttgttcctgtccccagcgcccacttttgtcgaaatatgcaagaagggatcagtggagcagtactcggcagcaccatacctagcaacgctggtgaactgcatggtttggaccctgtac

SEQ ID NO: 64197 - DNA, 259 bp, Glycine max
  Clone ID: 700759656H1
tcgagctcgacgctctccattgtctttgaacactcatcaccatggccaagcatgttatcttccctttgtttccttcttttcagtggctgcttcgctctgagagagcaggcacagcaaaatgagtgccagatccaaaagctgaatgccctcaaaccggataaccgtatagagtcggaaggtgggttcattgagacctggaaccctaacaacaagccattccagtgtgccggtgttgccctctctcgctgcacccttaacc

SEQ ID NO: 64198 - DNA, 262 bp, Glycine max
  Clone ID: 700759657H1
ggcaacagtgagaacaccattgaattttgattctagcaagcagagcttttgtcaattttctattgaccttctcggtggaggaattttagtggacaaaactggagattggatcacacttatacaaaattctccaattagtaacttgttgagagttgctgcttggaagaaaggctgtttaatggttaagattgtgatgtctgggaatgcagcagtcaaaaggagtgattgggcctcattggtacaagtgtttttaacaaacagc

SEQ ID NO: 64199 - DNA, 256 bp, Glycine max
  Clone ID: 700759659H1
cttaattattaacacttccttagttcagtatgtgggaagcccttcactctctctctttcttcgctttgcttgctactcttgtcgagtgcatgctttgctattagctccagcaagctcaacgagtgccaactcaacaacctcaacgcgttggaacgcgaccaccgcgttgagtccgaaggtggtttgattcaaacatggaactctcaacaccctgagctgaaatgcgccggtgtcactgtttccagactcaccctca

SEQ ID NO: 64200 - DNA, 80 bp, Glycine max
  Clone ID: 700759660H1
ctagcttatgattacgatgttcaaggatgttcagcttctgtcgtttatctgttatacgacataatggattaattgctatg

SEQ ID NO: 64201 - DNA, 255 bp, Glycine max
  Clone ID: 700759661H1
gagctcgagcgcaaatggcaacagtgagtacaccattgaattttgattctagctagcagagctttcgtcagtttactattgaccttctcggtggaggaatcttagtggacaaaactggagattggatcacacttatacaaaattctaccaattagtaacttgttgagagttgctgcttggaagacaggctgtttaatggtcaagattgtgatgtctgggaatgcagcagtcaaaaggagtgattgggcctcattg

SEQ ID NO: 64202 - DNA, 265 bp, Glycine max
  Clone ID: 700759663H1
ctctgatgttgctttgttttctgtgacttacttgctctcccgtgttgcaactatgaaagggttggtttggctgctatgtgtttatggggtgccattgctcattgtgaacggttttcttgtgaccatcacatatctgcagcacacacactatgccttgcctcactatgattcatcgaatgggattggctgaagggtgctttggcaactatggacagagattatggaattctgaacgtgtttcaccacttaactgcatactcatgtg

SEQ ID NO: 64203 - DNA, 213 bp, Glycine max
  Clone ID: 700759665H1
ccgctttcttcctcctcattaaggcgcaactctctctctctctttctttttctttgttaggtttggtgacacttagttagaaagagcgtgcgaagagggtggggagaagatttagtgttgtggccatggcggagtctgagaagagtactgtgcttgttacgggagccggtggtcgcacaggacaaatagtttacaaaaaattaaaagagaggc

SEQ ID NO: 64204 - DNA, 271 bp, Glycine max
  Clone ID: 700759666H1
gtcgttattgtggagcaagaaacctgcaacattggcggggttagaatcaaagggggccattgcagttggaaaccatgcagatattgtagtttggcaaccagagctggagtttgtcctggatgatgattatcctgttttcatcaaacattctgagctctctgcttacatgggaagaaggttatctggaaaagttttggagacttttgttagaggaaaccttgtgtttaaggatgggaagcatgctcctgcaccgtgtggtgttcaaatacta

SEQ ID NO: 64205 - DNA, 223 bp, Glycine max
  Clone ID: 700759670H1
ggcggcgagatggcgcagatccaggtgcagcatcagagtccggcgtcggctcctcctccgaacggcgtggctaacgcgccgaacaacccgaaccagttcgttacgacgtcgttgtacgtcggcgatcttgagcagaatgtcaacgacgcacagctatacgatctgttcaaccaggtcgtccaagtcgtttcggtccgcgtttgcagggagctacgaggcgtcg

SEQ ID NO: 64206 - DNA, 249 bp, Glycine max
  Clone ID: 700759673H1
acaacagaaccaaactcagaaccaaactcagaaccaaactcgccaaaactagggttttgcattgatggcactgtgcaaccgcgtcagatcgggaatctctctcttcaccaaatccacgttccttacttcccagcgatccagtctccaacgatccctcgttgcccctttcatttccctcgcctccagaaattacgccaacgtgccggggcaaaaggaaaccaaagttaaggtccctctggctttgtttgg

SEQ ID NO: 64207 - DNA, 82 bp, Glycine max
  Clone ID: 700759674H1
gtcttggcatctccgcagcaccacccaccgtggaccaggtcgacaacagagagaaagagagagaagaacacacacacacaca

SEQ ID NO: 64208 - DNA, 256 bp, Glycine max
  Clone ID: 700759676H1
agtttgttgttcctcactgagctcaccatggcgaccagagccaagcttactttagctatcttccttaactgtcttttagccttgatttcaaacctagccttgggcaaacttaaagaaaccgaggtcgaagaagatcccgagctcgtaacatgcaaacaccagtgccaacagcaacggcaatacactgagagtgacaagcgaacatgcttgcaacaatgtgacagtatgaagcaagagcgagagatacaagtcgaag

SEQ ID NO: 64209 - DNA, 260 bp, Glycine max
  Clone ID: 700759677H1
gagaaacctacaaggtgagaacgaagaggaggatagtggagccattgtgacagtgaaaggaggtctaagagtcacagctccagccatgaggaagccacagcaagaagaagatgatgatgatgaggaagagcagccacagtgcgtggagacagacaaaggttgccaacgccaaagcaaaaggagcagaaatggcattggtgagaccatttgcacaatgagacttcgccaaaacattggtcagaattcatcacctgacatct

SEQ ID NO: 64210 - DNA, 272 bp, Glycine max
  unsure (1)..(272): unsure at all n locations
  Clone ID: 700759678H1
ggangacaagcgctattatcaggaatcttcgcaatcttctgagccttttcttgtatcgtcaaaattcttgccacaccaacattgtttcttgatgagatcaagacagttcttgatgacgagtatatggtctcctcttctccttttggctggtaacttgtgacgtggatgaagtatgctgatttggatcacatggtttatattactcttttccttgagcactattggctttcaaaatgtaattgtattctacggctcacgggatcatggaaatg

SEQ ID NO: 64211 - DNA, 271 bp, Glycine max
  Clone ID: 700759682H1
ggggtcagaggtgtctaaacagatggagcgaagaaagacaatccagacagagaagaagagtctgtccgatctgaaaagcagcggagaagactaccctggctccgactaccgtccccaagacagaaaaaactggatgtcccatctcgaccctcagaaactccgcatcaaccaaatcgtctggcccggcacccacgactccgcaaccaacaaaattggcatccctctcctcactcgccccttcgcccagtgccaatccctctccatctaccgc

SEQ ID NO: 64212 - DNA, 275 bp, Glycine max
  Clone ID: 700759683H1
aaaacatgttgcactgcgccaacacgtcggggaatctggctgtggctggggacatgacagtgttggaaagacagagggcgaggatgaagtggcaagaagagcaagggtacttttctggcaacagcttcaacggtgttttttcttcttcttctctgcacgttcatgattccattatggtggctgctgactccggttgtgcactcgctgaggtcgtggctcaggcccaggctcgctcaaccaattcttcttcaatttcaaggacttttagttgtcca

SEQ ID NO: 64213 - DNA, 269 bp, Glycine max
  Clone ID: 700759684H1
gattctatcttgctgggaaccaagagcaagagtttctaaaatatcagcagcagcagcaaggaggttcccaaagccagaaaggaaagcaacaagaagaagaaaacgaaggaagcaacatattgagtggcttcgcccctgaattcttgaaagaagcgttacggcgtgaacatgcagatagtgagaaacctacaaggtgagaacgaagaggaggatagtggagccattgtgacagtgaaaggaggtctaagagtcacagctccagccatgag

SEQ ID NO: 64214 - DNA, 274 bp, Glycine max
  Clone ID: 700759687H1
attttctctggagacgtcaggctcactgagaaaacaatttttacttgcagagatttggacatcttggttgtttattatacaatagcaactcaatttagaaaatttctaccgcattacattaggtggcatctgtataccttgttgatctacattctcccatcttttctcactgctgaaattaaatataagcggaatctgagtaatattcatatttccggcttattttacgacggcagatacaaattctggactaaacacgagagaaatcttgctt

SEQ ID NO: 64215 - DNA, 252 bp, Glycine max
  Clone ID: 700759689H1
ggaaaagttggaaaggatacgttcttggaagggattaatacttcgttaccaactttgggagcaggagagtctgcattcaatattcattttgaatgggacggaagcatgggaatccccggtgcgttttacataaagaactacatgcaagttgagttcttcctcaagagtttgactcttgaagccatttcaaaccaaggaaccatccgctttgtttgcaactcatgggtttataacactacactatacaaaagc

SEQ ID NO: 64216 - DNA, 245 bp, Glycine max
  Clone ID: 700759690H1
aacttattaacactttccttagttcaatatggggaagcccttcttcactctctctctttcttccctttgcttgctactcttgtcgagtgcatgctttgctcattacctccagcgagttcaacgagtgccaactcagcaacctcaacgcgttggaacccgaccaccgcgttgagtccgaacgtggtcttattgaaacatggaactctcaacaccctgagctgcaatgcgccggtgtcgatgtttcc

SEQ ID NO: 64217 - DNA, 256 bp, Glycine max
  Clone ID: 700759692H1
cttggttatgccttcagctgttgtgggaacagtacgttcattggagcgtgactctaatgcttgtactgttgcaagagctggagataatgtagctgtaatgttgcaaggtgtcgatggaaatcatgtgatggcaggagatgtattatgccatcctgactttcctgttgcagttgctaagcatttggagttgaaagtgctagtgttggatggtgcaagtcccatattggtgggcacacagttagagtttcacatacac

SEQ ID NO: 64218 - DNA, 262 bp, Glycine max
  Clone ID: 700759693H1
cggctcgaggtggaggcaactccggttgaggcagggcgaagagtgcaattaaggagaatgccataacaataggagaggcattggaggcgacggcacagactgtgggtcagaaagcggtggatcagagtgacgcctccgcgattcaggcggcggaggtgagagcaacgggaagtaacgttataacgccgggtggacttgcggctatggctcaatcagctgctgcttataatgctgactgcaagcttgaccaggacaaggtcaa

SEQ ID NO: 64219 - DNA, 274 bp, Glycine max
  Clone ID: 700759694H1
ggctaacacacaagaattctttgatggaaattttccagtggattcttggttaccaatttttgtgaattgtctttatcctgtaagtcaattaccttcagaagctgtcgttgtaaatgttacatgtggtagtggacgtggtggtttacccaccactgcttggattagttctgcagttaataatcgctcctcagatatcaacaaaaagattcgcacagcacttgggaaaggtaagaaaattgtttttcttactagagttgatccttttccagtagct

SEQ ID NO: 64220 - DNA, 159 bp, Glycine max
  Clone ID: 700759695H1
gtggcttagagccctttttgtatgtgctaccccacagctctcttctgagactcatgaggaggaaccaggaacttgaaagggttgttgttctttatctgcctggcctgctggctttttaggttgaaagtgtgctgaatcacttcaagttcctggttccac

SEQ ID NO: 64221 - DNA, 260 bp, Glycine max
  Clone ID: 700759702H1
tctagttcaatatcctagtataccttaataaataatttaagatactatgatgagagcacggttcccattactgttgctgggacttgttttcctggcttcagtttctgtctcatttggcattgcttatctggtaaaaagagaaccccaaacacaacaagtgtctccagagttgcaatagcgagagagactcgtacaggaaccaagcatgccacgctcgttgcaacctccttaaggtggagaaagagaatgtgaagaaggtg

SEQ ID NO: 64222 - DNA, 255 bp, Glycine max
  Clone ID: 700759703H1
atacagcgattcggctcagtccagaggaagctcgccaaaggagaaggaaagctcactctcgtattgaatggctgcaaaaagctgatgtgcctaccatagcacagattgaagagttccattcgatgcagaggatgatgaatgctcctgattcaaatgataatatcgatctactgttgagcattgatttgttgggcttacaaggagcaggtaaagcttttccaaacaagattgtttttgatgataagcttgtgttgg

SEQ ID NO: 64223 - DNA, 255 bp, Glycine max
  Clone ID: 700759704H1
tgaacactcatcaccatggccaagcttgttctttccctttgtttccttcttttcagtggctgcttcgctctgacagagcaggcacagcaaaatgagtgccagatccaaaagctgaatgccctcaaaccggataaccgtatagagtcggaaggtgggttcattgagacctggaaccctaacaacaagccattccagtgtgccggtgttgacctctctcgctgcacccttaaccgcaatgcccttcgtagaccttcc

SEQ ID NO: 64224 - DNA, 253 bp, Glycine max
  Clone ID: 700759705H1
agtacaccgtattaaagaatttaagatatactatgtcgagagcgcggttcccattactgttgctgggagttgttttcctggcatcagtttctgtctcatttggcattgcgtattgggaaaagcagaaccccagtcacaacaagtgcctccgaagttgcaatagcgagaaagactcctacaggaaccaagcatgccacgctcgttgcaacctccttaaggtggaggaagaagaagaatgcgaagaaggtcaaat

SEQ ID NO: 64225 - DNA, 253 bp, Glycine max
  Clone ID: 700759706H1
agaagatcaacctcgtcctgatcaccctccacagcgaccaagcaggcccgaacaacaagaaccacgtggaacaggatgtcagactagaaatggggttgaggaaaatatttgcaccatgaagcttcacgagaacattgctcgcccttcacgtgctgacttctacaacccaaaagctggtcgcattaccaccctcaacagtctcaccctcccagccctccgccaattcggactcagtgcccaatatgttgtcctc

SEQ ID NO: 64226 - DNA, 254 bp, Glycine max
  Clone ID: 700759707H1
gttgccgtttctattattgacaccaacagcttggagaaccagctcgaccagatgcctaggagattctatcttgctgggaaccaagagcaagagtttctaaaatatcagcaagagcaaggaggtcatcaaagccagaaaggaaagcatcagcaagaagaagaaaacgaaggaggcagcatattgagtggcttcaccctggaattcttggaacatgcattcagcgtggacaagcagatagcgaaaaacctacaagg

SEQ ID NO: 64227 - DNA, 185 bp, Glycine max
  Clone ID: 700759708H1
ttatgtacaagtacatactcagcctcatatctcggcgctcctgaatcgctcacacttgtagcgtctgccatatagtcgtagtagcatgcttgcttggcgaataagttcaacggggtcaacgtctggcacttcgagaagctcatcgcggtggagatcgaacgccgcggcgattacgatgatggtga

SEQ ID NO: 64228 - DNA, 106 bp, Glycine max
  Clone ID: 700759709H1
gcaagggtaaagacaaacactgccaacgcccccgaggaagccaaagcaaaagcagaagaaatggcattgacgagaccatatgcaccatgagacttcgacacaacat

SEQ ID NO: 64229 - DNA, 248 bp, Glycine max
  Clone ID: 700759710H1
cctacctctttttcttctctctcaacaacttcaccttcttcctcctcgatcatgtctcacttcaagggcaagtaccatgatgagcttatcgccaatgctgcgtacattggcactcctggaaagggtattcttgctgctgatgagtcaacagggacaattggcaagcgtttggccagcatcagtgtagagaacattgaatccaacaggcgagctcttagggagctgcttttcactgctcctggtgttct

SEQ ID NO: 64230 - DNA, 244 bp, Glycine max
  Clone ID: 700759711H1
cacttccttagttcaatatggggaagcccttcactctctctctttcttccctttgcttgctactcttgtcgagtgcatgctttgctattagctccagcaagctcaacgagtcccaactcaacaacctcaacgcgttggaacccgaccaccgcgttgagtccgaaggtggtttgattcaaacatggaactctcaacaccctgagctgaaatgcgccggtgtcactgtttccaaactcaccctcaa

SEQ ID NO: 64231 - DNA, 251 bp, Glycine max
  Clone ID: 700759712H1
ctaggcaggtcgattgacataacacccgaatccaagtgaaacgagaaaacactcatcatcatggattcagttgcattaaatggcaaaagcaatgataagcctcttcacgttgccatgctcccatggctggccatgggtcacatatacccttacttcgaagtcgccaagattcttgctcaaaagggtcactttgttaccttcataaacagccccaacaacattgaccgcatgcccaaaaccccgaaacactt

SEQ ID NO: 64232 - DNA, 252 bp, Glycine max
  Clone ID: 700759713H1
ctttgaacactcatcaccatggccaagcttgttctttccctttgtttccttcttttcagtggctgcttcgctctgagagagcaggcacagcaaaatgagtgccagatccaaaagctgaatgccctcaaaccggataaccgtatagagtcggaaggtgggttcattgagacctggaaccctaacaacaagccattccagtgtgccggtgttgccctctctcgctgcacccttaaccgcaatgcccttcgtaga

SEQ ID NO: 64233 - DNA, 257 bp, Glycine max
  Clone ID: 700759714H1
gaggactggggaagtactcccgctgcaatagacagttgcttgactgttgctgatcaatacgatatccagattaacatacatacagacaccctaaatgaagctggatttgtcgaacatagcattgcagcatttaaaggaagaactattcatacttaccacagtgaaggtgcaggaggtggtcatactccagatatcatcaaagtatgtggtatgaagaatgttctgccctcatcaacaaacccaacacgccctttaaa

SEQ ID NO: 64234 - DNA, 187 bp, Glycine max
  unsure (1)..(187): unsure at all n locations
  Clone ID: 700759718H1
ttctccttaatcgctccctccctatataaactcgctctcctttgctttcttcctgttacttcacttataaaaaatctccccgcgnntnnctncngccccttccgtgcttccagcgaccttccacccacacatgaccgacctgcaaaccgtttgcggaatgaccggcgacgtgggttcccccgacaag

SEQ ID NO: 64235 - DNA, 250 bp, Glycine max
  unsure (1)..(250): unsure at all n locations
  Clone ID: 700759719H1
caagtttaccacacaacatacccaatacncanngnnccaactanggatcagngtgcanggacgngggctnnatangtacgaagacgaggcatagagacnngagannnccaagaanaacccgagacanancagggacangaaagcatccagaaaatcaccccatnctcatcgnntaggattgaactagtttgctgacatcactcctcaagagttcagcaaaaagtacttgcaagctcccaaggatgtgtcg

SEQ ID NO: 64236 - DNA, 96 bp, Glycine max
  Clone ID: 700759724H1
gatcgaaggaagaaagtgtaataagacgactctcactactcgatcgctagtgattgtcattgttatatataataatgttatctttcacaactaaaa

SEQ ID NO: 64237 - DNA, 184 bp, Glycine max
  Clone ID: 700759725H1
cagctcgagcggctcgacagagaagtgaagctgttgagcttttttgcgagtccatttggcaaaagggagaaatgggcattgaaactgaagggtgtagagtatgagtacatagaacaagatatcttcaacaagactagtctccttctccagttgaacccggttcacaagaaggttccggttcttg

SEQ ID NO: 64238 - DNA, 254 bp, Glycine max
  Clone ID: 700759726H1
gcaagagggaggggtgctgatcgttccacaaaactttgcggtggctgcaaaatcccagagcgataactttgagtatgtgtcattcaagaccaatgatagaccctcgatcggaaaccttgcaggggcaaactcattgttgaacgcattgccagaggaagtgattcagcacacttttaccctaaagagccagcaggccaggcaggtgaagaacaacaaccctttcaggttcctggttccacctcaggagtctcaga

SEQ ID NO: 64239 - DNA, 282 bp, Glycine max
  unsure (1)..(282): unsure at all n locations
  Clone ID: 700759728H1
cgtagctcggtattcgagctccgatcgagctagacaattaaatacaatctgcctagatcatagagaggaaaacatataggtannagttcttgctcctccttgtattagcttctgatgtgacagtgaagagagcagaggcgaaagattgctagacaaggaggcacgggttccagggtagatgcttattcgacaggcaataatgtaatgtgtgcaggagcgatggtttcatcggtggtcaatgccgaggccctcttcgcaaatgcttttgcagcaggccatgtt

SEQ ID NO: 64240 - DNA, 261 bp, Glycine max
  Clone ID: 700759730H1
gtagttgtgagcgtggcattagcatttgcatgtacccattattgaagcaagcgcaaggtccttattcttctctttcatattgctctcttctcctaaaccactgtttatctaaaaaatcgctttgctttgtcaaaatcgtgcatgatcactacctcaaattgggtcttaacacctacacatacttgggcaatcgctgtctcgacctttactctgagttcggccaccttaacgatgcaccgaagtgtttgatgatatttccca

SEQ ID NO: 64241 - DNA, 273 bp, Glycine max
  Clone ID: 700759732H1
ctctccgcaagaatgcaatgttcgtgccacactacaacctgaacgcgaacagcataatatacgcattgaatggacgggcattgatacaagtggtgaattgcaacggtgagagagtgtttgatggagagctgcaagagggacgggtgctgatcgtgccacaaaactttgtggtggctgcaagatcacaatgtgacaacttcgagtatgtgtcattcaagaccaatgatacacccatgatcggcactcttgcaggggcaaactcattgttgaacg

SEQ ID NO: 64242 - DNA, 114 bp, Glycine max
  Clone ID: 700759734H1
gaaaagtcatggtggacgcaagcaggggcaacaccagcaggaggaagaggaagaaggtggcagcgtgctcagtggcttccccaaacacttcttggcacaatccttccacacaac

SEQ ID NO: 64243 - DNA, 93 bp, Glycine max
  Clone ID: 700759735H1
acaaaggcttagatgccctttgttaagtgtagaataacggcgtatagtaactatgtacccttgtgtaatgagtcactcaagtacctatgcggg

SEQ ID NO: 64244 - DNA, 58 bp, Glycine max
  Clone ID: 700759738H1
tgttagcgagtggaaatgtgggtgatgacactatcaattttgaggcttttcgagagaa

SEQ ID NO: 64245 - DNA, 248 bp, Glycine max
  Clone ID: 700759740H1
accctcgctcctcgccagaaattgtattgcagaggaaagaccgagaaaaaagaagaaggaattttgatggtaaagtaatattctaatttccaaaattcgattttgttgccgaaggaagaaaagaaggaaatgggaggttcatcggatacgaagctcctgcaagacctgttgttgtacgcgcgagcgcagcgctgagtagcttggtactattcgcgggtttgagacacctggaccctaatcgcgaacat

SEQ ID NO: 64246 - DNA, 261 bp, Glycine max
  unsure (1)..(261): unsure at all n locations
  Clone ID: 700759744H1
caacaagatgaagatgaagatgaagacgaagatgatgaagatgaacaaattccctctcaccctcctcgccgaccaagccattgaaagcgtgaacaagacgaggacgaggacgaagatgaagataaacctcgtcctagtcgaccaagccaaggaaagcgtgaacaagaccaggaccaggacgaggacngagatgaagatgaagatcaacctcgcaagagccgcgaatggagatcgaaaaagacacaacccagaagacctaga

SEQ ID NO: 64247 - DNA, 265 bp, Glycine max
  Clone ID: 700759745H1
cacgcccacaccaacctcatcaaaaggaagaggaaaagcacgaatggcaacacaagcaggaaaagcaccaaggaaaggaaagtgaagaagaagaagaagaccaagaccaggatgaggagcaagacaaagagagccaagaaagtgaaggttctgagtctcaaagagaaccacgaagacataagaataagaaccctttcacttcaactctaaaaggttccaaactctcttcaaaaaccaatatggccacgttcgcgtcctccagagg

SEQ ID NO: 64248 - DNA, 267 bp, Glycine max
  Clone ID: 700759746H1
aaaattcttccaccaagttatgggttcccttgtgttgcttcttttctccctcttaggtctctcttctagttccagcatatcaactcatcgttccatattggaccttgacctaaccaagtttaccacacagaaacaggtgtcttcactgttccaactatggaagagtgagcatggacgtgtctaccataaccacgaagaagaggcaaagagacttgagattttcaagaataacttgaactatatcagggacatgaatgcaaacagaaa

SEQ ID NO: 64249 - DNA, 271 bp, Glycine max
  Clone ID: 700759747H1
gggaaacaaaactacccttttgcttttgctctttgttctttgccatggagtggccacaacaacaatggccttccatgatgatgagggtggtgataaaaagtcaccaaaaagtttgtttttgatgagcaactccacgagggttttcaagactgatgcaggggaaatgcgtgtgctgaaaagccatggtggtaggatattttataggcacatgcacattggcttcatctctatggaaccaaagtccttgtttgttcctcagtacctcgactcg

SEQ ID NO: 64250 - DNA, 300 bp, Glycine max
  Clone ID: 700759748H1
tcgcaccacgcgtagatttcggctcgaggaggaagtggtgctgttgcattgcgtgaacaaattgaggtgtggtgtgcatgttcaacattgggcaccgatgatgggttcagctactgtgcaaatagcgacgtcaaaatttgttctttgcccgaatgcttcagcggcgaaggttgcgagtcccaagaagaatgccgtcatcaatttctcttccaacttcaaaggaagtgttaccaaaatccatgccattccccctaatggctctgtctctatctgctcttcgcgtgtgtctgtgtcaagttt

SEQ ID NO: 64251 - DNA, 255 bp, Glycine max
  Clone ID: 700759757H1
gcaagagaaaaaataccaaccatggcaaccatttctactgatcaaccaagaggatcctactcctatggaacctcctatggagcaccctatggaaccacctatgagaccaacagcagcattaacaaccctccttcacgccaaaccgtgaagttcataactgctgcaactattggcatcacactcttactcctgtctgggttgaccctcacaggcactgtcataggtttgatcattgcaacccctcttcttgttatc

SEQ ID NO: 64252 - DNA, 219 bp, Glycine max
  Clone ID: 700759758H1
ggttgttgccaaggttggaaatcacaaacaaattgtgggtttccatgttgctggaagataggaagactgggatatgcttcattgataccatatgttgagccagttgtgcaagctcaaagtgctgaagtttactttgacttcttccctgtggaggttgatagtcaagagggagttgctcacattggtgaattgaaatctggtgtctatgttccacacaac

SEQ ID NO: 64253 - DNA, 259 bp, Glycine max
  Clone ID: 700759760H1
gcaaaggattctacccgccgctcgatgggaattgcgcttcaaggcgtctcgtagggctaatccgcctcacgagggtcaccaacggcacgctacctttggggggccgaggcccctactgctggtcggcaaacggacggcgggcgcacgcgtcgcttctagcccggattctgacttagaggcgttcagtcataatccaacgcacggtagcttcgcgccacaggcttttcaaccaagcgcgatgaccaattgtgcgaatcaa

SEQ ID NO: 64254 - DNA, 268 bp, Glycine max
  Clone ID: 700759764H1
agtttctaagatgacttctccctacattaaatgtacagtctctttcttcatagcattttgaatttggctgatgacaccatcaattttgaggcttttccccacaagctggtgaagttggagagattcaggaaaaagttgtattgaaattttcacaagaggaatttcttacagcttggtcaactgaggtgcgtcctgcaacaactctgttggctgatgggtgcccatatttgtatgctatggtgcatgatagttcagtgtctacaatacc

SEQ ID NO: 64255 - DNA, 248 bp, Glycine max
  Clone ID: 700759768H1
cgctagctatctagcaagcaagcacagagatggaggcaaagcgaggccatgccctcatgtgcttggcacgtgtttcactcttcctctgcgctctaaccctatccgctgctcacggaagcaccacggttcaatacatcgcgagaaagttgaaactcggggacaacgagcttctgcgcacggagaagaagttcaaggttttcatggagaattacgggaggagctactccacagaggaggagtatttgcgc

SEQ ID NO: 64256 - DNA, 245 bp, Glycine max
  Clone ID: 700759769H1
gtatttttgctagaggccaaccctcgagcttctcgtacagttccatttgtatcaaaagcaattggccatcccttggctaaatatgctacccttgtcatgtctggaaagaccctctatgatttacagtttacaaaagaagttatccctaaatatgtgtcagtcaaggaagctgttcttccttttttaaagttcccaggctgtgacgtgtttttaagtcctgagatgcgaagtactggtgaggtcat

SEQ ID NO: 64257 - DNA, 254 bp, Glycine max
  Clone ID: 700759781H1
gttcaatatcctagtataccttaataaataatttaagatactatgatgagagcacggttcccattactgttgctgggacttgttttcctggcttcagtttctgtctcatttggcattgcttactgggaaaaagagaaccccaaacacaacaagtgtcttcagagttgcaatagcgagagagactcgtacaggaaccaagcatgccacgctcgttgcaacctccttaaggtggagaaagaagaatgtgaagaagg

SEQ ID NO: 64258 - DNA, 152 bp, Glycine max
  Clone ID: 700759786H1
aatatcctagtacaccgtattaaagactttaagatatactatgatgagagcgcggttcccattactgttgctgggagttgttttcctggcatcagtttctgtctcatttggcattgcgtattgggaaaagcagaaccccagtcacaacaagt

SEQ ID NO: 64259 - DNA, 165 bp, Glycine max
  Clone ID: 700759788H1
gaaattctgagttccaacgcctctaaccctatgctgacgcgacttcttgagaactgtaagagtctcaaatatctggttgatgagtgtccttttgcatttgtgaactagtatgtaatattttattcacttaaataaagcgcattactatgtgcaatgagtgtgttt

SEQ ID NO: 64260 - DNA, 251 bp, Glycine max
  Clone ID: 700759789H1
tgcgttttgtgggtactggggaggggttaggcctaaggtgccggggatgccggaggcacggtggttccgaccaagttgtctcccggagcggagatgactatgacggaccaggcggtggtgaagatcatggagattggggtggggttggtgccaccgcatcgggcgcatgagttgtacgaggggcttcactctcatctggaatcggtgggaattgatggtgtcaagattgatgtcacgcatattctagagat

SEQ ID NO: 64261 - DNA, 259 bp, Glycine max
  Clone ID: 700759793H1
ctctaaagaaggatatagttttgaagagatatgcatcaagaaagaagcgtttgagggagaagagaagttttgtgcaaaatccttgggaacagtaattggttttgccatttcaaagctgggaaagaacattcaagtactatcaagttcctttgtcaataagcaagagcaatacactgtggaaggagtgcagaatcttggagacaaagcagtgatgtgtcatgggctaaatttcagaactgcagtattttactgccataaa

SEQ ID NO: 64262 - DNA, 264 bp, Glycine max
  Clone ID: 700759796H1
atggcataatctctaaagtccgaatcatctcattctcatcaagttattatcaaataattaattaaattcctcgtggaatcttgttgaagccatgtctacagctggtcaggtcatcaagtgcagagctgcggtggcatgggaagcagggaagccactatcgatagaaaccatagaagtggcaccaccccagaaaggtgaagtgcgtttgaagatcctcttcaactccctttgccgtacagatgtttactggtgggatgctaaggg

SEQ ID NO: 64263 - DNA, 277 bp, Glycine max
  Clone ID: 700759801H1
gagactgtgaaggaaagcaagcgagagtgatggaaggtgtgcttcaagggaaatattaatggcaaagtgtatggtggcagatacacattgaagaagtgcaataaaagggagattgtttcagttgggttttttgtgcaatcacaaacaacaccataaattaatctccaaatcgcatgtgtagtgcttcatcatcagctcataaatctaaagcaggcatcatgatcttgatgctgaaggttgaaaagggtctgtgagctgcagcagcttaattgatctc

SEQ ID NO: 64264 - DNA, 184 bp, Glycine max
  Clone ID: 700759802H1
tgaaattttgataaaccgcgatcacaggttgccgcactttaaaaccggaaacaaaagcaatcgttacttgatttcaagaatctctcaatttcttcctacttctttgtgtacgatttcttaagggaaagaaaatcactctctgtgctggccacagacttcgtgaatcattttcttttccacacaa

SEQ ID NO: 64265 - DNA, 277 bp, Glycine max
  Clone ID: 700759803H1
cagtgcctactggtgttgcatggtggatgtacaacaatgaagacactcctgttgttgccgtttctattattgacaccaacagcttggagaaccagctcgaccagatgcctaggagattctatcttgctgggaaccaagagcaagagtttctaaaatatcagcagcagcagcaaggaggttcccaaagccagaaaggaaagcaacaagaagaagaaaacgaaggaagcaacatattgagtggcttcgcccctgaattcttgaaagaagcgttcggcgt

SEQ ID NO: 64266 - DNA, 275 bp, Glycine max
  Clone ID: 700759804H1
cttcactctctctctttctttcctttgcttgctactcttgacgagtgcatgctttgctattagctccagcaagctcaacgagtgccaactcaacaacctcaacgcgttggaacccgaccaccgcgttgagtccgaaggtggtttgattcaaacatggaactctcaacaccctgagctgaaatgcgccggtgtcactgtttccaaactcaccctcaactgcaatggcctccacttgccatcttactcaccttatccccggatgatcatcatcgccc

SEQ ID NO: 64267 - DNA, 276 bp, Glycine max
  Clone ID: 700759805H1
ccattggtccttaaacactcatcagtcatcaccatggccaagctagttttttccctttgttttctgcttttcagtggctgctgcttcgctttcagttccagagagcagcctcagcaaaacgagtgccagatccaaaaactcaatgccctcaaaccggataaccgtatagagtcagaaggagggctcattgagacatggaaccctaacaacaagccattccagtgtgccggtgttgcgctctctcgctgcaccctcaaccgcaacgcccttcgtaga

SEQ ID NO: 64268 - DNA, 275 bp, Glycine max
  Clone ID: 700759807H1
gtaccctcaacagcctcaccctcccagccctccgccaattccaactcagtgcccaatatgttgtagaagtcagcgcgtgaagggcgagcaatgttctcgtgaagcttcaaggtgcagatattttcctcaaccccgtttcttgtctcgcatcctctttcacgtggttgaggaaaattactgcaccgtgaagggcgagcaatggggaatgcagcagtcaaaaggagtgattgggcctcattggtacaagtgtttttaacaaacagcaacagtacaga

SEQ ID NO: 64269 - DNA, 275 bp, Glycine max
  Clone ID: 700759808H1
aaccactcttaatttctctctgccttgctcatttacacacctctccaacctttcactttcagctttatttgaatccctctctctcctttccaaatggccagcgttgaggttgcacatcaaacaccaacaacagttccagaaaatgaaacaaccgaggtaatcaagacccaggaaacaaccccggaaccagtatcagccactgaggctcctgcaacagaacaagcagcagctgaggttcctgctcaagaagaacaacaagcaactgaggttcctgc

SEQ ID NO: 64270 - DNA, 150 bp, Glycine max
  Clone ID: 700759809H1
attcaatatcctagtataccataataaataatttaagatactatgatgagagcacggttcccattactgttgctgggacttgtttacctggcttcagtttctgtctcattttgcattgcttactgggaaaaagagaaccccagacacaac

SEQ ID NO: 64271 - DNA, 274 bp, Glycine max
  Clone ID: 700759810H1
tatcgagcgattcggctcaggtagattcctctcctatatacacctcccatctctcactaaacaaacacacagcgacatagcaaaatactaaaaaatgtcaaaggacaaagtttccggtgatccaagacgcgcagtgtgcacaggcatcaccatcttcctcctcttagccggcgtcactctcctagtcctctggctggtctaccgtccccacaagccgcgcttcacagtaatcggcgccgccgtctacgacctaaacaccaccaccccaccgctg

SEQ ID NO: 64272 - DNA, 86 bp, Glycine max
  Clone ID: 700759811H1
atcagtcatcaccatggccaggctagtttggtccctgtgtgttctgcttctcagtggctgctgcttcgcgttgagtaccagagagc

SEQ ID NO: 64273 - DNA, 262 bp, Glycine max
  Clone ID: 700759812H1
agatttgtatctggagatggtgaagagatgacattgattccgggaaccagtgttgaagaggcttacaacaagctaacagttgaacttgagaaaagtgttcctacattggttggcattgaatgtcccaaggatgaaaaacttcctcgtcgcaaagtttttgataaacctaagacgcgctgcttcactattctccctatggagtttaatcttgtggttcgtcagaagtttttaaattttgtgagtgtcattatgaagaaaaggg

SEQ ID NO: 64274 - DNA, 271 bp, Glycine max
  Clone ID: 700759813H1
tgggtttccttgtgttgcttcttttctccctcttaggtctctcttctagttccagcatatcaactcatcgttccatattggaccttgacctaaccaagtttaccacacagaaacaggtgacttcactgttccaactatggaagagtgagcatggacgtgtctaccataaccacgaagaagaggcaacgagacttgagattttcaagaataacttgaactatatcagggacatgaatgcaaacagaaaatcaccccattctcatcgtttagg

SEQ ID NO: 64275 - DNA, 272 bp, Glycine max
  Clone ID: 700759814H1
agaatgcaatgttcgtgccacactacaacctgaacgcgatcagcataatatacgcattgaatggacgggcattgatacaagtggtgaattgcaacggtgagagagtgtttgatggagagctgcaagagggacgggtgctgatcgtgccacaaaactttgtggtggctgcaagatcacagagtgacaacttcgagtatgtgtcattcaagaccaatgatacacccatgatcggcactcttgcaggggcaaactcattgttgaacgcattacca

SEQ ID NO: 64276 - DNA, 271 bp, Glycine max
  Clone ID: 700759815H1
ttgtctttgaacactcatcaccatggccaagcttgttctttccctttgtttccttcttttcagtggtacgttcgctctgagagatcaggcacagcaaaatgagtgccagatccaaaagctgaatgccctcaaaccggataaccgtatagagtcggaaggtgggttcattgagacctggaaccctaacaacaagccattccagtgtgccggtgttgccctctctcgctgcacccttaaccgcaatgcccttcgtagaccttcctacaccaac

SEQ ID NO: 64277 - DNA, 215 bp, Glycine max
  Clone ID: 700759816H1
ctgaggtagcgttgaccacagatctgaatttctttgcttttggtatcaatgccgagaacctgcaaggaagttcctctggttgttctcggcattgataccaaaagcaaagaacaaccagaggaacttccttgcaggttcgaaagacaatgtgataagccagatacctagtcaagtgcaggagcttaacttccctgggtctgcaaagatattgagaa

SEQ ID NO: 64278 - DNA, 275 bp, Glycine max
  Clone ID: 700759818H1
gcaaagcaatggctacttcaaagttgaaaacccagaatgtggttgtatctctctccctaaccttaaccttggtactggtgctactgaccagcaaggcaaactcagcggaaactgtttctttcagctggaacaagttcgtgccgaagcaaccaaacatgatcctccaaggagacgctattgtgacctcctcgggaaagttacaactcaataaggttgacgaaaacggcaccccaaaacccgcgtctcttggtcgcgccctctactccacccccatc

SEQ ID NO: 64279 - DNA, 110 bp, Glycine max
  Clone ID: 700759821H1
ttccttcacttgcagcactgttgcatcatcatcttcattgcaaaaccctaaacttcaccttcaaccatgaccacacaagtaccaccagacagtgtccaagttcacacaac

SEQ ID NO: 64280 - DNA, 273 bp, Glycine max
  Clone ID: 700759822H1
atcggtgatggtttgatgcctattctgcataaatctgcaccacaggtagcattattctctgctcgagggccaaatataaaggacttcagcttccaagaggcagatcttctcaaaccagatatattagctcctggttcattgatttgggctgcttggtgtccaaatggaactgatgagccaatttatgttggtgaagcgtttgccatgatatctggaaccagcatggctgcaccacatatagctggaattgctgctcttataaagcagaagcat

SEQ ID NO: 64281 - DNA, 185 bp, Glycine max
  Clone ID: 700759826H1
attgtggttactcagaagttgtgaaattttgtgaggttcattatgaagaaaagggacaagcttagttgtcaagttggaatcaacccatattctatggaatggactggttcggccaatagattactgagtaagggcaacgatattctgtgttgcgattatgctacttttgatggtttgattaccac

SEQ ID NO: 64282 - DNA, 274 bp, Glycine max
  unsure (1)..(274): unsure at all n locations
  Clone ID: 700759827H1
tncaatcgagcggctcgaggtgaatagaaagaaagcctcgtctagtaaacccagtttttacaaagttaacataacaaaataaatcaccaaccatgtctatcatcccaaacttgttcggtggtcgacgaagcaacgtcttcgacccagtttctctggacgtgtgggacccattggaagggtttccgttttccacagccaacgctggcgaaagtagtgccatagccaacactcgcgtggactggaaggagacaccgcaggctcacgtgttcagcgt

SEQ ID NO: 64283 - DNA, 230 bp, Glycine max
  Clone ID: 700759828H1
tcgatctcactaatcctttctcttctcagttctctcgttagtattcttccaatctccgtcgatcaccactaacaccaccatgacgtggctcctccgatccatcaagtcaaaactcctctcttcctcatcttcactttctagaaccttcccctctccctcacgctccggccccacacttgacctccctcagatcggagccatctctcccctccccgatctcttccacacaa

SEQ ID NO: 64284 - DNA, 142 bp, Glycine max
  Clone ID: 700759833H1
tcaggcaaatggtgcttggagggtcattgtaaacaatgtgtctggtcatacatgcactgtacatctataccgagaaaaggaggataccatcactcataaagtggtatacagttcagtatcggttaagggtccacacaacata

SEQ ID NO: 64285 - DNA, 272 bp, Glycine max
  Clone ID: 700759834H1
atctagttctgccattgacccaccaccgacactgtccctggggctatccttctcatctgaccaaagacagacatcaacaagacattcagctttacatgccatgcaatgtttcagcaatggagttagcatcattagtgttgcttgagaatatggtccttggattcacagattaattacatatattaatatttctctagtttcctgtctttttggtgggagaaagagaaagaggttgaaggaaagggcgatggattagagaaggcaagaagagt

SEQ ID NO: 64286 - DNA, 270 bp, Glycine max
  Clone ID: 700759835H1
ctcagagtcaagacaagcaacgtgatgcagagggcgaagacggtaacgatgatgaaggggacgatgatgacgatggagatggtggatttggggagggtgaagaggagttgtcatctgaagatggaggtggatatggcaacaattccaacaacaagagcaactcaaagaaggcacccgaaggtggcgcaggtggagcagaagagaatggggaagaggatgaagacgaagatggtgacgacgaaaattaatggtagtgatcgatgactcata

SEQ ID NO: 64287 - DNA, 149 bp, Glycine max
  Clone ID: 700759837H1
ttctctccattggtccttaaacactcatcagtcataaccatggccaagcaagttgtttccctttgttgtctgcttatcagtagctgctgcttcgctataagtaccagagagcagcctcagagagaagagtgccagatccaaaaactcaa

SEQ ID NO: 64288 - DNA, 84 bp, Glycine max
  Clone ID: 700759839H1
cacacgtcaaaatatccaatcatttcacatggaaagtgccactcaagtcggtacgacggctcagcccagctcagcttcagcgtc

SEQ ID NO: 64289 - DNA, 174 bp, Glycine max
  Clone ID: 700759840H1
gaaattctttctaaagttgcacaagatatggttgatgaatggtttgattgtgttgatgaggaggattcctttgaggaagtttctttaagtgcagcacttaatggtgttgagggtttggactatatggaaagaattcctcttgccacatctgagggttttcctcatgtgcttcca

SEQ ID NO: 64290 - DNA, 174 bp, Glycine max
  Clone ID: 700759841H1
gcttgttgttcctgcaatttttttttttaaaaaaaacacacgaagtgttaagttggggctttgctttttgtgtgaaggagagaaaatttgagcactgagttgatgagaagagagaaactataatgtgtggcgagagacaacgagtttctgcttgtgctgcctgcaccaacaact

SEQ ID NO: 64291 - DNA, 108 bp, Glycine max
  Clone ID: 700759842H1
acaccattgagtgttgcacttaaaggtgttgagggtttagactatatggaaagaattcctcttgccacatctgagggtttttctcatgtgcttccacacaacatacga

SEQ ID NO: 64292 - DNA, 161 bp, Glycine max
  Clone ID: 700759843H1
tgaaattttgataaaccgcgatcacaggttgccgcaccttaaaaccggaaacaaaagcaatcgttacttgatttcaagaatctctcaatttcttcctacttctttgtgtacggtttcttaagggaaagaaaatcactctctgtgctggccacagacttcgt

SEQ ID NO: 64293 - DNA, 255 bp, Glycine max
  Clone ID: 700759844H1
ggagagataacttctgttctagaaagccttgctgataatggtaatcacgttgtggaaagtccaggttctggaaatttgacaagtcacactcataatgatttcatgtttcagcatatcttcccccatcacaatcttattgggaatgaataaagccatcagccaatgagctctgttgctggatatatgcacccagctctgcattctgatgtaaactggggattaagaacattctcctatcatcagacttctaacgct

SEQ ID NO: 64294 - DNA, 70 bp, Glycine max
  unsure (1)..(70): unsure at all n locations
  Clone ID: 700759845H1
gtcgctaaaagcnaaagaagacagggatatgcctcatcgataccatacgttaagccagcacagcaagcac

SEQ ID NO: 64295 - DNA, 271 bp, Glycine max
  Clone ID: 700759848H1
ggaatttcttacagcttggtcaactcaggtgcgtcctgcaacaactctgtttgctgatgggtgcccatatttgtatgctatggtgcatgatagttcagtgtctacaataccaggtgattttgtcattggtgttaagttgacaaccataaacaatatgtgtgcatatgggctcaatcctggtatttcaggttctcgtcttttgggcaccattcctcagtccatttcacagcaaactgtttggaatcaaatggcaacagtgagaacaccattg

SEQ ID NO: 64296 - DNA, 270 bp, Glycine max
  unsure (1)..(270): unsure at all n locations
  Clone ID: 700759849H1
gcaatggctacttcaaagttgaaaacccagaatgtggttgtatctctctccctaaccttaaccttggtactggtgncactgaccagcaaggcaaactcagcggaaactgtttctttcagctggaacaagttcgtgccgaagcaaccaaacatgatcctccaaggagacgctattgtgacctcctcgggtttgttacaactcaataaggttgacgaaaacggcaccccaaaaccctcgtctcttggtcgcgccctctactccacccccatc

SEQ ID NO: 64297 - DNA, 271 bp, Glycine max
  Clone ID: 700759852H1
aaattcgggaactgagcaaacatgccaaatctagttcaaggaaaaccatttcttctgaagataaacctttcaacttgagaagccgcgaccccatctattccaacaagcttggcaagttgtttgagattaccccagagaaaaaccctcagcttcgggacttggatgtcttcctcagtgttgtggatatgaacgagggagctctttttctgccacacttcaattcaaaagccatagtggtactagtgattaatgaaggagaagcaaacattga

SEQ ID NO: 64298 - DNA, 138 bp, Glycine max
  Clone ID: 700759855H1
ctcgagccttatcggcttacaggtgttggttgtattgtgtataatgttgtgtgtagtgtagtgtagtgtggtagaagaacagcagcagaagatgggcagtgatgcactcagagatatttaacacctccagtccacaca

SEQ ID NO: 64299 - DNA, 267 bp, Glycine max
  Clone ID: 700759858H1
aagcctggtagatttgagagtttcttcctatttagcactgaagctcaacaatcctacttgcaaggattcagcaggaacattttagaggcctcctacgataccaaattcgaggagataaacaaggttctgtttagtagagaggaagggcagcagcaaggggagcagaggctgcaagagagcgtgattgtggaaatctcgaaggaacagattcgggcactgagcaaacgtgccaaatctagttcaaggaaaaccatttcttctgaagat

SEQ ID NO: 64300 - DNA, 266 bp, Glycine max
  Clone ID: 700759860H1
tgcgtctcttcctcttctctttcgatccatccctcattcctactcctccaatccaaccacctcatcctcacactcacatatacatatatctgaacgcgtatcgtccctcctatggcttcaaagcgcatcctcaaggagctcaaggacttgcagaaagacccaccaacttcttgcagcgctggtccagtagctgaggacatgttccattggcaagcaacaataatgggtcctacaaatagtccttatgctggaggtgtattcctagt

SEQ ID NO: 64301 - DNA, 265 bp, Glycine max
  Clone ID: 700759861H1
attgatacaagtggtgaattgcaacggtgagagggtgtttgatggagagctgcaagagggacgggtgctgatcgtgccacaaaactttgtggtagctgcaagatcacagagtgacaacttcgagtatgtgtcattcaagaccaatgatacacccatgatcggcactcttgcaggggcaaactcattgttgaacgcattaccagaggaagtgattcagcacactttcaacctaaaaagccagcaggccaggcagataaagaacaac

SEQ ID NO: 64302 - DNA, 244 bp, Glycine max
  unsure (1)..(244): unsure at all n locations
  Clone ID: 700759864H1
agtttctaagatgacttctccctacattaaatgtaaagtctctttcttcatagcatttggaaatttggctgatgacaccatcaattttgaggcttttccccacaagctggtgcattttggagagattcaggaaaaagttgtattgaaattttcacaagaggaatttcctacagcttggtcaactcaggtgttcggngcaacaactctnntggctgatgggtgcccatatttgtatgctatggtg

SEQ ID NO: 64303 - DNA, 268 bp, Glycine max
  Clone ID: 700759866H1
gttaggccaaaccaccattgatgaatggatggacaaagcgttggttcccagtttccaccaactgaaaaagaatttgaattcaaccacacatgaccataactcttcgatgctgtttaggctcgaagatgatggctactccgatcgctggggctcccaagagtggttacctgctactgtgagagtggtgggggaatagtatattattcaaacagtggtggtgaatggtgatatccgtttttttttgtggtagaaatgtaaatagaacact

SEQ ID NO: 64304 - DNA, 263 bp, Glycine max
  Clone ID: 700759867H1
ctttgttctatacttcaagagtgcgttcaagtctcacaaaacggtgcatttgaacacgtgtcaatggattaaaactgtagaacggacacacccttgttacttggacgtggaaattcttgttcgcgctcctttttatcttggcattgcgtttttgtgtgtgtacaatatcacacaacccaaccttattcgttcttctgttgttctgaggcgagccatgacggacggtcatgctctcaacaacatcagcctctgtggccgtggat

SEQ ID NO: 64305 - DNA, 110 bp, Glycine max
  Clone ID: 700759869H1
gttcaatatcctagtacaccgtattagagaatttaagatatactatgatgagagcgcggttcccattactgttgctgggagttgttttcctggcatcagtttctgtctca

SEQ ID NO: 64306 - DNA, 267 bp, Glycine max
  Clone ID: 700759870H1
cattattctagtacgtagcttaacaatattttaagcaattgctgctacaatgatagcgcggtttcctttgttgccgttgctgttgctgggaattgtttttctagcatcagtttctgtctcattacaggtgaagccgccgagtcaccacgagtgcctccagagttgcgatagtgaaacggatccatacaagcggaaagcttgcaagcttagttgcaagttcgttcctgagcacggggagcaacaacatgaagaagaagaaagagaaag

SEQ ID NO: 64307 - DNA, 98 bp, Glycine max
  Clone ID: 700759871H1
gaaattctgagttccaacgccactaaccctatgctgacgcgacttcttgagaactgtaagagtctcacatatctggctgatgagtgtccttttgcatt

SEQ ID NO: 64308 - DNA, 219 bp, Glycine max
  unsure (1)..(219): unsure at all n locations
  Clone ID: 700759873H1
ctcgagccgtaatcggactcgagttaatagtttngggcagcagcaacacttgttgttttttagtttttctgcctagtatacatcctacactctccaacccccgaagcctgctacacagttgcccaatttagagcatcatcatcttcaaataccaaattatttccagcatcattatcatcatcttgatccatctctcccaccagtcattcattccacaca

SEQ ID NO: 64309 - DNA, 266 bp, Glycine max
  unsure (1)..(266): unsure at all n locations
  Clone ID: 700759874H1
gttcaatatcctagtataccttaataaataatttaagatactatgatgagagcacggttcccattactgttgctggcacttgttttcctggcttcagtttctgtcttatttggcattgcttactgggaaaaagagaaccccaaacacaacaagtgtctccagagttgcaatagcgagagagactcgtacaggtaccaagcatgccacgctcgttgcaacctccttaaggtggagaaagaagaatgtgagaagtgtanaattccacg

SEQ ID NO: 64310 - DNA, 265 bp, Glycine max
  Clone ID: 700759875H1
ccaaaaagcaatctggatcctacaatctatggtgagcaaaccagtaagataacagcagatgcccttgatctagatggatacacagtggacgaggcactagcaagtcggaggttatttatgttagattaccatgatgtattcatgccatatataaggcggataaatcagacatatgccaaggcttatgcgacaaggactatcctttttctgagagaaaatggaaccttaaagccagtggccatcgaattaagtttgccacatcctg

SEQ ID NO: 64311 - DNA, 265 bp, Glycine max
  Clone ID: 700759876H1
aactcgagcgaatcggctcgagagcaaaatgaccaagttcacaaccctcctcatctctcacctcttctgcatcgcccaaacttgcagcgcctacaaatggcagcaccagcaagatagctgccgcaagcagctccagggggtgaacctcacgccctgcgagaagcacatcatggagtagatccaaggccgcggcgatgacgatgatgatgatgacgacgacaatcacattctcaggaccatgcggggaagaatcaactacataagg

SEQ ID NO: 64312 - DNA, 264 bp, Glycine max
  Clone ID: 700759877H1
aaaaaccatcatgttgacatgtctgaggaagggagggtgactgtgtttttggccaagccactcaagtgcaagactgttccgcgtttcactccgttcgctgcctgaagactgtgaatggaatggtttctctagttgtgtgtgctttacctactctatatttttaccttatttttgcttactttgtggcactagtatttgttttgggaagtagcgttgcttctgtaaacttggtggcaggggtatattatttatggaaataagtgg

SEQ ID NO: 64313 - DNA, 165 bp, Glycine max; identical to SEQ ID NO: 63925
  Clone ID: 700759880H1

SEQ ID NO: 64314 - DNA, 179 bp, Glycine max
  Clone ID: 700759881H1
aaaccttgctctatactacacagtacattcactagaagaattatggcttccatcctccactactttttagtcctctctctttcttgctctttacttttcttcttatccgactcagtcacccctacaaaaccaatataccttgttgttctacccgttcaaaatgatggttccacagggca

SEQ ID NO: 64315 - DNA, 217 bp, Glycine max
  Clone ID: 700759882H1
atgggttttttcctaggttggaaatcacaaacaaattgttggtttccagtatgctggaatctaaggaagactgggatatacttcattgataccatatgtgtagccagttgtgcaagctcaaagtgctagagtttacattgacttcttccctgtagagggtgatagtcaagagggagttgctcactgtggtgaactgtaatctggtgtctatgttcca

SEQ ID NO: 64316 - DNA, 266 bp, Glycine max
  Clone ID: 700759884H1
tcaatatcctagtataccgtattaaataatttaagatatactatgatgagagcgcggttcccattactgttgctggaagttgttttcctggcatcagtttctgtctcatttggcattgcgtattgggaaaagcagaaccccagtcacaacaagtgcatccgaagttgcaatagcgagaaagactcctacaggaaccaagcatgccacgctcgttgcaacctccttaaggtggaggaagaagaagaatgcgaagaaggtcaaattcc

SEQ ID NO: 64317 - DNA, 162 bp, Glycine max
  Clone ID: 700759886H1
agcagcagcgagagagcgaagaaagtgaagattctgagttacgaagacataagaataagaacccttttctcttcggctctaacaggttcgaaactctcttcaaaaaccaatatggtcgcattcgcgtcctccagaggttcaaccaacgctccacacaacata

SEQ ID NO: 64318 - DNA, 232 bp, Glycine max
  Clone ID: 700759887H1
atcagttacacccctggtgatgccgtttccgtcgttgttgctgagtccaatgctgaattcaaccacttcatagatttctcagtgccccatgaagcaacagagtctcgttttttagtaccccacttggaatcctcggattctcgtgcttctgccctagctcttcagatcactcttttccccaacaaaggcttcaaaattggcatcagcatccaccatgctgctgttgatggaa

SEQ ID NO: 64319 - DNA, 265 bp, Glycine max
  Clone ID: 700759888H1
ttgtctttgaacactcatcaccatggccaagcttgttctttccctttgtttccttctgttcagtggctgcttcgctctgagagagcaggcacagcaaaatgagtgccagatccaaaagctgaatgccctcaaaccggataaccgtatagagtcggaaggtgggttcattgagacctggaaccctaacaacaagccattccagtgtgccggtgttgccctctctcgctgcacccttaaccgcaatgcccttcgtagaccttcctac

SEQ ID NO: 64320 - DNA, 257 bp, Glycine max
  Clone ID: 700759890H1
tggtgatgataacttaattagtgttcatgaatacgtcaagccttactttagtggttctaaattgagaagctttctagctggtcataatatcaccattactgatggtattgacaagactagtgcaactttgcaatttagaaagttagcagattgtgattttctcaagagaaactttaagcagatgtctaatgttttgtgggtagctcctgaggacaaggcgagtttatggtcacaacttcattatgtttcgtgtaata

SEQ ID NO: 64321 - DNA, 250 bp, Glycine max
  Clone ID: 700759891H1
gctggttcacattcttcagaagatttttctgaaaaggaagatcaagaaaaacccaaaaagattgatgccagattgagacaaagaatagatcctcaatacaatgaggttcaggctcagatggaaacaaatttgtttaaattgtctcttgatgatgttgaaactcctaaaggttccatgttggatcttaaaatttctcaatctaaaattgcacttcccaataggtcactacgcagaatggttcctccaactg

SEQ ID NO: 64322 - DNA, 263 bp, Glycine max
  Clone ID: 700759892H1
gaaaaacccaaaaagattgatgccagattgagacaaagaatagatcctcaatacaatgaggttcaggctcagatggaaactaatttgtttaaattgtctcttgatgatgttgaaactcctaaaggttccatgttggatctgaaaatttctcaatctaaaattgcacttcccaagaacacagttggaggaaccattctgcgtagtgatctattggcaaattttttgacagagggcaattttagagcaagtgttgatttgcagcg

SEQ ID NO: 64323 - DNA, 269 bp, Glycine max
  unsure (1)..(269): unsure at all n locations
  Clone ID: 700759896H1
gactaccttaattccacatgatatactatcttanctcntnangatataaccgnttcattctcaatagcatctcacaaggtgtactgagaaggaatcacacaagagaaattttgggtggatcttggcaatttaaatttggtccaaaaatagtaagatagaaaaccatagtttatatagttttcatgtcctagctaacggtggcgcaccaaagggggtcaggtgagtttatgcggttcacggaaagtcatggcggcggtggtggcggtgac

SEQ ID NO: 64324 - DNA, 268 bp, Glycine max
  Clone ID: 700759901H1
atatcctagtacaccgtattaaagaatttaagatatactatgatgagagcgcggttcccattactgttgctgggagttgttttcctggcatcagtttctgtctcatttggcattgcgtattgggaaaagcagaaccccagtcacaacaagtgcctccgaagttgcaatagcgagaaagactcctacatgtaccaagcatgccacgctcgttgcaacctccttaaggtggaggaagaagaagaatgcgaagaaggtcaaattccacgac

SEQ ID NO: 64325 - DNA, 264 bp, Glycine max
  Clone ID: 700759902H1
cactcatcagtcatcaccatggccaagctagttttttccctttgttttctgcttttcagtggctgctgcttcgctttcagttccagagagcagcctcagcaaaacgagtgccagatccaaaaactcaatgccctcaaaccggataaccgtatagagtcagaaggagggctcattgagacatggaaccctaacaacaagccattccagtgtgccggtgttgccctctctcgctgcaccctcaaccgcaacgcccttcgtagacct

SEQ ID NO: 64326 - DNA, 262 bp, Glycine max
  Clone ID: 700759903H1
cgacaattaacaaacgaatggtgagaagaagggagagaatggaggaaaaggcaaaagctgaggagaagaagatagacttgttatgcaggcccaggattacttgttcgttcgggcgtttgtcccatttgcggatagtcgtgctgataaaagcttggaaggaatcagattgccgtggtgacatggaagtcatattggggggcgtggcttctctggaggatgagatttcatggttcaaggcagaagccaacaagtggggtatttc

SEQ ID NO: 64327 - DNA, 265 bp, Glycine max
  Clone ID: 700759904H1
gtacaccgtattaaagaatttaagatatactatgatgagagcgcggttcccattatgaaatgctgggagttgttttcctggcatcagtttctgtctcatttggcattgcgtattgggaaaagcagaaccccagtcacaacaagtgcctccgaagttgcaatagcgagaaagactcctacaggaaccaagcatgccacgctcgttgcaacctccttaaggtggaggaagaagaagaatgcgaagaaggtcaaattccacgaccacg

SEQ ID NO: 64328 - DNA, 261 bp, Glycine max
  unsure (1)..(261): unsure at all n locations
  Clone ID: 700759905H1
cttccctgtggaggttgatattcaagagggagttgctcacattggtgaattgaaatctggtgtctatgttccactgcctacaaaaacccanatngtngaaactcccaaggaatggcaactggatctaccttgtgacaaaattcctagtgtcttgaccacaactgatgagagattggttagcacagaacatgagggctatgatccttttcttggtggaattcaaaaatatgccactcccatgatgcccctagatgaagaaat

SEQ ID NO: 64329 - DNA, 266 bp, Glycine max
  Clone ID: 700759907H1
gttcaatatcctagtataccttaataaataatttaagatactatgatgagacaacggttcccattactgttgctgggacttgttttcctggcttcagtttctgtctcattgggcattgcttactgggaaaaagagaaccccaaacacaacaagtgtctccagagttgcaatagcgagagagactcgtacaggaaccaagcatgccacgctcgttgcaacctccttaaggtggagaaagaagaatgtgaagaaggtgaaattccacg

SEQ ID NO: 64330 - DNA, 261 bp, Glycine max
  Clone ID: 700759908H1
ttggtccttaaacactcatcagtcatcaccatggccaagctagttttttccctttgttttctgcttttcagtggctgctgcttcgctttcagttccagagagcagcctcagcaaaacgagtgccagatccaaaaactcaatgccctcaaaccggataaccgtatagagtcagaaggagggctcattgagacatggaaccctaacaacaagccattccagtgtgccggtgttgccctctctcgctgcaccctcaaccgcaac

SEQ ID NO: 64331 - DNA, 250 bp, Glycine max
  Clone ID: 700759909H1
aaagaatttaagatatactatgatgagagcgcggttcccattactgttgctgggagttgttttcctagcatcagtttctgtctcatttggcattgcgtattgggaaaagcagaaccccagtcacaacaagtgcttccgaagttgctatagcgagaaagactcctacaggaaccaagcatgccacgctcgttgcaacctccttaaggtggaggaagaagaagaatgcgaagaaggtcaaattccacgacca

SEQ ID NO: 64332 - DNA, 266 bp, Glycine max
  Clone ID: 700759910H1
tcactcgaaatcgagcgaattcggctcgagctcgacgaaaagaggtaaggactgagcaggaagacaccatgttgacaaagaataacgtgattctaacaataataaggatcatatatgcttaatgaaaaagaaaagtttacatatttagctgcaagatatattttatgtaatttggctggttttcaaactgtcttattttgggttatataatgctaaagaggaggcagtttagtatcgaacaattgtgacattgacttatcatcatc

SEQ ID NO: 64333 - DNA, 258 bp, Glycine max
  unsure (1)..(258): unsure at all n locations
  Clone ID: 700759911H1
attgctggtaatactcttatgtcagctttgatcgantccacggctactgccagatcttctgaaaatgcggaatcctctgcatgatctggaatttgtgttttctttcatttgtccgtttgtttaattcaataaaggaaattagggttgaccctcttgttgagtatgctctgcctatttgaaaatttccacacctcttttaattgtcgtaatgatgtgtgaagtgtgtgttattttaaatcggcactcttaaaggggcgg

SEQ ID NO: 64334 - DNA, 109 bp, Glycine max
  Clone ID: 700759912H1
ctatcattctgcttgcattgataaccatgtgattttgggatcatgcaaagggttcatagttttatactataagagaaacgatgatctcattctatggaatccatccaca

SEQ ID NO: 64335 - DNA, 266 bp, Glycine max
  Clone ID: 700759913H1
gattttagcaaattaaaatagtagtgttattggtaggttttggcaaagatgttttcagttccaggggtgtcgggaattctgaacagaggaggagggcataagataaaagggacagtggtgttgatgaggaagaatgtgttggaactcaacagcgtggctgatcttactaaaggaaatgttgggggactcataggcaccggcctcaacgttgttggctcaacacttgataacctcactgctttcttgggccgaagtgtcgccctaca

SEQ ID NO: 64336 - DNA, 270 bp, Glycine max
  Clone ID: 700759914H1
gtgtccatatttgtatgcaatggtgcatgatagttcagtgtctacaataccaggtgattttgtcattggtgtcaagttgacaaccataaacaatatgtgtgcatatgggctcaatcctggtatttcaggttctcgtcttttgggcaccattcctcagtccatttcacagcaaactgtttggaatcaaatggcaacagtgagaacaccattgaattttgattctagcaagcagagcttttgtcagttttctattgaccttctcggtggagg

SEQ ID NO: 64337 - DNA, 178 bp, Glycine max
  Clone ID: 700759915H1
tactatgatgagagtgcggtttcctttgttggtgttgctgggaactgttttcctggcatcagtttgtgtctcattaaaggtgagagaggatgagaataaccctttctacttgagaagctctaacagcttccaaactctctttgagaaccaaaacggtcgcattcgtctcctccagaga

SEQ ID NO: 64338 - DNA, 272 bp, Glycine max
  Clone ID: 700759916H1
gttcaatatcctagtataccttaataaataatttaagatagtatgatgagagcacggttcccattactgttgctgggacttgttttcctggcttcagtttctgtctcatttggcattgcttactgggaaaaagagaaccccaaacacaacaagtgtctccagagttgcaatagcgagagagactcgtacaggaaccaagcatgccacgctcgttgcaacctccttaaggtggagaaagaagaatgtgaagaaggtgaaattccacgaccacg

SEQ ID NO: 64339 - DNA, 263 bp, Glycine max
  unsure (1)..(263): unsure at all n locations
  Clone ID: 700759917H1
atactatgatgagagtgcggtttcctttgttggtgttgctgggaactgttttcctggcatcagtttgtgtctcattaaaggtgagagaggatgagaataaccctttctacttgagaagctctaacagcttccaaactctctttgagaaccaaaacggtcgcattcgtctcctccagagattcaacaaacgctccccacaacttgagaatcacngagactaccggattgtccagtttcagtcaaaacccaacacaatccttctc

SEQ ID NO: 64340 - DNA, 263 bp, Glycine max
  Clone ID: 700759920H1
ccattgtctttgaacactcatcaccatggccaagcttgttctttccctttatttccttcttttcagtggctgcttcgctctgagagagcaggcacagcaaaatgagtgccagatccaaaagctgaatgccctcaaaccggataaccgtatagagtcggaaggtgggttcattgagacctggaaccctaacaacaagccattccagtgtgccggtgttgccctctctcgctgcacccttaaccgcaatgcccttcgtagacctt

SEQ ID NO: 64341 - DNA, 250 bp, Glycine max
  Clone ID: 700759921H1
gtaacttgttgagagttgctgcttggaagaaaggctgtttaatggttaagattgtgatgtctgggaatgcagcagtcaaaaggagtcattgggccttattggtacaagtgtttgtatttaacagcaacagtattgagcattttgatgcatgtaagtggacaaaatcggaaccacattcctgggaattgatcttcccaatagaggtatgtggtcctaataatggttttgaaatgtggagttctgagtgggc

SEQ ID NO: 64342 - DNA, 119 bp, Glycine max
  Clone ID: 700759922H1
caccaagttatgggtttccttgtgttgcttcttatctccctcttaggtctcgcttctagttccagcatatcaactcatgcgttccatattggaccttgacgtaaccaagtttaccacac

SEQ ID NO: 64343 - DNA, 266 bp, Glycine max
  Clone ID: 700759923H1
cttcaacaccaacgaggacagagctgagaaacttcggtctccagatgacgaaaggaagcagatcgtgacagtggagggaggcctcagcgttatcagccccaagtggcatgcacaagaagacgaagacgaagatgaagacgaagaatatgaacaaactccctcttatcctccacgacgaccaagccatggaaagcatgaagatgacgaggacgaggacgaagaagaagatcaacctcgtcctgatcaccctccacagcgaccaagca

SEQ ID NO: 64344 - DNA, 267 bp, Glycine max
  Clone ID: 700759924H1
cttcctcactctctctctctcccaccacactcatggcatcaagctcacaaggtcctcgttcccatcgccgacggcaccgagaccatggaggccgtcatcatcatcgacgtcctccgccgctccggcgccgatgtcaccgtcgcttcctcctccgccaacctcgccgtccaagctctccacggcgtcaagatcatcgccgacgcctccgtctccgacgtcgccgccaccgcctttgacctcgtcgctctccccggaggtttacagggt

SEQ ID NO: 64345 - DNA, 265 bp, Glycine max
  Clone ID: 700759925H1
atcaacatagtcgtcattggacatgtcgactctgggaagtcaactaccactggtcacttgatctacaagcttggaggtattgacaagcgtgtgattgagaggttcgagaaggaggctgccgagatgaacaagaggtcattcaagtatgcctgggtgctcgacaagctcaaagctgagcgtgaaagaggaattaccattgatattgcttggtggaagtttgaaaccaccaagtactactgcacggtcattgatgctcctggacatt

SEQ ID NO: 64346 - DNA, 266 bp, Glycine max
  Clone ID: 700759926H1
gaaagtcttccatagccccccaaaaatccagagcaccatcttctttgctctctttctcttttgtgccttcaacacctcatacctaccttcagccatcgctgatttcgtgctcgataatgaaggtaaccctcttgaaaatggtggcacatattatatcttgtcagacataacagcatttggtggaataagagcagccccaacgggaaatgaaagatgccctctcactgtggtgcaatctcgcaatgagctcgacaaagggattggaa

SEQ ID NO: 64347 - DNA, 106 bp, Glycine max
  Clone ID: 700759931H1
acacatacccccaactagcaataattccttcacttgcaggacttagttctctgttgcatcatcatcatcttcattagtgttagccctaaacttcaccttcaaccat

SEQ ID NO: 64348 - DNA, 269 bp, Glycine max
  Clone ID: 700759932H1
tagaagttgcagtgtcatgtgctgttattagcgtggttgcagttgtcaagttcggtgttatgaagccttgtttttagggactggctgtggcagcaagttatacaggtctgccataaccacgaccttttttcccctttgggaagggttgtgtttttttaccaagtcctagtttttttaaggcttcattctttttgaacttggcactgcacctccttattgtctaatgatattcatacctgcccttgtgctgtatgttatgaaatgtaatg

SEQ ID NO: 64349 - DNA, 260 bp, Glycine max
  Clone ID: 700759935H1
tgtcctcccctcagcggcatcgttgtattgttcttacacatctttctctctctcactttcggtttctaaaccaaaaccctaatcgagatcacaatcggatcgtaaacaaacagagaccagccatggacgttgattccactcgagtgctcgactctcttccgcttccaggcgctaccaatccgctcttcaatctcgatcagacatgttcatgggttttgatgaaaatgatggggacgatgatataagagaggagtttctct

SEQ ID NO: 64350 - DNA, 260 bp, Glycine max
  Clone ID: 700759939H1
gcgcagagcagagcagcagagaagagagaaaacggcactgcagccgtagaaggaaaaccgaccatggtgcacgtctccttttacaggaactatggtaagacgtttaatgagccccgccgtccgtacgagaaggagcgtctagacgcggagctgaagctggtgggggagtacgggctgcggtgcaagagggagctgtggagggtgcagtacgcgctcagccgcatccgcaacaacgcgcggaatctccttaccctcgacga

SEQ ID NO: 64351 - DNA, 264 bp, Glycine max
  Clone ID: 700759940H1
cgcatgagagcatcaaactcttcttcttcgatttccactgcgaacgttactctttcttcttctttctcttcattttcttcgctcttcgatcttcgtccggggactgctccgaataccaccaccaccactcgccgatggccacgatcggaggcttacacgactcccaaggctctcaaaacagcgtcgaatccgaagccctcgctcgattcgccgtagacgaacacaacaagaagcagaattcgctctctggagtttgctagggtg

SEQ ID NO: 64352 - DNA, 260 bp, Glycine max
  Clone ID: 700759942H1
ttctaacaagtgattctaacatattaaaagctcccaatcagtggcataggtgacttcaaagtatgcattgagtctatttgaccattgtggatttgtacaaccaaaatggttaaattgagaagatgctttctaacaagtgattctaacatattaaaagctcccaatcagtggcataggtgacttcaaagtatgcattgagtctatttttcattttacactgaagtcattggaaattatcaagcggtcataacttagtctat

SEQ ID NO: 64353 - DNA, 264 bp, Glycine max
  Clone ID: 700759944H1
gtcgctcatcaacagaagcttaagtgaccggactcctcattgctgcactttttgccggtcaacacacaagttcatattcctcctcttgtactggtgcatatctgctgtctgacaacctgtgcctttctgctgtgcaggaggagcagaagatgttaatagaaaagcatggggacagagttgatcatgatgttttggctgatatggatgtgctgtataggtgcatcaaagaagccttgagactccatcctcctctcattatgctga

SEQ ID NO: 64354 - DNA, 242 bp, Glycine max
  Clone ID: 700759122H1
gagaaaaaataccaaccatggcaaccatttctactgatcaaccaagaggatcctactcctatggaacctcctatggagcaccctatggaaccacctatgagaccaacagcagcattaacaaccctcctttccgccaaaccgtgaagttcataactgctgcaactattggcatcacactcttactcctgtctgggttgaccctcacaggcactgtcataggtttgatcattgcaacccctctt

SEQ ID NO: 64355 - DNA, 240 bp, Glycine max
  Clone ID: 700759123H1
ctcggtggaggacttttagtggacaaaactggagattggatcacacttatacaaaattctccaattagtaacttgttgagagttgctgcttggaagaaaggctgtttaatggttaagattgtgatgtctgggaatgcagcagtcaaaaggagtgattaggcctcattggtacaagtgtttgaaacaagcagcaacagtacagagcattctgatgcatgtaagtggacaaaatcggcacca

SEQ ID NO: 64356 - DNA, 245 bp, Glycine max
  Clone ID: 700759124H1
caatccctttcttttcctctctgatctgcaaacacatttcaagagaacgtttttgttgttgcgcccaatcggtgttgcatttttcttttgcagagaggaggggaagtctttatttgtgagatttttcttaggaagatgaaaaacacggagaggattgcaaatttggccgtagcaggtttaactttagcctggcttattgtgaaagtagattcaaatgtaaatgttatcttgactgcttgcctcac

SEQ ID NO: 64357 - DNA, 246 bp, Glycine max
  Clone ID: 700759128H1
gcaaaatgaccaagttcacaatcctcctcatctctcttcccttctgcatcgcccacacttgcagcgcctccaaatggcagcaccagcaagatagctgccgcaagcagctccagggggtgcacctcacgccctgcgagaagcacatcatggagaagatccaaggccgcggcgatgacgatgatgatgatgacgacgacaatcacattctcaggaccatgcggggaagaatcaactacataaggagga

SEQ ID NO: 64358 - DNA, 246 bp, Glycine max
  Clone ID: 700759130H1
gccctaagtgttccagtatgtggagcaactctaggacgaattttcaacgtgcttggagagcccattgataatttcggtcctgtagatactcgcacaacatctcccattcatagatctgcgcctgcctttatacaattagatacaaaattagccacttttgaaacaggaataaaagtagtagatcttttagctccttatcgtcgtggaggaaaaataggacttttcggtggaactggagtgggtaaa

SEQ ID NO: 64359 - DNA, 245 bp, Glycine max
  Clone ID: 700759131H1
atgaggctagccacccagactccatcagagctgccttggctgaattcctctccacttgcatctttgtctttgctggagaaggctctgcccatgctttgcgacaaatttacaaggaaccagggtcatcagcgggtgagctagtggtaattgcactagctcatgcatttgctctatttgctgctatttctgctagcatgcatgtgtctggtggacacgtcaaccctgccgtcacttttggcgctctt

SEQ ID NO: 64360 - DNA, 249 bp, Glycine max
  Clone ID: 700759132H1
cttaacacttccttagttcaatatggggaagcccttcactctctctctttcttccctttgcttgctactcttgtcgagtgcatgctttgctattagctccagcaagctcaacgagtgccaactcaacaacctcaacgcgttggaacccgaccaccgcgttgagtccgaagtggtttgattcaaacatggaactctcaacaccctgagctgaaatgcgccggtgtcactgtttccaaactcaccctcaac

SEQ ID NO: 64361 - DNA, 244 bp, Glycine max
  Clone ID: 700759133H1
tgaaatcgatgaactccctaagcaaattgatgatacacagtacccaaaaacattcttctataaagaagaccttcatccaggcaaaacaatgaaagtacaattcaccaagcgtccctatgcacaaccttatggtgtatatacatggttaacggatattaaagacacctctaaagaaggatatagttttgaagagatatgcataagaaagaagcgtttgagggagaagagaattttgtgcaaaatc

SEQ ID NO: 64362 - DNA, 244 bp, Glycine max
  Clone ID: 700759134H1
gagaaactttaagcagatgtctaatgttttgtgggtagctcctgaggacaaggcgagtttatggtcacaacttcattatgtttcgtgtaataatctggaaatgcaagaagcttatcttgtcaatttcgtaaatgtgttacgagaattgtatttgcacagtccagaggaagctcgccaattgagaaggaaagctctctctcgtattgaatggctgcaaaaagctgatgtgcctaccatagcacag

SEQ ID NO: 64363 - DNA, 246 bp, Glycine max
  Clone ID: 700759135H1
gcaaaatgaccaagttcacaatcctcctcatctctcttctcttctgcatcgcccacacttgcagcgcctccaaatggcagcaccagcaagatagctgccgcaagcagctccagggggtgaacctcacgccctgcgagaagcacatcatggagaagatccaaggccgcggcgatgacgacccataatgatgacgacgacaatcacattctcaggaccatgcggggaagaatcaactacataaggagg

SEQ ID NO: 64364 - DNA, 243 bp, Glycine max
  Clone ID: 700759136H1
cttaattattaacacttccttagttcaatatggggaagcccttcactctctctctttcttccctttgcttgctactcttgtcgagtgcatgctttgctattagctccagcaagctcaacgagtgccaactcaacaacctcaacgcgttggaacccgaccaccgcgttgagtccgaaggtggtttgattcaaacatggaactctcaacaccctgagctgaaatgcgccggtgtcactgtttcca

SEQ ID NO: 64365 - DNA, 212 bp, Glycine max
  Clone ID: 700759137H1
cttatcttgtcaatctcgtaaatgtgttacgagaattgtatttgcacagtccagaggaagctcgccaattgagaaggaaagctctcactcgtattgaatggctgcaaaaagctgatgtgcctaccatagcacagattgaagagttccattcgatgcagaggatgatgaatgctcctgattcaaatgataatatcgatctactgttgagcatt

SEQ ID NO: 64366 - DNA, 243 bp, Glycine max
  Clone ID: 700759138H1
ctcaaaccaaacactagctacgcttctctctctttccttcccagagcttcctgtggctgtggaatcatcgtatcttcttacgtccgaagcaagcctttgtcttgtgtgtgttcttcccccttccgtcagacttctaggaaaatcagatgcatcgtggtaaattttcccttacacccaagaatgaagtcaaggacttgacaggttcaagtttaaccagttacaaacatagcagtcttctggacc

SEQ ID NO: 64367 - DNA, 241 bp, Glycine max
  Clone ID: 700759140H1
ctccattgtctttgaacactcatcaccatggccaagcttgttctttccctttgtttccttcttttcagtggctgcttcgctctgagagagcaggcacagcaaaatgagtgccagatccaaaagctgaatgccctcaaaccggataaccgtatagagtcggcaggtgggttcattgagacctggaaccctaacaacaagccattccagtgtgccggtgttgccctctctcgctgcaccctta

SEQ ID NO: 64368 - DNA, 242 bp, Glycine max
  Clone ID: 700759142H1
caaaccaatggccacgttcgcgtcctccagaggttcaacaaacgctcccaacaacttcagaatctccgagactaccgcattttggagttcaactccaaacccaacacccttcttctcccccaccatgctgacgctgattacctcatcgttatccttaacgggactgccattcttaccttggtgaacaacgacgaccgagactcttacaaccttcaatctggcgatgccctaagagtccctgc

SEQ ID NO: 64369 - DNA, 242 bp, Glycine max
  Clone ID: 700759144H1
ctaaaattcttccaccaagttatgggtttccttgtgttgcttcttttctccctcttaggtctctcttctagttccagcatatcaactcatcgttccatattggaccttgacctaaccaagtttaccacacagaaacaggtgtcttcactgttccaactatggaagagtgagcatggacgtgtctaccataaccacgaagaagaggcaaagagacttgagattttcaagaataacttgaacta

SEQ ID NO: 64370 - DNA, 243 bp, Glycine max
  Clone ID: 700759145H1
gattcttggttaccaatttttgtgaattgtccctatcctgtaagtcaattaccttcagaagctgtcgttgtaaatgttacatgtggtagtggacgtggtggtttacccaccactgcttggattagttctgcagttaacaatcgctcctcagatatcaacaaaaagattcgcacagcacttgggaaaggtaagaaaattgtttttcttaccagagttgatccttttccagtagctttactggct

SEQ ID NO: 64371 - DNA, 245 bp, Glycine max
  Clone ID: 700759146H1
ctccaattgtctttgcagttgatgatggcgttggaggactatggagacataccatggagtccaccaagctccaaaactctaaacaaatgttccagttcatggattttccatggccgccttctgttaaagacgataatccaagtcacaagcaagtgctagattatgttaactcctatgctgaacattattccctcaaaccttacatcagattcaactccaaagtaattgctatagattatgttggc

SEQ ID NO: 64372 - DNA, 245 bp, Glycine max
  Clone ID: 700759147H1
ggaaatttttcctttgatattaaatctcgctctagattggaaaaagtttcctctacaaaagcacaatttgttagtggaaaaaccttcaaatatgatatagttggtgctggttcacattcttcagaagatttttctgaaaaggaagatcaagaaaaacccaaaaagattgatgccagattgagacaaagaatagatccacgatacaatgaggttcaggctctgatggaaccaatttgtttaaattg

SEQ ID NO: 64373 - DNA, 245 bp, Glycine max
  Clone ID: 700759148H1
tgatcatacatagtagtgttggtgggttgcaaagatgcttgggggtcttctccataggggtcataagataaaagggacagtggtgttgatgcgcaagaatgtgttggacgtgaatagcgtaaccagcgttgggggaattattggtcaaggtctcgacttagttggctcaacactcgatactcttactgccttcttgggccgatccgtgtctctccagcttattagtgctaccaaagctgatgcca

SEQ ID NO: 64374 - DNA, 247 bp, Glycine max
  Clone ID: 700759149H1
caggcccttaagtttcctcctcctaaagtaattcaagtgagtaagtctgcatggatgactgatgaagaatttgcaagagaaatgcttgctggtgtaaatccaaacttgattcgttgtcttaaggatttccctccacgaagcaagctagatagccaagtctatggtgatcatactagtcaaataaccagagaacacctagagcccaacttagaagggctcactgtagatgaggctattcaaaacaaga

SEQ ID NO: 64375 - DNA, 244 bp, Glycine max
  Clone ID: 700759150H1
ctctatttctcagtctctgtgtttgcggctgaggattccgaacgagtgaccttcttcgtttctcgcaaagtttaagtaatcatgggtaaggaaaaggtagacatcaacattgtcgtcattggacatgtcgactctgggaagtcaactaccactggtcacttgatctacaagcttggtggtattgacaagcgtgtgattgagaggttcgagaaggaggctgccgagatgaacaagaggtcattca

SEQ ID NO: 64376 - DNA, 241 bp, Glycine max
  Clone ID: 700759152H1
taatgtagcatgtgctgctgttggcttgacatcaagctatactccgactccattgttggaatctggtttgcaaaaagacagagggttaattgtggagtattttggaaggatgtcttacgttgctcataatgttaatcagccccaagagaaagatttgttggaaggaaatttttcctttgatattaaatctcgctctagattggaaaaagtttcctctacaaaagcacaatttgttagtgga

SEQ ID NO: 64377 - DNA, 240 bp, Glycine max
  Clone ID: 700759154H1
caagttatgggtttccttgtgttgcttcttttctctctcttaggtctctcttctagttccagcatatcaactcattcttccatattggaccttgacttaaccaagtttaccacacaaaaaaaaaaataaaaaatgttccaactatggaagagtgtgcatggacgtgtctaccataatcatgaagaagaggcatagagacttgagattttcaagaatatttatgaactatatcagggacat

SEQ ID NO: 64378 - DNA, 241 bp, Glycine max
  Clone ID: 700759156H1
caaaccttgctctatactacacagtacacacactagaagaataatggcttccatcctccactactttttagccctctctctttcttgctcttttcttttcttcttatccgactcagtcacccctacaaaaccaataaaccttgttgttctacccgttcaaaatgatggttccacagggctccattgccccaacctccaaaaaagaacccctctaatgcaagtaccagtcctggtggacctc

SEQ ID NO: 64379 - DNA, 242 bp, Glycine max
  Clone ID: 700759158H1
caacatggaactctcaacaccctgagctgaaatgcgccggtgtcactgtttccaaactcaccctcaactgcaatggcctccacttgccatcttactcaccttatccccggatgatcatcatcgcccaagggaaaggagcacttggagttgcaattccaggatgtcctgagacgtttgaggagccacaagaacaatcaaacagaagaggctcaaggtcgcagaagcagcagctacaggacagt

SEQ ID NO: 64380 - DNA, 240 bp, Glycine max
  Clone ID: 700759161H1
ccattgtctttgaacactcatcaccatggcgcaggctgttctttccctttgtgtccttctagtcagtggctgcttcgctctgagagagcaggcacagcaaaatgagtgccagatccaaaagctgaacgccctcaaaccggataaccgtatagaggcggaaggtgggttcattgagacctggaaccctaacaacaagccattccagtgtgccggtgttacgctctctcgctagcaccttaa

SEQ ID NO: 64381 - DNA, 233 bp, Glycine max
  Clone ID: 700759162H1
aatcagagtaatattcagattaccggcttattttacgatggcagatacaaattcgagactaaatacgagagaaatcttgcaatgacagaagacgaaaagatggaagtgattagtaatagaggcattcctgctgatggtcttgaaaagcgagctcatgaatttgacatacatgtcgctcatgaaagcctcaaggatcgaattcctgctgttgacacgttgtattctagtaatgt

SEQ ID NO: 64382 - DNA, 211 bp, Glycine max
  Clone ID: 700759163H1
atgaattctggataaatggagctctgctacatactctagatagctgtgaaaatgatgatgggcttacattgttgtactctcaaactcgcttcagttcccaatttctcttctacaactttctttttcaaaactccaatcctccgttttcagaaatctccattgtcacgccccatcagagctctatcttcctccgccctcgttcaaacatcta

SEQ ID NO: 64383 - DNA, 238 bp, Glycine max
  Clone ID: 700759164H1
ataccttaataaatcatttaagatactatgatgagagcacggttcccattactgttgctgggacttgttttcctggcttcagtttctgtctcatttggcattgcttactgggatacagagcaccccaaacacgacaagtgtctccagagttgcaatagcgcgagagactcgtacaggaaccaagcatgccacgctcgttgcaacctccttaaggtggagatagaagaatgtgaagaag

SEQ ID NO: 64384 - DNA, 239 bp, Glycine max
  Clone ID: 700759165H1
accttttctctccggttaccagaaccgtaagttgctgaacatgaacccgcaatcgccggttcgggcggaaccggagcctccggttccgacgttctccccacggttcgcgctcacgtccggttcgcagcggaaaatcgcgatcgcggtcgatctgagcgacgaaagcgcctacgcggtgcgctgggcggtacaggatacctgcgccgggcgacgccgtgatcctccgcactgcgtccacg

SEQ ID NO: 64385 - DNA, 242 bp, Glycine max
  Clone ID: 700759166H1
gccaaatgctgttctttcaatgtggagatattttgttggagatctcgtctttgaagtttctaagatgacttctccctacattaaatgtacagtctctttcttcatagcatttggaaatttggctgatgacaccatcaattttgaggcttttccccacaagctggtgctctttggagagattcaggaaaaagttgtattgaaattttcacaagaggaatttcttacagcttggtcaactcagg

SEQ ID NO: 64386 - DNA, 239 bp, Glycine max
  Clone ID: 700759167H1
gtgcaactttgcaatttagaaagttagcagattgtgattttctcaagagaaactttaagcagatgtctaatgttttgtgggtggctcctgaggacaaggcgagtttatggtcacaacttcattatgtttcgtgtaataatctggaaatgcaagaagcttatcttgtcaatctcgttcctgtgttacgagaattgtatttgcacagtccagaggaagctcgccaattgagaaggaaagct

SEQ ID NO: 64387 - DNA, 240 bp, Glycine max
  Clone ID: 700759168H1
ctcgagccgctcgagccgccctactcattctccatacctcaacgaagaggttaaagagacggcaccactttgctgtccgccttgaccgagcagagcttcgtcttggccctcgattttgccctaaagtactctcagtcacaacagacaccgtcgtcgtcgtcgtcgtcatcaatggcaccgaagcagaccaaggctgagaagaagatcgcttacgatgcgaactgtgcgacctaatggagg

SEQ ID NO: 64388 - DNA, 237 bp, Glycine max
  Clone ID: 700759170H1
gaaaaatttgtacaaatgatgaagagcatctatgaaacagaagttacagattggccagtaccactgaaaatcatttctggaaccattcttgcaacaattttgggaacaaccttctggaaactcttgtcctttcttagagatgctggtaatgggggagtttttgttggtaatgttgcttcagcattcacaacttcaagtgtgcttgaggcccaaagtagaaagcccaacagatatgaa

SEQ ID NO: 64389 - DNA, 78 bp, Glycine max
  Clone ID: 700759171H1
gtagacactgaactatcatgcaccatagcatacaaatatgggcacccatcagccaacagagttgttgcaggacgcacc

SEQ ID NO: 64390 - DNA, 241 bp, Glycine max
  Clone ID: 700759172H1
ctttcatacttgttatgcaggcacaggattacttgttcgtatcgggcgtttgtcccatttgtggctagtgtgctgataaaagcgtggaaggaatcagattgcagtggtgacatggaagtcatattggggggcatggcttctctggaggatgagatttcatggttcaagacagaagccaacaagtggggtatttcactttctgacgttgttcctcagcaggctaacaaaaactattgtgggt

SEQ ID NO: 64391 - DNA, 240 bp, Glycine max
  Clone ID: 700759173H1
actgaccaagccatggcgatgagaaccaaactttctttagctatctttttcttttttcttttagccttattttcaaacctagcctttggcaaatgtaaagaaaccgaggtagaagaagaagaccctgatctcgtaacatgcaaacaccaatgccaacagccacagcaatacactgagggtgacaagcgggtatgcttgcaaagatgtgacaggtatcatcgtatgaagcaagagcgagag

SEQ ID NO: 64392 - DNA, 240 bp, Glycine max
  Clone ID: 700759174H1
attaaaatgcagcaacgaattatctaaccaggactgaatgacctaatggagtctaaaggtgggaaaaagaagtctagtagtagtagtagtaaatcaattttttacgaagctcccctcggatacagcatggaagacgttagaccaaacggtggaatcaagaaattcagatctgctgcttactctaactgttctcgcaaaccatcctgatacacatccggattgatagttcgttgcatgcaa

SEQ ID NO: 64393 - DNA, 241 bp, Glycine max
  Clone ID: 700759175H1
atgactatgaatattaattagatggattaacacaacagagaatgttgaattgaattgagaagatgacaaacccattagagagataccaaaaacttgggctaagcgagtctctaccgaaaacctacagatacccaattgcgtgcagagagctaagctttattctgagggaagcttttcatcaattccccaaaaatttgcaatccatcgtcttccaagacaccctctccgccttccgtctcct

SEQ ID NO: 64394 - DNA, 241 bp, Glycine max
  Clone ID: 700759177H1
ctaaaattcttccaccaagttataagaaatacatgtgttgcttcttttctccctcttaggtctctcttctagttccagcatatcaactcatcgttccatattggaccttgacctaaccaagtttaccacacagaaacaggtgtcttcactgttccaactatggaagagtgagcatggacgtgtctaccataaccacgaagaagaggcaaagagacttgagattttcaagaataacttgaac

SEQ ID NO: 64395 - DNA, 242 bp, Glycine max
  Clone ID: 700759178H1
cttgactacaactgatgagagattggtaggcacagaacatgagggatatgatccttttcttggtggaattcaaaaatatgccactcccatgatgcccctagatgaagaaattctttctaaggttgcacaagatatggttgaggaatggtttgattgtgttgatgaggaggattcctttgaggaagtttctttaagtgcagcactcaatggtgttgagggtttagactatatggaaagaattc

SEQ ID NO: 64396 - DNA, 243 bp, Glycine max
  Clone ID: 700759179H1
ctggtttggccaatagattactgagtaagggcaacgatattctgtgttgcgattatgctagttttgatggtttgattaccaagcaagttatgagcaagatggcagaaatgataaacagtctttgtggtggtgatgaaaaattgatgcgtgaaaggacacacctgctgttggcttgttgttcaaggatggcaatttgtaagaaagatgtttggagagttgaatgtggaatcccttctggatttc

SEQ ID NO: 64397 - DNA, 244 bp, Glycine max
  Clone ID: 700759180H1
cttaattattaacacttccttagttcactatggggaagcccttcactctctctctttcttccctttgcttgctactcttgtcgagtgcctgctttgctattagctccagcaagctcaacgagtgccaactcaacaacctcaacgcgttggacaccgaccaccgcgttgagtccgaagtggtttgattcaaacatggaactctcaacaccctgagctgaaatgcgccggtgtcactgtttccaaa

SEQ ID NO: 64398 - DNA, 242 bp, Glycine max
  Clone ID: 700759181H1
aataaagatgagtttgaagaacaacatggtggtgctaaaggtgtgtttgttgcttcttttccttgtgggggttacagctgcacgcatggaactgagcttcttcaaaagtgatcagtcatcaagttatgatgatgatgagtattcaaaaccatgctgtgatctctgcatgtgcacacgctcaatgcctcctcaatgcagctgtgaagatattaggctgaattcatgccactcagattgtaaga

SEQ ID NO: 64399 - DNA, 90 bp, Glycine max
  Clone ID: 700759182H1
gaaagaaacagaagaagtttaaatctcagttctctgttcaatttcaagttcaagctggtgaaatcttggatgagtgcttccacacaacat

SEQ ID NO: 64400 - DNA, 241 bp, Glycine max
  Clone ID: 700759183H1
ttcctccgccttagttacaagcacaaacaaatagctccttccaacttttcttctatctcttgcaatagttcacaacagactaagttgcagtgtaaaattttcaagtattgtttttttatccttttcagctgggtaagaatcatggaagtagagaaggaaaatactacatctactattactgcagaatcctcagtatctgcctctgatggtcaagatcctgtttcttctgttaatgcatctc

SEQ ID NO: 64401 - DNA, 108 bp, Glycine max
  Clone ID: 700759184H1
attcggctcgagctaaccttgccatggctatgtagctccatatatatatgtggatcttctttttcatcctttaattaatcatctatatatataaattttttccctttt

SEQ ID NO: 64402 - DNA, 226 bp, Glycine max
  Clone ID: 700759187H1
cattgagttgtggtcaacagagagcaagtaggcgagagacaaaaaagcctcaccgacttcggcgaaatggatctaccgccggcaccgatccggtggcgcgcaaccgcaatcccattctttgtggcggttctctttgtaaccaccatctccccttcgcgcgcaatctactgccgcgaagatgattgctacgatctccttggggtttctcaaagtggcaatgcttccg

SEQ ID NO: 64403 - DNA, 239 bp, Glycine max
  Clone ID: 700759189H1
gagacctacaaagtgagaacgaagaggaggatagtggagccattgtgacagtgaaaggaggtctaagagtcacagctccagccatgaggaagccacagcaagaagaagatgatgatgactgggaagagcagccacagtgcgtggagacagacaaaggttgctcacgccaaagcaaaaggagcagaaatggcattgatgagaccatttgcacaatgagacttcgccaaaacattggtcag

SEQ ID NO: 64404 - DNA, 234 bp, Glycine max
  Clone ID: 700759190H1
gtccggtgcgcccccggggcccttgaaaatccggaggaccgagtgcctcccacgcccggtcgtactcataaccgcatcaggtctccaaggtgaacagcctctggtcgatggaacaatgtaggcaagggaagtcggcaaaatggatccgtaacctcgggaaaaggattggctctgagggctgggcacgggggtcccagtcccgaacccgtcggctgtcggtggactgctcgagct

SEQ ID NO: 64405 - DNA, 239 bp, Glycine max
  Clone ID: 700759191H1
ccttaaacactcatcagtcatcaccatggctccgctagttttttccctttgttttctgcttttcagtggctgctccttcgctttcagttccagagagcagcctcagcaaaacgagtgccagatccaaaaactcaatgccctcaaaccggataaccgtatagagtcagaaggagggctcattgagacatggaaccctaacaacaagccattccagtgtgccggtgttgccctctctcgct

SEQ ID NO: 64406 - DNA, 237 bp, Glycine max
  Clone ID: 700759193H1
ggaatttactctccacattggaacttgaacgcgaacagtgtgctctatgtgactcgagggaaaggaagagttagagtggtgaactgccaagggaatgcagtgttcgacggtgagctacggaggggacaattgctagtggtgccgcagaactttgtggtggctgatcaagggggagaacacggattggaatacgtagtgttcaagacacaccacaacgccgtgagcagctacattaag

SEQ ID NO: 64407 - DNA, 242 bp, Glycine max
  Clone ID: 700759194H1
gcaagttgtttgagattaccccagagaaaaaccctcagcttcgggacttggatgtcttcctcagtgccgtggatatgaacgagggagctctttttctgccacacttcaattcaaaggccatagtggtactagtgattaatgaaggagaagcatacattgaacttgttggcattaaagaacaacaacagaggcagcaacaggaagagcaacctttggaagtgcggacatatagagctgaattg

SEQ ID NO: 64408 - DNA, 226 bp, Glycine max
  Clone ID: 700759195H1
cttattaacactttccttagttcaatatggggaagcccttcttcactctctctctttcttccctttgcttgctactcttgtcgagtgcatgctttgctattacctccagcaagttcaacgagtgccaactcaacaacctcaacgcgttggaacccgaccaccgcgttgagtccgaagtaggtcttattgaaacatggaactctcaacaccctgacctgcaattcgc

SEQ ID NO: 64409 - DNA, 226 bp, Glycine max
  Clone ID: 700759196H1
ccttagtccaatatggggaagcccttcttcactctctctcttacttccctttgcttgctactcttgtcgagcgcatgctttgctatcacctccagcaagttcaacgagcgccaactcaacaacctcaacgcgttggaacccgaccaccgcgttgagtccgaaggtggtcttattgcaacatggaactctcaacaccctgagctgcaatgcgccggtgtcactgttt

SEQ ID NO: 64410 - DNA, 269 bp, Glycine max; identical to SEQ ID NO: 58958
  Clone ID: 700759301H1

SEQ ID NO: 64411 - DNA, 258 bp, Glycine max
  Clone ID: 700759302H1
cttcttcttcttctttattttctcattttgccaaactaaaatagttgtgttggtagctttggcaaagatgttttcagcaggccataagatcaaagggacagtggtgttgatgcccaagaatgagttggaagttaaccctgatggctcagcagttgacaaccttaatgctttcttgggccgtagtgtctcccttcagctcattagtgctaccaaggctgatgcacatggaaaaggaaaagttggaaaggatacgttctt

SEQ ID NO: 64412 - DNA, 267 bp, Glycine max
  unsure (1)..(267): unsure at all n locations
  Clone ID: 700759303H1
gatcaacagaacgagggaagtattttcgcaataagcagagaacaggtgcgtgcgttggcccctaccaagaaaagctcttggtggccattcggtggcgaatccaagcctcaattcaatattttcagcaagcgtcccactatctccaacggatatggtcgtttaactgaagttggtcctgacgatgatgaaaagaattgngttcaaagactcaatctcatgcttacctttaccaacatcacccagagatctatgagtactattcactac

SEQ ID NO: 64413 - DNA, 267 bp, Glycine max
  Clone ID: 700759304H1
atatggggaagcccttcactctctctctttcttccctttgcttgctactcttgtcgagtgcatgctttgctattagctccagcaagctcaacgagtgccaactcaacaacctcaacgcgttggaacccgaccaccgcgttgagtccgaaggtggtttgattcaaacatggaactctcaacaccctgagctgaaatgcgccggtgtcactgtttccaaactcaccctcaaccgcaatggcctccacttgccatcttactcaccttatc

SEQ ID NO: 64414 - DNA, 266 bp, Glycine max
  Clone ID: 700759305H1
tgcgagtccaaattgttacatctgaaaagagttactggcatgtgtatgatcctgacaagtttcagatgtttgacaacagtgaaataggtctttattctaatcccactttggaagatatcccacattcagcttgggaccttttttgctgggacagtgagaaaactttgccaaataatttttctgcagaattgctctcttgcaaattggatactgttactggccaatattatcctgagtgggctccaattaattgtcgagttcatcga

SEQ ID NO: 64415 - DNA, 265 bp, Glycine max
  Clone ID: 700759306H1
tcctagtataccttaataaataatttaagatactatgatgagagcacggttcccattactgttgctgggacttgttttcctggcttcagtttctgtctcatttggcattgcttactgggaaaaagagaaccccaaacacaacaagtgtctccagagttgcaatagcgagagagactcgtacaggaaccaagcatgccacgctcgttgcaacctccttaaggtggagaaagaagaatgtgaagaaggtgaaattccacgaccacga

SEQ ID NO: 64416 - DNA, 265 bp, Glycine max
  Clone ID: 700759307H1
cttaattattaacacttccttatttcaatatggggaagcccttcactctctctctgtcttccctttgcttgctactcttgtcgagtgcatgctttgctattagctccagcaagctcaacgagtgccaactcaacaacctcaacgcgttggaacccgaccaccgcgttgagtccgaaggtggtttgattcaaacatggaactctcaacaccctgagctgaaatgcgccggtgtcactgtttccaaactcaccctcaagcgcaatgg

SEQ ID NO: 64417 - DNA, 266 bp, Glycine max
  Clone ID: 700759309H1
ggggtttctcctctctttctctgcagtttgatggatcgggaaggaggatccaacgccggatcttgctactactccgttctcgggattcgtagggatgcctccttctctgatattcgcactgcctaccgcaaactcgctatggtaaactataactaaacaaccatacatcaccgtttcattcttttcctattcttgattagttcctgaaattttttaaaattatgtttgttttgcgcccggctgagaagaggtggcacccggacaat

SEQ ID NO: 64418 - DNA, 265 bp, Glycine max
  Clone ID: 700759310H1
gtgattgttgtgactcgttcttcttcgtcgttatcttcttcttttgttgtttgtgtgtttgttttttctctcacctgaaaatgtcttgctgcggtggtaactgtggttgcggaagcgcctgcaagtgcggcaacggctgcggaggctgcaagatgtacccagacttgagctacaccgagtcaaccaccaccgagaccttggtcatgggagtcgcaccagttaaggctcaattcgagagtgctgaaatgggtgttcccgctgagaa

SEQ ID NO: 64419 - DNA, 266 bp, Glycine max
  Clone ID: 700759311H1
acacagtacacacactagaagaataatggcttccatcctccactactttttagccctctctctttcttgctcttttcttttcttcttatccgactcagtcacccctacaaaaccaataaaccttgttgttctacccgttcaaaatgatggttccacagggctccattgggccaacctccaaaaaagaacccctctaatgcaagtaccagtcctggtggacctcaatggaaatcacttgtgggttaactgtgagcagcagtactcat

SEQ ID NO: 64420 - DNA, 263 bp, Glycine max
  Clone ID: 700759312H1
atcggagtatccagagctgatccatgcaaactgccaacagattattactgtgctgcttcagagcatgaaggatgttccaaatgttgctgagaaggcttgtggtgctctttattttcttgcccaaggctatgaggatgctgcatctgcgtcctctccattgacccccttctttcaagatattgttcatgctcttctcactgtaactcacagagaggatgctggagaatcccgccttagaacagcagcctatgaagccttaaatg

SEQ ID NO: 64421 - DNA, 266 bp, Glycine max
  Clone ID: 700759315H1
ggtgctaaatctctagtaagtcgccatggtgatgtactcaagggagcctgactatccaaccaagtcttgccatgctagaggcgtcgaccttagggatcattttaagaacactagggagactgcctttgcaatcaggaagttgcccttggttaaagctacaaggtacttggaagactgacttacgcacacgcaggccattccgttcatacgtgtctgtcgaggtgtaggacaggacagctcaagcatggaatagacactcttgtggc

SEQ ID NO: 64422 - DNA, 263 bp, Glycine max
  Clone ID: 700759316H1
ctacaagtacttccttacaatcaaaaccaacaacaactatggcaagttatcaaaagcactacgatgatcagggtcgcaaggttgacgagtatggcaacgttgagaagcaaaccgacgaatacggcaaccctgttcatgctgctagtgtcacctatgtagccaccagaactgctgctggtggttacagtgatgacattaataagcaacatgataccaccaatgcctacggcgtagacactggtagacagcattctagtggtggc

SEQ ID NO: 64423 - DNA, 264 bp, Glycine max
  Clone ID: 700759319H1
acgtttctcacgcatgcactacttctccactgacgacgaccaaaacgaggatgacgacgacaccgacctcgacttcgtcgacgacagcaatgtcagccctgctgaagaggaggaacccaaaaaatccgacattctcggcggcgagaatttcaatcgccgcagggaatttcgggtggtgctggacccgcgaggcaagtgggttcaggaatggaacagggtgttcctcctcgtgtgcgccaccgggttgttcgtggacccgctgtt

SEQ ID NO: 64424 - DNA, 79 bp, Glycine max
  Clone ID: 700759321H1
ctaaattatgattacgatgttcaaagatgttaagcttttgttgtttatctgttatacgacataatggattaattgctat

SEQ ID NO: 64425 - DNA, 266 bp, Glycine max
  Clone ID: 700759323H1
ccagaagattcgtcacttcaatgaaggagacgtactagtgattcctcctggtgttccttactggacctataaactggcgatgaaccagttgttgccatcagtcttcttgacacctccaacttcaacaatcagcttgatcaaaaccccagagtattttaccttgctgggaacccagatatagagcacccagagatcatgcaacaacagcagcagcagaagagtcatggtggacgcaagcaggggcaacaccagcagcaggaggaaga

SEQ ID NO: 64426 - DNA, 267 bp, Glycine max
  Clone ID: 700759324H1
acaatatgtgtgcatatgggctcaatcctggtatttcaggttctcgtcttttgggcaccattcctcagtccatttcacagcaaactgtttggaatcaaatggcaacagtgagaacaccattgaattttgattctagcaagcagagcttttgtcaattttctattgaccttctcggtggaggaattttagtggacaaaactggagattggatcacacttatacaaaattctccaattagtaacttgttgagagttgctgcttggaaga

SEQ ID NO: 64427 - DNA, 267 bp, Glycine max
  Clone ID: 700759325H1
tccaaatggcaacttcggagaacaacaacgcgcgtccccaacgcgtggccaagaagagagcagcagctgcaatatgcgaacttcaccgcaacgccgccaagaggaaacgcgtcgttttgggtgacctcactaacgtttcatcaaactacgtcgccgttacggaaaaagaaattcagaaacagaaaaaggttaaacgcgagcaaccggcgcggccggtttccacgccggagaaggtagaggaaagacacgacccgcaactctgtgggc

SEQ ID NO: 64428 - DNA, 264 bp, Glycine max
  Clone ID: 700759326H1
aaattttccagtggattcttggttaccaatttttgtgaattgtctttatcctgtaagtcaattaccttcagaagctgtcgttgtaaatgttacatgtggtagtggacgtggtggtttacccaccactgcttggattagttctgcagttaacaatcgctcctcagatatcaacaaaaagattcgcacagcacttgggaaaggtaagaaaattgtttttcttaccagagttgatccttttccagtagctttactggctgttctttt

SEQ ID NO: 64429 - DNA, 261 bp, Glycine max
  Clone ID: 700759327H1
gagaatataggaatataagaactaagatggattggatcggagcgtaccgcggaggccagagaagcagggactggtgcgacccttcatcaccattcactgatttgtgggaccctcgtcgtgtcggtgacgctgatgatatcacctcctctctcgcccatgctcacgttgactggcgtgagactgataaagctcatatcttccgtgctgatcttccaggggtgaagaaagaggatctgaaggtgcaggtggaggagaataaga

SEQ ID NO: 64430 - DNA, 102 bp, Glycine max
  Clone ID: 700759328H1
ctaaattatgattacgatgttcaaagatgttaagcttttgttgtttatctgttatacgaaataatggattaattgctataaaaaaaaaagaaaagggggggc

SEQ ID NO: 64431 - DNA, 214 bp, Glycine max
  Clone ID: 700759330H1
agattactagttaatttgggtattatgaaatgtacctatgcctatgtttgtgtgtatttcttttctcttgtcgttatctgaattcatgtatgcaatttccttgatgctggtttggagtatcaacactaaaaacttgttaagtgtgtatgtagatgtagtcctcgatgatgaataaagtgtgacccctacccttcttcaaaaaaaaaaaaagaaa

SEQ ID NO: 64432 - DNA, 264 bp, Glycine max
  Clone ID: 700759331H1
gcagaaatgatcaacagtctttgtgggtggctcctgaggataaggcgagtttatggtcacaacttcattatgtttcgtgtaataatctggaaatgcaagaagcttatcttgtcaatctcgtaaatgtgttacgagaattgtatttgcacagtccagaggaagctcgccaattgagaaggaaagctctctctcgtattgaatggctgcaaaaagctgatgtgcctaccatagcacagattgaagagttccattcgatgcagagga

SEQ ID NO: 64433 - DNA, 264 bp, Glycine max
  Clone ID: 700759332H1
gcaaaatgaccaagttcacaatcctcctcatctctcttctcttctgcatcgcccacacttgcagcgcctccaaatggcagcaccagcaagatagctgccgcaagcagctccagggggtgaacctcacgccctgcgagaagcacatcatggagaagatccaaggccgcggcgatgacgatgatgatgatgacgacgacaatcacattctcaggaccatgcggggaagaatcaactacataaggaggaacgaaggaaaagacgaag

SEQ ID NO: 64434 - DNA, 229 bp, Glycine max
  Clone ID: 700759334H1
ttaacactctccttagttcaatatggggaagcccttcttcactctctctctgtcttccctttgcttgctactcttgacgagtgcatgctttgctattacctccagcaagttcaacgagcgccaactcaacaacctcaacgcgttggaacccgaccaccgcgttgagtccgaaggtggtcttattgaaacatggaactctcaacaccctgagctgcaatgcgccggtgtc

SEQ ID NO: 64435 - DNA, 257 bp, Glycine max
  Clone ID: 700759335H1
catgactcatgagttcagtcttttagctaatctaaatgcattggagtatttgttaaaaaaacataggtttgagccaagcttcttgatagaagactaatagacatttatgaggctatggatgactacctattttctttattttttttccctttaataggcaaggagattcatatatcatcaatgggacaaaatggtggacaagtggtgctatggatccaagatgtagaattctgatagtcatggggaaaactgacttc

SEQ ID NO: 64436 - DNA, 79 bp, Glycine max
  Clone ID: 700759336H1
ctaaattatgattacgatgttcaaagatgttaagcttttgttgcttatctgttatacgaaataatggattaattgctat

SEQ ID NO: 64437 - DNA, 259 bp, Glycine max
  Clone ID: 700759338H1
atcctagtacaccgtattaaagaatttaagatatactatgatgagagcgcggttcccattactgttgctgggagttgttttcctggcatcagtttctgtctcatttggcattgcgtattgggaaaagcagaaccccagtcacaacaagtgcctccgaagttgcaatagcgagaaagactcctacagggaccaagcatgccacgctcgttgcaacctccttaaggtggaggaagaagaagaatgcgaagaaggtcaaatt

SEQ ID NO: 64438 - DNA, 262 bp, Glycine max
  Clone ID: 700759339H1
ctcaaaagtaaacactcaaaacacttggtattaatttgttcttcttattcttcaatttgttgtgcctctagttcttgtttctaagctaagaatatgtctggggtttgggttttcaagaacggtgtggtgaggctggtggagaaccctggctcagagcgcaaggtgttggttcacactgcaagcaacgaaatcatcacttcctatgcagtgttggagcacaagcttagctcactggggtgggagcgttactatgatgaccctg

SEQ ID NO: 64439 - DNA, 261 bp, Glycine max
  Clone ID: 700759340H1
cacaaatctgggtatagtggagtagtagggtttttgcgtttgagagagaagaagcatgagcaggagtttgggaattcaggtgaagctgctccacgaggcttcggggcacgtggtgacggtggagctcaagagcggagaactctacagaggaagcatgatcgagtgcgaggacaactggaactgtcaactcgagagcatcacctacactgccaaggatggcaaaacatcgcaacttgagcatgtgtttattcgaggcagcaa

SEQ ID NO: 64440 - DNA, 261 bp, Glycine max
  Clone ID: 700759341H1
cttccaagtgagacaccagcaccactagtcaaatatagagaagaagagttgcataatttaagaggagatggaactggagaacgcaaagagtgggaaaggatctatgattatgatgtctacaatgatttaggtgatccggataaaggtgaaaatcatgcccgtcctgttcttggaggaaatgacacctttccttatcctcgtagggggagaactggtagaaaaccaacaaggaaagatcctaatagtgagagtaggagcaat

SEQ ID NO: 64441 - DNA, 262 bp, Glycine max
  Clone ID: 700759342H1
cgacactgatgatgatcctcttcaaaacggtggcacatactatatgttgccagttatgagaggaaagggcggtggaatagaagtagattcaactggaaaagaaatatgccctctcactgttgtgcaatcacccaatgagctcgataaggggattggactagtctttacatctccattacatgccctttttatcgccgaagctatcctttgagcattaagtttggttcatttgcagttataacgctgtgtgccggcatgccta

SEQ ID NO: 64442 - DNA, 257 bp, Glycine max
  Clone ID: 700759343H1
gaagcaaagcaatggctacttcaaagttgagaacccagaatgtggttgtatctctctccctaaccttaaccttggtactggtgctactgaccagcaaggcaaactcagcggaaactgtttctttcagctggaacaagttcgtgccgaagcaaccaaacatgatcctccaaggagacgctattgtgacctcctcgggaaagttacaactcaataaggttgacgaaaacggcaccccaaaaccctcgtctcttggtcgc

SEQ ID NO: 64443 - DNA, 260 bp, Glycine max
  Clone ID: 700759345H1
atccaccaaaggatcagttaccaaatatttcttactgtattactagtcctcctacatggcctgaggccatacttcttggttttcaacattttcttgtgatgcttggcacaactgtgttgattcccactgctcttgttccccagatgggaggtggcaataatgagaaggcaagagttatcgaaaccctgctttttgtagctggtattaacacattgttgcaaacaatgtttggaactcgattgcctgcagtaattggaggg

SEQ ID NO: 64444 - DNA, 259 bp, Glycine max
  Clone ID: 700759347H1
cacaaagttctgcggcaccactagcaattgtcccctccttagctcaccgtcgaacactgcattaaggatgtgtttagggcaatcccttcggaggttctttccaattcttacaaccttggccagagtcaagtgcgtcactcaagtatcaaggaaactccggccctttggtcaacccataaataacaacaagcatatatgaaggtgtggtgaggccatcttatatgaaataatatcaaaatatattttgtgtaataataaa

SEQ ID NO: 64445 - DNA, 262 bp, Glycine max
  Clone ID: 700759348H1
cgcaatcttcactattttcaccgagcatttgcattccacattgaatatggtctaggctacacaatctaatgctgagttattggagtggcctaagaaagataagcgccgcttcctgcatgttgtgtatcgtgttggtgatcttgatcgcaccattaagttttatactgaatgttttgggatgaagcttttgaggaaaagagatattccagaagagaaatatgccaatgcttttcttggatttggccctgaacaatcccatttt

SEQ ID NO: 64446 - DNA, 264 bp, Glycine max
  Clone ID: 700759349H1
tttgttcctgagatgggaggcggtaaccagcctgccagggttagtctgattcaaatccccagcaaagaggaactcaggcagaagaaccttttcagtgtcagtgactgcaagatttactggcaaagcaatggagactaccttgctgttaatgtagagaggtacacgaaaacaaaaaaaagcacatacacaggctttgagcttttccgtataaaagaacgggatataccaattgaagttttggagcttgagaataagaatgataag

SEQ ID NO: 64447 - DNA, 257 bp, Glycine max
  Clone ID: 700759350H1
gctgatgcttatcagcctcatctaatagctccagaacaaggataccgtcgtctaattgaatcttctctaataacacttaggggccctgctgaggcagctgttgatgcggttcactccctgttaaaggacttggttcacaaagctatgagtgtgactttggacttgaagcagtatcctggtctccggcttgaggttggggctgtcactgttgattcactcgcaagaatgagggatgacgccggagagcaacactgcag

SEQ ID NO: 64448 - DNA, 73 bp, Glycine max
  Clone ID: 700759351H1
cgcagatgtcactgtgatatcatttgtgtcactggatggactgccaccccaatgcaggatgtgcaggttacaa

SEQ ID NO: 64449 - DNA, 136 bp, Glycine max
  Clone ID: 700759355H1
tcaactcgagcgaatcggctcgaggttcaatatctgagtataccttaataaataatttaagatactatgagcgagatcacggttcccattactgttgctgggacttggtttcctggcttcagtttctgtagcattt

SEQ ID NO: 64450 - DNA, 260 bp, Glycine max
  Clone ID: 700759356H1
ctttgctattggtattaatgccgagaacaaccagaggaacttcatcgcaggttcgcaagacaatgtgataagccagatacctagtcaagtgcaggagcttgcattccctgggtctgcacaagctgttgagaagctattaaagaaccaaagagaatcctactttgtggatgctcagcctaagaagaaagaggaggggaataagggaagaaagggtcctttgtcttcaattttgagggctttttactgaataagtatgtact

SEQ ID NO: 64451 - DNA, 250 bp, Glycine max
  Clone ID: 700759358H1
taacacttaccttagttcaatatggaggaagcccttcttcactctctctctttcttccctttgcttgctactcttgtcgagtgcatgctttgctattacctccagcaagttcaacaagagccaactcaacaacctcaacgcgttggaacccgaccaccgcgttgagtccgaaggtggtcttattgaaacatggaactctcaacaccctgagctgcaatgcgccggtgtcactgtttccaaacgcaccctc

SEQ ID NO: 64452 - DNA, 83 bp, Glycine max
  Clone ID: 700759360H1
ctgagagtcccctcaggaaccacatactatgtggtcaaccctgacaacatacgatgagtcagattaataacactcgccatacc

SEQ ID NO: 64453 - DNA, 256 bp, Glycine max
  Clone ID: 700759361H1
tgaccaagttcacaatcctcctcatctctcttctcttctgcatcgcccacacttgcagcgcctccaaatggcagcaccagcaagatagctgccgcaagcagctccagggggtgaacctcacgccctgcgagaagcacatcatggagaagatccaaggccgcggcgatgacgatgatgatgatgacgacgacaatcacattctcaggaccatgcggggaagaatcaactacataaggaggaacgaaggaaaagacga

SEQ ID NO: 64454 - DNA, 196 bp, Glycine max
  Clone ID: 700759363H1
ctcatcagtcatcaccatggccaagctagttttttccctttgtattctgcttttcagtggctgctgcttcgctttcagttccagagagcagcctcagtataacgagtgccagatccaaaaactcaatgccctcaaaccggataaccgtatagagtcagaaggagggctcattgagacatggaaccctagcaacaag

SEQ ID NO: 64455 - DNA, 117 bp, Glycine max
  Clone ID: 700759364H1
gtgatgttttgtggcagaagaacgatgtgattggacacagccaaagctgtggacttgttctgatactactttgtaattgtaatcacataaaaggctatagggtatgaagagtgcaca

SEQ ID NO: 64456 - DNA, 248 bp, Glycine max
  Clone ID: 700759365H1
gttcaatatcctagtacaccgtattaaagaatttaagatatactatgatgagagcgcggttcccattactgttgctgggagttgttttcctggcatcagtttctgtctcatttggcattgcgtattgggaaaagcagaaccccagtcacaacaattgcctccgaagttgcaatagcgagaaagactcctacaggaaccaagcatgccacgctcgttgcaacctccttaaggtggaggaagaagaagaa

SEQ ID NO: 64457 - DNA, 260 bp, Glycine max
  Clone ID: 700759366H1
tgtcaggaacaattcctaaggaacgcaaaacaataagatcatctagagacatgtatgctttcagtaggaattgttcctgacaccagctgatattgcgcagcaaccatcaacatcttgagagaagataagcgctgcatctctaagaaaaggtcttccatagccccccaaaaatgaagagcaccatcttctttgctctctttctcttttgtgccttcaccacctcatacctaccttcagccatcgctgatttcgtgctcgat

SEQ ID NO: 64458 - DNA, 125 bp, Glycine max
  Clone ID: 700759367H1
tctgtataccttgttgatctacattctcccatcttttcgcactgctgaaattaaatataagcggactcagagtaatattcagatttccggcttattgtacgacggcaggtacgaattccgcacaa

SEQ ID NO: 64459 - DNA, 249 bp, Glycine max
  Clone ID: 700759370H1
gtttgttgttcctcactgacctcaccatggcgaccataaaaaagctttcttagctatcttccttttctgtcttttagacttgatttcaaacctagccttgggcaaacttaaagaaaccgaggtcgaagaagatcccgagctcgtaacatgcaaacaccagtgccaacagcaacggcaatacactgagagtgacaagcgaacatgcttgtaacaatgtgacagtatgaagcatgagcgagatcaacaagt

SEQ ID NO: 64460 - DNA, 70 bp, Glycine max
  Clone ID: 700759372H1
ctcgttgcaacctccttaaggtggaggaagaagaagaatgcgaagaaggtcaaattccacacaccatacc

SEQ ID NO: 64461 - DNA, 259 bp, Glycine max
  Clone ID: 700759373H1
gccgtgtgctagcttttgtggcgtctttgtttgtgagcttgaacatacagtgtgtttaagtgttgacactccgaaaaacacccgaagcaaaaaaactcttatttttcagttcctcacatcccaagcctttataaataagttttaggcttgttttggggtacacaaggaacgtgtttcgcttgatcatttactagcatttcggggtgaacattttgttttcagcaaaaaagaaaaggagagaaatcaagaagaacatatg

SEQ ID NO: 64462 - DNA, 257 bp, Glycine max
  Clone ID: 700759374H1
aacttattaacactttccttagttcaatatggggaagcccttcttcactctctctctttcttccctttgcttgctactcttgtcgagtgcatgctttgctattacctccagcaagttcaacgagagccaactcaacaacctcaacgcgttggaacccgaccaccgcgttgagtccgaaggtggtcttattgaaacatggaactctcaacaccctgagctgcaatgcgccggtgtcactgtttccaaacgcaccctca

SEQ ID NO: 64463 - DNA, 256 bp, Glycine max
  Clone ID: 700759375H1
actcgagccgattcggctcgagaattctttctctctgtttcagaactcagattctcccttccgtttttgttcaggttgttacaagaattagcacctttatcgacacacatgtctctccaacaaccaaatcaagtggtgccattgcaagaaccagaagccacattttctcaactaagcaaacaaaactcaatactctcactcacccttgatgagttctattgcaagaatggaaagagcttaggatccatgaacatgg

SEQ ID NO: 64464 - DNA, 252 bp, Glycine max
  Clone ID: 700759376H1
ggttgttgctctgggggagaattttgactgatgggaggctcaatgccagagtcaagtgtgatttgtccgaaaatctcacttttaaagccaatgctcagctcacaaatgagccgcatatgtctcatgcgatgatcaactttgattacaagggaaaagactatagaacccaatttcaacttggtaatggagccttgctaggagcaagttatattcagagtgtgacacagcatttatcattgggtggggaggtat

SEQ ID NO: 64465 - DNA, 253 bp, Glycine max
  Clone ID: 700759377H1
ggaaaaagaagcttaagtctcatcattttgatgcaaaatcaaagggaagaggaaggaggtgacatagttttgatgcaaaatcataggataaaaggaagtaaggttggaaccagaagagactgtgttgtattcctggtttcattcagatgtaatattatttttgattctttatgtaagaggcttggacatgccatcaactatgtcgctatgaggttataatgtggtcttgcagatcttgcttgctaattgattt

SEQ ID NO: 64466 - DNA, 256 bp, Glycine max
  Clone ID: 700759378H1
ggatttcattgcgatatcatttgtgtcactggatggactgccaccccaatgcaggatgttcaggttacaattgattggtttatttcctctcaggaatgtgttcccaggacctattgtgttttaaatccacaaaatccttttgttttaaataggtggatgggaaaattgactttcccccagggcacttcccgaagtgttaagagaatgcctctttctatagggggaggagctggtgcaaagaatgctattctcatga

SEQ ID NO: 64467 - DNA, 185 bp, Glycine max
  Clone ID: 700759379H1
gaaattttgataaaccgcgatcacaggttgccgcaccttaaaaccggaaacaaaagcaatcgttacttgatttcaagaatttctcaatttctttctacttctttgtgtacgatttcttaagggaaagaaaatcactctctgtgctggccacagacttcgtgaatcattttcttttccacacaaca

SEQ ID NO: 64468 - DNA, 245 bp, Glycine max
  Clone ID: 700759380H1
ccatattctatggaatggactggtttggccaatagattactgagtaatggcaacgatattctgtgttgcgattatgctagttttgatggtttgattaccaagcaagttatgagcaagatggcagaaatgatcaacagtctttgtggtggtgatgaaaaactgatgcgtgaaaggacacacctgctgttggcttgttgttcaaggatggcaatttgtaagaaagatgtttggagagttgaatgtgg

SEQ ID NO: 64469 - DNA, 180 bp, Glycine max
  Clone ID: 700759382H1
tgataaaccgcgatcacaggttgccgcaccttaaaaccggaaacaaaagcaatcgttacttgattacaagaatctctcaatttcttcctacttctttgtgtacaatttcttaagggaaagaaaatcactctctgtgctggccacagacttcgtgaatcattttcttttccacacaacata

SEQ ID NO: 64470 - DNA, 257 bp, Glycine max
  Clone ID: 700759383H1
cgtcgtcccgccggctcgttttgaggcgccgcgttacgaagccggcatcaaggcgccctcttccatttaccattccgagagaggtccgacgacctctcaggttctcgcagttgtcgccggccttccggtcggcggcatcctcctgctcctggcaggactgaccctggctggaactctcaccgggctggtggtggcaacaccgctcttcatcatcttcagcccgatgctgattccggccacggtcgcaattggcctgg

SEQ ID NO: 64471 - DNA, 257 bp, Glycine max
  Clone ID: 700759384H1
caaggaaaaccatttcttctgaagataaaccttttaacttgagaagccgcgaccccatctactccaacaagcttggcaagttctttgagatcaccccagagaaaaacccccagcttcgggacttggatatcttcctcagtattgtggatatgaacgagggagctcttcttctaccacacttcaattcaaaggcgatagtgatactggtaattaatgaaggagatgcaaacattgaacttgttggcctaaaagaacaa

SEQ ID NO: 64472 - DNA, 255 bp, Glycine max
  Clone ID: 700759385H1
agaaaccctaaccatcatgtctccaaaatcaaaggctaaagctatgttcatcatcttcaaaatattaatgttaaatcttttgccaccaatatatgcatgtgggccatgcactacgccacgttaccccaaagggccgccccatcacggaggaggccggccgaaagtgtcgcctccgctgccgccaatcataatcaaccctccggtggtaccgccaccggtggtgatataccctccaccaatctcaccgccataccc

SEQ ID NO: 64473 - DNA, 123 bp, Glycine max
  Clone ID: 700759387H1
tcctagtccaccgtattacagagttcaagatatactatgatgagagcgcggttcccatgactgttgctgcgagttgatcacctggcatccacgtctgtctcatctggcattgcgtattgggaa

SEQ ID NO: 64474 - DNA, 257 bp, Glycine max
  Clone ID: 700759388H1
gaacagcataatatacgcattgaatgggcgggcattggtacaagtggtgaattgcaatggtgagagagtgtttgatggagagctgcaagagggaggggtgctgatcgttccacaaaactttgcggtggctgcaaaatcccagagcgataactttgagtatgtgtcattcaagaccaatgatagaccctcgatcggaaaccttgcaggggcaaactcattgttgaacgcattgccagacgaagtgattcagcacactt

SEQ ID NO: 64475 - DNA, 254 bp, Glycine max
  Clone ID: 700759390H1
gctttgtcctcgggcctgtacttcagaaggagaggctcttgaaaagggctcaggcagaggctgaaggcacaactgttgaagctaagaagcctattgttgtgaagtatggtctcaaccatgttacctacctcatcgagcagaacaaagcacagctcgttgtgattgctcacgatgtggaccccattgaattggttgtctggcttcctgctttgtgcaggaagatggaaattccgtactgtattgtgaagggaaag

SEQ ID NO: 64476 - DNA, 255 bp, Glycine max
  Clone ID: 700759391H1
aaaacattcaggatcttccagtcccaggagcacgagcttgttaacaagtacaattatgttgttagcctttggaaaagggtatcaactgtcactggagaattgcactatggtgatgcattgaggctactaaacaacttggaggatgcatccaagaggtttgttgatcaagttaatgtgactcttgcccttctccatccaattaactgcacaagagagagaaaaatacatatggtgtttgatatgacaacaattcca

SEQ ID NO: 64477 - DNA, 244 bp, Glycine max
  Clone ID: 700759392H1
cttggttaccaatttttgtgaattgtctttatcctgtaagtcaattaccttcagaagctgtcgttgtaaatgttacatgtggtagtggacgtggtggtttacccaccactgcttggattagttctgcagttaataatcgctcctcagatatcaacaaaaagattcgcacagcacttgggaaaggtaagaaaattgtttttcttactagagttgatccttttccagtagctttactggctgttct

SEQ ID NO: 64478 - DNA, 254 bp, Glycine max
  Clone ID: 700759393H1
actcgagccgaatcggctcagctttgaacactcatcaccatggacaagcttgttctttcactttgtttccttcttttcaacggctgcttcgctctgagagagcaggcacagcaaaatgagtgccagatccaaaagctgaatgccctcaaaccggataaccgtatagagtcggaaggtgggttcattgagacctggaaccctaacaacaagccattccagtgtgccggtgttgccctctctcgctgcacccttaa

SEQ ID NO: 64479 - DNA, 78 bp, Glycine max
  Clone ID: 700759396H1
aaaagttgtattgaaatttttcctgaatctctccaaactgcaccagcttgtagggaaaagcctcaaaattgatggtgt

SEQ ID NO: 64480 - DNA, 272 bp, Glycine max
  Clone ID: 700759401H1
attgtctttgaacactcatcaccatggccaagcttgttctttccctttgtttccttcttttcagtggctgcttcgctctgagagagcaggcacagcaaaatgagtgccagatccaaaagctgaatgccctcaaaccggataccgtatagagtcggaaggtgggttcattgagacctggaaccctaacaacaagccattccagtgtgccggtgttgccctctctcgctgcacccttaaccgcaatgcccttcgtagaccttcctacaccaacg

SEQ ID NO: 64481 - DNA, 106 bp, Glycine max
  Clone ID: 700759402H1
atatcctagtacaccgtattaaagaatttaagatatactatgatgagagcgcggttcccattactgttactgggagttgttttcctggcatcagtttctgtctcat

SEQ ID NO: 64482 - DNA, 265 bp, Glycine max
  Clone ID: 700759404H1
gcggtttcctttgttggtgttgctgggaactgttttcctggcatcagtttgtgtctcattaaaggtgagagaggatgagaataaccctttctacttgagaagctctaacagcttccaaactctctttgagaaccaaacggtcgcattcgtctcctccagagattcaacaaacgctccccacaacttgagaaccttcgagactaccggattgtccagtttcagtcaaaacccaacacaatccttctcccccaccatgctgacgccg

SEQ ID NO: 64483 - DNA, 129 bp, Glycine max
  Clone ID: 700759405H1
gagaatacaatatattccctccaatctgcacccagccccacttacctaccttatctctctctctctctctctctcaatcgttcttcacgagagagagagacatggacgccgtcgttcaaaccagaggcc

SEQ ID NO: 64484 - DNA, 263 bp, Glycine max
  Clone ID: 700759406H1
tagcaaaatgaccaagttcacaatcctcctcatctctcttctcttctgcatcgcccacacttgcagcgcctccaaatggcagcaccagcaagatagctgccgcaagcagctccagggggtgaacctcacgccctgcagaagcacatcatggagaagatccaaggccgcggcgatgacgatgatgatgatgacgacgacaatattattatcaggaccatgcggggaagaatcaactacataaggaggaacgaaggaaaagacga

SEQ ID NO: 64485 - DNA, 75 bp, Glycine max
  Clone ID: 700759407H1
gtccatttgtccttgaatataatactcagcatggctaagcttgttctttccccttgttttctgctattgagtggc

SEQ ID NO: 64486 - DNA, 261 bp, Glycine max
  Clone ID: 700759409H1
aagctttctagctggtcataatatcaccattactgatggtattgacaaaactagtgcaactttgcaatttagaaagttagcagattgtgattttctcaagagaaactttaggcagatgtctaatgttttgtgggtgctcctgaggacaaggcgagtttatggtcacaacttcattatgtttcatgtaataatctggaaatgcaagaagcttatcttgtcaatctcgtaaatgtgttacgagaattgtatttgcacagtcca

SEQ ID NO: 64487 - DNA, 258 bp, Glycine max
  Clone ID: 700759410H1
gctggtgcagtttggagagattcaggaaaaagttgtattgaaattttcacaagaggaatttcttacagcttggtcaactcaggtgcgtcctgcaacaactctgttggctgatgggtgcccatatttgtatgctatgtgcatgatagttcagtgtctacaataccaggtgattttgtcattggtgttaagttgacaaccataaacaatatgtgtgcatatgggctcaatcctggtatttcaggttctcgtcttttgggc

SEQ ID NO: 64488 - DNA, 257 bp, Glycine max
  Clone ID: 700759411H1
ctcagtcctacgatacgattctcttccgcctcccttcccttcaactccacggctcagatccgaggagtttgggaaaccctaattcattcctctttgcttcttctatctctattcctctaacaccagtgatggcagtttggctccagaaggatcgcagtttgatgctcggcaatatgattctaagatgaatgaattgctttccgccgatggacaagaatttttcacttcatatgacgaatctatgatagttttgatgc

SEQ ID NO: 64489 - DNA, 259 bp, Glycine max
  Clone ID: 700759412H1
accattcccacgcccacctcatcagaaggaagagcgaaagcaagaggaagatgaggatgaggagcagcagcgagagagcgaagaaagtgaagattctgagttacgaagacataagaataagaacccttttctcttggctctaacaggttcgaaactctcttcaaaaaccaatatggtcgcattcgcgtcctccagaggttcaaccaacgctccccacaacttcagaatctccgagactaccgcattttggagttcaact

SEQ ID NO: 64490 - DNA, 84 bp, Glycine max
  Clone ID: 700759413H1
ctaaattatgattacgatgttcaaagatgttaagcttttgttgtttatctgttatacgaaataatggattaattgctataaaaa

SEQ ID NO: 64491 - DNA, 260 bp, Glycine max
  Clone ID: 700759414H1
ggtgctaaatccctagtaagccgccatggtgaagtactcaagggagcctgacaatccaaccaagtcttgcaaggctagaggcgccgaccttagggttcattttagagaacactagggaaactgcctttgcaatcagaagttgcccttagttaaagctaaaaggtacttggaagatgttcttgcgcacaagcaggccattccgttcagacgtttctgtcgtggtgttggaacgacagctcaagcatatattagacactcta

SEQ ID NO: 64492 - DNA, 262 bp, Glycine max
  Clone ID: 700759415H1
taccaagcaagttatgagcaagatggcagaaatgatcaacagtctttgtggtggtgatgaaaaactgatgcgtgaaaggacacacctgctgttggcttgttgttcaaggatggcaatttgtaagaaagatgtttgagagttgaatgtggaatcccttctggatttccgctcacagttatttgcaatagcatttttaatgagatgctcattagatatagctatgaaaaattactgcgtcaggctacagctccaagtatgtttt

SEQ ID NO: 64493 - DNA, 93 bp, Glycine max
  Clone ID: 700759418H1
ctcgagccgcgcgaacagcataatatacgcattgaatgggcgggcattggtacaagtggtgaattgcaatggtgagagagtgtttgatggaga

SEQ ID NO: 64494 - DNA, 257 bp, Glycine max
  Clone ID: 700759422H1
gtcctagtcgaccaagccaaggaaagcgtgtacaagaccaggaataggacgaggacgaagatgaagatgaagatgaacctcgcaagagccgcgaatggagatcgaaaaagacacaacccagaagacctagacaaaagaaccacgtgaaagaggatgcgagacaagaaacggggttgaggaaaatatctacaccttgaagcttcacgagaacattgctcgcccttcacgcgctgacttctacaaccctaaagctggtc

SEQ ID NO: 64495 - DNA, 254 bp, Glycine max
  Clone ID: 700759423H1
cgagaaaaggattaccgttcagaacgaagacagttccaaagatgagtacagagtttggaatcctttccgttcgaagttggccgctgccatccttggtggtgttgacaacatatggattaaacctggtgccagatcctttacctaggagctgcttccggcaccactgtttctcacgtatcagatgtttttggcccaactggagttgtctatgcagtagagttttcccatagaagtggtcgtgacttggtcatatg

SEQ ID NO: 64496 - DNA, 260 bp, Glycine max
  Clone ID: 700759425H1
tctcgagccgaatcggctcgagtgctgccatagaaaatacaagatcgctattgggaaaaataaatggtgttcttgtacacgaaacaaatgtaggtcctgcatttgatctaaacacttccatgaagcaggcatcaacagttacatgtcactaccagaagacacacaagccctaaatacatcttcgggaagaaaaagctcacggacaaagccagaggaaaacccacctccgaagaagaagtatgtgaaaaggaaaggagtga

SEQ ID NO: 64497 - DNA, 257 bp, Glycine max
  Clone ID: 700759426H1
atttggtggaaactcctaaggaatggcaactggatctaccttgtgataaaattcctagtgtcttgactataactgatgagagattggtaggcacagaacatgagggatatgatccttttcttggtggaattcaaaatatgtcactcccatgatgcccttagatgaagaaattctttctaaggttgcacaagatatggttgatgaatggtttgattgtgttgatgaggaggattcctttgaggaagtttctttaagtg

SEQ ID NO: 64498 - DNA, 82 bp, Glycine max
  Clone ID: 700759428H1
ctaaattatgattacgatgttcaaagatgttaagcttttgttgcttatctgttatacgaaataatggattaattgctataaa

SEQ ID NO: 64499 - DNA, 257 bp, Glycine max
  Clone ID: 700759430H1
caaatgaccaagttcacaatcctcctcatctctcttctcttctgcatcgcccacacttgcagcgcctccaaatggcagcaccagcaagatagctgccgcaagcagctccaggggctgaacctcacgccctgcgaaagcacatcatggagaagatccaaggccgcggcgatgacgatgatgatgatgacgacgacaatcacattctcaggtccatgcggggaagaatcaactacataaggaggaacaaggaaaagacg

SEQ ID NO: 64500 - DNA, 106 bp, Glycine max
  Clone ID: 700759433H1
aggttagggacatcaccacttggcatctgtttggagttcctgattttgacagggcgtgttatttctatggaatttcttatcgtgattgtatctaaatttgtttttc

SEQ ID NO: 64501 - DNA, 93 bp, Glycine max
  Clone ID: 700759434H1
gtattaaagaatttaagatatactatgatgagagcgcggttcccattactgttgtctgggagttgttttcctggcataagtttctgtctcatt

SEQ ID NO: 64502 - DNA, 258 bp, Glycine max
  Clone ID: 700759435H1
gtagcttagcaatggctacttcaaagttgaaaacccagagtgtggttgcatctctctgcctaaccttaaccttggtactggtgctactgaccagcaaggcaaactcagcggaaactgtttctttcagctggacaagttcgtgccgaagcaaccaaacatgatcctccaaggagacgctattgtgacctcctcgggaaagttacaactcaataaggttgacgaaaacggcaccccaaaaccctcgtctcttggtcgcgc

SEQ ID NO: 64503 - DNA, 81 bp, Glycine max
  Clone ID: 700759436H1
ctaaattatgattacgatgttcaaagatgttaagcttttgttgtttatctgttatacgaaataatggattaattgctataa

SEQ ID NO: 64504 - DNA, 247 bp, Glycine max
  Clone ID: 700759440H1
cacaaatctgggtatagtggagtagtagggtttttgcgtttgagagagaagaagcatgagcaggagtttgggaattccggtgaagctgctccacgaggcttcggggcacgtggtgacggtggagctcaagacggagaactctacagaggaagcatgatcgagtgcgaggacaactggaactgtcaactcgagagcatcacctacactgccaaggatggcaaaacatcgcaacttgagcatgtgttta

SEQ ID NO: 64505 - DNA, 240 bp, Glycine max
  Clone ID: 700759441H1
gcgagagaaacaagtcgaagaggaaactcgcgagaaggaagaagaacatcaagagcagcatgaggaggaggaagaccaaaatccctacgtttttgaagaagataaggatttttcgaccagagtcgaaacagaggtggcagcattcgggttctcaagaagttcactgagaaatccaagcttcttcaaggcattgagaatttccgtttggccatcttagaagctagagcacacacgttcgtg

SEQ ID NO: 64506 - DNA, 255 bp, Glycine max
  Clone ID: 700759442H1
cgacactgatgatgatcctcttcaaaacggtggcacatactatatgttgccagttatgagaggaaagggcggtggaatagaagtagattcaactggaaaagaaatatgccctctcactgttgtgcaatcaccaatgagctcgataaggggattggactagtctttacatctccattacatgccctttttatcgccgaagcgtatcaatgagcattaagtttggttcatttgcagttataacgctgtgtgccggca

SEQ ID NO: 64507 - DNA, 251 bp, Glycine max
  Clone ID: 700759443H1
tccagtgtctttgaacactcatcaccatggtaaagcttgttctttccctttgtttccttctgttcagcagctacttcgctctgagagagcaggcacagcaaaatgagtgccagatccaaaagctgaatgcctcaaaccggataaccgtatagagtcggaaggtgggttcattgagacctggaaccctaacaacaagccattccagtgtgccggtgctgccctctctcgtttgtaccttaaccgcaatgccc

SEQ ID NO: 64508 - DNA, 207 bp, Glycine max
  Clone ID: 700759444H1
gaaggatctagagaaagaaagtggtgtccaagcaatggcaattatctctggtatcccttaatttatatgaatgttgtcacagaggcctttcttttccttatgatgttgctcttgttcctaccaaagcagcacattaaaattaaaacatggcatcttcaccggacaccagcagaaccataaagctggtgcgtaacaacagctacctcc

SEQ ID NO: 64509 - DNA, 259 bp, Glycine max
  Clone ID: 700759448H1
cttcacgattaggctctgggtgtgtgacacctgatggtctggggctggaatccaggttaggttctggctgtttgacacctgacagtgctgggccaatcaatcaaaacaacatctctgtgcaaaaccagatattaaggaagcaactcttgcagatacggacaatggacattcaagtaatgcaacattgattgatcacagagtttcatttgaattaaccggggaagatgttgcccgctgtcttgctaataaaaccggggta

SEQ ID NO: 64510 - DNA, 75 bp, Glycine max
  Clone ID: 700759449H1
caaagtccttgtttgttcctcagtacctcgactccaatctcatcatattcatccggtaaaggggaaccaaacctg

SEQ ID NO: 64511 - DNA, 252 bp, Glycine max
  Clone ID: 700759450H1
cttaattattaacacttccttagttcaatatggggaagcccttcactctctctctttcttccctttgcttgctactcttgtcgagtgcatgctttgctattagctccagcaagctcaacgagtgccaactcacaacctcaacgcgttggaacccgaccaccgcgttgagtccgaagtggtttgattcaaacatggaactctcaacaccctgagctgaaatgcgccggtgtcactgtttccaaactgcacctc

SEQ ID NO: 64512 - DNA, 100 bp, Glycine max
  Clone ID: 700759451H1
attctgggatgaaggagaaatttgtacaaatgatgaagagcatctatgaaacaggagttacagactggccagtaccactgaaaatcatttctggaaccat

SEQ ID NO: 64513 - DNA, 122 bp, Glycine max
  Clone ID: 700759452H1
caactaacaataattccttcacttgcagaacttagttctctgttgcatcatcatcatcttcattagtgttagccctaaacttcaccttcaaccatgaccacagtgccaccacacagtgtcca

SEQ ID NO: 64514 - DNA, 254 bp, Glycine max
  Clone ID: 700759457H1
ccaaatattcttcgtcctcccgctcgctcttctcactcgtcatcttcgaattcgtctgcgccctaacaaaattcatttcaattccaactcctctgatcaaaatcctaggctcgttcttgaatctcctaatcgatctcctcctcctcctccgaagaataaaaggaggatcgatgtgggcagtatcttgcctggcgtcgtgctgcgcggcctgcgcatgcgacgcctgcaggaccgtcgtttcgggaatcagccgt

SEQ ID NO: 64515 - DNA, 255 bp, Glycine max
  Clone ID: 700759458H1
gcaagatagctgccgcaagcagctccagggggtgaacctcacgccctgcgagaagcacatcatggagaagatccaaggccgcggcgatgacgatgatgatgatgacgacgacaatcacattctcaggacatgcggggaagaatcaactacataagggaggaacgaaggaaaagacgaagacgaagaagaagaaggacacatgcagaagtgctgcacagaaatgagcgagctgagaagccccaaatgccagtgcaa

SEQ ID NO: 64516 - DNA, 76 bp, Glycine max
  Clone ID: 700759459H1
cgctccatctctccagtcttatctcgttcactttcacaactcaaacaattcgcaaaatcccagccttgtcccctct

SEQ ID NO: 64517 - DNA, 252 bp, Glycine max
  Clone ID: 700759460H1
gccaagtgaaagtgagaaaaaataaaaatcaaagagcataatgtcagggatcattcacaagattggggagacccttcatgtgggagggcacaagaaggaggaggagcataagggtgagcaccatgctgagaatacaaaggggagcaccatggtgaacacagtagtgagtacaaaggagagcatcatggtgaacacaaagctggagagtaccatggtgagcacaagccagagcacaaagaggggtcctagaca

SEQ ID NO: 64518 - DNA, 78 bp, Glycine max
  Clone ID: 700759462H1
atccttttgacgacttctgctatcaggatggaaatcgtgaaaatgaatataagaaagggttgagacctattctctggc

SEQ ID NO: 64519 - DNA, 255 bp, Glycine max
  Clone ID: 700759464H1
gttcaatatcctagtataccttaataagtaatttaggatactatgatgagagcacggtttccattactgttgctgggaattgttttcctgggttcagtttctgtctcatttggcattgcttactggtaaaagagaaccccaaacacaacaagtgtctccagagttgcaatagcgagagagactcgtacaggaaccaagcatgccacgctcgttgcaacctccttaaggtggagaaagaagaatgtgaagaaggtg

SEQ ID NO: 64520 - DNA, 89 bp, Glycine max
  Clone ID: 700759466H1
gtcatgaaagggtttaaaccggactctgtgccggtttatgctgctttggttaaggaatttgctgtttttgataggtggttttcttcaat

SEQ ID NO: 64521 - DNA, 254 bp, Glycine max
  Clone ID: 700759467H1
gttcaatatcctagtatacctttataaataatttaagatactatgatgagagcacggttcccattactgttgctggtgtttgttttcctggcttcagtttctgtctcatttggcattgcttactgggaaaagagaaccccaaacacaacaagtgttctcagagttgcaatagcgagagaaactcgtacaggaaccaagcattccacgctcgttgcaacttccttaaggtggagaaagaggaatgtgaagaaggt

SEQ ID NO: 64522 - DNA, 254 bp, Glycine max
  Clone ID: 700759468H1
gttgacaaccataaacaatatgtgtgcatatgggctcaatcctggtatttcaggttctcgtcttttgggcaccattcctcagtccatttcacatcaaactgtttggaatcaaatggcaacagtgagacaccattgaattttgattctagcaagcagagcttttgtcagttttctattgaccttctcggtggaggaatcttagtggacaaaactggagattggatcacacttatacaaaattctccaatgagtaa

SEQ ID NO: 64523 - DNA, 174 bp, Glycine max
  Clone ID: 700759469H1
gatgagagtgcggtttcctttgttggtgttgctgggaactgttttcctggcatcagtttgtgtctcattaaaggtgagagaggatgagaataaccctttctacttgagaagctctaacagcttccaactctctttgagaaccaaaacggtcgcattcgtctcctccagagattc

SEQ ID NO: 64524 - DNA, 240 bp, Glycine max
  Clone ID: 700759471H1
caagttattatcaaataattaattaaattcctcgtggaatcttgttgaagccatgtctacagctggtcaggtcatcaagtacagagctgcggtggcatgggaagcagggaagccactatcgatagaaccatagaagtggcaccaccccagaaaggtgaagtgcgtttgaagatcctcttcaactccctttgccgtacagatgtttactggtgggatgctaagggccagactccgctgttt

SEQ ID NO: 64525 - DNA, 252 bp, Glycine max
  Clone ID: 700759473H1
ggccatagtgatactagtgattaatgaaggagatgcaaacattgaacttgttggcattaaagaacaacaacagaagcagaaacaggaagaggaacctttggaagtgcaaaggtacagagctgaattgctgaagacgatgtatttgtaattccagcagcttatccatttgtcgtcaacgctacctcaaacctcaatttccttgcttttggtatcaatgctgagaacaaccagaggaacttccttgcaggcgag

SEQ ID NO: 64526 - DNA, 252 bp, Glycine max
  Clone ID: 700759476H1
gatcaacctcgcaagagccgcgaatggagatcgaaaaagacacaacccagaagacctagacaagaagaaccacgtgaaagaggatgcgagacaagaaacggggttgaggaaaatatctgcaccttgagcttcacgagaacattgctcgcccttcacgcgctgacttctacaaccctaaagctggtcgcattagtaccctcaacagcctcaccctcccagccctccgccaattccaactcagtggccaatatg

SEQ ID NO: 64527 - DNA, 253 bp, Glycine max
  Clone ID: 700759477H1
cccaccccacttacatacacattctcccactcctccgagccggtcgagttgaatcggtgagtcagtgaccgagttgaaccatgtcggacgaagagcaccatttcgaatccaaggccgatgccggagctccaagacctatcctcagcaggccggaaccatccgcaaaaacggctacatcgtcatcaagggtcgtccctgcaaggttgttgaagtttctacttccaagactggtaagcacggccatgctaagtgt

SEQ ID NO: 64528 - DNA, 189 bp, Glycine max
  Clone ID: 700759478H1
gtgaactcgagccgttgaaattttgataaaccgcgatcacaggttgccgcaccttaaaacctgaaacaaaagcaatcgttacttgatttcaagaatctctcaatttcttcctacttctttgtgtacgatttctaagggaaagaaaatcactctctgtgctggccacagacttcgtgaattcttttcttt

SEQ ID NO: 64529 - DNA, 254 bp, Glycine max
  Clone ID: 700759479H1
cattgtctttgaacactcatcaccatggccaagcttgttctttccctttgtttccttcttttcagtggctgcttcgctctgagagagcaggcacagcaaaatgagtgccagatccaaaagctgaatgcctcaaaccggataaccgtatagagtcggaaggtgggttcattgagacctggaaccctaacaacaagccattccagtgtgccggtgttgccctctcttgttgcacccttaaccgcaatgcccttcgt

SEQ ID NO: 64530 - DNA, 256 bp, Glycine max
  Clone ID: 700759480H1
ccgcacgaatatcttgttgtttggagcgatccgagaaaaactctgtaaacatgttggtttaccaggacctccttacaggtgatgagcttctctctgactccttccgttacaaggaaattgagaatggaagctgtgggaagttgaggggaagtgggttgttaaaggagcagttgatgtagacattggtgcaaacccttctgctgagggtggaggagaagatgagggagttgatgatgcagctgttaaggttgttgac

SEQ ID NO: 64531 - DNA, 254 bp, Glycine max
  Clone ID: 700759481H1
cgcaaagtttttgataaacctaagacgcgctgcttcactattctccctatggagtttaatcttgtggttcgtcagaagtttttaaattttgtgaggttcattatgaagaaaagggacaagcttagtgtcaagttggaatcaacccatattctatggaatggactggtttggccaatagattactgagtaagggcaacgatattctgtgttgcgattatgctagtgttgatggtttgattaccaagcaagttatg

SEQ ID NO: 64532 - DNA, 255 bp, Glycine max
  Clone ID: 700759483H1
cgtcgtcccgccggctcgttttgaggcgccgcgttacgaagccggcatcaaggcgccctcttccatttaccattccgagataggtccgacgacctctcaggttctcgcagttgttgccggccttccatcggcggcatcctcctgctcctggcaggactgaccctggctggaactctcaccgggctggtggtggcaacaccgctcttcatcatcttcagcccggtgctgattccggccacggtcgcaattggcctg

SEQ ID NO: 64533 - DNA, 252 bp, Glycine max
  Clone ID: 700759484H1
agcttgtgttggctaacacacaagaattctttgatggaaattttccagtggattcttggttaccaatttttgtgaattgtctttatcctgtaagtcaattaccttcagaagctgtcgttgtaaatttacatgtggctctggacgtggtggtttacccaccactgcttggattagttctgcagttaataatcgctcctcagatatcaacaaaaagattcgcacagcacttgggaaaggtaagaaaattgtttt

SEQ ID NO: 64534 - DNA, 240 bp, Glycine max
  Clone ID: 700759486H1
taatgctgttctttcaatgtggagatattttgttggagatctcgtctttgaagtctctaagatgacttctccctacattaaatgtacagtgctcttgcttcatagcattttgaaattgtgctgatgcaccatcaattttgaggcttttccccacaagctggtacagtttggagagatttagtaaaaagttgtattgaaattttcacaagaggaatttcttacagcttggtcaacccaggt

SEQ ID NO: 64535 - DNA, 247 bp, Glycine max
  Clone ID: 700759488H1
aattaagcttcctacagaagtaattagcacaattatgcccttaccggtggttaaagaactctttcgtacagatggtgaacaaatcctcaagtttccaccacctcatgtccctcaagtgagtaagttgcatggatgaccgatgaagaatttgcaagagagatggttgcgggtgtaaatccatgcgtaattcgtggtcttcaagagtttcctccaaaaagcaatctggatcctacaatctatggtgagc

SEQ ID NO: 64536 - DNA, 248 bp, Glycine max
  Clone ID: 700759490H1
gttcccaggacctattgtgttttaaatccacaaaatccttttgtgttaaataggtggatgggaaaattgactttcccccagggcacttcccgaagtgttaagagaatgcctctttctataggggaggagctggtgcaaagaatgctattctcatgaatatgccaaatgctgttctttcaatgtggagatattttgttggagatctcgtctttgaagtttctaagatgacttctccctacattaaatgt

SEQ ID NO: 64537 - DNA, 249 bp, Glycine max
  Clone ID: 700759491H1
caatacaatgaggttcaggctcagatggaaacaaatttgtttaaattgtctcttgatgatgttgaaactcctaaaggttccatgttggatcttaaaatttctcaatctaaaattgtacttcccaaaacacagttggaggaaccattctgcgtagtgacctattggcaaattttttgacagagggcaattttagagcaagtgttgatttgcagcgcactcatcgtatcaaaggaatgattaaaatggtgg

SEQ ID NO: 64538 - DNA, 247 bp, Glycine max
  Clone ID: 700759492H1
gtgtccatttcaataattttcaacaacttatggacttggcagtttcatggagtctcagtgcaaatatcatgaaggaacgaatcaaagcagataaaagtgatatggtttatgtcttctctgctggaggaaggacacaatagtacattgcttcttgaataaagaaggcgaatgtagtatacgtcctgattcaatagaagatccagaagcacaacttttgctcaaagcttcagaaactatgctcatgaaa

SEQ ID NO: 64539 - DNA, 249 bp, Glycine max
  Clone ID: 700759493H1
ggagatggcactggtgggcagtctatttgggggagagaatttgaggatgaatttcataaaaggtaatgaagtttttttacaaacgttctatgttattaattattatatgcaaaaaatatcacatatcagactcctggctaatgattatttgggggatatgccgatggcttgtggaaacttcctggtctgattttgcctcagatggaatttagagcaaatgcttttttctctcttgcagtttgaggcatg

SEQ ID NO: 64540 - DNA, 244 bp, Glycine max
  Clone ID: 700759494H1
cacaaacaaattgttggtttccatgttgctggaagcataggaagactgggatatgcttcattgataccatatgttgagccagttgtgcaagctcaaagtgctgcattttacttcgacttcttcctgtggaggttgatagtcaagagggagttgctcacattggtgaattgaaatctggtgtctatgttccactgcctacacaactcaatttggtggaactcccaaggaatggcaactggatcta

SEQ ID NO: 64541 - DNA, 261 bp, Glycine max
  Clone ID: 700759501H1
agcttagttgtcaagttggaatcaacccatactccatggaatggactggtttggccaatagattactgagtaagggcaacgatattctgtgttgcgattatgctagttttgatggtttgattaccaagcaagttatgagcaaaatggcagaaatgataaacagtctttgtggtggtgatgcaaaattgatgcgtgaaaggacacacctgctgttggcttgttgttcaaggatggcaatttgtaagaaagatgttggagagt

SEQ ID NO: 64542 - DNA, 261 bp, Glycine max
  Clone ID: 700759502H1
accagtgttgaagaggcttacaacaagctaacagttgaacttgagaaaagtgttcctacattggttggcattgaatgtcccaaggatgaaaaacttcctcgtcgcaaagtttttgataaacctaagacgcgctgcttcactattctccctatggagtttaatcttgtggttcgtcagaagtttttaaattttgtgaggttcattatgaagataagggacaagcttagttgtcaagttggaatcaacccatattctatggaa

SEQ ID NO: 64543 - DNA, 258 bp, Glycine max
  Clone ID: 700759503H1
ggccagaaaaattcccagtgaaattgataagagtgtaaatggtgaacatcaagcagaagaaaatagtaatgacctcatatgggctgatccagtttcatgctgttatgcactgtatgcaaagttgaaccccgatacagttctcttgcagcaatcacctttagcccttgcaaaagctttaaagaactcggtggagttggatgggttaaaaaaggcacatattcgggatggtgcagcagttgtgcaatatcttgtctggct

SEQ ID NO: 64544 - DNA, 244 bp, Glycine max
  Clone ID: 700759504H1
ctcagacaaggatattaaagagagagagaaaaaaaatgatggaggttgtgattgttgcaattgctgctacacttgggaatcttctgatgggatgggatagttcaactattgcagcgggtatgacctacatcaagaaggaatttgtcttggatgccacacttgaagggctaatcgtgtccatgtcgtttataaccggcaccattgtgacattattctcagggacagtttctgatttggttggaag

SEQ ID NO: 64545 - DNA, 259 bp, Glycine max
  Clone ID: 700759508H1
ctacaagtacttccttacaatcaaaaccaacaacaactatgagcagttatcaaaagcactacgatgatcagggtcgcaaggttgacgagtatggcaacgttgagaagcaaaccgacgaatacggcaaccctgttcatgctgctagtgtcacctatgtagccaccagaactgtctgctggtggttacagtgatgacattaataagcaacatgataccaccagtgcctacggcgtagacactggtagacagcatctagtgg

SEQ ID NO: 64546 - DNA, 256 bp, Glycine max
  Clone ID: 700759509H1
caatatcctagtataccttaataaataatttaagatactatgatgagagcacggttcccattactgttgctgggacttgttttcctggcttcagtttctgtctcatttggcattgcttactgggaaaaagagaaccccaaacacaacaagtgtctccagagttgcaatagcgagagagactcgtacaggaaccaagcatgccacgctcgttgcaacctccttaaggtggagaaagaagaatgtgaagaaggtgaaa

SEQ ID NO: 64547 - DNA, 255 bp, Glycine max
  Clone ID: 700759510H1
cattggtccttaaacactcatcagtcatcaccatggccaagctagttttttccctttgttttctgcttttcagtggctgctgcttcgctttcagttccagagagcagcctcagcaaaacgagtgccagatccaaaaactcaatgccctcaaaccggataaccgtatagagtcagaaggagggctcattgagacatggaaccctaacaacaagccattccagtgtgccggtgttgccctctctcgctgcaccctca

SEQ ID NO: 64548 - DNA, 254 bp, Glycine max
  Clone ID: 700759511H1
acgagtgccaactcaacaacctcaacgcgttggaacccgaccaccgcgttgagtccgaaggtggtcttattgaaacatggaactctcaacaccctgagctgcaatgcgccggtgtcactgtttcacaacgcaccctcaaccgcaacggcctccacttgccatcttactcaccttatccccaaatgatcattgtcgttcaagggaagggagcaattggatttgcatttccgggatgtcctgagacgtttgagaag

SEQ ID NO: 64549 - DNA, 256 bp, Glycine max
  Clone ID: 700759515H1
gttgtggatatgaacgagggagctctttttctgccacacttcaattcaaaggccatagtggtactagtgattaatgaaggagaagcaaacattgaacttgttggcattaaagaacaacaacagaggcagcaacaggaagagcaacctttggaagtgcggaaatatagagctgaattgtctgaacaagatatatttgtaatcccagcaggttatccagttgtggtcaacgctacctcagatctgaatttctttgctt

SEQ ID NO: 64550 - DNA, 257 bp, Glycine max
  Clone ID: 700759516H1
ctctgatgttgctttgttttctgtgacttacttgctctaccgtgttgcaactatgaaagggttggtttggctgctatgtgtttatggggtgccattgctcattgtgaacggttttcttgtgaccatcacatatctgcagcacacacactatgccttgcctcactatgattcatcagaatgggattggctgaggggtgctttggcaactatggacagagattatggaattctgaacaaggtgtttcaccacataactg

SEQ ID NO: 64551 - DNA, 256 bp, Glycine max
  Clone ID: 700759517H1
ctagcgggtgaaggtttttgcgccgcgccttatatcacaccgtcgtccgaaagcgtcgttgccgtgaaaccctagaaagaaacgacgacgtaaatggaggtggagcccgtggagccgcagtcgctgaagaagctaagcttcaagtctctgaagcgcgctctcgatctcttctctcccatccacggatacctcgctaatcccgatgccgaaagcaagaaaatacgcactagccacaaggtgagcgtggagtatggtg

SEQ ID NO: 64552 - DNA, 134 bp, Glycine max
  unsure (1)..(134): unsure at all n locations
  Clone ID: 700759519H1
ggtatctagcttatcacattgtcttgaaaacctacaaggaagnacctctggatgtactcggcattaatacgaatagcaaagaacaaccagaggaacttcctcgcaggttcgcaagacatgtgataaacagatac

SEQ ID NO: 64553 - DNA, 174 bp, Glycine max
  Clone ID: 700759521H1
atattattagataatgttggtattatgtgatgtacctatgcctatgtttgtgtgtatgagctaactcttgacgttatctgaattcatgtatgcaatttccttgatgctggtttggagtatcaacactagaaacttgttaagtgtgtatgtagatgtagtcctcgatgatgaata

SEQ ID NO: 64554 - DNA, 255 bp, Glycine max
  unsure (1)..(255): unsure at all n locations
  Clone ID: 700759525H1
gaaattttgataaaccgcgatcacaggttgccgcaccttaaaaccggaaacaaaagcaatcgttacttgatttcaagaatttctcaatttctttctacttctttgtgtacgatttcttaagggaaagaaaatcactctctgtgctggccacagacttcgtgaatcattttcttttccactcttcgtttaattttcgnacactctcctatttgatataggacttcgtgtcagatttaaacttcttctgtttctttc

SEQ ID NO: 64555 - DNA, 255 bp, Glycine max
  Clone ID: 700759526H1
aggccatagtgatactagtgattaatgaaggagatgcaaacattgaacttgttggcattaaagaacaacaacagaagcagaaacaggaagaggaacccttggaagtgcaaaggtacagagctgaattgtctgaagacgatgtatttgtaattccagcagcttatccatttgtcgtcaacgctacctcaaacctcaatttccttgcttttggtatcaatgctgagaacaaccagaggaacttccttgcaggcgaga

SEQ ID NO: 64556 - DNA, 244 bp, Glycine max
  Clone ID: 700759527H1
ctgatctagcataacgcgcattatagaaccccgccagctacagagcaattgttataccaactaatgcgaacccgtgtactgatgcatgaaatttggactttttgaagcgtaccggatttcactgtgagatcatttgtgtcactgcatggactgccaccccaatggatgaggttcaggttacaaacctttcgttaatttcctctcaggaacttcttcccatgacttgccgagtgttcaatcccca

SEQ ID NO: 64557 - DNA, 185 bp, Glycine max
  Clone ID: 700759529H1
agattactagttaatttgggtattatgaaatgtacctatgcctatgtttgtgtgtttttgctttctcttgtcgttatctgaattcatgtatgcaatttccttgatgctggtttggagtatcaacactaaaaacttgttaagtgtgtatgtagatgtagtcctcgatgatgaataaagtgtgaccc

SEQ ID NO: 64558 - DNA, 164 bp, Glycine max
  Clone ID: 700759531H1
atttaatctagatcttatcttatctagatttgaatttctcatctagatattatttaatctagatcttatcttatcttatctagatttgaatttaatttgtttatgggcctggatttaaaacagctttgtaagctttgggactgaaaaactatataacagcacca

SEQ ID NO: 64559 - DNA, 222 bp, Glycine max
  Clone ID: 700759533H1
tgtttttacaatctttcaaaaattttgtttctttgtgtgtgtatggtgatgataacttaattagtgttcatgaatatgtcaagccttactttagtggttctaaattgaaaagctttctagctggtcataatatcaccattactgatggtattgacaaaactagtgcaactttgcaatttagaaagttagcagattgtgattttctcaagagaaactttaggc

SEQ ID NO: 64560 - DNA, 256 bp, Glycine max
  Clone ID: 700759534H1
gaaacataccgaatgagagcatcaaactcttcttcttcgatttccattgcgaacgttactttttcttcttctttctcttcattttcttcgctcttcgatcttcgtccggggactgctccgaataccaccaccaccactcgccgatggccacgatcggaggcttacacgactcccaaggctctcaaaacagcgtcgaaaccgaagccctcgctcgattcgccgtagacgaacacaacaagaagcagaattcgcttct

SEQ ID NO: 64561 - DNA, 247 bp, Glycine max
  Clone ID: 700759536H1
tatgccagctttttctgttccacaggctactgccagatcttctgaaaatgcggaatcctctgcatgatctggaatttgtgttttcttttgcttgttcgtttgtttaattcaataaaggaaattaggcatgaccctcttgttgagtatgctctgcctatttgaaaatttccacacctcttttaattatcgtaatgatgtgtgaagtgtgtgttattttaaaaaaaaaaaaaaaaaaaaaaaggggggg

SEQ ID NO: 64562 - DNA, 83 bp, Glycine max
  Clone ID: 700759537H1
ctcgagactatcgatccggtattccagagaatatacgtatatcattggactgtgctatgtatagttacttttagggggagtgc

SEQ ID NO: 64563 - DNA, 253 bp, Glycine max
  Clone ID: 700759539H1
cttgatttcgtacttgacaaagtctgctggaacaggcattggtattgagtttcgagagtcaggtttgaatattaatgctaaaaatgagcagctagtaaaagaaggcatggtctttaatgtgtcccttgggtttcagaacgttcaaagagaaagttccaagtctaagaacaagcacttctccttgttgcttgctgacacagttatcataaacaaagataaaactgaagttgtgacctctatgagctcaaaggct

SEQ ID NO: 64564 - DNA, 252 bp, Glycine max
  unsure (1)..(252): unsure at all n locations
  Clone ID: 700759540H1
tctncaccgattcggctcagagcaaaatgaccaagttcacactcctcctcatctctattctcttctgcatcgcccacacttgcagcgcctccaaatggcagcaccagcaagatagctgccgcaagcagctccagggggtgaacctcacgccctgcgagaagcacatcatggagaagatccaaggccgcggcgatgacgatgatgatgatgacgacgacaatcacattctcaggaccatgcggggaagaatca

SEQ ID NO: 64565 - DNA, 253 bp, Glycine max
  Clone ID: 700759541H1
actaaggaggagtacaatgaattctacaagaaaacttttaatgaatacctggagccattagcatcatcacactttaccacagagggtgaggtagaatttagatctatactttatgttcctgccttcgctccctctggaaaggatgacataatcaatcccaagaccaagaatataagactttttgtgaagagagtgttcatttcagatgattttgatggagaactgtttccccgatacttaagctttgtcaaag

SEQ ID NO: 64566 - DNA, 252 bp, Glycine max
  Clone ID: 700759542H1
cgacactgatgatgatcctcttcaaaacggtggcacatactatatgttgccagttatgagaggaaagggcggtggaatagaagtagattcaactggaaaagaaatatgccctctcactgttgtgcaatcacccaatgagctcgataaggggattggactagtctttacatctccattacatgccctttttatcgccgaagctatcctttgagcattaagtttggttcatttgcagttataacgctgtgtgcc

SEQ ID NO: 64567 - DNA, 252 bp, Glycine max
  Clone ID: 700759543H1
agagcttcttgccataacgtttgttacgcgacgacgacgtatccattgagatctcgacggtggctttccatccgcctccttccaatctcctcctcctcctcctccgcatcagacgacggcgtttcgagatctgacatctctctctcgtaacagttaatcctgaagtgacaatttaaaataaaaggtgatttgaaacagttctttccttgtctaaaagaatactggacagatatggaagtcaacaattggcat

SEQ ID NO: 64568 - DNA, 250 bp, Glycine max
  Clone ID: 700759544H1
cggagaagtatcagatctggagcaggacaatagcgatgggagcgatcgcgtgtgtacagctgagccgagcggcatcagcagatgacgtcgatgtgctctctgacgacaagttcgagaaggaagttggtcaggacagaggagctctcgtggagttctatgctccttggtgtggacactgcaaaaagcttgctccagaatatgaaaagcttggtagcagcttcaagaaagccaaatctgttttaatcggcaa

SEQ ID NO: 64569 - DNA, 255 bp, Glycine max
  Clone ID: 700759545H1
tactcgagcgaatcggctcgagcggaaacgaacaagacgtcgacattgtggacgttggacgtctctaagttccattcccctaattatactacatcgtcgttcgcctccgatcacaaccatcgccggagcttcacgccggcaaaacctctgccgttcaagataacggatgagatgatcggcatgaccgttccgagaaaggctcgttgagcatctgcaaaaaggtttcatgaaagttggatttccgcaagcagcggt

SEQ ID NO: 64570 - DNA, 254 bp, Glycine max
  Clone ID: 700759548H1
attaataaagatgagtttgaagaacaacatggtggtgctaaaggtgtgtttgttgcttcttttccttgtgggggttacagctgcacgcatggaactgagcttcttcaaaagtgatcagtcatcaagttatgatgatgatgagtattcaaaaccatgctgtgatctctgcatgtgcacacgctcaatgcctcctcaatgcagctgtgaagatattaggctgaattcatgccactcagattgtaagagctgtatgt

SEQ ID NO: 64571 - DNA, 236 bp, Glycine max
  unsure (1)..(236): unsure at all n locations
  Clone ID: 700759549H1
cacacacacacactaagaataatggcttctatcctccactactttttagccctctctctttctttctctttccttttcttcttatccgactccgtccccattccccaacaccacactaaccctacaatacctataaaccttctggttctacccgttcaaaatgatgcttccacagggctccatgctctcnacctccaaaaaaggacccctctaatgcaagtaccagtcctggtgga

SEQ ID NO: 64572 - DNA, 253 bp, Glycine max
  Clone ID: 700759550H1
cgacactgatgatgatcctcttcaaaacggtggcacatactatatgttgccagttatgagaggaaagggcggtggaatagaagtagattcaactggaaaagaaatatgccctctcactgttgtgcaatcacccaatgagctcgataaggggattggactagtctttacatctccattacatgcccattttatcgtcgaagctatcctttgagcattaagtttggatcatttgcagttataacgctgtgtgccg

SEQ ID NO: 64573 - DNA, 185 bp, Glycine max
  Clone ID: 700759553H1
atgttcttctctatcttttctggtttggaaccaaaacacaaacacaagaaataataaaactaataaacacaacacaacatatcaagcattgagtgcaattgtaaacaacacaacacaaccaaggttgaagagaagtgaaagttgaatcctgtgtggcgcaggagaaggagggtatggactcaaac

SEQ ID NO: 64574 - DNA, 252 bp, Glycine max
  Clone ID: 700759554H1
cgccctcgactcacatccttgtccgattccgcgaacgagtcgagttaatcgggttggtaagatctattctgtttcttcgtcatggcaaccggacaactattctcgcgtactacacaggctttgttttacaactacaagcaacttcccatccagcggatgcttgattttgacttcctttgcggcagggaaacaccatcagttgctggaataattaaccctggttctgagggatttcaaaaacttttttttggt

SEQ ID NO: 64575 - DNA, 287 bp, Glycine max
  Clone ID: 700758815H1
cttaattattaacacttccttagttcaatatggggaagcccttcactctctctctttcttccctttgcttgctactcttgtcgagtgcatgctttgctattagctccagcaagctcaacgagtgccaactcaacaacctcaacgcgttggaacccgaccaccgcgttgagtccgaaggtggtttgattcaaacatggaactctcaacaccctgagctgaaatgcgccggtgtcactgtttccaaactcaccctcaaccgcaatggcctccacttgccatcttactca

SEQ ID NO: 64576 - DNA, 289 bp, Glycine max
  Clone ID: 700758816H1
caatatcctagtataccttaataaataatttaagatactatgatgagagcacggttcccattactgttgctgggacttgttttcctggcttcagtttctgtctcatttggcattgcttactgggaaaaagagaaccccaaacacaacaagtgtctccagagttgcaatagcgagagagactcgtacaggaaccaagcatgccacgctcgttgcaacctccttaaggtggagaaagaagaatgtgaagaaggtgaaattccacgaccacgaccacgctcacaacacccgg

SEQ ID NO: 64577 - DNA, 197 bp, Glycine max
  Clone ID: 700758817H1
caaccttctggaaactcttttcctttcttagagatgctggtaatgggggagtttgtgttggtaatgttgcttcagcattcacaacttcaagtgtgcttgaggcccaaagtagaaagcccaacagctatgaagtttcccaatacagagatcgagatgtggcaataaagcgcagagcatgggttgaaggccagatgtct

SEQ ID NO: 64578 - DNA, 235 bp, Glycine max
  Clone ID: 700758818H1
cacacaactactacaagtacttccttacaatcaaaaccaacaacaactatggcaagttatcaaaagcactacgatgatcagggtcgcaaggttgacgagtatggcaacgttgagaagcaaaccgacgaatacggcaaccctgttcatgctgctagtgtcacctatgtagccaccagaactgctgctggtggttacagtgatgacattaataagcaacatgataccaccaatgcct

SEQ ID NO: 64579 - DNA, 282 bp, Glycine max
  Clone ID: 700758819H1
caaaaatatgccactcccatgatgcccctagatgaagaaattctttctaaggttgcacaagatatggttgaggaatggtttgattgtgttgatgaggaggattcctttgaggaagtttctttgagtgcagcactcaatggtgttgagggtttggactatatggaaagaattcctcttgccacatctgagggttttccccatgtgctttcacgcaaaaatggtgaaaaaggcaaaaggagatttgtttctggggatggtgaagagatgacattgattccggga

SEQ ID NO: 64580 - DNA, 279 bp, Glycine max
  Clone ID: 700758820H1
cttctctctttcaattccttcccagctctccattgaagaagctatggactttctaaacttcttgcttaacttgttggtccctccaggcagtatgatcaccttggctttctcatggcctgcactttgcttcctcaatttttgtgagtggctttgtaatagtatatatggtgaggatatggataataaagtggtcataatcaccggcgcatcttcaggcattggagagcaaattgcatatgagtatgctttgaggagagcaaatttaacgttggtggcccg

SEQ ID NO: 64581 - DNA, 282 bp, Glycine max
  Clone ID: 700758821H1
ggaacaatgacagaatcagataagatgaaccccatcgatcaccttcccctccgtctgctcagatccgacactcttccacgcgcccctaccttctctgaatccaccgtggatttcctccctcacttctccggctactcctggatcgcctacgccgcttcttcacttctcaccatctcccacttcccttcccctctctcccctcaacaaacccgcatcggcccctttttccgccaatacttccagctctccgcccatcccgtcgccgccgtcgcctggtccccc

SEQ ID NO: 64582 - DNA, 281 bp, Glycine max
  Clone ID: 700758822H1
tcgatttgggggtgccattgatgatgctgctcgctacttcaaggatgctcatgacagggcgcttagtccttatgagtttgttgaaagtatgaagaagaagggaattcgtgtgccaggaatagggcacaggatccagcatagggacaacaaagataagagagttgagctgctacagaagtttgcacgcacacattttcgctctgtgaaatacatggaatatgctgttcaagttgagacctacacgctcacaaaggcaaataatttagttcttaacgtagatg

SEQ ID NO: 64583 - DNA, 279 bp, Glycine max
  Clone ID: 700758823H1
aaaattcttccaccaagttatgggtttccttgtgttgcttcttttctccctcttaggtctctcttctagttccagcatatcaactcatcgttccatattggaccttgacctaaccaagtttaccacacagaaacaggtgtcttcactgttccaactatggaatagtgagcatggacgtgtctaccataaccacgaagaagaggcaaagagacttgagattgtcaagaataacttgaactatatcagggacatgaatgctaacagacaatcaccccattc

SEQ ID NO: 64584 - DNA, 183 bp, Glycine max
  Clone ID: 700758825H1
gaaattttgataaaccgcgatcacaggttgccgcaccttaaaaccggaaacaaaagcaatcgttacttgatttcaagaatctctcaatttcttacctacttctttgtgtacgatttcttaagggaaagaaaatcactctctgtgctggccacagacttcgtgaatcattttcttttccacact

SEQ ID NO: 64585 - DNA, 245 bp, Glycine max
  Clone ID: 700758827H1
cattctcttgggaatttctcaagattttgaaattgctggtaatactcttatgccagctttttctgttccacaggctactgccagatcttctgaaaatgcggaatcctctgcatgatctggaatttgtgttttctttcatttgtccgtttgtttaattcaataaaggaaattaggcatgaccctcttgttgagtatgctctgcctatttgaaaatttccacacctcttttaattgtcgtaatgatg

SEQ ID NO: 64586 - DNA, 275 bp, Glycine max
  Clone ID: 700758828H1
tgacattttcacaagaggaatttcttacagcttggtcaactcaggtgcgtcctgcaacaactctgttggctgatgggtgtccatatttgtatgcaatggtgcatgctagttcagtgtctacaataccaggtgattttgtcattggtgtcaagttgacaaccataaacaatatgtgtgcatatgggctcaatcctggtatttcaggttctcgtcttttgggcaccattcctcagtccatttcacagcaaactgtttggaatcaaatggcaacagtg

SEQ ID NO: 64587 - DNA, 281 bp, Glycine max
  Clone ID: 700758829H1
gggaagagaagaaagagagaaaacaaagggcggtggtgagtgcttctgcttcatcatcatcagagaatggcggctactgtgtcttctgcttggtcaaagcccggcgcgtgggccctagattccgaggaacacgaagccgagctccttcaacagaacaacaacaaccccaacgacaagccactcgccgacttcccggcccttgccgccgccgccgccaccaagcccaagaagaagaaggcccagacctactccctcgccgaattcaccgccaagcccgactc

SEQ ID NO: 64588 - DNA, 283 bp, Glycine max
  Clone ID: 700758832H1
attttgtgaggttcattatgaagaaaagggacaagcttagttgtcaagttggaatcaacccatactccatggaatggactggtttggccaatagattactgagtaagggcaacgatatcctgtgttgcgattatgctagttttgatggtttgattaccaagcaagttatgagcaaaatggcagaaatgataaacagactttgtggtggtgatgcaaaattgatgcgtgaaaggacacacctgctgttggcttgttgttcaaggatggcaatttgtaagaaaga

SEQ ID NO: 64589 - DNA, 259 bp, Glycine max
  Clone ID: 700758833H1
cggctcgagtcaatatcctagtataccttaataaataatttaagatactatgatgagagcacggttcccattactgttgctgggacttgttttcctggcttcagtttctgtctcatttggcattgcttactgggagaaagagaaccccagacacaacaagtgtctccagagttgcaatagcgatagagactcgtacaggaaccaagcatgccacgctcgttgcaacctccttaaggtggagaaagaagaatgtgaagaa

SEQ ID NO: 64590 - DNA, 108 bp, Glycine max
  Clone ID: 700758834H1
aagtgcagaccaagctagctagctagcaagcaagcacagagatggaggcaaagcgaggccatgccctcatgtgcttggcacgtgtttcactcttcctctgcgctgcta

SEQ ID NO: 64591 - DNA, 126 bp, Glycine max
  Clone ID: 700758836H1
cattctcttgggaatttctcaagatctcgaaattgctggtaatactcttatgccagctttttctgttccacaggctactgccagatctgctgaaaatgcggaatcctctgcatgatctggaagttg

SEQ ID NO: 64592 - DNA, 277 bp, Glycine max
  Clone ID: 700758839H1
cgtaatattaataatcgtaacaaacaagagagagaacagaactactactgtttctttttttgcctttgtttctctgcccctttgtgcagcgtctcacacaccaatggaagaaccaagtggttgcaacaagagcgctccaaaaggaaaaaaggatgacctttaccatgtacttcacaaggtcccttatggagatagcccttatgtcagagctaagcatgcccagaaatgtggaaaaatagatgagcaaatagacatgctgaagcgaaagttgaagttg

SEQ ID NO: 64593 - DNA, 269 bp, Glycine max
  Clone ID: 700758840H1
ataggacttcgtgggtagacttttctatttctctccttctttcactctcttcttctcactgatccgcattgccgttcaaagtggtcttatttgaaaaacacttgggcgttggtgcaaatgtttgcttcattaattttctctggagacaacaggctcactgtgataacaatctttacttgcagagatttggacatcttggttgtgtattatacaatagcaactcaatttagaaaatttctaacgcattacattaggtggcatctgtatac

SEQ ID NO: 64594 - DNA, 267 bp, Glycine max
  unsure (1)..(267): unsure at all n locations
  Clone ID: 700758841H1
ccccttcacatttgttcggtgcaagtgaagtgtcacggttaaaaaagtgatctttttgttgcggttttccaagtttgtgggtgatgagcttcacatagacaaagaccaacgaggtggggcagagagaagaagagatggtgggaactccaattaacggaagaacaaggctatcttttggtgttgtgaatggtggccatgatcttggccccagtagtgctccaccaagcaatgccggctcntcctatggcattatagagttcacaagag

SEQ ID NO: 64595 - DNA, 81 bp, Glycine max; identical to SEQ ID NO: 61181
  Clone ID: 700758842H1

SEQ ID NO: 64596 - DNA, 95 bp, Glycine max
  Clone ID: 700758843H1
ttagctaacaaccttgatatccccaagttatccgcatgttgagataaagtttatatattaatcatatttcttccgtatttcggaaaaaagaaaaa

SEQ ID NO: 64597 - DNA, 203 bp, Glycine max
  Clone ID: 700758844H1
gctgagcatccacaaagtaggaggggaataagggaagaaagggtcctttgtcttcaattttgagggctttttactgaataagtatgtactaaaatgtatgctgtaatagctcatagtgagcgaggaaagtatcgggctatgtaactatgactagagcttcaactatgaataaataaatcgacagcatatgatgcttttgtttt

SEQ ID NO: 64598 - DNA, 277 bp, Glycine max
  Clone ID: 700758846H1
caattaacaaacgaagtgatgagaagaagggagagaatggaggaaaaggcaaaagctgaggagaagaagataggtatgagcgagacttggttgaggaagcaccgtcttatctacgacggagccactagacaccctcttattattagcatttgcgatggcaccatcattattgcttcctttaaaacatggctcgttagtaaatttaacttcctttacatatttagtacaattttgggtagccatgtcaagatgtaacaaaatgtttgcgatcagactt

SEQ ID NO: 64599 - DNA, 279 bp, Glycine max
  Clone ID: 700758847H1
cactttccttagttcaatatggggaagcccttcttcactctctctctttcttccctttgcttgctactcttgtcgagtgcatgctttgctattacctccagcaagttcaacgagtgccaactcaacaacctcaacgcgttggaacccgaccaccgcgttgagtccgaaggtggtcttattgaaacatggaactctcaacaccctgagctgcaatgcgccggtgtcactgtttccaaacgcaccctcaacggcaacggcctcgacttgccatcttactca

SEQ ID NO: 64600 - DNA, 267 bp, Glycine max
  Clone ID: 700758849H1
aaataatttaagatactatgatgagagcacggttcccattactgttgctgggacttgttttcctggcttcagtttctgtctcatttggcattgcttactgggaaaaagagaaccccaaacacaacaagtgtctccagagttgcaatagcgagagagactcgtacaggaaccaagcatgccacgctcgttgcaacctccttaaggtggagaaagaagaatgtgaagaaggtgaaattccacgaccacgaccacgacaaaaacacccgg

SEQ ID NO: 64601 - DNA, 271 bp, Glycine max
  Clone ID: 700758851H1
atcaccctttaactttgtgtggacaataaacaaatgtcatgggcgtttctgtctttcaactcagatattagtgtttctttaatatatcgccaatgttgtcatattcttatgttctgtttttaaaaccccttgtgttcttagcttaagcgagagtggagtgtgtagcttattagcttgtgtatgtagtcctctagatttggtaattgatttggaatacacaatttcatttggatcaacgctcttgttcatgtatcttatgtaaactgtgcta

SEQ ID NO: 64602 - DNA, 234 bp, Glycine max
  Clone ID: 700758852H1
agccactcaggcttccattgcaggatgtttacaaaattggtggtattggtaccgtgccagtgggacgtgttgagactggtgtcgtgaagcccggtatggtggtgacttttggtcccactgggctgacaactgaggttaagtctgttgagatgcaccatgaggctctcacagaggctcttccaggtgacaatgttggctttaatgtgaagaatgttgcagtcaaggatctcaagc

SEQ ID NO: 64603 - DNA, 184 bp, Glycine max
  Clone ID: 700758854H1
ctcgagccggataaactgcgatcacaggttgccgcaccttaaaaccggaaacaaaagcaatcgttacttgatttcatgaatttctcaatttctttctacttctttgtgtacgatttcttaagggaaagaaaatcactctctgtgctggccacagacttcgtgaatcattttcttttccacacaa

SEQ ID NO: 64604 - DNA, 274 bp, Glycine max
  Clone ID: 700758856H1
cttcttcttcaattccacacccatcatggtactcttccgatcctctttctcctcgccaccctcatcaccctcgcctccggtgcccgccacgatattctccggttaccctccgaagcatccacttttttcaaagcacccggtggcgatcaaaacgatgagggcacgaggtgggccgttttaattgccggttccaatggctactggaattacaggcaccagtctgatgtttgccatgcgtatcaactactgaggaaaggtggtctcaaagaagaaa

SEQ ID NO: 64605 - DNA, 272 bp, Glycine max
  Clone ID: 700758857H1
ggtcgatggaacaatgtaggcaagggaagtcggcaaaatggatccgtaacctcgggaaaaggattggctctgagggctgggcacgggggtcccagtcccgaacccgtcggctgtcggtggactgctcgagctgcttccgcggcgagagcgggtcgtcgcgtgccggtcgggggacggattgggaacgggcccttcggggcctcttccccgggcgtcgaacagtcaactcagaactggtacggacaaggggaatccgactgtttaattaaaac

SEQ ID NO: 64606 - DNA, 266 bp, Glycine max
  Clone ID: 700758860H1
atggttttgaaatgtggagttctgagtgggcaaatcaaacttcatggcatttgagtttccttattgacaatcccaaacagtctacagtttttgatattctcttgggaatctctcaagattttgaaattgctggtaatactcttatgccagctttttctgttccacaggctactgccagatcttctgaaaatgcggaatcctctgcatgatctggaatttgtgttttctttcgcttgttcgtttgtttaattcaataaaggaaatta

SEQ ID NO: 64607 - DNA, 183 bp, Glycine max
  Clone ID: 700758862H1
tccaaccccaagaaggaacaagaagtagtagttgctacttgatatggctccaaagaggaagcgccagatggcagtcacagatcagaataaaggaaaagcttttaagagtcatccaacaattcaacttgctaagcatctagcagagataacttctcaaattcctccttgtgtttcatcacatgc

SEQ ID NO: 64608 - DNA, 279 bp, Glycine max
  Clone ID: 700758863H1
atcgagccgcgctgatgatatcacctcctctctcgcccatgctcacgttgactggcgtgagactgataaagctcatatcttccgtgctgatcttccaggggtgaagaaagaggatctgaaggtgcaggtggaggagaataagatcctgcagataagcggggagagggtgaaggagaaggaggaccagaacgacaagtggcaccgcgtcgagaggcagtgcggaagcttcctccgccgcttccggctgccggaggatgccaaccccaaccagatcagctg

SEQ ID NO: 64609 - DNA, 259 bp, Glycine max
  Clone ID: 700758865H1
atttccgaataccattgtgcagattgaaccagacatgagttcaaggtttcagcttttgagtaccactaccaatggtgcttttgttcaagggaaagatctcgcaatggttaaagttaatgtagcatgtgctgctgttggcttgacatcaagttacactccaactccattgttggaatctggtttgcaaaaagacatagggttaattgtggagtattttgaaaggatgtcttacgttgctcataactttaatcagccccaa

SEQ ID NO: 64610 - DNA, 92 bp, Glycine max
  Clone ID: 700758866H1
aaggtgaattatggaatcctgcttgcacaaaagcaatgactatgtcatttaatccaaacccgtgttctgatgcgtggagtttgggatttctg

SEQ ID NO: 64611 - DNA, 110 bp, Glycine max
  Clone ID: 700758869H1
ctccattggtccttaaacagtcatcagtcatcaccatggccaagcgaggattttcccgttgacggctgcgtttcagtggctgctgcttcgctttcagttccagagagcag

SEQ ID NO: 64612 - DNA, 117 bp, Glycine max
  Clone ID: 700758870H1
caagttatgggtttccttgtgttgcttcttttctccctcttaggtctctcttctagttccagcatatcaactcataggtccatattggaccttgacataaccaagtttaccacacag

SEQ ID NO: 64613 - DNA, 272 bp, Glycine max
  Clone ID: 700758871H1
gcaaatcaaacttcatggcatttgagtttccttattgacaatcccaaacagtctacagtttttgacattctcttgggaatttctcaagattttgaaattgctggtaatactcttatgccagctttttctgttccacaggctactgccagatcttctgaaaatgcggaatcctctgcatgatctggaatttgtgttttctttcatttgtccgtttgtttaattcaataaaggagattaggcatgaccctcttgttgagtatgctctgcctatt

SEQ ID NO: 64614 - DNA, 269 bp, Glycine max
  Clone ID: 700758872H1
gtaacagtatcctgagtgggctccaattaattgtcgagttcatcgacaaccaattcacatcactgaaggaaattatgtcagaaagcaagatgtcagcattgaatatgatgcatgtacaattccaaatgattgtggttcattggttgttgccaaggttggaaatcacgaacaaattgttggtttccatgttgctggaagcaaaggaagactgggatatgcttcattgataccatatgttgagccagttgtgcaagctcaaagtgctgaag

SEQ ID NO: 64615 - DNA, 60 bp, Glycine max
  Clone ID: 700758873H1
ctcgagccgcttcaactatgagtaactcaatcgacagcatatgatgcttatgtctagagt

SEQ ID NO: 64616 - DNA, 216 bp, Glycine max
  Clone ID: 700758874H1
gcccttcactctctctctttcttccctttgcttgctactcttgtcgagtgcatgctttgctattagctccagcaagctcaacgagtgccaactcaacaacctcaacgcgttggaacccgaccaccgcgttgagtccgaaggtggtttcattcaaacatggaactctcaacaccctgagctgaaatgcgccggtgtcactgtttccagattcaccct

SEQ ID NO: 64617 - DNA, 55 bp, Glycine max
  Clone ID: 700758875H1
ctcgagccgcttcaactatgaataaataaatcgacagcatatgatgcttttgttt

SEQ ID NO: 64618 - DNA, 260 bp, Glycine max
  Clone ID: 700758876H1
ccattttctaagctagatcacacacgttcgtgtctcctcgccactttgattccgaggttgactttttcaacatcaaggggcgattcgtacttgggttggtgagtgaagagtgaaacagaggaaatcactcttgaacctggggacatgatacacataccagctggcaccccactgtacatcgttaacagagatgagaatgataagctcttccttgccatgctccatatacctgtctctgtctctactcctggaagatttga

SEQ ID NO: 64619 - DNA, 270 bp, Glycine max
  Clone ID: 700758877H1
caggagagtgatgtgaagtgggcttcaagatgggatgcctatttgctaatgaatgatgatcaaatccactggttctcaattgttaactcattaatgattgttctcttcctttctggcatggtggcaatgattatgctgaggacactgtaccgtgacattgcaaagtacaatgagcttgagacccaagaagaagcccaagaggagactggttggaagcttgtccatggtgatgtatttaggccccccaacaactcagatttgctgtgtgtt

SEQ ID NO: 64620 - DNA, 273 bp, Glycine max
  Clone ID: 700758879H1
atccatctgccccacatggacttcgacttctgatagaggactacccttatgctgttgatgggctagagatatgggctgcaattaagacatgggtccaagaatatgtgtccttgtactatgcaagagatgatgatgtcaaacctgattctgaactccaacagtggtggaaagaagctgtagagaaaggtcatggtgatctgaaagacaagccatggtggcctaagttgcaaacaattgaagagcttgttgaaatttgcaccattatcatatgga

SEQ ID NO: 64621 - DNA, 183 bp, Glycine max
  Clone ID: 700758880H1
ctcgagccgaaccgcgatcacaggttgccgcaccttaaaaccggaaacaaaagcaatcgttacttgatttcaagaatctctcaatttcttcctacttctttgtgtacgatttcttaagggaaagaaaatcactctctgtgctggccacagacttcgtgaatcattttcttttccacacaacat

SEQ ID NO: 64622 - DNA, 176 bp, Glycine max
  Clone ID: 700758881H1
gaaaaaccttcaaatatgatatagttggtgctggttcacattcttcagaagatttttctgaaaaggaagatcaagaaaaacccaaaaagattgatgccagattgagacaaagaatagatcctcactacaatgaggttcaggctcagatggaaacaaatttgtttaaattgtctctt

SEQ ID NO: 64623 - DNA, 270 bp, Glycine max
  Clone ID: 700758882H1
gatgacttctccctacattaaatgtacagtctctttcttcatagcatttggaaatttggctgatgacaccatcaattttgaggcttttccccacaagctggtgcagtttggagagattcaggaaaaagttgtattgaaattttcacaagaggaatttcttacagcttggtcaactcaggtgcgtcctgcaacaactctgttggctgatgggtgcccatatttgtatgctatggtgcatgatagttcagtgtctacaataccaggtgattt

SEQ ID NO: 64624 - DNA, 270 bp, Glycine max
  Clone ID: 700758883H1
atatactatgatgagagtgcggtttcctttgttggtgttgctgggaactgttttcctggcatcagtttgtgtctcattaaaggtgagagaggatgagaataaccctttctacttgagaagctctaacagcttccaaactctctttgagaaccaaaacggtcgcattcgtctcctccagagattcaacaaacgctccgcacaacttgagaactttcgagactaccggattgtccagtttcaagtcagaacccaagacatccttctccccca

SEQ ID NO: 64625 - DNA, 271 bp, Glycine max
  Clone ID: 700758886H1
tgataacactcgccatacccgttaacaaacccggtagatttgagagtttcttcctatctagcactcaagctcaacagtcctacttgcaagggttcagcaagaatattctagaggcctcatacgacaccaaattcgaggagataaacaaggttctgtttggtagagaggaggggcagcaacaaggggagcgagaggctgcaagagagtgtgattgtggaaatctcaaagaaacaaattcgggaactgagcaaacatgccaaatctagttcaa

SEQ ID NO: 64626 - DNA, 151 bp, Glycine max
  Clone ID: 700758887H1
taagatttgaaattttgataaaccgcgatcacaggttgccgcaccttaaaaccggaaacaaaagcaatcgctacttgatttcaagaatctctcaatttcttcctacttctttgtgtacgatttcttaacggtaagagaatcactctctgaa

SEQ ID NO: 64627 - DNA, 270 bp, Glycine max
  Clone ID: 700758888H1
atcataaaattcttccaccaagttatctagctccttgtgttgcttcttttctccctcttaggtctctcttctagttccagcatatcaactcatcgttccatattggaccttgacctaaccaagtttaccacacagaaacaggtgtcttcactgttccaactatggaagagtgagcatggacgtgtctaccataaccacgaagaagaggcaaagagacttgagattttcaagaataacttgaactatatcagggacatgaatgcaaacaga

SEQ ID NO: 64628 - DNA, 266 bp, Glycine max
  Clone ID: 700758889H1
acttattaacactttccttagttcaatatggggaagcccttcttcactctctctctttcttccctttgcttgctactcttgtcgagtgcatgctttgctattacctccagcaagttcaacgagtgccaactcaacaacctcaacgcgttggaacccgaccaccgcgttgagtccgaaggtggtcttattgaaacatggaactctcaacaccctgagctgcaatgcgccggtgtcactgtttccaaacgcaccctcaaccgcaacgg

SEQ ID NO: 64629 - DNA, 268 bp, Glycine max
  Clone ID: 700758890H1
attcactgaatcactgttctctctctagttaattaaaaatggtcacttatgtcgtcaccaccaccttgttcctcttccttgccatggccatcaccaccctttgcctccaagaaattgaggtgctccaaatggcccaaaaccatgtttctcaagccaagaatttgattggaaactctttgagattgcatggcttgggaagcctaagtctttctgatcaaacaagtgctacaatagcccttagtgattgtgccaaactctatgaggagag

SEQ ID NO: 64630 - DNA, 269 bp, Glycine max
  Clone ID: 700758891H1
ccccaactaacaataattccttcacttgcagaacttagttctctgttgcatcatcatcatcttcattagtgttagccctaaacttcaccttcaaccatgaccacagtgccaccacacagtgtccaagtgcacacaacaacacaccgctacgaagccggcgtcgtcccgccggctcgttttgaggcgccgcgttacgaagccggcatcaaggcgccctcttccatttaccattccgagagaggtccgacgacctctcaggttctcgcagt

SEQ ID NO: 64631 - DNA, 270 bp, Glycine max
  Clone ID: 700758892H1
ctacactccactccatctccatggaggaacacaaaaaagaagggttttttttgcccacaccagttgcaaaactaatatcctttcaaacggatttgatctataatggcctggtttctctcttttcccctatccactctcttttctccgtggcttctaagtcctaccaccgtgctgaggagaccaaagacagtgttgaatcagcagtgcaacgtgctctttctcatcaaatcactcatggcagcgcactcttgctgaagaaactaggacttt

SEQ ID NO: 64632 - DNA, 267 bp, Glycine max
  Clone ID: 700758893H1
gaaaagctgaagaaattgaactggagactgttgttacttccagaggagatgaggatcagaagcatgccataaaaggatttagttttgaagatgaccgcctcatgaattgtaattggttgcaagagcctaatgcagatgaccttttgatgtgctttcgaatattagcagtttgccacactgcgattcctgagctgaatgaggagactggcgtttatacatatgaagctgagtcacctgatgaaggggcttttcttgtagcagcaagag

SEQ ID NO: 64633 - DNA, 276 bp, Glycine max
  Clone ID: 700758895H1
ctacattctcccatcttttctcactgctgaaattaaatataagcggaatctgagtaatattcatatttccggcttattttacgacggcagatacaaattctggactaaacacgagaaaaatcttgctttgacagaagaggaaaagatggaagtgattagaaatagaggcattcctgctgatgttcttgcaaagcgagctcatgaatttgaaaaacatgttgctcatgaaagcctcaaggatcaaattcctgctgttgacaagttgtattctactaa

SEQ ID NO: 64634 - DNA, 267 bp, Glycine max
  Clone ID: 700758896H1
ttgtctttgaacactcatcaccatggccaagcttgttctttccctttgtttccttcttttcagtggctgcttcgctctgagagagcaggcacagcaaaatgagtgccagatccaaaagctgaatgccctcaaaccggataaccgtatagagtcggaaggtgggttcattgagacctggaaccctaacaacaagccattccagtgtgccggtgttgccctctctggctgcacccttaaccgcaatgcccttcgtagaccttcctacac

SEQ ID NO: 64635 - DNA, 117 bp, Glycine max
  Clone ID: 700758902H1
tgatggatacacagtggacgaggcactagcaagtcggaggttatttatgttagattaccatgatgtattcatgccatatataaggcggataaatcagacatatgccaaggcttatgc

SEQ ID NO: 64636 - DNA, 245 bp, Glycine max
  Clone ID: 700758904H1
cacacaactactacaagtacttccttacaatcaaaaccaacaacaactatggcaagttatcaaaagcactacgatgatcagggtcgcaaggttgacgagtatggcaacgttgagaagcaaaccgacgaatacggcaaccctgttcatgctgctagtgtcacctatgtagccaccagaactgctgctggtggttacagtgatgacattaataagcaacatgataccaccaatgcctacggcgtaga

SEQ ID NO: 64637 - DNA, 242 bp, Glycine max
  Clone ID: 700758906H1
gcaaaggattctacccgccgctcgatgggaattgcgcttcaaggcgtctcgtagggctaatccgcctcacgagggtcaccaacggcacgtgcctttggggggccgaggcccctactgctggtcggcaaacggacggcgggcgcacgcgtcgcttctagcccggattctgacttagaggcgttcagtcataatccaacgcacggtagcttcgcgccactggcacttcaaccaagcgcgatgac

SEQ ID NO: 64638 - DNA, 241 bp, Glycine max
  Clone ID: 700758907H1
cggatattgctctgaggattgtggccccaggcaagggcattctggctgcagatgagtccgtgggcagcatggccaaaaggctgagccaaattggggtagagaacactgaggagaatcgccgactgtaccgccaggtcctgttcagtgctgatgaccgtgtgaaaaagtgcattgggggggtcatcttcttccacgagacactctaccagaaagatgacaatggtgtcccctttgtccgcac

SEQ ID NO: 64639 - DNA, 210 bp, Glycine max
  Clone ID: 700758908H1
tgtttttgtgttgacataaccgatttctgctatgaaccttgcaaacccagtgaggatgacaaggaaaactactaatgaacaagtgttatgcatgtaagctctctctccaacggacaaagccccctttatgctttgtttgttatgtaaggaatgactaaataaacttggaataaaacttcctctcttcttcttcttcaaagaatacgtaaa

SEQ ID NO: 64640 - DNA, 244 bp, Glycine max
  Clone ID: 700758909H1
ggcacttgagtttccttattgacaatcccaaacagtctacagtttttgatattctcttgggaatttctcaagattttgaaattgctggtaatactcttatgccagctttttctgttccacaggctactgccagatcttctgaaaatgcggaatcctctgcatgatctggaatttgtgttttctttcgtttgttcgtttgtttaattcaataaaggaaattagacatgaccctcttgttgagtat

SEQ ID NO: 64641 - DNA, 241 bp, Glycine max
  Clone ID: 700758910H1
gttttcagtgtcatctaacagagaggagaagagagtgccttgtaataatcatagcataaattcataaagaagagagagcataatagtgagagtgggagatggatcagctgttgtggagggtgttgcctttgctaacaatccttgtctcctttggagtgttcttctacttgcaggattcttacacagcacagttttatgctctcataaagttaccacgggataagtgcagccttcttcccca

SEQ ID NO: 64642 - DNA, 239 bp, Glycine max
  Clone ID: 700758911H1
tttagggggcgtgccagttctgatatttacaccatctgctctcaagactgtgaattatggaatcctgcttgcacaaaagcaatgactatgtcatttaatccaaacccgtgttctgatgcatggagtttggaatttttgaagcgtaccggatttcactgtgatatcatttgtgtcactggatggactgccaccccaatgcaggatgttcaggttacaattgattggtttatttcctctca

SEQ ID NO: 64643 - DNA, 182 bp, Glycine max
  Clone ID: 700758916H1
ctgtattaaagaatgtaagatatactatgatgagagcgcggttgccattactgttgctgggagttgttttcctggcatcagtttctgtctcatttggcattgcgtatttggagaagcagaaccccagtcataataagtgcctccgaagttgcaatagcgagaaagactcctacaggaaccaa

SEQ ID NO: 64644 - DNA, 182 bp, Glycine max
  Clone ID: 700758917H1
aacacggatatggctgtgcagctgtgggaaaccctgaaggaagccatcgtagcctacactggcttctctccttccaccttcttcacggtgctggcgcttctttttgccgtttactacgtcgtcacgggtctctttggctcctccgacgatcaccatcaccgcaacggcaacgtcgaggagga

SEQ ID NO: 64645 - DNA, 234 bp, Glycine max
  Clone ID: 700758918H1
gcaagagaaaaaataccaaccatggcaaccatttctactgatcaaccaagaggatcctactcctatggaacctcctatggagcaccctatggaaccacctatgagaccaacagcagcattaacaaccctccttcacgccaaaccgtgaagttcataactgctgcaactattggcatcacactcttactcctgtctgggttgaccctcacaggcactgtcataggtttgatcatt

SEQ ID NO: 64646 - DNA, 215 bp, Glycine max
  Clone ID: 700758919H1
aagcccttcactctctctctttcttccctttgcttgctactcttgtcgagtgcatgctttgctattagctccagcaagctcaacgagtgccagctcaacaacctcaacgcgttggaacccgaccaccgcgttgagtccgaaggtggcttgattcaaacatggaactctcaacaccctgagctgaaatgcgccggtgtcactgtttccaaactcat

SEQ ID NO: 64647 - DNA, 263 bp, Glycine max
  Clone ID: 700758920H1
gcgtccgtattctcctcattcggctcgaggaattcctcttgccacatctgagggttttcctcatgtgctttcacgcaacaatactgaccaaggcatggcgacaccagtgtctgcgctgctagaagatatgccattggttccgggagccagtgttgaagaggcttacaacaagctaacagttgaacttgagaaaagtgttcctacattggttggcattgaatgtcccaaggatgaaaaacttcctcgtcgcaaagtttttgata

SEQ ID NO: 64648 - DNA, 83 bp, Glycine max
  Clone ID: 700758921H1
cctgctgaagctcatatcttccgtgctgatcttccaggggtgaagagagaggatctgtccgtgcaggtggaggagaataagat

SEQ ID NO: 64649 - DNA, 85 bp, Glycine max
  Clone ID: 700758923H1
cggctcgagcttttaatgagatgctcattagatatagctatgcgaaattactgcgccaggctacagctcctagtatgttgtgaca

SEQ ID NO: 64650 - DNA, 238 bp, Glycine max
  Clone ID: 700758926H1
ctctacaaaagcacaatttgttagtggaaaaaccttcaaatatgatatagttggtgctggttcacattcttcagaagatttttctgaaaaggaagatcaagaaaaacccaaaaagattgatgccagattgagacaaagaatagatcctcaatacaatgaggttcaggctcagatggaaacaaatttgtttaaattgtctcttgatgatgatgaaactcctaaaggttccatgttggat

SEQ ID NO: 64651 - DNA, 239 bp, Glycine max
  Clone ID: 700758927H1
gtgtcatcagccaaatttgaggcttttccccacaagctggtgcagtttggagagattcaggaaaaagttgtattgaaattttcacaagaggaatttcttacagcttggtcaactcaggtgcgtcctgcaacaactctgttggctgatgggtgcccatatttgtatgctatggtgcatgatagttcagtgtctacaataccaggtgattttgtcattggtgttaagttgacaaccataaa

SEQ ID NO: 64652 - DNA, 237 bp, Glycine max
  Clone ID: 700758931H1
ctcggtggaggaattttagtggacaaaactggagattggatcacacttatacaaaattctccaattagtaacttgttgagagttgctgcttggaagaaaggctgtttaatggttaagattgtgatgtctgggaatgcagcagtcaaaaggagtgattgggcctcattggtacaagtgtttttaacaaacagcaacagtacagagcattttgatgcatgtaagtggacaaaatcggaa

SEQ ID NO: 64653 - DNA, 240 bp, Glycine max
  Clone ID: 700758932H1
aacactcatatccttatcctgtttctttcaatggaagtcatttctgcttctagcttgaatcccaacgctccgatgttcgtgccactcgcctatcggacggtggatgatttctccgaccagtggtgggacctcgttcactcctccccctggttccgcgactactggctccgcgagtgcttccaagatccccagttccataacgacgacgctttcgacttcgactttgacctagatctccaa

SEQ ID NO: 64654 - DNA, 186 bp, Glycine max
  Clone ID: 700758933H1
ggaatttctcaagattttgaaattgctggtaatactcttatgccagctttttctgttccacaggctactgccagatcttctgaaaatgcggaatcctctgcatgatctggaatttgtgttttctttcatttgtccgtttgtttaattcaataaaggaaattaggcatgaccctcttgttgagtatg

SEQ ID NO: 64655 - DNA, 223 bp, Glycine max
  Clone ID: 700758935H1
gcaaaatgaccaagttcacaatcctcctcatctctcttctcttctgcatcgcccacacttgcagcgcctccaaatggcagcaccagcaagatagctgccgcaagcagctccagggggtgaacctcacgccctgcgagaagcacatcatggagaagatccaaggccgcggcgatgacgatgatgatgatgacgacgacaatcacattctcaggaccatgcgggg

SEQ ID NO: 64656 - DNA, 241 bp, Glycine max; identical to SEQ ID NO: 63254
  Clone ID: 700758936H1

SEQ ID NO: 64657 - DNA, 206 bp, Glycine max
  Clone ID: 700758938H1
cagcattagccattagcactatgaataaatagagaacacgcgaaacacctgattcccctccccagacgccgtagagtcagagagagagattcactgaaacagagcgcagaagaaaatacataaactaatccagaaaatgaacaccggcgctggaaaggtggtgtgtgtcaccggcgcttccggttaaattgcatcctggatagtca

SEQ ID NO: 64658 - DNA, 233 bp, Glycine max
  Clone ID: 700758939H1
ctcggtggaggaattttagtggccaaaactggagattggatcacacttatacaaaattctccaattagtaacttgttgagagttgctgcttggaagaaaggctgtttaatggttaagattgtgatgtctgggaatgcagcagtcaaaaggagtgattgggcctcattggtacaagtgtttttaacaaacagcaacagtacagagcatcttgatgcatgtaagtggacaaaatc

SEQ ID NO: 64659 - DNA, 239 bp, Glycine max
  Clone ID: 700758940H1
ggagagttgaatgtggaatcccttctggatttccgctcacagttatttgcaatagcatttttaatgagatgctcattagatatagctatgaaaaattactgcgccaggctaaagctccaagtatgtttttacaatccttcaaaaattttgtttctttgtgtgtgtatggtgatgataacttaattagtgttcatgaatacgtcaagccttactttagtggttctaaattgaaaagcttt

SEQ ID NO: 64660 - DNA, 69 bp, Glycine max
  Clone ID: 700758941H1
taagtgtagaataacgggtatagtaactatgtacccttgtgtaatgagtcactcaagtacctatgcggg

SEQ ID NO: 64661 - DNA, 238 bp, Glycine max
  Clone ID: 700758942H1
agctcctgaggacaaggcgagtttatggtcacaacttcattatgtttcgtgtaataatctggaaatgcaagaagcttatcttgtcaatctcgtaaatgtgttacgagaattgtatttgcacagtccagaggaagctcgccaattgagaaggaaagctctctctcgtattgaatggctgcaaaaagctgatgtgcctaccatagcacagattgaagagttccattcgatgcagaggatg

SEQ ID NO: 64662 - DNA, 235 bp, Glycine max
  Clone ID: 700758943H1
gtacaactgaagtgatctcaacctggttttgtgtccacttctgttacttaatccacatgcttgccctaattcaacccaagtcaataccctgtcccaaatcttacatagatttctgctaaattttctattgccagatccatcaacttcgacacaccctccaattttcttcttcgaattcaatggcgtggtcgcataaaggcaagttttttatcttctctttactcttctttttctc

SEQ ID NO: 64663 - DNA, 238 bp, Glycine max
  unsure (1)..(238): unsure at all n locations
  Clone ID: 700758944H1
aaagaaattaagagagttttttttgttccacactgcatacgattttgngatgagaaccaaactttctttagctatctttttctttttagctttagcggtattttcaaacctagactttggcaaatgtaaagaaaccgaggtagaagaagaagaccctgagctcgtaacatgcaaacaccaatgccaacagccacagcaatacgatgagggtgacaagcgggtatgcttgcaaagatgt

SEQ ID NO: 64664 - DNA, 119 bp, Glycine max
  Clone ID: 700758945H1
gcagatgtctaatgttttgtgggtggctcctgaggacaaggcgagtttatggtcccaacttcattaggtttcctggaataatccgggaatgcaagaagcttaacctggcaatcccggaa

SEQ ID NO: 64665 - DNA, 239 bp, Glycine max
  Clone ID: 700758947H1
gcatcatcatcttcattgcaaaaccctaaacttcaccttcaaccatgaccacacaagtaccaccacacagtgtccaagtccacacaacaacacacctctacgaagctggcgtcgtcccccccggagcccgtttcgaaccgccgcgttatgaagccggcgtcaaagcgccctccatttaccattccgagagaggtccaacgacttcccaggtcctcgccgtcctcgccggcctcccggtc

SEQ ID NO: 64666 - DNA, 236 bp, Glycine max
  Clone ID: 700758948H1
aaagtttccttgacaatctaattctgcaaaaatggcaagcaataaggagtctaagttcccagcacagagccagaaaactcagccaggaaaagaacatgtaatgaatccactcccacaagccacaaatcctgatcacaaggccgccaataaactccagggaaaggtggcgttggtgacaggaggtgactcaggaattggcagagcggtttgcctgtgtttcgcaaaagagggtgcaa

SEQ ID NO: 64667 - DNA, 207 bp, Glycine max
  Clone ID: 700758949H1
cagcggttcaggaaactcttcttcgtcactgtggttgaaaatcgaatcctttctctctctctctctctaggcaataaagtgaaacgcatcagagaaattcaattcaatggatgcaaatcgcgagcaaattgtggacgttgggtcggtggtggaagccgtttctgctgacgacggtgacgctcctctctacagcctcgaaagtctctg

SEQ ID NO: 64668 - DNA, 239 bp, Glycine max
  Clone ID: 700758950H1
ggcatcctccgcattgtgcagcaattagggtttcatcctccgcattgtgaagcaatcgagcgcaggcatcaattgggaaattagggtttcattgtcttcttcttcgtatgtcttattactcaagcaattcgttctctcgaacatggaagcggaacggcacaagggtacggtgaacccgtcggcaatgttagcttctctggttagtaggagagccaaacgtcacgaagatcttcgcagca

SEQ ID NO: 64669 - DNA, 196 bp, Glycine max
  Clone ID: 700758951H1
cggatcggagcaaagctctcctctgtccacaatcctccgtttcactctctctaaaatcctaacactccgaaatgcccgaaccggaatcgcaaaacggacacgagcaagacccggagccgcagccagaaacagaaccagtgccaacagagcaaacacaaccacaattggagccgaaatcgaaatccacgcccgaacc

SEQ ID NO: 64670 - DNA, 231 bp, Glycine max
  Clone ID: 700758953H1
gacggtgatacctttcgtgcgtttacttttcttttcttttctctcttcacatcaaaatcacttatctctctctctagagaaaatggcagcttgcatattcacggtggcacaggacggaaccgcagatttccaaacggtgcaggaggcgatcgacgccgtgccgctcggcaacattcggcggacggtgattcgggtgtcgccgggaatctaccggcaaccggtgtatgtccc

SEQ ID NO: 64671 - DNA, 237 bp, Glycine max
  Clone ID: 700758955H1
attctccaattagtaacttgttgagagttgctgcttggaagaaaggctgtttaatggttaagattgtgatgtctgggaatgcagcagtcaaaaggagtgattgagcctcattggtacaagtgtttttaacaaacagcaacagtacagagcattttgatgcatgtaagtggacaaaatcggaaccacattcctgggaattgatcttcccaatagaggtatgtggtcctaataatggtt

SEQ ID NO: 64672 - DNA, 238 bp, Glycine max
  Clone ID: 700758956H1
attggtccttaaacactcatcagtcatcaccatggccaagctagttttttccctttgtcttctgcttttcagtggctgctcgttcgctttcagatcgagagagcagcctcagtaaaacgagtgccagatccaaaaactcaatggcctcaaaccggataaccgtatagagtcagaaggatggctcattgagacatggaaccctaacaacaagccattccagtgtgccggtgttgacctc

SEQ ID NO: 64673 - DNA, 237 bp, Glycine max
  Clone ID: 700758958H1
gttccaaatttctatgccagcgaggcagagagagatactagagcgagaaagagagagagcgccacgcaccgttcattccttcgtcctcgccgtttctaaccgtcgcagttttccggcgaagtttctccgatttgtttaaccgaaatggcggatctgtccgttctcggttggattctgtgctccgctctgagcctcttcgcgctctacagcctggccttcggcggagcgagccgtaac

SEQ ID NO: 64674 - DNA, 234 bp, Glycine max
  Clone ID: 700758959H1
acgcaactgaaaaggaaaaccctaagagatgaagagaactcctatcttgttccctctcttctttcttctttgtgccttcacctcatatctaccttcagccaccgctgatgatgatcatgtgtacgacactgacggcgataagcttcaatacggtgtcaattatttcgtgttgccagtgataagaggaaatggcggtggaatacaagtagcaaaagcaggaaacgaaacttgccc

SEQ ID NO: 64675 - DNA, 230 bp, Glycine max
  Clone ID: 700758960H1
cacttccttagttcactatgcggaagcccttcactctctctctttcttccctttgcttgctactcttgtcgagtgcatgctttgctattagctccagcaagctcaacgagtgccaacacaacaacctcaacgcgttggaacccgaccaccgcgttgagtccgaaagtggtttgattcaatcatggaactctcaacaccctgatctgtaatgcgccggtgtcactgtttcc

SEQ ID NO: 64676 - DNA, 234 bp, Glycine max
  Clone ID: 700758961H1
cacctttgttcactcttcttctcttgcggctagggttttagcgcagctcttctagatttaaggaagatgggtaaggaaaaggttcacatcagtattgtggtcattggccatgtcgactctgggaaatccactaccactggtcacctgatttacaagcttggaggcattgacaagcgtgttattgagaggtttgagaaggaagctgctgagatgaacaagaggtctttcaagtat

SEQ ID NO: 64677 - DNA, 232 bp, Glycine max
  Clone ID: 700758963H1
attgaatatgatgcatgtacaattccaaatgattgtggttcattggttgttgccaaagttggaaatcacaaacaaattgttggtttccatgttgctggaagcaaaggaagactgggatatgcttcattgataccatacgttgagccagttgtgcaagctcaaagtgctgaagtttactttgacttcttccctgtggaggttgctagtcaagagggagttgctcacattggtg

SEQ ID NO: 64678 - DNA, 81 bp, Glycine max
  Clone ID: 700758965H1
gttcaatatcctagtataccttaataaataatttaagatactatgatgagagcacggttcccattactgttgctgggactt

SEQ ID NO: 64679 - DNA, 211 bp, Glycine max
  Clone ID: 700758970H1
atagtctttgaacactcatcaccatggccaagcttgttctttccctttgtttccttcttgtcagtggctgcttcgctgctgagagagcaggcacagcgaaatgagtgccagatccaaaagctgaatgccctcaaaccggataaccgtatagagtcggaatgtgggttcattgagacctggaaccctaacaacaagccagtccagtgtcccg

SEQ ID NO: 64680 - DNA, 216 bp, Glycine max
  Clone ID: 700758974H1
ccaaatgcggatttcttcctctttcaagattcatatctgaagtaaatgctatcaaaaggagaataacccgatttgaaatgcaccaaactctgaaattgcttcaaggagagatatcgcaactaagtgagtacaatccacttgatctgttctctggatccaaggaaagaattctgaaagctattaaaggtctccttacaactcctcaaaacaattttc

SEQ ID NO: 64681 - DNA, 193 bp, Glycine max
  Clone ID: 700758975H1
aaaattcttccaccaagttatgggatatcctgtgttgcttctgttctccctcttaggtctctctactagttccagcatatcaactcatcgttccatattggaccttgacctaaccaagtgtaccacacagaaacacgtgtcttcactgctccaactatggaagagtgagcatggacgtgtctgacataaccac

SEQ ID NO: 64682 - DNA, 231 bp, Glycine max
  Clone ID: 700758976H1
ggcgtacacatcgaaagattattaaccctgctttccatttagaaaaattgaaggttatgttaccaatatttcttgaatgttgtgacgatatggtttccaaatgggaaaggttgttgtcttcaaatgacaaatccgaaattgatgtgtggcctttccttcaaaatttaacatgtgatatgatatctagaacagcatttggaagcagttatgaagatgggaaacgtatatttg

SEQ ID NO: 64683 - DNA, 239 bp, Glycine max
  Clone ID: 700758978H1
agcaaaatgaccaagttcacaatcctcctcatctctcttctcttctgcatcgcccacacttgcagcgcctccaaatggcagcaccagcaagatagctgccgcaagcagctccagggggtgaacctcacgccctgcgagaagcacatcatggagaagatccaaggccgcggcgatgacgatgatgatcatgacgacgacaatcacattctcaggaccatgcggggaagaatcaactacat

SEQ ID NO: 64684 - DNA, 70 bp, Glycine max
  Clone ID: 700758979H1
gttcattatcctagtacaccgtattatagaatttcagacatactctgatgagagcgcggatcccatgact

SEQ ID NO: 64685 - DNA, 233 bp, Glycine max
  Clone ID: 700758980H1
gttctgagtctcaaagagaaccacgaagacataagaataagaacccttttcacttcaactctaaaaggttccaaactctcttcaaaaaccaatatggccacgttcgcgtcctccagaggttcaacaaacgctcccaacagcttcagaatctccgagactaccgcattttggagttcaactccaaacccaacacccttcttctcccccaccatgctgacgctgattacctcatc

SEQ ID NO: 64686 - DNA, 217 bp, Glycine max
  Clone ID: 700758981H1
ctcgagccggatcggctcgtgaaacacgagaacaatcttgctttcacagatgaggaaaagacggaagtgattaggaatagaggcattcctgctgatgttcttgcaaagcgagctcatgaatttgaaaaacatgttgctcatgaaagcctcaaggatcaaattcctgctgttgacaagttgtattctactaaggttaataagtttgcaaaaattatga

SEQ ID NO: 64687 - DNA, 233 bp, Glycine max
  Clone ID: 700758982H1
tctcgagccgattcggctcgagaccatctttatgtagcaaatgttaggagattctaggactaacatatcaaaagctggtaaggcaaatgctctctctgaggatcataaaccaaatagaagtgatgagcggaagagaatcgagaatgctggtggtgttgtcatgtgggcaggtacttggagggttggaggggtgctagcaatgtctcgtgcctttggtaaccgtatgctgaagc

SEQ ID NO: 64688 - DNA, 232 bp, Glycine max
  Clone ID: 700758983H1
tagtagtgttggtgggttgcaaagatgcttgggggtcttctccataggggtcataagataaaagggacagtggtgttgatgcgcaagaatgtgttggacgtgaatagcgtaaccagcgttgggggacttattggtcaaggtctcgacttagttggctcaacactcgatactcttactgccttcttgggccgatccgtgtctctccagcttattagtgctaccaaggctgatg

SEQ ID NO: 64689 - DNA, 232 bp, Glycine max
  Clone ID: 700758984H1
caccccatcagtttgatgcctgtttcatggatattcaaatgccagaaatggatggatttgaagctacaaagcgaattagggagatggaagatagtgtgaacagagaagtatctatggatgactttaagaatattacaaactggcatgtacccattttagccatgaccgcagatgtgatacaggctacacacgaggaatgcctaaggtgtggcatggatggatatgtttcaaa

SEQ ID NO: 64690 - DNA, 238 bp, Glycine max
  Clone ID: 700758985H1
ggcaatttcagagtattgtggatgagaaattgaaagagattgtgacctctagcagacaagcactggtgcaaagctgaaggactacaattaatgccggtcggggtggtttgtgttcatctgaggatgaacttaacagtgttatatatagtttacagtaccgcatacagcatgagagcattcctttgactgaggaaaaacaaatcctccgagaaatcaaacagcttgaggggacaaggga

SEQ ID NO: 64691 - DNA, 233 bp, Glycine max
  Clone ID: 700758986H1
gttcaatatcctagtataccttaataaatattttaagatactatgatgagagcacggttcccattactgttgctgggacttgttttcctggcttcagtttctgtctcatttggcattgcttactgggaaaaagagaaccccaaacacaacaagtgtctccagagttgcaatagcgagagagactcgtacaggaaccaagcatgccacgctcgttgcaacctccttaaggtgga

SEQ ID NO: 64692 - DNA, 231 bp, Glycine max
  Clone ID: 700758987H1
ctcgagccgtggagaagtacctcaacaaggagctggagctggacaaatttatcactcactctgtcccattctcagagatcaacactgcatttgatcttatgctgaaaggggagggaataaggtgcctcatctgcatggaagagtaaatcaatgatgttctctgctgaacagtgtttgcgtgtaatgtgaaaagagaattgaataaatttggcatgtaattcggttattgga

SEQ ID NO: 64693 - DNA, 234 bp, Glycine max
  Clone ID: 700758988H1
ataaaattcttccaccaagttatgggtttccttgtgttgcttcttttctccctcttaggtctctcttctagttccagcatatcaactcatcgttccatattggaccttgacctaaccaagtttaccacacagaaacaggtgtcttcactgttccaactatggaagagtgagcatggacgtgtctaccataaccacgaagaagaggcaaagagacttgagattttcaagaataac

SEQ ID NO: 64694 - DNA, 75 bp, Glycine max
  Clone ID: 700758989H1
tcttgtacagggaaaagatctcgcaatggttaaagttcatgtcgcatgtgctgctgtaggcttgacatcaagcta

SEQ ID NO: 64695 - DNA, 246 bp, Glycine max
  Clone ID: 700758990H1
cgagtttagggggcgtggcagttctgatatttacaccatctgctctcaagactgtgaattatggaatcctgcttcgacaaaagcaatgactatgtcatttgatccaaacccgtgttctgatgcatggagtttggaatttttgaagcgtaccggatttcactgtgatatcatttgtgtcactggatggactgccaccccaatggcaggatgttcaggttacaattgattggtttatttcctctcagg

SEQ ID NO: 64696 - DNA, 210 bp, Glycine max
  Clone ID: 700758992H1
ctggtcttggcatctccgcagcaccacccaccctggaccaggtcttcaacagagagaaagagaaggaagaacacacacacacacacacacacgttaaactaacattttttattagtaagaagacatggctcaacccagttccaacggggatctgaataataaccagcagggtcaggttcagcaacagcagcagcagtgggcggcggcgca

SEQ ID NO: 64697 - DNA, 230 bp, Glycine max
  Clone ID: 700758993H1
tgacaacttcgagtatgtgtcattcaagaccaatgatacacccatgatcggcactcttgcaggggcaaactcattgttgaacgcattaccagaggaagtgattcagcacactttcaacctaaaaagccagcaggccaggcagataaagaacaacaaccctttcaagttcctggttccacctcaggagtctcagaagagagctgtggcttagagccctttttgtatgtgct

SEQ ID NO: 64698 - DNA, 235 bp, Glycine max
  Clone ID: 700758996H1
taaaaggatagaagatgatcagaaatttaaaaacaaaaaaagtaagaaaaggaaaaacttggaggcatcaaatcagttggagaatgatagaaagaaaagtaagaaagaaatgatctctaagacaagagaggaggttgaagctgattacaaggctgcatccttagccccagatgttatggagaagaaacagatgcaaactgaaactctctctgctgtctttgagacatactttcgc

SEQ ID NO: 64699 - DNA, 188 bp, Glycine max
  Clone ID: 700759001H1
gattcaggaaaaagttgtattgaatctctccaaacttcacatcttgttgggaaaagcctcaaaattgatggtgtcatcagccaaatttgaggcttttccccacaagctggtgagtctgagagattaggacaaagttgtattgaaattttcacaagaggaatttcttacagcttggtcaactcaggtgc

SEQ ID NO: 64700 - DNA, 315 bp, Glycine max
  Clone ID: 700759002H1
cgcatgcacgcgtcagtcgctgagggagctcttcttctgccacacttcaattcaaaggccatagtggtactagtgattaatgaaggagaagcaaacattgaacttgttggcattaaagaacaacaacagaggcagcaacaggaagagcaacctttggaagtgcggaaatatagagctgaattgtctgaacaagatatatttgtaatcccagcaggttatccagttgtggtcaacgctacctcggatctgaatttctttgcttttggtatcaatgccgagaacaaccagaggaacttccttgcaggtcgaaagaca

SEQ ID NO: 64701 - DNA, 291 bp, Glycine max
  Clone ID: 700759004H1
ccgattgctagaatggaatttcgatgctcagtcatctcttttaccattctcttctctcttgctcttgcaggagagagccatgtccatgcatcgctacctgaggaagattattgggaagctgtttggccaaacactcccattcccactgcactgcgagagcttctaaagcctctccctgcaggtgttgaaatcgatgaactccctaagcaaattgatgatacacagtacccaaaaacattcttctataaagaagaccttcatccaggcaaaacaatgaaagtaaattcacca

SEQ ID NO: 64702 - DNA, 286 bp, Glycine max
  Clone ID: 700759005H1
caaagaatagatcctcaatacaatgaggttcaggctcagatggaaacaaatttgtttaaattgtctcttgatgatgttgaaactcctaaaggttccatgttggatcttaaaatttctcagtctaaaattgcacttcccaagaacacagttggaggaactattctgcgtagtgatctattggcaaattttctgacagagggcaattttagagcaagtgttgatttgcagcgcactcatcgtattaaaggaatgattaaaatggtggccacagttggtattccgagaa

SEQ ID NO: 64703 - DNA, 290 bp, Glycine max
  Clone ID: 700759006H1
aacaattccttcacttgcagcactgttgcatcatcacttcattgcaaaaccctaaacttcaccttcaaccatgaccacacaagtaccaccacacagtgtccaagtccacacaacaacacaccgctacgaagctggcgtcgtcccccccggagcccgtttcgaaccgccgcgttatgaagccggcgtcaaagcgccctccatttaccattccgagagaggtccaacgacttcccaggtcctcgccgtcctcgccggcctcccggtcggtggcatcctgctcccctggcggg

SEQ ID NO: 64704 - DNA, 287 bp, Glycine max
  Clone ID: 700759007H1
ccaagttcacaatcctcctcatctctcttctcttctgcatcgcccacacttgcagcgcctccaaatggcagcaccagcaagatagctgccgcaagcagctccagggggtgaacctcacgccctgcgagaagcacatcatggagaagatccaaggccgcggcgatgacgatgatgatgatgacgacgacaatcacattctcaggaccatgcggggaagaatcaactacataaggaggaacgaaggaaaagacgaagacgaagaagaagaaggacacatgagaagtgct

SEQ ID NO: 64705 - DNA, 283 bp, Glycine max
  Clone ID: 700759008H1
ttcgagcgaatcggctcgagctcaactcaagtttatgacattttgatatgtggaatagtgtattggtgttggtgatcctgtgtcttagtcttagtaatggtgatgatcaagagaagaagaaaccctgtttgtgggagtggaagagactgagtagcgcttactctgcctatcgggcactttttccttcaagtattggtcttgacatgcttaagaaccttgtcactcacacatatgcccgtttctttcctccaaatatagagtaagttatttcttctcaaatcaa

SEQ ID NO: 64706 - DNA, 287 bp, Glycine max
  Clone ID: 700759009H1
cacgtaatcaaaaccatgcagatacgaacctgccactccatcaccacccaaacccttccacaacttccgtgttcttctagaaaagcccaccaccgccaccttcttccgccgttaaacgctgcggtttccgcggcgccgttcaaagcccggaaggcccactcaatgcctccagaaaagaaagaaattttcaagtccttggagggatgggcctcggagtgggtcctaccgctgctgaagcccgtggagcaatgctggcagccacaaaacttcctccctgaccctccctt

SEQ ID NO: 64707 - DNA, 281 bp, Glycine max
  Clone ID: 700759011H1
gcaccataaaaccggaaacaaaagcaatcgttactgatttcaagaatttctcaatttctttctacttctttgtgtacgatttcttaagggaaagaaaatcactctctgtgctggccacagacttcgtgaatcattttcttttccacttttagtttaccgtcgtgaacactctcctatttgatataggacttcgtgtcagatttaaacttcttctgtttctttctcagtactctgttcaatttcaagttcaaccgggttaaatcttggattagtgttccact

SEQ ID NO: 64708 - DNA, 279 bp, Glycine max
  Clone ID: 700759012H1
ggtccaacttgttagacctaataaacaaagttgcatctctgatttgattgtttattaggtccaacttgttagaggaaaaccaattgttttcaacagtaggaaatatttaatttgacattttggttcttgtaatttttggagaataatagggcttgatgctcctaattgtaaatgtggaatattaatttggcagaaatttgccttcaattgtaccaaataccattttgaatttcgaaaaacattgtggaaaaaaaaaaaaaaaggggggccgcgcctaat

SEQ ID NO: 64709 - DNA, 267 bp, Glycine max
  Clone ID: 700759013H1
gggagttgctcacattggtgcattgaaatctgtggtctatgttccactgcctacataaactagtttggtggagactcccaaggaatggcaactggatctaccttgtgacagaattcctagtgccttgactacaactgatgcaagattggtaggcacagaacatgatggatatgatccttttcttggtggaattcaaaaatatgccactcccatgatgcccctagatgaagaattctttctaatgttgcacaagatatggttgaggaa

SEQ ID NO: 64710 - DNA, 279 bp, Glycine max
  Clone ID: 700759015H1
gcgatgaagaggcaatgcaaagttaacctgtacggaactgcttttcccatgaaggaggagcttgacaggcaaatcctgtccaggttccagcggcctcctggaccaattccttcttcaatgctcggtttggagactgttacaggaagtgttgatcactttggttttgaggattgtctaaatgacccccgagagtcagagactttccggccattagacatgcatcatgggatggaagttcgccttggtctatctaagggaccagtgtacccaagtatatat

SEQ ID NO: 64711 - DNA, 231 bp, Glycine max
  Clone ID: 700759016H1
cttgctcagtcctggatgtggaggtccttgactctctcggcttattccccatgccagctactcttgtcgagtgcatgcttagctatcagctccagcaagctcaacgagtgccaactcaagaacctcaacgcgttggaacccgaccaccgcgctgagtccgaaagtggtttgattcgaacatggtactctcaacaccctgagctgacatgcgccggtgtcactgttcccaaa

SEQ ID NO: 64712 - DNA, 302 bp, Glycine max
  Clone ID: 700759017H1
tcggctcgagcttagttattatcacttccttagttcaatatggggagcccttcactctctctctttcttccctttgcttgctactcttgtcgagtgcatgctttgctattagctccagcaagctcaacgagtgccaactcaacaacctcaacgcgttggaacccgaccaccgcgttgagtccgaaggtggtttgattcaaacatggaactctcaacaccctgagctgaaatgcgccggtgtcactgtttccaaactcaccctcaactgcaatggcctccacttgccatcttactaccttatc

SEQ ID NO: 64713 - DNA, 288 bp, Glycine max
  Clone ID: 700759018H1
cttatcttatccctctaatcactctagctgttgcaatttctactatttttcaatggcttctgcagatgttgagttccgttgctttgttggtgggcttgcttgggtcaccggcaacgatgccctcgagaaagccttttcaatctacggcgacatcgttgaatcgaaggttatcaacgaccgtgagactggaaggtccagaggattcggatttgtgaccttcgcctcagagcagtcaatgatagatgcgatcgcaggaatgaacggccaggaccttgacggtcgaacatc

SEQ ID NO: 64714 - DNA, 289 bp, Glycine max
  Clone ID: 700759020H1
tctgcttaatcgaactattcagattctaaaaaatgagttggtggtgggctggagcaatcggtgctgccaagaagaaattcgaggaagaggaaccgccgcgaagttgccagagcgtgggcctggtgatcggcgtgacgggcatcgtgggcaacagcctcgccgagatcctccctctcgccgacacccccgccggtccatggaaggtctacggcgtcgcacgctgcccccgtccgccgtggaacgccgaccatcctgtcgagtacatccagtgcgacgtctcgatcccgcc

SEQ ID NO: 64715 - DNA, 285 bp, Glycine max
  Clone ID: 700759021H1
actgataaagctcatatcttccgtgctgatcttcaggggtgaagaaagaggatctgaaggtgcaggtggaggagaataagatcctgcagataagcggggagagggtgaaggagaaggaggaccagaacgacaagtggcaccgcgtcgagaggcagtgcggaagcttcctccgccgcttccggctgccggaggatgccaaccccaaccagatcagctgcacgctcgaaaacggggtgctgaacgtcaccgtgcccaaggtggagaagaagccggagaacagacgtg

SEQ ID NO: 64716 - DNA, 283 bp, Glycine max
  Clone ID: 700759022H1
agcaaaatgaccaagttcacaatcctcctcatctctcttctcttctgcatcgcccacacttgcagcgcctccaaatggcaacaccagcaagatagctgccgcaagcagctccagggggtgaacctcacgccctgcgagaagcacatcatggagaagatccaaggccgcggcgatgacgatgatgatgatgacgacgacaatcacattctcaggaccatgcggggaagaatcaactacataaggaggaacgaaggataagacgaagacgaagaagaagaggaca

SEQ ID NO: 64717 - DNA, 286 bp, Glycine max
  Clone ID: 700759024H1
tttgattgcagtgccaaccggttttgcatactggatgtacaacaatgaagacactcctgttgttgccgtttctcttattgacaccaacagcttccagaaccagctcgaccagatgcctaggagattctatcttgctgggaaccaagagcaagagtttctacagtatcagccacagaagcagcaaggaggtactcaaagccagaaaggaaagcgtcagcaagaagaagaaaacgaaggaggcagcatattgagtggcttcgccccggaattcttggaaatgcgttcg

SEQ ID NO: 64718 - DNA, 222 bp, Glycine max
  Clone ID: 700759025H1
ctcgagccgccctctctatcttccaatcccattatcattccctgtcgtctttctttgactttctcatccttttccttttcccaagcaattgtactctttaggggcataatacacgtaaagcaagttggtttctggagtagttagagttacatgcgctctgcaggcacatggcaatatatgatctggatcccgatgttgttcgctggggtcttcatctcctag

SEQ ID NO: 64719 - DNA, 279 bp, Glycine max
  Clone ID: 700759026H1
gaacaaactcaggcacattaaatactctgcctgtccagctgaacaatggtcctgtacttcatgaaaaggtttgagtaattaattcagcatcatcaattactcaaaccttgagtagagaagtgcttgagggccacagaaagctagtgacactcgcagctacaagaacaaactcaggcacattaaatactctgcctgtccagctgaacaatggtcctgtacatcatgaaaaggtcgaggtgcctctggatcccacacaagagctggcaaggttgattctga

SEQ ID NO: 64720 - DNA, 271 bp, Glycine max
  Clone ID: 700759027H1
gatgagtgtgcggtttcctttgttggtgttctgggaactgttttcctggcatcagattgtgtctcattaaaggtgcgagaggatgaggataacccttgctacttgagaaactctaagagcttccagactctctttgagaacctacaacggtcgcattcgtctcctccacagattcgacgaacgctctgcagaacttgagaacattcgagactacaggattgtccggtttcagtcaatacccaacaccgtccttctccgcccacgatgctga

SEQ ID NO: 64721 - DNA, 274 bp, Glycine max
  Clone ID: 700759028H1
tctccttggagctattatatcatggggcttctgtggcctttcgtctctgagcacgctggggactggtatccagctgaccttggtagcaacgatttcaaaggtctttatggatacaaggtattcatatctattgctctgattttaggggatggcatttacaatctgataaagactatactgataaccattgacggagatgtggagggcaagctccagacagcttcctgttgtgacagaggttcaagatgatgagagttctcaactgcaatcaaag

SEQ ID NO: 64722 - DNA, 277 bp, Glycine max
  Clone ID: 700759029H1
taaaattcttccaccaagttatggaatccctgtgttgcttcttttctccctcttaggtctctcttctatttccagcaattcaactcattgttccatattggaccttgacctaaccaagtttaccacacagaaacaggtcacttcactgttccaactatggaagagtgagcatggacgtgtctaccattaccacgaagaagaggcaaagagacttgagattttcaagaatacttggaactatatcagggacatgaatgcaaacagaaaatcccccatt

SEQ ID NO: 64723 - DNA, 304 bp, Glycine max
  Clone ID: 700759031H1
tacacgcgcacggaactcggctcgagctcggtggaggaattttagtggacaaaactggagattggatcacacttatacaaaattctccaattagtaacttgttgagagttgctgcttggaagaaaggctgtttaatggttaagattgtgatgtctgggaatgcagcagtcaaaaggagtgattgggcctcattggtacaagtgtttttaacaaacagcaacagtacagagcattttgatgcatgtaagtggacaaaatcggaaccacattcctgggaattgatcttcccaatagaggttgtggt

SEQ ID NO: 64724 - DNA, 269 bp, Glycine max
  Clone ID: 700759032H1
ggtccaacttgttagacctaataaacaaagttgtcatctctgatttgattgtttattaggtccaacttgttagaggaaaaccaattgttttcaacagtaggaaatatttaatttgacattttggttcttgaaattgttggagaataatagggcttgatgctcctaattgtaaatgtggaatattaatttggcagaaatttgccttcaattgtaccaaataccattttgaatttcgaaaaacttgtggaaaaaaaaaaaaaaagggcggc

SEQ ID NO: 64725 - DNA, 290 bp, Glycine max
  Clone ID: 700759033H1
taagaaatgaagagtactatcttctttgctctcttctagtttgtgccttcaccatctcatacctgccttcagccaccgctcagttcgtgctcgacactgatgatgatcctcttcaaaacggtggcacatactatatgttgccagttatgagaggaaagggcggtggaatagaagtagattcaactggaaaagaaatatgccctctcactgttgtgcaatcacccaatgagctcgataaggggattggactagtctttacatctccattacatgcccttttttcgccgaag

SEQ ID NO: 64726 - DNA, 286 bp, Glycine max
  Clone ID: 700759034H1
ctcgagccgatttgagtgaactcactttaaacagtggaaaagagttcagggccaaggtacaggagaaagatacttccggaggaaaagtgaaagggcagggaactgggacagtccttgctgtaactcttgttgccgtggatgctgaaatcagcgttaatgctgccatgctacaggaagggcttgctaggacagaaaaaagaaacaggtgggacagaaaagacagacagacagctcttgataatttggagaatttccaggaagaagcaaagaccagcaggccggaatg

SEQ ID NO: 64727 - DNA, 192 bp, Glycine max
  Clone ID: 700759035H1
gctaaatgaccaagttcacaatcatgctgcgactctcttctcatctgcactgtccacacttgcagcgcctccaaatggcagcactcagcaagatagctgccgcaagcagctccaggaggtgaacctcacgccctgcgatcagcacatcatagagcagatacaacgctgaggcgatgacgatgctgatgatga

SEQ ID NO: 64728 - DNA, 286 bp, Glycine max
  Clone ID: 700759036H1
aaagaaattaagagagttttttttgttcctcactgaccaagccattgcgatgagaaccaaactttctttagctatctttttcttttgtcttttagccttattttcaaacctagcctttggcaaatgtaaagaaaccgaggtagaagaagaagaccctgagctcgtaacatgcaaacaccaatgccaacagccacagcaatacactgagggtgacaagcgggtatgcttgcaaagatgtgacaggtatcatcgtatgaagcaagagcgagagaaacaatccaagagg

SEQ ID NO: 64729 - DNA, 278 bp, Glycine max
  Clone ID: 700759037H1
ctcgagccgctcgagccgggacctattgtgtttaaatccacaaaatccttttgtgtcacataggtgatatggggaaaatgactttgccccaaggcacttcccgaagtgtcaaaagagtgcctcattctatagggggaggagctggtgcacagaatgctattctcatgaatatgccagatgctgttctttcaatgtggagatattttgttggagatctcgtctttgaagtttctaagatgacttctccctacattagatgtacagtctctctcttctag

SEQ ID NO: 64730 - DNA, 290 bp, Glycine max
  Clone ID: 700759038H1
acaaaacccaccgagatcagcagcggcaagtgttcggaggctacaacaagaggttcagacatttcagccctaccctacggctagctccatgcaactatccacatgctacttaccctatcatctccttctccctctcacaaattcccagtcttgtactttctctctggcctcacatgcacggacgagaacttcattttcaagtcgggtgctcaacgcgccgcttccgctgagggagtggccttggcatttcccgacacttctccaagaggcttgaatgtggaagagaagca

SEQ ID NO: 64731 - DNA, 279 bp, Glycine max
  Clone ID: 700759039H1
tgcaggctgtatatttgctgaacttcttctgcgtcgaccttttttgcagggtacaagtgacattgatcaattaggaaagattttttcagcatttggcactccaacggcttctcagtggcctgatatggtatacctgcctgattatgtcgaataccaatatgttcctgccccccctctgcgttctttatttccgatggtaactgatgatgctttagatctgttgtcaaagatgcttacatatgatccaaaagctagaatttcagtgcagcaggactagag

SEQ ID NO: 64732 - DNA, 278 bp, Glycine max
  Clone ID: 700759040H1
tttctttctctatttattctgagtcacgctaccttgattctccaattagatcggccctttttcatttcatccgggggctcacaaatttctgggactaatcaattgacaatgctgcattagtgggattggtactgccaggttctttagctgatgaaagaggattgagctgtgctgcttgtgacttgagtggtgcatacctgttctatacgctaattcagaagctctgccaaatttagtgtctgacttactgctttattgagggattcattcatatattt

SEQ ID NO: 64733 - DNA, 278 bp, Glycine max
  Clone ID: 700759041H1
attaacacttccttagttcaatatggggaagcccttcactctctctctttcttccctttgcttgctactcttgtcgagtgcatgctttgctattagctccagcaagctcaacgagtgccaactcaacaacctcaacgcgttggaacccgaccaccgcgttgagtccgaaggtggtttgattcaaacatggaactctcaacaccctgagctgaaatgcgccggtgtcactgtttccaaactcaccctcaaccgcaatggcctccacttgccacttactc

SEQ ID NO: 64734 - DNA, 275 bp, Glycine max
  Clone ID: 700759042H1
gttggagatctcgtctttgaagtttctaagatgacttctccctacattaaatgtacagtctctttcttcatagcatttggaaatttggctgatgacaccatcaattttgaggcttttccccacaagctggtacagtttggagagattcaggaaaaagttgtattgaaattttcacaagaggaatttcttacagcttggtcaacccaggtgcgtcctgcaacaactctgttggctgatgggtgtcgatatttgtatgctatggtgcatgtagttca

SEQ ID NO: 64735 - DNA, 273 bp, Glycine max
  Clone ID: 700759043H1
aaaaccaatggccacgttcgcgtcctccagaggttcaacaaacgctcccaacagcttcagaatctccgagactaccgcattttggagttcaactccaaacccaacacccttcttctcccccaccatgctgacgctgattacctcatcgttatccacaacgggactgccattcttaccttggtgaacaacgacgaccgagactcttacaaccttcaatctggcgatgacctaagagtccctgcaggaaccacatactatgtggttaacccgaca

SEQ ID NO: 64736 - DNA, 270 bp, Glycine max
  Clone ID: 700759045H1
atcaaatcctcttttcatcattcatttctttcgatcagaaacaatcaatcttcattcaggatgcaacgttttgttgacaacgtcctcgctgttactaaagagtcggtgaagacgtttacttatgaatcgttgaacaatgttgccacagtgataaatggtgtgtcagctcttgtgttgacattgctgcctgggaaagtttctatacttgaaggtattcagggttgggagctcaggccaactcttcgtggaccacgctttccacgttggatg

SEQ ID NO: 64737 - DNA, 270 bp, Glycine max
  Clone ID: 700759046H1
gtggagttcctgtggaagaggggtattctgtcctgctttggccaaggctgtgaaaacaatgaagaagggagagaaagttctcttgaatgtgaagccacaatatgcatttggtgagagtggaagaccagccttaggagatgaaggtgccgtacctccaaatgcttatcttcaattggatcttgagttggtctcgtggaagaccgtgtctgacattaccaaggatagaaaggttctcaagaagactttgaaggaaagggagggatatgacga

SEQ ID NO: 64738 - DNA, 277 bp, Glycine max
  Clone ID: 700759048H1
cttgcatcaatttggcgctctcaactcgctgctgctccccccaaaaacccttgctgttgctggggaaccatgagcaagtctccgcgcagagatctgcaagtcttcgatttcaacgaagaggatgaggtcgcctccgataaacaccacaatttcctcgctcgcgattccgaggtcaataaggttggcatcaagagtgttgccagtattcattgtgttgatgtagctggtgctatgtttaatttggaaaaggattgttctgacccctctcctgcacagt

SEQ ID NO: 64739 - DNA, 282 bp, Glycine max
  Clone ID: 700759049H1
cttgatcggtggtgtatttggtgtgttgatgttttattaaacttttgtactcttgctttgaaactagttggttagatttgaaattcttctaagatggatacttcttataggactggtggagtcaagtacgagtgcttgctttttgatatggatgacactctttacccattgagcttaggtctcaatttgttttgtcgcaagaacatacaagagtatatgttagaactcttgcatattgaagagagtgaagtgccaaaaatgtgtttggatttgtatgggaat

SEQ ID NO: 64740 - DNA, 281 bp, Glycine max
  Clone ID: 700759050H1
tctcgagccgaatcggctcgagcaggctcgaggcaaagcaatggcaacttcaaagttgaaaacccagaatgtggttgtatatctctccctaaccttaaccttggtactggtgctactgaccagcaaggcaaactcagcggaaactgtttctttcagcttccacaagttcgtgccgaagcaaccaaacatgatcctccaaggagacgctattgtgacctcctcgggaaagttacaactcaataaggttgagaaaacggcaccccaaaacctcgtctctggtc

SEQ ID NO: 64741 - DNA, 283 bp, Glycine max
  Clone ID: 700759051H1
ctttgaacactcatcaccatggccaagcttgttctttccctttgtttccttcttttcagtggctgcttcgctctgagagagcaggcacagcaaaatgagtgccagatccaaaagctgaatgccctcaaaccggataaccgtatagagtcggaaggtgggttcattgagacctggaaccctaacaacaagccattccagtgtgccggtgttgccctctctcgctgcacccttaaccgcaatgcccttcgtagaccttcctacaccaacggtccctagaaatcta

SEQ ID NO: 64742 - DNA, 280 bp, Glycine max
  Clone ID: 700759052H1
cacacacacacacacactaagaataatggcttctatcctccactactttttagccctctctctttctttctctttccttttcttcttatccgactccgtccccattccccaacaccacactaaccctacaaaacctataaaccttctggttctacccgttcaaaatgatgcttccacagggctccattggtccaacctccaaaaaaggacccctctaatgcaagtaccagtcctggtggacctcaatggaaaccacttgtgggttaactgtgagaacact

SEQ ID NO: 64743 - DNA, 280 bp, Glycine max
  Clone ID: 700759053H1
cgaaggagctcttcttctaccacacttaattcaaaggccatagtgatactagtgattaatgaaggagatgcaaacattgaacttgttggcattaaagaacaacaacagaagcagaaacaggaagaggaacctttggaagtgcaaaggtacagagctgaattgtctgaagacgatgtatttgtaattccagcagcttatccatttgtcgtcaacgctacctcaaacctcaatttccttgcttttggtatcaatgctgagaacaaccagaggaattccttgc

SEQ ID NO: 64744 - DNA, 280 bp, Glycine max
  Clone ID: 700759054H1
ggaagaaggtggcagtgtgctcagtggcttcagcaaacatttcttagcacaatccttcaacaccaacgaggacaaaactgagaaacttcggtctccagatgacgaaaggaagcagatcgtgacagtggagggaggcctcagcgttatcaatcccaagtggcaagacaaggaagacgaagacgaagatgaagacgaagaatatgaacaaactccctcttatcctccacgacgaccaagccatggaaagcatgaagatgacgaggacgaggacgagaagaag

SEQ ID NO: 64745 - DNA, 275 bp, Glycine max
  Clone ID: 700759055H1
attctctccattgtctttgatcactcatcaccatggccaagcttgttctttccctttgtttccttcttttcagtggctgcttcgctctgagagagcaggcacagcacaatgagtgccagatccacaagctgaatgccctcaaaccggataaccgtatagagtcggaaggtgggttcattgagacctggaacgctaacaacaagccattcgagtgtgccggtgttgcgctctctcgctgcacgcttaactgcaatgcgcttcgtagacttcgtaca

SEQ ID NO: 64746 - DNA, 274 bp, Glycine max
  Clone ID: 700759056H1
ctcgagccgctcgagccgcaaatttgttaaattgtctcttgatgatgttgaaactcctacaggttccatgttggatcttaaaatttctcagtctaaaattgcacttcccaagaacacagttggaggaactattctgcgtagtgatctattggcaaattttctgacagagggcaattttagagcaagtgttgatttgcagcgcactcatcgtattaaaggaatgattaaaatggtggccacagttggtattcctgagaatacaggtatacattgg

SEQ ID NO: 64747 - DNA, 157 bp, Glycine max
  Clone ID: 700759057H1
accaaaatcactctattttttagcacaacttcaattattacaacaaagtataattaattaggcagagaatatggtggtgaggtgatggtcagaagtgagctgtcctcaaagggtggttgctcttagagaagagtagagtttgacttgtgagtgactg

SEQ ID NO: 64748 - DNA, 275 bp, Glycine max
  Clone ID: 700759058H1
gtgaagtgaagaataatcttgtgaatcgcgtaagctactctcaactcaactggatccgggtcacaaccgtcttgaaattaagaccaactgggtcattgatcacaatctcaattggtagcacaacatcaagggatagtgaaaaagaaaggtatatttgatcagggatatggcaactcgaagatatgagtttggaaggatgaatgaggctagccacccagactccatcagagctgccttggctgaattcctctccacttgcatctttgctttgctgg

SEQ ID NO: 64749 - DNA, 272 bp, Glycine max
  Clone ID: 700759059H1
gggatatgatccttttcttggtggaattcaaaaatatgccactcccatgatgcccctagatgaagaaattctttctaaggttgcacaagatatagttgaggaatggtttgattgtgttgatgaggaggattcctttgaggaagtttctttgagtgcagcactcaatggtgttgagggcttggactatatggaaagaattcctcttgccacatctgagggttttcctcatgtgctttcacgcaaaaatggtgaaaaaggcaaaagggtttgtt

SEQ ID NO: 64750 - DNA, 273 bp, Glycine max
  Clone ID: 700759061H1
ctcctacttctccgcctccttcaaatcgtcatcaatttcgcgtctttctttctcaattctcttagattctcaatttggtcttcaaaaatgcggatgagttgcaatggatgtcgagttctgagaaaaggttgcagtgaaaattgcagcatcagaccctgtttacaatggatcaaaagcccagaatcccaagccaatgctactgtgtttctcgctaagttttatggtcgtgctggtctcatgaacctcgttaacgcaggccccgaaatcttcgtc

SEQ ID NO: 64751 - DNA, 151 bp, Glycine max
  unsure (1)..(151): unsure at all n locations
  Clone ID: 700759062H1
gtttcacctttccacacatcatacgactttacccacttgccttgcagatctttttccagggaaaagtttgcatttctntgtcatctagagttagatgtctgagtgatcagacggaacatgttgaggtgangagctgcgagttatataggat

SEQ ID NO: 64752 - DNA, 264 bp, Glycine max
  Clone ID: 700759063H1
cagaagcacaacttttgctcaaagttcagaaactatgctcatgaaagcttatgcttttttgaagtacaacaatgcaaccaatttgattgtcaggacccatttggcagaattggtcaatgaagacttttatgatgaaaaatttaattttattggcacaattgggactccagcttttcatcgacaaattgctgcacacttggagaaaatgccattatggcaaaaagcaattttgtgctgcatgggacattgtctgtctcgggaaaa

SEQ ID NO: 64753 - DNA, 274 bp, Glycine max
  Clone ID: 700759064H1
aagaggatgagaagccacagtgcaagggtaaagacaaacactgccaacgcccccgaggaagccaaagcaaaagcagaagaaatggcattgacgagaccatatgcaccatgagacttcgccacaacattggccagacttcatcacctgacatctacaaccctcaagccggtagcgtcacaaccgccaccagccttgacttcccagccctctcgtggctcagactcagtgctgagtttggatctctccgcaagaatgcaatgttcgtgccaactac

SEQ ID NO: 64754 - DNA, 272 bp, Glycine max
  Clone ID: 700759065H1
tttggctcgagctcgtccgtttgatgatgttgagaccctcatggttccatgtcggatcttaccttgtctcgatctacaattggcattcccgaatacacagttgctggaaccattctgcgtagtgacctattggcaaattttttgacagagggcaattttagcgccagtgttgatttgcagcgcactcatcgtatcgaaggaatgattaaaatggtggccacagctggtattcctgaggatacaggtatagcattggcctgttgtatgaatag

SEQ ID NO: 64755 - DNA, 271 bp, Glycine max
  Clone ID: 700759066H1
aaaaccaaaacagtaaagctaacttcaacacctttaattttctaaaagtaattcagcggctgaataccaagcggagaagatgagtcaggagcagccacggcgtcccaaaggccaaaaccccatcaaatacggcgacgtttttgtcgtctccggcgaccttgcacagaagcccgtcgcaccggaagatgctgccatgatgcaaagcgcggaaactcgagtgctcggacaaacccaacccggcggagcagcttccgtcatgcatctgccgcca

SEQ ID NO: 64756 - DNA, 281 bp, Glycine max
  Clone ID: 700759067H1
caagaatttccattgcatgcaaagcaatacgcattatattactagttttaatttgttttgtcgtttgcttctttctttgattaatgatgactagctttaaggttgcatgtgtggttgcgatgatgtgcatggttgttgccatgagtgttacacccatggcacaggccgcaatcacgtgcgggcaggtcgccggcgacgtgtctccgtgcctcagttatcttcgaagcggcggaaaaccgtcggacgcctgctgcaacggagtgaagtcgctcagcggcgcg

SEQ ID NO: 64757 - DNA, 281 bp, Glycine max
  Clone ID: 700759068H1
gatgaacgtcaattcccattcccacgcccacctcatcataaggaagagcgaaagcaagaggaagatgaggatgaggagcagcagcgagagagcgaagaaagtgaagattctgagttacgaagacataagaataagaacccttttctcttcggctctaacaggttcgaaactctcttcaaaaaccaatatggtcgcattcgcgtcctccagaggttcaaccaacgctccccacaacttcagaatctccgagactaccgcattttggagttcaatccaaaccc

SEQ ID NO: 64758 - DNA, 278 bp, Glycine max
  Clone ID: 700759069H1
tgtgactcgaggacaaggaaaggttagattcacatagatcacactgtttgcattcagattccaatgtggagagtaaattccattcttgtagagatcaacatattgggcactgagttggaattggcggagggctgggagggtgaggctgttgagggtactaatgcgaccagctttagggttgtagaagtcagcgcgtgaagggcgagcaatgttctcgtgaagcttcaaggtgcagatattttcctcaaccccgtttcttgtctcgcatctctttcacg

SEQ ID NO: 64759 - DNA, 278 bp, Glycine max
  Clone ID: 700759070H1
gggaagacaagggagccattgtgacagtgaaaggaggtctgagcgtgataaaaccacccacggacgagcagcaacaaagaccccaggaagaggaagaagaagaagaagatgagaagccacagtgcaagggtaaagacaaacactgccaacgcccccgaggaagccaaagcaaaagcagaagaaatggcattgacgagaccatatgcaccatgagacttcgccacaacattggccagacttcatcacctgacatctacaaccctcaagccgtagcgtca

SEQ ID NO: 64760 - DNA, 273 bp, Glycine max
  Clone ID: 700759071H1
gttcagtgtctacaataccaggtgattttgtcattggtgttaagttgacaaccataaacaatatgtgtgcatatgggctcaatcctggtatttcaggttctcgtcttttgggcaccattcctcagtccatttcacagcaaactgtttggaatcaaatggcaacagtgagaacaccattgaattttgattctagcaagcagagcttttgtcaattctctattgatcttcttggtggaggaattttagtggacaaaactggagattggtcacact

SEQ ID NO: 64761 - DNA, 262 bp, Glycine max
  Clone ID: 700759072H1
aaagtcttccatagccccccaaaatgaagagcaccatcttctttgctctctttctcttttgtgccttcaccatctcatacctaccttcagccatcgctgatttcgtgctcgataatgaaggtaaccctcttgaaaatggtggcacatattatatcttgtcagacataacagcatttggtggaataagagcagccccaacgggaaatgaaagatgccctctcactgtggtgcaatctcgcaatgagctcgacaaagggattgg

SEQ ID NO: 64762 - DNA, 269 bp, Glycine max
  Clone ID: 700759073H1
cgacacatcaagcaaccaacaaaactgatttctcatttcgtagcatcaaccgctaactatccagatactaattttcgctttggtttggttcaattctgtccgcagacatggttttcaggccaatgagtggtaattggttagcactgttaagaaacagttatggaggtaaagccgcgtacgcaacctcaacagcaccaaagatgaaagcgtatgcagctgcggctgattacggacacaagcaacaacatgggaagtcggccaacgggact

SEQ ID NO: 64763 - DNA, 270 bp, Glycine max
  Clone ID: 700759074H1
atgttctcatcctagtacacgtattagagaatttaagatatactatgatgagagcgcggttcgcattactgttgctgggagttgttttcctggcatcagtttctgtctcatttggcattgcgtattgggacaagcagaaccccagtcacaacaagtgcctccgaagttgcaatagcgagaaagactcctacaggaaccaagcatgccacgctcgttgcaacctccttaaggtggaggaagaagaagaatgcgaagaaggtcaattccacg

SEQ ID NO: 64764 - DNA, 267 bp, Glycine max
  Clone ID: 700759075H1
taatgatctcgcaatggttaagttaatgtagcatgtgctgctgttggcttgatatcaagctatactccgactccattgttggaatctggtttgcaaaaagacagagggttaattgtggagtattttggaaggatgtcttacgttgctcataacgttaatcatccccaagagaaagatttgttggaaggaaatttttcctttgatattaaatctcgctctagattggaaaaagtttcctctacaaaagcacaatttgttagtgaaaaa

SEQ ID NO: 64765 - DNA, 222 bp, Glycine max
  Clone ID: 700759076H1
atcaataccaaaatgaccaacttacaattctcctcatcgctcttctcttcatcgcccacacctgctgcgcctccaaatggcaacagcaccagcaagagagctgccgcgagcagctcaaggggctcaacctcaacccctgtgagcacatcatggagaagatccaagctggccgccgcggcgaggacggcagcgacgaagatcacattctcatcaggaccatgc

SEQ ID NO: 64766 - DNA, 270 bp, Glycine max
  Clone ID: 700759077H1
tagcctcatgctcaacttcgtggattctaccaaatatcaaaactgagcatgattccagtggtttgtgtgatggaatggatacttcacaacaagcactactcaagggaagtgaaaatgtcagtggtggttgtggttattggtgtcggtgtttgcactgtaactgatgtaaaagttaacctcaaaggtttcatgtgtgcctgtatagcagttttgtcaacatctttacagcaaatttcaataggttctccttcaaagaaatatcaattggat

SEQ ID NO: 64767 - DNA, 273 bp, Glycine max
  Clone ID: 700759078H1
attgattacagcatcccaaatcaaagtcatactcagagttacctctctctcatttctgcaactgtcaggtcatgtggtcggagccacaacaaaaccgtcatcaacattatttagattttaaataaataaaaattcagatgagagagagagagagagaaataatatgcatggatagattaattagtggcgaaagtggagtatttatatctaattactattcaattatcttaatagccgcgcgcgagaaaagcaacagcgttatggcaagaagaa

SEQ ID NO: 64768 - DNA, 254 bp, Glycine max
  Clone ID: 700759079H1
cattcagcgtggacaagcagatagcgaaaaacctacaaggagagaacgaaggggaagacaagggagccattgtgacagtgaaaggaggtctgagcgtgataaaaccacccacggacgagcagcaacaaagaccccaggaagaggaagaagaagaagaggatgagaagccacagtgcaagggtaaagacaaacactgccaacgcccccgaggaagccaaagcaaaagcagaagaaatggcattgacgagaccata

SEQ ID NO: 64769 - DNA, 269 bp, Glycine max
  Clone ID: 700759080H1
tgtagctgtggggtgcagattgattactattcttgtgttggccttttcaggatgggcaagtgcaagggttgtgggcagataggaagaatgggaacaacaaatgggtcaatgagttcttatgaattttcgttgatgttgtctcctgttgtttctttttgggattgtatgttccgtaaaatgaggtattcctacagacctgagtgggtgtagtggttagaacgtaactttagtactagtctcaatactttaactaaatagagtatttagca

SEQ ID NO: 64770 - DNA, 275 bp, Glycine max
  Clone ID: 700759081H1
gtttggtttctcagagactggggaatctgtgcttctcattaagggtcctcagggaagaataaatagggctatttggggacctctcaacagaaccattattagtgccggtgaagatgctgttattcgtatttgggattctgagacgggaaaactgcttaaagagtcagacaaggaatctggccataaaaagaccgtgacatcacttgctaagtctgcggatggttcgcatttccttactggctcccttgacaagtctgctaggctttgggtactag

SEQ ID NO: 64771 - DNA, 275 bp, Glycine max
  Clone ID: 700759083H1
ttcgcctcacaccatgaaacccttctccgcttcggaatcgccttcatcctcctcctccattcctccctcgcttctcatatcccctaccccaaagcaatttccgatttgaaggatacaattgtgaagggatttgggttcacggcggaagatgatgttacgattacggggttcgatcctcgagacgccgaggtagggcattccgtggagtaccaattcgacctcgaaatcgatcacaaggttattcccttcaagctcctcgaagacgtcaacactgg

SEQ ID NO: 64772 - DNA, 272 bp, Glycine max
  Clone ID: 700759084H1
cctctgcaaaactttttatctgctggagatttagttacaacagatttgtcccaagacacaacagttgacattactagaaaactggcagctctgaattctgcatttagagatgaccgactcattatgagaaatcaagaaggtctagctttccctcgtggtccatatgatatgagggaacctggtattccatatcagaatcttaatgtccaacgatctcctcagatgcactctcagttgaatcacagtggtcaaatgtttaaccactggttctc

SEQ ID NO: 64773 - DNA, 260 bp, Glycine max
  Clone ID: 700759085H1
tacaataccaggtgattttgtcattggtgttaagttgacaaccataaacaatatgtgtgcatatgggctcaatcctggtatttcaggttctcgtcttttgggcaccattcctcagtccatttcacagcaaactgtttggaatcaaatggcaacagtgagaacaccattgaattttgattctagcaagcagagcttttgtcaattctctattgatcttcttggtggaggaattttagtggaccaaacgggagatgggtcac

SEQ ID NO: 64774 - DNA, 270 bp, Glycine max
  Clone ID: 700759086H1
ctgagccgattcggctcgagtgcagatagtgagaaacctacaagatgagaacgaagaggaggatagtgaagccactgtgacagtgaaaggaggtctaagagtcacagctccagccatgaggaagccacagcaagaagaagatgatgatgatgaggaagagcagccacagtgcgtggagacagacaaaggttgccaacgccaaagcaaaaggagcagagatggcattgatgagaccatttgcacaatgagacttcgccaaaacattgtcag

SEQ ID NO: 64775 - DNA, 274 bp, Glycine max
  Clone ID: 700759088H1
cttaattattaacacttccttagttcaatatgcgggaagcccttcactctctctctttcttccctttgcttgctactcttgtcgagtgcatgctttgctattagctccagcaagctcaacgagtgccaactcaacaacctcaacgcgttggaacccgaccaccgcgttgagtccgaaggtggtttgattcaaacatggaactctcaacaccctgagctgaaatgcgccggtgtcactgtttccaaactcaccctcaaccgcaatgcctccactt

SEQ ID NO: 64776 - DNA, 195 bp, Glycine max
  Clone ID: 700759089H1
taatgaactgtaattgtagtagtagacagtagcaccatgagctaggaacagctcatcaaacctccagggagcaggaccccatcaaatacggcgacgttttcaaagtctccgagaactcgctttcaaaccctcgcgccaagagacgcagctctcatgcaagctacggagaaccaagcattgggctcgactccaaaa

SEQ ID NO: 64777 - DNA, 267 bp, Glycine max
  Clone ID: 700759090H1
tctcccccaccatgctgcgctgattacctcatcgttatccttaacgggactgccattcttaccttggtgaacaacgacgaccgagactcttacaaccttcaatctggcgatgccctaagagtccctgcaggaaccacatactatgtggttaaccctgacaacgacgagaatctcagaatgataacactcgccatacccgttaacaaacccggtagatttgagagtttcttcctatctagcactcaagctcaacagtctcttgcaagg

SEQ ID NO: 64778 - DNA, 269 bp, Glycine max
  Clone ID: 700759091H1
actgaccaagccatggcgatgagaaccaaactttctttagctatctttttcttattacttttagccttattttcaaacctagcctttggcaaatgtaaagaaaccgaggtagaagaagaagaccctgagctcgtaacatgcaaacaccaatgccaacagccacagcaatacactgagggtgacaagcgggtatgcttgcaaagatgtgacaggtatcatcgtatgaagcaagagcgagagaaacaaatccaagaggaaatcgtgagaag

SEQ ID NO: 64779 - DNA, 269 bp, Glycine max
  Clone ID: 700759092H1
aacaactatgcgatgggtctcatgtgatgcaatatggtgataccaacatcacagctgaaaagctttatttataccaaggttttgatcctgccactgtgaacttccctccacaaaacggcaggctagaaactaaaatggaagttgttaaccaaagagatgcagaacttttgttcatgtggcaaatgtatcagagatcaaaccatcagtcagaaaataagacagacatcctcaaacaaattgcggagacagtgaagcataggaaacacata

SEQ ID NO: 64780 - DNA, 250 bp, Glycine max
  unsure (1)..(250): unsure at all n locations
  Clone ID: 700759093H1
cggctcgagcggctcgatctctagtacaccgtattaaagaatttaagatatactatgatgatagcgcggctcacattactgttgctggtangtgttttcctggcatcaggttctgtctcatttggcattgcgtattgggaaaagcagaaccccagtcacatcaagtgcctgcgaagttgcaatatcgagaaagactcctacaggaaccaagcatgctacgctcgttgctaactccttaaggtggatgaag

SEQ ID NO: 64781 - DNA, 231 bp, Glycine max
  Clone ID: 700759094H1
ctcgagccgctcgagccgcagtgcagcagcagcaacagcagcatcctccacagccacagcatctggatcacatcaatagcatgtttaatctcggggccgcctgtgcttggggacaatgatcgctgtcaaaatttgtatcagacttggttagcggtcgctcacgcgtgaagctgcaaaaccacgctgtgaagtgtaatgatagatcgtagtactgaaacttgggacttgggg

SEQ ID NO: 64782 - DNA, 257 bp, Glycine max
  unsure (1)..(257): unsure at all n locations
  Clone ID: 700759095H1
aatttttgacaaacctangacgcgctgcttcactattctccctatggagtttaatcttgtggttcgtcagaagtttttaaattttgtgaggttcattatgaagaaaagggacaagcttagttgtcaagttggaatcaacccatattctatggaatggactggtttggccaatagattactgagtaagggcaacgatattctgtgttgcgattatgctagttttgatggtttgattaccaagcaagttatgagcaaga

SEQ ID NO: 64783 - DNA, 270 bp, Glycine max
  Clone ID: 700759096H1
gccgttgaaaaactcttccgaaacgaaacatgtgagacctgtgacatttaccatgagccaatcccttgacgagtctcacacatcagacagaaacgatgatattgagagatatgctgaacctacacctactgcagccagtaactctttacaaccaacttcaggagaacaagaagcaaggcaatgatcttagagaactataggggttgttctgctcaaaaagagaagaatgtagaatttctgcttctatagaggaatgcttctattatagat

SEQ ID NO: 64784 - DNA, 253 bp, Glycine max
  Clone ID: 700759101H1
cggctcgagtcaaattccacgaccacgaccacaacacccggagagggaacgtcagcaacacggtgagaaggaggaagacgaaggtgagcagccacgtccattcccattcccacgcccacgccaacctcatcaagaggaagagcacgagcagaaggaggaacacgaatggcatcgcaaggaggaaaaacacggaggaaagggaagtgaagaggaccagatgaacgtgaacacccacgcccacaccaacctcatc

SEQ ID NO: 64785 - DNA, 248 bp, Glycine max
  Clone ID: 700759102H1
caggacggtggtcatggacgtcgaaatccgctaaggagtgtgtaacaactcacctgccgaatcaactagccccgaaaatggatggcgctaaagcgcgcgacctatacccggccgtcggggcaaggaccaagccccgatgagtaggagggcgcggcggtcgctgcaaaacccaggtcgcgagcctgggcaggagcggtcgtcggtgcagatcttggtggtagtagccaatattcacatgagaactttga

SEQ ID NO: 64786 - DNA, 261 bp, Glycine max
  Clone ID: 700759105H1
gctcggccttcggcacaaggatcatacatagtagtgtttgtgggttgcaaagatgcttgggggtcttctccataggggtcataagataaaagggacagtggtgttgatgcgcaagaatgtgttggacgtgaatagcgtaaccagcgttgggggaattattggtcaaggtctcgacttagttggctcaacactcgatactcttactgccttcttgggccgatccgtgtctctccagcttattagtgctaccaaagctgatgc

SEQ ID NO: 64787 - DNA, 246 bp, Glycine max
  Clone ID: 700759107H1
ccaagttcacaatcctcctcatctctcttctctactgcatcgcccacacttgcagcgcctccaaatggcagcaccagcaagatagctgccgcaagcagctccagggggtgaacctcacgccctgcgagaagcacatcatggagacgatccaaggacacggcgatgacgatgatgatgctgacgacgacaatcacattctcaggaccatgccgggaagaatcaactacataaggaggaacgacacga

SEQ ID NO: 64788 - DNA, 245 bp, Glycine max
  Clone ID: 700759108H1
cctcgacgaatcgctcgagcggctcgagctctccattgtctttgaacactcagctccatggccaagcttattctttccatttgtttccttcttttcagtggctgcttcgctctgagagagcaggcacagcaaaatgagtgccagatccaaaagctgaatgccctcaaaccggataaccgtatagagtcggaaggtgggttcattgagacctggaaccctaacaacaagccattccagtgtgccgg

SEQ ID NO: 64789 - DNA, 244 bp, Glycine max; identical to SEQ ID NO: 61139
  Clone ID: 700759110H1

SEQ ID NO: 64790 - DNA, 239 bp, Glycine max
  Clone ID: 700759111H1
gcacaatgatctcgctcacaatcctcctcatctctcatctcttctgcatcgcccacacttgcagcgcctccaaatggtagcaccagcaagattgctgccgcagcagctccagggggctgacctcacgccctacgacaagcacatcatggagcagatccaaggctgcggcgatgctcgatgatgatgatgacgacgacaatcacattctcaggaccctgcggggaagaatcaactacata

SEQ ID NO: 64791 - DNA, 224 bp, Glycine max
  Clone ID: 700759117H1
gcaaatgtggagatcttattcttcagaaaaacatcaaatggaaattgatagagatgaaaagaaaaagaaaagtgatggctctgggcctaatttggctggagatggagaacttgttgaagctcctctggggttgtttcctcggccttggcctacaaattctgatgcatcagagggtagccggttttcaaaagtcgttgagtattccggctgctaagcgtggtatt

SEQ ID NO: 64792 - DNA, 192 bp, Glycine max
  Clone ID: 700759118H1
gcaaattggatactgttactggccaatattatcctgagtgggctccaattaattgtcgagttcatcgacaaccaattcacatcactgaaggaaattatgtcacaaagcaagatgtcagcattgaatatgatgcatgtacaattccaaatgattgtggttccttggttgttgctcaggttgtaaatcacaaac

SEQ ID NO: 64793 - DNA, 246 bp, Glycine max
  Clone ID: 700759119H1
gcaaaatgaccaagttcacaatcctcctcatctctcttctcttctgcatcgcccacacttgcagcgcctccaaatggcagcaccagcaagatagctgccgcaagcagctccagggggtgaacctcacgccctgcgagaagcacatcatggagaagatccaaggccgcggcgatgacgatgatgatgatgacgacgacaatcacattctcaggaccatgcggggaagaatcaactacataaggagga

SEQ ID NO: 64794 - DNA, 241 bp, Glycine max
  Clone ID: 700759120H1
ggtccaacttgttagacctaataaacaaagttgtcatctctgatttgattgtttattaggtccaacttgttagaggaaaaccaattgttttcaacagtaggaaatatttaatttgacattttggttcttgtaattgttggagaataatagggcttgatgctcctaattgtaaatgtggaatattaatttggcagaaatttgccttcaattgtaccaaataccattttgaatttcgaaaaac

SEQ ID NO: 64795 - DNA, 243 bp, Glycine max
  Clone ID: 700759121H1
actgataaagctcatatcttccgtgctggtcttccaggggtgaagaaagaggatctgaaggtgcaggtggaggagaataagatcctgcagataagcggggagagggtgaaggagaacgaggacgagaacgacaagtgggaccgcgtcgagaggcagtgcggaagcttcctccgccgagtccggctgacggaggatgcgaactccaaccagatcagctgcaagctcgaaaacggggtgctgaac

SEQ ID NO: 64796 - DNA, 250 bp, Glycine max
  Clone ID: 700758513H1
cacgcccacaccaacctcatcaaaaggaagaggaaaagcacgaatggcaacacaagcaggaaaagcaccaaggaaaggaaagtgaagaagaagaagaagaccaagaccaggatgaggagcaagacaaagagagccaagaaagtgaaggttctgagtctcaaagagaaccacgaagacataagaataagaacccttttcacttcaactctaaaaggttccaaactctcttcaaaaaccaatatggccacgt

SEQ ID NO: 64797 - DNA, 253 bp, Glycine max
  Clone ID: 700758516H1
tttgactcttgaagccatttcaaaccaaggaaccatccgctttgtttgcaactcatgggtttataacactaaactttacaaaagcgtgcgcattttctttgccaaccatacatatgtacctagtgagacaccagcaccacttgtggagtacagagaagaagaattgaagagtcaaagaggcaatggaacgggagagcgcaaggaatatgataggatctatgattatgatgtctacaatgatttgggcaaccca

SEQ ID NO: 64798 - DNA, 159 bp, Glycine max
  Clone ID: 700758518H1
ttttgataaaccgctatcacaggttgccgcaccttaaaaccggaaacaaaagcaatcgttacttgatttcaagaatctctcaatttcttcctacttctttgtgtacaatttcttaaggtaaagaaaatcactctctgtgctggccacagacttcgtgaa

SEQ ID NO: 64799 - DNA, 251 bp, Glycine max
  Clone ID: 700758519H1
ctcgagtcggttcatgtggttggtgcaagcaagttgtctgatcatacgtgttttctggatgttaagggatactgtcgcgaagagaggagccacgaagggcttggacatgggtggttctctggcctaccaaaaatttgccaagacttgtgactgtgcctcacctagatcaactctgaagtgctggaaagaggaagatgaagaagagtagttttcttaagtgtctttattatgtccttgcgaaaataagtccg

SEQ ID NO: 64800 - DNA, 250 bp, Glycine max
  Clone ID: 700758520H1
agacactcctgttgttgccgtttctattattgacaccaacagcttggagaaccagctcgaccagatgcctaggagattctatcttgctgggaaccaagagcaagagtgtctaaaatctcagcaagagcaaggaggtcatcaaagccagaaaggaaagcatcagcaagaagaagaaaacgaaggaggcagcatattgagtggcttcaccctggaattcttggaacatgcattcagcgtggacaagcagata

SEQ ID NO: 64801 - DNA, 247 bp, Glycine max
  Clone ID: 700758522H1
cactcatcagtcatcaccatggccaagctagttttttccctttgttttctgcttttcagtggctgctgcttcgctttcagttccagagagcagcctcagcaaaacgagtgccagatccaaaaactcaatgccctcaaaccggataaccgtatagagtcagaaggagggctcattgagacatggaaccctaacaacaagccattccagtgtgccggtgttgccctctctcgctgcaccctcaaccgca

SEQ ID NO: 64802 - DNA, 251 bp, Glycine max
  Clone ID: 700758523H1
gctacagcgatggccataaccgccaccatttccgttcccttcacatcccccagtcgccgcactctcgcctccgtcaatagcctctctccgcgttctacccgatccactttgcccacaccgcaacgcactttcaaataccctaattcgcgcctcgtcgtgtcttccatgagcaccgaaacagccgtcaaaacttcatccgcctccttcctcaaccgcaaggagtccggcttcctccatttcgccaagtacca

SEQ ID NO: 64803 - DNA, 248 bp, Glycine max
  Clone ID: 700758524H1
caagcttttctttttcttgttctttaattttctgattttagcaaattaaaatagtagtgttattggtaggtcttggcaaagatgttttcagttccaggggtgtcgggaatgctgaacagaggaggagggcataagataaaagggacagtggtgttgatgaggaagaatgtgttggacttcaacagcgtggctgatcttactaaaggaaatgttgggggactcataggcaccggcctcaacgttgttgg

SEQ ID NO: 64804 - DNA, 248 bp, Glycine max
  Clone ID: 700758525H1
aaaattagggtttctcgatcttcttcatttgtcactgctctcaccgtttcagggttttaccttcccaacacgatacaagtcctatcccgattctggaaaggaggtgttttccctttgaatttcgcggacaactgttgactacgagaattgtgattgcctctgcgtccttcatgggctgatttggctgcaaattctgcagctgagaacgcaggtcctggttcttctgctaacaatgtgggaactggtag

SEQ ID NO: 64805 - DNA, 250 bp, Glycine max
  Clone ID: 700758526H1
ctcgagccggaattgctctcttgcaaattggatactgttactggccaatattatcctgagtgggctccaattaattgtcgagttcatcgacaaccaattcacatcactgaaggaaattatgtcagaaagcaagatgtcagtcattgaatatgatgcatgtataattccaaatgattgtggttccttggttgttgccaaggttggaaatcacaaacaaattgttggtttccatgttgctggaagcaaagga

SEQ ID NO: 64806 - DNA, 247 bp, Glycine max
  unsure (1)..(247): unsure at all n locations
  Clone ID: 700758529H1
gggaagatcaganagagagaaaacaaagggcggtggtgagtgcttctgcttcatcatcatcagagaatggcggctactgtgtcttctgcttggtcaaagcccggcgcgtgggccctagattccgaggaacacggcgccgagctccttccacacaacatacgaccctccnacgacaagncagtcgntgacttctcctcacttgccgccgccgccgccaccaagtccaagaagaagatggcccagacct

SEQ ID NO: 64807 - DNA, 249 bp, Glycine max
  Clone ID: 700758530H1
ggattcagcaggaacattttagaggcctcctacgataccaaattcgaggagataaacaaggttctgtttagtagagaggaagggcagcagcaaggggagcagaggctgcaagagagcgtgattgtggaaatctcgaaggaacagattcgggcactgagcaaacgtgccaaatctagttcaaggaaaaccatttcttctgaagataaaccttttaacttgagaagccgcgaccccatctactccaacaag

SEQ ID NO: 64808 - DNA, 238 bp, Glycine max
  Clone ID: 700758532H1
ctcgagccgccttaaacactcatcagtcatcaccatggccaagctagttttttcccttagttttctgcttttcagtggctgctgcttcgctttcagttccagagagcagcctcagcaaaacgagtgccagatccaaaaactcaatgccctcaaaccggataaccgtatagagtcagaaggagggctcattgagacatggaaccctaacaacaagccattccagtgtgccggtgttgcc

SEQ ID NO: 64809 - DNA, 251 bp, Glycine max
  Clone ID: 700758533H1
aaattatgtcagaaagcaagatgtcagcattgaatatgatgcatgtacaattccaaatgattgtggttcattggttgttgccaaggttggaaatcacaaacaaattgttggtttccatgttgctggaagcaaaggaagactgggatatgcttcattgataccatatgttgagccagttgtgcaagctcaaagtgctgaagtttactttgacttcttccctgtggaggttgatagtcaagagggagttgctc

SEQ ID NO: 64810 - DNA, 253 bp, Glycine max
  Clone ID: 700758534H1
ctcagaatgataacactcgccatacccgttaacaaacccggtagatttgagagtttcttcctatctagcactcaagctcaacagtcctacttgcaagggttcagcaagaatattctagaggcctcatacgacaccaaattcgaggagataaacaaggttctgtttggtagagaggaggggcagcaacaaggggaggagaggctgcaagagagtgtgattgtggaaatctcaaagaaacaaattcgggaactga

SEQ ID NO: 64811 - DNA, 251 bp, Glycine max
  Clone ID: 700758535H1
cattctcttgggaatttctcaagattttgaaattgctggtaatactcttatgccagctttttctgttccacaggctactgccagatcttctgaaaatgcggaatcctctgcatgatctggaatttgtgttttctttcatttgtccgattgtttacattcaataaaggaaattaggcatgaccctcttgttgagtatgctctgcctatttgaaaatttccacacctcttttaattgtcgtaatgatgtgtga

SEQ ID NO: 64812 - DNA, 248 bp, Glycine max
  Clone ID: 700758538H1
cagacttcaatctggtgatgccctgagagtcccctcaggaaccacatactatgtggtcaaccctgacaacaacgaaaatctcagattaataacactcgccatacccgttaacaagcctggtagatttgagagtttcttcctatctagcactgaagctcaacaatcctacttgcaaggattcagcaggaacattttagaggcctcctacgataccaaattcgaggagataaacaaggttctgtttagta

SEQ ID NO: 64813 - DNA, 247 bp, Glycine max
  Clone ID: 700758540H1
ctcgagccgtgttactccttctctcgttgattcggatctagagtctttttttcactcttcagttctcgttgttgttcttcgctttcctgaaactagggttttcaatttcgattcattcgttaataattaaagatgtttgggagggcaccgaagaagagcgataatacgaggtactacgaaatcctcggcgtctcgaagaacgcttcgcaggatgatctgaagaaggcttacaagaaagccgccatca

SEQ ID NO: 64814 - DNA, 246 bp, Glycine max
  Clone ID: 700758541H1
ccaaaatctaccatagcggttccattttctgaatttctcgagcgaacttcgcccagttctagggttccccactgccatgtaccttgccgaattaacctccgaacaggttctgaggagggacatcccatgggagacctacatgtccaccaagctcatctcagggacgagccttcagctcttaaggcgctacgatcaccgaccagaaagtcacagagcacagttgctcgatgatgatggtccctctta

SEQ ID NO: 64815 - DNA, 246 bp, Glycine max
  Clone ID: 700758542H1
attccattgcccccaagcgggagaagacacatggtgaagttgaaaggaggattgtttcacaacttttgactcttatggatggattaaaatctcgtgctcatgttattgttattggagctactaatcgtccaaatagcattgacccagcattgagaaggtttggtagatttgatagggaaattgatattggtgttcccgatgaagttgggagacttgaagtccttcgcatacatactaaaaacatga

SEQ ID NO: 64816 - DNA, 245 bp, Glycine max
  Clone ID: 700758543H1
gtgacttcgccaggctcaacttcccaaacctgcgacaccagggttcctccgtcggtggtgatttcggggagtacaagcctcttcattccgctgttgacgccaagcttcaggccatttgcgaaggcctggctgagctgcagaaacaggggaagaccgagaagcctccgaggaagtcgcgttccaaactcgcggagaaggttgtttccgacaaggagaacaacaactcttgtaaggtggaagctgcg

SEQ ID NO: 64817 - DNA, 230 bp, Glycine max
  Clone ID: 700758544H1
gctgagcatccacaaagtaggaggggaataagggaagaaagggtcctttgtcttcaattttgagggctttttactgaataagtatgtactaaaatgtatgctgtaatagctcatagtgagcgaggaaagtatcgggctatgtaactatgactagagcttcaactatgaataaataaatcgacagcatatgatgcttttgttttgtgtcaaaaaattacacaaagggggcc

SEQ ID NO: 64818 - DNA, 212 bp, Glycine max
  Clone ID: 700758545H1
gctgagcatccacaaagtaggaggggaataagggaagaaagggtcctttgtcttcaattttgagggctttttactgaataagtatgtactaaaatgtatgctgtaatagctcatagtgagcgaggaaagtatcgggctatgtaactatgactagagcttcaactatgaataaataaatcgacagcatatgatgcttttgttttgtgtcaaaa

SEQ ID NO: 64819 - DNA, 246 bp, Glycine max
  Clone ID: 700758546H1
tgaaagtggtagtagagtcacatgggaaggttgcatcgtctagctcgatatcaacgatggtgaccgtctcgttttcgctcgtctctccccctctgcgaaattgaagattgggaataagaactgctctctgcaaccgttaatcggtcgtcccttcggtactgcttttcaagtcgatggaccttatctctctcccgcacaagttaatggtactaatggtgaagaattaagagatgttcaagtaagtgt

SEQ ID NO: 64820 - DNA, 247 bp, Glycine max
  Clone ID: 700758547H1
atcaccattactgatggtattgacaagactagtgcaactttgcaatttagaaagttagcagattgtgatttctcaggacgtacccacaaaagcttagagctctgcttaaagtttctcttgagaaatcacaatctgctaactttctaaagagaaactttaagcagatgtctaatgttttgtgggtagctcctgaggacaaggcgagtttatggtcacaacttcattatgtttcgtgtaataatctgga

SEQ ID NO: 64821 - DNA, 112 bp, Glycine max
  Clone ID: 700758548H1
ctattcgtcattgccgcaaatgaattccgtcgcttctcatgcatgatcgcaccttcaactctcttcttcttcaccatggctttacctcaaggttttggcgctgtggagttcg

SEQ ID NO: 64822 - DNA, 250 bp, Glycine max
  Clone ID: 700758549H1
acgaaatctagtacgggtagtgcagaggggatttctgagaaaacagattccaaggatgacaacttcgtatttgttgccggtgctactggtagagttggttcacggacagtgagggagcttataaagcttggatttagagtcagagctggagtgcggagtgctcagagggccggtgcattagttcagagtgttgaacaattgaagcttgatggtgcaagtggagggggacaagcccagctgtagagaagct

SEQ ID NO: 64823 - DNA, 247 bp, Glycine max
  Clone ID: 700758550H1
gtaaaaatagcaagcctcaagctactgcaatgcatgttggagctatagaaattatcattgatagtttcgcaagtcctgactgcaacatagttggtgcaatgcttttggttgatacttatcataccaatcctgaaaatgcagttcgtagtatttttgttgcgcctttcagaggcggaaggcccattcgggtggttacatttccgaataccattgtgcagattgaaccagacatgaattcaaggtttca

SEQ ID NO: 64824 - DNA, 73 bp, Glycine max
  Clone ID: 700758551H1
gtaactaacaaccttgatatccccaagttatccgcatgttgaaagaaagtttatatattaatcatatttcttc

SEQ ID NO: 64825 - DNA, 245 bp, Glycine max
  Clone ID: 700758553H1
ggcttggcaacaaaccatactggatcatcaagaattcgtggggggagaaatggggagaagatggctattacaagctctgcagagggcatggcatgtgtggaataaacactatggtttctgctgcaatggtgcctcaaccacaaacaacacctacaaagaattatgcttcttattagctatgcacttaaggaaatctaaataaatatttttcattctaggtgatgtatcatgtatgtaccaaaata

SEQ ID NO: 64826 - DNA, 244 bp, Glycine max
  Clone ID: 700758555H1
caactactactactactgcacacactctctctctctctctcattgtatggccgccaattcgagtagccgagggatcaccgccttggggaagcgagtcgccaaccagatctggacttccaaccccccctcagctcctctcacttccaggaggggagcaatagcagctgcatacagtagcagcggcgggtcagtgtatgacaagaaccctgatgatcagatccactctggggcggtcccagacgat

SEQ ID NO: 64827 - DNA, 245 bp, Glycine max
  Clone ID: 700758556H1
attctactaaggttaataagtttgcaaaaattatgaaccttagacaaagtgttgttggtgatcttaaacttcttactgatgggaagttgtatgagggtaagcatattcctgtatctaatattagtgcaggggagaatcatgtagttcaaatacccctaatggcacaggaggaaattctgtcttctagtgcaagtgctttcagaactgcaatggtgagtagaaatagcaagcctcaagctactgca

SEQ ID NO: 64828 - DNA, 246 bp, Glycine max
  Clone ID: 700758558H1
taaaattcttccaccaagttatgggtttccttgtgttgcttcttttctccctcttaggtctctcttctagttccagcatatcaactcatcgttccatattggaccttgacctaaccaagtttaccacacagaaacaggtgtcttcactgttccaactatggaagagtgagcatggacgtgtctaccataaccacgaagaagaggcaaagagacttgagattttcaagaataacttgaactatatca

SEQ ID NO: 64829 - DNA, 244 bp, Glycine max
  Clone ID: 700758559H1
tgaacactcatcaccatggccaagcttgttctttccctttgtttccttcttttcagtggctgcttcgctctgagagagcaggcacagcaaaatgagtgccagatccaaaagctgaatgccctcaaaccggataaccgtatagagtcggaaggtgggttcattgagacctggaaccctaacaacaagccattccagtgtgccggtgttgccctctctcgctgcacccttaaccgcaatgcccttc

SEQ ID NO: 64830 - DNA, 244 bp, Glycine max
  Clone ID: 700758560H1
agataaaataccaaccatggcaaccatttctactgatcaaccaagaggatcctactcctatggaacctcctatggagcaccctatggaaccacctatgagaccaacagcagcattaacaaccctccttcacgccaaaccgtgaagttcataactgctgcaactattggcatcacactcttactcctgtctgggttgaccctcacaggcactgtcataggtttgatcattgcaacccctcttctt

SEQ ID NO: 64831 - DNA, 241 bp, Glycine max
  unsure (1)..(241): unsure at all n locations
  Clone ID: 700758561H1
atggtggaaattgactttcccccagtgcacttcccgaagtgttaaggagaatggcctcgtttgctatagggtnngangaggctgggtggcaagagaatggctgattctcatggaatatggccaaatggctggttgctttcaatgtgggagatatttgtgttgggagatctcgtcttgggaagtttctgaggatgacttctgccctacattaagatgtacagtctctttcttcatagcattt

SEQ ID NO: 64832 - DNA, 244 bp, Glycine max
  Clone ID: 700758563H1
ccttaataaataatttaagatactatgatgagagcacggttcccattactgttgctgggacttgttttcctggcttcagtttctgtctcatttggcattgcttactgggaaaaagagaaccccaaacacaacaagtgtctccagagttgcaatagcgagagagactcgtacaggaaccaagcatgccacgctcgttgcaacctccttaaggtggagaaagaagaatgtgaagaaggtgaaattc

SEQ ID NO: 64833 - DNA, 244 bp, Glycine max
  Clone ID: 700758564H1
ctggtagacagcattctagtggtggctacgatggtgacactaataaacatcatggaactactggtggctataatgatgacaccaatagacatcatggaactaccggtgtctatggtatagacaccgataggcaacaacatgggactactggtggctatgccggtgacactggtaggcaacatgggaacatcggtggcccttactatggaaccaacaccgcagacaccggtactggtcccagaag

SEQ ID NO: 64834 - DNA, 248 bp, Glycine max
  Clone ID: 700758565H1
cgagattgaggcgggggttgatttggaagaaacccagctaaggtaattcctcgcaacccctaactaaaccttcaaaggatcatcatgggcagtcacaatgctttggctgccactttcggaatattaggtaacatcatttctgtgatggtgtacttggctccggtgccaacgttttaccggatatacaaaaagaaatgcacggacggtttccactcgctgccatacttgttgtcattaatgagttctat

SEQ ID NO: 64835 - DNA, 221 bp, Glycine max
  Clone ID: 700758566H1
caaaacttgacccttaaaaagagatagtaactccaactccaagtcacattggtgacaaagttagaaacaaggagaaagaaagaagatggcaggaaagaaaatcccagatgtgttgctgaattcaggacacaaaatgccagttataggcatgggaacttcagtggagaatcgtccatcaaatgagacccttgcttctatctatgttgaagccattgaggtgg

SEQ ID NO: 64836 - DNA, 239 bp, Glycine max
  Clone ID: 700758570H1
gggaggatctggtgcaaagaatgctattctcatgaatatgccaaatgctgttctttcaatgtggagatattttgttggagatctcgtctttgaagtttctaagatgacttctccctacattaaatgtacagtctctttcttcatagcatttggaaatttggctgatgacaccatcaattttgaggcttttccccacaagctggtgcactttggagagattcaggaaaaagttgtattga

SEQ ID NO: 64837 - DNA, 243 bp, Glycine max
  Clone ID: 700758571H1
aactgactttcccccagggcacttcccgaaatgttaagagaatgcctctttctatagggggaggagctggtgcaaagaatgctattctcatgaatatgccaaatgctgatctttcaatgtggagatattttgttggagatctcgtctttgaagtttctaagatgacttctccctacattaaatgtacagtctctttcttcatagcatttggaaatttggctgatgacaccatcaattttgagg

SEQ ID NO: 64838 - DNA, 243 bp, Glycine max
  Clone ID: 700758572H1
aagcgatggagtcttggtccattcgaatccgaagatacgaaacgcttccaacaacggctaaagacttcgagtctcgttggaaggccttctcccactgaatccatccaacggtggcctcgactacttgcaggcacgtgtggactcttgcacggtggaggctatgctatcttggaagccaccaatttatttattttggtttctctatgctttttttatatgatatgtaattaatctttgtttttc

SEQ ID NO: 64839 - DNA, 243 bp, Glycine max
  Clone ID: 700758573H1
tctcgagccgattcggctcgaggaatgatcctcctatttccaattactccttcattagagatcgaaaatgatgttaccaagagtaacagtaaatgcagtagctcaagcagctctagtagtgaatctggctcttcatccagtgattcagactcagttagttcatctggtagtgagttggatatggctaaaacatcagaacctcttagtgccaccaaggaaaacataggatttggcttgacttca

SEQ ID NO: 64840 - DNA, 242 bp, Glycine max
  unsure (1)..(242): unsure at all n locations
  Clone ID: 700758576H1
ggggcaacaccagcagcaggaggaagaaggtggcagtgtgctcagtggcttcagcaaacatttcttagcacaatccttcaacaccaacgaggacaaagctgagaaacttcggtctccagatgacgaaaggaagcagatcgtgacagtggagggaggcctcagcgttatcagccccaagtggcaagaacaataagacgacatcgangatgaagacgaagaatatgaacaaactccctcttatc

SEQ ID NO: 64841 - DNA, 74 bp, Glycine max
  Clone ID: 700758577H1
gtcagaaggagggctcattgagacatggaaccctaacaacaagccattccagtgtgccggtgttgccctctctc

SEQ ID NO: 64842 - DNA, 228 bp, Glycine max
  Clone ID: 700758578H1
ggctcgaggtttaagatctctctctaaaatatcaaatatgtcaatcgcattttcccgatagataccaatgctaggcagctaaaatagcaacatttccaaggcacaagcaaatcttgctattttagctgccctgcagtggtttctatcgggaaaatggattgacatatttgatgtttaagatctctctctaaaataactttctttttcatatattaattgactgccgat

SEQ ID NO: 64843 - DNA, 242 bp, Glycine max
  Clone ID: 700758579H1
ttccgttctcaaactcactcacactctctcttctgctagattctacgattcccgaagtgccttcctcctcctcctccttcttcccctctaatcggatcctaatccaaatccaaatccagttcaaagaagatgcaatacaagaacctggggcgatctggcctgaaggtgagccagctctcctacggcgcgtgggtgagcttcgggaaccagctggacgtgaaggaggcgaaggccctcctaca

SEQ ID NO: 64844 - DNA, 238 bp, Glycine max
  Clone ID: 700758581H1
aacactttccttagttcaatatggggaagcccttcttcactctctctctttcttccctttgcttgctactcttgtcgagtgcatgctttgctattacctccagcaagttcaacgagtgccaactcaacaacctcaacgcgttggaacccgaccaccgcgttgagtccgaagctggtcttattgaaacatggaactctcaacaccctgagctgcaatgcgccggtgtcactgtttccaa

SEQ ID NO: 64845 - DNA, 243 bp, Glycine max
  Clone ID: 700758582H1
tcctagtataccttaataaataatttaagatactatgatgagagcacggttcccattactgttgctgggacttgttttcctggcttcagtttctgtctcatttggcattgcttactgggaaaaagagaaccccaaacacaacaagtgtctccagagttgcaatagcgagagagactcgtacaggaaccaagcatgccacgctcgttgcaacctccttaaggtggagaaagaagaatgtgaaga

SEQ ID NO: 64846 - DNA, 242 bp, Glycine max
  Clone ID: 700758583H1
cggagatctctttcatggcttttactctcgagacttctgactcttctgttacggtcacctcctccacaaccaatcctctttctcaagacatctctaatgcctattatgttcaccctaacgagaatccctctgcgaaactcattactgctcttcttgatggttaggctcaagcgatgacgttggtattgaagatgaagaacaaaattggcttcgtggactgcacgatttcaaaacctcatgag

SEQ ID NO: 64847 - DNA, 158 bp, Glycine max
  Clone ID: 700758584H1
tgaaattttgataaaccgcgatcacaggttgccgcaccttaaaaccggaaacaaaagcaatcgttacttgatttcaagaatctctcaatttcttcctacttctttgtgtacgatttcttaagggaaagaaaatcactctctgtgctggccacagactt

SEQ ID NO: 64848 - DNA, 238 bp, Glycine max
  Clone ID: 700758585H1
gagacctccttccatagcgaattcgaggagataaacagggttttgtttggagaggaacaggagcagaggcagcaagagggagtgatcgtggaactctcaaaggaacaaattcggcaactgagcagacgtgccaaatctagttcaaggaaaaccatttcctccgaagatgaaccattcaacttgagaagccgcaaccccatctattccaacaactttggaaagttctttgagatcaccc

SEQ ID NO: 64849 - DNA, 237 bp, Glycine max
  Clone ID: 700758586H1
cttgggcgttggtgcaaatgtttgcttcgttaattttctctggagacgacaggctcactgagaaaacaatttttacttgcagagatttggacatcttggttgtttattatacaatagcaactcaatttagaaaatttctaccgcattacattaggtggcatctgtataccttgttgatctacattctcccatcttttctcactgctgaaattaaatataagcggaatctgagtaata

SEQ ID NO: 64850 - DNA, 240 bp, Glycine max
  Clone ID: 700758587H1
agaagccacagtgcaagggtaaagacaaacactgccaacgcccccgaggaagccaaagcaaaagcagaagaaatggcattgacgagaccatatgcaccatgagacttcgccacaacattggccagacttcatcacctgacatctacaaccctcaagccggtagcgtcacaaccgccaccagccttgacttcccagccctctcgtggctcagactcagtgctgagtttggatctctccgca

SEQ ID NO: 64851 - DNA, 242 bp, Glycine max
  Clone ID: 700758588H1
tgtagtagtgtctttgggttgcaaagatgcttgggggtcttctccataggggtcataagataaaagggacagtggtgttgatgcgcaagaatgtgttggacgtgaatagcgtaaccagcgttgggggaattattggtcaaggtctcgacttagttggctcaacactcgatactcttactgccttcttgggccgatccgtgtctctccagcttattagtgctaccaaagctgatgccaacgga

SEQ ID NO: 64852 - DNA, 65 bp, Glycine max
  Clone ID: 700758589H1
caaagatcatacatagtagtgttggtgggctgcaaagatgcctgcgggtcttctccataggggtc

SEQ ID NO: 64853 - DNA, 240 bp, Glycine max
  Clone ID: 700758590H1
taacactttccttagttcaatatggggaagcccttcttcactctctctctttcttccctttgcttgctactcttgtcgagtgcatgctttgctattacctccagcaagttcaacgagtgccaactcaacaacctcaacgcgttggaacccgaccaccgcgttgagtccgaaggtggtcttattgaaacatggaactctcaacaccctgagctgcaatgcgccggtgtcactgtttccaaa

SEQ ID NO: 64854 - DNA, 240 bp, Glycine max
  Clone ID: 700758591H1
acagtacacacactagaagaataatggcttccatcctccactactttttagccctctctctttcttgctcttttcttttcttcttatccgactcagtcacccctacaaaaccaataaaccttgttgttctacccgttcaaaatgatggttccacagggctccattgggccaacctccaaaaaagaacccctctaatgcaagtaccagtcctggtggacctcaatggaaatcacttgtggg

SEQ ID NO: 64855 - DNA, 72 bp, Glycine max
  Clone ID: 700758592H1
cagagggttaattgtggagtattttggaaggatgtcttacgttgctcataacgttaatcagccccaagagaa

SEQ ID NO: 64856 - DNA, 238 bp, Glycine max
  Clone ID: 700758593H1
agcagaaggagcaaaagcaatggcgccgaagaagccgagaaccacgacaaggaaccctgatttggttagggggattggcaagtattcgaggtcgcagatgtaccacaagaggggcatctgggccatcaaggccaaaaacggtggcgttttgccccgccacgatcccaagcccaagcccgaggccccggcccagaagccgcccaagttctaccccgcggacgatgttaagaagcccctc

SEQ ID NO: 64857 - DNA, 239 bp, Glycine max
  Clone ID: 700758594H1
cctcttcatatacagtacacacttcagctggtggtagcctggtagatagtgtgcttccaaaatgaagaacaaaaggaagactttactattgctgctgctcatggctgcaactctcttttgcatgccaattgtgtcgtatgctgtttctaatgtcaacattcaagaccatctcaccaatatttctgagctggtaaaaggtccaaatagaaggcttttgtcatttgtggattgtggagaga

SEQ ID NO: 64858 - DNA, 242 bp, Glycine max
  Clone ID: 700758595H1
caacactcttcccttctcctcttcaatcctttctcgccagaagctcactcgccggagcctatcccgctccgtcctccgtcctaccgccggcgaactttccggcagcgtcgacgacgatgaagaatcgggcgaattggacgacctcgatctcgtcgccctcgagcaagaagccaaggatgccgtcgaagcgtattcaagctctctgtctcaaattttgagcattgaagacgaggagaaaagtg

SEQ ID NO: 64859 - DNA, 241 bp, Glycine max
  Clone ID: 700758596H1
ctcgagccgctttctcaggttctggtttttgattttcaaccaaaagatcctgaagatatatatgtggcactagcggctctatatggtagagcagtgccaggtgagattaattaccgagattactagtctcacgtttacagaaagttaacttcttctgaatgctattgaatattaattaccgagattgtgcatgcatgatcaagtgtaaacagctattatttgcaaaatcttgaagatcatg

SEQ ID NO: 64860 - DNA, 249 bp, Glycine max
  Clone ID: 700758601H1
cttaattattaacacttccttagttcaatatggggaagcccttcactctctctctttcttccctttgcttgctactcttgtcgagtgcatgctttgctattagctccagcaagctcaacgagtgccaactcaacaacctcaacgcgttggaaccgaccaccgcgttgagtccgaaggtggtttgattcaaacatggaactctcaacaccctgagctgaaatgcgccggtgtcactgtttccaaactcac

SEQ ID NO: 64861 - DNA, 277 bp, Glycine max
  Clone ID: 700758602H1
tctctggggatggtgaagagatgacactgattccgggaaccagtgttgaagaggcttacaacaagctaatagttgaacttgagaaaagtgttcctacattggttggcattgaatgtcccaaggatgagaaacttcctcgtcgcaaaattttgacaaacctaagacgcgctgcttcactattctccctaatggagtttaatcttgtggtccgtcaaaagtttttaaattttgtgaggttcattatgaagaaaagggacatcttagttgtcaagttgga

SEQ ID NO: 64862 - DNA, 208 bp, Glycine max
  Clone ID: 700758604H1
taacaattccttcacttgcagcactgttgcatcatcatcttcattgcaaaaccctaaacttcaccttcaaccatgaccacacaagtaccaccacacagtgtccaagtccacacaacaacacaccgctacgaagctggcgtcgtcccccccggagccgtttcgaaccgccgcgttatgaagccggcgtcaaagcgccctccatttacca

SEQ ID NO: 64863 - DNA, 256 bp, Glycine max
  Clone ID: 700758605H1
ttggcattgcttactgggaaaaagagaaccccaaacacaacaagtgtctccagagttgcaatagcgagagagactcgtacaggaaccaagcatgccacgctcgttgcaacctccttaaggtggagaaagaagaatgtgaagaaggtgaaattccagaccacgaccacgaccacaacacccggagagggaacctcagcaacccggtgagcaggaggaagacgaagatgagcaaccacgtccaatcccattcccaggc

SEQ ID NO: 64864 - DNA, 280 bp, Glycine max
  Clone ID: 700758607H1
attttggttaagagtcttgaaaaagcaagagaaaaaaaaataccaaccatggcaaccatttctgatcaacctagagggtcctactcctatggaacctcatatggagcaccctatggaaccacgtatgagaccaacaccagcattaacaacccacctcacgccaaacagtgaagttcataactgctgccactattggcatcacactcttgctcctgtctgggttgaccctcacaggcactgtcataggtttgatcattgcaacccctcttcttgttatctt

SEQ ID NO: 64865 - DNA, 276 bp, Glycine max
  Clone ID: 700758608H1
ggacagtgagaaaactttgccaaataatttttctgcagaattgctctcttgcaaattggatactgttactggccaatattatcctgagtgggctccaattaattgtcgagttcatcgacaaccaattcacatcactgaaggaaattatgtcagaagcaagatgtcagcattgaatatgatgcatgtacaattccaaatgattgtggttcattggttgttgccaaggttggaaatccacaaacaaattgttggtttccatgttgctggaagcaaagg

SEQ ID NO: 64866 - DNA, 281 bp, Glycine max
  Clone ID: 700758609H1
attggtccttaaacactcatcagtcatcaccatggccaagctagttttttccctttgttttctgcttttcagtggctgctgcttcgctttcagttccagagagcagcctcagaaaaacgagtgccagatccaaaaactcaatgccctcaaaccggtaaccgtatagagtcagaaggagggctcattgagacatggaaccctaacaacaagccattccagtgtgccggtgttgccctctctcgctgcaccctcaaccgcaacgcccttcgtagaccttccta

SEQ ID NO: 64867 - DNA, 277 bp, Glycine max
  Clone ID: 700758610H1
ctaaaccctactcattctccatacctcaacgaagaggttaaagagacggcaacactttgctgtccgccttgaccgagcagagcttcgtcttggccctcgattttgccctaaagtactctcagtcacaacagacaccgtcgtcgtcgtcgtcgtcacaatggcaccgaagcagaccaaggctgagaagaagatcgcttacgatgcgaactgtgcgacctaatggaggagtacggccagatcctcgttgtgaactccgataacgtgggatcgaaccact

SEQ ID NO: 64868 - DNA, 242 bp, Glycine max
  Clone ID: 700758611H1
cctggttcgcgttgcgcaccggcctctatagcgagcttgaaccatcttcagcttcagctactttgcactaacaaagcgccccacgttctgagacaaacccagtatgctatctgccatgggggatcagaaagtttcgatttttcatgattgtgtataactgcacaaagaaggtagtgaagcaatgcgtagagcgatcgcgtttctcgttcacccacgattcctccttctcttccttgttctct

SEQ ID NO: 64869 - DNA, 282 bp, Glycine max
  Clone ID: 700758612H1
taaaccctactcattctccatacctcaacgtagaggttaaagagacggcaacactttgctgtccgccttgaccgagcagagcttcgtcttggccctcgattttgccctaaagtactctcagtcacaacagacaccgtcgtcgtcgtcgtcgtcataatggcaccgaagcagaccaaggctgagaagaagatcgcttacgatgcgaactgtgcgacctaatggaggagtacggccagatcctcgttgtgaactccgataacgtgggatcgaaccagctccaga

SEQ ID NO: 64870 - DNA, 267 bp, Glycine max
  Clone ID: 700758613H1
ggaaaagatctcgcaatggttaaagttaatgtagcatgtgctgctgttggcttgacatcaagttacactccaactccattgttggaatctggtttgcaaaaagacagagggttaattgtggaatattttggaaggatgtcttacgttgctcataagttaatcagccccatgagaaagatttgttggagggaaatttttcctttgatattaaatctcgctctagattggataaagtatcctcgtacatagcacaatttgttagtggaa

SEQ ID NO: 64871 - DNA, 283 bp, Glycine max
  Clone ID: 700758614H1
ctcttcctcaccgattgctagaatggaatttcgatgctcagtcatctcttttaccattctcttctctcttgctcttgcaggagagagccatgtccatgcatcgctacctgaggaagattattgggaagctgtttggccaaacactcccattcccatgcactgcgagagcttctaaagcctctccctgcaggtgttgaagtcgatgaactccctaagcaaattgatgatacacagtacccaaaaacattcttctataaagaagaccttcatccaggcaaaacat

SEQ ID NO: 64872 - DNA, 275 bp, Glycine max
  Clone ID: 700758615H1
cttcgagggtttgggtttctcttcctcccttggagaaaaagaagagccaccgctgcgacgccgttcgtgcatttttgaggtgccgctgtcatgtttgggcgtggtggaccaaggaggagtgataactccaaatattatgatattctcgggatttccaaaatgccagtgaagatgaaatcaagaaggcctatagaaagggcggctatgagaaccatccagataagggaggagatctgaaaagtttaaggagttaggtcaagcatatgaagttttaa

SEQ ID NO: 64873 - DNA, 284 bp, Glycine max
  Clone ID: 700758616H1
ttcagaactgcaatggtgagtagaaatagcaagcctcaagctactgcaatgcatgtgggagctatagaaattatcattgatagtttcgcaagtcctgactgcaacatagttggtgcaatgcttttggttgatacttatcataccaatcctgaaaatgcattcgtagtatttttgtcgcgcctttcagaggcggaaggctattcgggtggttacattccgaataccattgtgcaaattgaaccagacatgaattcaagggttcagcttttgagtaccactaccat

SEQ ID NO: 64874 - DNA, 277 bp, Glycine max
  Clone ID: 700758617H1
acctccgccgtcaacggcgtcttgatcggtcgcatctccgcttccaacgacgtcgtcgagatcgccgatgccgtccctctcttccactctcacatcccccttcttccccaattggagatatctctcatcatgatagaggaatatttttctgctaagggttgaacatagtgggctattttcacgcgaatgagagatctgatgacagtgagcttggtagtgtggcgaagaatattggtgaccacatttgccgctactttccccaagccgccgttctatt

SEQ ID NO: 64875 - DNA, 167 bp, Glycine max
  Clone ID: 700758618H1
gcgagcggccgcccttttttttttcttgaattgagagcggtcttctagcgtttcttctcaaaccccgtcatcagacaagttcgattggaaagtgcatttgcacatttccaaaatgtagtatttagaactaaattcttttttttgtaattcaacaggtgctatgtcat

SEQ ID NO: 64876 - DNA, 264 bp, Glycine max
  Clone ID: 700758619H1
cattctcttgggaatttctcaagattttgaaattgctggtaatactcttatgccagctttttctgttccacaggctactgccagatcttctgaaaatgcggaatcctctgcatgatctggaatttgtgttttctttcatttgtccgtttgttaattcaataaaggaaattaggcatgaccctcttgttgagtaatgctctgcctatttgaaaatttcaacacctctttaaatggtcgtaatgatgtgtgaagtgggtgtaattt

SEQ ID NO: 64877 - DNA, 267 bp, Glycine max
  Clone ID: 700758621H1
gtcattctcgcccttgtcgccaccttcggcagcatcatcaacagagtcactatcttcatcatccgcttccgcgccaaagccccttctctcccatccctaaccctaaacgacgacaatttttacacctcctcctcctctgacgacgacgacgacgacgataacgacgacgacctaacctactcctcttccgagcccgaagacgagccctccgcgtcttccagtttcatccgtttggacgactatttccgactcagaggaaccgataat

SEQ ID NO: 64878 - DNA, 276 bp, Glycine max
  Clone ID: 700758622H1
caatgttatcggactccttaacttcctcaccttcctcttgcgcatcccgatcctggtggccggagtgaggctgagcaagcaaggcgccaccgagtgcgagcggtggctggagaagcccgtcatcgcgctcggcgtcttcctcatgctcgtctactcgccggcctcgtcggcgcgtgctgccgcgtgtcgtggctcctctggctctacctcttcgtcatgtttgtcctcatcgttcttctcttcgccttcaccattttcgctttcgtcgttaccaac

SEQ ID NO: 64879 - DNA, 273 bp, Glycine max
  Clone ID: 700758623H1
attgtctttgaacactcatcaccatggccaagcttgttctttccctttgtatccttcttttcagtggctgcttcgctctgagagagcaggcacagcaaaatgagtgccagatccaaaagctgaatgccctcaaaccggataaccgtatagagcggaaggtgggttcattgagacctggaaccctaacaacaagccattccagtgtgccggtgttgccctctctcgctgcacccttaaccgcaatgcccttcgtagaccttctacaccaacggt

SEQ ID NO: 64880 - DNA, 275 bp, Glycine max
  Clone ID: 700758624H1
caaatgctgttctttcaatgtggagatattttgttggagatctcgtctttgaagtttctaagatgacttctccctacattaaatgtacagtctctttcttcatagcatttggaaatttggctgatgataccatcaattttgaggcttttcccacaagctggtgcagtttggagagattcaggaaaaagttgtattgaaattttcacaagaggaatttcttacagcttggtcaactcaggtgcgtcctgcaacaactctgttggctgatgggtgtc

SEQ ID NO: 64881 - DNA, 276 bp, Glycine max
  Clone ID: 700758625H1
tgctgttgacaagttgtattctactaaggttaataagtttgcaaaaattatgaaccttagacaaagtgttgttggtgatcttaaacttcttactgatgggaagttgtatgagggtaagcatattcctgtatctaatattagtgcaggggaaatcatgtagttcaaatacccctaatggcacaggaggaaattctgtcttctagtgcaagtgatttcagaactgcaatggtgagtaaaaatagcaagcctcaagctactgcaatgcatgtgggagct

SEQ ID NO: 64882 - DNA, 215 bp, Glycine max
  Clone ID: 700758626H1
ggaggagtttgcattgacatgtcattaatgaaaagagtgacagaattacatgttaatgacatggatgttgttgtagagcctggcataggccataaggttccaaataccttaattattaacacttccttagttcaatatggggtagcccttcatctctctctttcttccctttgcttgctactcttgtcgagtgcatgctttgctattagctccag

SEQ ID NO: 64883 - DNA, 264 bp, Glycine max
  Clone ID: 700758627H1
cattctcttgggaatttctcaagattttgaaattgctggtaatactcttatgccagctttttctgttccacaggctactgccagatcttctgaaaatgcggaatcctctgcatgatctggaatttgtgttttctttcatttgtccgtttgtttattcaataaaggaaattaggcatgaccctcttgttgagtatgctctgcctatttgaaaatttccacacctcttttaattgtcgtaatgatgtgtgaagtgtgtgttatttt

SEQ ID NO: 64884 - DNA, 274 bp, Glycine max
  Clone ID: 700758629H1
gtgaaatgaaaagcaaaaactgggggaaggaccccaaatctcaagaatggagccggtaacacatggtgcctatggtggtggaatgtacggtacggagaaagggcaaccggaggaggccaacaaagcaacggcaagtgagagccagagtgctgatggccccgttgataaggacgctatcaagcccaaacacaaccctccccttacaccggagacagagatttagatatcactgggcagtcttatatccagtaacacaatataataatcccttatc

SEQ ID NO: 64885 - DNA, 269 bp, Glycine max
  Clone ID: 700758630H1
cggcaaccatttctggaactttccaccaggatctagatcctacacctgtagaactctaacttcaataacccgaatgatttaaacaccttattcattcggcaccatcatcatcaactacctcaaaattctaagcacaatttctctgagttgtatttgagataatagcacatagcataacaagggaaggagtattaacaaccgcaaacctgaagagaaaaagagcagcagaagacgaatcaccaacgatgggtgtggattactacaagatc

SEQ ID NO: 64886 - DNA, 281 bp, Glycine max
  unsure (1)..(281): unsure at all n locations
  Clone ID: 700758631H1
cgtacgtgtgaagtgaagaataatcttgtgaatcgcgtaagctctctcaactcaactggatccgggtcacaaccgtcttgaaattaagaccaactgggtcattgatcacaatctcaattggtagcacaacatcaaggganagtgaaaaagaaaggatatttgatcagggatatggcaactcgaagatatgagtttggaaggatgaatgaggctaagcacccagactccatcagagctgccttggctgaattcctctccacttgcatctttgtctttgctgg

SEQ ID NO: 64887 - DNA, 272 bp, Glycine max
  Clone ID: 700758632H1
aatgaccaagttcacaatcctcctcatctctcttctcttctgcatcgcccacacttgcagcgcctccaaatggcagcaccagcaagatagctgccgcaagcagctccagggggtgaacctcacgccctgcgagaagcacatcatggagaagatccaagccgcggcgatgacgatgatgatgatgacgacgacaatcacattctcaggaccatgcggggaagaatcaactacataaggaggaacgaaggaaaagacgaagacgaagaagaaga

SEQ ID NO: 64888 - DNA, 278 bp, Glycine max
  Clone ID: 700758633H1
atttaagatactatgatgagagcacggttcccattactgttgctgggacttgttttcctggcttcagtttctgtctcatttggcattgcttactgggaaaaagagaaccccaaacacaacaagtgtctccagagttgcaatagcgagagaactcgtacaggaaccaagcatgccacgctcgttgcaacctccttaaggtggagaaagaagaatgtgaagaaggtgaaattccacgaccacgaccacgaacacaacacccggagagggaactcagcaac

SEQ ID NO: 64889 - DNA, 264 bp, Glycine max
  Clone ID: 700758635H1
tattctcttgggaatttctcaagattttgaaattgctggtaatactcttatgccagctttttctgatccacaggctactgccagatcttctgaaaatgcggaatcctctgcatgatctggaatttgtgttttctttcatttgtccgtttgttaattcaataaaggaaattaggcatgaccctcttgttgagtatgctctgcctatttgaaaatttccacacctcttttaattgtcgaaatgatgtgtgaagtgtgggtaatttt

SEQ ID NO: 64890 - DNA, 189 bp, Glycine max
  Clone ID: 700758636H1
gctgagcatccacaaagtaggaggggaataagggaagaaagggtcctttgtcttcaattttgagggctttttactgaataagtatgtactaaaatgtatgctgtaatagctcatagtgagcgaggaaagtatcgggctatgtaactatgatagagcttcaactatgaataaataaatcgacagcatatg

SEQ ID NO: 64891 - DNA, 266 bp, Glycine max
  unsure (1)..(266): unsure at all n locations
  Clone ID: 700758639H1
gcagctttagtgagtatgtatgaaacattaagggtgctttgctagcattatacaggtttcttctgggtgcaggcatcaagaagaaacctgtataatgctagcaaagcagctttagtgagtatgtatgaaacattaagggtggaagttgggccgatgtaggcataacaatcgtgacacccggttagcagaaggcaaggtgngtctggacctagatttgcgagatgttagtgagtgggtgcgccaaagcgatagttaatggcacgttg

SEQ ID NO: 64892 - DNA, 274 bp, Glycine max
  Clone ID: 700758640H1
agccaaaaaaagaaaaagtatgaagtgaaggaaggaagagaggagggttaccacttaccggcggagccatggggaactccataggactcaaaggttggtccagcgtcataaatggagccctgatactccgtccccttaaccgtgttaaactcacctttatcttcccactccacctcctcccttgcaggtgcatgtcctcgtacccttcccccttgaaccacccttcgcgctcctcgctcgcctcgtattccctccacccctccgagaacccaca

SEQ ID NO: 64893 - DNA, 258 bp, Glycine max
  Clone ID: 700758641H1
tggtggtgaagataatgtaagtgaagagggtgatacaggtgaggaagaagtcgaagatgttcacgatgaacttgagggtgaagaggagcatgagcatgagcatgagcatccagactttgctgatgttgaggaagaggaacaccgagaagtttgaaagagaggcgaaacggaaagaattgaagtttttgttgggggctggacaagatgctatgagatgatctgagaagttttggtgaagtggggtgttacagagtcagt

SEQ ID NO: 64894 - DNA, 278 bp, Glycine max
  Clone ID: 700758642H1
tcaatttgtcaacagaaaaacctaatgtctcatcgagactctgattccaagcgtcgccactccaagttcgatcgagaagcaagtcccaagagatatagaagggatagtaacagagtaacctcagatggaggagatcggagaaacccaccactcattctaggcgtgaacccttcgatgctgctcccaagaaatcaaattcaaatgatcatcatgagaatccgccccaacatttgtctcaaccaccaagatctcgctcttatcatcagcacgatgaacgg

SEQ ID NO: 64895 - DNA, 207 bp, Glycine max
  Clone ID: 700758645H1
gctgagcatccacaaagtaggaggggaataagggaagaaagggtcctttgtcttcaattttgagggctttttactgaataagtatgtactaaaatgtatgctgtaatagctcatagtgagcgaggaaagtatcgggctatgtaactatgacagagcttcaactatgaataaataaatcgacagcatatgatgcttttgttttgtgtc

SEQ ID NO: 64896 - DNA, 205 bp, Glycine max
  Clone ID: 700758646H1
tgggtttgccacggtttgggcgtcctaagaatgacggtgaattgagttcgaaccttttcgtggccaattgtgggtccgcagtggggctctctgacgatgacattgcatctgtgttctgcaaatttggagagctgaagggagtttatgcagagatgagagtgggacacgtgtcattgtagcttatgatgaagagggttctgcacaa

SEQ ID NO: 64897 - DNA, 278 bp, Glycine max
  Clone ID: 700758647H1
atcaccattactgatggtattgacaagactagtgcaactttgcaatttagaaagttagcagattgtgatttctcaggtgctacccacaaaagcttagagctctgcttaaagtttctcttgagaaatcacaatctgctaactttctaaagagaactttaagcagatgtctaatgttttgtgggtagctcctgaggacaaggcgagtttatggtcacaacttcattatgtttcgtgtaataatctggaaatgcaagaaggggatcttgtcaatctcgtaa

SEQ ID NO: 64898 - DNA, 110 bp, Glycine max
  Clone ID: 700758648H1
aatctcgtttgttctcactaactattacttcatcatgtcgtcgagcagagttggtcaagtcatcaaatgcaaagctgcggtttcatgggaggcagggaagccacttgtga

SEQ ID NO: 64899 - DNA, 250 bp, Glycine max
  Clone ID: 700758649H1
ctctcttcttcagtggtggaagctactagaacactagtttgttgagcactgcgatgaggaagtggacggttgcttccgctctccttcttctctctctcctctttctctttgcagatcaaggtcgaaagtttcaggcgaatgccgagagggattccgacgagcttgtagatccacccaaggtggaggacaagatcggtgctgtgcctcatggcctttcaaccgattcagatgtcgtcaagagggaggcgga

SEQ ID NO: 64900 - DNA, 262 bp, Glycine max
  Clone ID: 700758650H1
gggacattgtttgtctcggaaaagcaaagaaacatggtcttctgggatgaaggaaaaatttgtacaaatgatgaagagcatctatgaaacagaagttacagattggccagtaccactgaaaatcatttctggaaccattcttgcaacattttgggaacaaccttctggaaactcttttcctttcttagagatgctggtaatgggggagtttttgtgggaaatgtggcttcagctttcaaacttcaagtgtgcttgaggccca

SEQ ID NO: 64901 - DNA, 268 bp, Glycine max
  Clone ID: 700758651H1
ttcaccctttaactttgtgtggacaataaacaaatgtcatgggcgtttctgtctttcaactcagatattagtgtgtctttaatatatcgccaatgttgtcatattcttatgttctgtttttaaaaccccttttgttcttagcttaaggagagtggagtgtgtagcttactagcttgtgtatgtagtctctagatttggtaattgatttgaaatacacaatttcatttgtatcatagatcttgttcatgtatcttatgtaaactgtgct

SEQ ID NO: 64902 - DNA, 262 bp, Glycine max
  Clone ID: 700758655H1
gttgatggatcccaagggctcaaagcagcagccacagcaatcacaggaggtggtaccaaacttcctcagcctcccccaacagcaacaagggaataccaacaacaacaacatgggagagaacaaacctgcagaggtgaaggatttccagtagtggtagctgagaacaaggaagagagcaagaaacagcagcaacagttggcaccaaagaggagttccaacaaggacaggcacaccaaggttgaaggcaggggaaggaggataa

SEQ ID NO: 64903 - DNA, 272 bp, Glycine max
  Clone ID: 700758656H1
tatatatactatgatgagagtgcggtttcctttgttggtgttgctgggaactgttttcctggcatcagtttgtgtctcattaaaggtgagagaggatgagaataaccctttctacttgagaagctctaacagcttccaaactctcttgagaaccaaaacggtcgcattcgtctcctccagagattcaacaaacgctccccacaacttgagaactatcgagactaccggattgtccagtttcagtcaaaacccaacacaatccttctccccca

SEQ ID NO: 64904 - DNA, 270 bp, Glycine max
  Clone ID: 700758657H1
cagtgtgggacgtgttggtccacctcttccttgttgctacattaagcttgtttcttgggaagaaggagggtatctgacatcagataaaccaatgccaaggggagagattgtagttggaggatttagtgtgacagctggttactttaagatcaagaaaaaactaacgaagtgttcaaggttgatgagaaaggtatgcgctggttttatactggtgatattgggcaattccaccctgatggatgtcttgaaatcatagataggaagaaagat

SEQ ID NO: 64905 - DNA, 271 bp, Glycine max
  Clone ID: 700758658H1
aagggagccattgtgacagtgaaaggaggtctgagcgtgataaaaccacccacggacgagcagcaacaaagaccccaggaagaggaagaagaagaagaggatgagaagccacagtgcaagggtaaagacaaacactgccaacgcccccgggaagccaaagcaaaagcagaagaaatggcattgacgagaccatatgcaccatgagacttcgccacaacattggccagacttcatcacctgacatctacaaccctcaagccggtagcgtcac

SEQ ID NO: 64906 - DNA, 273 bp, Glycine max
  unsure (1)..(273): unsure at all n locations
  Clone ID: 700758660H1
atcaccctttaactttgtgtggacaataaacaaatgtcatgggcgtttctgtctttcaactcagatattagtgtttctttaatatatcgccaatgttgtcatattcttatgttctgtttttaaaaccccttttgttcttagcttaagcggagtggagtgtgtagcttactagcttgtgtatgtagtctctagatttggtaattgatttgaaatacacaatttcatttgtatcaacgatcttgttcatgtatcttatgtanactgtgctattca

SEQ ID NO: 64907 - DNA, 279 bp, Glycine max
  Clone ID: 700758664H1
tacaacctgaacgcgaacagcataatatacgcattgaatggacgggcattgatacaagtggtgaattgcaacggtgagagagtgtttgatggagagctgcaagagggacgggtgctgatcgtgccacaaaactttgtggtggctgcaagatcacagagtgacaacttcgagtatgtgtcattcaagaccaatgatacacccatgatcggcactcttgcaggggcaaactcattgttgaacgcattaccagaggaagtgattcagcacactttcaaccta

SEQ ID NO: 64908 - DNA, 273 bp, Glycine max
  Clone ID: 700758665H1
ccagttcaatatcctagtacaccgtattaaagaatttaagatatactatgatgagagcgcggttcccattactgttgctgggagttgttttcctggcatcagtttctgtctcatttggcattgcgtattgggaaaagcagaaccccgtcacaacaagtgcctccgaagttgcaatagcgagaaagactcctacaggaaccaagcatgccacgctcgttgcaacctccttaaggtggaggaagaagaagaatgcgaagaaggtcaaattccacg

SEQ ID NO: 64909 - DNA, 266 bp, Glycine max
  Clone ID: 700758666H1
accaaacgtcttttctttcttatacattttactttagtttgtgaaattctatccaaagattttgagaatgtctagctgtgggtgtggaagcagctgcaactgtggcagcaactgcagttgcaacaagtactcttttgactacgttggaagatcacaaatgagactctagttttgggtgttgggccggtgaaggcccaattcgagggtgctgaaatgggtgttgcagctgagaacggtggctgcaactgtggatcaaactgcacttg

SEQ ID NO: 64910 - DNA, 156 bp, Glycine max
  Clone ID: 700758667H1
tttcctgttttcaatttcgattctttcgttaatttaataagatgtttgggtgggcaccgaagaagagcgataatacgaggtactacgaaatcctcggcgtctccaagaacgcttcgcaggatgatctgagtaggcttacaagaaagccgctcttaa

SEQ ID NO: 64911 - DNA, 262 bp, Glycine max
  Clone ID: 700758668H1
ttcacctcctcagcagtcgtcagaaagactccataacccaaaaatgcctttcaagaggtacgttgagattggaagggttgctcagatcaactatggcaaagagtacgggcggctcgtgatcattgtcgatgtcattgaccagaataggctcttgttgatgctcccgacatggtgaggtcccaagtgaacttcaagaggctctcgctcactgacatcaagattgatattaagaggattcccaagaagaaggatctcattcaag

SEQ ID NO: 64912 - DNA, 271 bp, Glycine max
  Clone ID: 700758669H1
cttctctctctctcggatttcttgcgcggtttatcatgggggatacgtcagtattcgttttctctcaccacatttagcccttctggaaagcttgttcagattgagcatgctttgacggctgtcgggtctggacaaacgtctttgggattaaagctgcaaatggagttgtcattgctaccgagaagaaattgccatctatattggttgatgaagcatcagtccagaaaattcagttattaacaccaaatataggtgtcgtatatagtggcat

SEQ ID NO: 64913 - DNA, 272 bp, Glycine max
  Clone ID: 700758671H1
taacaatggcttcaaccgacaagtcaccggacccaacgccggcgaagggtccggatccaactccggggaagccgatgagtgttggtcagcacgtgatcgacaagagtgcaatgatggtgcagtcgctggaccccattaagcagatggtcagcacgtgtgctccttcgctatctacagccatgacatgtctcgccagatagagacacatcactactgctccagactccaccagatattcatacaatgtgctgtctaggattccgatgaatcca

SEQ ID NO: 64914 - DNA, 264 bp, Glycine max
  Clone ID: 700758674H1
caccgtattaaagaatttaagatatactatgatgagagcgcggttcccattactgttgctgggagttgttttcctggcatcagtttctgtctcatttggcattgcgtattgggaaaagcagaaccccagtcacaacaagtgcctccgagttgcaatagcgagaaagactcctacaggaaccaagcatgccacgctcgttgcaacctccttaaggtggaggaagaagaagaatgcgaagaaggtcaaattccacgaccacgacca

SEQ ID NO: 64915 - DNA, 238 bp, Glycine max
  Clone ID: 700758675H1
atcaaagcagtaagataacagcagattcccttgatctagatgggtacacaatggacgaggcacttggtagtcgaaggttatttatgttagattaccatgatatcttcatgccatatgtgaggcagataaatcagctgaattctgccagacttatgcgacaaggactatcctttttttgagagaagatggaactttaaagccagtggccatcgaattaagtttgccacattctgctggg

SEQ ID NO: 64916 - DNA, 269 bp, Glycine max
  Clone ID: 700758679H1
attagttcttgttattcattattcattctcagcttcttttcttctggggggcaaaaggggtcacttttcagatccgagattgagctcctttacccatcatcatcatggagctcctcgggtacctgaatcagggtcacccttctagaggacaacacttgttattactctttcattggtgctttcgacacttgtgtccttctccactttcacacatgccttctcttcttctgcgtttccggaactgaatcctataaaacgtaggcactcac

SEQ ID NO: 64917 - DNA, 224 bp, Glycine max
  unsure (1)..(224): unsure at all n locations
  Clone ID: 700758680H1
tgcgtatttgcgtgtacccacatccacgcccattactccgcaatctcccacagctacgaggaccaaatgcagaaatctgaanacctcttgctccgttaatgccgccaaaattccaatgccccctctaaaccctaaagacccttcctctcaagctcgcttccatcgctgcctcttcccccgaaacgctcctcaaaactccaaaaactccgacaaccctcttttct

SEQ ID NO: 64918 - DNA, 271 bp, Glycine max
  Clone ID: 700758681H1
ccgatatcaatatgataagaaggggaacccattcaataggggatcatgcagaaatcttaaagaaacactttgttccagtattccccattcgaagaataatttccgatcatttgttgtggaggatgaacttatgatggtcgggtcctgactccaaatattggggatggaattttgaccccaaaggagaaaattgatattgaaatgggatctatgcgtgcagaagatggacgtatgcctgttcctgaacttctgcgaaattttgattttgata

SEQ ID NO: 64919 - DNA, 240 bp, Glycine max
  Clone ID: 700758682H1
taacacttccttagttcaatatggggaagcccttcactctctctctttcttccctttgcttgctactcttgtcgagtgcatgctttgctattagctccagcaagctcaacgagtgccaactcaacaacctcaacgcgttggaaccgaccaccgcgttgagtccgaaggtggtttgattcaaacatggaactctcaacaccctgagctgaaatgcgccggtgtcactgtttccaaactcac

SEQ ID NO: 64920 - DNA, 272 bp, Glycine max
  Clone ID: 700758683H1
gggttttctccaccgtccattgcaaagtcttgcgcccaatttccatggaactgtaaagagaggatagttagaagattaaatcttaaagcagtaagtcatcatggataaatcagagcagactcaacagcagcagcagcaacaacacatgtgatgggagttgccgcaggggctagccaaatggcctattcttctcactacccgactgcttccatggtggcttctggcacgcccgctgtaactgctccttccccaactcaggctccagctgcctt

SEQ ID NO: 64921 - DNA, 268 bp, Glycine max
  Clone ID: 700758684H1
ataagggacaagcttagttgtcaagttggaatcaacccatattctatggaatggactggtttggccaatagattactgagtaagggcaacgatattctgtgttgcgattatgctagttttgatggtttgattaccaagcaagtttgagcaagatggcagaaatgatcaacagtctttgtggtggtgatgaaaaactgatgcgtgaaaggacacacctgctgttggcttgttgttcaaggatggcaatttgtaagaaagatgtttggag

SEQ ID NO: 64922 - DNA, 192 bp, Glycine max
  Clone ID: 700758685H1
ctgaattggagctgaattatggaaggcgttatggcttactcggattcaatggttgtagaaaatctacactgcttacagccatcggttgtcgggaacttccaattccgaccacatggacatatatcatctaaccagggagttgtgcctctgatatgtctgcattggaagctgtcataagctgtgacgaagaaa

SEQ ID NO: 64923 - DNA, 265 bp, Glycine max
  Clone ID: 700758686H1
tcgagtttcacagccaagtcgtaaaagggtttcaagggatggaaaacatgcagagcttctggcaattgggtgatgaactccgtgggcactcaaaagcatcggaggatcacaagtggttaatggttgcctcgaaactggccgaacgacaagattgaagggggagcgtgtgaacaaccttgatctttcaaagggacccattgaaacaaggtcaagggatacatttgggttccaggaagagaacaaatttgattctcttaacttgagc

SEQ ID NO: 64924 - DNA, 272 bp, Glycine max
  Clone ID: 700758688H1
tctcgagccgattcggctcgagaccgattgctagaatggaatttcggtgctcagtcatctcttgtaccattctcttctctctagctcttgcaggagagagccatgtccatgcatcgctacctgaggaagattattgggaagctgttggccaaacactcccattcccactgcactgcgagagcttctaaagcctctccctgcaggtgttgaaatcgatgaactccctaagcaaattgatgatacacagtacccaaaaacattcttctataaag

SEQ ID NO: 64925 - DNA, 271 bp, Glycine max
  unsure (1)..(271): unsure at all n locations
  Clone ID: 700758689H1
gagcaggtaaagcttttccaaacaagattgtttttgatgataagcttgtgttggctaacacacaagaattctttgatggaaattttccagtggattcttggttaccaatttttgtgaattgtctttatcctgtaagtcaattacctcagaagctgtcgttgtaaatgttacatgtggtagtggacgtggtggtttacccaccactgcttggattagttctgcagttaataatcgctcctcagatatcaacanaaagattcgcacagcactt

SEQ ID NO: 64926 - DNA, 266 bp, Glycine max
  unsure (1)..(266): unsure at all n locations
  Clone ID: 700758690H1
cttaattattaacacttccttagttcaatatggggaagcccttcagtctctctctttcttccctttgcttgctactcttgtcgagtgcatgctttgctattagctccagcaagctcaacgagtgccaactcaacaacctcaacgcttggaacccgaccaccgcgttgagtccgaagtggtttgattcaaacatggaactctcaacaccctgagctgaaatgcgccggtgtcactgtttccanactcaccctcaaccgcaatggcct

SEQ ID NO: 64927 - DNA, 271 bp, Glycine max
  Clone ID: 700758691H1
gtcatgggaaacaaaactacccttttgcttttgctctttgttctttgccatggagtggccacaacaacaatggccttccatgatgatgagggtggtgataaaaagtcaccaaaaagtttgtttttgatgagcaactccacgagggtttcaagactgatgcaggggaaatgcgtgtgctgaaaagccatggtggtaggatattttataggcacatgcacattggcttcatctctatggaaccaaagtccttgtttgttcctcagtacctcga

SEQ ID NO: 64928 - DNA, 273 bp, Glycine max
  Clone ID: 700758692H1
gaaaacgagaacgcaagaaaaattgtctacacgcagcagaaggatcttatccctaagtttctcaagaacgacgaagatgacgacgacgtcgtttccgacgacgaagcacagaaacagatcgaggaaacgatgcaggagaccaaggcgctttggagaaaatcgtgaacgttaggttaagcgctgcgcaaccgaagaatgttccgaagcagaactccgatgcgaagtatatacagtacaaaccctcgcagcaatccgatgcgttcaattcgggtg

SEQ ID NO: 64929 - DNA, 191 bp, Glycine max
  Clone ID: 700758693H1
agcagaaggagcaaaagcaatggcgccgaagaagccgagaaccacgacaaggaaccctgatttggttagggggattggcaagtattcgaggtcgcagatgtaccacaagaggggcatctgggccatcaaggccaaaaactgtggcgtttgccccgccacgatcccaagcccaagcccgaggccccggccca

SEQ ID NO: 64930 - DNA, 261 bp, Glycine max
  Clone ID: 700758694H1
gtacaacagatccaaactcagaaccaaactcagaaccaaactcgccaaaactagggttttgcattcatggcactgtgcaaccgcgtcagatcgggaatctctctcttcaccacatccacgttcattacttcccagcgatccagtctcaacgatccctcgttgcccctttcatttcgctcgactccagagattacgccaacgtgccggggcaaaaggaaaccagagttaaggtccctctggccttgtttgaaggttcaggaa

SEQ ID NO: 64931 - DNA, 157 bp, Glycine max
  Clone ID: 700758695H1
taaacactcatcagtcatcaccatggccaagctagttttttccctttgttttctgcttttcagtggctgctgcttcgctttcagttccagagagcagcctcagaaaaacgagtgccagattccaaaactcaagtagcctcaaccggtaaccgtatag

SEQ ID NO: 64932 - DNA, 176 bp, Glycine max
  Clone ID: 700758696H1
ttttgctaaaccgcgatcacaggttgccgcaccttaaaaccggaaacaaaagcaatcgttacttgatttcaagaatctctcaatttcttcctacttctttgtgtacgatttcttaagggaaagaaaatcactctctgtgctggccacagacttcgtgaatcattttctttgccact

SEQ ID NO: 64933 - DNA, 213 bp, Glycine max
  Clone ID: 700758701H1
actccctcttaaactcttcctcccaaatctccctccaagaccttcaaaatcacaccactaaccagatccaaaattcacacatgaaccaccaacaccaacttgctcactttgattcaacttctcacgacgactttctcgaacaaatgctctcttcctgctcttggacagacctcaacccaaaaaggcctttattatgggccctaccaccctcaa

SEQ ID NO: 64934 - DNA, 81 bp, Glycine max; identical to SEQ ID NO: 61181
  Clone ID: 700758702H1

SEQ ID NO: 64935 - DNA, 303 bp, Glycine max
  Clone ID: 700758706H1
atggaatggactggtttggtcaatagattactgagtaagggcaacgatattctgtgttgcgattatgctagttttgatggtttgattaccaagcaagttatgagcaagatggcagatatgatcaacagtctttgtggtggtgatgaaaaactgatgcgtgaaaggacacacctgctgttggcttgttgttcaaggatggcaatttgtaagaaagatgtttggagagttgaatgtggaatcccttctggatttccgctcacagtcatttgcaatagcatttttaatgagatgctcattagatat

SEQ ID NO: 64936 - DNA, 152 bp, Glycine max
  Clone ID: 700758707H1
ggctcatgtcacgcggctattagaataaagtcacttcccagttacttgactctctctctattcttttccgccattcctaaccctacaagctttgtctcgtaaagaaaattccaaagctcaacagagataatgaggacagtgctttcgcgctt

SEQ ID NO: 64937 - DNA, 311 bp, Glycine max
  Clone ID: 700758709H1
aaacacttgtaccaatgaggcccaatcactccttttgactgctgcattcccagacatcacaattttaaccattaaacagcctttcttccaagcagcaactctcaacaagttactaattggagaattttgtataagtgtgatccaatctccagttttgtccactaaaattcctccaccgagaaggtcaatagaaaattgacaaaagctctgcttgctagaatcaaaattcaatggtgttctcactgttgccatttgattccaaacagtttgctgtgaaatagactgaggaatggtgccccaaagacgagaac

SEQ ID NO: 64938 - DNA, 274 bp, Glycine max
  Clone ID: 700758710H1
caagggtttaacctttctggctgtgttaatatgcgtttcagcactgtcactgagtccttctgttgcgggggaagggcaaaataatggccttgttatgaacttctacaaggaatcatgcctcaggctgaagacatcatcacagaacaagtcaagcttctctacaagcgccacaagaacactgctttctcctggctcaggaacatcttccatgactgtgctgttcagagttgtgatgcttcactgttgctggactccacatagaaggacttgtctg

SEQ ID NO: 64939 - DNA, 285 bp, Glycine max
  Clone ID: 700758711H1
ccccaagcgatctgtgctatggtaagcacagattgagagttcatttcatgcagaggatgacggaagtccctgattcaatgataatatcgatctactgttgagcgcttgatttgttggggttaccaggaccaggttaagcttttccaaacaagattgtttttgatggtaagcttgtgttggctaacacacaagaattctttgatggaaattttccagtggattcttggttaccaatctttgtgaaatgtctttatcctgtaagtcaattaccttcagaagctgtcg

SEQ ID NO: 64940 - DNA, 243 bp, Glycine max
  Clone ID: 700758712H1
gagaccaatttcttagctatcttttcgtattctttagccttattttcaaacctagcctttggcaaatgtaaagtaaccgaggtagaagaagaagaccctgagctcgtaacatgcaaacaccaatgccaacagccacagctatacactgagggtgacaagcgggtatgcttgcaaagatgtgacaggtatcatcgtatgaagcaagagcgagagatacaaatccaagaggaaactcgtgagaag

SEQ ID NO: 64941 - DNA, 291 bp, Glycine max
  Clone ID: 700758713H1
cttggaagatacatctggagctatcgatgtttcaacaattgggtcctcagatgttagaaaccctgactattatggcgatgagcatcttactactacctctgatgggaatgtagctcacataactggtgtggatgctgggacttatgagcattcctccatttcgcaatcagaggctttaaaatctgaaccccctgaaactgctcaggaaaatcaatattcatttcgctcttcacacgagtttacttacgaaaatggccaacagccagatgttacatacgctcattcacagac

SEQ ID NO: 64942 - DNA, 215 bp, Glycine max
  Clone ID: 700758714H1
ggatatcggtcctcaattcgggtcgctccgaacacccattcgggtcggaaagccttacgggttgagcatccttcggaagaggaataacggctttgtttgcttcgccgtcgatgacgagctcagacagaagcagcaggacttgagtactatcgcaactgggctgggctccgccttgaagagaggctcggaaacacagatctcattgagagtacaac

SEQ ID NO: 64943 - DNA, 297 bp, Glycine max
  Clone ID: 700758715H1
ctcgagccggagaaactcgccaattgagaaggaaagctctctctcgtattgaatggctgcaaacagctgatgtgcctaccatagcacagattgaagagttccattcgatgcagaggatgatgaatgctcctgattcaaatgataatattgatctactgttgagcattgatttgttgggtttacaaggagcaggtaaagcttttccaaacaagattgtttttgatgataaacttgtgctggctaacacacaagaattctttgctggaaattttccagtggattcttggttacgatttt

SEQ ID NO: 64944 - DNA, 307 bp, Glycine max
  Clone ID: 700758717H1
ataaaattcttccaccaagttatgggtttccttgtgttgcttcttttctccctcttaggtctctcttctagttccagcatatcaactcatcgttccatattggaccttgacctaaccaagtttaccacacagaaacaggtgtcttcactgttccaactatggaagagtgagcatggacgtgtctaccataaccacgaagaagaggcaaagagacttgagattttcaagaataacttgaactatatcagggacatgaatgcaaacagagaatcaccccattctcatcgtttaggattgaacaagtttg

SEQ ID NO: 64945 - DNA, 278 bp, Glycine max
  Clone ID: 700758718H1
ttaactaacaaccttgatatccccaagttatccgcatgttgaaaaaaagtttatatattaatcatatttcttccgtatttcaaaaaaaaaaaaaaaagaaaaaaaaaaaaaaaaaggggggcccccccgaaaatggttttcctcccccgggatttttttcgggggcggtcacttgggggggatacctttcccccacagggtcctgtttaggaccccggggaaaacagggataaaggtcttccccgagtaaaattcattccccctaaaaaagccctcaa

SEQ ID NO: 64946 - DNA, 306 bp, Glycine max
  Clone ID: 700758719H1
gatggagggaactaatagtagcggtgataacgtgagtgcgggtgtggtgcagagtaggatgaggatgaaggtgatggtggctatagacgagagtgaaggaagcttctatgctcttaagtgggcccttgataacctcttcaccaccatggccactgtgggagaagcatcatcacctgaaaatgatggcatggtgttcttggttcatgttgagcccaaagttcacaactatgtgtatcccatcggacccggtggagcagccttttatcctgcaactgtagtagtggattcggtgaagaaagcacaaca

SEQ ID NO: 64947 - DNA, 303 bp, Glycine max
  Clone ID: 700758720H1
agccactcaggcttccattgcaggttgtctacaaaattggtggtattggtaccgtgccagtgggacgtgttgagactggtgtcgtgaagctcggtatggtggtgacttttggtcccactgggctgacaactgaggttaagtctgtttagatgcaccatgaggctctcacagaggctcttccaggtgacgatgttggctttaatgtgaagaatgttgcagtcaaggatctcaagcgtggttttgttgcatccaactccaaggatgactctgccaaggaagctgccagcttcacatctcaagtca

SEQ ID NO: 64948 - DNA, 301 bp, Glycine max
  Clone ID: 700758722H1
agtggaaggaggtctcagcgttatcagccccaagtggcaagaacaacaagatgaagatgaagatgaagacgaagatgatgaagatgaacaaattccctctcacccacctcgccgaccaagccatggaaagcgtgaacaagacgaggacgaggacgaagatgaagataaacctcgtcctagtcgaccaagccaaggaaagcgtgaacaagaccaggaccaggacgaggacgaagatgaagatgaagatcaacctcgcaagagccgcgaatggagatcgaaaaagacacaacccagaagacct

SEQ ID NO: 64949 - DNA, 296 bp, Glycine max
  Clone ID: 700758723H1
gagaaggttgagaagataaagggcacaaaaacaatacaagttaattcaaatttgaaataaaaattcgaacttttgaagatctttggaatctcacaactgtcaccactcgccagtgtttatccattcggattattccctagatctgatcgtgcaatgcactcaaaccgtgggtgaaaaacctttttaatcatctggagttttgattttcctttccagggaatgaaggaagttgtccaagttaagatctggagctgtgatgctgctttgacttgctgagtttgtttctgggttggatt

SEQ ID NO: 64950 - DNA, 264 bp, Glycine max
  Clone ID: 700758725H1
gagcgcggttcccattactgttgctgggagttgttttcctggcatcagtttctgtctcatttggcattgcgtattgggaaaagcagaaccccagtcacaacaagtgcctccgaagttgcaatagcgagaaagactcctacaggaaccaagcatgccacgctcgttgcaacctccttaaggtggaggaagaagaagaatgcgaagaaggtcaaattccacgaccacgaccacaacacccggagagggaacgtcagcaacacggtg

SEQ ID NO: 64951 - DNA, 273 bp, Glycine max
  unsure (1)..(273): unsure at all n locations
  Clone ID: 700758726H1
ttcacttgttgctcgtcttagtttctgtgttgtgtcatttttattgctatatcctaattaaacttcaccctcaaaatgagtgatcccacactagcacaaccacacctagtcgaagtccacacaacactcgaaatcgctcgttaccacacacaaccataaccatagaccctcaataaatgcctcaggtgaaaagaagaaaattgtggggcccttctacaaagggaatannnatgctctattgaaccccaatttcgtggggtgtgttgaaggagc

SEQ ID NO: 64952 - DNA, 288 bp, Glycine max
  unsure (1)..(288): unsure at all n locations
  Clone ID: 700758727H1
tacgaacagattgacatcttagtgcacatcacgcaatttataggcgtctaactcctcactaccgtgacaccatgagcatcaacgcacttgctaggcaatctctcattaatgctgatggcataatagagaaatcttttttgccctcaaagcattccgttgagatgtcttcagcggtttataagaattgggttttcactgatcaagcactacctgcagatcttatcaagagaggagtggcaatnntttttnancngncccacatggacttcgacttctgatagaggacta

SEQ ID NO: 64953 - DNA, 275 bp, Glycine max
  Clone ID: 700758728H1
ttctctccattgtctttgaacactcgccaccatggccaagcttgttctttccctttgtttccttcttttcagtggctgcttcgctctgagagagcaggcacagcaaaatgagtgccagatccaaaagctgaatgccctcaaaccggataaccgtatagagtcggaaggtgggttcattgagacctggaaccctaacaacaagccattccagtgtgccggtgttgccctctctcgctgcacccttatacgcaatgcccttcgtagaccttcctaca

SEQ ID NO: 64954 - DNA, 250 bp, Glycine max
  Clone ID: 700758729H1
cttaattattaacactaccttagctcaatatgggcaagcccttcactctctcactatcatcccattgattgctactcaagtcgagtgcctgcattgctattagctccagcaagctcaacgagtgccaactcaacaacctcaacgcgttagaagccgatcaccgcgttgcagtccgacggtggactcattcaaacatggaactctcaacaccctgagctcaaatgcgccggtgtcactgtatccaaactca

SEQ ID NO: 64955 - DNA, 224 bp, Glycine max
  Clone ID: 700758730H1
cactgatcaagcactacctgcagatcttatcaagagaggagtggcaattaaggatccatctgccccacatggacttcgacttctgatagaggactacccttatgctgttgatgggctagagatatgggctgcaattaagacatgggtccaagaatatgtgtccttgtactatgcaagagatgatgatgtcaaacctgattctgaactccaacagtggtggaaag

SEQ ID NO: 64956 - DNA, 212 bp, Glycine max
  Clone ID: 700758731H1
atcgtgtcgagggctcagatggaaacaaatttgtttaaattgtctcttgatgatgttgaaactcctaaaggttccatgttggatcttaaaatttctcagtctaaattgcacttcccaagaacacagtgaggaactattctgcgtagtgatctactgaattctgacagagggcataacatgtattcacgatccgtaagagtaatgtgcaatga

SEQ ID NO: 64957 - DNA, 282 bp, Glycine max
  unsure (1)..(282): unsure at all n locations
  Clone ID: 700758732H1
ctcaaacatttcaacgttttagagagagagagagagagagatacagagagagaagggttggcttngtgatggggttgaatcaatataatgaatgagctggcgtacgaaacaaatgtaaacttcttactgatgggaagttgtatgagggtaagccatattcctgtatctaatattagtcccggcgagaatcctgtagttcaaataccccaaatggcaccggaggaacttctgtcttctagtgcaattgatttcagaactgccatgggtgagtagaaatagcaa

SEQ ID NO: 64958 - DNA, 93 bp, Glycine max
  Clone ID: 700758733H1
attctctccattgtctttgaacactcatcaccatggccaagcttgttctttccctttgtttccttcttttcagtggctgcttcgctctgagag

SEQ ID NO: 64959 - DNA, 213 bp, Glycine max
  Clone ID: 700758734H1
ggtccttaaacactcatcagtcatcaccatggccaagctagttttttccctttgttttctgcttttcagtggctgctgcttcgctttcagttccagagagcagcctcagcccaacgagtgccagatccaaaaactcaatgccctcaaaccggataaccgtatagagtcagaaggagggctcattgagacatggaacctaaacaacaagccatt

SEQ ID NO: 64960 - DNA, 79 bp, Glycine max
  Clone ID: 700758735H1
ctcgagccgcttcaactatgaataaataaatcgacagcatatgatgcttttgtttaaaaaaaaaaaaaaaaaagggggg

SEQ ID NO: 64961 - DNA, 299 bp, Glycine max
  Clone ID: 700758737H1
agtgcaactttgcaatttagaaagttagcagattgtgattttctcaagagaaactttaggcagatgtctaatgttttgttggtggctcctgaggactaggcgagtttatggtcacaacttcattatgtttcatgtaataatctggaaatgcaagaagcttatcttgtcaatctcgtaaatgtgttacgagaattgtatttgcacagtccagaggaagctcgccaattgagaaggaaagctctctctcgtattgaatggctgcaaaaagctgatgtgcctaccatagcacagattgaaga

SEQ ID NO: 64962 - DNA, 296 bp, Glycine max
  Clone ID: 700758738H1
agcagcggcagcttcatctgtttttctgcatcggcgtgaacaatggcgacgtacgctgcgatgaagcccaataagcctggcttggaggagtcccaagaacagatccacaagataaggatcaccctttcctccaagcacgtcaaaaatctcgagaaggtttgtggggacttggttcgtggtgcaaaggataagaggctcagggttaagggacctgtcaggatgcccactaaggttcttcacatcactaccaggaagtccccctgtggtgaaggtaccaacacatgggacagatttga

SEQ ID NO: 64963 - DNA, 296 bp, Glycine max
  Clone ID: 700758740H1
attccttcacttgcagcactgttgcatcatcatcttcattgcaaaaccctaaacttcaccttcaaccatgaccacacaagtaccaccacacagtgtccaagtccacacaacaacacacctctacgaagctggcgtcgtcccccccggagcccgtttcgaaccgccgcgttatgaagccggcgtcaaagcgccctccatttaccattccgagagaggtccaacgacttcccaggtcctcgccgtcctcgccggcctcccggtcggtggcatcctgctcctcctggcgggattgaccc

SEQ ID NO: 64964 - DNA, 294 bp, Glycine max
  Clone ID: 700758741H1
aaacacttgtaccaatgaggcccaatcactccttttgactgctgcattcccagacatcacaattttaaccattaaacagcctttcttccaagcagcaactctcaacaagttactaattggagaattttgtataagtgtgatccaatctccagttttgtccactagaattcctccaccgagaaggtcaatagaaaattgacaaaagctctgcttgctagaatccaaattcaatggtgttctcactgttgcccattgaatccaaacagtttgctggtgaaatagactgaggaatgg

SEQ ID NO: 64965 - DNA, 285 bp, Glycine max
  Clone ID: 700758742H1
ccaggctaaagctccaagtatgtttttacaatccttcaaaaattttgtttctttgtgtgtgtatggtgatgataacttaattagtgttcatgaatacgtcaagccttactttagtggttctaaattgaaaagctttctagctggtcataatatcaccattactgatggtattgacaagactagtgcaactttgcaatttagaaagttagcagattgtgattttctcaagagaaactttaagcagatgtctaatgttttgtgggtagctcctgaggacaaggcgag

SEQ ID NO: 64966 - DNA, 306 bp, Glycine max
  Clone ID: 700758743H1
tgtttcattgcctcaattctcatttttcagttgagttcagataccataaccataccataccataccagaaaattaaactgaagtgagagagagatgacagtactgtctccttctcttactcggcctaagttgcaatcttcctttctttgttgccctctcacatattctaagcctacaaatagaaatattcaaccaaaacccacttcttatccacgcattagagctttggaccttgatcaaaacacggctaagcgagaaaacacacagccctgtttcccatgcaatggatctggcgctcagaaatgc

SEQ ID NO: 64967 - DNA, 273 bp, Glycine max
  Clone ID: 700758745H1
tggaaatctacatacaacatggtaatggtattcgaggcacgataatctcgggtagtcctagcacttatcaagagccgcaagaatctcagcaacgaggatgatgccagaggccccaagaccgtcaccaaacagtacatcgcttcagagactgtgacttgatcgcagtgcctactggtgttacatggtggatgtacaacgatgacgacactcctgttgttgccgtttctattatcgacaccaacagctatggagaactagctcgaccagatgcct

SEQ ID NO: 64968 - DNA, 141 bp, Glycine max
  Clone ID: 700758746H1
atttagacagcggatcgaagagggtgttgatgaaattctccaccgctccgtaccactggttcgtcgcaacacgtgacgataatggcttcgaagaattctcaacgagacacgcgcttagcggtaatcgactctgcaatccga

SEQ ID NO: 64969 - DNA, 300 bp, Glycine max
  Clone ID: 700758747H1
cgcctttccagagcggtatggccattcaggtcgctacatttccgaataccattgcgcagactgaaccatacatgaattcaaggtttcagcttttcagtaccactaccaatggtgattttgtatcagggaaagatctcgcaatggttaaacgtaatgttgcatgtgccgctgttggcttgacatccagttacactccaactccattgttggaatctggtttgccaaaagacagagggttaattgggcgatattttggaatgatgtcttacgttgctcataacgttaatcagccccaagaga

SEQ ID NO: 64970 - DNA, 294 bp, Glycine max
  Clone ID: 700758748H1
gcgcgttctacacgtgttgccgatctcagatgttgtaaaattagtttatgatgtgaagctatggagtggaaaatatgtggatgtaggagatttcgggatgaatggcctcaaaacgctttgtcgtttgtggttattgagtcctgagtgatcttgtcatccgacctttgccatgacaggtgcgcttgcatggcaggtcaaaaaatgttaataaaaacagttttattggtttggggagagatgcacgggggttgcccggggtctcttcctcttgtgtggtgtggtgtttgctgtgct

SEQ ID NO: 64971 - DNA, 300 bp, Glycine max
  Clone ID: 700758750H1
ttttcgtttgcgttgctgttgcgactgagtgagtgaagatggcgtgcttgcacgaccacagttgcgaagaccatgactgttcctctaactggtctctctacaaacacatcgacctctccaaggtaactgctttgaatgaggcaaatccaggaagtgttaagtcagttttcaaagcttgggaagagcgtctggattcttctggggttcacttggaaagcaatgagggtgatcctgagttacttgtcttcattccatttacttcagatgtcaagattaagagcgtatccatagttggtggag

SEQ ID NO: 64972 - DNA, 295 bp, Glycine max
  Clone ID: 700758753H1
ctcgagccgattcggctcgagggtcaatgtacactgtgtatggtactcgcatgatcccaaaaggggttctgttagcaacattgcacctttggcaattggactcattgttggggcaaacatccttgttggtgggccatttgatggagcctgcatgaaccctgctctagcttttgggccttccttagtgggctggagatggcaccaacactggatcttctgggtgggtccactgattggggctgcactggcagcactggtgtatgaatatgttgtgatcccaactgagctccctcat

SEQ ID NO: 64973 - DNA, 293 bp, Glycine max
  Clone ID: 700758754H1
tgacggatatgaaactctaataatgtcagatgagagtacagaatcagagacagagcaagcgttcttaagcgccatccttgagcaaccaattagtgtctccattgatgcaaaagattttcatttatacaccgggggaatttatgatggagaaaactgtacaagtccgtatgggattaatcactttgttttacttgtgggttatggttcagcggatggtgtagattactggatagcgaaaaattcatggggagaagattggggagaagatggttacatttggatccaaagaaaca

SEQ ID NO: 64974 - DNA, 295 bp, Glycine max
  Clone ID: 700758755H1
ggctcgagggagattggatcacacttatacaaaattctccaattagtaacttgttgagagttgctgcttggaagaaaggctgtttaatggtcaagattgtgatgtctgggaatgcagcagtcaaaaggagtgattgggcctcattgcgtacaagtgtttttaacaaacagcaacagtacagagcattttgatgcatgtaagtggacaaaatcagaaccacattcctgggaattgatcttcccaatagaggtatgtggtcctaataatggttttgaaatgtggagttctgagtggg

SEQ ID NO: 64975 - DNA, 283 bp, Glycine max
  Clone ID: 700758756H1
tgccctctctcgctgcacccttaaccgcaatgcccttcgtagaccttcctacaccaacggtccctcggaaatctacatacaacaaggtaatggtatttttggcatgatattcccgggttgtcctagcacttatcaagagccgcaagaatctcagcaacgaggacgaagccagaggccccaagaccgtcaccaaaaggtacatcgcttcagagagggtgatttgatcgcagtgcctactggtgttgcatggtggatgtacaacaatgaagacactcctgttgtt

SEQ ID NO: 64976 - DNA, 304 bp, Glycine max
  Clone ID: 700758757H1
tctcgagcgaatcggctcgagtatcaacattaagaattctcagaacgatattcattggggatgctcatattatcctgatggcaaagcaaaagctcttctggaggaaattcaggaattctccaagatactgcatcaggataatatgagcatccccaatgaatatctctctgaggattattgcccaagaaatgtctgctttaatgaacttcttgaagttttgaaggaacctaagttacaaccttttgagtcagaataccaactagcatcaaggttgtcgatggccgagaaggatattaaatgtgtt

SEQ ID NO: 64977 - DNA, 304 bp, Glycine max
  Clone ID: 700758758H1
agcaaagcaatggctacttcaaagttgaaaacccagaatgtggttgtatctctctccctaaccttaaccttggtactggtgctactgaccagcaaggcaaactcagcggaaactgtttctttcagctggaacaagttcgtggcgaagcaaccaaacatgatcctccaaggagacgctattgtgacctcctcgggaaagttacaactcaataaggttgacgaaaacggcaccccaaaaccctcgtctcttggtcgcgccctctactccacccccatccacatttgggacaaagaaaccggtagcg

SEQ ID NO: 64978 - DNA, 274 bp, Glycine max
  Clone ID: 700758759H1
cattctcttgggaatttctcaagattttgaaattgctggtaatactcttatgccagctttttctgttccacaggctactgccagatcttctgaaaatgcggaatcctctgcatgatctggaatttgtgttttctttcatttgtccgtttgtttaattcaataaaggaaattaggcatgaccctcttgttgagtatgctctgcctatttgaaaatttccacacctcttttaattgtcgtaatgatgtgtgattcgtgtgttattttaaaaagaga

SEQ ID NO: 64979 - DNA, 246 bp, Glycine max
  unsure (1)..(246): unsure at all n locations
  Clone ID: 700758760H1
gtaatagaaacctctcagcccctctccgttcacactcgccancgtaatcgacggccaagncgttgcgcaaaccatccgatctgaaatcgccgacgaggtgcgcccctctctcaaaaatacggcaaggttccggcattagcggtggtgatagtagggaacagaaaagattcacagagctatgttggaatgacgagaaaggcatgcgctgaattgggaatcaaatccttcgatgtggaccttcccgaa

SEQ ID NO: 64980 - DNA, 305 bp, Glycine max
  Clone ID: 700758762H1
caacgacgacagagactcctacagacttcaatctggtgatgccctgagagtcccctcaggaaccacatactatgtggtcaaccctgacaacaacgaaaatctcagattaataacactcgccatacccgttaacaagcctggtagatttgagagtttctacctatctagcactgaagctcaacaatcctacttgcaaggattcagcaggaacattttagaggcctcctaggataccaaattcgaggagataaacagggttctgtttagtagagaggaagggcagcagcaaggggagcagaggctac

SEQ ID NO: 64981 - DNA, 230 bp, Glycine max
  Clone ID: 700758763H1
tgtttcctttgttggtgttgctgggaactgttttcctggcatcagtttgtgtctcattaaaggtgagagaggatgagaataaccctttctacttgagaagctctaacagcttccaaactctctttgagatccaaaacggtcgcattcgtctcctccagagattcaacaaacgctcccaaaacttggaaatctttcgagattacgggattgtccagtttcagtcaaaaccc

SEQ ID NO: 64982 - DNA, 219 bp, Glycine max
  Clone ID: 700758764H1
gaagctaacgccaaaacgatgtcgtatgtgcctccgcacctcagaaacccgagttccaccaccgtcgccaccctcagaaccccctccgtaaccctagacaaccaccaccaccaccaccacaagctcgcattcgcctccaacaccaccaccaattgctctccatctctctcctccttccacaacaatgcctctcgccggagctccgccgcgcctccttcg

SEQ ID NO: 64983 - DNA, 299 bp, Glycine max
  Clone ID: 700758765H1
cttcctcaccgattgctagaatggaatttcgatgctcagtcatctcttttaccattctcttctctcttgctcttgcaggagagagccatgtccatgcatcgctacctgaggaagattattgggaagctgtttggccaaacactcccattcccactgcactgcgagagcttctaaagcctctccctgcaggtgttgaaatcgatgaactccctaagcaaattgatgatacacagtacccaaaaacattcttctataaagaagaccttcatccaggcaaaacaatgaaagtacaattcacc

SEQ ID NO: 64984 - DNA, 288 bp, Glycine max
  unsure (1)..(288): unsure at all n locations
  Clone ID: 700758766H1
catttatcaactcactcatcaatctcgtttgttctcactaactattacttcatcatgtcgtcgagcacagttggtcaagtcatcaaatgcaaagctgcggtttcatgggaggcagggacgccacttgtgattgaagaagtagaggtggcaccaccacaagctggtgaagtgcgtttgaagatcctctacacctctctttgccacactgatgtttacttctgggaagccaagggccanactccattgtttcctcgtatatttggtcatgaagctggagggattgtggag

SEQ ID NO: 64985 - DNA, 315 bp, Glycine max
  Clone ID: 700758767H1
gcgaagatctagttccttgcaaagagctgagcaaagggcacgtgaagaaagtgaaaggctcaggaaagaagagcgtgaacagattgctgaaaaacgaaggagagacttgactcttagggctcgtgtggctgctaagacagaagaaaagaaattggagctgctgtttcttcagtggactgagcatcataaaagactaagcaattttataaggactaaagcagaacctccaatctactatttgcctaacaagccctttcatgaagatcctacattacttgagaagagcaaagaagaggcttttctagaatggaagaa

SEQ ID NO: 64986 - DNA, 310 bp, Glycine max
  Clone ID: 700758768H1
tgcaattttcacaagaggaatttcttacagcatggtcaactcaggtgcgtcctgcaacaactctgttggctgatgggtgcccatatttgtatgcaatggtgcatgatagttcagtgtctacaataccaggtgattctgtcattggtgtcaagttgacaacccttcacaatatgtgtgcatatgggctcaatcctggtatttcaggttctcgtcttttgggcaccattcctcagtccatttcacagcaaactgtttggactcatctggcaacagtgagaacaccattgagttttgattctagctagcagag

SEQ ID NO: 64987 - DNA, 308 bp, Glycine max
  Clone ID: 700758769H1
cattggtccttaaacactcatcagtcatcaccatggccacgctagtatgttccctttgtcatctgctgcccagtggctgctgcttcgctttcagttccagagagcagcctcagtcaaacgagtgccagatccaagaactcaatgccctcctaccggatcaccgtatagagtcagaatgagggctcattgcgacatggaaccctaacaacaagccattccagtgtgccggtgttgccctctctcgatgcaccctcaaccgctacgaccctcgtagaacttcctacaccaacggtcgcccggaaatctac

SEQ ID NO: 64988 - DNA, 308 bp, Glycine max
  Clone ID: 700758770H1
cagaaaagtcatggtggacgcaagcaggggcaacaccagcaggaggaagaggaagaaggtggcagcgtgctcagtggcttcagcaaacacttcttggcacaatccttcaacaccaacgaggacatagctgagaaacttcagtctccagacgacgaaaggaagcagatcgtgacagtggaaggaggtctcagcgttatcagccccaagtggcaagaacaacaagatgaagatgaagatgaagacgaagatgatgaagatgaacaaattccctctcaccctcctcgccgaccaagccatggaaagcgtga

SEQ ID NO: 64989 - DNA, 295 bp, Glycine max
  Clone ID: 700758772H1
ctcaggtgcgtcctgcaacaactctgttggctgatgggtgcccatatttgtatgctatggtgcatgatagttcagtgtctacaataccaggtgattttgtcattggtgttaagttgacaaccataaacaatatgtgtgcatatgggctcaatcctggtatttcaggttctcgtcttttgggcaccattcctcagtccatttcacagcaaactgtttggaatcaaatggcaacagtgagaacaccattgaattttgattctagcaagcagagcttttgtcaattctctattgatct

SEQ ID NO: 64990 - DNA, 220 bp, Glycine max
  unsure (1)..(220): unsure at all n locations
  Clone ID: 700758773H1
ataaaattcttccaccaagttatgggtcctcctgtgntgcttctatactccctcttaggtctctcttctagttccagcatatcaagtcatcgttccatattggaccttgacctaaccaagtttaccacacagatacaggcgcctgcactgttccaactatggccgagtgagcatggacgtgtctaccataaccacgaagacgacgcacagagacctgaga

SEQ ID NO: 64991 - DNA, 267 bp, Glycine max
  Clone ID: 700758774H1
ttaactaacaaccttgatatccccaagttatccgcatgttgaaaaaaagtttatatattaatcatatatcttccgtatttcacaagaatacgacaagacttaatttaagaggaatgggggggcccagctttctagctgtgcataatatcaggattactgatgggagtgacaagactagtgcaactttgcaatttagaaagttagcagattgttgtgttctcaagagaaactttaagcagatgtctaatgtaatgtgggtagctcctg
